United States Patent Application Publication US 2008/0034453 A1 - sequence listing, part 21

SEQ ID NO: 176640 - DNA, 290 bp, Glycine max
ctctctcagtgctctcgatctccatctgcaacttccttgtctgacagatcctgtgttccggagaaaggaaaggaaaggaaagatgtcggggcaaacgcagcgtctgaacgtggtccccaccgtgacgatgctgggagtggtgaaggcccgattggtcggcgccacgcgcggccacgcgctcctgaagaagaagagcgacgcgctcacggtgcagtcccgccagatcctgaagaagatcgtctccacaaaagaatccatgggcgacatcatgaaaacgtcgtcgttcgcgc

SEQ ID NO: 176641 - DNA, 286 bp, Glycine max
  unsure (1)..(286): unsure at all n locations
gtgcattcttctctcgctctctgccttccatcacactcggcattttgtttcccaagatagtagaagatggcagacactgaggatattcaacctcttgtttgtgacaatggaacaggaatggttaacgctggattcgctggagctgatgctccatgttttgtgntntccagcattgttggttgntctcgttacactggtgtgatggttggcatgggccaaaaagatgcatatgttggtgatgaggcacaatctaagaggggtattttgactctcaagtaccccattg

SEQ ID NO: 176642 - DNA, 128 bp, Glycine max
tcttcttctcttgcggctagggttttagcgcagttcttctagatttaaggaagatgggtaaggaaaaggttcacatcagtattgtggttattggccatgttgactctgggaagtccactaccactggc

SEQ ID NO: 176643 - DNA, 285 bp, Glycine max
cctcgagccgaatcggctcgagggctaatctattaggcgctgttcacctcgtcttctacaaacttttctgttcgatctcaaacaaggttgttccttccaccgccatgagtttcatcttcggaaagcgaaaaacacccgcagagcttctgcgggaaaataagaggatgctggacaaatcaatcagagaaattgagcgcgagcggcaaggcttgcaaacgcaagagaagaaattgattgcggagataaagaaaagtgccaaacagggccagatgggagctgttagat

SEQ ID NO: 176644 - DNA, 279 bp, Glycine max
cagttgaagaggtgtgagcctcttaaggagtctgaagtgaaggtgctctgcctcaaagccatggaaatcctcgtcgaagagagcaacgttcaaagggtcgacgctcctgtcaccatatgtggtgatattcacggtcagttttatgacatgaaggagcttttcaaagtaggaggggattgccccaaaactaactatttattcctgggggattttgttgatagagggttttactcggttgaaccgtttctgcttctgctcgctcttaaggtgaggtatcca

SEQ ID NO: 176645 - DNA, 283 bp, Glycine max
caaaaaggattgctggattattatcaatggaaaggtgtatgatatcacgccatttctggatgagcatcctggaggagatgaagttttggtaacgtcaacagggaaggatgccaccattgattttgaagatgtgggccacagtgattctgccatagaaatgatggaaaaatacttcgtcgggaaggttgacacttccactcttccagcgaaagttaaccatagtctgccacaacctacacaagcaggtggcgctggcaatcaatcttctggatttgttgtaaag

SEQ ID NO: 176646 - DNA, 276 bp, Glycine max
cttttgaaggcaaattcgcggcctcgagtcttttctttttctgtatcgtttttactttccatcacttccattttccgtcatcatggaggatgctgctgcttctgctaatgctgcagaggatagagaaaacaagttcctaactatggcaattgaagaagcatataaggcggttgacagtggccatggtcgcccatttggtgcagttattgttcgaaacgatgaaatactttcaagctgtcataacatggttgtaagacatgctgatcccactgccca

SEQ ID NO: 176647 - DNA, 280 bp, Glycine max
gaaattgtccgtgacatgaaggaaaaacttgcatatgttgccctagattatgagcaagaactcgagactgcaaaaagcagttcatcagttgagaaaagctatgagcttcctgatggacaagttatcacaattggggcagagagattccgttgcccagaagttcttttccagccatctatgattggaatggaagctgctggaattcatgagaccacctacaattctatcatgaagtgtgatgtggatatcagaaaggatctatatggcaacattgttctta

SEQ ID NO: 176648 - DNA, 278 bp, Glycine max
cccaagtgaaagtcagacacaataaaaatcaaagagcataatgtcagggatcattcacaagattggggagacccttcatgtgggagggcacaagaaggaggaggagcataagggtgagcaccatgctggagaatacaaaggggagcaccatggtgaacacagtagtgagtacaaaggagagcatcatggtgaacacaaagctggagagtaccatggtgagcacaagccagagcacaaagaggggttcctagacaaagtcaaggacaagatccatggtg

SEQ ID NO: 176649 - DNA, 290 bp, Glycine max
gtttgttgtgagctataagctagtttatcgtgaggcgaatatgaccttgtttgtcttctttgttgctgcagtagttttggtagcatggccatgccatggcgcaggctaccaaaggttccctctccgaatgacaactggctatggtgagcgttcttcggaggtaaaatgcgcaagttttaggcttgctgtggaagcacacaacatccgagcccttaaaaccattcctgaagagtgcgttgacacaacaaaggactacattaatggcgaacaatttagatcagactctaaaa

SEQ ID NO: 176650 - DNA, 283 bp, Glycine max
caaagcaccaagcaaagctcatccttgagttaaaaaatggcagcagcttcttccatggctctctcatccccatccttggctggcaaggccgtgaagctgggcccatcagccccagaagtgggaagggtgagcatgaggaagaccgtcaccaagcaggtctcctcaggaagcccatggtacggcccagaccgagtcaagtacttgggccccttctctggcgagcccccgtcctacctaaccagcaagttcccaggcgactacggctgggacactgctgggcttt

SEQ ID NO: 176651 - DNA, 281 bp, Glycine max
tcgttcgtcttttacatcaggatggagtctcaggtgaagcacgcacttgttgtcaaagtaatgggtcgtactggatccagaggacaggtgacccaggttagagtgaagtttctggatgatcagaaccgtcacatcatgaggaatgttaaaggaccagtgagagaaggagacattctcaccctactcgagtctgaaagggaagctagaaggttgcgctaagagggtctttctttcttgatctttatggtagttagtcggtgctaaaggttatagcaccctat

SEQ ID NO: 176652 - DNA, 278 bp, Glycine max
cgcaacaaaaagaaagaatcccaggcgaggagaaagatggaggggaaggagcaggatgtgtcgttgggagcgaacaagttccccgagagacagccgattgggacggcggcgcagagccaagacgacggcaaggactaccaggagccggcgccggcgcgctggttgacccgacggagtttacgtcatggtcgttttacagagcagggatagcagagtttgtggccacttttctgtttctctacatcaccgtcttaaccgttatgggagtcgccggggct

SEQ ID NO: 176653 - DNA, 277 bp, Glycine max
gctataagctagtttatcgtgaggagaatatgaagttgtttgtcttctttgttgctgcagtagttttggtagcatggccatgccatggcgcaggctaccaaaggttccctctccgaatgaaaactggctatggtgagcgttcttcggaggtaaaatgcgcaagttttaggcttgctgtggaagcacacaacatccgagcccttaaaaccattcctgaagactgcgttgacccaacaaaggactacattaatggcgaacaatttagatcagactctaa

SEQ ID NO: 176654 - DNA, 274 bp, Glycine max
gcccaagccctatacaaccaaaccctaacacacacccatttgattcagtttccatggctagcctcaaggttgcatttttcgctgcagtgctctgcatggttgtggtgagtgcacccatggcacatgcagctatcacgtgcgggcaggtgacgaatagcctgatcaattgcatcggttacctccagaacggaggaacgccgccgtcgggatgctgcaacggagtgaagagcctcaatgccgccgccaagaccaccgccgaccgatagacggcgtg

SEQ ID NO: 176655 - DNA, 290 bp, Glycine max
ggattcagctctagcccacattagtaaagtggccttccttagcaagtcttccacattggcaacaagatgtgcaacatatacaaggacacaaatatgataatgctggtctctaaaatgttgtacacctgacacgacaccgccccgcatatgacctcttgtcaaagatgcttgaatatgatcctcgtaagcgtttaacagcagcacaagctttggagcatgagtatttcaaaattgaaccattacctggacggaatgcacttgtaccctgccaacttggagagaaaattgta

SEQ ID NO: 176656 - DNA, 190 bp, Glycine max
cacaccccaattctctgccctcaactgcatcgatctctccaaccccgacatcaaccaatccgtcaacttactcaaagaggcatgtttggattccggttttttctacgttgtcaatcatggaataagccaggaattcatggacgaggtttttgcgcagagcaagaagttcttctctcttccacacaacata

SEQ ID NO: 176657 - DNA, 281 bp, Glycine max
ggcacctttgcaccaggtagatgttctaaatacgttgccaattgtagtgctggcgattcatccactgaaccctatatccttggacactacttattacttgctcatgaatttgctgccacattatacaagacacaatatcaggctcgtcaaaaaggacaaattgggatcactaatccaacacactactttttgccaaaatctcaaagtgctgcagattacaaggcagcaagtagagctctggacttcttctttggttggtattctgatccggttttctatgg

SEQ ID NO: 176658 - DNA, 273 bp, Glycine max
caaatacttgaagccctctgttgcaggattccttatgcagaaggaacttgactatctagttggagctgtgtcaaaccccaagagaccatttgctgctatcgttggtgggtcaaaggtgtcttccaagattggcgttattgagtccttgttggagaaagttaacgttctcttgcttggtggaggaatgatctttaccttttacaaggctcagggttattcagttggttcatctcttgtggaggaagacaagcttagccttgcaactacacttct

SEQ ID NO: 176659 - DNA, 275 bp, Glycine max
cttcgccaacacgcgcatcgactggaaggagacggcggaggcgcacgtgttcaaggcagacctgccggggctgaagaaggaagaggtgaaggtggagatcgaggaggagggaagggtgctgcagataagcggacagagaacaaaggagaaggaggacaagaacgacacgtggcaccgcctcgaacgctccagcggcagctttctccgccgcttccgcctgccggagaacgcgaaactcgatcaggtgaaggccggcatggagaacggagtgctca

SEQ ID NO: 176660 - DNA, 275 bp, Glycine max
gtcaacgggcgagtaaacccgtaaggcgcaaggcagctgattggtgggatccccctgtgggttgcaccgccgaccgaccctgatcttctgtgaagggttcgagtgagagcatacctgtcgggacccgaaagatggtgaactatgcctgagcggggcgaagcagaggaaactctggtggaggcccgcagcgatactgacgtgcaaatcgttcgtctgacttgggtataggggcgaaagactaatcgaaccgtctagtagctggttccctccgaagt

SEQ ID NO: 176661 - DNA, 217 bp, Glycine max
cgtagttgagaactaagaaggagaagcaaatggcttcctcaatgatctcttccccagctgttaccactgtcaaccgtgccggtgccggcatggttgctccattcactggcctcaagtcgatggctggcttccccaccagaaagaccaacaatgacattacctccattgctagcaacggtggaagagtgcaatgcatgcaggtgtggccacagttggc

SEQ ID NO: 176662 - DNA, 255 bp, Glycine max
caaatacttgaagccctctgttgcaggattccttatgcagaaggaacttgactatctagttggagctgtgtcaaaccccaagagaccatttgctgctatcgttggtgggtcaaaggtgtcttccaagattggagttattgagtccttgttggagaaagttaacgttctcttgcttggtggaggaatgatctttaccttttacaaggctcagggttattcagttggttcatctcttgtggaggaagacaagcttag

SEQ ID NO: 176663 - DNA, 206 bp, Glycine max
gtttgttgtgagctataagatagttatcgtgaggagaatatgaagttgtttgttttctttgttgctgcagtagttttggtagcatggccatgccatggcgcaggctaccaaaggttccctctccgaatgaaaactggctatggtgagcgttcttcggaggtaaaatgcgcaagttttaggcttgctgtggaagcacacaacatccg

SEQ ID NO: 176664 - DNA, 219 bp, Glycine max
ctcttgggctcgtcgaatttcaaatccgatctccgacgattgatcccggtagaggctagtacactctccaatctgcaacaatgcctctcagactcgaaatcaagcgcacgttgcgcaaagatcagagagagtgagatgtgtggatctacatccaacagagccatggattctggctagtttatactctggaactgcctgtatcgggaactaccagtctca

SEQ ID NO: 176665 - DNA, 270 bp, Glycine max
cttcacccaagtctcaaacaaccttttaaacctcatcaaacatgtctctgattccatcattgctaagcaacagaaacatcatggaccccttctccaccaacatctgggcaccctctgactccgacagcgaggtttccgccttcgtgaacgcacgtgtggactggaaggaaaccccggagtcgcacgtgttcaaggcggacttgccggggctgaagaaggaggaggtgaaggtggaggtggaggaagggcgcgtgttgaacatcagcggag

SEQ ID NO: 176666 - DNA, 260 bp, Glycine max
caaaaatcaagccaatgtttgtgggttttggtttcatttcattaagatgatctgtttatctcttttcttctttttaaaatttaaagtctttgtattttgtatgtaaagatgtaaaattatgattattaggtggtgcatgtgtcgcgtcatgggccaatgttatcctctgcttttaagttggaagaggcccaactcatgtgtgatgtacggctgtgattgtgtaatttaatttgcaaaatcaaaaataacaccagagtcat

SEQ ID NO: 176667 - DNA, 272 bp, Glycine max
cttcttcccttgcggctagggttttagcgcacttcttctagattcaaggaagatgggtaaggaaaaggttcacatcagtattgtggttattggccatgttgactctgggaagtccactaccactggccacctgatctacaagcttggcggcattgacaagcgtgttattgagagatttgagaaggaagctgctgagatgaacaagaggtctttcaagtatgcctgggtgcttgataagcttaaggctgagcgtgaaagaggaatcacaattg

SEQ ID NO: 176668 - DNA, 273 bp, Glycine max
gttcgattttgtagtaagtgaggtgccaatatggtgaagatagctcttggtactttggatgactcttttagcgctgcctctcttaaggcttatttcgcagagttccacgcaactctgattttcgtgttcgctggtgttggatcagccatcgcttacaacgagcttacaaaagatgcagccttggatccaacggggctggtggcagtagctgtggcacatgcatttgcactgtttgtaggtgtctccgtcgccgccaacatctcaggtggccat

SEQ ID NO: 176669 - DNA, 281 bp, Glycine max
caacactgcaataggaagagttttcaaatggcagagggaaaaggtagagtttgtgtcactggaggcactgggttccttggttcatggatcatcaagagactccttgaagatggatatgctgttaacaccactattagatctgacccaggacgaaagagagatgttagcttcctcacaaacctaccagccgcatccgaaaagctaaaaattttcaacgctgatctcagcgaccctgaaagttttgatccagcagttgagggatgtgttggaattttccacac

SEQ ID NO: 176670 - DNA, 272 bp, Glycine max
tctatctattataaccaaacactcttcttcatattcttcttcttcttcttgttcttgttctatctgtgacgagcatcatggcctcgagagcagtgctattgttggctatgtgtgtgcttccggccatggttgtggccattcgcccagcaaagaaccctttttgcgtgaagggtcgcgtctactgtgacccttgccgtgctggttttgagacctcagcaaccacctacattgccggtgctgagattatgttgcaatgcaagagcagggtcagc

SEQ ID NO: 176671 - DNA, 272 bp, Glycine max
ctcactcactcactcactcactcactcgcaagcaaaaagaaagaatcccaggcgaggagaaagatggaggggaaggagcaggatgtgtcgttgggagcgaacaagttccccgagagacagccgattgggacggcggcgcagagccaagacgacggcaaggactaccaggagccggcgccggcgccgctggttgacccgacggagtttacgtcatggtcgttttacagagcagggatagcagagtttgtggccacttttctgtttctctacat

SEQ ID NO: 176672 - DNA, 271 bp, Glycine max
cgcttcttcacttttctttttcctctgtctcctcctcaatcttcattgtcctgttctttcccttggtgacaaaccaagactaacacacacagaacatagcttgtgttggtgaggtgagaagataaagaaagaatggcatttgcaggaacaacacagaagtgtatggcctgtgacaaaaccgtttatctggttgataagttgaccgcggataaccgagttttccacaaagcttgcttcagatgccatcactgcaaaggaaccctcaagctga

SEQ ID NO: 176673 - DNA, 267 bp, Glycine max
cgagtttgttgtgagctataagctagtttatcgtgaggagaatatgaagttgtttgtcttctctgttgctgcagtagttttggtagcatggccatgccatggcgcaggctaccaaaggttccctctccgaatgacaactggctatggtgagcgttcttcggaggtaaaatgcgcaagttttaggcttgctgtggaagcacacaacatccgagcctttaaaaccattcctgaagagtgcgttgaaccaacaaaggactacattaatgg

SEQ ID NO: 176674 - DNA, 267 bp, Glycine max
ctaacattggggactttattccttggattgatttcttggacttgcagggttacataaagaggatgaagactttgagcaagaagtttgatatgttcatggagcacgtcctggatgaacatattgagaggaagaaagggattaaggattacgtggcaaaggacatggttgatgttcttttgcaacttgccgaggatcctactcttgaggtcaagctcgagaggcatggagttaaggcttttacacaggacctaatagcaggtgggactg

SEQ ID NO: 176675 - DNA, 266 bp, Glycine max
gaggaaactgcaaagaattggcagcacagcccgatgttgatggatttttggttggtggtgcatccctcaaggcggaatttgtggacatcataaacgctgctactgtgaagaagaattgaaattcgtagttaggaactgataatgctgcctttcaagctgcttcggaaattgctgtttttgagttttggttctgtgctttgtggccaatgtattgaactctgtttagtacctgaataaacatgctttcctttgatctcatccatagg

SEQ ID NO: 176676 - DNA, 272 bp, Glycine max
caaggattctacccgccgctcgatgggaattgcgcttcaaggcgtctcgtagggctaatccgcctcacgagggtcaccaacggcacgtgtctttggcgggccgaggcaccctactgctgctcggcaaacggacggcgggcgcacgcgtcgcttctagcccggattctgacttagaggcgttcagtcctaatccaacgcacggtagcttcgcgccactggcttttcaaccaagcgcgatgaccaattgtgcgaatcaccggttcctctcgtat

SEQ ID NO: 176677 - DNA, 286 bp, Glycine max
cggaattcggaaaacccagtgctgatcgctctctgggtgttcccaaaatgaagcttcggagatcttcgctgtgcgtctttctagggtttctggcgctgttcctttcgccgccgccgtcaatggcgaaattcgtggtggagaagaacagcttgacggtgacgtcgccggacaacatcaagggcacgcacgatagcgcgattgggcaattcgggataccccaatacggaggcagcatggctgggaacgtgttgtacccaaaggacaacaaaaagggttcaaggagttc

SEQ ID NO: 176678 - DNA, 284 bp, Glycine max
acaaaacagagcaaagagagagtgtgtgaaaagtgaacaaaaaacagaacaacaatggcgacacttaaggttcctcagcctcttccccccgttgcagatgattgtgagcagctcagaaaagccttctcaggttggggaactaacgaggagctgattgtatcgatcttggctcataggaatgctgctcagaggaagcttatcagagaaacttatgcccagacctatggagaagatctcctcaaggccttggacaaagaactcacgagtgattttggaggctggtt

SEQ ID NO: 176679 - DNA, 283 bp, Glycine max
  unsure (1)..(283): unsure at all n locations
ctctctctccctctaagaatatcnctctctctctcatacttattctccctcgcgcgaaagataaacacatttttagttgcaactaatgggaactgttgaagctgcaaacaaggatgcaaatggaagcctcctagagaaaaatcctacagttgtttttgtgttaggtggcccaggcagtggaaagggtacccagtgtgcaaatattgtcgaaaattttgggtatactcacctcagtgctggtgatcttctgcgagcagaaatcaaatctggttctaaaatggca

SEQ ID NO: 176680 - DNA, 291 bp, Glycine max
tccgctcgagcagagatgacgacccgcttcaagaagaaccgcaagaagcgcggccacgtgagcgccggtcatggccgtatcggaaagcaccgtaagcaccccggcggccggggaaacgccggtggcatgcatcaccacaggatcctgttcgacaagtaccatccgggcttcttcggtaaggtgggaatgaggtacttccataagcttcgcaataaattctactcccccatcgtcaacgtcgaaaagctatggtctctcataccccaagacgcgaaggaaaaagcctaaaat

SEQ ID NO: 176681 - DNA, 281 bp, Glycine max
gttcgttagatctaacaaccacttatcccctttctcttctaacgagtgaggaaaaatggcgcgtaagaagatcagagagtatgactcaaagaggttgttgaaggagcactttaagagactctctggcaaggagttgccgatcaagtctgcacaaattaccgcatcaactgatttcactgagctacaagagaaggaaccctggctttcatcttctaaattggttgttaaacctgacatgttatttggaaagcgtggcaaaagtggtttggttccttgaattt

SEQ ID NO: 176682 - DNA, 283 bp, Glycine max
gaaggcaatggctgcgactcctgcggacgtgaaggagtaccctaactactacgtgttcgtgatcgacatgccaggcctgaaatccggggacattaaggtgcaggtggaggatgctaacgtgcttctgataagcggcgagaggaagagggaggaggataaagagaaagaaggggctaagtatttgaggatggagagaagggttggcaagttcatgaggaagttcacgcttcccgagaatgccaacaccgatgctatctctgccgtctgccaagaggtgtgctca

SEQ ID NO: 176683 - DNA, 238 bp, Glycine max
ttggaacacgcacaattccacagtgcggtgcggtctaaggatatggtgcttagaagaagggatttggtgggtctccaatgttttgtaccagtttgacccatcgacttttgttttgttgggtatgacctatattagttaggagtttttcagtttttagtattacttaaattttctcctcaacagagactttgtgtaaagtgcaattttctagttaaatttcacttaattgggtttggga

SEQ ID NO: 176684 - DNA, 281 bp, Glycine max
agagtttgttgtgagctataagctagtttatcgtgaggagaatatgaagttgtttgttctctttgttgctgcagtagttttggtagcatggccatgccatggcgcaggctaccaaaggttccctctccgaatgaaaactggctatggtgagcgttcttcggaggtaaaatgcgcaagttttaggcttgctgtggaagcacacaacatccgagcctttaaaaccattcctgaagagtgcgttgaaccaacaaaggactacattaatggcgaaaatttagatc

SEQ ID NO: 176685 - DNA, 281 bp, Glycine max
tttgactcttcttcgtctcaaatctcttcgttcttcgattcgttccatttcttccaaaatggccaaagacccagttcgcgttctcgtcactggagctgcagggcaaattgggtatgctcttgtccctatgattgctaggggagtgatgttgggtcctgaccagcccgtgatcctccacatgcttgacattcctccggcagcagagtcattgaatggggttaaaatggaattggtggatgctgcatcccctcttcttaaaggtgttgttgcccaactgatgt

SEQ ID NO: 176686 - DNA, 282 bp, Glycine max
cttcgctacgtcgtcgttagggtcttcttcggatcggtggaacttgaccctgccggcgtgaattccgacgctactcgtggcgccgaattgctatagcggtgacgaatatgaaggttttcgttaagactctcaaaggcactcacttcgaaatcgaagtgacgccgcaagacacggtttctgaagtgaaaaaaaatatagaaactgttcagggtgcagatgtctatcctgctgcacagcaaatgctaattcatcaagggaaagttcctcgcgatctactacctt

SEQ ID NO: 176687 - DNA, 280 bp, Glycine max
aatgaaagcaataagtccctccttcctctgccttataattcttgtgacccttttcgctggtagcattgaaagtgcaccagcaaacgtgaagccaagccattatgctgcacccttcaataggagtgtttttccttctggttttctatttggaataggctctgcagcttaccagatagaaggagcagcagctatagatggcagaggaccaagtatatgggacacctatactaaacagcaaccagggaagatttgggatcatagtgatggaagctagcaattg

SEQ ID NO: 176688 - DNA, 281 bp, Glycine max
tgttggggaagaggaggctttgttctgcactttgtgcaatgttgaggtgctagtgtttagtaagcatagtcgaagttgtgacaaatgatgttgatgtgatttgatcaccattgtcggtggttgaacaattgtgttggaaagaagaattacatcacgtttgtgtgtcttatggcagtgagcctagtttggcttatagttgaatgtggagttgggattgcagtacttgtcagatgtctcgttgataagaaaggtacagagattcagatagctgaaaactttga

SEQ ID NO: 176689 - DNA, 277 bp, Glycine max
taattgcaagaatggcacttcgttgcttggtgatgtccctttctgttctcttcactcttggtcttgcgagagaaagccatgccagagacgaagatttttggcatgctgtttggccaaacactcccattccaagttcattgcgagatcttctaaagcctggccctgcaagtgttgaaatcgatgatcaccctatgcaaattgaagaaacacagtacccgaaaaccttcttctataaagcagactttcatccaggcaaaacaatgaaagtcaattcagc

SEQ ID NO: 176690 - DNA, 279 bp, Glycine max
catcacctctcaattaccttttcttccctaaatcttgctgcacgtcagttaatgaagtaatctgccatggaattcctgatgcaaggcagcttgaggatggtgacattgtaaatgttgatgtcactgtgtactataaaggtgttcatggtgatctcaatgaaacatactttgtgggaaatgttgatgaagagtctcgccaactagtaaaatgcacatatgagtgcctggagaaggcaatatccattgttaaacctggggtacgattccgtaaattggtga

SEQ ID NO: 176691 - DNA, 278 bp, Glycine max
tgcacacagagatcgtgatcgaaaatggcgacgtgaaggttcctgcacaacttccttctccattggaagacagtgagcaattgcgaaaagcttttcaagggtggggaacgaatgaaggattgataatatcaatcctgggtcacagaaacgcgcgtcagcgtaagttgattcgtgaagcttatagtacaacccatggagaagatcttcttaaagatttagacaaagaactttcaagtgactttgagcgggctgtgatggtttggacattggaccttctg

SEQ ID NO: 176692 - DNA, 276 bp, Glycine max
gtcgttctgaacggaaaagcactggcgcataccctgaggcttctcttctcttctcttctctgtcgtgagtcaccatggtgagggttagtgtgctgaacgatgctctgaagagcatgtacaatgctgagaaaaggggaaagcgccaagtcatgattaggccatcctccaaagtcattatcaaattccttttggtgatgcaaaagcacggatacatcggagagtttgagtatgttgatgaccacagggctggtaaaatcgtggttgaatgaacggtag

SEQ ID NO: 176693 - DNA, 275 bp, Glycine max
gtgctaaatccctagtaagccgccatggtctagtactcaagggagcctgacaatccaagcaagtcttgcaacgctagacgcgccgaccttagggttcattttaagaacactagggacactgcctttgcaatcaggaagttgcccttggttaaagctataaggtacttggaagatgtccttgcgcacaagcaggccattccgttcagacgtttctgtcgtggtgttggaacgacagctcaagcagagaatagacactctaatggccaacaacgtgg

SEQ ID NO: 176694 - DNA, 274 bp, Glycine max
ctcgcaagcaaaaagaaagaatcccaggcgaggagaaagatggaggggaaggagcaggatgtgtcgttgggagcgaacaagttccccgagagacagccgattgggacggcggcgcagagccaagacgacggcaaggactaccaggagccggcgccggcgccgctggttgacccgacggagtttacgtcatggtcgttttacagagcagggatagcagagtttgtggccacttttctgtttctctacatcaccgtcttaaccggtcatggagtcg

SEQ ID NO: 176695 - DNA, 272 bp, Glycine max
  unsure (1)..(272): unsure at all n locations
gttctttcctcacttcaaacttgacaaaaatggcaacagaattggcatcatctcccaattgggttccaagcgcaccacatgtttggcagcctttgccgccctccttctcctcttcctccgcggtctccgccgccgccgatacaacctccccccaggcccaaagccctggcccatcataggcaacctaaacttaattgggtcccttccacatcggtcgatccacacgcttagcnaaacctacgggcccatcatgcacgtatggttcggtcgag

SEQ ID NO: 176696 - DNA, 274 bp, Glycine max
ctcgagccgctcttcttcatattcttcttctcttcttgttcttgttctatctgtgacgagcatcatggcctcgagagcagtgctattgttggctatgtgtgtgcttccggccatggttgtggccattcgcccagcaaagaaccctttttgcgtgaagggtcgcgtctactgtgacccttgccgtgctgggtttgagacctcagcaaccacctacattgccggtgctgagattatgttgcaatgcaagagcagggttagcaacgaggtgtgtaca

SEQ ID NO: 176697 - DNA, 276 bp, Glycine max
cgaatttcattgcagagtgttattttgagtatcagcatcaatggctccaattgcagtgggaaacgtgattccagacggcattttggcttacttggatgaagaaaacaaaccccaaactgtctccattcactctctcgccaccggcaagaaagtcatcatctttggggttcccggtgccttcactcctacttgcagcttgaagcacgttcctggcttcattgagagagcagaagagctgaaagggaagggtgtggacgaaataatctgtacagtgtg

SEQ ID NO: 176698 - DNA, 274 bp, Glycine max
ctcattaattgcaagaatggcacttcgttgcttggtgatgtccctatctgttctcttcactcttggtcttgcgagagaaagccatgccagagacgaagatttttggcatgctgtttggccaaacactcccattccaagttcattgcgagatcttctaaagcctggccctgcaagtgttgaaatcgatgatcaccctatgcaaattgaagaaacacagtacccgaaaaccttcttctataaagaagaccttcatccaggcaaaacatgaaagtac

SEQ ID NO: 176699 - DNA, 208 bp, Glycine max
attgagtagtaccttcacctctctcaacaatctagctagagtttgctcctatctatatgtaataaggtatgctgatatgcactattcaaataggagcattagctatgtttgttaatgtcactttatgttatgtgggtaagtcacctaagacactccacgtacctacttgttgtctcttacgcggctttaataaatcttctgcccttgt

SEQ ID NO: 176700 - DNA, 273 bp, Glycine max
  unsure (1)..(273): unsure at all n locations
cagcgttctgagtcttttcttcttcgttaccctcttcacatgccttctctctgctaattcccacgatgaccatattttcctaccgagtcaactccatgacgatgactcagtgagttgcactgctaccgacccaaaccttaactacaagccggtgatcggaatcctgacncaccccggcgacggtgcctctggccggctcagcaacgccaccggggtttcttacatcgccgcctcctacgttaaattcgtggagtccggtggtgctaggttatt

SEQ ID NO: 176701 - DNA, 273 bp, Glycine max
gagaatccgaggcgaagagaagcgcatattaacatggcatggctcgttccgtcgacgatctcagattccggccactcctctcgccggcgagcccttactcttccctcctccgtcgagccctctccgattcgaatcgttcccagcctcgcaccaccatgaatcccgcatacgattatttgttcaagcttttgctgattcgagattctggtgtaggcaagtcatgtcttctcctgaggtttgctgatgattcataccttgacagctattcagtac

SEQ ID NO: 176702 - DNA, 275 bp, Glycine max
acgcaagtcaggaacaagcaagtgcttctaaaggactatgttaccggttttcccaaagaatccgacatgaatattgtcgaaagtaccataacattgaagcttccacaaggttccaatgacgtcttgctcaaaaatttgtacttgtcttgtgatccgtatatgaggaatctcatgaacaagcccgaaggccctcccaatagtcgtgcttacactcctggctctccattaataggatatggtgtgtctaaagtcctggaatctgggcatcagattat

SEQ ID NO: 176703 - DNA, 251 bp, Glycine max
ccttgattcatgtgttcagttttggagaagagaaagggattcggtgttgatgagcaatattgatctgttgctgcagtaggggaccgagtaagaatgccaaaccagctatggtttgcactgccaatgatttacaaggatggaaagatttcccaaagggacttagagttcttctgcttgaaggagatagtagttctgctgctgagataagagaacaacttgaggccatggactataaggtttccacacaacat

SEQ ID NO: 176704 - DNA, 264 bp, Glycine max
caatcttctgagagtgtttggttgaaagtagcaaagatgtttcctttcgggcaaaagggtcaaaagataaatgggactatggtggttatgcagaagaatgtgttggatatcaacagcatcaccagtgttggagggatcgttgaccaaggcttaggcttcataggcagtgcagtcgatgcacttacttttgcagccaccaaaatctccatccagttgattagtgctaccaaggctgatggtgggaaaggaaaaattggaaagagt

SEQ ID NO: 176705 - DNA, 256 bp, Glycine max
gagaatcaaaccatggcagtgcagtatacggtccccactgtgcttccaccaagcgggtgctggtttgtctggttgagaaggaagtcgaatttgaggttgtccctgttgatgtcactaagggggagcagaaggatcctgagtacctcaaactacagtcatttggagttgtacctgtcatcaaagatggagattataccttatatgaatctcgtgctataatgaggtatgatgcagacaaatacagatctcaaggggt

SEQ ID NO: 176706 - DNA, 270 bp, Glycine max
gattccttcgtgcgtgcgattctcctgatatccaaggtgaagcaccgacaccggacctatctccggcgaatccccagtccccactttcttccttcgaaatgaatcccgagtatgattatctgttcaagctccttcttattggagactctggtgttggtaaatcatgccttcttctgagattttctgatgattcgtacatcgaaagctacataagcaccattggagttgattttaaaatacgtaccgttgagcaagatggaagaccattaa

SEQ ID NO: 176707 - DNA, 273 bp, Glycine max
tttgtttgttccatctcttgcttcttgcttctattacttgcttctttcttcaccatgtcacttgctgggaaaatcaccactgaaattggggttcatgcaaccgctgcaaagtggttcaacctctttgcaacacaacttcatcatgttcaaaaccttactgatagagtacatggaaccaagctgcatcaaggtgaagactggcatcacaacgagacagtcaaacactggacttataccatagatggtaaggctacaacatgtctgggagtattg

SEQ ID NO: 176708 - DNA, 271 bp, Glycine max
gactcttctttttctctaagtctaaggggtgccctgagatcactttgagcaatggtgaaggctgtggcagttcttggcagcagcgagggtgtcactggaactattttcttcactcaggagggaaatggtccaaccaccgtaactggatctcttgctggtcttaagcctggtctccatggcttccatgtccatgccttgggggacactaccaatggttgcctgtcaactggagcgcatttcaatcctaataacaacgagcacgtgcccctga

SEQ ID NO: 176709 - DNA, 269 bp, Glycine max
tttttggctgtgttatgcttctcagcactgtcactgagtcgttgtcttgcggaggataatggacttgttatgaacttctacaaggaatcatgccctcaggctgaagacatcatcaaagaacaagtcaagcttctctacaagcgccacaagaacactgctttctcctggctcagaaacatcttccatgactgtgctgttcagagttgtgatgcttcactgttgctggactccacaagaaggagcttgtctgagcaggaaacagtagaagc

SEQ ID NO: 176710 - DNA, 264 bp, Glycine max
ctttctcttcttccttcgctcgttgttctccctcgcgtagatcgacaatggcggagacagagacgtttgctttccaggctgagatcaaccagctcctcagtctcatcatcaacaccttctactccaacaaggagactttccttcgtgaactcatcagcaacgcctccgatgctttggacaagattcgatttgagagtttgacagataagagcaagctcgatgctcagccagagttgttcattcatattattccagacaagataa

SEQ ID NO: 176711 - DNA, 269 bp, Glycine max
tgcaaccttagctgctgttcaccagctgcgctcaatggccttgctggaagttccctctctggaactaagctctctttcaagccctctcgccacactgtcaaatccaagaacttcaggagtggtgccgtggtagcaaagtatggtgacaagagtgtgtactttgatttggaggatctgggcaacactacggggcagtgggacttgtatggctcagatgcaccttcaccctacaaccctcttcagagcaagttcttcgagacattgctgct

SEQ ID NO: 176712 - DNA, 291 bp, Glycine max
tccgttcgatcagaattcgagctcgagcgtttctatcatacccactatgccttctccgtttctcactagactcacatcgcgcctccatttcgctgcattccctctgcgttctccaacgaggaaactcatgtcgcacactcttgcacgtgcgcatcttggtctcacacacccttctaatatcgaaacccccaagatctcttttggtgctaaggatgttgatgtgacggaatggaaaggggacattctggcagtgggtgttacggaaaaagatttggctagagatgcaactcg

SEQ ID NO: 176713 - DNA, 268 bp, Glycine max
  unsure (1)..(268): unsure at all n locations
gatcgagataactagaaacagtgtgatgaaaatgaaggtccttgttttcttcgttgctacaattttcgtagcatggcaatgccatgcgtacgatatgttccctctccgaatgaacactggctatggtgcccgtactccggaggtgaaatgcgcaagttggaggcttgctgtggaagcacacaacatcttcgngtttgagaccattcctgaagagtgcgttgaagcaacaaaggaatacatccatggcgaacaatatagtcagactcca

SEQ ID NO: 176714 - DNA, 269 bp, Glycine max
gtagcggatcagcaatatcagtggccgcaaatttggtggcagtgtcacttggtagtgagactgatgggtccattttatgcccttcaggttctaattcagtagtgggcattaaaccaacagttggcctcactagtagagcaggggtagttcccatcaccccattacaggacacagttggaccaatttgcaggactgtatcagatgctgctcttgttcttgaaaccattgcaggcatcgacgtcaatgataacgcaacaatcaagcatcaa

SEQ ID NO: 176715 - DNA, 269 bp, Glycine max
gtgagtctcagccggggcatgtctgaagtcttcttctctgcttgtatgcaacggccacagccatagtcgcctgaaaccgattgttgttgcagggaaaacacagagatccgggtcgacccgttgcagatccgatccaaataagaaaagatgaatattttcaggttagccggggacatgacccatttggccagcgtcctcgtccttcttctcaagatccacaccatcaaatcctgcgccggtgtctcattgaagactcaagaatctatgca

SEQ ID NO: 176716 - DNA, 268 bp, Glycine max
cttcctcacgcatttcctcgttttttcttcccttttctctttctccggcgacgatctcagattccggccactcctctcgccggcgagcccttactcttccctcctccgtcgagccctctccgattcgaatcgttcccagcctcgcaccaccatgaatcccgaatacgattatttgttcaagcttttgctgattcgagattctggtgtaggcaagtcatgtcttctcctgaggtttgctgatgattcataccttgacagctatacagta

SEQ ID NO: 176717 - DNA, 272 bp, Glycine max
gccaagtgaaagtgagaaaaaataaaaatcaaagagcataatgtcagggatcattcacaagattggggagacccttcatgtgggagggcacaagaaggaggaggagcataagggtgagcaccatgctggagaatacaaaggggagcaccatggtgaacacagtagtgagtacaaaggagagcatcatggtgaacacaaagctcgagagtaccatggtgagcacaagccagagcacaaagaggggttcctagacaaagtcaaggacaagatcc

SEQ ID NO: 176718 - DNA, 269 bp, Glycine max
ctcggtgtagcaatggcgatgatgcaaggtgtgcagaagaacacactgtacgtgggagggttagcggaggaagtgaacgagtcgatcctccacgcggcgttcattcccttcggcgacatcaaggacgtgaagacgccgctggaccaggccacgcagaagcaccgctccttcggcttcgtcaccttcctcgaacgcgaagacgcctccgccgccatggacaacatggacggcgccgagctctacggtcgcgtcctcaccgttaattacgc

SEQ ID NO: 176719 - DNA, 267 bp, Glycine max
cacatcttcttcccaaccactactactccctcactgcagatctcaattgcatcgctgtccatggctaccatcgttagcatcaaggcccgccagatcttcgacagtcgtggcaatccaactgtcgaggtggatttgacttgctccgatggtacttttgccagagctgctgttccaagtggtgcatccactgggatttatgaggcccttgaattgagagatggaggatctgactaccttggaaagggtgtatcaaaggctgttgacaat

SEQ ID NO: 176720 - DNA, 266 bp, Glycine max
gatggaattcaagtagagttgcaagcaactgatcctactgagatgggtcttgatgtgttcaaaagccgtgccaactaaaatgattatataaaatagtaggctttctggtgggagcagcacccctgaagccttagttactcatatggaaaatatcctagtttgtgggatggtcaacttgggtagttatggtcccaaactctcaattttccaagttgtggcataaaattctattgcaccttttgacaagctttgcttgttccagtgtg

SEQ ID NO: 176721 - DNA, 266 bp, Glycine max
cacaccttcaggagcagtcatggttctcaaaaccgagctgtgccgattcagcggtgccaagatctacccagggaaaggcatcagatttgttcgtggtgattctcaggttttcctgtttgctaactcaaaatgtaagaggtatttccacaacaggttgaagccgtcaaagctcacgtggactgcaatgtaccgaaagcagcataagaaggatattgctcaagaagctgtgaagaagagaagacgtgctaccaaaaaaccttactcta

SEQ ID NO: 176722 - DNA, 265 bp, Glycine max
cagagagtgagacaagaaggaagaagaagaagaagagatggcaaatgaactacccctcaaagcttttggttgggctgcttcagacacttctggcacccttgccccttaccatttctccagaagggaaaatggcgtcgatgacgtcactctcaagattctcttctgcggggtttgccactctgatctccacactctcaaaaacgtctggggtttcaccacctaccctgtcgttcctgggcatgaaattgttggtgttgtgacagaa

SEQ ID NO: 176723 - DNA, 266 bp, Glycine max
gttctttgtctcgcaatcttcactattttcaccgagcatttgcattccacattcgaacatggtacacgctacacaatctaatgctgagttattggagtggcctaagaaagataagcgccgcttcctgcatgttgtgtatcgtgttggtgatcttgatcgcaccattaagttttatactgaatgttttgggatgaagcttttgaggaaaagagatattccagaagagaaatatgccaatgcttttcttggatttggccctgaacaat

SEQ ID NO: 176724 - DNA, 160 bp, Glycine max
  unsure (1)..(160): unsure at all n locations
cgagaatatgaagttgtttgtcttctgtgtttctgnagtagttctggtagcatggccatgccatggcgcaggctagcacaggttccctctccgaatgaaaactggctatggtgagcgttcttcggaggtaaaatgcgcaagtcttaggcttgctgtggaa

SEQ ID NO: 176725 - DNA, 269 bp, Glycine max
caatggcaacccaagcctctctcttaaccccacccctctccggtctcaaagccagcgaccgcgcctccgtgccatggaagcaaaactccagcctctccttctccagcccgaagcccctcaagttctccagaacaatcagagcagcagccgccgacgagaccacagaggcaccagcaaaagtagaggctgcaccggtcgggttcaccccaccagaacttgacccaaacaccccttccccgatcttcgggggcagcaccggcgggctcctg

SEQ ID NO: 176726 - DNA, 267 bp, Glycine max
cgttgatccatctcttgtttcttgctttctttcttcaccatgtcacttgctgggaaaatcaccactgaaatcggggttcatgcaaccgctacaaagtggttcaacctcttcgcaacacaactccatcatgttcaaaacctaactgatagagtgcatggaaccaagctgcatcaaggtgaagactggcatcacaacgagacagtcaagcactggacttataccatagatggtaaggttacaacatgtctggagagtattgaatccatt

SEQ ID NO: 176727 - DNA, 269 bp, Glycine max
gttcccggcgactccggccaccgttggatttcaattggttcttgtttttgaacggtggagtaaagaggcatggctgacaaagaggcagagtcggcaatgccaagggacgcgaagattgtgaagtctttgctgaaatcaatgggcgtagaagactacgaacctcgcgtcattcacaagtttctagagctatggtatcgctacgttgtcgatgtgttaaccgatgcacaagtctattcagagcatgctggaaaatctgcaattgactgtga

SEQ ID NO: 176728 - DNA, 262 bp, Glycine max
cgaggaggcacaccttcaggagcagtcatggttctcaaaaccgagctgtgccgattcagcggtgccaagatctacccagggaaaggcatcagatttgttcgtggtgattctcaggttttcctgtttgctaactcaaaatgtaagaggtatttccacaacaggttgaagccgtcaaagctcacgtggactgcaatgtaccgaaagcagcataagaaggatattgctcaagaagctgtgaagaagagaagacgtgctaccaaaa

SEQ ID NO: 176729 - DNA, 250 bp, Glycine max
ctcgggaaaatcacagcgacgctcaggaaaaactctaaactgtgaaaaaaaccactgcgatcaatggcaacgatcaaggccgtgaaagctcgccagatcttcgacagccgtggaaatccaaccgtcgaagttgacgttattctcagcgatggaagcttccacagagcagaaaatacaaaaaaagcatcaacaggtgtttatgaggctttggaattaagggatggaggctcagactacctcgggaaaggtg

SEQ ID NO: 176730 - DNA, 264 bp, Glycine max
agcgtggttatgttgcctcaaactcaaaggatgacccccaaaggaggctgctaacttcacagcccaacgtcatcatcatgaaccaccctggtcagattggaaatggctatgcccctgtcctcgactgccacacttctcacattgctgtcaagtttgctgaactcatgaccaagattgacaggcgatccggcaaagagcttgagaaggagcccaagtttttgaagaacggtgatgctggttttgttaagatgattccaaccaaac

SEQ ID NO: 176731 - DNA, 266 bp, Glycine max
gttcccggcgactccggccaccgttggatttcaattggttcttgtttttgaacggtggagtaaagaggcatggctgacaaagaggaagagtcggcaatgccaagggacgcgaagattgtgaagtctttgctgaaatcaatgggcgtagaagactacgaacctcgcgtcattcacaagtttctagagctatggtatcgctacgttgtcgatgtgttaaccgatgcacaagtctattcagagcatgctggaaaatctgcaattgactg

SEQ ID NO: 176732 - DNA, 266 bp, Glycine max
ctcaattctttctctgtcgtcgctctttcttcaacttcaagcttaattcctcatgtctttcagaggcctcagccggccaaatgccacatcaggcatgggtgttgctgatcacagcaaaaacaccttcatggaattgaagcagaagaaggttcatcgttatgtgatctttaaggtcgatgagaagaaaagggaggttgtggttgagaagactggtggcccggctgagagctatgacgattttgctgcatctttgccggagaatgatt

SEQ ID NO: 176733 - DNA, 268 bp, Glycine max
ctatagcccaagccctatacaaccaaaccctaacacacacccatttgattcagtttccatggctagcctcaaggttgcatttttcgctgcagtgctctgcatggttgtggtgagtgcacccatggcacatgcagctatcacgtgcgggcaggtgacgaatagcctgatcaattgcatcggttacctccagaactgaggaacgccgccgtcgggatgctgcaacggagtgaagagcctcaatgccgccgccaagaccaccgccgaccgc

SEQ ID NO: 176734 - DNA, 267 bp, Glycine max
ctataagctagtttatcgtgaggagaatatgaagttgtttgtcttctttgttgctgcagtagttttggtagcatggccatgccatggcgcaggctaccaaaggttccctctccgaatgaaaactggctatggtgagcgttcttcggaggtaaaatgcgcaagttttaggcttgctgtggaagcacacaacatccgagcctttaaaaccattcctgaagagcgcgttgaaccaacaaaggactacattaatggcgaacaatttagatc

SEQ ID NO: 176735 - DNA, 265 bp, Glycine max
ctggtacctattgtagagccagagatcctggtggatggacctcatgacatcaacaagtgtgctgaggtgaccgagcgcgttcttgcagcatgctacaaggctctaaatgatcaccatgttctgcttgagggcactctgttgaagcccaacatggtcacccctggttcagagtctaagaaggtcaccccagaggtgattgctcaatacactgttacagctttgcagcgaactgttcccgctgctgttccggccattgtcttcttgt

SEQ ID NO: 176736 - DNA, 263 bp, Glycine max
ccaagagtggaaatggcaggtggtgctgataggggactcggcggtggggaagtcgcagatactagctcggtttgcgaggaacgagttcagcttggactccaagtccaccatcggtgttgaatttcagacaaggaccttggtcatagatcacaagaccgttaaggctcagatctgggacactgctggccaagaacgatacagagcagttacgagtgcatactacaggggtgctgtgggggcaatgttggtttatgacatcacta

SEQ ID NO: 176737 - DNA, 266 bp, Glycine max
cgcagaacaaaaccaaaaccagacaactgaagctggaaggcaccaagaggttggccacaagagccttctccagagtgatgctctttaccagtatattctggagaccagtgtctacccaagagaacctgaatccatgaaagaactgagagagttgacagcaaaacacccatggaacatcatgacaacctctgcagacgaagggcaattcttgaacatgctccttaagctcatcaatgccaagaacaccatggacattggtgtctaca

SEQ ID NO: 176738 - DNA, 264 bp, Glycine max
ggacgctgacatgggaggttcgtatggatctaccctgcggtataagagtgttgagcgtatcaagcctattggaaagcattctcttcttggtgctagcggggagataagtgactttcaggaaattttgcgctaccttgacgagcttatcctttatgacaacatgtgggaggatgggaattctctagggccgaaggaggtgcatacttatttaacccgtgtaatgtataatagacgtaacaagttcaatccattgtggaatgcact

SEQ ID NO: 176739 - DNA, 270 bp, Glycine max
ctgtcttctagaagggaattcaaagatatatatgttgtcttcgaactcatggaatctgatttacatcaggtcatcaaagctaatgatgatctgacaccagaacattaccagtttttcttgtatcagcttctacgaggcttgaagtatatacacacagcaaatgtttctcaccgtgatctaaagccaaaaaacattttagcaaatgctgactgccaactgaagatttgtgactttggtcttgccagagtggctttcaatgatactcccact

SEQ ID NO: 176740 - DNA, 261 bp, Glycine max
agggtttgtaactttgtcttttgcttccgaatctgaatcgaataataatcaatcaatcatcatgtcgtcggcgaagaagatcacactgaagagttcggacggcgaggctttcgaggtggacgaggcggtggcgctggagtctcagacgataaagcacatgatcgaggacgactgcgccgacagctccatccctctgccgaacgtgacgagcaagatcctggcgaaggtgatcgagtactgcaagaagcacgtcgaggccgc

SEQ ID NO: 176741 - DNA, 263 bp, Glycine max
ccagcgaaacgctcttcgttatcttttctcagactccgcggcgtagatccgaggagttcgggaaatcctaactcatcatctcaactcaagtcatggctggacttgcacctgagggatcacagttcgatgctcgtcaatatgattctaacatgagtgacttactttcatctgatggacaggacttcttcacatcctatgacgaggtttatgatagttttgacgctatgggtttgcaggaaaatcttctcaggggaatttacgca

SEQ ID NO: 176742 - DNA, 264 bp, Glycine max
caagcttgaagactcaacaaatttcagtaccaaaatccaaccaagtctctactattatccattattgtctgccacatcttcccttagtactagaaatgaggctgccacaactaaacttgttcttagtgtcatttttgttgctctttgttgccagagcaaatggttctctgctcccattcatagatcctcccaccactctcttggctgatctctggtccgatcgcttcccggacccgtttcgagtgctggaacagattccatttg

SEQ ID NO: 176743 - DNA, 268 bp, Glycine max
ctcactcacaaacacacactgaactaaaaaacatcaaaagagacatggctgagcaaaccttcatcatgatcaagcctgatggcgtccaaagaggccttattggcgagatcattagcagatttgagaagaaaggtttctacttgaaaggtttgaaacttgttactgtggaccgtccttttgctgagaagcactatgctgatttgtctgccaagcctttctttagtggtttggtggattacattatctctggccctgttgttgccatgat

SEQ ID NO: 176744 - DNA, 270 bp, Glycine max
ctactcttagccgcagatctctcagggcttgcatcttctcaggtacgttgtgaagatgtacacatcaaggaagaaaatccacaaggataaggatgctgaaccaactgagtttgaagagtcagttggacaggcattgtttgatctggaacataccaaccaggagcttaaaagtgatctgaaggatttatacataaactcagctgtgcaagttgatgtttctgggaaccgcaaggctgttgttattcatgtcccttacagattaaggaaagg

SEQ ID NO: 176745 - DNA, 252 bp, Glycine max
cgaagttggccccaagacagttcacattccgactggggagaactttatgtgtttgatgcagcccgagagatacaaaggctgaaagggcaggacaccattgtgctggctggagctgaatatggtagtggaagttccagagattgggctgccaaaggtcccatgctattgggtgtccaagctgtgatagctaaaagttttcagagaattcattcgtagcaatttggtaggaatgggtaatggtcctctttgctt

SEQ ID NO: 176746 - DNA, 262 bp, Glycine max
accatacagcccccttggccgtggattttttggtggcaaggctgtcgtagaaagtatacctgcaaacagttttctggcatttcaaccaaggttacgaggggagaactttgacaagaacaaaatcttatattctaggatagaaaaattggcagagaagtatggatgtacatcttcgcaacttgctcttgcatggattcttcatcaaggagacgatgtggtacccatccctggaacaactaagataaaaaatcttgatagtaat

SEQ ID NO: 176747 - DNA, 258 bp, Glycine max
ctagagcgctgagaaggttgacgacagcgtgtgagacagcaaagacaacactctcttctaccgcgcagacaactattgacatcgattctttatacgaagggattgatttctatgctacaatcacgagggcgaggtttgaggaaatgaacatggatttgttcaggaagtgcatggaggtgttgctgatgctcttaaagctgttgacctgtatctggagcaaaacaatcttcaaatggaggttgacgtggagaccaggac

SEQ ID NO: 176748 - DNA, 260 bp, Glycine max
cattaccctagaagtcgaaagctccgacaccatcgacaacgtcaaggctaagattcaggacaaggagggaatccccccagaccagcagaggctgatcttcgccgggaagcagctcgaggacggacgcacccttgctgactacaacatccagaaggagtcaactctccacttggtgttgcgtcttcgtggtggtatgcagattttcgtgaagactcttacgggtaagactattaccctcgcggtggagagctctgacacca

SEQ ID NO: 176749 - DNA, 256 bp, Glycine max
gagagtttgttaaagaactgtgaagaagagggtaactgcaaacaaagcaagcaaaacaaaagacgcagtgatggagaggatgaagagggtgcttctgccgcttctggccttcactgttcttctcatgttgccagaagcttctgctacaaagtttactgttggaaacaaccagttttggaaccccgatattaactacaccgagtgggctaaaggcaaacatttctaccttggtgactggctctatttcgtgtacgat

SEQ ID NO: 176750 - DNA, 263 bp, Glycine max
cgcgttctatatattattgcattgacaatgaggcctgctcttgctttgcttcctcttctatttgctctcttgttagctgccactacagaatcaagaaaagatacaggggaatattggaaaatgatcatgaaagatcaggaaatgccagaaggacttcaaggtcttgtttcatttcaatctgaaaataaccctaagactcaagagcagcttggtaaaggttccaaaaaccattgtgaagagtctctagttacaaatacacaagt

SEQ ID NO: 176751 - DNA, 267 bp, Glycine max
cacatggcgttcaacgccggcgccgagcataacctggttccccggccacatggccgccgctacacgtgccatccgccaccgcctcaaactcgctgacctcgtcatcgaagttcgcgacgctcgcattcccctctcctccgccaacgccgacctccagccacacctctccgctaaacgacgcgtcgtcgcactcaataaaaaagacctcgccaaccctaacatcatgcataaatggacgcattattttgagacgtgtaatcagaattg

SEQ ID NO: 176752 - DNA, 260 bp, Glycine max
ctatagcccaagccctatacaaccaaaccctaacacacacccatttgattcagtttccatggctagcctcaaggttgcatttttcgctgcagtgctctgcatggttgtggtgagtgcacccatggcacatgcagctatcacgtgcgggcaggtgacgaatagcctgatcaattgcatcggttacctccagaacggaggaacgccgccgtcgggatgctgcaacggagtgaagagcctcaatgccgccgccaagaccaccg

SEQ ID NO: 176753 - DNA, 262 bp, Glycine max
cagagagcgagcagtttcagacacagagagaggggtttcggattggagggattgacgctgcgtctcttcctcttctctttcgatccatccctcattcctcatcctccaatccaaccacctcagcctcacactcacatatacacatatctgaacgcgtatcgtccctcctatggcttcaaagcgcatcctcaaggagctcaaggacttgcagaaagagccaccaacttcttgcagcgctggtccagtagctgaggacatgttc

SEQ ID NO: 176754 - DNA, 262 bp, Glycine max
ctgctatcgataacatatttcacttgagacagttatctttatctacgcaagagaagaatagaaaatggatatcaggttgatggatttggactctccattgttcaacactctgcaccgaatcatggatctgacagaggacgcagagaagaacttgaacgctccgacgcggacatacgtgcgcgacgcgaaggcaatggctgcgactcctgcggacgtgaaggagtaccctaactactacgtgttcgtgatcgacatgccaggc

SEQ ID NO: 176755 - DNA, 259 bp, Glycine max
aggacagtgataggtttggtttggaaggaagaagaaaatgaaggccatagtgataacgaggccaggaggtcccgaagtgctccaacttgaggaagtggaagatcccctagtcggagacgacgagcttctcatcggagtccacgccacttcccttaacagagccgatacctttcagaggaaaggctcctaccctccccctaagggcgccagccttacctcggtctcgaatgttccggaactgtcctttccctgggtaaaa

SEQ ID NO: 176756 - DNA, 265 bp, Glycine max
  unsure (1)..(265): unsure at all n locations
caacagagcacaccccaattctcggncctcaactgcatcgatctctccaaccccgacatcaaccaatccgtcaacttactcaaagaggcatgtttggattccggttttttctacgttgtcaatcatggaataagccaggaattcatggacgaggtttttgcgcagagcaagaagttcttctctcttcctcacaacgagaagatcaagactctcaggaatgaacaacacaggggatacacccctgttcttgatgagttgcttgatc

SEQ ID NO: 176757 - DNA, 262 bp, Glycine max
cgatctcattaatgagattatagcaaatggcttaaagccatttgtcacgctgtttcattgggacctcccacaagctcttgacgatgaatatgggggatttctcaaacctgaaatagtggaggacttgcgtaactatgctgacttttgcttcaagacatttggtgatcgggtgaagcactgggtaaccctaaatgaaccatatggctacagcgtgaatggctacagtggtggaaattttgcaccaggtagatgttctaactac

SEQ ID NO: 176758 - DNA, 265 bp, Glycine max
cagagatcggagcgtggaacctctctctctctctctctctctctgcggaaaccggaatatctcagttctctgatcagatccatccgacgtcgtttcagtgataatggctccgttcagcggcgatgagacggcaccgtttttcggcttccttggagccgcagctgccctcgtcttctcctgtatgggagctgcctatggcacagcgaagagtggcgttggcgtggcttcgatgggtgtgatgagaccagagctggtgatgaagtct

SEQ ID NO: 176759 - DNA, 279 bp, Glycine max
cataattgtaattgtgataccgttgcggtcgtgacggaaagcatggaatttcaaaaactagtccttcatctgttccttccaacttatctattctgtcatatagtgaagcaagtgatttctcaaatcttcccacaccgaggtccgagcgtgaaatcttgtcttccccaaatcttaaggcctttacctttaacgagctaaagaatgccaccaggaactttcgccccgacagccttcttggtgaaggaggatttggttttgtttacaaggggtggattgatg

SEQ ID NO: 176760 - DNA, 278 bp, Glycine max
cgtctgactcatggcggagattgaactgaaaactgcacctgctgattttcgttttcctacaacaaatcaaaccagacattgtttcactcgctacatagagtttcatagatgcttggcagcaaagggtgaaaactcaggtgaatgtgagagcatttgctaaatattaccgctccctttgcccgggtgaatgggttgaaaggtggaatgaacagagggagaatgggacttttccaggacctctttgaaatcatgtggcacttggatatccttccgaggca

SEQ ID NO: 176761 - DNA, 276 bp, Glycine max
tactaactcactcactcacaactcagtgaaagagaatccgaggcgaagagaagagaaaaattaagatggaggggaaggagcaggatgtgtcgctgggagcgaacaagttcccggagagacagccgattgggacggcggcgcagagccaagacgacggcaaggactaccaggagccggcgccggcgccactggttgacccgacggagtttacgtcatggtccttttacagagcagggatagcagagtttgtggccacttttctgtttctatacatca

SEQ ID NO: 176762 - DNA, 273 bp, Glycine max
catgagggagtcgatgacgcagctgttaaggttgttgacattgttgatacattcagacttcaggagcaacccgcttttgataagaaacagtttgttaccttcatgaagaggtttatcaagaatttgactcccaagctcgatgcagagaaacaagagttgtttaagaagcacattgagggagcaactaaatacctgctctctaagattaaggatttccagttttttgttggggagagcatgaatgatgatgcttgcttggtctttgcatactac

SEQ ID NO: 176763 - DNA, 274 bp, Glycine max
cgagtttgttgtgagctataagctagtttatcgtgaggcgaatatgaagttgtttgtgctctctgttgctgcagtagtcttggtagcatggccatgccatggcgcaggctaccaaaggttccctctccgaatgacaactggctatggtgagcgttcttcggaggtaaaatgcgcaagttttaggcttgctgtggaagcacacaacatccgagcctttaaaaccattcctgaagagtgcgttgaaccaacaaaggactacattaatggcgaacaa

SEQ ID NO: 176764 - DNA, 276 bp, Glycine max
cgtgtgagacacagacaatgccaaagtctcaatttcgaaccccatttcttgtttctttttctcttttgttattcatcttcaacctcaccccttcatacgcactctatggagcatccacacccgtgcttcaactcactccctctaacttcaagtccaaggttctgaattcaaatggagttgttcttgttgaattctttgctccatggtgtggacactgtcaggctctgactcctatatgggagaaggcagctactgtgttgaagggtgttgttactg

SEQ ID NO: 176765 - DNA, 277 bp, Glycine max
  unsure (1)..(277): unsure at all n locations
cagcaagcatgtgtggcggacaatcatcgcagatttcatacctcggcagcgtccccgcaccctcacagcctccgaactctggcccaagcgcaggncacctcaacctcaacctcctcctcctccagttaagaggcagaggaaaaacctctacagagggatcaggcagcggccctggggcaaatgggccgcggagattcgcgatccacgtaaaggagttcgtgtctggcttggcaccttcaacaccgccgaagaagccgccagagcctacgacaaagaa

SEQ ID NO: 176766 - DNA, 269 bp, Glycine max
tggatcttttgctgattttcaacttcgcattgacacaagggaagtacaacggcagcaccatcacgttcactgggaggagccccctctcggagaaggtgagggagttgcccattgttggtggaagtggggtcttcaaatttgccactgggtatattgagtccaggactctcagttttgatccccaaacgaggaataacacggttcagttcgacgtgtatatttactactgatgaatgttgaatgtgtttttcttttttcctttttttcac

SEQ ID NO: 176767 - DNA, 279 bp, Glycine max
cactaactcactcactcacaactcagtgaaagagaatccgaggcgaagagaagagaaaaattaagatggaggggaaggagcaggatgtgtcgctgggagcgaacaagttcccggagagacagccgattgggacggcggcgcagagccaagccgacggcaaggactaccaggagccggcgccggcgccaccggttgacccgacggagtttacgtcatggtccttttacagagcagggatagcagagtttgtggccacttttctgtttctatacatcactg

SEQ ID NO: 176768 - DNA, 275 bp, Glycine max
cgaaaagagcagagtgcttattgttgggggaactggctacataggaaaaaggttggtgaaggcaagtttagctcaaggacatgaaacatttgttcttcacaggccagagattggtgttgatattgagaaagttcagcttctattgtcattcaaggagcaaggagctaggcttgtttcaggttcatttaacgaccataagagcctagtgaatgctgtgaaacttgttgatgttgtcatttgtgccatttctggtgttcacatccgcagccaccaaa

SEQ ID NO: 176769 - DNA, 270 bp, Glycine max
ctagactcttccttttctcttctctgtctaaggggtgccctgagatcacattgaacaatggtgaaggctgtggccgttcttggcagcagtgagggtgtcactggaactattcacttcgttcaggagggaagtggtccaaccaccgtaactggatctcttgctggtcttaagcctggtctccatggtttccatgtccatgccttgggggacactaccaatggttgcctctcaactggatcacatttcaatcctaataacaaggagcatggt

SEQ ID NO: 176770 - DNA, 271 bp, Glycine max
cactcacaaacgcacactgaattcaaaaacatcgaaagagagaggcatggccgagcaaaccttcatcatgatcaagccagatggcgttcaaagaggccttattggcgagattattagcagatttgagaggaagggtttttacttgaaagggttgaaactcgttactgtggaccgtccttttgctgagaagcactatgctgatttgtctgcaaagcctttctttagtggtttggtggattacattgtctctggccctgttgttgccatgatc

SEQ ID NO: 176771 - DNA, 274 bp, Glycine max
gctaaattctcaaaggcaccaatttcattgctcagagttcccaaattctccccaagagataaaatgtctctaatcccaaacttcttcggtggccggagaaacaatgtgttcgatcctttctcactggacgtgtgggatcccttcaaggattttcctttcccaaatacgctttcttcagcttccttccctgaattttctcgggaaaattcagcatttgtgagcacccgtgtggactggaaggagaccccagaggcgcacgtgttcaaggcagata

SEQ ID NO: 176772 - DNA, 274 bp, Glycine max
cctgcattcaatgaggagcataggcttccaggagctcttgaggaaactatgaattatcttcatcaacgtactttaaaggattcttcatttacatatgaggttgtaattattgatgatggaagtgctgatgagacaaaaagagtagcttttgaatttgtgaggaaatacacagtagacaaggtaagggtcatccttctaggaagaaatcacggcaaaggagaagcaatcagaaaaggaatgatgcattcacgtggtgaactacttcttatgcttg

SEQ ID NO: 176773 - DNA, 281 bp, Glycine max
cgttttccacccggtaaagtaactggtcagaagtctgatattctgattcagatgcctaatggaccgctaccaagatctgatgctgctcaggctgtaaagaagatgaagattgagaaacttgatgatgatgaagatggtgaaaaggaagaatgagtgcagagtgataacttttggtgatcaagagtcgttcaagttgatgtttttgctctttttgaacaaccttttctgaatggggctgattaaagaatggtgaacacctgagtgtaatagatgcagtttat

SEQ ID NO: 176774 - DNA, 278 bp, Glycine max
agcaaacataacttgcagtaatggcttcaatgaataaccaaaaagaaattgagctctttgagggccaatctcttctgtacatgcagctatatgggcacctaagacctatgtgtcttaagtgggctgttcaactaggtattccagacatcatacagccgaatgccaaacccatttctctttctgacttggtctctactcttcaaattccaccagctaacgctgcctttgtgcagcggttcatgcgcttcttggcacacgatggaatctttgagatccat

SEQ ID NO: 176775 - DNA, 272 bp, Glycine max
cgcttgtgctgccttcgtttgcgtttttatcacagaggaattaacatatatatagcaagcatggcagtcacactctacgaccttagctcttcctctgggttgaacaaacttgatgagtaccttctcccacgcagttacatcaccgggtaccaagctacaaaggatgatcttactgtttatgcagctttgccaactgctccatcagatgaatatggaaatgtttccaggtggtacaagcacattgatgctttgttgagaatctctggtgttac

SEQ ID NO: 176776 - DNA, 272 bp, Glycine max
gtggatttctgttgttggtgttgacttcattgggaagaagcttgtgaactccaaggaaggacctccaacctttgaccaaccgaagatgactttgagcaagctcttggagtatggtaacatgcttgtccaagaacaagagaatgtgaagagagtacaactggcagacaagtacttgacagaggctgctcttggtgatgctaatcaagattccatcaacagaggaactttctatggcaaagcagctcagcaagtaaacattcccgttcctgaag

SEQ ID NO: 176777 - DNA, 270 bp, Glycine max
gggcaattttcagggtcggctttcgggacaagggagcagagaagttgcacatataatggacctgttgacctacgcgctggagcaaataaaattgctcttctcagcgtgactgttggattacagaatgttggtcggcattatgaaacatgggaggcagggatcactggtccagttttgctccatggtcttgaccaaggacagacagatttgacgtggaacaagtggtcatataaggttggcctaagaggagaggctatgaatttggtatct

SEQ ID NO: 176778 - DNA, 273 bp, Glycine max
gcttgctactgagtttccacactgcataccttaggtcttccgaattcgaagttaatttgcaagatggctaaggaaaaggctcagatcaacattgtggtggttggtcatgtggaccctgaggaggcaaccaccattaacgagctgaagaagcctgctgtggagaaagaagctccagggcatgccatatgagggcatgcacgtacggcctcggaggggaaccagaaaattatgttaacaaaataatctggaaccctaatgtatcagtgtcatcat

SEQ ID NO: 176779 - DNA, 275 bp, Glycine max
ctccttctctcgttgattcggatctagagtcttttttcactcttcagttctcgttgttgttcttcgctttcctgaaactagggttttcaatttcgattcattcgttaataattaaagatgtttgggagggcaccgaagaagagcgataatacgaggtactacgaaatcctcggcgtctcgaagaacgcttcgcaggatgatctgaagacggcttacaagacagccgccatcaagaatcaccctgacaagggcggtgatcccgagaagtttaaaga

SEQ ID NO: 176780 - DNA, 276 bp, Glycine max
catgataaggatatgtatgccagatcccctatcaactcatcttgacaattttccttgtcccatcattatatttcaaggattggaggacaatgttgtgccaccggatcacgctcggacaatctaccaggcggtcaacgaaaaacgtgtgccagttgctcttgtagagtatgacggagaacaacacggtttccgaaacgctgagaacattaagtttacacttgaacaagacatggtcttcttcgcacgattgcatgggcactttgatgtagctgatga

SEQ ID NO: 176781 - DNA, 272 bp, Glycine max
gggatgtggaacttgggaaacttttatacagcttgaatggacacagagatcgtgtatattctgttgcattcagtcccaatggtgagtacatagccagtgggtctcctgacagatcgatgctcatatggtccttgaaggaaggcaagatcgttaaaacctacactggtgatggaggcatttttgacgtctgttggaataaggagggtgacaagatcgctgcctgttttgccaataatacagtttgtgttttggatttcagaatgtaacctgag

SEQ ID NO: 176782 - DNA, 272 bp, Glycine max
ctatggcggaagaaccgaaagttccaccaccttacgatcctccgttaccgtttgatcctagtcggatgattggtatcatcaagaggaaggccttgatcaaagacttagctgcggtataccatgctgaatgccttgcatactgtcaagagcttttggaacttcaaactaaatgggaagagccatttattgacttaaaaactccagaggaatcaaaaaaggagacagcacgaccctccaaacgtgtaaaacagttgcgttaggtttcaggtggt

SEQ ID NO: 176783 - DNA, 271 bp, Glycine max
cgaaaaaggaagggcttgctgattatcgatattttccagaaccagaccttccagcagtaatcctttctcaagaatatgttgatggtataaaaaattctttaccagagcttccagaaattaagcggagaagatatgagcagatgggcttaagcatgcaagatgttcttttcctggctaatgataaaaatattgcagaattttttgatgcaactcttgcaaaaggtgctgactcaaagctggttgccaactggataatgagtgatattgctgc

SEQ ID NO: 176784 - DNA, 271 bp, Glycine max
cattaattgcaagaatggcacttcgttgcttggtgatgtccctttctgttctcttcactcttggtcttgcgagagaaagccatgccagagacgaagatttttggcatgctgtttggccaaacactcccattccaagttcattgcgagatcttctaaagcctggccctgcaagtgacgaaatcgatgatcaccctatgcaaattgaagaaacacagtacccgaaaaccttcttctataaagaagaccttcatccaggcaaaacaatgaaagt

SEQ ID NO: 176785 - DNA, 269 bp, Glycine max
ctgctaattattcttcagtcttgcggaactccattttgatttctccacgttccacgatacccctgatgcagtggtatctaatctcaatgtgctttgtacggctgtggaatattggattcttagtcattgcaatagctgacatattatcacaatgaataactgttggagtctaggagtcttgttgtacgtcttgcagaatttttctgagccatgtcgcttcacacgcaacgcttgtcgcaaccatgtattctgcttctttgacgcccatg

SEQ ID NO: 176786 - DNA, 277 bp, Glycine max
ctcggtgtagcaatggcgatgatgcaaggtgtgcagaagcacacactgtacgtgggagggttaacggaggaagtgaacgagtcgatcctccacgcggcgttcattcccttcggcgacatcaaggacgtgaagacgccgctggaccaggccacgcagaagcaccgctccttcggcttcgtcaccttcctcgaacgcgaagacgcctccgccgccatggacaacatggacggcgccgagctctacggtcgcgtcctcaccgttaattacgccctccccg

SEQ ID NO: 176787 - DNA, 271 bp, Glycine max
aggttgatttgttagagaagatgctcatctttgatccaaacaggcgaattacagttgatgatgcgttgagccacccatacatggcacctactccatgacatcaatgaggaacctgtttgcaccagacctttcagttttgactttgagcaaccatcattcactgaagaagacatcaaggaactcatctggagagaatctgtgaagttcaatcctgttccaccagtctactgagatttggtatttatgttgtatatgcttagtggattatctg

SEQ ID NO: 176788 - DNA, 273 bp, Glycine max
ctcccgagtacctcggatttgtttgacaccaggaagaagatgaacaacatcaaactttatgtcaggagggtgttcatcatggacaactgtgaggagctcattcccgagtacctcggatttgtgaagggtgttgtcgactccgatgacttgcccctcaacatttctcgagagctgctgcagcagaccaaggtcctgaaggtgatcaggaagaatcttgtgaagaagtgcattgagatgttcaatgaaattgcggagaacaaggaagactacaac

SEQ ID NO: 176789 - DNA, 270 bp, Glycine max
cccgagagagagagagagagaatcttgtgcagcaacgcagtgtatgtgagtgagttgggttttttctttggttttcctgagctgtgttttattctctttatctctctctctgccctctcatcttcgagctccgatggcgagcctgtggcgcgcggcgaccggcatgacggaaaacgccaccgattacgacggcgtcgagttctggtccaaccccgagcgcaccggctggctcaccaagcagggcgagtacatcaagacctggcgccgcgc

SEQ ID NO: 176790 - DNA, 270 bp, Glycine max
cgaatatcttgttgtttggagcgatccgagaaaaactctgtaaacatgttggtttaccaggacctccttacaggtgatgagcttctctctgactccttccgttacaaggaaattgagaatcgaatgctgtgggaagttgaggggaagtgggttgttaaaggagcagttgatgtagacattggtgcaaacccttctgctgagggtggaggagaagatgagggagttgatgatgcagctgttaaggttgttgacattgttgacacattcaga

SEQ ID NO: 176791 - DNA, 269 bp, Glycine max
ctcgagcgcagttcttctttcctcaaccttctttcttcttatatatcgaacatggctcagtatcattcaagtgggaaaagctcttccatgactgctatagccttcctgtttatccttctaatcacttatacaggcacaacagatgcacaatccggggtatgttatggaagacttggcaacaacttaccaacccctcaagaagttgtggccctctacaatcaagccaacattcgcaggatgcgaatctacggtccaagcccagaagtcct

SEQ ID NO: 176792 - DNA, 271 bp, Glycine max
gtaacttcgaatctgattttcatcccttaacaccaacgccaacgccaattccattcagatcacagtcccttcgattcctgctgcaacatactttcaaagccctcaaatggaggggactgtcttcactcctgcactgcaagaaattgagcatgtaaagtctgatcaaggagaaattctgagcaagcctttcttggatgcgtgcaaacacatattgcctgtaatagataagtttggagctgctatggcccttgttaaatctgacataggtggt

SEQ ID NO: 176793 - DNA, 267 bp, Glycine max
gacgctttgatgtatttgttgaggccgaagcaaataaagctgctggaaagtatgagaatgcctctattgactttcagattgagttttacaagaatgaaggactgactccatatacagaggccaaacttcctcttataagtgatgttcctgaaggatgtgtaatagtacgagagcatgttcccattagtgatctttttacatgtctttggttcaatgaagttgaccgattcacttctagggaccagattagtttctcaactgtcaggg

SEQ ID NO: 176794 - DNA, 268 bp, Glycine max
cttccattctctctgtgtatctccctacctctcccttcaagatgcagatcttcgtcaagaccctcaccggcaagaccatcacccttgaggtggaaagctctgacaccatcgacaacgtcaaggccaagatccaggacaaggaaggcatccccccggaccagcaacgtctcattttcgccggaaagcaacttgaggacggccgtacccttgctgactacaacattcagaaggagagtactcttcacctcgtcctccgtctccgtggtgg

SEQ ID NO: 176795 - DNA, 268 bp, Glycine max
ctctcactttcatttctacatccctggctctgttccgtcgatgacgatggcgtttagggtgcgaaaccctgacctccgctttctcattcttctctctctcttgtccatcacttccgccaaggtcttcttcgaggagcgtttcgatgacggatggggaaatcgttgggttaaatcagattggaaaaaagatgagaacctggctggggagtggaaccacacctctggccaatggaatggagacgctaacgacaaaggtattcaaaccagt

SEQ ID NO: 176796 - DNA, 276 bp, Glycine max
gaaacggcggcgtcatcatcgactccggcacctcagtcacccgcctcacccgacctgcctacattgccctccgggacgcgttccgcatcggggcctcgcatctgaagcgcgcgccggagttctcgctcttcgacacgtgtttcgatctgtccgggctcacggaggtgaaggtacctacggtggtgttgcatttccgaggtgctgacgtgtccttgccggcgacgaattacttgactccggtggacaacagtgggagcttctgcttcgcgtttgccg

SEQ ID NO: 176797 - DNA, 296 bp, Glycine max
gttacctgtttgcgatctcattacaatctccccagtttctaatctcagctaagaaaaaccaaaagatgtctctgattccaggtttcttcggtgcccgaaggagcaacgtcttcgatccattctcactcgacatttgggatcccttcaaggattttcatgttcccacttcttctgtttctgctgaaaattctgcattcgtgagcactcgtgtggattggaaggaaaccccagaggcacacgtgttcaaggctgatattccagggctgaagaaagaggaagtcaaggttcagattgaa

SEQ ID NO: 176798 - DNA, 285 bp, Glycine max
cagagagagaggttttgatgcaacgctgtcactgagaaaggatctctatctacgaaggagcggaataaaacccttctctctgtgattaagagaatggcttcagatcggaaacttcacacttttgaggaggtggcaaagcacaaccagaccaaggattgctggctcatcatttctggcaaggtgtatgatgtcacccctttcatggaggatcatcccggaggtgatgaggttttgttatctgcaacagggaaagatgcaaccaatgactttgaagatgtggggcac

SEQ ID NO: 176799 - DNA, 278 bp, Glycine max
cttattttgatttcaactttgaagtttagttgttttgtggaatggcagcgaagagcaaaatcctagtccttggaggaacaggatacattggaaaattcatagttaaggcaagcgcagaagcaggacaccccacttttgccttagttagagagaccaccctttctcatcctgaaaagtctaaacttattgagagcttcaagagctctggagttactcttctttatggtgatgtaaatgatcatgaaagccttgttaaggcaatcaagcaagttgatgtt

SEQ ID NO: 176800 - DNA, 276 bp, Glycine max
acctctaactatttatattcacatatttctctccttctcagaaatcagaattgagcaagcgtttggatttggaatttgaaggttatcatcatcatttatagatattattattattataagaagttcatcagaaatattcaatggggagctttgaaactgaactgatgaatcttaaggccacagagttgaggttgggactgcccggctgtgatgaaactaatgagaaaagttcatccagtagtggatctgttgttagaagcaacaagagatcttcac

SEQ ID NO: 176801 - DNA, 275 bp, Glycine max
ctgttctcttctgtcattgcttctcctccacacacgcacagagacacacacttttgcagtcacattgagaatcgggcgtgttcgcacgaagacggtgaagaaatcctcgcggcaagtgatagagaggtactactcccgcatgacgctggacttccacacgaacaagaaggctctggaagaggtggccatcattccctccaagaggctccgcaacaagatcgcggggttctccacccatctcatgaagcggatccagaagggtcccgtgcgtggaa

SEQ ID NO: 176802 - DNA, 277 bp, Glycine max
gtttggatcttgctggccgtgatctgactgactctttgatgaagatcctcggcagaggtggtgaacatgtaccctctctcagattccactgtgtgtgaggcagagtcttccataatctctcttaatggaacagttgaagccaagtgctgttaactcttctcctctcactccactcaccttcttggacagagcagccaccgtttacggcgatgtcccttccgttgtttataacgacacaaccttcacgtggtctcagacgcgccgccgatgcctccag

SEQ ID NO: 176803 - DNA, 282 bp, Glycine max
cagatccgggaatgattcaggtgtctttaggtcctagttgggggctggatacagatggaaatgagctgcctagacttgtttatgtttctcgtgtgaagcgaccaggcttccaacatcacaagaaggctggagctatgaatgctttgattcgagtttctgctgtcttgaccaatggtgcatatcttctgaatgtggattgtgatcactatttcaataatagcaaagccctcaaagaagccatgtgtttcatgatggatcctgttcttggaaagaagacatgct

SEQ ID NO: 176804 - DNA, 273 bp, Glycine max
tagtgattgccttcaaatcacacactctcttcaatttctagggttttgctattgctttgcctccgttccccctttctcacaaaaacaacgccttttctcttctccttcgtatctattctttgcgtttgcttttcggttgattgacggcattcacagcgtaatttgttgctgcattttaatcgatttatctaaccaggactgaatgacctaatggagtccaaaggtgggaaaaagaagtctagtagtagtagtagtaaatcaattttttacgaa

SEQ ID NO: 176805 - DNA, 282 bp, Glycine max
gcttgctactgagtttccacactgcataccttacgtcttccgaattcgaagttaatttgcaagatggctaaggaaaaggatcagatcaacattgtggtggctcctcatgtggaccctgaggaggcaaccaccattaacgagctgaagaagcctgttgtggagaaagaagctccagggcatgctatatgagggcatgcacgtacggcctcggaggggaaccagaaaattatgttaacaaaataatctggaaccctaatgtatcagtgtcatcatcagtgtgta

SEQ ID NO: 176806 - DNA, 280 bp, Glycine max; identical to SEQ ID NO: 176507

SEQ ID NO: 176807 - DNA, 285 bp, Glycine max
gcaagaatggcacttcgttgcttggtgatgtccctttctgttctcttcactcttggtcttgcgagagaaagccatgccagagacgaagatttttggcatgctgtttggccaaacactcccattccaagttcattgcgagatcttctaaagcctggccctgcaagtgttgacatcgatgatcaccctatgcaaattgaagaaacacagtacccgaaaaccttctcctataaagaagaccttcatccaggcaaaacattgtttgtacaattcagcaagcctcccttt

SEQ ID NO: 176808 - DNA, 289 bp, Glycine max
cgaatatcaaattggtctcttgtcttcctcctcatctctacactactccacatacagcccagcctctcaagcccaagcccaagcccaagcccaagcccgttcataaaatcctcctgcagcagcacccagtacccagccctctgcgtctcatccctctccgtctacgcctccagcatccaacaggaccctcaccaactggttcagacagcactctccctctccctgaaccgcacccaagccaccaaaaccttcgtggctaactgcaacaaattcagaggcctgaaaccca

SEQ ID NO: 176809 - DNA, 279 bp, Glycine max
ccagaatggcacttcgttgcttggtgatgtccctttctgttctcttcactcttggtcttgcgagagaaagccatgttcgagacgaagatttttggcatgctgtttggccaaacactcccattccaagttcattgcgagatcttccaaagcctggccctgcaagtgtcgaaatcgatgatcaccctatgcaaattgaagaaacacagtacccgaaaaccttcttctataaagaagaccttcatccaggcaaaacaatgaaagtacaattcagcaagcctc

SEQ ID NO: 176810 - DNA, 279 bp, Glycine max
catcgtttcttgaagggcctgcatttgcacctcctttcattagggaaggtatttggtgtggtagcgcaaactccacaactgaagaaggaaaggatttaaaggacttgcgaatcatggttgatgttggtgatatccctattcaagaaatgcgagattgtgggataggagatgagagactcatgaaagttgtctagtgattctgtcaagctagtgatggaagaggatccattacgtcccttaattttgggtggtgatcactcaatctcatatccagttgtc

SEQ ID NO: 176811 - DNA, 280 bp, Glycine max
cttattttttccaatcaaaccaaacaaaacataagcaccgctcttttctctccgaaatccccataccccttcacttctgagctctggacgagatcccagatctcaccatctttcacgcactcttccatcagattcaccctttcgtttaacgcaaactcataacttgaaggttaatggctgctccaccggcaagggctcgtgccgattacgattatctcataaagcttctcttgatcggtgacagcggtgtcgggaaaagttgcctccttctgcgtttctc

SEQ ID NO: 176812 - DNA, 280 bp, Glycine max
ctccgcaccagtttcaccgcacgaatatcttgttgtttggagcgatccgagaaaaactctgtaaacatgttggtttaccaggacctccttacaggtgatgagcttctctctgactccttccgttacaaggaaattgagaatggaatgctgtgggaagttgaggggaagtgggttgttaaaggagcagttgatgtagacattggtgcaaacccttctgctgagggtggaggagaagatgagggagttgatgatgcagctgttaaggttgttgacattgttg

SEQ ID NO: 176813 - DNA, 283 bp, Glycine max
catcgagataactagaaacagtgtgatgaaaatgaaggtccttgttttcttcgttgctacacttttcgtagcatggcaatgccatgcgtacgatatgttccctctccgaatgaacactggctatggtgcccgtactccggaggtgaaatgcgcaagttggaggcttgctgtggaagcacacaacatctttggctttgagaccattcctgaagagtgcgttgaagcaacaaaggaatacatccatggcgaacaatatagatcagactccaaaacagttaaccaa

SEQ ID NO: 176814 - DNA, 289 bp, Glycine max
ctgctttctctctctctctctctctctctctctcttgtttctctacagacaatggcttgtcaattactgattgccaatgcttgtgttggatttgattgaaaaataggttgacttgtgagaatgtccactccagcaaggaagagactcatgagagatttcaaaagattgcaactagatcctcctgctggcatcagtggggctccccaagacaataatattatgctttggaatgcagttatctttggaccagatgacaccccttgggatggaggcaatttaagctaacact

SEQ ID NO: 176815 - DNA, 196 bp, Glycine max
atatacaagagttttcttgccttgtgtggagctttatccaatcactgtgtgtggtgtgtgcttaagttaaaaacttgccttccaattaatgtaacgagtgtttcctttctcatttccttttgccacagaattgtgagagtcagttgatatctttgtatgtgacttcaataaattttaataaaagaaagcatcattt

SEQ ID NO: 176816 - DNA, 196 bp, Glycine max; identical to SEQ ID NO: 176815

SEQ ID NO: 176817 - DNA, 270 bp, Glycine max
ctgaaaagcgacacgacacaacacaacacaagcttcattctttttcttcgcttcttctgtacagcacccaagactgaagatgatagaccttgcgcgcgtgcagaaggagcttgtggaatgcagcaaggacgcggagggatcgggcatcaaagtcagccccaaaaacgacaaccttgttctcttgatcggcaccattcctggccccgtcggaactccatatgaagcgggcatttccagattgatatcacattgcctgatgggtaccgtttg

SEQ ID NO: 176818 - DNA, 273 bp, Glycine max
ctgaaaagcgacacgacacaacacaacacacgcttcattcttattcttcgcttcttctgtacagcacccaagattgaagatcatagaccttgcgcgcgtgcagaaggagcttgtggaatgcagcaaggacgcggagggatcgggcatcaaagtcagccccaaaaacgacaaccttgttctcttgatcggcaccattcctggccccgtcggaactccatatgaagcgggcattttccagattgatatcacattgcctgatgggtacccgtttga

SEQ ID NO: 176819 - DNA, 271 bp, Glycine max
cacagctccaagagtgcaaagactgctccatttttggagtaattggttcaaaaagataatgaggttctttatttggttgaacctattgatgaggttgccattcagaacctacagacctacaaagataagaaatttgttgatatcagctaggaggatttggaattatgtgatgaggatgaggtcaaagagagggaaaacaagcaagaatacaacctactctgtgattggatatcacaacaacttggtgacaaggtggccagagttcaaatct

SEQ ID NO: 176820 - DNA, 276 bp, Glycine max
cagacaaacaattcagatatagccaaagtccaacccacatagtctcattgctttcaattttccaatacctcttctgagtaccaaaacagaaggcatatccgcacatacacattccaacgtacaaaatgaggcactttttagtactagtaccactgatcttgcttgtctttgctggtttcccatccaaagcaaaagggtctctgctaccattcacaaatcatccaaataccctcttggctgatctatcgtctaatcatttccctgatccatttcgcg

SEQ ID NO: 176821 - DNA, 302 bp, Glycine max
tcgcgaattcggcccgagaatatgtctccttgtattacccaacagatgcagcagttcacacaagatactgaactacaagcatggtggaaggaagctgtggagaagggtcatggtgacttaaaagaaaagccttggtggcctaaaatgcagacaactgaagatctcattcaatcatgctctattatcgtttggacagcttcggctctccatgctgctgttaattttggacaatatccttatgggggcttaatcctgaaccgtccaactctagccagaaggtttatcccagctgaaggaacccc

SEQ ID NO: 176822 - DNA, 281 bp, Glycine max
cgttgatcgagataactagaaacagtgtgatgaaaatgaaggtccttgtcttcttcgttgctacaattttcgtagcatggcaatgccatgcgtacgatatgttccctctccgaatgaacactggctatggtgcccgtactccggaggtgaaatgcgcaagttggaggcttgctgtggaagcacacaacatctttggctttgagaccattcctgaagagtgcgttgaagcaacaaaggaatacatccatggcgaacaatatagatcagactcccaaacagtt

SEQ ID NO: 176823 - DNA, 276 bp, Glycine max
cgattatctcattgatcagggtctctaatctttgctttatgtcttgttatcgtgcatatttcattggctactgtacaagtttttgcatcgacctggactggaatgctttcattgcagtgtaataatcttgttgtgagtatgaaaagtcacgggatctgcgtgtagtgaagaaagtgtttgatgcttgagaaatgatgactataatctctatctttgtacttttttagtggggtacctgtatacattacagtggttttaaaattttaatgctatgtt

SEQ ID NO: 176824 - DNA, 287 bp, Glycine max
tccacatcttatcactccaaatgcactttcatacaaatcagcaatgagagagaatctgttgaggcagggatacagaattgtacggaatcattggagaccaatggagcgatctgcttggagaccacagaggcgaaagcaggacctttaagcttcctaatcccatgtactacattgagtagtaccttcacctctctcaacaatctagctagagtttgctcctatctatatgtaataaggtatgctgatatgcactattcaaataggagcattagctatgtttgttaatg

SEQ ID NO: 176825 - DNA, 273 bp, Glycine max
gttgactcctggagcaatcaggtctggtttgactgaagacaccagacatgtggaattcaacatcatttcaggcacttccatgtcctgcccccatgtcactggcttagctgcccttcttaagggcactcacccagaatggagccctgcagctataaggtctgccctcatgaccacagcttacagaacctacaaaaatggccaaaccataaaagatgtcgccaccgggctaccctctacgccatttgattatggggccggacacgttgatccagt

SEQ ID NO: 176826 - DNA, 276 bp, Glycine max
cttgaatctccaactacattgtaaaacacaaacaggtggcttcatgataactccactaccaggtgcttggcccctcaaacctggttctgcaactttccctttctttggagttcagcctgtcatactggatgagaaaggtgttgaaatagaaggggagtgcaatggatatttgtgtgtgaagaaatcatggcctggggcattcagaactctgtatggtgatcatgaaagatatgaaacaacatatttcaagccatttgccggatactatttcagtgg

SEQ ID NO: 176827 - DNA, 277 bp, Glycine max
gaggaagcaaagggagttgtgaagcacgttttccttgcaaagttcaaggacgacgtcactccagagcggattgaggagctcatcaaggactatgccaatcttgtcaatctcatcccacccatgaagtcattccattggggcaaggatgtaagtgctgaaaacatgcatcaaggcttcactcatgtgtttgaatcaacctttgagagtacagaaggcattgcagagtatacagctcatcctgcccatgttgaatatgcaactttgttcctttcctacc

SEQ ID NO: 176828 - DNA, 299 bp, Glycine max
cgagctcgagctcgagatactcgcgatgctagccctagagctacccaatctccattcatgttcaccccacaagttccggtggttccgctacaaaaacctgatgagatgcatgctccaagcccttcctggatgcagactacgtcagtttatgaggatatgtactgtgaactgggaattccaacgatgattacttggagctatgatgggaaggaagttgccgtggagggttcgtgggataattggaaaacaagaatgcctttacagagatcagggaaggacttcacaataatgaaggtgct

SEQ ID NO: 176829 - DNA, 238 bp, Glycine max
ggaatatctgcgtgtgaatgtgtacatgcttgttgttgatgagcttcgtcctgctgagtatctgcgtttcaaggaggagcttgttgagggaagttcaaacggcaacttatgtgcttgagttggactttgaaccgtttaatgcatccttccctgcgcccaactctgaacaagtccattggaaatggcgtcgagttcctcaaccgccacctttcggccaagctcttccacacaacatacg

SEQ ID NO: 176830 - DNA, 273 bp, Glycine max
caacaacaacttatgcctggtatgaggccaggtgcagctcctgtgccgaattttttcgtgccaatggttcagcagggacaacagggacagcgtcccggtggaaggcgtccaggtgcagttcagcagtcccagcagccagttcctatgatgccacagcagatgcttcctaggggacgtgtctatcgttatcctcctggtaggggtattcctgatgttcctatacctggggttgctggaggtatgttttctgttccatatgatgtgggtgggatg

SEQ ID NO: 176831 - DNA, 269 bp, Glycine max
tggtgatgccggtgttagagccaatgcacaacaaccaaaactttttgttggaatgattctcatcctcatttttgctgaagcacttgccctttatggtctcattgttggtattatcctgtcttctcgtgctggccagtctagagccgactaagaaaggagttgtgctgcaaaatattctttgaccacccatctgttttaacctccttttaaagggggtgagggaggtaattattagttgttccgagcttagcgatgttcaggcagcattt

SEQ ID NO: 176832 - DNA, 238 bp, Glycine max
cataggcttcgtgttccttatttaggtgacgaattgcatcacactggttggaattcatgcagctcttgccatggagacccctcggcagaccgacgatttctcatcgcacctgcactcgtttcaggtcgcatatatgtggttgatgtgaaaacaaatccaagggctccatctttgcacaaagttgttgagcctgccgatatcatacagaagactggattagcttatccacacacatctc

SEQ ID NO: 176833 - DNA, 275 bp, Glycine max
acctcctcctcctcctccttcttcttcttccctggcatcggatccagatccaaatccagtttaacaaagaaaatgcagtacaagaacctgggccgatcgggactgaaggtgagccagctctcctacggggcgtgggtgagcttcggtaaccagctagacgtgaaggaggccaaggccctcctccagtgctgccgcgaccacggcgtgaacttcttcgacaacgccgaggtctacgccaacggccgcgacgaggaaatcatgggccaggccatccg

SEQ ID NO: 176834 - DNA, 274 bp, Glycine max
tcgaactgttgtttggtctcttctctcttatccatggcatcaacgtttctcaccctaccaactcccttcctacacaaaaccaatgccatcagtttctctaacaagagaccctcatttttgcagaggagctctctgaagattcatgcaattaccaaaaaatgggaacccacaaaggttgtgcctcaggctgatagagttcttattcgtttggaggagctttcagataaaacagttggtggagttttgctgcctaaatcagctgttaaatttgagc

SEQ ID NO: 176835 - DNA, 279 bp, Glycine max
gcatggagtcctcaaagatctatgcttacctcttcctctgcatgatctttctctcttccgccactcccattctcggttgtggctactgtggcaaaccccccaaaaagcacaagcctggtaaaacaccacagacacccaaaacacccgttgttaagccaccagtcaccatccctcccattaatgttcctcccgttgttcttccaccaatagtgaagcccccaggtattctccctccaattccaattattaacccaccaaccacaccagggaagggaggga

SEQ ID NO: 176836 - DNA, 283 bp, Glycine max
cgattcgattctctctgcactcacttctagggttttctctgcgctataagcaatcatggcggatgaaacaccaaatgagatgaaggaggaggttccagaaattgttccttttgatcctaccaagaagaagaagaagaagaaaattacaattgtagatcctgctgatgaacctgtggagaaattggctgagaagacagaaaacctctcagtttccgagggggttgagactgcatttactggtttgaaaaagaagaagaagaagcctgttgaaatgggtaacttg

SEQ ID NO: 176837 - DNA, 277 bp, Glycine max
  unsure (1)..(277): unsure at all n locations
tcaaggttcctcaaaatgtatctgatgtttgtgttgctcttcgtcatatcaattcgattgaatatgtgatatgataanataaacattgtggtaggttatatngtggacnctgaggagggaancancattaacgagctgaagaagcctgttgtggagaaagatgctccagggtatgctatatgagggcactgtatgtacggcctcggaggggaaccagataattatgttaactaaataatctggaaccctaatgtatgagtgtgatcatcagtgtgta

SEQ ID NO: 176838 - DNA, 275 bp, Glycine max
caaattagcctcacaaaagcaaagatcaaacaaaccaaggacgagaacacgatgttgcttgaacttgcacttggtttattggttttggctctgtttctgcacttgcgtcccacacccactgcaaaaccaaaagcacttcgccacctcccaaacccaccaagcccaaagcctcgtcttcccttcataggacaccttcatctcttaaaagacaaacttctccactacgcactcatcgacctctccaaaaaacatggtcccttattctctctctactt

SEQ ID NO: 176839 - DNA, 274 bp, Glycine max
cgtgaggctgctgctgaagaaactaagaaaagtaaccatgtgcagagaaaacttgagaaacgccagacagatcgtaatcttgactcccacattgaagagcaatttggtggtgggcgattgttggcctgtatttcttctcgtcccggacaatgtggcagggctgatgggtacattcttgaaggtaaggagctggagttttacatgaagaaactccagaggaagaagggaaagggtgctgcttaattttagtgttttctaaacttctatttggctt

SEQ ID NO: 176840 - DNA, 281 bp, Glycine max
ctcgaccgcctagggacaaggtgttcatacaaggagatggagatgtgaaaggagcgtatatcactgaggctgatgtgggaacttttaccatcgaagcagcatatgaccctagagccttgaacaaagccgtgcacataagactcccaaacaattatctgtccttaaatgatatcatctctctgtgggagagaatcattgggaaaactcttgagacaatttatgtatcagaagaagaagttcttaagcaaattaaggagacttctttcccaaatacttatctt

SEQ ID NO: 176841 - DNA, 265 bp, Glycine max
atcacttttctactttgagtcttcttgatccttctttttctccttgaactcaaacatggcagatgaggtggttctgctagatttctggccaagtccatttgggatgagggtcaggattgcacttgctgaaaagggtatcaaatatgagtacaaagaagaggacttgaggaacaagagtcctcttctcctccaaatgaacccggttcacaagaagattccggttctcatccacaatggcaaacccatttgtgaatcctcattgctg

SEQ ID NO: 176842 - DNA, 259 bp, Glycine max
ctttcttgagttgagttaacagcatggagagggaggaagatgttaaggttggagcacagaaattctcagagaggcaagcattggggacaggagctcagggtgacaaggactacaaggaggcaccaccagcacccttgtttgagccaggggagttaaagtcatggtctttttacagagctgggattgcagagtttgtggccacattcttgttcctctacatcactgtcttgactgtcatgggtgtcaacaggcacccaac

SEQ ID NO: 176843 - DNA, 257 bp, Glycine max
gcattttcagaggaacaatggcgggtagggtttcggcgtgcttcttcttcgtgtttgctctttctctccttcttccttttcagatctccgctcgagaatcatcggagaaagagttcgtactcacattggatcactctaactttcacgacactgtcagcacgcacgatttcatcgtcgtcgagttctacgctccatggtgtgcccactgtaagaagcttgctcccgagtatgagacagctgcttctatctgagtagtc

SEQ ID NO: 176844 - DNA, 261 bp, Glycine max
  unsure (1)..(261): unsure at all n locations
caacgagttgcacttcaactaagacctcaacngnaattaagaagctccanagaggtgtgaccaagctngnggacctngttngccgtcacgcttggtcccaagggaagaaatgttgttctcgagagcaagtatggctcgccgaaaatcgttaacgacggtgtcactgtcgctaaagaggttcagttcgaggctcccgttgagaatattggtgccaagttggtgagacaagcggctgccaagacaaacgacttggctggtgat

SEQ ID NO: 176845 - DNA, 258 bp, Glycine max
cttcttctcttgcggctagtcttttagcgcagttcttctagatttaaggaagatgggtaaggaaaaggttcacatcagtattgtggtcattggccatgtcgactctgggaaatccactaccactggtcacctgatttacaagcttggaggcattgacaagcgtgttattgagaggtttgagaaggaagctgctgagatgaacaagaggtctttcaagtatgcctgggtgctggacaaacttaaggctgagcgtgaaag

SEQ ID NO: 176846 - DNA, 120 bp, Glycine max
cgcattgcttcgcctcacagcagcagctgcagcagcaatggctcccaaacgaggtggaaaggctccggctcttgccgctaagaagaagcctgagaaggtcacgaatccgttgttcgagaa

SEQ ID NO: 176847 - DNA, 256 bp, Glycine max
gtgctgtgctgaagattggtcccaacgagccatctgagctggctatccatgagaatgcctatggcttggccagatactgtctcatatgccaggagaatggcctggttcccattgttgagcctgagatccttgttgatggatctcatgacattcacaagtgtgctgccgtcaccgagcgtgtccttgcagcatgctacaaggctttgaatgatcaccacgtccttcttgagggtaccctattgaagccaaaatggtc

SEQ ID NO: 176848 - DNA, 259 bp, Glycine max
cgaacaattccggtccgaagagaaaaaggatgacatattaagaacaagctctgttcagcattttggaaagaagaagcaaagtagcttccctcagccaaaacctgcaaaacctctacctgacatcatcagtcagagtggccaccagcatgccatagtgtatgtggagggagataagtattatggagccaaggcaaccataaacgtttgggacccaaaaattcaacaacccaatgaatttagcctttctcaatgtggattt

SEQ ID NO: 176849 - DNA, 258 bp, Glycine max
ggcggattagagaagcagattcaagaattagttgaagccattgttttgcccatgacccacaaggagcggttccaaaagttaggagttcgtcctcccaagggagtgctgttgtatggacctccagggactgggaaaacattgatggctcgtgcctgtgcagcacagacaaatgccacttttctgaaattggctggtcctcaactggtccagatgttcattggagatggagcaaaacttgttcgtgacgccttcaactag

SEQ ID NO: 176850 - DNA, 257 bp, Glycine max
gtgcctaaccattaaaacacacactctctctcaccaaattcttattagaacgaaaaaagaaaagaaaagaaaaaagagcgatttttccctcaccaaagaagaaccaaaacaatggcggatcaactcaccgatgaacagatctccgagttcaaggaagccttcagcttgttcgataaggacggcgatggttgcatcacaaccaaggagcttggaactgttatgcgttcattggggcaaaacccaactgaggcgaactc

SEQ ID NO: 176851 - DNA, 257 bp, Glycine max
ctgatggagtgttcttcgctgaactgaacgaggttctgacaagggagttagccgacgacggatactccggcgtggaagttagggttacgccgatgcgcaccgaaatcatcatcagagccaccagaacccaagccgttctcggtgagaagggaaggagaatcagggaacttacctcggtggttcagaagaggttcaagtttcccgagaacagtgttgaactttatgctgaaaaggtcaacaataggggctttgcgcta

SEQ ID NO: 176852 - DNA, 257 bp, Glycine max
ctttcatttctacatccctggctctgctccgtcgatgacgatggcctttagggtgcgaaaccctgacctccgctttctcattcttctctctctcttgtccatcacttccgccaaggtcttcttccaggagcgtttcgatgacggatggggaaatcgttgggttaaatcagattggaaaaaagatgagaacctggctggggagtggaaccacacctctggccaatggaatggagacgctaacgacaaagtattcaaac

SEQ ID NO: 176853 - DNA, 256 bp, Glycine max
agagaaaaaaaaaaaaaaaaaaacgaaaaaaaaaaaaaaaaaaaaaaaaacaaaaaaaaaacaaacaaaaaaaagaaccaaagcaaaacgaaaaagtacgaaaccacggaacaagcgcacaacacccgccacaccgagaacaaccgcacaagagccagagaacaccaaggggccgacgaggcccacacggacaagcccaataaccccccacaaaaaaaaaaaaaaaaaaattaataaaaaaaccaaaaaacaaaaa

SEQ ID NO: 176854 - DNA, 259 bp, Glycine max
  unsure (1)..(259): unsure at all n locations
gagctattggagcagttgcctgctttgcagcagctgctgtatcgacttgttggttgtcggccagaaggagcagctgttagcaattatgtgatacaatatgctcttgccctggtactgaaggagangtttaagatttattgtgctattaatgatggcattatcaatcttgttgataagttttttgagatgcccggacatgaagctattaaagcccttgatgcctataaacgtgcgggtcagcaggcagcaagttatctga

SEQ ID NO: 176855 - DNA, 259 bp, Glycine max
ccttttctctctctctctctcgttcgtgttcttcgtcgcaaattcaaaggaggatctctcttgcgttttctctaggttttcgctatggcgtcgaagcgaattttgaaggagcttaaggatttgcagaaggatcctccaacatcttgcagtgccggtcctgttgttgctgaagatatgttccattggcaagctacaattatgggtcctccagacagtccctatgcaggaggtgttttcctagtgaccattcatttccctc

SEQ ID NO: 176856 - DNA, 270 bp, Glycine max
cagaagcatcctcctaattacatcttgcttgcactcttcaccgtgtcgatcagttccaccatcggagtcactcgtgccaacaccgacgggaaaattgtgcttgaggctttgattttgacctccgctgtggtttcatctcttactggctatgccttttgggcgtccaagacgggcaaggattttagcttccttggcccaatattgttcacctccctcattactctcatcctcactggcatgatgcagatgttcttccctctgggacctact

SEQ ID NO: 176857 - DNA, 254 bp, Glycine max
ctgaacccattcctgaagctaacgatgaacctgttaaagtggtagttgggaacagtcttgaggacattgttttcaaatctgggaagaatgttctgctggagttttatgctccctggtgtggtcattgcaaacagttggctccaatattggacgaagttgctatctcatatcaaagtgatgctgatgttgttattgcaaaactggatgcaactgccaacgatatcccaagtgaaacctttgatgtcaaggttatc

SEQ ID NO: 176858 - DNA, 256 bp, Glycine max
attctcgtttctatcatacccacttcgccttctccgtttctcactagactcacatcgcgcctccatttcgctgcattccctctgcgttctccaacgaggaaactcatgtcgcacactcttgcacgtggcactcttggtctcacacacccttctaatatcgatacccccaagatctcttttggtgctaaggatgttgatgtgacggaatggaaaggggacattctggcagtgggtgttacggaaaaagtttggctag

SEQ ID NO: 176859 - DNA, 257 bp, Glycine max
cataactagaaacagtgtgatgaaaatgaaggtccttgtcttcttcgttgctacaattttcgtagcatggcaatgccatgcgtacgatatgttccctctccgaatgaacactggctatggtgcccgtactccggaggtgaaatgcgcaagttggaggcttgctgtggaagcacacaacatctttggctttgagaccattcctgaagagtgcgttgaagcaacaaaggaatacatccatggcgaacaattagatcaga

SEQ ID NO: 176860 - DNA, 258 bp, Glycine max
tagaaacagtgtgatgaaatgaaggtccttgttttcttcgttgctacaattttcgtagcataccaatgccatgcgtacgatatgttccctctccgaatgaacactggctatggtgcccgtactccggaggtgaaatgcgccagttggaggcttgctgtggaaccacacaacatctttggctttgagaccactcctgaagagtgcgttgaagcaacaaaggaatacatccatggcgaacaatatagatcaactccaaaa

SEQ ID NO: 176861 - DNA, 257 bp, Glycine max
gctagggtccccaagaaggtcttgcagttcgctggaatcgatgacgtcttcacttcctccaggggttccaccaaaaccctcggaaatttcgtcaaggctacttttgactgtttgctgaaaacctacggttttctaacacctgaattctggaaggagactcggttctccaaatcaccattccaagagtacactgatctattggcaaagccaacagggaaggcccttatcctcgaggaggaaagggtggagcttgagtt

SEQ ID NO: 176862 - DNA, 254 bp, Glycine max
ccgtgaactcgaagtgatccactccaggtgggccatgctcggagccttgggctgcgtcttcccggagttgctgtcccgcaacggggtgaagttcggagaagccgtgtggttcaaggccgggtcccagatcttcagcgagggtgggctcgactacttgggcaacccaagcctgatccacgcccagagcatcctcgccatctgggccacacaagttatcctaatgggtgccgttgaaggttaccgtatgctggtgg

SEQ ID NO: 176863 - DNA, 255 bp, Glycine max
cgagtatccgaattcttacgtgttcgagatcgacatgccgggtttgaaatctggggacataaagcttcaagttgaagacgacaacctgcttctgatatgtggggaacgaaagagggacgaagagaaagaaggggcgaagtatttgagaatggagagaagggttgggaagttaatgcgcaagtttgtgctgcctgagaatgccaacactgatgcaatctctgctgtgtgccaagatggtgtgcttaggtaaccgtg

SEQ ID NO: 176864 - DNA, 232 bp, Glycine max
  unsure (1)..(232): unsure at all n locations
gcattttcagaggaacaatggcgggtagggtctcgacgtgcttcttcttcgtgtgtgctacttctcttcgtcttcgttgtcagatgtctgttgaggaatcatcggagaaagagttcgtactcacattggatcactctaactttcccganactgtnagcacggacgatttcatcgtcgtcgagttccacgctccatggtgtccccgatgtaagatgcttgctcccgagtatga

SEQ ID NO: 176865 - DNA, 256 bp, Glycine max
aaccctactcattctccatacctcaacgaagacgttaaagagacggcaacactttgctgtccgccttgaccgagcagagcgtcgtcttggccctcgattttcccctaaagtactctcagtcacaacagacaccgtcgtcgtcgtcgtcgtcatcaatggcaccgaagcagaccaaggctgagaagaagatcgcttacgatgcgaactgtgcgacctaatggaggagtacggccagatcctcgttgtgactccgata

SEQ ID NO: 176866 - DNA, 256 bp, Glycine max
cttcctcaccgattgctagaatggaatttcgatgctcagtcatctcttttaccattctcttctctcttgctcttgcaggagagagccatgtccatgcatcgctacctgaggaagattattgggaagctgtttggccaaacactcccattcccactgcactgcgagagcttctaaagcctctccctgcaggtgttgaaatcgacgaactccctaagcaaattgatgatacacagtacccaaaaacattcttctataa

SEQ ID NO: 176867 - DNA, 259 bp, Glycine max
cttccttgagcatccagcagcaacaaacaagaggggtttgccttgtgccgtttgtgttgttttcgggacgaagaagaagatggtgtcaggttctggaatctgcgcaaagcgggtggtggtggacgcgcgccaccacatgctgggtcgtctagcctccatcgtggcgaaggagcttctgaacggccagaaagtggtggtcgttcgctgtgaagagatttgcatctcgggcgggctggtgaggcagaagatgaatacttga

SEQ ID NO: 176868 - DNA, 255 bp, Glycine max
aacttctgctacttcctactccaaccgcacttctgctccgcaattatcatgggcaaggtcaagatcggaatcaacggatttggaagaattggccgtttggtagccagagtggctctgcagagagacgatgttgaactcgttgccgttaacgaccctttcatcaccaccgattacatgacatacatgtttaaatacgacagtgttcatggacactggaagcatcacgatgtcaccgttaaggacgagagacccttc

SEQ ID NO: 176869 - DNA, 254 bp, Glycine max
aaggctggcttccacacatgggagcagttaattctcaaggatccacatcttatcactccaaatgcactttcatacaaatcagcaatgagagagaatctgttgaggcagggatacagaattgttggaatcattggagaccaatggagcgatctgcttggagaccacagaggcgaaagcaggacctttaagattcctaatcccatgtactacattgagtagtaccttcacctctctcaacaatctagtagagtttg

SEQ ID NO: 176870 - DNA, 251 bp, Glycine max
acggatctcagttcttcatttgcacggagaagacagagttgctcgacggaaagcatgtcgtgttcggacaggtcatcgaaagattgaacgttttcaaggacatcgagaaggtcggatccagctccggcaggacctccaagcccgttgtcatcgccaactgagctcaactctcttagtcgacgttgatccgcggctttaatctctgaatctgtgttatttctttcggtgtcgtttttgccttaattttctct

SEQ ID NO: 176871 - DNA, 252 bp, Glycine max
gttatcttctagtatttttcaagtaacttttggtttcaaacctaggaagttggaagtcatggcagcaacattgatggcagcaacaagttctggcactcttaaagcaactcctttcctaggccaaggcaagggtgccaatgccaatgctcttagggatgttgtttccatgggaactgggaagtacaccatgggcaatgatttgtggtatggaccagacagagtgaaatacttgggacccttttcgctcagacc

SEQ ID NO: 176872 - DNA, 250 bp, Glycine max
atttggttattcttatttgtgtgctcagtatggtgggaatcttttcgttgattacagggagaccgggatgtagtggattcggatcttcctcaactgctgaacaggttatcgaaggaattgatgccagcaacctcactgcaatcatcacaggaggagccagtggcatagggttggagacagcacgtgttctggcaattcgaaaggcccatgtcataattgctgccagaaacatggagtctgcaaggaagcg

SEQ ID NO: 176873 - DNA, 254 bp, Glycine max
ctttcggccagtggacagatgctagcagaaaaacatataatctagtggatgccctgactagacacactgcacaggtgtatccaaaatcctggactactatattggtgtcttttgataaccaaggcatgtggaacttgaggtctgcaatatgggaaaggcaatatcttcggctacagttctatcttagagtgtggaatgcacagaaaagccttgctaatgaatatgacattcccaataatgttctgctttgtggc

SEQ ID NO: 176874 - DNA, 254 bp, Glycine max
attttggctttggctttccaatcctcctgatttcctcttctacgattctaaaatatcgcgaatggcatccaagagaatactgaaggagctcaaggacttacagagagatccaccaacttcatgcagtgcaggccctgtgggcgaggacatgttccattggcaagcaaccatcattggtccaaatgacagtccctatgctggtggtgttttccttgtgaccatccatttccctcccgattatcccttcaaacctc

SEQ ID NO: 176875 - DNA, 259 bp, Glycine max
attgtccagcttctctcaaagcgccataagaacactgcttcctcctggctcagaaacatcttccatgactgtgctgttcagagttgtgatgcttcactgttgctggactccacaagaaggagcttgtctgagaaggaaacagatagaagctttgggttgagaaatttcaggtacattgagaccatcaaagaagctttggtaagggaatgcccaggagttgtttcctgtgctgatatcctcgttctctctgcagagatgg

SEQ ID NO: 176876 - DNA, 252 bp, Glycine max
caggaataaaggcagctctattttgagccaagtgaaacatctatcttcctgtctaagttctttgaataaaagtctgaatgtgtcatctctatgctacaatgtttatgattcagatcaggttgattctatttgtttgatggccatcttgcacgtcctgatcttattgtgttcaagtgacggacaaatccaaacaggaaagagagatttgaaatgtaaatgccaagtaaatgtgaaaagtacagtcatttttag

SEQ ID NO: 176877 - DNA, 249 bp, Glycine max
caatcctctgatagcgttcggtttcaagtagacaagatgtttcctagcgggcaaaagggtcagaagctacaggggattctcgtggttatgcagaagaactgtgttgcatatcaacagcatcaccagtgttggagggaccgttgaccaaggcttaggcttcatacggcagtgcagtcgatgcacttacttccccagctagccaaatctccagccagctgattagtgctaccaaggctgatggtgcgaacg

SEQ ID NO: 176878 - DNA, 251 bp, Glycine max
ggtgaggctgctgctgaagaaactaagagcagtaaccatgtgcagagaaaacttgagaaacgccagaatcgatctaatcttgactcccacattgaagagcaatttggtggtgggcgattgttcgcatgtatttcttctcgtctaggacaatgtggcagggctgatgggtacattcttgaaggtaaggagctggagttttacatgaagaaactccagaggaagaagggaaagggtgctgcttaatttagtgt

SEQ ID NO: 176879 - DNA, 253 bp, Glycine max
gcatttcagcagagtgattctgttcactacaatgccatcatcactatcctctttcctccatatggttcctattctctcccttcttgtactctcatgtgtgatttgttctagtagtgctcagggaccaccttcacctggctactaccccagttccaaaattagtcctgttagtttttatcaagggtttagaaacctatggggacctcagcatcagaggctagaccaaggctcattgacaatctggcttgactct

SEQ ID NO: 176880 - DNA, 254 bp, Glycine max
cggagagagctcgtaagaagaaagaagaggaagagaagagaatggagagggaaagagaaaaggagagaattcgcattggcaaggagttgctggaagcaaagaggattgaagctgacaatgagaggaaacggttgttggccttgagaaaagcagagaaagaggaagagaaaagtgctagggagaaaatcaagcaaaagttggaagaagacaaggcggaaagaaggcggagacttggattgcctccaaggaaccct

SEQ ID NO: 176881 - DNA, 239 bp, Glycine max
tagaacagtggccctaatgaagcccatgtgtcttcgcagtcacaagtttggcagcatggcaatgctatgcgtacgacatgttccctctccgaatgaatactggctatggcgcccgtactcaggaggtgaaattgcgcaagttggaggcttgctgtggaagcacacaacatctttggctttgagaccattcctgaagagtgcgtcggaagcaacaaaggaatacatccatggcgaacaat

SEQ ID NO: 176882 - DNA, 253 bp, Glycine max
ccacaagggtatctccatcttgtggacttggatctagctgagatggatattaagaaagcccttgagattgagccagacaacagggatgcaaagatggagtacaaaattttgaagcagaaagtgagagaatacaacaagaaggacgcacaattttacagcagcatatttgcaaaaatgaataaactagagcaagcaagaacagcaacagcaaagcaggagcctgtgccaatgactattgacagcgagttaaatt

SEQ ID NO: 176883 - DNA, 252 bp, Glycine max
cgaaaacgcgtcttcataaacgccgcccaaaacctctcatacccttttattcattccattcgtttctagggccttcttttctctgccgagaaaatgagagagtgcatctcgatccacattggccaggccggtatccaggttggaaacgcctgctgggaactctattgccttgaacacggcattcagcccgatggacagatgccgagtgacaagaccgttggcggaggagacgacgccttcaaccatttttca

SEQ ID NO: 176884 - DNA, 253 bp, Glycine max
cgcggcaaagaagatgccgccaacaactctgcccgtggccatcataccattgggaaagagattgttgatctgtgcttggaccgcatcagaaagcttgctgacaattgcactggactccaagggtttttggtcttcaatgccgttcgtggaggaactggttctggacttggttcccttctcttggagcgtctctccgttgattatggcaagaaatcaaagcttggtttcacagtctacccctctcctaggtgtc

SEQ ID NO: 176885 - DNA, 258 bp, Glycine max
  unsure (1)..(258): unsure at all n locations
aagagtgtgaactgcaaacggcttctccagcctagtttgttctcagatcttcttcttccatggaccagtacgactgaccgtngagaagataggcgagggaacatacggcgtcgtttacaaggctcgcgaccgcgccaccaatgagacaatcgctctgaagaagattcgcctcgagcaggaggacgaaggcgttcccagcaccgccattcgcgagatttctcttctcaaagagatgcagcataggaacattgttaggtt

SEQ ID NO: 176886 - DNA, 259 bp, Glycine max
ctagctcttcctctaaaccctaaacaactcttgctcttcttccttcgctcgttgttctccctcgcgtagatcgacaatggcggatacagagacgtttgctttccatgctgagatcagccagctcctcagtctcatcatcaacaccttctactccaacaaggagattttccttcgtgaactcatcagcaacgcctccgatgctttggacaagattcgatttgagagtttgacagataagagcaagctcgatgctagccag

SEQ ID NO: 176887 - DNA, 294 bp, Glycine max
gctcaatatcatctccattctctctctcttactcactcaatcccacgccaaaatacccggcgtctattccggtgggccatggcaaagcgctcacgccactttctacggtggcagcgacgcctcaggaactatgggaggagcgtgtgggtacgggaacctatattcccaaggctacggtgtgaacactgcggcactaagcactgctttgttcaacaacggtttcagctgtggagcgtgtttcgaaatcaaatgcacggatgacccgaaatggtgcaacccggtaacccttccatc

SEQ ID NO: 176888 - DNA, 293 bp, Glycine max
ccaagagcaggctgctcgtgcattggctaacttagctgcccatggagatagtaacagtaacaatgccgctgttggacaagaagcaggtgctcttgaggctctcgttcaacttactcgctctccccatgagggtgtcaggcaagaggctgctggtgcactttggaatttgtcatttgacgatagaaatcgagaggccattgctgcagctggagccgttcaggccttggttgctcttgcccaagcttgtgctaatgcctcccctggacttcaagagagggctgctggtgctctgt

SEQ ID NO: 176889 - DNA, 293 bp, Glycine max
cgttgatcgagataactagaaacagtgtgatgaaaatgaaggtccttgttttcttcgttgctacaatcttcgtagcatggcaatgccatgcgtacgatatgttccctctccgaatgaacactggctatggtgcccgtactccggaggtgaaatgcgcaagttggaggcttgctgtggaagcacacaacatcactggctttgagaccattcctgaagagtgcgttgaagcaacaaaggaatacatccatggcgaacaatatagatcagactccaaaacagttaacccacaagct

SEQ ID NO: 176890 - DNA, 224 bp, Glycine max
  unsure (1)..(224): unsure at all n locations
cttctgagagtgtctgcccgactctcgcatagatgtttcctttcgggcaaaagggtcacaagataaaggggactatggtggttatgcagaagaatgtgttggacatccacagcattgncagtgttggagggattcttgaccagggcttatgcttcataggccgtgcagtcgatgcacttacttttgcagccaccaagatctccagccagttgatttagtgctac

SEQ ID NO: 176891 - DNA, 280 bp, Glycine max
ctggtgtgagatctgtacccggctagccattgatgtggaaaagtccaagcttcaaagatgagtaagcttcagagtgatgctcttagagaagctatctcaggaatcatgactgattccaaggaaaagaacaggaaatttgtggagaccattgaactccaaattgggctgaaaaactatgatccccagaaggacaagcgttgtagtggctctgttaagttggctcacattcctcgccccaagatgaagatttgtatgcttggagatgcccacacgttgaaga

SEQ ID NO: 176892 - DNA, 289 bp, Glycine max
cagagagagagggatttggaactttggatatctatagcgaaagcgggacaccaccaaaaaccgaactgttcccagatctctctctcactcttccaacaatcgaaatccaaaaccctaccgacaccacactcaatcgaaattcttcattctcttctcatcgatggggcagaagtctctgatctacgcgttcgtgtcgcggggaacagtgattctcgcggagtacaccgaattcagcggaaacttcaactccatcgccttccagtgccttcagaagctccctgccaccaac

SEQ ID NO: 176893 - DNA, 295 bp, Glycine max
cccgaagcagccatggggatcgatctcaaggccggaggtaagagcaaaaagaccaaaagaacagcacccaagtccaatgatatctatctcaagctcttggtcaagctttatcgcttccttgttcggagaactggcagcaacttcaatgctgttatacttaagagattgttcatgagcaaggttaacaaacccccattgtctttgtcaaggttgattaagtatacgaaggggaaggaagataagattgcagtggtggtggggtctataaccgatgatattcgtgtttatgaagttc

SEQ ID NO: 176894 - DNA, 290 bp, Glycine max
caggagtgggaagttggcgagtggagcaattgcgaatctggtggacgaggttggaggtgctgtcatccatgaagagggtctccccatgaatgtttccgttgacatgtctatttcttttctctcatctgtgagagttggcgatgaactagaaattacttctaggttgttaggaaggaaaggaggttattctgggactattgttcttcttaaaaacaaagcaactggagaattgatagcggaaggtcgtcattcactatttggtagacataacagcaaaatgtaattcgata

SEQ ID NO: 176895 - DNA, 285 bp, Glycine max
attttagaagaataccccctcttttgctgcatcagaggagttgtaaattaagagcatggctgcacaagctcttgtatcatcatcttctcttaccttctcagcggaggctgcaagacaaagtcttggaccaagatcactccaatctccatttggcttctccagaaaagcctcctttcttgttaaggcagctgctaccccccctgtcaagcaaggatcagacagacctttgtggtttgcatcaaagcaaagtctttcttacttggatggcagccttcgggtgactat

SEQ ID NO: 176896 - DNA, 288 bp, Glycine max
agactttgttgtgagctataagctagtttatcgtgaggagaatatgaagttgtgtgtctctcctgttgctgcagtagttttcgtagcatggccatgccatggcgcaggctaccaaaggttccctctccgaatgacaactggctatggtgagcgttcttcggaggtaaaatgcgcaagtcttaggcttgctgtggaagcacacaacatccgagcccttataaccattcgcgaagagtgcgttgaaccagcacaggactacattaatggccgacatctagatcagactct

SEQ ID NO: 176897 - DNA, 289 bp, Glycine max
gttctctgtcactgctgcgtctctcgtaaccatgcctaagcaaatccacgagattaaggatttccttctcactgctagaatgaaggacgcaaggtcggtgaagatcaagaggagcagagatgtggttaagttcaaggtcagatgctcgaagtacctctacacactttgtgtgtttgacccagagaaagctgataaattgaagcaatctcttcctccaggtttgagtgttcaagacctgtaaaggtacagggcgagagaccaagaagaagcaattcattgattcttctga

SEQ ID NO: 176898 - DNA, 284 bp, Glycine max
ctgaaaagaagggtttgtaagacaaagatcaaagacgcgcaagacgagtggtagggtttctgggaaggtgaagtggttcaacgatcagaaggggtttggattcataacccctgacgatggcagcgaggaactcttcgttcaccaatctcagatcaaatctgacggtttccgaagcctagctgaaggagagtccgttgagttcgctattgaatctgaatctgacggacgcgccaaggctgctgatgtcactggcgccgacggcggcacgtccagggaaccagacg

SEQ ID NO: 176899 - DNA, 284 bp, Glycine max
cggaatgatgccatacttctgggtgctgagacttcacgtgggctgtaccctattgagactatttctactgttggcagaatttgttctgaggctgagaaagttttcaatcaagacctttattttaagaggacagtcaagtatgttggagaacccatgacccacttggaatctattgcatcctctgcggtacgggctgcaattaaggtgaaagcatctattataatttgtttcacttcatcaggaagggctgcaagattgatcgcaaagtataggccaacaatgcc

SEQ ID NO: 176900 - DNA, 289 bp, Glycine max
cacggcagtcaagttattagaatctgtgttgtgttgtgttgtgttgagcagagagagagagtgagggataagaagagaatagggttagggttagggttagggttagggtttgattgaggatgccgaagaacaagggaaagggaggtaagaacaggcagaggggaaagaacgaggcggacgacgagaagcgggagctggtgttcaaggaggacgggcaggagtacgcgcaggtgctccggatgctggggaacgggcggtgcgaggcgatgtgcatcgacgggacgaagag

SEQ ID NO: 176901 - DNA, 294 bp, Glycine max
cctgaagtgaacacaatggatagaagggttggctatgaggtgctggtggctttggtgacccttttggttttctcatttgcttgtgccactgcttcatcatcaggaccaacaaaactccaccaccgtgtggagcaattcaggaggaatctgcttgctaatggccttggtagaactcctccaatggggtggaacagttggaatcatttcagctgtcaaattaacgaaaaaatgatcagagaaactgctgatgcccttgtttctactggtctgtcgagcttggatacacttatgtca

SEQ ID NO: 176902 - DNA, 291 bp, Glycine max
ctcgaagcaccggaactctcacaggctgataagaaatatcaaccatcatcccaggccattgacaaacctgcagatgatggctacaactggcgtaagtatgggcagaagcaggttaagggtagtgagtatccacgaagctattacaagtgcacacatctgaattgtgttgtgaagaaaaaagttgagcctgcccctgatggtcacataactgaaattatctataaaggccagcataaccatgaaaagcctcaggcaaataggcgtgccaaagataatagtgattcaaatgga

SEQ ID NO: 176903 - DNA, 287 bp, Glycine max
cagataactagaaacagtgtgatgaaaatgaaggtccttgtcttcttcgttgctacaattttcgtagcatggcaatgccatgcgtacgatatgttccctctccgaatgaacactggctatggtgcccgtattccggaggtgaaatgcgcaagttggaggcttgctgtggaagcacacaacatctttggctttgagaccattcctgaagagtgcgttgaagcaacaaaggaatacatccatggcgaacaatatagatcagactccaaaacagttaaccaacaagctta

SEQ ID NO: 176904 - DNA, 88 bp, Glycine max
aaaaggctcaatgctcctaagcattggatgcttgacaaactgggtggtgcatttgcgcctaaaccctcatctggaccacacaaatcga

SEQ ID NO: 176905 - DNA, 280 bp, Glycine max
caaagatgaagatgatccacgttcttttcctctttgctcttgtctcgttcacttcccatgcttctgtcaatgatttctgtgtagcagacctaaaaggtccagatagcccttcaggctatcagtgcaagccacctaacacagtcacagtggatgactttgtgttctctggctttgtagctggaaacaccacaaacactttcaatgctgcattaacctccgcatttgttactgattttccaggtgtgaatggtcttggtgtatctgtggcacggttagacat

SEQ ID NO: 176906 - DNA, 308 bp, Glycine max
cgtagtaagctcggggtgtaccattgccacaccgactcctctgagctggctctttatctatccggagggaatttataagctcatgacatacataagggacaactacaataatccaccagtgtacattaccgaaaatggcgttgcggaatcaaagaatgactcacttgcaatcaatgaagcccgaaaggatggtattcgaattagataccatgatggccatctcaaatccctgcttcatgcgatcagagatagagttaatgtgaagggctactatatatggtcatcttcagatagctttgaatgggatg

SEQ ID NO: 176907 - DNA, 284 bp, Glycine max
gataaccacagatccatctactccaagtccaaaatcagtcactgtcccacttcttgggagtgcccaagaatctgaagtcgatattgatggccatgatattcatcgtccaagcagcatccgtgctttactttccactccaacacacactgttcatcgcttgtggcgtaagtttgatgatgaattcatgcgtcctgtttttggtggcaggggttttgttcctatagaacctggctcaccaactgaacgtaatggccatcaatggcgttgagaaaaaagccaagaaa

SEQ ID NO: 176908 - DNA, 217 bp, Glycine max
attcgcttcgtcaagtttcacagccaagtcgtaaaagggtttcaagggatggataacatgcagatcttctggcaatttggtgatgaactccgtgggcactcaaaagcatctgaggatcacaagtcgttaatgtgttgcctcgaaactggtcgaacagacaagtttgaagggggagcgtgtgaacaaccttgatctttcaaagggatccattgaaaca

SEQ ID NO: 176909 - DNA, 284 bp, Glycine max
atggcttcctccaccgctttcttcacacccctccatgatttcactcaagccagaacaaccccatcaccccctttgcctttcatcaaatcctcctttgcttcctccaagtcaaccttttttcaccctgccctttccctacaaacctcttccaactttcccaggctttttggaaagcctaagtttttctctgttcatgcaagggctgccacagaaaaaaccatgtatgattttactgtcaaggatattgacagaaaggatgtttctcttagcaagtttaaggggaa

SEQ ID NO: 176910 - DNA, 288 bp, Glycine max
ctgagctataagctagtttatcgtgaggagaatatgaagttgtttgtcttctttgttgctgcagtagttttggtagcatggccatgccatggcgcaggctaccaaaggttccctctccgaatgaaaactggctatggtgagcgttcttcggaggtaaaatgcgcaagtcttaggcttgctgtggaagcacacaacatccgagacactaaaaccattcctgaagagtgcgttgcaccaacaaaggactacattaatggcgaacaatttagatcagactctaaaacagtt

SEQ ID NO: 176911 - DNA, 290 bp, Glycine max
ctcccttgttcgtttcactctcacaatggactccctctctctcttctgcaccggaccccttctcgccggcggcctctactggttcgtctgccttctgggcgccgccgagcagaagggcaaacgcgccaccgatctatccggcggctccatctccgccgagaaagtccaagacaactacaagccgtactggtccttcttccgccgccccaaggagatcgagaccgccgacaaagttcccgacttcgtcgacaccttctacaatctagtcaccgacatctacgagtggtgct

SEQ ID NO: 176912 - DNA, 288 bp, Glycine max
agctagctaggttgaaaatagtttggttttgtagtaagtgaggtgaggtgccaaaatggtgaagataactcttggtactttcgatgactcttttggtgttgcctctcttaaggcttatttggcagagttccatgcaactctgattttcgtgttcgctggtgttggttcagccatcgcttacaacgagcttacaaaagatgcagccttggatccaacggggctggtggcagtagctgtggcccatgcatttgcactgtttgtaggtgtctccgtcgcagccaacatctc

SEQ ID NO: 176913 - DNA, 186 bp, Glycine max
caaaaatcacagccatggccacctccaacttctctattgttctctccgtctccctagccttctgtatggtgctacttaccaaggcacactcgaccgataccgtttctttcaccttcaaccagttccacccagtccaaccaaacgttatgctacataaagatgctagtatttcatcctctggggtgt

SEQ ID NO: 176914 - DNA, 281 bp, Glycine max
caagattgagtaataagatggggttggacgccgcagtggaggcagcggcggaattccttaacaaggcagtgaaaccagtgctggtaggtggtcctaaactgagggtggcaacagcatctgatgcctttgtcgaactggctgatgcgtgtggttatgcgcgtgctgcgatgccgtcggctaaagggcaggttccagagcaccatccgcattttatcggaacttattggggtgctgtgagcactgccttctgtgctgagattgtggagtctgcggatgcatac

SEQ ID NO: 176915 - DNA, 252 bp, Glycine max
ctgtactcgatcaaacacaaaatggaaaagaatgtggggattctcgccattgacatctacttccctcacgcttgcgttcagcaggaagcattggagactcatgatggtgccagtaaagggaagtataccattggacttggccaagactgcatgtcattctgtaccgaagtagaagatgtcatctcaatgagtttgacagtggttacttctcttcttgagaagtatgggattgatcctatacaaatcggtcgt

SEQ ID NO: 176916 - DNA, 285 bp, Glycine max
ctgactcgttcttcttcgtcgttatcctcttcttttgtcgtttgtgtgtttgtcttttctctcacctgaaaatgtcttgctgcggtggtaactgtcgttgcggaagcgcctgcaagtgcggcaacggctgcggaggctgcaagatgtacccagacttgagctacaccgagtcaaccaccaccgagaccttggtcatgggagtggcaccagttaaggctcaattcgagagtgctgaaatgggtgttcccgctgagaacgatggctgcaaatgtggagctaactgca

SEQ ID NO: 176917 - DNA, 284 bp, Glycine max
cgcagctgtagaggagggcatagtaccatgtggtggtgttgctcttctctatgcatcaactgagttggataagcttcaaactgctaactttgatcaaaagataggggtccagatcatccaaaatgctttgaagactcctgtgcacacaattgcttcaaatgccggagttgagggtgctgtcgttgttggtaaactattggaacagaatgatcctgatcttggatatgatgcagccaaaggtgaatatgtcgatatggttaaagctggaatcattgatccattga

SEQ ID NO: 176918 - DNA, 282 bp, Glycine max
acggatctcagttcttcatttgcacggagaagacagagtggctcgacggaaagcatgtcgtgttcggacaggtcatcgaaggattgaacgttgtcaaggacatcgagaaggtcggatccagctccggcaggacctccaagcccgttgtcatcgccaactgccgtcaactctcttagacgacgttgacccgcggctttaatctctgaatctgtgttatttctttcggtgtcgtttttgcctttttttgctcttcttttctttctcgtgtcgtcgtttagggga

SEQ ID NO: 176919 - DNA, 288 bp, Glycine max
atttggttattctctatttgtgtgctcagtatggtgggaatcttttcgttgattacagggagaccgggatgtagtggattcggatcttcctcaactgctgaacaggttaccgaaggaattgatgccagcaacctcactgcaatcatcacacgaggagccagtggcatagggttggagacagcacgtgttctggcaattcgaaaggcccatgtcataattgctgccagaaacatggagtctgcaaaggaagcgaaacaactcatacttgaggaagacgagtcagctcgt

SEQ ID NO: 176920 - DNA, 287 bp, Glycine max
caggagtgttatcggcgaaggaggcattcgagaagcttgaaaaggtgggagaagggacatatgggaaggtgtacagagcaagagagaaggcaactgggaagatcgtggctctgaagaagactcgtctccacgaggacgaagaaggtgtccctcccaccactctccgtgaggtttccattctgcgaatgctctctcgcgatccccatgtcggtaggttaatggatgtcagaccaggtcagaacaagggagggaagacagtgctctacttggtatttgagtacatggac

SEQ ID NO: 176921 - DNA, 284 bp, Glycine max
tgaatctcaagattctaagagagattttcctgctctttgaagaagggtgtttgcttgattttggagatgtcgctgctctcagatctcatcaaccttaacctctcagacactactgagaaggtgatcgcagagtacatatggatcggtggatcaggaatggacctgaggagcaaagcaaggactctcccaggaccagttagcgagccttcacagcttcccaagtggaactatgatggttccagcacaggccaagcttctggagaagacagtgaaatgattatata

SEQ ID NO: 176922 - DNA, 266 bp, Glycine max
ctccgtgctatagcgcaaggctgttctgagtacaatattactgttgttgttaagcgagaggattgtataaaggctttacgagctgtccattccagattttatctctcaagaaccaccatagcaatgggcattattggacctggattaattgggagcacactacttgaccagctaaaggatcaggcctcaaccctgaaagaagaattcaacattgatttgcgtgtaatgggcatacttggttcaaagtcaatgcttcttagtgatgt

SEQ ID NO: 176923 - DNA, 281 bp, Glycine max
cggctcgaggtggcaataagaagtacagtgacaagaagaaagcgatgggcagaactgaatccactgtacccatatttaatatggaagacatagaggagggtgttgaaggttatgatgatgaaaggacactacttatgtctcaaaagagcttggagaagcgttttggtcagtctccagtttttattgctgccactttcatggagcagggtggcattccaccttcaacaaaccccccaactcttcttaaggaagcgatccatgtcatcagctgtggttacgaa

SEQ ID NO: 176924 - DNA, 276 bp, Glycine max
ctcactttctcgcagaaacgtattgtttttctctctttccgcggcctagatctgagcagtttggaaaccctaactgctctcaccaacgacatcaccactctctccgatcaactacctctttcgtcgccctaagtcatggcaggaattgcacccgagggatcacagtttgatgctcgtcaatatgataccaagacgaatgagctgcttacgtccgatggtcaggatttcttcacatcctacgatgaggtttatgacagttttgatgctatgggcttg

SEQ ID NO: 176925 - DNA, 282 bp, Glycine max
cggctcgagtagaaacagtgtgatgaaaatgaaggtccttgtcttcttcgttgctacaattttcgcagcatggcaatgccatgcgtacgatatgttccctctccgaatgaacactggctatggtgcccgtactccggaggtgaaatgcgcaagtcggaggcttgctgtggaagcacacaacctctttggctttgagaccattcctgaagactgcgttgaagcaacaaaggaatacatccatggcgaacaatatagatcagactccagaacagttaaccaaca

SEQ ID NO: 176926 - DNA, 288 bp, Glycine max
cacaaatcacagccatggccagctccaacttctctattgttctctccgtctcactagcctgctttttggtgctacttaccaaggcacactcgaccgataccgtttctttcaccttcaacaagttcaagccagtccaaccaaacattatgctccagaaagatgctagtatttcatcctctggggtgttacaactcaccacagttggcatcaacggcgtcgccacctcgggatctctcggtcgtgccctttacgctgccgcaatcgagatttgggacagcgaaaccggca

SEQ ID NO: 176927 - DNA, 288 bp, Glycine max
ctttttcccagtccaagtagcctcgaattcgtgccactctcttcaaaatggccgttagcttctcaaatctccacacagaatcaggtctcaagtccctcgacgacttcctctctgggaaagtctacgtttctggggatcagttcacataggacgacatcaaagtgtatgttgctgttttggagaagccatgtgactcttttcccaatgctgccaagtggtacgaggttgtctcatctcagcttgctgcaagcttccccggcaatgctcagggggtgagattcagtggca

SEQ ID NO: 176928 - DNA, 285 bp, Glycine max
cgaaattgtgaaggaagtctcttcctacttgaagaaggttggctacaacccagacaagattccatttgtgcccatctctggtttcgagggtgacaacatgattgagaggtccaccaaccttgactggtacaagggaccaactctccttgaggctcttgaccaaatcaatgagcccaagaggccctcagacaagccactcaggcttccattgcaggatgtctacaaaattggtggtattggtaccgtgccagtgggacgtgttgagactggtgtcgtgaagcccgg

SEQ ID NO: 176929 - DNA, 285 bp, Glycine max
gaagaacaagtagttgagaactaagaaggagaagcaaatggcttcctcaatgatctcttccccagctgttaccactgtcaaccgtgccggtgccggcatggttgctccattcactggcctcaagtccatggctggcttccccaccaggaagaccaacaatgacattacctccattgctagcaacggtggaagagtgcaatgcatgcaggtgtggccaccagttggcaagaagaagtttgagactctttcctacctgccagaccttgatgatgcacaattggcaaa

SEQ ID NO: 176930 - DNA, 281 bp, Glycine max
ctgcccttgtttccaatctctacttcatctcccagctgctccaccgtcagtacagcggaaacttcttcgtagatctattgggaaaatggaaggaatctgaatatggaggtggtcagtctgttcctgttggtggcattgcatactatatcactgcaccatccagcttagctgatatggcagccaatcctttccatgctctgttctatcttgtgtttatgctttcagcctgtgccttgttctctaaaacatggattgaagtctctggttcatctgctaaagat

SEQ ID NO: 176931 - DNA, 277 bp, Glycine max
acttaatcgatcatcacttcacttcactaatacatcatggcagacgagacccagaacaagtatgagagctctgaggttgaggtccaggatcgtggtgtttttgactttctcggtaagaaaaaggatgaagaagacaagcctcatcctcaggaggaggtcatcgccaccgagtttcaaaaagtcactgtctcagatcaaggagagaacaagcacagcctcttagaaaagcttcaccgatctgacagcagctctagctcttcaagtgaggaggaaggag

SEQ ID NO: 176932 - DNA, 276 bp, Glycine max
cgactataataggccaatggttaagtcttctcatatgtgtactactattactgcagacagaaggggctcctgtgggaatcacttttgttgaaaatgcagtggcaaaaggggctgtgtgtttggatgggagtgctccagcttaccacttccataagggatctggaccaaggattaacaactggatagttccctttgagggagtaggatagtgcaacaacgttactacttgcctttcccgtacggacactcgatctaggttcatctaatgtaaatgga

SEQ ID NO: 176933 - DNA, 276 bp, Glycine max
ctgagcgtaggttggaagcagagagatggaaggttgggacccgaatacgaagtcgacgctgacacagatccctctgctgacgacgaaggcgggtccacgagacggagcggcatggacgcagaggcttaaggaagagtacaaggctctgatagcgtacacgcagatgaacaagtccaacgacaacgattggttccgtatctccgccgccaatccggaaggcaatcgctggaccggtagatgctggtacgttcacaacctcctcaagtacgaattcga

SEQ ID NO: 176934 - DNA, 282 bp, Glycine max
cgttgcgttgattgattggtatgaagtcattgactttttttcttcttctattctcacacatacccatctactccttccctcatggctgaacaatcttccaactccatttacgatttcactgtcaaggacatcagtggaaatgatgtcagtctgaatgattacagcgggaaggttctactgattgtgaatgtcgcctctcaatgtggtttgacacaggcaaattacaaagaattgaatgtattgtacgagaagtacaagaatcagtgatttgaaatcttggca

SEQ ID NO: 176935 - DNA, 287 bp, Glycine max
ccattctccatctcagaatggagaatgcgagaataagccagtggttgatccttctggtgtgtgcgctgctgttgctgctatcagaagcttactatgtgccaatcactattgttcagaacgcggtagcaaaaggagctgtttgtttggatgggagtcaccagcttatcattttgataggggatttggatcagggattaacaactggttggttgcatttgagggaggaggatggtgcaacaatgtcactacttgccttgctcgcaagaccaatcgtttaggttcatcta

SEQ ID NO: 176936 - DNA, 291 bp, Glycine max
ccgcattgatgtggataacatgtcctatgaggagctattggctctggaagaacgcattggaaatgtgagcactggattaagtgaggagattgtatcgaaacttttgaaaaagaagaagtattcagctgaaccagattctcagcatgaggcagaaccatgctgtgtttgtcaggaggagtataaagatggggatgatttaggatcactggattgtgggcatgattaccatagagattgtattaaacagtgcgtaatgcataagaatttgtgtcccatttgtaagacaacggg

SEQ ID NO: 176937 - DNA, 288 bp, Glycine max
attctcccatttcctctcagaaccctcgatcactcccacgcgctcctatatcctctccttcaccgtcgctctctccaacgatcacaacaacatcgtcatcccatggcaaacgccgcatctggtatggcagtccatgatgactgcaagttaaggtttttggagctgaagacaaagaggacacaccgtttcatagtttttaagattgaggagcagcagaagcaggtcattgtggagaagcttggtgagccagcccaaggctatgaagatttcactgccagccttcctgct

SEQ ID NO: 176938 - DNA, 283 bp, Glycine max
cgcagaacaaaaccaaaaccagacaactgaagctggaaggcaccaagaggttggccacaagagccttctccagagtgatgctctttaccagtatattctggagaccagtgtctacccaagagaacctgaatccatgaaagaactgagagagttgacagcaaaacacccatggaacatcatgacaacctctgcagacgaagggcaattcttgaacatgctccctaagctcatcaatgccaagaacaccatggaaattggtgtctacactggatattcacttctt

SEQ ID NO: 176939 - DNA, 283 bp, Glycine max
cgacaagcttgtggtgttgaagctaaatggaggcttgggcacaactatgggttgcactggtcctaaatctgtaattgaagttcgtgatgggttgacatttctagatttaattgtgatccagattgagaatctcaattccaaatatggaagcaatgttcctttgcttttgatgaattcattcaacactcatgatgacactcaaaagattgttgaaaaataccaaaactccaatattgagattcatacttttaaccagagccagtatcctcgattggttgctgag

SEQ ID NO: 176940 - DNA, 284 bp, Glycine max
ctgatagagtgcatggaaccaagctgcatcaaggtgaagactggcatcacaacgagacagtcaagcactggacttataccatagatggtaaggttacaacatgtctggagagtattgaatccattgatgaacagagcaaaacaatcacctacaagctcttcagtggtgacattgatcataattataagaactttaagttcatctttcaagccattgatgataatgatcatggcggtactattatcaaatggaccgttgaatacgagaggcttcgtgaggaggtt

SEQ ID NO: 176941 - DNA, 282 bp, Glycine max
ccaagatgaagatgattcactttcttttcctctttgctcttgtctcgttcacttcccatgcttctgtcaatgatttctgtgtagcagacctaaaaggtccagatagcccttcaggctatcagtgcaagccacctaacacagtcacagtggatgactttgtgttctctggctttgtagctggaaacaccacaaacactttcaatgctgcattaacctccgcatttgttactgattttccaggtgtgaatggtcttggtgtatctgcggcacggttagacatag

SEQ ID NO: 176942 - DNA, 282 bp, Glycine max
taacaagctagctattagttcgattttgtagtaagtgaggtgccaatatggtgaagatagctcttggtactttggatcactcttttagcgctgcctctcttaaggcttatttcgcagagttccacgcaactctgattcccgtgttcgctggtgttggatcagccatcgcttacaacgagcttacaaaagatgcagccttggatccaacggggctggtggcagtagctgtggcacatgcatttgcactgtttgtaggtgtctccgtcgccgccaacatctcag

SEQ ID NO: 176943 - DNA, 281 bp, Glycine max
ccggcactacttcggctccatcttcttcgatctctcaaactctatcggcgcagaaccaatcctatatcactatggggaagacacatggaatgggagctgcccgcaagctgaagtctcaccgtaggagacaaaggtgggctgacaagtcatacaaaaagtctcatcttggaaatgaatggaagaagccttttgctggttcatcccatgcaaagggtattgttcttgaaaagataggtattgaggctaagcagcccaactctgccattcgaaaatgtgccagg

SEQ ID NO: 176944 - DNA, 266 bp, Glycine max
atagttaacaccatggagagggaggaagatgttaaggttggagcacagaaattctcggagaggcaagcactgggtacaggagctaagagtgacaaggactacaaggaggcaccaccagcacccttgtttgagccaggggagttaaagtcatggtctttttacagagctgggatcgcagagtttgtggccacattcttgttcctctacatcactgtcttgactgtcatgagtgtcaacagggcacccaacaagtgctcttctgttgg

SEQ ID NO: 176945 - DNA, 283 bp, Glycine max
cttccattctatcgtcactcattcccaaacgaaacgaaacgcagcgtttcttcagattcagacccaaactcatggcaaatacgttgcggttatacttgacctgcattcggaacacgctcgaggccgcaatgtgcctccagaactttccgtgtcaagaagtcgaaaggcataacaagcccgaggttgaactcaagaccagccccgaactcctgctcaatcccgttttgatatgccgaaatgaggctgaaaaatgcttaatagaaacatctatcaattcattgcg

SEQ ID NO: 176946 - DNA, 279 bp, Glycine max
cagggtttgggcttctcttcctcccttggagaaaaagaagagccaccgctgcgacgccgttcgtgcatttttgacgtgccgctgtcatgtttgggcgtggtggaccaaggaggaccgataactccaaatattatgatattctcgggatttccaaaaatgccagtgaagatgaaatcaagaaggcctatagaaaggcggctatgaagaaccatccagataagggaggagatcctgaaaagtttaaggagttaggtcaagcatatgaagttttaagtgatc

SEQ ID NO: 176947 - DNA, 282 bp, Glycine max
ctaactttcacacgcagcggcttcttcttccgttttcctgaatacgtgtgaacaatggcgacgtacgctgcgatgaaacccaccaagccagggttggaggagtcccaggaacagatccataagataaggatcaccctttcttccaagcacgtcaaaaacctcgagaaggtttgtgcggacttggttcgtggtgcaaaggacaagcgcctcagggttaagggacctgttaggatgcccactaaggttcttcacatcactaccaggaagtccccctgtggtgaa

SEQ ID NO: 176948 - DNA, 282 bp, Glycine max
cttgtctctgccaccaaggagggtctcaaacttgacgagagtgacgatgagaagcagaagcaagaggagttgaaggagaagtttgacaacctatgcaaggtgatcaaggatgttttgggtgacaaggttgagaaggttgtagtctctgaccgtgttgttgattcaccatgctgtctggtgactggagaatacggttggactgcaaacatggaaaggatcatgaaagctcaagccctaagggacaacagcatggcaggatacatgtcaagcaagaagacaatg

SEQ ID NO: 176949 - DNA, 277 bp, Glycine max
cagataactagaaacagtgtgatgaaaatgaaggtccttgttttcttcgttgctacaattttggtagcatggcaatgccatgcgtacgatatgttccctctccgaatgaacactggctatggtgcccgtactccggaggtgaaatgcgcaagttggaggcttgctgtggaagcacacaacatctttggctttgagaccattcctgaagagtgcgttgaagcaacaaaggaatacatccatggcgaacaatatagatcagactccaaaacagttaacc

SEQ ID NO: 176950 - DNA, 278 bp, Glycine max
caacaatggtgccgcaacccattttgcatctaacccttttgtcattaataatctctctgaccactctttccttggtcgatgccgccgatcccacatttggcttcacccctcttggattatctagtagctcaaacttgcaaatccaaaagccttacgacgttgcagtcaacgagcgctacagcttttcaaatggagtgcacagattttgggtatactccacggacaagcctcatatgcaaggcagcaatacgaagccacgaactgagattcgtatcgct

SEQ ID NO: 176951 - DNA, 279 bp, Glycine max
  unsure (1)..(279): unsure at all n locations
cattcataggcccaagagcaaagaaactaagaagattttgagcacaatggcatacacacaatgcatcatcccgnancatgncctcancagtccaaccagagctccatcacagcgctcagttgtgagcaccaaaccaaaccacattgtttgcaaggcacaaaagcaggttgtccaagagggtgaggacactactaacattgtctctcgcaggttggccctcactgttctcattggtgctgctgctgttggctctaaggttgcacctgctgatgctgccta

SEQ ID NO: 176952 - DNA, 281 bp, Glycine max
gctcgatctcttgggctcgtcgaattcgaaatctgatctccgacgattgatcccggtagaggctagtacactctccaatctgcaaaaatgcctctcagactcgaaatcaagcgcaacttgcgcaaagatcagagagagtgaaatgtgtggatctacatccaacagagccatggattctggctagtttatactctggaactgtctgtatctggaactaccagtctcagaccatggcaaaatcttttgaggttaccgagttaccagttagatcggccaagttt

SEQ ID NO: 176953 - DNA, 284 bp, Glycine max
aagtcatttgatgaactctgcaaggtcatcaaggacattctgggagacaaagtggagaaggttgttgtctctgacagaattgttgattccccttgctgcttggtgactggtgaatatggatggagtgcaaacatggagaggatcatgaaggcacaggctctgagagacagcagcatgagtggctacatgtctagcaagaagacgatggagatcaaccctgacaatggtatcatggaggagttgaggaagagggctgaagctgataagaatgacaagtctgttaa

SEQ ID NO: 176954 - DNA, 280 bp, Glycine max
gttggactgagtcatctagtccaaatgtgagatagcccaccagaacttcctttcagattgtctcaattagatgaaaaactcaaagttggatacaagtcaacaactgctgggaaatttactgatgctcttcgcacttttgtcaatattcttcatacaattcctttgattgttgttgagtcaaggagagatgttgatgaactgaaagaattgattatcatagtgaaagagtatgtcttgggtctgcagatggagctgaaaataagggaaattcaggacaatc

SEQ ID NO: 176955 - DNA, 278 bp, Glycine max
ctttgttgtgagctataagctagtttatcgtgaggagaatatgaagttgtttgtcttctttgttgctgcagtagttttggtagcatggccatgccatggcgcaggctaccaaaggttccctctccgaatgaaaactggctatggtgagcgttcttcggaggtaaaatgcgcaagttttaggcttgctgtggaagcacacaacatccgagcctttaaaaccattcctgaagagtgcgttcaaccaacaaaggactacattaatggcgaacaatttagat

SEQ ID NO: 176956 - DNA, 271 bp, Glycine max
gtgaggtgaggtgccaaaatggtgaagataactcttggtactttcgatgactcttttggtgttgcctctcttatggcttatttggcagagttccatgcaactctgatttccgtgttcgctggtgttggttcagccatcgcttacaacgagcttacaaaagatgcagccttggatccaacggggctggtggcagtagctgtggcccatgcatttgcactgtttgtaggtgtctccgtcgcagccaacatctcgggtggccatttgaacccag

SEQ ID NO: 176957 - DNA, 287 bp, Glycine max
ttctatcggcattggaatatatgtatcattgactaatgaacaattggatggtctaagacgagattgaacagggaatacaaaggactttgacagaatctatgattatgcagtctataatgatttgggcaatccagatggtggtgatcctcgcccaatccttggtgggtctagcatctatccctaccctcgcagggttagaacaggaagagataggaccaggacagatcccaacagtgagaaacccggcgaggtttatgttccaagagatggaaattttggtcacttga

SEQ ID NO: 176958 - DNA, 274 bp, Glycine max
aaagataagaccatcaaagtttcacttcagccttatccggtttagggtttcggtttttgacccaacctttgacgtatcgaaaccttaagtttcggatcaggtctgagcaatctggttggtagaacctttggtcttagagagtcaagttttatgtctgaattagacgatcaaattcctactgccttcgatccttttgctgatgcaaatgctgatgactcgggtgctgggtcaaaggagtatgtgcatattcgcgtacagcagcgaaatggaagga

SEQ ID NO: 176959 - DNA, 274 bp, Glycine max
gtttgttgttgttgttggaagccaaaaccctagcagccggcgagaatggcagacgttgaggttgatgtggcggcggcggcggcggcggcggctgcagggcagccaaagaagagaacgttcaagaagttcagcttcaggggggtggatctggacgcgcttctggacatgtccactgacgaactcgtgaagatgttcagtgctcgcgcacgcagaaggttccagagaggtctcaccagaaagcccatggccttgattaaaaagctccgcaaagcga

SEQ ID NO: 176960 - DNA, 273 bp, Glycine max
  unsure (1)..(273): unsure at all n locations
tcctaaaacatctcaatgggttcttcttctattacaacatcgactccaancatgaccatggctgcgatcgtgctcctgttcacggtctttgccgtttcctccgccctagacatgtcgataatctcgtacgacagcgcccacgcggacaaggccgccacgttgcgcaccgcggaggagctgatgtccatgtacgaccagtggctcgtgaagcacgggaaggtgtacaacgcgctcggcgagaaggagaagcgcttccagatcttcaaggacaac

SEQ ID NO: 176961 - DNA, 270 bp, Glycine max
aaaggctctctcacgcagtcgcagtgagtgaaaaggaaaaccctaattgcggtattctcagtgccttcgagagaaagacaaaatggcagataatcttgttctccgtggcaccatgcgcgcccacaccgacgttgtgacggcgattgccactcccatcgacaactccgacatgatcgtcaccgcctcacgcgacaaatccatcatcctctggcatcttaccaaggaggacaagacttacggtgtcccccgccgccgcctcaccggccattc

SEQ ID NO: 176962 - DNA, 266 bp, Glycine max
gtttgttgtgagctataagctagtttatcgtgaggagaatatgaagttgtttgtcttctttcttgctgcagtagtcttggtagcatggccatgccatggcgcaggctaccaaaggttccctctccgaatgaaaactggctatggtgagcgttcttcggaggtaaaatgcgcaagtcttaggcttgctgtggaagcacacaacatccgagccgttaaaaccattcctgaagagtgcgttgaaccaacaaaggactacattaatggcg

SEQ ID NO: 176963 - DNA, 272 bp, Glycine max
cctcgctccgcaccagtttcaccgcacgaatatcttgttgtttggagcgatccgagaaaaactctgtaaacatgttggtttaccaggacctccttacaggtgatgagcttctctctgactccttccgttacaaggaaattgagaatggaatgctgtgggaagttgaggggaagtgggttgttaaaggagcagttgatgtagacattggtgcaaacccttctgctgagggtggaggagaagatgagggagttgatgatgcagctgttaaggtt

SEQ ID NO: 176964 - DNA, 268 bp, Glycine max
gtgcttgtggactcaacaccagggaatcaagctgaaaaggacgctattccaaatcttacactccgaggctttacgttcattgaagcaataaaaaggcttgttgaagctgaatgccctggtgtagtctcttgtgctgatatcttgactttgactgccagagactctattcatgccactggtggaccctattggaatgttccaacaggacgaagggatgggttcatctctagagcagcagatccgttacgcagccttcctgctccttttc

SEQ ID NO: 176965 - DNA, 275 bp, Glycine max
aagagaaagtttgtggcggatggagtggtcttcgccgaactgaacgagtttctgacacgtgacttggcggaggacggttactccggcgtggaggttagggttacgccgatgcgcaccgagattatcatcagagccaccagaacccaagccgttctcggtgacaaggcaaggagaattagggaacttacctcagtggtgcagaagaggttcaaatttcccgagaacagtgtcgagctttatgctgagaaggtcaacaacagaggcctctgtgccat

SEQ ID NO: 176966 - DNA, 225 bp, Glycine max
cagctcattgaggaaagctctcttcagctactcggattactgttccttgcaaaattcgtgccaagcggggctgtgccactcaccctagaagcattgcagagagggttagaagaactaaaattagtgagcgaatgaggaagctacaagatctggtccccaacatggataagcaaacaaacacagcagacatgttggacttggctgttgagtacattaaagaccttc

SEQ ID NO: 176967 - DNA, 266 bp, Glycine max
gttgatcgagataactagaaacagtgtgatgaaaatgaaggtccttgttttcttcgttgctacaattttcgtagcatggcaatgccatgcgtacgatatgttccctctccgaatgaacactggctatggtgcccgtactccggaggtgaaatgcgcaagttggaggcttgctgtggaagcacacaacatctttggctttgagaccattcctgaagagtgcgttgaagcaacaaaggaatacatccatggcgaacaatatagatcag

SEQ ID NO: 176968 - DNA, 273 bp, Glycine max
cgatcacaaaaatggcggcgaaacttcaaatatttacgggattgccccccgcgccatttcaatcttctttctcctccactctctgcgtactcaagaagcctctcactacctccttcttcggcaccgcgcgagtgcgaagttctgaaacttagagtgatgaggattgtcaagcctacgcgtggcggaggtgctctcggtgctcgcatgaacctctttgacaggttcgccagagttgtgaagtcgtacgcaaacgctgtcttaagttcgtttgaa

SEQ ID NO: 176969 - DNA, 271 bp, Glycine max
aattgaaagtaattggtaagctgcaagatggtactttgtttttgaaaaagggccatgacgatgaaggagagctgtttgaattcaaaactgatgaggagcaagtaattgatgggcttgacagagctgtgttgactatgaagaagggtgagatagcattgttgattataggacctgaatatgcttttggttcatcagagtctcagctggaacttgcagtggttccacctaactccacagtatattacgaggttgagctagtatcatttgagaa

SEQ ID NO: 176970 - DNA, 266 bp, Glycine max
tgttactgctgctcttttctcttttcttttctctttagttctctcttcccctttctttttctttttcttcttcttctgagcttgtttaagcttttcttccattaacatattatcacaatgtgtggtattcttgctgttcttggttgttctgatgactctcgagccaaaagggtccgcgtgcttgagctctctcgcagattgaagcaccgtggccctgactggagtgggctccatcaacatggtgactgctttttggcacatcaacg

SEQ ID NO: 176971 - DNA, 267 bp, Glycine max
cacgaactcgccgagtcgaagtgagtcagtctgactcggcggcgattctgttctcctcgggaaccacggcgcgcgtgaagggcgtgctccttacgcaccgcaacttacatcgcgctgattggagggttctatcaccttagaatggtggtggatgatgatccgcacccggtgtcgttgttcacgctcccgctgttccacgtgttcgggttctctatgctggttagggccatcgccgtcggagagacgcttgtgttcatgcataggttt

SEQ ID NO: 176972 - DNA, 269 bp, Glycine max
aaaacatctccagtgggttcttcttcttctattacaacaacgtcgcccaagaccatgaccatggccatggccacgatcctgctcctgtacacggtcttcgcggtttcatcggccctagacatgtcgataatctcgtacgacaacgcccacgccgccacgtcgcgcagcacatgcgagctgatgtccatgtacgagcagtggctagtaaagcacggcaaggtgtacaacgcgctcggagagaaggagaagaggttccagatcttcaagga

SEQ ID NO: 176973 - DNA, 265 bp, Glycine max
attggagactgtttccaaggagtggggaattgaggctatgccaacctttctgttcttgaaagaaggcaagctggtggacaaggttgtgggtgccaagaaagaggagctgcaattgacaatagccaaacatgccgcaattgctgctgcttgaagtgccatatgaatatgttaagaataatagactattgtcttcgagtcagtttgcttttattactattaatctgttattgggtctgtttgcatgatttcagaacggatttagagt

SEQ ID NO: 176974 - DNA, 263 bp, Glycine max
cggttttcaatttcgattcattcgttaataattaaagatgtttgggagggcaccgaagaagagcgataatacgaggtactacgaaatcctcggcgtctcgaagaacgcttcgcaggatgatctgaagaaggcttacaagacagccgccatcaagaatcaccctgacaagggcggtgatcccgagaagtttaaagagctggcacaagcatatgaggttctgagtgaccctgagaagcgtgagatatatgatcagtatggtgaag

SEQ ID NO: 176975 - DNA, 265 bp, Glycine max
gctagtttatcgtgaggagaatatgaagttgtttgtactctttgttgctgcagtagttttggtagcatggccatgccatggcgcaggctaccaaaggttccctctccgaatgaaaactggctatggtgagcgttcttcggaggtaaaatgcgcaagttctaggcttgctgtggaagcacacaacatccgagcacttaaaaccattcctgaagagtgcgttgaaccaacaaaggactacattaatggcgaacaatttagatcagac

SEQ ID NO: 176976 - DNA, 264 bp, Glycine max
ctcttctcttgcggctagggttttagcgcagttcttctagatttaaggaagatgggtaaggaaaaggttcacatcagtattgtggtcattggccatgtcgactctgggaaatccactaccactggtcacctgatttacaagcttggaggcattgacaagcgtgctattgagaggtttgagaaggaagctgctgagatgaacaagaggtctttcaagtatgcctgggtgctggacaaacttaaggctgagcgtgaaagaggaatc

SEQ ID NO: 176977 - DNA, 265 bp, Glycine max
aacgacatatttatattcggcatagataacaccgtactctctaatatcccatactatgaaaaacatggatatggggtggaggaatttaatgaaaccttatatgatgaatgggttaacaagggcgacgcaccggcattgccagagactcttaaaaattacaacaagctgttgtctcttggcttcaagattgtattcttgtcaggaagatatcttgacaaaatggccgtaacagaagcaaacctaaagaaggctggcttccacacat

SEQ ID NO: 176978 - DNA, 265 bp, Glycine max
tgagtggccaaggaagagaaaaaggagaatacagtctcaagaactacttgcaagtcaaggctgttgttacatccttgaagaaccctgcttggctttgaacatcattagctttagatttatttgatgaaaaagattaataaataggctccaataataaagataattaaattgggtttattccattcaaagtatctgataatgatgaatatgatctattttctttttctgtttttgcccctgcattttatgggtagcgcgaaatata

SEQ ID NO: 176979 - DNA, 261 bp, Glycine max
tggatttggaccagtggatctccaaggtgaaggatggccagcaccttctcgaagaggagcttcaacttctttgcgaatatgttaaagagatccttattgaggagtcaaatgtgcagcctgtcaacagtccagtgacggtttgtggtgatattcatggtcagtttcatgatctaatgaaacttttccagactgggggtcatgtgccggagacaaattacatttttatgggagactttgttgatcggggttacaatagtcttg

SEQ ID NO: 176980 - DNA, 261 bp, Glycine max
  unsure (1)..(261): unsure at all n locations
ccgaggcgaagagaagagaaaaattaagatggaggggaaggagcaggatgtgtcgctgggagcgaacaagttcccggagagacagccgattgggacggcggcgcagagccaagacgacggcaaggactaccaggagccggcgccggcgccactggtagacccgacggagtttacgtcatggtcgcttttacagagcagggatagcagagtttgtggccacttttctgtttctatacatcacttcttaaacnggncatggga

SEQ ID NO: 176981 - DNA, 257 bp, Glycine max
gtgggacccacgcgctcctctcacactttctcccgcgcacgtgcggaatatccactagcttcgtggaggtgacggatcttgacatggttgatgctgccatagtagaagggaaaacaaaagtgctttacttcgaatctgtttccaaccccacccttacggttgcgaacatacctgaactgtgccacatggcacaccggaagggagtgacggtggtggtggacaacacgttcgcgcccatggtgctttcgccagcgcgt

SEQ ID NO: 176982 - DNA, 261 bp, Glycine max
cagcactgtaacctcacacctctccaaaatccgttccccctttctttcaaacccttttttttttcttccaacaaatcagcgatcccgacgacgtcggtggtgccggcgaatcggcggcgtgcggcggcgaaccccgccgaggatatggacttcgagacgacggagggcgtgaaggccatcgcgagcttcgaggagatggggatcaaggacgatctgctccgcggaatctaccagtacggcttcgagaagccctcagccatt

SEQ ID NO: 176983 - DNA, 266 bp, Glycine max
tcgcggaggcgccgcactccactccactccaatcaatcagatactagcgatgcggaggaagcgaaaggtagcaccgaaatctctctgtatccgccgagcccccgctgaagcaacaccaaccaaaacccgaaaatgccgctcaggaatacgaagaagaggtcgaagaggaagttgaggaagaagaggtagaggaagaggtcgaagaggaagaagaagaagaggaggacgaagaggacgaggaagaagaagaagaagaccaaaaagac

SEQ ID NO: 176984 - DNA, 265 bp, Glycine max
cgcgtcgctccgcaccagtttcaccgcacgaatatcttcttgtttggagcgatccgagaaaaactctgtaaacatgttggtttaccaggacctccttacaggtgatgagcttctctctgactccttccgttacaaggaaattgagaatggaatgctgtgggaagttgaggggaagtgggttgttaaaggagcagttgatgtagacattggtgcaaacccttctgctgagggtggaggagaagatgagggagttgatgatgcagct

SEQ ID NO: 176985 - DNA, 264 bp, Glycine max
aaacttctgttctttcaggagccaccatggccgagactcggagatctacgggcaccgttaagtggttcaacgcgcacaaaggtttcggattcataactccccaagatggaaccgatgatctcttcgtgcacttcacttccatccgatccgacggctaccgttctttgtccgacggtcagtccgttgagtttctcctcgattacggcgacgacggccgcaccatggccgtcgacgtcacctcagccgttagatctcgtcttcccg

SEQ ID NO: 176986 - DNA, 264 bp, Glycine max
tgctcatcaagtccaagaaccaacctaccttttgcaatctccattcaatggcgtcctctctcattgcgaacgcttcctctcctcttcactcctctccaggtccctccttcgccccgccgcttccgcttcccaccgctctttcaacaccaacgccatgcgccagtatgacaaccgcgccgacgaccacagcaccgacatcgatcgtcactccgaacgctctttccctagcactgcgcgccgcgacgatatcttctcagatgtgtt

SEQ ID NO: 176987 - DNA, 260 bp, Glycine max
agcagcagctttgaacgacgcagaaggttcatccaatctccgaatcctttaatcgcattgcaaccatgtcgaggagaaaggtcagagagccaaaggaggaaaacgtgactcttggcccagctgttagagatggcgaacatgtctttggcgtcgctcgcatatttgcctcctttaatgataccttcattcatgtcactgatctgtctgggagggaaacgcttgtccgcatcactggtggaatgaaggttaaggctgacaga

SEQ ID NO: 176988 - DNA, 258 bp, Glycine max
aaacaactctttcttttcttccttcgctcgttgttctccctcgcgtagatcgacaatggcggagacagagacgtttgctttccaggctgagatcaaccagctcctcagtctcatcatcaacaccttctactccaacaaggagtctttccttcgtgaactcatgagcaacgcctccgatgctttggacaagattcgatttgagagtttgacagataagagcaagctcgatgctgcgccagagttgttcattcatattat

SEQ ID NO: 176989 - DNA, 239 bp, Glycine max
caaattttgcaatctcagaaccattgttgtattgttgccggcagtggtgtggcgactttgttgttttatttagagtaggtatacgccatgatttaataatttaagtctgagagctttttgttgctaaagagattcaacgatcttataaccgggtttaggttttggccattccattaataatggtcccttttaactgtgtatggtttcacgtaatgtaattgcagggtgttgtacccttc

SEQ ID NO: 176990 - DNA, 260 bp, Glycine max
agaatatgttgctgtggagaatattgaaaacaaatacttacagtgcccccttataacatcgatttgggtctatggaaacagttttgaatctttcttggtggcagtggtggtccctgaaagaaaggcccttgaggattgggcagtgaagcataattctacagatgatttcaaatctttatgtgaaaatccaaaggcaagaaaatacattttggatgagctcaacaacactggtcagaaacaccaacttagaggttttgagc

SEQ ID NO: 176991 - DNA, 257 bp, Glycine max
gtttgttgttgtaactcgttcttcttcctttgttgttctgtgtctgtgcttgtactttctctcacctgaaaatgtcttgctgcggtggtaactgtggttgcggaagctcctgcaagtgcggcaacggctgcggagggtaagattttcgttgtaacattgtttttttcttgggaaaatagagtttttccgggaaaattttctttttggatttttaattgttattatggttacccttttggttcaattgcatgcaaaaa

SEQ ID NO: 176992 - DNA, 262 bp, Glycine max
cacacactctcatagctgtagcggcgacactaagatcggagaaagaatggcgaaaacgacgtcgttgctgctctttacactgctcctcttcggaaccctagctctcatccaggcgaagaaatcgaaggaggatttgaaggaggtgacccacaaggtttactttgatgttgagattaatggaaaagaagcaggtcgtattgtaatgggtctttatgggaaggctgttccaaaaactgcagaaaacttccgagcactttgcaca

SEQ ID NO: 176993 - DNA, 255 bp, Glycine max
agagtttgttgtgagctataagctagtttatcgtgaggagaatatgaagttgtttgtactctttgttgctgcagtagttttggtagcatggccatgccatggcgcaggctaccaaaggttccctctctgaatgaaaactggctatggtgagcgttcttcggaggtaaaatgcgcaagtcttaggcttgctgtggaagcacacaacatccgagcccttaaaaccattcctgaagagtgcgttgaaccaacaaagga

SEQ ID NO: 176994 - DNA, 168 bp, Glycine max
ggagaatatgaagttgtttgtcttctttgttgctcgagtagttttggtagaatggccatgccatggcgcaggctaccaaaggttccctctccgaatgaaaactggctatggtgagcgttcttcggaggtaaaatgcgcaagttttaggcttgctgtggaagcacacaa

SEQ ID NO: 176995 - DNA, 247 bp, Glycine max
gccatttatgacatctgcaggcgttcactggacattgagaggccaatctacaccaaccttaatcatttagtttctcaggtgatatcatcactgactgcttccctgaggtctgatggagccttgaatgttgacgtcaacgaattccagaccaaccttgtgcactaccccaggattcattttatgctttcatcttatgctcacgtaatttcagccgagaaggctcaccatgagcagctatcagttggtg

SEQ ID NO: 176996 - DNA, 259 bp, Glycine max
ctgatctttcttttgacaccaaaattggggagttaacaaaatccaatgctggactgagcttcaccaaagatgacttgattgcctcattgactctgaatgacaaaggtgatgctttgaatgctgcatattaccatgtagttaaccccttgaccaacactgctgttggtgctgaagtgacccatagattctcaactaatgagaacactctcactcttggtacccaacatcaattggatccattgaccacattgaaggcacg

SEQ ID NO: 176997 - DNA, 270 bp, Glycine max
cggaattcggctcgaactcgagccgaatcggctcagcggctcgagattgattagaattgacaataatgtctggttcggaggacgagggaggagaagagtacctcttcaagatcgtcataatcggagactccgcggtggggaaatcgaacctgctgtcccgctacgcccggaacgagttcaacatgcactccaaggccaccataggcgtcgagttccagactcagtgcttggaaatcgactccaaggaagtcaaggctcagatttgggaca

SEQ ID NO: 176998 - DNA, 257 bp, Glycine max
ctttaatagctctgcaaaatctttagtctgctaaagtagttgtgacgaatctctttttgttggtttagactttgtagtgtgcatgtataagaacttcatatcttgaatacttttaattatatattttgtttgtcggtgtttactgttttttggtattaagattcacgtagttgcggaaaaaaaaacaaaaaaaaaaaaaaaaaaaaaaaaaaaaaaaaaaaaaaaaaaaaaaaaaaggggggggccccctttttttt

SEQ ID NO: 176999 - DNA, 259 bp, Glycine max
gccactctaaagacaatggcagtgcctctactctcgaagaagatcgtgaagaagagggtgaagaagatcaagaggccttagagtgacaggaaaatttctgtcaagacaaactggcgcagaccaaagggtatcgattcccgtgtaaggagaaagttcaagggatgcactttgatgccaaacattggttatggtacagacaagaagacccgccactatctccctaatggtgataagaaatctgtggttcacaatgtgaagg

SEQ ID NO: 177000 - DNA, 259 bp, Glycine max
cagagatccatcgatcaattaatttccaatggccgatcagctcaccgaacgaacagatctctgagttcaaggaagcctttagcctcttcgacaaggacggcgatggttgtattaccaccaaggaacttgggactgtgatgcggtcgcttgggcagaacccaactgaggctgagctgcaggacatgataaatgaggttgatgctgatgggaatggtaccattgatttcccagaattcctcaatctcatggcgcgcaagat

SEQ ID NO: 177001 - DNA, 256 bp, Glycine max
gaatggttctatttgttgtgtgtctctttctcctttcatcttggtatcgggttgcccggaacagcatatgccaggaggcagcatttatggctcagtggtgcaaacgaagtagacagcaaaactttttcaagagctattcttgccaagagtgctcatatacagacagtggtgtgtattcctgtgttggagggcgtcgttgagttgggcacaaccgataagatcgaagaagacctaaatttcatccaacacataaaga

SEQ ID NO: 177002 - DNA, 254 bp, Glycine max
cggctcgagcggctcgagtagaaacagtgtgatgaaaatgaaggtccttgttttcttcgttgctacaattttcgtagcatggcaatgccatgcgtacgatatgttccctctccgaatgaacactggctatggtgcccgtactccggaggtgaaatgcgcaagttggaggcttgctgtggaagcacacaacatccttggctttgagaccattcctgaagagtgcgttgaagcaacaaaggaatacatccatggcg

SEQ ID NO: 177003 - DNA, 252 bp, Glycine max
  unsure (1)..(252): unsure at all n locations
aacaaatcaaagccatggccacctccaacttccctattgttctctccgtctccctagccttctttttggtgctacttaccaaggcacactcgaccgataccgtctctttcaccttcaacaagttcaacccagtccaaccaaccattatgcccnanaaagatgctagtatttcatcctctggggtgttacaactcaccaaagttggcagcaacggcgtgcccacctcgggatctctcggtcgtgccctttacg

SEQ ID NO: 177004 - DNA, 256 bp, Glycine max
ctgaaattttaattgacttttctcccctcataaaaaaaacctaccaatggctcccgcaaatgcagagaagaagcccgcggagaagaagccggcagagaaggccccagcggagaagaagccgaaggggtagaagaagatatcgaaggaaggaggaagcgagaagaagaagaagagaacaaagaagagcgttgagacctacaagatctacatcttcaaggtgttgaagcaagtgcaccccgacatcgggatctccagc

SEQ ID NO: 177005 - DNA, 253 bp, Glycine max
caagaacactctcttgaacattcatggatccagtgagcgtgtggggtaacacgcccttggcgacggtcgatcccgagatccatgacctcatcgagaaggagaagcaccgccaatgccgcggcatcgacctcatcgcctccgagaacttcacctccttcgcagtcaccgaggccctcggcagcgccctcaccaacaaatactccgagggcatgcccggcaaccgctactacggcggcaacgaattcatcgacca

SEQ ID NO: 177006 - DNA, 256 bp, Glycine max
cgctgagaatccacaagatgctgcagaatctcttattccacttttggaggaagccgaagctgctgttcctcaggagtttcaccccaggacgccagttaaacttggagcaactgcaggtttaaggcaattggaaggggatgcttctgataggatattgcaggcggtcagtgacatgctcaagaacagaagcacactgaacgttggggccgatgcagtttcagtgttgagtggaaaccaagaaggagcttatcaatgg

SEQ ID NO: 177007 - DNA, 258 bp, Glycine max
gttaatttgcgtctatattcattttggcatcgaggttgaatctcatcggagagagaaaaaccataaccatgtctggaagaggaaagggaggcaagggtctcggaaagggaggagcgaaacgacaccgtaaggttctgagggataacattcagggcataacgaagcccgcaattcgccgtctcgcgagacgtggcggcgtgaagcgtatcagtggtctcatctacgaagaaacccgcggtgttctcaagatcttcctcg

SEQ ID NO: 177008 - DNA, 254 bp, Glycine max
ccaagttcaaagatgaagatgatccacgttcttttcctctttgctcttgtctcgttcacttcccatgcttctgtcaatgatttctgtgtagcagacctaaaaggtccagatagcccttcaggctatcagtgcaagccacctaacacagtcacagtggatgactttgtgttctctggctttgtagctggaaacaccacaaacactttcaatgctgcattaacctccgcatttgttactgattttccaggtgtgaa

SEQ ID NO: 177009 - DNA, 257 bp, Glycine max
ctcggttctgccttcacaaaaaaattatccagatcccctttttctcctaagaaaagccatggctaagggtcccggtctctactctgacatcggcaagaaagccagggatctgctgttcaaggactaccacagtgaccagaagttcaccatcaccacctactcacccactggagttgctataacagcatcaggaaccaggaaaagtgaactgtttgtggctgatgtcaacacccagttgaagaacaaaaacatcacta

SEQ ID NO: 177010 - DNA, 257 bp, Glycine max
gctctttgtcttctctgacacatttggggccttgttgagtgtgtttttgcaagagggtatggcgaaggacgttgaggttgctgagcgtggctccttctctgggaaggactaccaggaccctccaccagcaccactcattgatgctgaggagctcacaaagtggtccttttacagggctcttattgctgagttcattgccactttgctcttcctctacattactgtgctcacagttatagggtacaagcaccacacgg

SEQ ID NO: 177011 - DNA, 255 bp, Glycine max
ctattcttacaagttacatccattgagaaacatgaaggtctcccccttagcattttcaatcctttttttgtccttcaccataggactcttcattggcattgcttcagcagcacaagaaccagtgcttgacacctcaggccagaagctgagaacaggtgtcaagtactacattctaccagtcttcagaggcagaggtggaggcctaacagtttcaagcagtggcaacaacacatgccccctctttgtggtgcaaga

SEQ ID NO: 177012 - DNA, 250 bp, Glycine max
ttcattgctgacctttctgttggtttggctacgggtcaaattaagactggagctccatgcaggtctgagcgtcttgctaaatataaccagctcttgagaattgaggaggagcttggtgctgaagcagtgtacgccggagctaacttccgtacccccgttgaaccctactaaagttttcaagtggaaaaaacctggagatccacacgagtttgagcattgagatttgggtgcgcggtttttggtgtgatat

SEQ ID NO: 177013 - DNA, 256 bp, Glycine max
tgagattggaccccaggattcagagtttgcgggaagctttgtgactttgcctcactcgccgcatgtcaaccataacaacatcaccagagcttctttcaaattgccattaacgtatcagttgaaagacttgggagtaacaaaagacgatgatagtatttctgtcacactggctcccatatatggagacaagcctgttacaattaaggacgtaaggataaagcgtgtttatcctgaggtagacgatgaataaatctaa

SEQ ID NO: 177014 - DNA, 292 bp, Glycine max
gttaccagtttgcgatctcattacaatctccccagtttctaatctcagctaagaaaaaccaaaagatgtctctgattccaggtttcttcggtggccgaaggagcaacgtgttcgatccattctcactcgacatgtgggatcccttcaaggattttcatgttcccacttcttctgtttctgctgaaaattctgcattcgtgagcactcgtgtggattggaaggagaccccagaggcacacgtgttcaaggctgatattccagggctgaagaaagaggaagtcaaggttcagat

SEQ ID NO: 177015 - DNA, 288 bp, Glycine max
ctcaaaggcaccaatttcattgctcagagttcccaaattctccccaagagataaaatgtctctaatcccaaacttcttcggtggccggagaaacaatgtgttcgatcctttctcactggacgtgtgggatcccttcaaggattttcctttcccaaatacgctttcttcagcttccttccctgaattttctcgggaaaattcagcatttgtgagcacccgtgtggactggaaggagaccccagaggcgcacgtgttcaaggcagatattccaggactgaagaaggagga

SEQ ID NO: 177016 - DNA, 286 bp, Glycine max
gctaaattctcaaaggcaccaatttcattgctcagagttcccaaattctccccaagagataaaatgtctctaatcccaaacttcttcggtggccggagaaacaatgtgttcgatcctttctcactggacgtgtgggatcccttcaaggattttcctttcccaaatacgctttcttcagcttccttccctgaattttctcgggaaaattcagcatttgtgagcacccgtgtggactggaaggagaccccagaggcgcacgtgttcaaggcagatattccaggactga

SEQ ID NO: 177017 - DNA, 279 bp, Glycine max
aatgaaagcaataagtccctccttcctctgccttataattcttgtgacccttttcgctggtagcattgaaagtgcaccagcaaacgtgaagccaagccattatgctgcacccttcaataggagtgtttttccttctggttttctatttggaataggctctgcagcttaccagatagaaggagcagcagctatagatggcagaggaccaagtatatgggacacctatactaaacagcaaccagggaagatttgggatcatagtgatggaagtctagcaat

SEQ ID NO: 177018 - DNA, 277 bp, Glycine max
cctaagtctttgggaatagtgctgcaatggcttcaagtcaggaggaggtgacccttttgggagctactggaagcccatttgtgtgcagggttcatattgccctcaagttgaagggagttcaatacaaatatgtcgaagaaaatttgaggaacaagagtgaactgcttctcaaatccaacccagttcacaagaaggttccagtgtttattcacaatgagaagcccatagcagagtctcttgtgattgttgaatacattgatgagacatggaagaacaa

SEQ ID NO: 177019 - DNA, 281 bp, Glycine max
cagttccacagcattagccatccaaactataaataaatagagaacacgcgaaacacctgattcccctacccagacgccgcagagtcagagagagagattcactgaaacagagcgcagaagaaaatacctaaactaatccagaaaatgagcagcggcgctggaaaggtggtgtgtgtcaccggcgcttccggttacattgcttcctggatagtcaaattcctcctcaatcgcggctacaccgttaaggccaccgttcgcgacacaagtgatccgaaaaacat

SEQ ID NO: 177020 - DNA, 214 bp, Glycine max
attgaacgttaagccttcaccagtagtggcagcttttagttccagagggcccaatatggttaccagacagattctgaaaccggacgttattgggcctggggttaacatcttggccgggtggtccgaagcaattgggccatcagggttatccgatgacactcggaaaactcagttcaacctcatgtcaggtacatctatgtcttgtccacacaac

SEQ ID NO: 177021 - DNA, 281 bp, Glycine max
ctctgctcgtagggtttctccacctagagggaaatggctcccaaaccgcctagtacgggtctgtttgttggactgaacaagggtcacgtcgtcaccaagaaggaattgcctccacgcccctcagatcgtaaggggaaaacaagcaagagggtgcactttgtgaggaacctcataagagaggtagccggttttgcaccctatgaaaagcgtataactgagttgctgaaggttgggaaggataagagggcactgaaggttgcaaagagaaagctcggaacaca

SEQ ID NO: 177022 - DNA, 280 bp, Glycine max
tcttcatcttgttctatctgtgacgagcatcatggcctcaagagcagtgttattgttggctatgtgtgtgcttccggcgatggttgtggccattcgcccagcaaagaaccctttttgcgtgaagggtcgtgtctactgtgacccttgccgtgctggttttgagacctcagctaccacctacattgctggtgctgagattatgttgcaatgcaagagcagggttagcaacgaggttgtgtacacgaagaaggggtacaccgactcaaccggagcatacaca

SEQ ID NO: 177023 - DNA, 280 bp, Glycine max
ctcattaattgcaagaatggcacttcgttgcttggtgatgtccctttctgttctcttcactcttggtcttgcgagagaaagccatgccagagacgaagatttttggcatgctgtttggccaaacactcccattccaagttcattgcgagatcttctatagcctggccctgcaagtgttgaaatcgctgatcaccctatgcaaattgaagaaacacagtacccgaaaaccttcttctataaagaagcccttcatccaggcaaaacaatgaaagtacaattc

SEQ ID NO: 177024 - DNA, 278 bp, Glycine max
gggttaacaagggcgacgcaccggcattgccagagactcttaaaaattacaacaagctgttgtctcttggcttcaagattgtattcttgtcaggaagatatcttgacaaaatggccgtaacagaagcaaacctaaagaaggctggcttccacacatgggagcagtcaattctcaaggatccacatcttatcactccaaatgcactttcatacaaatcagcaatgagagagaatctgttgaggcagggacacagaattgttggaatcattggagaccaa

SEQ ID NO: 177025 - DNA, 279 bp, Glycine max
cattgcggaagcagaagaagcgccgcagctatggtgaagtactccagagaacccgacaatcccaccaagtcctgcaaggccagaggcgctgacctcagagttcattttaagaacactagggagactgcctttgccatcaggaagttgccccttgttaaagctaaacgatacttagaggatgttttggcccacaaacaggctattcctttccgacgcttttgtggtggtgttgggaggacggcccaggctaagaacagacactccaatgggcaaggacgc

SEQ ID NO: 177026 - DNA, 279 bp, Glycine max
cgaacctgcttttagggctgcaatcataatgttccagagagaatttgccatgagactggttgctcagcccggtgataaactatattgtcgtctcacggtcaacactcaactacatgctcgagtcttccacctcctcaaagttggaagacacaacttcaggccccctcccaaggtggattccactgtggtgcgaattgagcccaggaaaccccgtattgaagttaagcaaaaggagtgggatgggtttttgcggatttgttttaacaggaagaacaaaac

SEQ ID NO: 177027 - DNA, 287 bp, Glycine max
gcatatagttttcctcctagctagatacatgatcaagtcctcctccatggcttcaattgccaaaatgcttgaaggcaaagtggcgataatcacaggaggagcaagtggcattggtgccgcgagcgccaagctattcgtccaacacggcgccaaagtaatcattgccgacgtgcaagacgagttaggccagttccactgcaaaaccctcggcacaacaaacattcactacgtccactgcgacgtaaccagcgactccgacgtcaaaaacgtggtcgaatttgccgtgt

SEQ ID NO: 177028 - DNA, 276 bp, Glycine max
cttcctcttgcttgttctcgtcggtgcaactacagcttctggggctgaactatgtgcagacttttactcatgcacctgcccaaacttgttgcctatagtgaagaaaggagtggccaaagccattcagaaagaaccacgcatgggcgcttccttactccgattgcatttccatgactgctttgtaaacggttgtgatgcatctatactgttggatgatacaagcaacttcattggggagcaaacagcagcagctaacaaccaatcagctagagggtt

SEQ ID NO: 177029 - DNA, 276 bp, Glycine max
gtttgttgtgagctataagctagtttatcgtgaggagaatatgaagttgtttgttctctttgttgctgcagtagttttggtagcatggccatgccatggcgcaggctaccaaaggttccctctccgaatgaaaactggctatggtgagcgttcttcggaggtaaaatgcgcaagtcttaggcttgctgtggaagcacacaacatccgagcctttaaaaccattcctgaagagtgcgttgaaccaacaaaggactacattaatggcgaacaatttag

SEQ ID NO: 177030 - DNA, 277 bp, Glycine max
caacaagagagagtggaaaagatggcgcggttgatcacagtggtgtggtgcgcggtggcggtgctattatgcgccgcggccggtgcgtcgtgggtggaggaggcggcgaacccgatacgaatggtgtctggcgtggaggcggaggtggttcgggtgatcggggagtgccggcgtgcgttgaagtttgctaggttcgtgagcaggttcgggaagagttaccaaagcgaggaagagatgaaggagaggtacgagatattctcgcagaatctcaggttca

SEQ ID NO: 177031 - DNA, 282 bp, Glycine max
caagttcaaagatgaagatgatccacgttcttttcctctttgctcttgtctcgttcacttcccatgcttctgtcaatgatttctgtgtagcagacctaaaaggtccagatagcccttcaggctatcagtgcaagccacctaacacagtcacagtggatgactttgtgttctctggctttgtagctggaaacaccacaaacactttcaatgctgcattaacctccgcatttgttactgattttccaggtgtgaatggtcttggtgtatctgtggcacggttag

SEQ ID NO: 177032 - DNA, 282 bp, Glycine max
ggagtgcagaatcttggagacaaagcagtgatgtgtcataggctaaatttcagaactgcagtattttactgccatgaagtccgtgaaacaacagctttcatggttccattggtggctggtgatggaaccaaaactcaggcacttgctatttgccactcaaatacttctggaatgaatcatcaaatgcttcatcaacttacgggagttgatcctggaactaaccctgtttgccatttccttggaagcaaggccattttatgggtacccaatttatctgtggac

SEQ ID NO: 177033 - DNA, 280 bp, Glycine max
ctagctagtcctgattcctagctctataaaaggagaataccataggaattcatcacagacaaacaaacaatttaccagctatacttgttcctttcgaaggttagaagtgctacaatacaaacaatggcagctacccaggaagatgtgaagcttttgggtattgtgggaagcccatttgtgtgcagggtccagattgcccttaagttgaagggagttgaatacaaatttttggcagacaatttgggcaacaagagtgatttgcttctcaaatacaaccctg

SEQ ID NO: 177034 - DNA, 261 bp, Glycine max
cttcgattctctctttctctttcttcagaaaaattaaacccattcaaagaaagaaagaaagagcgatcatttccaatcacaatggcagaccaactcaccgacgaacagatctcggagttcaaggaagccttcagtttgttcgatacggatggcgatggttgcatcacaacaaaggagcttgggactgttatgcgttcgttgggtcagaatccaacagaggctgagctccaagacatgatcaatgaagtagatcctgatggg

SEQ ID NO: 177035 - DNA, 276 bp, Glycine max
cacagattttgattcgattcgattcgattcagtcgaggttttaagcagcagcaagatgtctgggcgtggaaagggaggaaagggattgggaaaaggaggagcaaaacgacatcgtaaggtgctccgcgacaacattcagggaattacgaagccagcgattcgtcgtttggctcgcaggggtggcgtgaagcgtatcagcggtttgatctacgaggagactcgcggtgttctcaagatcttcttggagaatgtcatccgtgacgccgttacttacac

SEQ ID NO: 177036 - DNA, 276 bp, Glycine max
cactaagctaaacaatttcatcaagcctgccatggcttcctcgtgtgcttcctctgccattgcagctgttgccatctccacaccaagttcccagaagaatggatcactcttgggaagcacaaaagcttcttttcttagtgggaggaaactgaaggtgaacagttttacagcaccagttggagcacgatccagcactacagtgtgtgcagttgctgagcctgataggcctctgtggttcccaggcagcacccctcctccatggctagatggcagttt

SEQ ID NO: 177037 - DNA, 295 bp, Glycine max
tgcagtcggctcgagataatattaataagcgaatgttgaaccctaactgaggatacactcgcaccggtagctgctgcagccccttgtgagtgagtgttctgaaagatgagaccaattttgatgaaaggtcatgagaggccattgacgttcctgaaatacaacagggacggcgatctcctcttctcctgcgccaaggaccacaacccaaccgtctggtttgccgacaatggcgaacgcttgggcacttatcgcggccacaacggcgccgtttggacctgcgacgtctcaagagatt

SEQ ID NO: 177038 - DNA, 281 bp, Glycine max
cttttaattttttgccctaaaaccctcgctaccgccgtggtggccgccgcagaaggagagtcgagagcgcaatcgagtcttcatcttcgactcaccatgaagctcgtcaggtttttaatgaagttgaacaatgaaaccgtgtcaattgagctcaagaatggcactattgtccatggcaccattacaggtgttgatatcagtatgaacacacatttgaaaacagttaaactaactctgaaagggaaaaatccagtcactctagatcatctcagtgtgagggg

SEQ ID NO: 177039 - DNA, 276 bp, Glycine max
ggtgactgtgctctgctctcatctcattcatattcatttcaatggcaactcaaggtcaagtcattacctgcaaagctgcggtggcctgggaacccaacaagcccttaaccgtccaagacgttcaggttgctccgcctcaggccggcgaggtccgtgtccaaatcctcttcaccgctctctgccacaccgatgcttacacttggggcggcaaggatcccgaaggtctcttcccctgtattctcggccacgaagctgcagggattgtggagagtgttg

SEQ ID NO: 177040 - DNA, 274 bp, Glycine max
gagagagaaactgataaggcagggatacaacattgttgggatcattggagaccaatggagcgatctcctcggaggccacagaggcgaaagcaggacctttaagcttcctaatcccctgtactacattcagtacttccttcacctctcaacaatctagcttgctcctatctatctatatgtcataagatgcgttcaaataggggcactagcttcactttatgttgtttcagctgtgtgtcaacaagtcatgtaagagacttcactatgttgtttt

SEQ ID NO: 177041 - DNA, 274 bp, Glycine max
ctcacactatcctctttcataagaggaagtgcagagattcattgaccttcaaaaacccaaaaccctaaaaagcgcaagaaaaccccatccccaagataactctcgctctgaaaccgccatggatttgcagcagagcgagttcgatcgcctcctgttcttcgagcacgctcgtaaggccgcagaagccgaatacgagaagaaccctctcgacgctgataacttaacaagatggggtggagctttattagagttgtctcagtctcagagtcagcct

SEQ ID NO: 177042 - DNA, 198 bp, Glycine max
gtttccttatctatgttgtacttctgaataacatagactttatgcatgtctatgcgtaattattgcctgaacttctgcactattgtatttggatgctctcggttttcatatcataaagtgtgttctcactttcactttgtatttagttcatcttatgtttaccagtaataataccgaagcgatcgcgtttattactag

SEQ ID NO: 177043 - DNA, 279 bp, Glycine max
aaacgctccatactcgatatagcttacaccacttgggccatcaaaccccaaccaattctaaccatttcttttcgttccgatcagtttttcgtctctctctgttttccgaaaccttaatctcttgcccgataagggaaaattatgaatcccgataagttcacccacaagacaaacgaagctctggtgagtgcccacgaaatagcaacaagcaacggtcacgcgcagttcacccctcttcacctggcgtcctctctgatttccgacaaggatggcattttc

SEQ ID NO: 177044 - DNA, 279 bp, Glycine max
gtttttcttaagcttgagatcaggaattaatttcagaggttcagagaatggcaacggattcttctaatggtaatggccatcaccaaacaacaacaaagcaacctcctttgccgtctcccctgcgcttttccaaattttttcagtccaacatgagaatcttggttactggaggagctggattcattgggtctcacttagttgacagattgatggaaaatgaaaaaaatgaggtaattgttgctgacaactacttcactggatccaaggacaacctcaaaa

SEQ ID NO: 177045 - DNA, 275 bp, Glycine max
gtttgtaccacctaaggcacctcaagatttatatgagagctattataacgcaaacaaatcgaacctgaagttgtatgttagacgtgtgttcatttcagatgaatttaatgaactgttgcccaagtacctaaactttttgctgggtcttgttgattctgacactttgccacttaatgtatcacgagaaatgcttcaacaacatagtagtctgaagacaatcaagaagaaacttattaggaaagcccttgatatgatccgcaggattgctgatgagg

SEQ ID NO: 177046 - DNA, 269 bp, Glycine max
gctccccctacgattcgccgattgttttgcagcaaagctccacagaagaagaattatgagaacttctatcccaaggaacagaaggaacatccgagaggaaacgacaaaaaatacgagtccacagataaatcgaacgcaaacacagaggatagtggaaatcttcaggaagccttcatgaagccagttcaccatctagtcagcccagtatcgtcgatagggctattgcttacatcctcttcgtttggtcctcgtgcacagaagcagattag

SEQ ID NO: 177047 - DNA, 275 bp, Glycine max
cttagctttcctttccagttcatacttcatcctattattactttccctctttgcattccaaatggccactgttgaggttgcacagcaaacaccaacaactgtgacagagaatgaaacaacgactgaggtaaccaagattgaggaaactaccccagaacagccagccaccgaggttactgccccagaaacagtcaacgaagaagcaaaagaggaagcagcagttgagactaatgagcgcaacagaagttacagaggaagggaaggctgagaaaaca

SEQ ID NO: 177048 - DNA, 274 bp, Glycine max
gagaatagagaagagagatggatccagacgcgttggcaaaggcattcgtggagcactactacagcaccttcgacaccaacaggaacggcttagcgaatctctaccaggagggttccatgctcactttcgaagggcagaagatccaaggcgctttcaacatcgttgccaagctcacctccctcccttttcagcagtgccaccactcaatctccaccgtcgactgccagccctccggcgtcaacgccggcatgctcgtcttcgtcagcggaaacct

SEQ ID NO: 177049 - DNA, 278 bp, Glycine max
cgaagagaatggctcccaagggtttaatctttttggctgtgttatgcttctcagcactgtcactgagtcgttgtcttgcggaggataatggacttgttatgaacttctacaaggaatcatgccctcaggctgaagacatcatcaaagaacaagtcaagcttctctacaagcgccacaagaacactgctttctcctggctcagaaacatcttccatgactgtgctgttcagagttgtgatgcttcactgttgctggactccacaagaaggagcttgtct

SEQ ID NO: 177050 - DNA, 288 bp, Glycine max
cgctaacaagagattcaagaccggcatggctaatgaagaggaacagacaaaccacctcttcggcatcaaagatctcggtcacaagactctccttcagagtgatgcactctatcagtatatacttgaaaccagtgtctatccaagagagcacgagtgcttgacagagatacgcaagatgactgcaaaacacccactgaacatcatggcaacaccagcagacgaaggacaacttctgagcatgcttgttaagctcacgaattcaaagaacgccttggaaattggtgtatt

SEQ ID NO: 177051 - DNA, 281 bp, Glycine max
gtggcggcaagcaactccatccgcaatgggaatcgatttgaaggcaggaggtaagtccaagaagaccaagcgaaccgcccccaaatccgatgatatctacctcaagcttctcgtcaagctgtaccgttttcttgttcggaggactgggagtaacttcaatgctgttgtcctcaagcgccttttcatgagcaaggtcaacaagcccccgctatccctctctagattgatccgttacacgaagggaaaggaggataagatagctgtggttgttggtgccgtga

SEQ ID NO: 177052 - DNA, 275 bp, Glycine max
caataagcaagagcaatacactgtggaaggagtgcagaatcttggagacaaagcagtgatgtgtcatgggctaaatttcagaactgcagtattttactgccataaagtccgtgaaacaacagctttcatggttccattggtggctggtgatggaaccaaaactcaggcacttgctgtttgccactcagatacttctggaatgaatcatcacatgcttcatgaactcatgggagttgatcctggaactaaccctgtttgccatttccttggaagca

SEQ ID NO: 177053 - DNA, 269 bp, Glycine max
agagtttgttgtgagctataagctagtttatcgtgaggagaatatgaagttgtttgtcttctttgttgctgcagtagttttggtagcatggccatgccatggcgcaggctaccaaaggttccctctccgaatgaaaactggctatggtgagcgttcttcggaggtaaaatgcgcaagttttaggcttgctgtggaagcacacaacatccgagcctttaaaaccattcctgaagagtgcgttgaaccaccaaaggactacattaatggcg

SEQ ID NO: 177054 - DNA, 265 bp, Glycine max
gacaacgagtttatctcttcttctactagagttctcttttctctgggtagtgtaatatcattaatcaatggctgacgctatctttggataccctttcagacgcttcatctggggtcaccctccaattttcagagaatggtctggctcaatagccctcttagattggctcgaatcacccactgcccacatcttaaaagttaatgttccaggattcagcaaggaagacataaaggtgcagattgaggatgggaatattcttcacatc

SEQ ID NO: 177055 - DNA, 268 bp, Glycine max
tatttttgcaagtggaagtccattcagtaatgtggatcttggaaatggtcatattggccattgcaaccagggaaacaacatgtacctctttccaggcattggtctcggaactcttctttcaggcgctaggatcgtctctgatggcatgctgcaggctgcagctgagcgtctggctacatacatgagtgaagaggaggtactcaaaggaattattttcccttcaacatccagaattcgagatattacaaagcaggtagccacagctgtt

SEQ ID NO: 177056 - DNA, 268 bp, Glycine max
cctcgagccgattcggctcgagaacaaatcaaagccatggccacctccaacttctctattgctctctccgtctccctagccttctttttggtgctacttaccaaggcacactcgaccgataccgtttctttcaccttcaacaagttcaacccagtccaaccaaacattatgctccaaaaagatgctagtatttcatcctctggggtgttacaactcaccaaagttggcagcaacggcgtgcccacctcgggatctctcggtcgtgccc

SEQ ID NO: 177057 - DNA, 277 bp, Glycine max
gttctccgtggcaccatgcgcgcccacaccgacgttgtgacggcgattgccactcccatcgacaactccgacatgatcgtcaccgcctcacgcgacaaatccatcatcctctggcatcttaccaaggaggacaagacttacggtgtcccccgccgccgcctcaccggccattctcattttgtccaggacgtcgtcctctcttctgacggccagtttgccctatccggctcctgggacggcgagctccgcctctgggaccttgctgctggcacctccg

SEQ ID NO: 177058 - DNA, 281 bp, Glycine max
  unsure (1)..(281): unsure at all n locations
tctctcacactttgatcactgatctcatctcaattctcagccgtctcganatctgataagccagaagaggtggaaaggggcagcaaggatgacaagcacaaggaagatgatcaagaggaggggaagggtggattcattgagaaggtgaaggatttcattcatgacattggtgagaagattgaggaagctattgggtttgggtcgccgagtgccgatgttactgcgatacacatcccatcaattaatcttcacaaagcagatcttgttgttgatgtgctcat

SEQ ID NO: 177059 - DNA, 277 bp, Glycine max
ctgcgaaagtgtttgtttggctcagtttgttgaattcgctggcagctacagctatgatcatcaacagtaccccttttcctctatgatcgattcgattccgtagagtgagaaatcagatcagaataatcatcgatgggtaatttgttcgtgaagaagcccaaggtaacagacgtcgataaagcaattctcgctctcaagacccagagacgcaaactcgcccaatatcaacagaagctagatgctgttattgaagcagaaaagcaagctgcacgagact

SEQ ID NO: 177060 - DNA, 276 bp, Glycine max
ctggctgcaagtcttacttggcatttttcgaccacaaaggggatccaaaagaactgtgtggttctttgcacactggatacttggaactgcggtcacattccttggtgtcctgaatgtatatcttggtttaggagcctaccaccaaaacacatccaaaggcataaaaatttggaacatacttttcactgttcagatatctttgattgtgtttttctaccttttccaagaaaaatgggtgtatatacaaaaccacggagtggttttgggcaaagaaat

SEQ ID NO: 177061 - DNA, 266 bp, Glycine max
cgagtttgttgtgagctataagctagtttatcgtgaggacaatatgaagttgtttgtcttctttgttgctgcagtagttctggtagcatggccatgccatggcgcaggctaccaaaggttccctctccgaatgaaaactggctatggtgagcgttcttcggaggtaaaatgcgcaagtcttaggcttgctgtggaagcacacaacatccgagcctttaaaaccattcctgaagagtgcgttgaaccaccaaaggactacattaatg

SEQ ID NO: 177062 - DNA, 264 bp, Glycine max
ctctaagactatcagcaagctggcacatccaaatgctccccttggatatgggttgtgtttcctgaaccttgcttttgatggatttaccaatgcaacccaggattctttaaaagcaaggtatccaaaaacaagtgcttgggatattatgctgggcatgaatttatggggaaccatatataatatgatttacatgtttggatggccccatgccagtggatttgaggcagttcgcttttgccaacatcatcccgaggcagcatggga

SEQ ID NO: 177063 - DNA, 272 bp, Glycine max
actgcggagagagaaattgagtttccgagataaccagttttctctttgattcatcaatggcaactgcgaggaccgtgaaggatgtttcgcctcacgatttcgtgaaggcttatgcttcccacctcaagcgttccggcaagatggagcttcctgagtggaccgatattgtaaaaacagcaaaatttaaggagttggctccatatgatcctgactggtactacattagggctgcctcaatggcaagaaagatctatttgagaggtggtcttggt

SEQ ID NO: 177064 - DNA, 270 bp, Glycine max
accctaacccgcttcgaaccgtggcttcctcaggctcgcagaacctctctcgaagaaaaccttcttcttcttcgtcttcgtcttctcaacaaacacccgggtcgacccggatcgtttaccgagaatctcggatcccatcggaatccgatctcccgatctggcagcagaactggttcatcgcattgctcttcgtcatggctctcggattcttcgccctcgccattttcctcttcctcactctcgactcttcaatcgctccttcttccaccg

SEQ ID NO: 177065 - DNA, 266 bp, Glycine max
gcaagactttccattgcatgcaaagcaaatacgcattatattactagttttaatttgttttgtcgtttgctctcttctttgattaatgatgactagctttaaggttgcatgtgtggttgccatgatgtccatggttgtcgccatgagtgttacacccatggcacaggccgcaatcacgtgcgggcaggtcgccggcgacgtgtctccgtgcctcagttatcttcgaagcggcggaaaaccgtcggacgcctgctgcaacggagtga

SEQ ID NO: 177066 - DNA, 263 bp, Glycine max
gaacaatggcgggtagggtttcgacgtgcttcttcttcgtgtttgctctttctctccttcttccttttcagatctccgctgaggaatcatcggagaaagagttcgtactcacattggatcactctaactttcacgacactgtcagcaagcacgatttcatcgtcgtcgagttctacgctccatggtgtggccactgtaagaagcttgctctcgagtatgagacagctgcttctatcttgagtagtcatgatcctccggttgtt

SEQ ID NO: 177067 - DNA, 261 bp, Glycine max
gtgagtttgttgatcgagataactagaaacagtgtgatgaaaatgaaggtccttgttctcttcgttgctacaattttcgtagcatggcaatgccatgcgtacgatatgttccctctccgaatgaacactggctatggtgcccgtactccggaggttcaatgcgcaagttggaggcttgctgtggaagcacacaacatctttggctctgagaccattcctgaagagtgcgttgaagcaacaaaggaatacatccatggcgaa

SEQ ID NO: 177068 - DNA, 260 bp, Glycine max
ctttgtcgtgagctataagctagtttatcgtgaggcgaatatgaagttgtttgttctctttgttgctgcagtagtcctcgtagcatggccatgccatggcgcaggctaccaaaggttccctctccgaatgaacactggctatggtgagcgttcttcggaggtaaaatgcgcaagtcttaggcttgctgtggaagcacacaacatccgagccgctaaaaccattcctgaagagtgcgttgaacccacaaaggactacatta

SEQ ID NO: 177069 - DNA, 268 bp, Glycine max
acttaatcgatcatcacttcacttcactaatacatcatggcagacgagacccagaacaagtatgagagctctgaggttgaggtccaggatcgtggtgtttttgactttctcggtaagaaaaaggatgaagaagacaagcctcatcctcaggaggaggtcatcgccaccgagtttcaaaaagtcactgtctcagaccaaggagagaacaagcacagcctcttagaaaagcttcaccgatctgacagcagctctagctcttcaagtgagg

SEQ ID NO: 177070 - DNA, 268 bp, Glycine max
cttttaattctcagatccaagcttgggagacagagaaagagaaagagaatggacgccattgattctgtgttcgatccgctgagagaattcgcaaaggacagcgtgacgctcgtgaagcgctgccacaaacccgatcgcaaagaattctccaaggttgccgtccgtactgcaattggtttcgtcgtgatgggattcgtcggtttcttcgtgaagctcattttcattccaattaacaacatcattgtcggatctggttaggatgaaggga

SEQ ID NO: 177071 - DNA, 265 bp, Glycine max
ctgaaatctgaagctaacttacgggaaatgagatggccaatggcaacactagtcatcgcttcaagctcttgcttttgcctctaactctgcactcttcagtcgctctgattgtcttcgaagagagattcgaagatggatggaagagccgttgggtgctatccgattggaaaatgagtgaaggaaaagcgggtaccttcaagcacacagcaggaaaatggtctggggatcctgatgacaaaggtcttcagacatataatgacgccaa

SEQ ID NO: 177072 - DNA, 265 bp, Glycine max
ctcattgctttcaattttccaataccttttctgagtaccaaaacagaaggcatatccgcacatacacattccaacgtacaaaatgaggcactttttagtactagtaccactgatcttgcttgtttttgctggtttcccatccaaagcaaaagggtctctgctaccattcacaaatcatccaaataccctcttggctgatctatggtctaatcatttccctgatccatttcgcgtgttagagcaaatcccatttggggttgacaaa

SEQ ID NO: 177073 - DNA, 265 bp, Glycine max
gctgtctgctgttagatctgtacccgcctagccattgatttggaaaagtccaacttcaaggatgagtaagcttcagagtgatgctctaagagaagctatctcaggaatcatggctgattccaaggaaaagaacaggaaatttgtggagaccattgaactccaaattgggttgaaaaattatgatccccagaaggacaagcgtttcagtggctctgttaagttgcctcatattcctcgccccaagatgaagatttgtatgcttgga

SEQ ID NO: 177074 - DNA, 265 bp, Glycine max
ggagggtccaccagtgaacttcaaacatccaataaataaattgaatccagagaaaaatggggtggcaaagggacctactaagttttataacccagagatccatgctgctgcattctgtctgccttcttttgtggacaaggttgattgatccaacagacattcataaatgactcggtagcattaaggaattgctgttagttaccctttgtttttgctgtgtcgttctgcatatttatgatattatccttttattatgttatttagt

SEQ ID NO: 177075 - DNA, 259 bp, Glycine max
ctctattctctaacatcacaatttcaattgtcttttttttacataatcatggccatgaaacgtgctgttcaatccctgcttgcctcatcttccaccctcaccaggaactttcatgcctcaggagaaaaaaagaagattgtaggggtgttctacaaagggaatgagtatgcttcgaatcccaattttgtgggatgtgttgaaagagcattgggtatacgtgagtggttggaatcacagggtcaccagtacatagtcactg

SEQ ID NO: 177076 - DNA, 258 bp, Glycine max
caaggcattgattctggttggggggtttggaacaaggctgaggccactgacactcagttttcctaagcctcttcttgattttgctaacaaacctatgattctgcatcagatagaggcccttaaggccattggagttactgaggtggtgctagccatcaactaccaaccagaggttatgttgaatttcttgaaggattttgaaacaaagctcggcatcaagatcacatgttctcaggaaactgaaccatcgggaacagc

SEQ ID NO: 177077 - DNA, 268 bp, Glycine max
ggcaaatgccaagtgacaaaacagttggcggaggtgatgatgctttcaacactttcttcagtgagactggtgctggaaagcacgtgccacgtgccgtctttgtagatcttgagcccactgttattgatgaagtgaggaccggaacttaccgccagcttttccacccagagcagctcactagcggcaacgaagatgccgccaacaactttgcccgtggtcattataccattgggaaagagatcgttgatctgtgcttggaccgcatcag

SEQ ID NO: 177078 - DNA, 270 bp, Glycine max
cgtactcagatttagccttggctttggacaagctctttggttcctatggaatggtggaggccttgaagaatgcggacaattctgaacacgttcccatttatgaggacaaagatggtgactggatgcttgttggagatgtcccttgggaaatgtttatggagtcatgcaagaggctgaggattatgaagaggtcagatgccaagggcttcggtttgcaaccaaaaggatctctgaagggattcatagaaagcgcggcaaagtgaaacatta

SEQ ID NO: 177079 - DNA, 265 bp, Glycine max
ctcataagtgaccaaaaaagacaacctttggggaatcataaaattcttcagaatggctcgcacaattacaattgcagcaatgtgtcttcttctctcattagtgtccctctgtgtcaccaccaacgcattaatgccatccacacgtagcaccctctgggacatgatgctccaatccgaggacccatttggaatcttggaacagaacccattcaacaacatacccaacatcagaggaggagccgagactctcgccctggcacgtgcg

SEQ ID NO: 177080 - DNA, 262 bp, Glycine max
ctacaaggctttgaatgatcaccatgtccttcttgagggtaccctattgaagccaaacatggtcacccctggatcccaatctgctaaggtttcccctcaggtggttgccgagcacactgtcagagcccttcagagaaccgtgcctgctgcagttcctgctgtcgttttcttgtctggtggccagagtgaggaggaggcatccgtcaacctcaacgccattaaccaggtcaatgggaagaagccatggtcactctctttctcc

SEQ ID NO: 177081 - DNA, 263 bp, Glycine max
cgacctggccacatggccagcagttgtccaaatgagggcatttgccacacctgtggtaaagctggacaccgtgctagggaatgctcagcccctccaatgcctccaggggacttgaggttgtgcaacaactgttataagcaggggcacattgccgcggaatgtacgaatgagaaggcttgcaacaactgtaggaagacaggccacttggcacgtgattgtcctaacgatccaatttgtaatttgtgcaatgtttctgggcatgt

SEQ ID NO: 177082 - DNA, 259 bp, Glycine max
gttggctgttttgaacattcacccaatttgcagagttccaagttatatacatacactgcataattaagagaaaatgtctctgattccaagtttcttcggtggccgaaggagcagtgttttcgaccctttctccctcgatgtgtgggagccctttaaggattttccatttcccagttctctttctgctgaaaattcagcctttgtgagcacacgagtggattggaaggagacaccagaagcacacgtgttcaaggctgat

SEQ ID NO: 177083 - DNA, 256 bp, Glycine max
ggcagttaatagcaatttcgataagaaaagttccaaaattcagctaagagaaaatgtctctcattccaaacattttcggtggccgtaggagcaatgtgttcgatcccttcaaggattttcctttcccaaattccgtctctacttccttccctgagttttctcgggaaaattctgcgtttgtgagcactcgtgtggattggaaggagaccccagaggcgcacgtgttcaaggccgatattcccgggctgaagaagga

SEQ ID NO: 177084 - DNA, 256 bp, Glycine max
ctgcgaaaacccccaactccaacctctgttcatcgtctaccgcgctttcttttcaaccagaactatgattaagctttttaaagtaaaggaaaagcagagagaacttgcagaaaatgcaagtggcggaccacctgttaagaagcaaagtgctggagagttgcgtcttcacaaagatataagtgagctgaatctaccaaaatcatgtaccatgcaattccccaatggcaaagatgatctgatgaactttgaagtttca

SEQ ID NO: 177085 - DNA, 257 bp, Glycine max
cagaaagagatactcggaaaaagaaactgcatcgctcacgcacgcgttaacattaccacgttcttagttacagcacttctgctatcctttcgtcttcaatttccctttggatttcattcattaggtgagtacgtacgattacgatggattcgagttcggagcatcaagaattcgattatttgtttaagttgttgatgattggagactctggggttggcaagagtagtcttcttctcagtttcacctccgatgctttt

SEQ ID NO: 177086 - DNA, 251 bp, Glycine max
cgaccattagcactctaatggctccaacaaatgtcacatgcttcagagaagaaaatgaatccgagaaaggggaggaaataacaatagaagaagacaagctaagtcaagaatgtaaggagttgatactctctcttcctagggagagaggttggagaacacgttatatatatctatttcaaggattttggtgccagccattggaaatccaagcaataatcacttttcagaagcacttccaagctaaagacagt

SEQ ID NO: 177087 - DNA, 264 bp, Glycine max
ctcgaggttgggcaaacaactggaattgcagagaaaatgaacagcgccatcttcaaagcttcaaacagcaacaatctccattcctctctcagggccgcactcttccattccacctctcccttgcaacgtaaacgccgcaatcattgggactccagagggagcaaccatacctcgagaaggtttagaagggtgcaagcgaaacacagagtaatgaacagtatcaatgattatgcagaatccctgtttcagagctggaagcaaggt

SEQ ID NO: 177088 - DNA, 257 bp, Glycine max
atttctttttaccaatcactacttattcaatccaaggatggcttccgccggcgatcttttcaggcatggtttgccggaagttggtggtgccgggaagttacacgtgcttgctgttgatgacagccacgtggaccgcaaggtgatcgagcggttgctcaaaatctcgtcttgcaaagtgacggtggtggaaagtggtagcagggctctacagtatctggggttggatggagaaaaaagttccattggttttgatagtg

SEQ ID NO: 177089 - DNA, 280 bp, Glycine max
cggacgttgaggatgttgacgaggacaaggagaaggattccaagaaaaagaagaagatcaaggaggtgtctcatgagtggcaactcatcaacaagcagaaaccaatttggctgcgaaaccagaagagatcaccaaggatgaatacgcttctttctacaagagcctcaccaatgactgggaagaacacttggctgtgaaacatttctctgttgagggccagcttgagttcaaggccattctctttgtgccaaagagggcacctttgatttgtttgacacca

SEQ ID NO: 177090 - DNA, 277 bp, Glycine max
tgaaatatagtgatggcgatagagcattttgtacatctagtgatctcttcattgatgagagattgagaatcgcattagatggcatcattgtcattagcatggaaatatttcgccctaagttttagatggttcggctgaaaacaccttgaaagggaagataaggattaccacgagatgcttatggcttgacaaggggaaactgatggatgcactctacaaagctgcccgtgcagctctttcaagctgccctgtaaagagtccacttgctcacatcgaa

SEQ ID NO: 177091 - DNA, 277 bp, Glycine max
gctcctttccctctctaataagggttcctctttcctgctctagcacaatttacaatctcaatggctggaatttgctgtggtgttgttggagaaggtgacactccggctccactcgagcccactcctcgcccctccaggcgccggagtttggacatcttacctttaaaatatatcgccgacatgcccatgccgccgccggaggctttacggaagcgtcccaagctcaacctcagggactgcgataacgcaattgaaaattgcgacgaatccactggac

SEQ ID NO: 177092 - DNA, 272 bp, Glycine max
gtttcataggctcctttttgattacgaaaatgtggaagagaacgggttttgaagaagaagcagttcaattgatcaactcagatttcagggacctaagtctagctgctaatagatcgcccatcatgccatcaaacttggtggcattggctttggagcctcttttttcggattgtttgctgccattgctgctatttatctgttgattttggatcgtacaaactggaaaacaaatattctcacagcactactcattccatacattttcttcagct

SEQ ID NO: 177093 - DNA, 271 bp, Glycine max
cctcgagccgaatgcggctcgagggcgtcttgtatactgacaaggaacctttaggtcgcaggactgtaaaaacccagatggaccttgctggcctatctgtgagagaggatgctgtggtaacatatttggtcgttgggatggccttgaacctgagcttgctgcagttgcaacaggttcgcacattgatgctataccttactcgggaaaatatgatggagttgttggtgttttaggtgctattgaagccatcagagtcctgaaaaggtctggt

SEQ ID NO: 177094 - DNA, 270 bp, Glycine max
gaagatggagatgtatcagatctggagcaggagaatagcgttgggagcgttcgcgtttgctactgttttcctatcggcctcagcagacgacgtcgttgtgctctctgaagatacttcgagaaggaagttggtcaggacagaggagctctcgttgagttctatgctccttggtgtggacactgcaaaaagcttgctccagaatatgaaaagcttggtagcagcttcaagaaagccaaatctgttttaatcggcaaggttgactgtgatgag

SEQ ID NO: 177095 - DNA, 274 bp, Glycine max
cacgaatttcattgcagagtgttattttgagtatcagcatcaatggctccaattgcagtgggaaacgtgattccagacggcattttggcttacttggatgaagaaaacaaaccccaactgtctccattcactctctcgccaccggcaagaaagtcatcatctttggggttcccggtgccttcactcctacttgcagcttgaagcacgttcctggcttcattgagagagcagaagagctgaaagggaagggtgtggacgaaataatctgtatcag

SEQ ID NO: 177096 - DNA, 279 bp, Glycine max
cgtaggtctgtgtccaggtctctctcaatatcaagatccagaagccgttcaaggagtttatcaagagatgcagaaaatccaggaaacaatttgtatgtgacaggattgtctcctaggattaccaagagagaactggagaaacattttgctgctgaaggaaaagtgatagatgtccatctggtagttgatccttggacaagggaatcccgtgggtctggctttgtgacaatggagactcttgaggaggctgaacgatgtgtaaagtatctgaatcgctct

SEQ ID NO: 177097 - DNA, 289 bp, Glycine max
gagataactagaaacagtgtgatgaaaatgaaggtccttgttttcttcgttgctacaattttggtagcatggcaatgccatgcgtacgatatgttccctctccgaatgaacaactggctatgtgcccgtactccggaggtgaaatgcgcaagttggaggcttgctgtggaagcacacaacatctttggctttgagaccattcctgaagagtgcgttgaagcaacaaaggaatacatccatggcgaacaatatagatcagactccaaaacagttaaccaacaagcttact

SEQ ID NO: 177098 - DNA, 252 bp, Glycine max
gcggaatcagctagaattttctaataatggccaaagacgttgagcaggttacagagcaaggtgaatactccgcgaaggattaccatgacccacctccggcgccgttgatcgacccagtgagctcactaagtggtccttgtacagagccgccatagctgagttcatagcaacactccttttcctttacatcaccgtgttgaccattattggctacaagagacagagtgacaccaaaatccccggtaacaccga

SEQ ID NO: 177099 - DNA, 279 bp, Glycine max
atttgctcccagcactgagcttaaccgagcttcacaaagatgaatcgggaaaaattgatgaagatggccggttcggttagaactgggggaaagggcaccgtgagaagaaagaagaggctgtccacaagacaacaaccacagatgacaaaaggcttcagagcaccctgaagagaataggggtgaatgccatcccggctattgaggaggtcaatatctttaaggatgacgtagttatccagtttctaaatcccaaagttcaagcatccattgctgctaata

SEQ ID NO: 177100 - DNA, 278 bp, Glycine max
ctaaaatcagctctgaaattggtgttcaggcaaccgctgcaaagtggttcaacctcttcacaacacaacttcatcacgttcaaaatcttactgatagaattcatggaaccgagctgcatcatggtgaagactggcatcacaatgagtcggtcaagcactggacttataccatagatggcaaggttacaacttgcaaggagagtattgaatccgttgatgaagagaacaaaacaatcaactacaagctcttcgatggagacattgataatcagtttaag

SEQ ID NO: 177101 - DNA, 274 bp, Glycine max
cggaaattctgaatcttgcaagcaaacctagtgctttggagagaccgaatgggtctcacactgctgttgttggtggtggtcagactgcctgggatatgctcaatgatgaaaagtttcttcttacattaccacatcttgtgcagatctggataacatccttggtggaggaattaagtgcaaagaagtcactgaaataggattcaacttgcggtaaatgttcagattccacaagaatatggtggcctaggtgggaaggcaatatacatcgacacag

SEQ ID NO: 177102 - DNA, 274 bp, Glycine max
ctcgagccgatcgatccctttggggagataagaaaatgtggcttgtgcagctctcaaccccatttctgaacggccatggccatggctccagccttctctggaaacccagttcgcggtgactcagacccactgggccccgccgagtttgctgcctcaaatcaatgcgatgaagacgatgcagggaaaagtggtgtgctccacgaacgacaagacggtggcagtggaggtggtgcggctggcccctcacccaaagtacaagaggcgcgtgaggaag

SEQ ID NO: 177103 - DNA, 272 bp, Glycine max
gctcgtttgattctgatttccagtacgaatacgaaccgtgaaagcgtggcctatcgatcctttagtccttcggaatttgaagctagaggtgtcagaaaagttaccacagggatactggcttgtggcagccaagcgttcatagcgacgttgctttttgatccttcgatgtcggctcttcctatcattgtgaagcagaattcaccaagtgttggattgttcacccaccaatagggaacgtgagctgggtttagaccgtcgtgagacaggttagt

SEQ ID NO: 177104 - DNA, 272 bp, Glycine max
caaactccatttctcactcgccgtcgtctcttccgtctagggtttctcctcttcacaaaaatggttgccgcaaaaaaaactaagaagacccatgagagcatcaacaacaggccgctctcgtcatgaagagtggcaaattcaccctcggttacaagaccgttctcaaatctcttaggagctccaaagggaaattgattatcattgctaacaactgcccccctttgaggaagtcagagattgaatactatgctatgttggcaaaggttggggtt

SEQ ID NO: 177105 - DNA, 271 bp, Glycine max
tgagtctctgtccgaagccacttgagagaaaatggcggtgcctctgctctcaaagaagatcgtgaagaagagggtaaagaagttcaagaggcctcagagtgacaggaaaattccgtcaagactaactggcgcagaccaaagggtatcgattctcgtgttaggagaaagttcaagggatgcactttgatgccaaacattggttatggttcagacaagaagacccgccactatctccctaatggtttcaagaaatttgttgttcacaatgtga

SEQ ID NO: 177106 - DNA, 266 bp, Glycine max
cagatgcatgtgaattacttgaaatgtgaaatttggcaggtcatggatgtgttgttgttgttattatcatgtgttctcttggttggtttgccaaacctggctatagtagacagtcgcagggctcccgttctggactactttgagtattgtgctatgagctgcagagcttacagtgcctcgttggaagaatttggaggggttggtgatggaacaactttgaacactaaagcctttcaggctgccatagagaatctgagtcagtatgc

SEQ ID NO: 177107 - DNA, 267 bp, Glycine max
gctacaatatcctctctttttctcttcgcactctccctcatggcaaggttgagaggctctatggtctcgcccctgttgctaagtacttggtcaggaacgaagatggtgtcccattgctgctctcaacctcatgaaccaggacaaaatcctcatggaaagctggtactatttgaaagatgcagtccttgaagggggtattccatttaacaaagcatatggaatgacagcctttgaataccatggaacggatccaaggtttaacaaggt

SEQ ID NO: 177108 - DNA, 281 bp, Glycine max
aaacgaagtaaatgggtcggcttaatctcctacttgtgtggtcactctctttaagcacttttccttaattatctacacccaacctctgcccagctcagtccaaaccactatgctaacaatgccccaaccttgaaagcatcgttagacaagccgttactaataagttccaacaaacctttgtcaccgtcccagccacccttcgcctattctttcacgattgctttgtccagggttgtgatgcttccgttttgattgcatccaccggaaataaccaggcagag

SEQ ID NO: 177109 - DNA, 269 bp, Glycine max
gtgatgatcccctatcaccaacacttgatcacccttacttcacgacactactgtaaaactcaaaatctagtttcatactcccgtcctcctccccttgaaatggctctccaggctggttatcttgttcctgcttctttctcggttcttaaagagggaaagagtggtgtgtctctcaaggagtccaccttgttcggtctttcagtttcaggaactatacaagctattttaagttcttctgcattgaggtgcaagagggatttcgaacaaaa

SEQ ID NO: 177110 - DNA, 275 bp, Glycine max
gtcccaagaccattgatgtacgtagctctaacatatgaccacagaattattgatggaagagaggctgtgttctgtctgcgacgcatcaaagatattgtggaggatcctcgtagcttctgctcgacatatgaagtgaacctctaattttaaatggagtaaattaaacctcaaaattcacataccataatgggtacccttatgtctaggttttgaattgcggctgcccgtaatttataatctgtaatgagcaaactctgtaggatcatatcccaatt

SEQ ID NO: 177111 - DNA, 268 bp, Glycine max
gatcgagataactagaaacagtctgatgaaaatgaaggtccttgttttcttcgttgctacaattttcgtagcatggcaatgccatgcgtacgatatgttccctctccgaataacactggctatggtgcccgtactccggaggtgaaatgcgcaagttggaggcttgctgtggaagcacacaacatctttggctttgagaccattcctgaagagtgcgttgaagcaacaaaggaatacatccatggcgaacaatatagatcagactcca

SEQ ID NO: 177112 - DNA, 267 bp, Glycine max
gagataactagaaacagtgtgatgaaaatgaaggtccttgttttcttcgttgctacaattttggtagcatggcaatgccatgcgtacgatatgttccctctccgaatgaacactggctatggtgcccgtactccggaggtgaaatgcgcaagttggaggcttgctgtggaagcacacaacatctttggctttgagaccattcctgaagagtgcgttgaagcaacaaaggaatacatccatggcgaacaatatagatcagactccaaa

SEQ ID NO: 177113 - DNA, 278 bp, Glycine max
gtacagtgtacagggatttataggcagagatagttgcgtaatatgaacgcatctgagaagcagttgattttccgatcagaaaatctgaatcatgtcgtggcaagcgtacgtggatgatcacctgctgtgtgaaatcgaaggtaaccacctcactcacgccgctattatcggccacgacggcagcgtttgggctcagagcgccaacttccctcagttcaaagctgaggaaataactgctatcatgaatgactttaacgagcctggatcacttgctccaa

SEQ ID NO: 177114 - DNA, 275 bp, Glycine max
cacacaacacggcactgagttattagtaattgtgttgtgttgtgttgagcagagagaaggatcaagacaggataagaagaaagagggaatagggttagggctagggtcagggtaggttgaggatgccgaagaacaagggaaagggaggtaagaacaggaagaggggaaagaacgaggcggacgacgagaagcgagagctggtgttcaaggaggacgggcaggagtacgcgcaggtgctccggatgctgggtaacgggcggtgcgaggcgatgtgc

SEQ ID NO: 177115 - DNA, 276 bp, Glycine max
aggttcacttggcaaccatcccagtaacaggcactggcattaaccctgctaggagtctaggagctgctgtcatgtacaaccaacagaaggcctgggatgaccattggatctttagggttggaccatttattggagcagccattgcagccttctaccaccaattcatcttgagagcaggtgctgctaaggctcttggatcattcaggagcaaccccgctatttgagtcaatttaatttcttcttcatgatgagttcaaaatgaagaggaaattataa

SEQ ID NO: 177116 - DNA, 266 bp, Glycine max
ctcataacacaaagcacaaagcaaagctcatccttgagttaaaaaatggcagcagcttcttccatggctctctcatccccatccttggctggcaaggccgtgaagctggcccatcagccccagaagtgggaagggtgagcatgaggaagaccgtcaccaagcaggtctcctcaggaagcccatggtacggcccagaccgagtcaagtacttgggcccattctctggcgagcccccgtcctacctaaccggtgagttcccaggcgac

SEQ ID NO: 177117 - DNA, 264 bp, Glycine max
gtgacctctcctttcttgagatcaccaaagggtcatatgaaggaggaaagcctgatgcatctttttcgtttaaggatgaggactttgttaaggttgccttagggaaatgaatccgcagattgctttcatgaggggtgcgatgaagattaagggaagtttgagtgctgctcagaaatttactccggatatcttcccaaagccttctaagctgtgagctgagatttctgcaactacctgcacaaggttgctagaattatcgtttgg

SEQ ID NO: 177118 - DNA, 271 bp, Glycine max
caaaaatggtgaagtttctgaaaccaaacaaagccgtcatcgtccttcagagacgctacgccggcaaaaaagccgtgatagtgcgaaccttcgatgaaggcacgcgcgagccccctacgggcactgcttggtggcagggataaagaagtaccctgcgaaggtgatcaagaaggattcggccaagaagacggccaagaagtcgcgtgtgaaggcgttcgtgaagctcgtgaactaccagcacctcatgcccacgcgctacacgctcgatgtc

SEQ ID NO: 177119 - DNA, 277 bp, Glycine max
cagatagagagagacatgatgtcaacttccggcgccggcaggtacatggcttttccgccgtctccgtccgcgcctccgtcgccgcacctctccggtcttcgctccactccccttccgacccggacaaatatctagctgagttgttgggagaacgtaacaagcttagtcccttcatggctgtgcttcctcactgctttcgattctttaaccaagaaattttgcgtgtaaccacgctgatggggaatgcatcagttttaggtcaaagtgggcttgaaca

SEQ ID NO: 177120 - DNA, 266 bp, Glycine max
gttagttattgctgtcttctttttgtgtgtgccaataacacagaaagagagagaaagacatggctctgaaccaatcaaaggccgtgttgttgagggtgagtttggtgtggtggcgctgtgtataccaggatacatagtgggtccccctctctactggcatttcgttgcagtgaacaaccactcttcatcttctacttgtgcactctgcatctgcgattgctcttcacaacccattctttctattccacaaggacttagcaatactt

SEQ ID NO: 177121 - DNA, 268 bp, Glycine max
gacagagaagagaatggacgctattgattctgtgttcgatccgctcagggaattcgccaaggacagcgtcatgctcgtcaagcgatgccacaagcccgatcgcaaagattctccaaggttgctgtgcgtaccgcgatcggtttcgttgtgatgggattcgtgggttttttcgttaagctcatcttcattccaattaacaacatcatcgtcggatctggttaggatgaggggaatcgcaatcgcctcaggaattcaagttatcaaacaa

SEQ ID NO: 177122 - DNA, 264 bp, Glycine max
gaaagaagcatattcctgagtcaaatagttctgtccatatagaatttgtgaagtgagagtccaacctttcattttcaattttcaaagatgcctcgtggaacacttgaagttgttctgatcagcgccaaaggaatcgatgacaatgattttctctccagcatagatccttatgtgattctcacatacagggcacaggagaaaaagagcactgtgcaagaagatgctggatccaagccacaatggaatgagagctttcttttcact

SEQ ID NO: 177123 - DNA, 258 bp, Glycine max
ctctcgttgattcggatctagactcttttttcactcttcagttctcgttgttgttcttcgctttcctgaaactagggttttcaatttcgattcattcgttaatattaaagatgtttgggagggcaccgaagaagagcgataatacgaggtactacgaaatcctcggcgtctcgaagaacgcttcgcaggatgatctgaagacggcttacaagaaagccgccatcaagaatcaccctgacaagggcggtgatcccgaga

SEQ ID NO: 177124 - DNA, 264 bp, Glycine max
gcttcgtgttgtagctagctcctcgaaaatgctggcacgcctcgccgcgagtcgcttcaacgagatccgtcagattttccgtcagccttctagggctttctcgacgctccgaactaccaccttgacacaccggacaacaaccctaaacttccatgggaattcaccgaggccaatcaagcaaaggttaaggagattttgtctcactatccatccaactataagcaatctgctacaattcctcttttggatcttgcccagcagcag

SEQ ID NO: 177125 - DNA, 243 bp, Glycine max
cttaaaccctagcccctcttctcttcattcttcactcaggaaacacgcataatggccttctgtaataaggttggaaatgtcttgaggcagggtgctgctcgcagcacacaagcacctgtttcatccatgcttaattacattcgctgcatgtcttcaagcaagctttttattggaggcctttcatatggagttgacgatcagtctcttaaggatgcatttcctggctttggagatgtggttgat

SEQ ID NO: 177126 - DNA, 267 bp, Glycine max
atcatggccacctctgctattcagcaatcagcattcgcaggtcaaactgctctgaagcagctcaatgagttggtccgcaagaccggtggcgccggcaaaggtcgcccaacatgcgccgtaccgtcaagagtgctcctcagagcatttggtatggccctgatcgtcccaagtacctgggtccattctcagagcagattccgtcatacctgaccggagaattccccggtgactacggatgggacactgctggactatcagctgacccgg

SEQ ID NO: 177127 - DNA, 266 bp, Glycine max
ctagagtgcgaaagaaaaatggagggaaaagaggaagatgtttccttgggagctaacaaattctcagagaggcaaccgattggaactgcggctcagagccaagagatggcaaggactacacagagccacccccggctccacttttcgagccctccgaactcacttcttggtccttctaccgacccggaatagccgagtttgtagccacttttctctttctctacataaccatcttaaccgtcatgggtgtcaataggtccagctcc

SEQ ID NO: 177128 - DNA, 259 bp, Glycine max
gtcttcaacttcacccattcatacgtgttgttgttactgctgctcttttctcttttcttttctctttagttctctcttcccctttctttttctttttcttctcttctgagcttgtttaagcttttcttccattaacatattatcataatgtgtggtattcttgctgttcttggttgttctgatgactctcgagccaaaagggtccgcgtgcttgagctctctcgcagattgaagcaccgtggccctgactggagtgggt

SEQ ID NO: 177129 - DNA, 260 bp, Glycine max
aaagaatatctgatgtgatagacaaaggaggaacgcagaccgaggcgtttccagttcgaaagggaaatgaaagtgtccttgttggtgaagggtaggtgagagcacgaaaggggtgtgtgttgggttgaataggtatagataggatcaatgagcaacaacaacgcaggaaaggtggtgtgtgtgacgggtgcttctggtttcatagcttcatggatcgtcaaattccttctccaacgtggttacactgtcagggccaccgt

SEQ ID NO: 177130 - DNA, 257 bp, Glycine max
cgcagtcctccgcggaggaaggctccggcaactccgccaccgccggcacggagtggacgttctccgcaaagtcccatgcgccctcctcggacccctcctgggacgccatacagcgctgcggtggcgccaccctggcactcggcgacctccgctttgtgcagcgcctggggagcggtgacatcggaagcgtctacttggtggagctcaagggctccaacggttgcctctttgcggccaaggtgatggacaagaaggaa

SEQ ID NO: 177131 - DNA, 260 bp, Glycine max
cacctttgttcactcttcttctcttgcggctagggttttagcgcacttcttctagatttaaggaagatgggtaaggaaaaggttcacatcagtattgtggtcttggccatgtcgactctgggaaatccactatcactggtcacctgatttacaagcttggaggcattgacaagcgtgttattgagaggtctgagaaggaagctgctgagatgaacaagaggtctttcaagtatgcctgggtgctggacaaacttaaggct

SEQ ID NO: 177132 - DNA, 269 bp, Glycine max
  unsure (1)..(269): unsure at all n locations
agtcactcttcctgcanaacccagatctgtagacaatatgggaagcactggtttgctacatttgatatggcttgtcattgctttagtaagtgtgtcgcttgtgcaagcagaagatgcgtataagtatttcacatggacggtcgatcatgggactctttatcccttggctagtccccagcaggttattcttatcaatggtcagtttcctgggcctagacttgacttggtaactaatgaaaatgtaattctcaaccttatcaacaagctgg

SEQ ID NO: 177133 - DNA, 273 bp, Glycine max
gcaagaatggcacttcgttgcttggtgatgtccctttctgttctcttcactcttggtcttgcgagagaaagccatgccagagacgaagatttttggcatgctgtttggcaaacactcccattccaagttcattgcgagatcttctaaagcctggccctgcaagtgttgaaatcgatgatcaccctatgcaaattgaagaaacacagtacccgaaaaccttcttctataacgaagaccttcatccaggcaaaacaatgaaagtacaattcagca

SEQ ID NO: 177134 - DNA, 257 bp, Glycine max
caccgaccgccactgcctccagaacgaacccaaattcatgtccctcctctctcctcaccccaacatcctccaaatcttccatgtcttcgaggacgaccactatctctccatcgtagtggagctctgccagccccacacgcttttcgaccgcatgctccatgctcccttctcggagtcccaggccgcctccctcatcaagaagcttctcgaagccgtcgcccactgccaccgcctcggcgtcgcccaccgcgacatta

SEQ ID NO: 177135 - DNA, 255 bp, Glycine max
accattctcaggtccagatccgattccagttccaattcccgatcttctcaaaccctagttcctcatcttgagaatgagagagatcttgcacatccagggagggcaatgcgggaaccaggtcggagcgaagttctgggaggtgatatgcgacgagcacggcatcgaccacaccggaaagtacagtggcgactctgaactccaattggaacgcatcaatgtttattacaacgaagcgagtcgcggaaggtacgttcc

SEQ ID NO: 177136 - DNA, 250 bp, Glycine max
cagatctgagtgagaatctgaagagtgtctcaaaggagaagaccctccttaaggatcctgccaagccaccggctaaggctcaagtggttggttggccaccagtgaggtcatacaggaagaacatgatggcagtacaaaaggttagcactgaggatgtggcagagaagacaacaagcagcactgctagttctggggcatttgtcgaggtttccatggatggagcaccttacctgcgcaaggtggacctcac

SEQ ID NO: 177137 - DNA, 248 bp, Glycine max
cgcagagcccagaaaagaagctctttctctctaacaagaatgcctcccactgacggagacttggatcttaggccaccttctcaatcttccttcacagccggcgactacacgttcgccgatgcggacaatttggagcattgcgctaagtatctcaaccaatcgctcgtcacgtttggtttcccggcttcgctcgatctcttcgcaaatgacgccgtttcagttgcgaggacttgcaattgcatttacgt

SEQ ID NO: 177138 - DNA, 249 bp, Glycine max
ctgtgaagttgtttgtcttctttgttgctgcagtagtcttggtagcatggccatgccatggcgcaggctaccaaaggttccctctccgaatgaaaactggctatggtgagcgttcttcggaggtaaaatgcgcaagttttaggcttgctgtggaagcacacaacatcccagcctttaaaaccattcctgaagagtgcgttgaaccaacaaaggactacattaatggcgaacagtttagatcagactcta

SEQ ID NO: 177139 - DNA, 232 bp, Glycine max
gcaaaaagaaagagtcccaggcgaggagaaagatggaggggaaggagcaggatgtgtcgttgggagcgaacaagttccccgagagacagccgattgggacggcggcgcagagccaagacgacggcaaggactgccaggagccggcgccggcgccgctggttgacccgacggagtttgcgtcgtggtcgttttgcagagcagggatagcagagtttgtggccgcttttctgtt

SEQ ID NO: 177140 - DNA, 243 bp, Glycine max
caaggccctcatgttcttcaatgcccaacgatcggggaagttgcccaagcataacaatgtttcgtggaggggaaactcgggaatgcaagatgggaagtcttcagatcattctgctgcgattaaggatctggtgggtgggtactatgatgccggggatgctatcaagtttaactttcctgcttcgttttccattactatgttgagttggagtgtgattgagtatagtgcaaaatatgaggctgc

SEQ ID NO: 177141 - DNA, 245 bp, Glycine max
gagagtggctcccaagggtttgacctttctggctgtgttggtgtgcgtttcagcactgtcagtgagtccttctgttgcgggggaagggcaaagtgatggccttgttgtggacttgtacaaggagtcatgccctcaggctgaagacatcatcacagaacaagtcaagcttctctacaagcgccacaagaacactgctttctcctggctcaggaacatcttccatgactgtgctgttcagagttgtg

SEQ ID NO: 177142 - DNA, 231 bp, Glycine max
caagttcaaagatgaagatgatccacgttcttttgctctttgctcttgtctcgttcacttcccatgcttctgtcaatggtttccgtgtagcagacctgaaaggtccagatagcccttcaggctatcagtgcaagccacctaacacagtcacagtggatgactttgtgttctctggctttgtagctggaaacaccacaaacagtttcaatgctgcattaacctccgcatttg

SEQ ID NO: 177143 - DNA, 249 bp, Glycine max
cggggtttgaggaaactgagttgaggcttggactgcctggaaacggaggcactgaagaagtgctcatcaggaagaggggtttctctgagactgaaactggtcatgaagatgagtctgccaccactgtggatttgatgcttggtctttcttctaaggaggccgcaaccactgctgctgctgctgcagatccaactgatgagcacaagactttgcctaaggagaagacccttctgccagcagatcctgcta

SEQ ID NO: 177144 - DNA, 251 bp, Glycine max
ctgagggtccctggacctctgatcctcttgttttcgacaactcatacttcacggagttgttgagtggtgacaaggaaggtctccttcagctaccttctgacaaggctcttttgtctgaccctgtattccgccctctcgttgataaatatgcagcggacgaagatgccttctttgctgattacgctgaggctcaccaaaagctttccgagcttgggtttgctgatgcctaatcaacgtttaggggattgttg

SEQ ID NO: 177145 - DNA, 250 bp, Glycine max
ctggatactgagggttacagcgacggaagtgatggcaacactgcaggggctagtcaaacaaaaaggaaaagatgccgagagggaacactgaccactggtatgactcttgttcactgttgcatcttgacgaacaaaagagttgtgttggattagaattatacttttggtgttatcactgtgcaatgatgtcaactagatcattgagtatggtactatggtcttgataagttgatattatcctattacttat

SEQ ID NO: 177146 - DNA, 250 bp, Glycine max
tccaagagtgagagtatgggaggctcatggtcatggcagctcacatgtgccctcttgctactcttctccgccgtagtcaccgccactgaccacattgtgggtgccaatcgtggctggaaccctggctttaactacactctttgggccaacaaccacactttctatgttggcgatcttatctcattcaggtatcaaaagaatcaatacaatgtgtttgaggtgaaccaaactgggtatgacaagtgcacta

SEQ ID NO: 177147 - DNA, 247 bp, Glycine max
gtggtgttagatctgtacccgcctagccattgatttggaaaagtccaagcttcaaagatgagtaagcttcagagtgatgctcttagagaagctatctcaggaatcatgactgattccaaggaaaagaacaggaaatttgtggagaccattgaactccaaattgggctgaaaaactatgatccccagaaggacaagcgttttagtggctctgttaagttgcctcacattcctcgccccaagatgaaga

SEQ ID NO: 177148 - DNA, 248 bp, Glycine max
ccagacggcgtcttcatggacgcctttcttctgcgtttccgtttcctcgttcgagttcgctttttgatctgcgaaaatgagagagtgcatctcgatccacgttggtcaggctggtatccaggtcggaaatgcttgctgggagctctactgcctcgagcacggcatcgggcccgatgggcaaatgccaagtgacaagacagttggcggtggtgatgatgctttcggtgctttcttcggcgagactggtg

SEQ ID NO: 177149 - DNA, 233 bp, Glycine max
aacagtgtgatgacaatgaaggtccttgttttcttcgttgctacaattttggtagcatggcaatgccatgcgtacgatcatgctccctctccgagtgaacactggctatggtgcccgtactccggaggtgaaatgcgcaagttggaggcttgctgtggaagcacacaacatctttggctttgagaccattcctgaagagtgcgttgaagcaacaaaggagtacatccatggcg

SEQ ID NO: 177150 - DNA, 254 bp, Glycine max
ggttcctcctcaattctcctcccggagaaatccaatacgttgccaaagatgtggaatccattctcaacaacgacgatttgtacaaggaagccgcttccgaggcttttctcttttacaacaaatcgcacttgatttcccttccaatgtccaaccgaagcggagacgtactggttacttcttttggtgagcttgagggtagtgcatttcttgaacctaggagtgcgcaagtagcacttgttgatcatgttaaacaa

SEQ ID NO: 177151 - DNA, 244 bp, Glycine max
cttctacacatccctagctgcgtcgttccgtcgttgacgatggcgtttcgggtgcgaagcctgagctccgctctctctttcttctctctctcttgtccatcgcttccgccagtgtcttcttcgaagagcgtttcgatgacgggtgggaaaatcgatgggttaaatcagattggagaaaagatgagaacgtggctggggagtggaaccacacgtctggtcgatggaatggagacgctaatgacaa

SEQ ID NO: 177152 - DNA, 243 bp, Glycine max
caggcttccccttcaggatgtgtacaagattggaggtattggaactgtgccagtgggacgtgttgagaccggtgtcttgaagcctggcatggtggtgacttttgcaccaactggactgacaactgaagtcaagtctgtggagatgcaccatgaatctcttacagaggcacatcctggtgacaatgtgggattcagtgttgagaatgttgctgttaaggatttgaagcgtggttatgttgcctc

SEQ ID NO: 177153 - DNA, 245 bp, Glycine max
cggaatctgaagcactgatatggggtgacaaactcgtgctgaagggattgtcattccgtggttttcatggagcactaccggaagaaaggaagctaggccagaagttcgtggtagatgttgatgcatggatggatctcaaagcagctggcaaatctgatcacttgtcagatacagttagttacacggatgtatatgatatagctaaggaggttcttgaagggtcacctcaaaaccttctggagtca

SEQ ID NO: 177154 - DNA, 246 bp, Glycine max
cgacatttttcttctctcagccatctctctctctctctgcgtccatggagttttggggtgttgaggtgaaaagtggagaatctctcaaggttgatccgggagatgacaagattatccacctttcaaatgcatgcctgggggatgtcactaaggataaagaaggtctaccagtagccctgtatgtcaagtttggtaaccaaaagcttgtgattggcacgctttcttctgaagcttttcctcagatat

SEQ ID NO: 177155 - DNA, 244 bp, Glycine max
ccattctctctctctctctctctcaaatctcaattcactcattcatttcccccttcttctctctctcaatttcgctttgtattgtcttcagttcagtaaaccgcaccaattccgatggcggcgtcgcggcggctccgggacctccaatcccaaccggcgaacaagatctgcgtcgactgttcccagaagaacccgcaatgggcctcggtttcctacggcgtcttcatgtgcctggagtgctccg

SEQ ID NO: 177156 - DNA, 242 bp, Glycine max
ctcttcttctcttgcggccagggttttagcgcagttgcttctagctttaaggcagatgggtaaggcaaaggttcacatcagtattgtggtcattggccatgtcgactctgggaaatccactaccactggtcacctgatttacaagcttggaggcattgacaagcgtgttattgagaggtttgagaaggaagctgctgagatgaacaacaggtctttcaagtatgcctgggtgctggacaaac

SEQ ID NO: 177157 - DNA, 239 bp, Glycine max
cgctactggaagtggtttgctgggaatttggcatctggtggggctgctggggcttcttccctcttatttgtctattctttggattgtgcccgtactcgtttagcaaacgatgcaaaggctgcaaagaagggtggcgataggcagtttgatggcttggttgatgtttgcaggaaaaccatcaagtctgatggtgttgctggcctttatcgtgggttcaacatctcgtgtgttggaattat

SEQ ID NO: 177158 - DNA, 242 bp, Glycine max
tgcaagaatggcacttcgttgcttggtgatgtccctttctgttctcttcactcttggtcttgcgagagaaagccatgccagacacgaaggtttttggcatgctgtttggccaaacactcccattccaagttcattgcgagatcttctaaagcctggccctgcaagtcttgagatcgatgatcaccctgtgcaaattgaagaaacacagtacccgaaaaccttcttctataaagaagaccttc

SEQ ID NO: 177159 - DNA, 202 bp, Glycine max
gtgttcatgaacgcctttcttctccgtttccgtttcctcgttcggattcgctttttgctctgcggaaatgagagagcgcatgtcgatccacattggtcagtctggtatccaggtcggaaatgcatggtgggagctctgctgcctcgagcacggcatcgggcccgatgtgcagatgccacgtgacactacagttggcggtggt

SEQ ID NO: 177160 - DNA, 251 bp, Glycine max
atgagctagtttatcgtgaggagaatatgaagttgtttgtcttctttgttgctgcagtagttttggtagcatggccatgccatggcgcaggctaccaaaggttccctctccgaatgacaactggctatggtgagcgttcttcggaggtaaaatgcgcaagttttaggcttgctgtggaagcacacaacatccgagcctttaaaaccattcctgaacagtgcgttgaaccaacaaaggactacattaatggc

SEQ ID NO: 177161 - DNA, 249 bp, Glycine max
ggaggatccggggcaagaaagccaaggtgaatttcccggatgagccttcaggcgctgctgcttcctcaaaacgcctcaaggtgaatccagaggctcagccaatgaaggaaaatctgaacaccgtgaagccgaaaatgaaccagatgttcagttttggtcacaatctggagggctactacagcccagtagatcaggtggaacagaaaccactggttgaccagtatgttaaccctgccccgttccctggaa

SEQ ID NO: 177162 - DNA, 239 bp, Glycine max
cgaaaaaaaaagagtttccggcattattccatcatgaacgctcttcccattcttctcttcttcctcttcgtttcggcattagtttatgcgaagaaaactggcgatgtgacggagttgcaaattggcgtgaagcataaaccagcatcatgtgaagttctggcacacaaaggtgacagagtcaaagtacactatcggggaaaactcactgatggaactgttttcgattctagctttgaaag

SEQ ID NO: 177163 - DNA, 246 bp, Glycine max
cggatttctttacaaagttgatacaaagagtttctccaaagagttaccagcaggcttttggggaagtttatgtgacacaaaagtttctagagaatttttgcggggatcaggttcgtttcctggcaaggtcttttggtgtccctggaaatcatcttggacaacaaagtcatggttttcgttggccatatggtcccgtggccattattactccttttaattttcccttggagattcctgtccttcaat

SEQ ID NO: 177164 - DNA, 246 bp, Glycine max
attgatgagaagcatttttcaccttggaattcatcaatgtcttcgaaagtaggttgtctgtagcaaaggagtgattgtgaatgcttattttattttctatgtatcctttttcagagttcacattttttttggccttcggaacattaatgtgaatgtctatagctacatgtatcgagaattttatataagattgtcagttcgcactcaaattatcagattttagtttattcatgaatcacttgcccg

SEQ ID NO: 177165 - DNA, 247 bp, Glycine max
tcaggattagagggtcgccacgtttagcaataaccaaaccctctctactcttttttcttctccttctcttcgctagggttttagcttcttcctcttcacttcgttctttttcgcctctacaatgagcaacgacaaggacacattcaacgtcgccgatctcacttctgctctcaacgaggacaatagagcagaccttgtcaatgctcttaagagcaagatacagagtttggctggacaacactcggat

SEQ ID NO: 177166 - DNA, 245 bp, Glycine max
acctggggctgaacacaaggaaaaggcttctccagaaaccattgccaaatatactctaaccatgcttagaagaagagttcctcctgctgtccctggaatcatgtttttgtctggtggacaatccgaagtggaagcaacactaaatctaaatgccatgaaccaaagtcccaacccatggcatgtttctttctcatatgcacgggctcttcagaacactgtgcttaagacatggcaaggacaccctg

SEQ ID NO: 177167 - DNA, 159 bp, Glycine max
acactagtcatgttattcttggggtgcatatgaagattcatgatgggtattttgagatattaggattggacaaactcgcctgtggctcgtgctactctttacagatctctatttagagatgccgtcgatgtcgtcccagatgctgtcgaagccttcagg

SEQ ID NO: 177168 - DNA, 243 bp, Glycine max
ggctttggcaggttgcagttcccagttcccagttcgaaacccttattcctttcaaagaaccaagttgagtgatcgtgatggcaccaaaggcagagaagaagccagcggagaagaagcccgcggaggagaagaagtcgacggtgggagacaaggctccggcggagaagaagccaaaggccggaaagaagcttccgaaggagggaggcgccggcggagaagggaagaagaagaagagaaacaaga

SEQ ID NO: 177169 - DNA, 242 bp, Glycine max
  unsure (1)..(242): unsure at all n locations
ctccncgccactcccgccggcctcatctccgcttccatcgcccatgctttcgccctcttcgtcgccgtctccgtcggcgccaacatctccggcggccacgtcaaccccgccgtcaccttcggcgccttcgtgggcggcaacatcaccttactccgcggcatcgtctacgtcatcgcccagctcctcggctcccccgtggcctccctcctcctcgccttcgtcactgcctcccctgttccagc

SEQ ID NO: 177170 - DNA, 246 bp, Glycine max
caaggacagaaggacagtgagagtggaatgcttcatgaaagacagcagccccaatatctgggtgaggcctatcagtggactcacaatggtggttgaccttgaactcatgaagatcgttcagtatcacgacggtcgcattataccagtaccaactgccgacaacactgaataccgcttttcacgtcagaacccaccattcggtccaagacaacatagtctagcaacccatcaaccacagggtccagg

SEQ ID NO: 177171 - DNA, 243 bp, Glycine max
cttgtctcgttgattcggatctagagtcttttttcactcttcagacctcgttgttgttcttcgctttcctgaaactagggttttcaatttcgattcattcgttaataattaaagatgtttgggagggcaccgaagaagagcgataatacgaggtactacgaaatcctcggcgtctcgaagaacgcttcgcaggatgatctgaagacggcttacaagacagccgccatcaagaatcaccctgac

SEQ ID NO: 177172 - DNA, 239 bp, Glycine max
gagaaatcatcagcattcacataggtcaggccgggatccaggttggcaactcctgctgggaactctactgcctggaacatggcatccagcccgatggcatgatgccaagtgactcctccttcggtgtagcccacgacgccttcaacaccttcttcagcgaaaccggatccggcaagcacgtccctcgcgccgtcttcgtcgatctcgagcccaccgtcatcgacgaagtccgttgtggc

SEQ ID NO: 177173 - DNA, 238 bp, Glycine max
ctttatttacaacaacaatggcttctgtgcctcaaccaaaaatctcccttctaaccttattcttcttctcgtccttcaccatcattgcgcatgcaattgttcctcaaaacgaaaccttcaaatttgagaactcaggtgaacttggaccctacatcgttgagtacggtgcagattacagaatgataagcatcttcaactctccattccaagttggtttctacaacaccaccccaaatgc

SEQ ID NO: 177174 - DNA, 237 bp, Glycine max
ctcgagccgatttcaaaatggctaggggactaaagaagcatttgacaaggctcaatgctcccaagcattggatgcttgacaaactgggtggtgcatttgcgcctaaaccctcatctggaccacacaaatcgagggactgcctccccctcattcttattctgcgaaaccggctgaagtatgctctgacataccgtgaagtcattgctattctgatgcagcgccatgttcttgttgatg

SEQ ID NO: 177175 - DNA, 242 bp, Glycine max
ggtctttcatgcccaatcagagagaaaagttagggttcacaacttttccttttccttttgcttgcgggtctgaatcaagtggtcagtcatccattcattattcatcatgtcgtcggcgaagaaaatcacgccgaagagttcggacggcgaggctttcgaggtggaggaggcggtggcgctggagtcgcagacgataaagcacatgatcgaggacgactgcgccgacagcggcatccctctgc

SEQ ID NO: 177176 - DNA, 244 bp, Glycine max
gtttagggtttcggttctctaccctatctttcacgtatcgaaaccttaaatttacgatcaggtctgagcaatctggttggtagaacctttggtcttagtgagtcaagttttatgtctgaattagacgatcaaattcctactgccttcgatccttttgctgatgcaaatgctgatgactcgggtgctgggtcaaaggagtatgtgcatattcgtgtacagcagcgaaatggtaggaaaagcctga

SEQ ID NO: 177177 - DNA, 244 bp, Glycine max
tgcgaggagaaagatggaggggaaggagcaggatgtgtcgttgggagcgaacaagctccccgagagacagccgattgggacggcggcgcagagccaagacgacggcaaggactaccaggagccggcgccggcgccgctggttgacccgacggagtttacgtcatggtcgttttacagagcagggctagcagagtttgtggccacttttctgtttctctacatcaccgtcttaaccgttatggga

SEQ ID NO: 177178 - DNA, 247 bp, Glycine max
cacaacacaacaaaactctccagttctgaagattttcttgtctcttgtctttgaaactagaagctccgtgattgatcaatggcgacaaaagacggcaaagccataggcatagacctcggcacgacctacagctgcgtgggcgtgtggcaaaacgaccgcgttgagatcatccccaacgaccaaggcaaccgaaccaccccctcctatgtcgccttcaccgacaccgagaggctcatcggagacgccg

SEQ ID NO: 177179 - DNA, 244 bp, Glycine max
tcagagagagggagtcagagaaaccctaggtaagaagaacagatgccggctggtcatggtttgaggtcccgcaccagagattccttctctcgtcctttcaggaagaagggaaccatcgccctcaccacatacctgagaacctaccacgtcggcgactatgttgacgtcaaggttaacggtgccgttcacaagggaatgccccacgaattctaccatggccgcaccggacgcgtctggaatgtca

SEQ ID NO: 177180 - DNA, 240 bp, Glycine max
gttggtacgaaaaatgtcgaagctgatcttcgtgttcctttcgcttgttcctcttctctgcacctccttctccccagagagaccctcagatcgacgcgtcctcgttttgctcgatgacttcgccatcaaatcctctcattctctcttcttcaactccctcaaatctcgcggcttcgatctccaattccacctcgcagacgacccccaaattgcgctccagagatacggccagtacctcta

SEQ ID NO: 177181 - DNA, 235 bp, Glycine max
cgaagtttacgggctccgggaagatgaaacgctgcgttctgatgatcacggattctgcgatttacatcgttgaccctgaggtggacgcgctgaagcggagaatagtgcttgcggcggtggagagggtttgtctgagtgaactgagtgataattttttcgcggtgattgttccgtcggagtatgatttgctcatggctagtactcggaagacggagattgtcacggtgctggtcga

SEQ ID NO: 177182 - DNA, 239 bp, Glycine max
gaaagaaggtttttttagtatagttaacagcatggagagggaggaagatgttaaggttggagcacagacattctcggagaggcaagcactgggtacaggagctaagagtgacaaggactacaaggaggcaccaccagcacccttgtttgagccaggggagttaaagtcatggtctttttacagagctgggatcgcagagtttgtggccacattcttgttcctctacatcactgtcttga

SEQ ID NO: 177183 - DNA, 239 bp, Glycine max
ctccatttctcactcgccgtcgtctcttccgtctagggtttctcctcttcaccaaaatggttgccgcaaaaaaaactaagaagacccatgagagcatcaacaacaggctcgctctcgtcatgaagagtggcaaattcaccctcggttacaagaccgttctcaaatctcttaggagctccaaagggaaattgattatcattgctaacaactgcccccctttgaggaagtcagagattgaa

SEQ ID NO: 177184 - DNA, 239 bp, Glycine max
catttatgcaggtaaaccctgatgatgttgtgtttgggggatgggatatcagtcacttgaacctggcagatgccatggccagggccaaggtgtttgatatcgacctgcagaaacagttgaggccttacatggcatctatggttccactccccggaatctatgaccccgatttcattgctgccaaccaaggagaccgtgccaacaacgtgatcaagggcacaaagaaagaacaagttcaa

SEQ ID NO: 177185 - DNA, 235 bp, Glycine max
gagataactagaaacagtgtgatgaaaatgaaggtccttgttttcttcgttgctacagttttcgtagcatggcaatgccatgcgtacgatatgtaccctctccgaatgaacactggctatggtgcccgtactccggaggtgaaatgcgcaagttggaggcttgctgtggaagcacacaccatctttggctttgagaccattcctgaagagtgcgttgaagcaacaaaggaataca

SEQ ID NO: 177186 - DNA, 275 bp, Glycine max
atttggtgccagccattggaaatccaagcaataatcacttttcagaagcacttccaagctaaagacagtgatgttattgtggccacaattccaaaatcaggtaccacttggctgaaagctctcacctttgccattgtcaatcgccatactcatagtatcactacatcaatgtcatcacatcctttgcttacttctaatcctcatgaacttgtgcctttcatagaatacaccgtttatggtaatgcccctagccatgttccaaacctatccagcat

SEQ ID NO: 177187 - DNA, 271 bp, Glycine max
cctggagaggctgtgaagtacaagagctctttgcatgcattccacacaatcgtcgcaaattacggtgccaagtcaatcttcaaatcgtgctggtgaaacatattgcgtgctgttccaggtgctggtgtcgcttgatggcatatgacaacctggcagcatatcttgttcggaaagaactacggatcagggggaggtcgctaatgtgatgacgacaattcccggggataatcatgcacgattcccttgtcatttgactaaattaggatgacaa

SEQ ID NO: 177188 - DNA, 250 bp, Glycine max
cttcactcttcttctcttgcggctagggttttagcgcacttcttctagatttaaggaagatgggtaaggagaacgttcacatcagtattgtggtcattgggcatgtcgactcttggaaatccagtaccactggtgacctgatttacaagcttcgaggcattgacaagcgtgttattgagaggtttgagaaggaagctgctgagatgaacaagaggtctttcaagtatgcctgggtgctggacagacttaa

SEQ ID NO: 177189 - DNA, 278 bp, Glycine max
attttccctcactttctcgctccccaaacgcccctctctctcctccaatggccgaccagctcaccgacgaccagatcgccgagttcaaggaggccttcagcctcttcgacaaggacggcgatggttgcattactaccaaggaacttgggactgttatgaggtcacttggtcaaaacccaactgaggcagaactgcaggatatgataaacgaggttgatgctgatggcaacggaaccatcgatttcccagagttcctcaacctgatggctcgcaagatg

SEQ ID NO: 177190 - DNA, 275 bp, Glycine max
ccctaaccacaatcatgcaagactttttgcgctcccttcgccgctccttggttttccgccccggcggtgacgattcacctttcgccggaatcgccaacaagctcggctccgccattcgcaaatcgcgaatcgccctcgaacctcctcctccgatacggtggcgcaagggcgagttgatcggttccggcggcttcggtcacgtctacatgcgaatgaacctcgactccggggagcttattgccatcaaacaggttttaattgcacctggtagcgta

SEQ ID NO: 177191 - DNA, 276 bp, Glycine max
ctataagctagtttatcgtgaggagaatatgaagttgtttgacctctttgttgctgcagtagttttggtagcatggccatgccatggcgcaggctaccaaaggttccctctccgaatgaaaactggctatggtgagcgttcttcggaggtaaaatgcgcaagttttaggcttgccgtggaagcacacaacatccgagcctttaaaaccatgcctgaagagtgcgttgaaccaacaaaggactacattaatggcgaacaatttagatcagactctaa

SEQ ID NO: 177192 - DNA, 277 bp, Glycine max
gaattatcaaaggtgaaacgaagaagccctaactacgcacgcattcgtgagaaaactcaatattcgtcgctcatggcactctcttctcgtctcttttccaaatccaaattgatctatggcagtcaaatacttctacaaaaggagcatgctattccagttcgtcactttgctaaagagtctgcccctcctgcccttaagggagacgagatgctgaagaacatttttgtggaggtgaagaacaaatttgagaccgccataggaatattaaagaaggaga

SEQ ID NO: 177193 - DNA, 277 bp, Glycine max
atctctatcgagtaaattaactatgaagcctaccctactattatccctttccttcctgcctctctttgctttcctggctctttcagaagatgttgaacaagttgtggacataagtgcgcaaccccattttcccaggtggcacatattacattatgccatcaacttggggcgctgccggtggtggattgaaactaggccggacaggaaactcaaactgcccagttactgttttgcaagattactcagaaatcttccgtggcacaccagtcaaattcag

SEQ ID NO: 177194 - DNA, 279 bp, Glycine max
ctccacaggaagaagcatattcctgagtcaaatagttctgtccatatagaatttgtgaagtgagagtccaacctttcattttcaattttcaaagatgcctcgtggaacacttgaagttgttctgatcagcgccaaaggaatcgatgacaatgattttctctccagcatagatccttatgtgattctcacatacagggcacaggagaaaaagagcactgtgcaagaagatgctggatccaagccacaatggaatgagagcttgcttttcactgtctctga

SEQ ID NO: 177195 - DNA, 249 bp, Glycine max
gcagaaagcaagctcatcctagagttttaaaaatggcagcagcctcctccatggctctctcttccccatccgtggctggcacggccgtgaagctgggcccatcagcccccgaagtcgggagggtcagcatgaggaagaccgtcaccaagcaggcctcctccggaagcccattgtacggcccagaccgtgtcaagtagttgggcgcattctctggcgaggccccgtcctacctcactggcgagttccagg

SEQ ID NO: 177196 - DNA, 272 bp, Glycine max
caagcaagatattaccattactggtgctagcaccttgccttcagatgaggtggagagaatggtaaacgaagctgagaaattttcaaaggaagacaaagaaaagagggatgccattgacacaaagaaccaggcagattctgtggtgtaccagacagaaaagcaattgaaagagcttggagacaaggttcctggccctgtaaaagagaaggttgaagcaaaactaggggagcttaaagatgcaatttctgggggttcaacccaagctattaagg

SEQ ID NO: 177197 - DNA, 272 bp, Glycine max
cgcaatttggatcctaatgtaaccgatgatcatctgaggcaagttttcagccagtatggagaattagttcatgtgaagattcctccaggcaagcgatgtgggtttgtccaatttgcagacaggagctgtgctgaagaggcccttcgggtgttgaatgggacgctgttgggtggacaaaatgtgcgtctttcatggggtcgcagtccttcaaacaaacaggctcaggcagatccaaaccagtggaatggtgctgctggtgctggttctggtgg

SEQ ID NO: 177198 - DNA, 275 bp, Glycine max
cattcctgaagagtgcgttcaagcaacaaaggaatacatccatggcgaacaatatagatcagactccagaacagttaaccaacaagcttacttttatggcagagacctcgaagtccatcccaaggacacatttgtgttcagtatagatggcaccgtactctctaatattccatactacaaaaaacatcgatatggggtggagaaattcaactcgaccttgtatgatgaatgggttaacaagggcaatgcaccggcactgcccgagactcttaaga

SEQ ID NO: 177199 - DNA, 275 bp, Glycine max
caagtagttgagaactaagaaggagaagcaaatggcttcctcaatgatctcttccccagctgttaccactgtcaaccgtgccggtgccggcatggttgctccattcactggcctcaagtccatggctggcttccccaccagaaagaccaacaatgacattacctccattgctagcaacggtggaagatcgcaatgcatgcacgtgtggccaccagttaccaagaagaagtttgagactctttcctacctgccagaccttgatgatgcacaattgg

SEQ ID NO: 177200 - DNA, 268 bp, Glycine max
tcgcagttccttgatctctcctctcaagatgcagatattcgtgaaaactttgaccggcaagaccatcacccttgaggtggaatcctccgacaccattgacaacgtaaaagctaagattcaagacaaggaagggatcccacctgaccagcagagacttatctttgcgggtaaacaacttgaggatggtcgcacccatgccgattacaacatccgagaggaatcaccctccatctggtgcttcgcataaggggtggagccaatccttggt

SEQ ID NO: 177201 - DNA, 269 bp, Glycine max
agctcttcaaaacccaaacaacaaccgtactgcacaactccaccactgtgcaatggccgacgaggaacctgttgatcagaagatatatcttgaagagtcttgcaaaccaaaatgtgtaaaaccattactagaataccaggcgtgcattaaaaggatacatcgtgatgaatctgggcagaaacactgcactggacaatattttggattattggtcttgtattgacaaatgtgttgcaccgaagctattcaccaaactgaagtaaatcggg

SEQ ID NO: 177202 - DNA, 267 bp, Glycine max
catacactctcatagctgtagcggcgacactaagatcggagaaagaatggcgaaaacgacgtctctgctgctctttaaaatgctcctcttcggatccctagctctgatccatgcggcgaaatcgtcataggatttgacggacgtgaaccacaaggtttactatgacgttgagattaatggaaaagatgcaggtcgtattgtaattggtgcctatgggaaggctgttccataaactgcagataactatccagcactttgcaccagggg

SEQ ID NO: 177203 - DNA, 270 bp, Glycine max
caagttctctgagttgttttgtgagacagcacatagcatagcaaggaaggagtattacaaccgaaaccctgaagaaaaaaagagtagaggaagaaaaaacacctgcaccaccaacgatgggtgtggattactacaagatcttgcaggttgataggagcgccaaagacgacgacttgaagaaggcttataggtaacttgctatgaaatggcaccctgataagaaccccaacaacagtaaggaatctgccatagggttaaacagatttccga

SEQ ID NO: 177204 - DNA, 272 bp, Glycine max
ctcgagcgctgcattattattctcttccccttaatttctatacccaatccctcagcaacacgcagcaaatgggtcggcttaatctcctacttgtgtggtcactctcattaacactgtccctttattatctacacccaatctctgctcagctcagtccaaaccactatgctaaaacatgccccaatcttgaaagcatcgttagacaggccgttaccaagaagttccaacaaacctttgtcaccgtcccagccacccttcgtctcttctttcat

SEQ ID NO: 177205 - DNA, 272 bp, Glycine max
ctttataccgattcgcttacttttcttctcctccttcctccaattttcgtttcccgaaatacccttcgaaacacgttaaattctctttgctgccactctcattcgcaacgatggaagctcctccagaaggttatcgcaggaacgttggtatctgtctcatgagcaatcacaaaaagattttttctgcttcgaggctcgacattcccaattcttggcaaatgcctcagggtggtattgatgaaggtgaggatccaagaaatgcagccatcagg

SEQ ID NO: 177206 - DNA, 269 bp, Glycine max
cgcaacaaaaagaaagaatcccaggcgaggagaaagatggaggggaaggagcaggatgtgtcgttgggagcgaacaagttccccgagagacagccgattgggacggcggcgcagagccaagacgacggcaaggactaccaggagccggcgccggcgccgctggttgacccgacggagtttacgtcatggtcgttttacagagcagggatagcagagtttgtggccacttttctgtttctctacatcaccgtcttaaccgttatcggagt

SEQ ID NO: 177207 - DNA, 268 bp, Glycine max
gttttcttcagaaatttgccatcgttgagagaagcgtgagagccttagtcgttcaagatgagagctaagtggaagaagaagcgcatgaggaggttgaagaggaagcgccgaaagatgagacaaagatctaagtaggtgcttgagcaggagttgagatgagctttccatctgctaccagcctcatgacattttaggctgttatggctcttatgatcttgaggtctagtcgctaggggagcttcactcttgacttagtttgctttactgg

SEQ ID NO: 177208 - DNA, 267 bp, Glycine max
caaaaagcttgctcagaggaagcactttccttctgtaaactggcttatttcttattcagaatactcaacggcacttgaaaccttttatgagcgatttgatccagattttatcaacattaggacaaaggctcgtgaagttctgcaaagggaacatgacctgaatgaaattgttcagcttgtgggcaaggatgctttagctcaaggagataagatcaccttagagattggaaagcttttcagagaggattatcttgctcaaaatgcctt

SEQ ID NO: 177209 - DNA, 268 bp, Glycine max
agagggcaagttgaagggaattcttggttacactgaagatgatgtggtctccactgactttatcggcgatagcagatcaagtatttttgatgcaaaggctggaattgcattgaataagaactttgtgaagcttgtttcttggtacgacaacgagtggggatacagctcacgtgtcattgatcttcttgtattcgttgccaagatctctctttaaggtgttacttcaaagtagcttgtcttcacattattaccgtatgtttatgtttag

SEQ ID NO: 177210 - DNA, 268 bp, Glycine max
attagcacttcttcttttcacactgccgctgcaacaatggcttcagaggagaaactttcgaacccaatgagggagataaaagtgcagaagctcgttctcaatatctctgttggcgagagtggagatcgtctcaccagagccgccaaggtgttggaacaacttagtggccaaaccccagtgttttccaaagcaaggtacactgttcgttcctttgggattagaggagatgagaagattgcatgctatgtcactgtcagaggtgacaagg

SEQ ID NO: 177211 - DNA, 267 bp, Glycine max
cttctgacagtgtttggctgaaagtagcaaagatgtttcctttcgggcaaaagggtcaaaagataaaggggactatggtggttatgcagaacaatgtgttggatatcaacagcatcaccagtgttggacggatcgttgaccaaggcttatgcttcataggcagtgcagtcgatgcacttacttttgcagccaccaaaatctccatccagttgattagtgctaccaaggctgatggtgggagaggaaaaattggaaagagtacaaatt

SEQ ID NO: 177212 - DNA, 270 bp, Glycine max
cgagataactagaaacagtgtgatgaaaatgaaggtccttgttttcttcgttgctacaattttcgtagcatggcaatgccatgcgtagcgatatgttccctctccgaatgaacactggctatggtgcacgtactccggaggtgaaatgcgcaagttggaggcttgctgtggaagaccacaacatctttggctttgagaccatccctgaagagtgcgttgaagcaacaaaggaatacatccatggcgaacaatatagatcagactccaaaa

SEQ ID NO: 177213 - DNA, 272 bp, Glycine max
caaaaaccctaggtagagagctcttcctccctttctcacagcaatggccgccgcagcacgccctctcgtcaccgtgcaggccctcgacggtgacatggcaaccgatgcctcctccaccgttcccatccctgacgtcatgaaggcctctatccgccccgacatcgtcaatttcgtacactcgaacatccccaagaacagccgccagccataacccgtcagtcgtcgcgctggtcaccagacctccgccgaatcctggggtaccggccgagccg

SEQ ID NO: 177214 - DNA, 269 bp, Glycine max
cacaaacactttcaatgctgcattaacctccgcatttgttactgattttccaggtgtgaatggtcttggtgtatctgtggcacggttagacatagccaaaggtggatcaatcccaatgcacacacaccctgctgccactgaacttctaataatggtggaaggtcaaatcactgctggttttatgaccccaactgcactttataccaagacactgaaacctggagatattatggtttttccacaaggacagttgcattttcaggttaatt

SEQ ID NO: 177215 - DNA, 271 bp, Glycine max
ggatggagaaggtggtatgtgtgaccggcggcagcggctgcattggttcatggctcgtccatctcctcttggatcgcggctacaccgttcacgccaccgtccaaaacctcaacgatgaagccgagacgaagcatcttcaatccctcgacggagcgtccacgcgcctccgcctcttccagatggatctcctccgccacgacaccgtcctcaccgccgtgcgtggctgcgccggcgtcttccacctcgcctctccctgcattgtcgaccaagt

SEQ ID NO: 177216 - DNA, 259 bp, Glycine max
agcaaaaactaccttcacatccacaaaccacacctcccccataactaaaagtaacctccctcatggaagagctctcagcggggcctctcgtccccgccgtcgtcaaacctgaaccgtccaaaggcgcctccgccgctgcctccggcggcacgttcccggcctccacgtcggagccggacaaggacttcctctgtccgatttgcatgcagatcatcaaggagccgttcctcaccgagtgcggccccagcttctgctacat

SEQ ID NO: 177217 - DNA, 239 bp, Glycine max
tatctgaatctgataggaaaaaaacaaaaaggcgcagatgggtagcacaggtttctcatggaaattggcggatcatccaaagcttccaaagggtaatactgtggctgtggtggtgttggatgcgtggggaaaagccacacccaatgattacaactggcatcacaaggctgaaacaccctgcatggattctcttaaaaacggtgcccctgataccgtgcatattggttcgcgctcatggt

SEQ ID NO: 177218 - DNA, 266 bp, Glycine max
acttcttactccttacaagatgggcaaattcaatctgtcccatagagttgttttggcaccgctgaccagacagacgtcttacgacaacgtcccacaaccccatgccatcctctactactcccagagaacttccaacggaggccttctcattactgaagccactggcgtctctaatacggctcaaggctatccgcaaacccctggcatatggactaaagaccatgttcaagcttggaaacccattgtcgatgccgtccacgccaaag

SEQ ID NO: 177219 - DNA, 263 bp, Glycine max
catagctagaagcaataagatgaaaatgaaagtgcttgttttgtttgttgctacagttttggtagcatatgaatgccatggctcagactaccagaagttccctctccaaatgaaaactgggtttggtgggcaatacagcaatgaggtggcatgtgccagttggaggcttagcgtggaagcaaacaacgtagtcaagtggcaaactgttcctgcatcttgcggagagtacatagctgactacgttctaggagaccaatatagat

SEQ ID NO: 177220 - DNA, 263 bp, Glycine max; identical to SEQ ID NO: 108942

SEQ ID NO: 177221 - DNA, 266 bp, Glycine max
gttgatcgagataactagaaacagtgtgatgaaaatgaaggtccttgttttcttcgttgctacaattttggtagcatggcaatgccatgcgtacgatatgttccctctccgaatgaacactggctatggtgcccgtactccggaggtgaaatgcgcaagttggaggcttgctgtggaagcacacaacatctttggctttgagaccattcctgaacagtgcgttgaagcaacaaaggaatacatccatggcgaacaatatagatcag

SEQ ID NO: 177222 - DNA, 238 bp, Glycine max
ctcgagccgctcgagccgcaacattgttgcacttaatttgtaatcacttatgtattaataaaaagggtctacactaaagtgagagccttattttggctgtagtgtagcccatgcgtgtgtattggttttaattgatcaaaagtgtgttttaatctctcttaccatatgaatatcaaaatttgttcttcattggtgttggattccaaaaaaaaaaaacaaaaaaaaaagggggggcccc

SEQ ID NO: 177223 - DNA, 260 bp, Glycine max
cctggtcttactgtgtggtgactgtgctctgctctcatctcattcatattcatttcaatggcaactcaaggtcaagtcattacctgcaaagctgcggtggcctgggaacccaacaagcccttaaccgtccaagacgttcaggttgctccgcctcaggccggcgaggtccgtgtccaaatcctcttcaccgctctctgccacaccgatgcttacacttggggcggcaaggatcccgaaggtctcttcccctgtattctcgg

SEQ ID NO: 177224 - DNA, 263 bp, Glycine max
agttattagggtttttgagtgcggcggtccaaacactcttctctgcagcttttgcctacaactcccttcaccatggctgaacaaaccgagaaagcttttctgaagcaaccaaaagtgtttctcagcacaaagaagactgggaagggaaagagacctggaaaaggtgggaaccgcttttggaagtccattgggcttggatttaagactcccagggaagccatcgaaggaacctatattgacaagaagtgccccttcactggcaa

SEQ ID NO: 177225 - DNA, 262 bp, Glycine max
ctcgagccgcttccttccttctccttctctctgagaacaacaccccacactcctctctctctctccgcttccttctcttctcacacctccatggcccacacttcccttccctccgccgatgccggcatggacgctgtccagcgccgtctcatgttcgaagacgaatgcattttggtggatgacggtgcccgtgtcgttggtcatgattcagaatacaattgtcacttgatggcaaacattgccgccgagaatttgctgcata

SEQ ID NO: 177226 - DNA, 267 bp, Glycine max
caggcagcaaacatgatgaagaagattggccttcttgaagctgcaaaacggaagttcttgggggaagggttgggggcttgctccattgaggaactgcaatggatagaacaacagttggagaggagtttaagtaatgttagaacaagaaagatccaggttttcaaggaacaaatcgagcaactaaaagaaaaggaaaaagtcctacttgatgaaaatgtcaagctcactgaaaatcgcaggctctctgagaagcatggaatcaatcta

SEQ ID NO: 177227 - DNA, 262 bp, Glycine max
ccaatggcgaggatcaaggtttacgagctgaggcagaagacgaacgctgatctgatgagtcaactgaaggacctgaaggcggacttgactagcttcgtgttgctaaggtcaccggtggtgcccctaacaagctttccaagataaaggtggttaggttgaacattgcccaggttttgacggtgatttctcacaagcagaaggctgcgttgagggatgcctacaagaataagaagtacttgcctctcgatctcggccctaagaa

SEQ ID NO: 177228 - DNA, 266 bp, Glycine max
ttcagaccgaactcaacactcgcagcaccgccatgagtgccgccacttcctccagcctctccaccgtcaccgatgccaatcttcactccagatttcattctcgtcttgttccattcactcatcatttctcactttctcaacccaaacggatttcttcaatcagatgccaatcaattaataccgataagaagaaatcaagtagaaatctgctggacaatgcaagtaacctcctcacggacttattaagtggtggaagtatagggtct

SEQ ID NO: 177229 - DNA, 145 bp, Glycine max
cacaccgacgtggctgttctcttggacaacgaagccatctacgacatctgtaggagatctctcgacatcgagaggcccacctacaccaacctcaacaggctcatttcccagatcatttcgtcgctaaccacttccttgaggtttg

SEQ ID NO: 177230 - DNA, 156 bp, Glycine max
gttcaaattttaggagcggagaatccagagaaagagagatgtctggtatcgcccgtggacgtcttgccgaggagcgaaagtcatggcgcatcaaccaccctcatggtttcgttgccaagcccgagactctccctgatgccaccgttaatttgatgg

SEQ ID NO: 177231 - DNA, 156 bp, Glycine max
gcggctcttatgattctgaggatggcttccgcctgttggataaagagatttcagagcatgaatatttgaaaaacagtgttgagggtttatctcggaggcttttctatcttgctcttccaccttcagtatatccctcagtttgcaagatgatcaaga

SEQ ID NO: 177232 - DNA, 273 bp, Glycine max
tgagttttgaaggagaaggagggaaggggtgtaacggctccttcttccgcgcgtttgacatggacgacaatggggatgagtgcatggacgagtactttcatcaacccgagaagaagcgacgtctctctgcgagccaggttcagtttctagagaagagcttcgaggaggagaacaagcttgaacccgagagaaagaccaaactagccaaagaccttggtttgcagccacggcaagttgctatttggttccagaaccgtagagctcggtggaaga

SEQ ID NO: 177233 - DNA, 262 bp, Glycine max
cactgtcttccttctctagggtttttagctcccccaatttcttcgctcaacatggttcttcaaaatgatattgatttgctaaatcctccggttgagcttgagaagaggaaacacaagctcaagcgtcttgttcagtcaccaaactctttcttcatggatgttaagtgccagggttgcttcaacataaccactgtctttagccactctcagactgttgttgtatgcggaaactgccagactgtcttgtgtcaaccaaccggtg

SEQ ID NO: 177234 - DNA, 190 bp, Glycine max
ctattcattcaagattcagcaagtgcgttttggaagcagagaccgaaatacttcgagatggcccgtacaaagcaaactgctcgtaagtcaactggaggaaaagctcccaggaagcagcttgcaaccaaggctgcacgtaagtctgcaccaacaactggtggtgtgaagaagcctcatcgttatcgccctg

SEQ ID NO: 177235 - DNA, 272 bp, Glycine max
cattaattccactgtgtgtgagggcctgtcttccataatctctcttaatggaacagttgaagccaagtgctgttaactcttctcctctcactccactcaccttcttggacagagcagccaccgtttacggcgatgtcccttccgttgtttataacgacacaaccttcacgtggtctcagacgcgccgccgatgcctccagctggcctctgccctcgcctccctcggcatcggccgcggccacgtcgtctccgtcgtggcccccaacatcccc

SEQ ID NO: 177236 - DNA, 269 bp, Glycine max
tcgagcttgggagtgagtcactcttcttgcataacccagatctgcagacaatatgcgaagcactggcttgttacatctgttatgccttgtcattgctttagtaagtgtgcaagcagaagatgcgtataagtattacacatggacggtgacttatggaactatttctccattgggtagtccccagcaggttattcttatcaatggtcagtttcctgggcctagacttgacttggtgactaatgagaatgtaattctcaaccttatcaaca

SEQ ID NO: 177237 - DNA, 158 bp, Glycine max
ggaacatgatcttaaaggactaatggagggaatgaagcagccctttagccagagtgaagtaaaatgcttaatgctccagcttttagaaggtgtgaagtatcttcatgacaactgggtgcttcatagggatttgaagacttctaacctgcttctgaata

SEQ ID NO: 177238 - DNA, 273 bp, Glycine max
tccgtcttcataaacgcctttcttctccgtttccgtttcctcgttcgaattcgctttttgatctgcgaaaatgagagactgcatctcgatccacattggtcaggctggtatccaggtcggaaatgcttgctgggagctctactgcctcgagcacggcatcgggcccgatgggcaaatgccaagtgacaagacagttggcggtggtgatgacgctttcaatactttcttcagcgagactggtgctggaaagcacgtgccacgtgcagtgtttgt

SEQ ID NO: 177239 - DNA, 267 bp, Glycine max
gtatcttcatcaataatcgcagaagcagtttccggtgcatctcatcgtcttccaaaatgcacgacgcagatgtctcgaagcaaatccagcagatggtgcgtttcatccgccaggaagctgaggagaaagccaacgagatctctgtatctgccgaagaggaattcaatatcgagaagctgcagttggttgaagccgaaaagaagaagatcaggcaagaatacgaacgcaaagagcgccaagtcgaaattcgcaagaagattgagtact

SEQ ID NO: 177240 - DNA, 270 bp, Glycine max
cacaaatcaaagccatggccacctccaacttctctattgttctctccgtctccctagccttctttttggtgctacttaccaaggcacactcgaccgataccgtttctttcaccttcaacaagttcaacccagtccaaccaaacattatgctccaaaaagatgctagtatttcatcctctggggtgttacaactcaccaaagttggcagcaacggcgtgcccacctcgggatctctcggtcgtgccctttacgctgccccaatccagattt

SEQ ID NO: 177241 - DNA, 268 bp, Glycine max
cttctcttgcggctagggttttagcgcagttcttctagatttaacgaagatgggtaaggaaaaggttcacatcagtattgtggtcattggccatgtcgactctgggaaatccactaccactggtcacctgatttacaagcttggaggcattgacaagcgtgttattgagaggtttgagaaggaagctgctgagatgaacaagaggtctttcaagtatgcctgggtgctggacaaacttaaggctgagcgtgaaagaggaatcaccatt

SEQ ID NO: 177242 - DNA, 266 bp, Glycine max
atttacgcttctcttctctgcagcaactatgcctaaccctaaggtcttcttcgacatgaccatcggcggtcaatctgctggccgcatcgtgatggagctctacgccgacgtcactccccgcaccgccgagaacttccgcgcgctttgcaccggcgagaagggcgtagggcggagcggcaagcccctccactacaagggctcgtccttccaccgcgtgatcccgagtttcatgtgtcagggtggcgacttcaccgccggaaacggaa

SEQ ID NO: 177243 - DNA, 266 bp, Glycine max
cagaatttcctgtttacgatcttattgcaattttgcaactttcaaagcttattagctcaagtaacatcaaaagatgtcattgattccaagtattttcggtggcccaaggagcaacgtgttcgatccattctcactcgatatgtgggatcccttcaaggattttcatgttcccacttcttctgtttctgctgaaaattctgcatttgtgaacacacgtgtggattggaaggagacccaagaggcacacgtgctcaaggctgatattc

SEQ ID NO: 177244 - DNA, 269 bp, Glycine max
aaaattgatgttgcttcaacctttttgacttttaagtaaggttttcattttcttcacataaccacacgcaggaagcattggagactcatgatggtgccagtaaagggaagtataccattggacttggccaagactgcatgtcattctgtaccgaagtagaagatgtcatctcaatgagtttgacagtggttacttctcttcttgagaagtatgggattgatcctaaacaaatcggtcgtctggaagttggaagcgagaccgtgatagac

SEQ ID NO: 177245 - DNA, 155 bp, Glycine max
tgtgtgtggttgcaccggcggcaatggcggacacttggcatcgatattcgggacggagaaggacagggtgaactgcccgttctacttcaagatcggcgcgtgcaggcacggcgaccggtgctcgcgtctccacacgaagccgagcataagcccca

SEQ ID NO: 177246 - DNA, 158 bp, Glycine max
attctctttgcgcagttccctacctctcctttcaagatgcagatcttcgtcaagaccctcaccggaaagaccatcacccttgaggtggaaagctctgacaccatcgacaacgtcaaggccaagatccaggacaaggaaggaattcccccggatcagca

SEQ ID NO: 177247 - DNA, 270 bp, Glycine max
cccttctccaacatgccacacgacagcgttctgagtcttttcttcttcgttaccctcttcacatgccttctctctgctaattcccacgatgaccatattttcctaccgagtcaactccatgacgatgactcagtgagttgcactgctaccgacccaaaccttaactacaagccggtgatcggaatcctgacccaccccggcgacggtgcctctggccggctcagcaacgccaccggggtttcttacatcgccgcctcctacgttaaattc

SEQ ID NO: 177248 - DNA, 271 bp, Glycine max
ctctgcatcggaagaaaccctagccactctcccggcgtcacgatgcagatcttcgtgaaaaccctaacgggtaaaacgatcacgttggaggtggagtcttcggacaccatcgacaacgtgaaggccaagatccaggacaaggaaggcatccctccggaccagcagcgcctcatcttcgccgggaagcagctggaggacggccgcaccctcgccgactacaacatccagaaggagtccacgcttcacctcgtcctccgcctccgtggcggcg

SEQ ID NO: 177249 - DNA, 264 bp, Glycine max
gtcactcttcctgcagaacccagatctgtagacaatatgggaagcactggtttgctacatttgatatgccttgtcattgctttagtaagtgtgtcgcttgtgcaagcagaagatgcgtataagtatttcacatggacggtgacttatgggactctttatcccttggctagtccccagcaggttattcttatcaatggtcagtttcctgggcctagacttgacttggtaactaatgacaatgtaattctcaaccttatcaacaag

SEQ ID NO: 177250 - DNA, 265 bp, Glycine max
gcctagccattgatttggaaaagtccaacttcaaggatgagtaagcttcagagtgatgctctaagagaagctatctcaggaatcatggctgattccaaggaaaagaacaggaaatttgtggagaccattgaactccaaattgggttgaaaaattatgatccccagaaggacaagcgtttcagtggctctgttaagttgcctcatattcctcgccccaagatgaagatttgtatgcttggagatgcccagcacgttgaggaggctg

SEQ ID NO: 177251 - DNA, 142 bp, Glycine max
gcaagaatggctattcgttgcttggtgatgaccctttctgttctcttcactcttggtcttgcgagagaaagccatgccagagcacgaagatttttaggcatgctgtttggccacacactcccattccgagttcattgtgaga

SEQ ID NO: 177252 - DNA, 268 bp, Glycine max
ctattctctaacatcacaatttcaattgtcttctttttacataatcatggccatgaaacgtgctgttcaatccctgcttgcctcatcttccaccctcaccaggaaccttcatgcctcaggagaaaaaaagaagattgtaggggtgttctacaaagggaatgagtatgcttcgaatcccaattttgtgggatgtgttgaaagagcattgggtatacgtgagtcgttggaatcacagggtcaccagtacatagtcactgatgacgaagaa

SEQ ID NO: 177253 - DNA, 270 bp, Glycine max
gtgaagagaatggctcccaagggtttaacctttctggctgtgttaatatgcgtttcagcactgtcactgagtccttctgttgcgggggaagggcaaaataatggccttgttatgaacttctacaaggaatcatgccctcaggctgaagacatcatcacagaacaagtcaagcttctctacaagcgccacaagaacactgctttctcctggctcaggaacatcttccatgactgtgctgttcagagttgtgatgcttcactgttgctggac

SEQ ID NO: 177254 - DNA, 268 bp, Glycine max
gaaggtttggagatgggtggtgagtttgatgttagtggggttactgcccgtgtcaacaatgggtcgattcgtggtggagaagaacagcctgagagtgacatcgccggagaaaataagagggacacacgacagtgccattggcaacttcggaatacctcaatacggtggtagcatggccgggaacgtaatttaccctaaggataacaaaaagggttgcaaagagttcgatgagttcgggatttccttcaaatcaacccccggtgctctt

SEQ ID NO: 177255 - DNA, 265 bp, Glycine max
caaagtactccattgaaatgtcatcagttgtttacaagaattgggttttcactgaccaagcattaccagctgatcttgtcaagagaggattggcagttgaggatccctctgccccacatggtcttcgccttgtgatagaggactacccttatgctgttgatggacttgaaatatgggatgctattaagacctgggtccatgagtatgtctctgtgtattacccaacaaatgcagcaattcaacaagacactggacttcaagcatg

SEQ ID NO: 177256 - DNA, 149 bp, Glycine max
tgcagaccgagctagctagctagcaagcaagcacagagatggaggcaaagcgaggccatgccctcatgctgttggcacgtgtttcactcttcctctgcgctctaaccctatccgctgctcacggaagcaccacggttcaagacatcgcg

SEQ ID NO: 177257 - DNA, 261 bp, Glycine max
ctggttgtcaaggaactggtatgaaggtttctataagacatcttggcccatccatgattcagcagatgcagcatgcctgcaatgaatgtaagggtactggagaaactatcaatgacagagatcgctgcccacagtgcaagggagagaaggttgtgcaggagaagaaagtccttgaagttattgtagaaaaggggatgcagaatacgcagaagataacattccctggcgaactgatgaagcgccggacacaattactgggga

SEQ ID NO: 177258 - DNA, 147 bp, Glycine max
agaagaagaaggttttcgcgatggcatcgaaacggatcttgaaggaactcaaggatctccagaaggatcctcctacctcttgcagcgccggtcctgttgctgaagacatgtttcactggcaagcaacaattatgggtcctccagaca

SEQ ID NO: 177259 - DNA, 261 bp, Glycine max
gtttgttgtgagctataagctagtttatcgtgaggagaatatgaagttgtttgttctctttgttgctgcagtagttttggtagcatggccatgccatggcgcaggctaccaaaggttccctctccgaatgacaactggctatggtgagcgttcttcggaggtaaaatgcgcaagttttaggcttgctgtggaagcacacaacatccgagcctttaaaaccattcctgaagagtgcgttgaaccacccaaggactacattaa

SEQ ID NO: 177260 - DNA, 263 bp, Glycine max
aaaaaaactcccttgtatattgttgcagctctagctagggtttcgcaagtgcgatcgaagaagaacaacgacgatggcgatggctgcagctctgcgtcgcgaaggaaggcgtttgatccaaccaatcaacgccctccactcttctctcaattcctccctcatctctcaagaccaagaccctcatggcgcgcgctccatttccactcaagttgtgaggacccgaatgaagagtgtgaggaatatccagaagatcaccaaggcca

SEQ ID NO: 177261 - DNA, 264 bp, Glycine max
caaacatggcagaaagtcctaattggaatccctcatatcctgctttacatgatgaacacttgagagtgtgctgttcaaatctatccaacatctgagggattccaaacatggcagaaagtcctaattggggcaacagttgtgttttgtgcaacatcagggatcccatcagatttccagttgcgtgtacttttgcctggactcgcagttgtcagcgcaccatagcttttgccctaaaccaactccaaaagaattttgaattcgtgg

SEQ ID NO: 177262 - DNA, 253 bp, Glycine max
gccaccaccagagggtcgcttgcccgatgccactaagggttctgaccatttgagagatgtgtttggcaaagctatggggcttagtgaccgagatatcgttgctctgtctgggggtcacactattggagctgcgcacaaggagcgttctggattcgagggtccctggacctctaatcctcttattttcgacaactcatacttcaaggagttgttgagtggtgagaaagaaggcctccttcagctaccttctgac

SEQ ID NO: 177263 - DNA, 260 bp, Glycine max
caggaatatggcttccttaagctcctcattagtgctgctccttgcagctctaattctatcccctcaagttcttgctgactatgagaagcccccaatttacaagccacctgtttacacaccgccagtttataagcccccagttacccaaaccaccagtgtacaaacctccagtttacaagcctccagttgaaaaaccacctgtttataagcctccagtttataagccacccatttacaagcctccagtgtacaaacctcca

SEQ ID NO: 177264 - DNA, 254 bp, Glycine max
tcagaaggttgaaacgggtcatcaagacacggtccatgatgttgcaatggattactatggtaagaggctggccacggcttcatcagatcacacaatcaagataattggggtgagcaactcggcctctcagcatctagcaaccttgaccggtcaccaaggacctgtatggcaagtggtgtgggctcaccctaagtttggttctctacttgcgtcttgttcctatgatggccgtgtcattgtttggaaggagggca

SEQ ID NO: 177265 - DNA, 259 bp, Glycine max
gcaaagttgtttgctgtcatttctcttcagatgggacattattagctagtgctggacatgacaagaaggttgttctgtggaatatggagacattgcaaacagaaagcactccggaggaacacagtcttattattactgatgttcgcttcagaccaaattcaactcagctggcaacatcttcatttgatacaactgtgcggctgtgggatgctgcagatccaaccttccctttacatacatatagtggtcatacttcaca

SEQ ID NO: 177266 - DNA, 264 bp, Glycine max
cgaaaaatggagggaaaagaggaagatgtttccttgggagctaacaaattctcagagaggcaaccgattggaactgcggctcagagccaagacgatggaaaggactacacagagccacccccggctccacttttcgagccctccgaactcacttcttggtccttctaccgagccggaatagccgagtttgtagccactttactctttctctacataaccatcttaaccgtcatgggtgtcaataggtccagctccaagtgtgct

SEQ ID NO: 177267 - DNA, 260 bp, Glycine max
cttctttctctctcacgttttccgcttcagttttctcgggaaaatcctggtgaaaggtccaggcctctactctgacattggcaagagagctcgcgatcttctgttcaaggattatcagaatgaccacaagttcaccatcaccacttacacttccaccggagtggaaatcacttcaactggagtcaggaaaggtgagatatatttggccgatgtcagcactaaggtgaagaacaagaacatcacaactgatgtcaaagtgg

SEQ ID NO: 177268 - DNA, 256 bp, Glycine max
gcgcggcataacctaaacttacccttcttctctctgtgtgtgtgcgcatcaaacgcaaccagaagcagccatggccactgcaagaactgtgaaggacgtttctcctcatgagttcgtcaaagcttactcttctcacctcaagcgatctggcaagatggagctgccagagtggactgatattgtgaaaactgcaagatttaaggagttggctccttatgatcctgactggtactatgtcagagctgcttccatggca

SEQ ID NO: 177269 - DNA, 254 bp, Glycine max
gcaagaatggcacttcgttgcttggtgatgtccctttctgttctcttcactcttggtcttgcgagagaaagccatgccagagacgaagatttttggcatgctgtttggccaaacactcccattccaagttcattgcgagatcttctaaagcctggccctgcaagtgttgaaatcgatgatcatcctatgcaaattgtcgaaacacagtacccgaaaaccttcttctataaagcagaccttcatccaggcaaaac

SEQ ID NO: 177270 - DNA, 255 bp, Glycine max
gaaatccagtgcgtgtgtgttgtagcagcgagagaaggaaggaggaaagacgaacacagacatcactgcatcgacgaagccagagtaccctgtcattgatcgtaaccctcccttcaccaaagtcgtcggcaacttcaacaccctcgactatctccgattcgtcaccatcaccggcgtttctgtcaccgtcggctatctctccgggattaagcctggaattaggggtccgtcgatggttacagggggcttgatcgg

SEQ ID NO: 177271 - DNA, 259 bp, Glycine max
gagaaaagttagggttcacaacttttccttttccttttgcttgcgaatctgaatcaaataatcaatcatccattcattattcatcatgtcgtcggcgaagaaaatcacgctgaagagttcggacggcgaggctttcgaggtggaggaggcggtggcgctggagtcgcagacgataaagcacatgatcgaggacgactgcgccgacagcggcatccctctgccgaacgtgacgagcaagatcctggcgaaggttatcgag

SEQ ID NO: 177272 - DNA, 265 bp, Glycine max
gaagttctgaatttaaagtacaaggtttgctatgcaaggattttggatttgaagaggaagtttttggaagcagcattacgatattatgatatatctcaaattgagaaaaggcaaataggagacgaggagattaatgaggaagcacttgaacaagctttatctgctgctgttacatgcacaatattggcagctgcaggacctcaacgttcccgtgttcttgccactttgtacaaggatgagcggtgttcaaagttgaagatctatc

SEQ ID NO: 177273 - DNA, 258 bp, Glycine max
atcaaaaccaaaatgccaaggaaggtagattctgtgagaaactcaagatcaagaacaagcctaagtttgtaggagtgagacaaagggcatcagggaaatgggcagcagagatcaaagacacatcaaagaagattaggctgtggcttggaacttaccaaactgctgaggaagcagctcgagcttatgatgaagctgcgtgcctccttagaggttcaaacactcgcaccaatttctctactcataaatatggcattgctc

SEQ ID NO: 177274 - DNA, 257 bp, Glycine max
ctcgagccggtcttcagtttctcctcgttgttcttcgctttccagttttcaatttcgattctttcgttaatttaataagatgtttgggagggcaccgaagaagagcgataatacgaggtactacgaaatcctcggcgtctccaagaacgcttcgcaggatgatctgaagaaggcttacaagaaagccgccattaagaatcaccccgacaagggcggtgatcccgagaagtttaaagagctggcgcaacttatgaggt

SEQ ID NO: 177275 - DNA, 252 bp, Glycine max
ttctcactgtcttgtctctccagagaactgtatagagagagatggcagctgcaacatctggtgctgtgttaaatgggttgggatcttccttcttgagtggaggaaacaggagccaaacccttctggccactgctattggaggcaaagttggtgctgctgctgttactgttagtcctagaagactcattgtggtagctgctgctgcaccaaagaagtcatggctccctggtgtcagaggtggtggcaactcgt

SEQ ID NO: 177276 - DNA, 254 bp, Glycine max
ctcgagccgcttccttccttctccttctctctgagaacaacaccccacactcctctctctctctccgcttccttctcttctcacacctccatggcccacacttcccttccctccgccgatgccggcatggacgctgtccagcgccgtctcatgttcgaagacgaatgcattttggtggatgagaatgaccgtgtggttggtcatgattcaaaatacaattgtcacttgatggcaaagattgaagctgagaattt

SEQ ID NO: 177277 - DNA, 258 bp, Glycine max
ccctcgagccgaatcggctcgagccgcaattcactctgtacaattcactcgttcgttctctgcacgttatatcctttttgagcaccaatggcggacgctgaaaccttcgctttccaggctgagatcaaccagcttctaagtctcatcatcaacacattctacagcaacaaggagattttcttgcgtgaactcatcagcaatgcttctgatgctttggataagattcgattcgagagcttaaccgacaagagcaagctc

SEQ ID NO: 177278 - DNA, 250 bp, Glycine max
cagcaacacaaaaaggacattgctcaagaagctgtgaggaagaggagacgtgctgccaaaaagccttactctaggtccattgttggtgcgaccttggaagtaatccagaaaaagagagctgagaagccagaagttcgagatgcagctagggaagctgctcttcgtgaaattaaggagaggatcaagaaaacaaaggatgagaagaaggctaagacagcagaagttgcttccaagtcgcaaaaagcaggag

SEQ ID NO: 177279 - DNA, 244 bp, Glycine max
gagattcgccaacatcgcttgcaagaaggccgatgttgacatgaacaaaagggctggtgagttgagtgctgcagagttggatagtgtgatgactgtggtggcgaaccctaggcaattcaagatcccggattggtttttgaacaggaagaaggattacaaggatggaaagtactctcaggttgtgtctaatgctcttgatatgaagctcagggatgacttagagagactaaagaagatcagaaac

SEQ ID NO: 177280 - DNA, 249 bp, Glycine max
gtcgttgtgaaaacactgctacgttgggtgagagaaaaaatgttaaccttcctggtgttgttgttgatctccccacacttactgagaaggataaggaagatattcttcaatggggtgtacccaacaagattgacatgattgctctttcatttgttcgcaaaggctcagatcttgttaatgtccgcaaggttctggggccacatgcaaagactattcagttgatgtctaaggttgagaatcaggaaggag

SEQ ID NO: 177281 - DNA, 249 bp, Glycine max
gacacattagcctttcaatatgggggttctgcggcacacaataagatattttctgagagaagaggtcaatggaaggcagcagcccaatcccaggaatttattcgaacactacagcgttattacaacaacacatatttagatggtgataagcaaaaagcaattaacttactcttggggcattttcagccccaacagggaaaaccagcactatgggagctagattcagatcagcattacactgtcaagaaa

SEQ ID NO: 177282 - DNA, 257 bp, Glycine max
caatgtcaaccaaccccgccatttctgcaagaattgtcagagatactggactgccggtggagtgatgaggaatgttcctgtgggtgctggtcgcaggaagaacaagaattttacttctcagtatcgtcagataactgttcctgaagcagcactcttgagttctcagccggacttgccaaatggagtcagtcatccttccttgaactgtaatgccacactccttgcatttgggtctgatacacccttgtgtgaatcaa

SEQ ID NO: 177283 - DNA, 255 bp, Glycine max
attcattcaagattcagcaagtgcgttttggaagcagagaccgaaatacttcgagatggcccgtacaaagcaaactgctcgtaagtcaactggaggaaaagctcccaggaagcagcttgcaaccaaggctgcacgtaagtctgcaccaacaactggtggtgtgaagaagcctcatcgttatcgccctggaactgttgctcttcgtgagattaggaaataccagaagagcactgagctcctaatcaggaagcttcc

SEQ ID NO: 177284 - DNA, 255 bp, Glycine max
tgcttaccttgttgcagagaaggtcattgttaccaccaagcacaatgatgatgaacagtacatttgggagtctcaggctggtggctctttcactgttactagggacactgatggcgagcaactcggaaggggaaccaagatcaccctacttcctcaaggaagatcagttggagtacttggaggagaggagaatcaaggatcttgtgaagaagcactctgaattcactagttatcctatttacctttggactgaga

SEQ ID NO: 177285 - DNA, 254 bp, Glycine max
gagaaaaacagatagtgtgggagagagaagagcggaagagaaaatgacgaccaggttcaagaagaacaggaagaagagaggtcacgtcagcgccggacacggccgtatcggaaagcaccgcaagcatcccggaggtcgcggtaacgccggtggcatgcatcaccaccgtatcctcttcgacaagtaccatcctggtttcttcgggaaggtaggcatgcgctacttccacaaacttcgcaacaaattctacaatc

SEQ ID NO: 177286 - DNA, 248 bp, Glycine max
gttgaacatacaaaggtcctgaatgttgtctaccgctctgcaactgcacttggatcacgcttaccatctatatctagtgcaaaagctagagtagctggtgctggtgctattctgtggccagtaaccagtagcactcaggttgtgatgaagcgtgcacaaagtgttgctgaagctgttgtcagaactcgctcatcattgtcatcatggtcttgcatgagtgcacggcgccgaaatgtgggttcatcagt

SEQ ID NO: 177287 - DNA, 243 bp, Glycine max
taagagaatacaccaaaacccaacatgaaaacccttaacaaagcctcacttattttattccctctcttgttcctttccctattcaagcattcccatgctgcaggaatcgctatctactggggccaaaacggtggagaaggcaccttagcagaagcttgcaacactagaaactaccaatatgtgaacatagccttcttgtccacttttggcaacggccaaactccacaactcaaccttgcaggt

SEQ ID NO: 177288 - DNA, 247 bp, Glycine max
gaatttcattgcagagtgttattttgagtatcagcatcaatggctccaattgcagtgggaaacgtgattccagacggcattttggcttacttggatgaagaaaacaaaccccaaactgtctccattcactctctcgccaccggcaagaaagtcatcatctttggggttcccggtgccttcactcctacttgcagcttgaagcacgttcctggcttcattgagagagcagaagagctgaaagggaagg

SEQ ID NO: 177289 - DNA, 248 bp, Glycine max; identical to SEQ ID NO: 170261

SEQ ID NO: 177290 - DNA, 261 bp, Glycine max
caaacactctgtaactctttattttattttctttctttctttctccgatcgcatagctcgctcgcaaccaccatgccttcccgaagaagaactctcttgaaggtcatcattctcggtgacagtggggtggggaagacatctttgatgaaccaatatgtgaataagaagtttagtaatcagtacaaggcaaccattggagcggattttttaaccaaagaagtgcaattcgaagataggcttttcaccttacagatttgggat

SEQ ID NO: 177291 - DNA, 249 bp, Glycine max
cttgacttggtcactctctcaggctcacacacaattgggaggagcacttgttcttctatcatggataggatttacaacttcaatgggactaaaaagccagatccctcactaaatgtctttttcttgaagttgttgaggaaaaggtgcaaaagggtgatggatttggtgcaccttgatgtcataacccctaggacttttgacacaacctattacactaaccttatgaggacagtggggttattgtcaaca

SEQ ID NO: 177292 - DNA, 253 bp, Glycine max
ggcagactagtatccgatcctctgtcctctcgaagctttcatcgttcaacatattctcaccatctcagtcatgggcctgctatcttgttttaggtctaccgtcctgagaaaatgttccaaaggaagctctggcatgtcaagattcctgtatacgaacaattttcaacgaaacttgatttcgtctggtggcaatgaatcgtattatgggtattttaacaggagatcatacacttcactttatatgggaactgga

SEQ ID NO: 177293 - DNA, 249 bp, Glycine max
ggaaagtccctcttctcaacaatcggtttccgatcatcaaccccgctactgaagacatcatagggcatattccagccgctactaaggaagatgttgaccttgcggtggatgctgctaaaagagccttttcccataacaaaggcaaagattggtcttcagctcctggctctgttcgtgctcgctatcttcgagccatcgcttcaaagataacagagaaaaaggatgaactaggaaagcttgaagcaattg

SEQ ID NO: 177294 - DNA, 249 bp, Glycine max
gaagagaacacatattgctgcaaaagctgttgagattgccgagagacgcatattaagagacaggtggccagaatattatgacacaaagagatctcgattcgtcggaaagcaatctcgactatatcagacttggtcaatcgcaggataccttgtggcgaactgctgcttgcagacccaagtaaagcaaacacattgatcactgaagaggattctgagcttgtgaatgccttgataagtgccaaccctaga

SEQ ID NO: 177295 - DNA, 249 bp, Glycine max
cttcttctctggttgattcggatctagagtcttcagtttctcctcgttgttcttcgctttcctgttttcaatttcgattctttcgttaatttaataagatgtttgggagggcacgaagaagagcgataatacgaggtactacgaaatcctcggcgtctccaagaacgcttcgcaggatgatctgaagaaggcttacaagaaagccgccattaagaatcaccccgacaagggcggtgatcccgagaagtt

SEQ ID NO: 177296 - DNA, 248 bp, Glycine max
ccatgtcagacgaggagcaccacttcgagtcaaaggctgatgctggagcatcaaagacatttccccagcaagctggaaccatccgcaaaaacggttacattgtcatcaagaacaggccatgcaaggttgtggaggtttcaacttccaaaactggcaagcatggacacgcaaagtgtcactttgttgcaattgacatcttcactgggaaaaagcttgaggatattgtcccatcttcccataactgtgat

SEQ ID NO: 177297 - DNA, 248 bp, Glycine max
caacaattgttgagatttctccagatgctcctgtagttaaagaagaattgtttggtccagttctgtatgttatgaaatttcagactctagaagaagcaattgccttgaacaattctgtacctcaaggattaagtagttcaatctttacccaaagacctggaactatattcaaatggatcgggccacgaggtagtgattgtggtatagtgaatgcaaacatacctacaaatggagctgaaattggtggt

SEQ ID NO: 177298 - DNA, 251 bp, Glycine max
cggagagttggttaaaagtaggaaatgaaagtcagggagagagaatggcggaagaggcagggatctcccgtctagcggaggacatcctccggcagatattctgcaggctgccactgagggaaataatgatatgccgctcagtgtcaaaattcttcctgcagctgctctcaacaccttcgttcctccaggtcctctccagctcccatccacccctccagctcctggccctccgcaaccgccaccacacccct

SEQ ID NO: 177299 - DNA, 249 bp, Glycine max
tctcaatctcattcacctcaaccacttctcatcatctctatcaccccattttctcaaacacctacacaaaatgtgcttcctcaacacaaagtccctggctcacttcatgttgctaacaacaattgtagttggcattgcaatgggagattcatcaaaggacaaagaggaatgcactgagcaattggcaggcctagcaacatgtctgccctatgttgggggtcaagcacaagctccaaccccagattgttg

SEQ ID NO: 177300 - DNA, 243 bp, Glycine max
ctggcaccaacagccaagactctgacttacctggcccaggagaaaaccctagaatcgagcttcgttcgggacgaggaggagcgtcccaaggttgcctacaacgaattcagcgacgagatcccagtgatttctcttgccggaatcgacgaggtggatggacgcagaagagagatttgtgagaagatcgtggaggcttgcgagaattggggtatattccaggttgttgatcacggtgtggatcaa

SEQ ID NO: 177301 - DNA, 135 bp, Glycine max
cgttgtggcacttgcaagggcattgggatcaatgccaggagtttatcgggttgatttgctaactagacaagtgtcggcgccagatgtagattagagttatggggagccgacggaaatgttgtctccaagagacac

SEQ ID NO: 177302 - DNA, 242 bp, Glycine max
gctttcttgagttgagttaacagcatggagagggaggaagatgttaaggttggagcacagaaattctcagagaggcaagcattggggacaggagctcagggtgacaaggactacaaggaggcaccaccagcacccttgtttgagccaggggagttaaagtcatggtctttttacagagctgggattgcagagtttgtggccacattcttgactgtcatgggtgtcaacagggcacccaacaa

SEQ ID NO: 177303 - DNA, 246 bp, Glycine max
caaacattgcaggatttgcaacttgattaccttgacctctatctgatccactggccagtgcgcatgaaaagcggatcagttggattcacgaaggaatatctcgatcaaccggacattcccagcacatggaaagcaatggaggcactctatgactcaggcaaggcaagagccataggagttagcaattctctcttcaaaaaagcttcaagatctcatgaatatagcaagagtgcctcctgctgttaa

SEQ ID NO: 177304 - DNA, 254 bp, Glycine max
tgtgagctataagctagtttatcgtgaggcgaatatgaagttgtttgttctctttgttgctgcagtagttttggtagcatggccatgccatggcgcaggctaccaaaggttccctctccgaatgaaaactggctatggtgagcgttcttcggaggtaaaatgcgcaagttttaggcttgctgtggaagcacacaacatccgagcctttaacaccattcctgaagagtgcgttgcaccaacaaaggactacatta

SEQ ID NO: 177305 - DNA, 250 bp, Glycine max
ctagaaacagtgtgatgaaaatgaaggtccttgttttcttcgttgctacaattttggtagcatggcaatgccatgcgtacgatatgttccctctccgaatgaacactggctatggtgcccgtactccggaggtgaaatgcgcaagttggaggcttgctgtggacgcacacaacatctttggctttgagaccattcctgaagagtgcgttgaagcaacaaaggaatacatccatggcgaacaatatagatc

SEQ ID NO: 177306 - DNA, 251 bp, Glycine max
gagaaaaacagatagtgtgggagagagaagagcggaagagaaaatgacgaccaggttcaagaagaacaggaagaagagaggtcacgtcagcgccggacacggccgtatcggaaagcaccgcaagcatcccggaggtcgcggtaacgccggtggcatgcatcaccaccgtatcctcttcgacaagtaccatcctggtttcttcgggaaggtaggcatgcgctacttccacaaacttcgcaacaaattctaca

SEQ ID NO: 177307 - DNA, 139 bp, Glycine max
cctttgttcactcttcttctcttgcggctagggttttagcgcagttacttctagatttaaggcagatgggtaaggcaaaggttcacatcagtattgtggtcattggccatgtcgactctgggaaatccactaccactgg

SEQ ID NO: 177308 - DNA, 246 bp, Glycine max
cttgatttcttgcttctatatattacttgcttcttttcttgatcatgtcccttgctggtaaaatcagctctgaaattggtgttcaggcaaccgctgcaaagtggttcaacctcttcacaacacaacttcatcacgttcaaaatcttactgatagaattcatggaaccgagctgcatcatggtgaagactggcatcacaatgagtcggtcaagcactggacttataccatagatggcaaggttacaa

SEQ ID NO: 177309 - DNA, 244 bp, Glycine max
tctcaaccctccttaaaccctaaccaatccaaccatggcttcttcttccaccttcactgcaatgcccgcctgcaagctctcctcctccgccgccatctcctccttcccctcccgccgccgctccaacgccgtcgttctgtcgaggcgcacgcgccgccagggtctccgccatggccaaggagttgcacttcaacaaagacggcaccgcaattaagaagctccagagcggtgtgaacaagctcgc

SEQ ID NO: 177310 - DNA, 246 bp, Glycine max
cttcatttcaaatcccaacaaaaaaccaaagtaatctaacaaagtaagcacaatgagggagatattgcacgtgcaaggtgggcaatgcgggaaccaaatcggttccaagttctgggaagtgatatgcgacgagcatggcatcgaccccaccggaaagtacaccggcgacgaggcctccgatctccaactggagaggatcaacgtctactacaatgaagcctccggcggaaggtacgttccccgggc

SEQ ID NO: 177311 - DNA, 240 bp, Glycine max
tgaagttgtttgtcttctttgttgctgcagtagttttggtagcatggccatgccatggcgcaggctaccaaaggttccctctccgaatgaaaactggctatggtgagcgttcttcggaggtaaaatgcgcaagttttaggcttgctgtggaagcacacaacatccgagcctttaaaaccattcctgaagagtgcgttgaaccaacaaaggactacattaatggcgaacaatttagatcag

SEQ ID NO: 177312 - DNA, 240 bp, Glycine max
ctataagctagtttatcgtgaggcgaatatgaagttgtttgtctactttgttgctgcagtagttttggtagcatggccatgccatggcgcaggctaccaaaggttccctctccgaatgaacactggctatggtgagcgttcttcggaggtaaaatgcgcaagttttaggcttgctgtggaagcacacaacatccgagccattaaaaccattcctgaagagtgcgttgaaccaacaaagga

SEQ ID NO: 177313 - DNA, 247 bp, Glycine max
atccaagttcaaagatgaagatgatccacgttcttttcctctttgctcttgtctcgttcacttcccatgcttctgtcaatgatttctgtgtagcagacctaaaaggtccagatagcccttcaggctatcagtgcaagccacctaacacagtcacagtggatgactttgtgttctctggctttgtagctggacacaccacaaacactttcaatgctgcattaacctccgcatttgttactgattttcc

SEQ ID NO: 177314 - DNA, 247 bp, Glycine max
atacactctgctcgtagggtttctccacctagagggaaatggctcccaaaccgcctagtacgggtctgtttgttggactgaacaagggtcacgtcgtcaccaagaaggaattgcctccacgcccctcagatcgtactgggaaaacaagcaagagggtgcactttgtgaggaacctcataagagaggtagccggttttgcaccctatgaaaagcgtataactgagttgctgaaggttgggaaggataa

SEQ ID NO: 177315 - DNA, 245 bp, Glycine max
cgaatagattatcctaagtctttgggaatagtgctgcaatggcttcaagtcaggaggaggtgacccttttgggagctactggaagcccatttgtgtgcagggttcatattgccctcaagttgaagggagttcaatacaaatatgtcgaagaaaatttgaggaacaagagtgaactgcttctcaaatccaacccagttcacaagaaggttccagtgtttattcacaatgagaagcccatagcagag

SEQ ID NO: 177316 - DNA, 243 bp, Glycine max
ctgctatcgataacatatttcacttgagacagttatctttatctacgcaagagaagaatagaaaatggatatcaggttgatggatttggactctccattgttcaacactctgcaccgaatcatggatctgacagaggacgcagagaagaacttgaacgctccgacgcggacatacgtgcgcgacgcgaaggcaatggctgcgactcctgcggacgtgaaggagtaccctaactactacgtgtt

SEQ ID NO: 177317 - DNA, 241 bp, Glycine max
gtctgtttggatggaacggtgcctggataccatttggatcgtggatttggatctggtgcagatagttggcttattcatttggagggaggaggatggtgtaataccatcagaaactgtgtctatagaaaaaatactcgtcgtggatcctcaaaatacatggaaaatcaaataccattcacgggaatattgagcaacaaacctgaagaaaaccctgatttctttaactggaatagagttaaat

SEQ ID NO: 177318 - DNA, 236 bp, Glycine max
caaacgcagcattgggagatagacagagagagagacagagagagagagaaagacccttacccttctctatcgctcgctttcctttgacgcttctgacccttgctttgtctgcgtcttccttctttctttctttctttctctgtgtgtcgtaatggctctcccagactcttcttcccgtcgcaactccctgatcccctccttcatctactcctcttcctccaaaacgctccctctcc

SEQ ID NO: 177319 - DNA, 236 bp, Glycine max
atcatttctccatttccattttctctctcacttttcaagaatcgtaagctatgggaaagtcttacccaactgtgagtgctgattaccagaaggccgttgagaaggcgaagaagaagctcagaggcttcatcgctgagaagagatgcgctcctctaatgctccgtttggcatggcactctgctggaacctttgacaagggcacgaagaccggtggacccttcggaaccatcaagcac

SEQ ID NO: 177320 - DNA, 235 bp, Glycine max
ttcttcccaaccactactactcactcactgcagatctcaattgcatcgctgtccatggctaccatcgttagcatcaaggcccgccagatcttcgacagtcgtggcaatccaactgtcgaggtggatttgacttgctccgatggtacttttgccagagctgctgttccaagtggtgcatccactgggatttatgaggcccttgaattgagagatggaggatctgactaccttggaa

SEQ ID NO: 177321 - DNA, 272 bp, Glycine max
acgaatagctctgcaaaaagttctgccaagggtgtagttgacaactcccagcctttccaaaagaatggtgctattgtgttactccttggtgctttctatttgctcagtagatatgccattcactgcacatgggtcacatcgaggcttactcatctccctcaattgtcttggctgcgaggggtgcccatggcaacagggtcatctttgatgattatcgtgaagcttacttttggcttcgccagaacactccacaagatgccaaggtgatgtca

SEQ ID NO: 177322 - DNA, 270 bp, Glycine max
cgtttgttgtgagctataagctagtttatcgtgaggagaatatgaagttgtttgttttctttgttgctgcagtagttttggtagcatggccatgccatggcgcaggctaccaaaggttccctctccgaatgaaaactggtatggtgagcgttcttcggaggtaaaatgcgcaagttttaggcttgctgtggaagcacacaacatccgagcctttaaaaccattcctgacgagtgcgttgaaccaacaaaggactacattaatggcgaaca

SEQ ID NO: 177323 - DNA, 269 bp, Glycine max
gcaagacatgagagactgctacgatagcttgctttccgcggcagagcgacccccaacagtgcttatgaattctcagagtccttgggagatttgggctcttgccttctggagaaaaccgccttgcatgacgacgaagaagcggcaaagttctcataatgctcggtaaaatacagtttcaactccagaagcttattgataaatatcgctctcatatcacccagacaattaccattccttcggactctcttctcaatgaacttcgaattgtt

SEQ ID NO: 177324 - DNA, 270 bp, Glycine max
ccattggctaagcactcatgcaattgttgagccatttgtcatagcaacaaacaggcaactgagtgtggttcaccctatttacaaacttctgtttcctcactaccgtgacaccatgaatattaattcacttgcccggaagccctggtcaatgcagatggtattatagagaaaacattcttgtggggtaggtactctatggaaatgtccgctgtcatctacaaggactgggttttcactgatcaagcattacctaatgatcttgtaaagaga

SEQ ID NO: 177325 - DNA, 276 bp, Glycine max
cagttatctttatctacgcaagagaagaatagaaaatggatatcaggttgatggatttggactctccattgttcaacactctgcaccgaatcatggatctgacagaggacgcagagaagaacttgaacgctccgacgcggaatacgtgcgcgacgcgaaggcaatggctgcgactcctgcggacgtgaaggagtaccctaactactacgtgttcgtgatcgacatgccaggcctgaactccggggacattaaggtgcaggtggaggatgataacgt

SEQ ID NO: 177326 - DNA, 276 bp, Glycine max
aggttgagtggtgttttgcatcttgaaggatctgtgaagaccacaaaattgaaactcacttggctacctgagatagatgaactagttagcctgacattagtggagtttgattatctaattacaaagaaaaagcttgaagaagggaggatttcattgatgtggttaacccatgtaccaaaaaggagactttagcttatggagactccaacatgcgaaatcttcagcgtggagatttattgcaactggagagaaagggatatttcaggtgtgatttac

SEQ ID NO: 177327 - DNA, 284 bp, Glycine max
  unsure (1)..(284): unsure at all n locations
cgagataactagatacagtgtgatgnaaatgaaggtccttgttntcttcgttgctacaattttcgtagcatggcaatccatgcgtacgatatgttccctctccgaatgaacactggctatactgcccgtactccggaggtgaaatggcaagttggaggcttgctgacgaagcacacaacatctttggctttgagaccattcctgaagagtgcgttgaagcaacaaaggaatacatccatggcgaacaatatagatcagactccaaaacagttaaccaacaagct

SEQ ID NO: 177328 - DNA, 255 bp, Glycine max
ccgtaagatggtgaactatgcctgagcggggcgaacagtatgaaactctggttgaggctcgcagcgatactgacgtgcaaatcgttcgtctgacttgggtataggggcgaaagactaatcgaaccgtctagtagctggtccctccgaagtttccctcaggatagctggagcccgcgggcgagttctatcgggtaaagccaatgattagaggtatcgggggcgcaaggcctcgagctattctcaaactttaaatag

SEQ ID NO: 177329 - DNA, 269 bp, Glycine max
ctccaaggtggtgctcaccaaggatacaaccacaattgttggtgatggaagtacccaggaagcagtgaacaagagagttgcacaaattaggaacctaattgaggctgctgagcaagagtatgagaaagaaaagctgaagagagaattgctaaattgtctggtggtgtggctgtgatacaggtttgcgcacaaactgagacagagctcaaggaaaagaaattgagagttgaagacgctcttaatgctacaaaggcagctgtagaggaagg

SEQ ID NO: 177330 - DNA, 276 bp, Glycine max
acaaccactcttaatttctctctgccttgctcatttacacacctctccaacctctcactttcagctttatttgaatccctctctctcctttccaaatggccagcgttgaggttgcacatcaaacaccaacaacagttccagaaatgaaacaaccgaggtaatcaagacccaggaaacaaccccggaaccagtaccagccactgaggctcctgcaacagaacaagcagcagctgaggttcctgctcaagaagaacaacaagcaactgaggttcctgc

SEQ ID NO: 177331 - DNA, 276 bp, Glycine max
cgagagagagagcgagcagtttcagacacagagagaggggtttgggattggagggattgacgctgcgtctcttcctcttctctttcgatccatccctcattcctaatcctccaatccaaccacctcagcctcacactcacaatacacatatctgaacgcgtatcgtccctcctatggcttcaaagcgcatcctcaaggagctcaaggacttgcagaaagacccaccaacttcttgcagcgctggtccagtagctgaggacatgttccattggcaag

SEQ ID NO: 177332 - DNA, 277 bp, Glycine max
cattctgcttgcagctgatggcgcaaattctgctccatgggactcttcatgccactatctatgaagtcgataagctcaaaattggtggaggcaactttttaaccaagatcgtacaaaacatcgaggagactgttggtattggaaaggtgtcactaaactatatgcaaccattgatctagagaaggcacgagtggggaggaccagaattattgaaaaagagattaacaatccaagatggtacgagtcctttcatatttattgtgcccatatggcatca

SEQ ID NO: 177333 - DNA, 281 bp, Glycine max
acggaacaaacagggaatataagagagaaaaagatgggtttcataatggaattcgcggagaacttggtattgaagttgatggaggatccgaaggacagggatcggaggttccgggagcacgtttatagagtgaaggacaggtgcggaagacgaaggagatgtggagctaccctatgcgaccctatgggttttggactttcgaacgccacaattctcagcttgcttgggatgcacagattagccaagtggctgggaggagggacccttatgatgatatcctc

SEQ ID NO: 177334 - DNA, 288 bp, Glycine max
  unsure (1)..(288): unsure at all n locations
caaaacaaaaacaaagtaagagttcactcaatctcactgtgttgtgagttgtgtgtgagcaccaaccaacaatggtgtctctgactccgttatgtttctttattaccttgttgatcgctggtgcagacgcaccggcggagccccaanacgtgcgttttgacaccggggggttgagcagagacacctttcccaaaggattcttattcggaacggccacgtctgcgtaccaagtggagggtatggcccacaaagacggtcgcggcccaagcatttgggacgtcttcatca

SEQ ID NO: 177335 - DNA, 272 bp, Glycine max
ctattcttacaagttacatccattgagaaacatgaaggtctcgcccttagcattttcaatcctttttttgtccttcaccatagaactcttcattggcattgcttcagcagcacaagaaccagtgcttgacacctcaggcagaagctgagaacaggtgtcaagtactacattctaccagtcttcagaggcagaggtggaggcctaacagtttcaagcagtggcaacaacacatgccccctctttgtggtgcaagagaagcttgaagtctcaaa

SEQ ID NO: 177336 - DNA, 270 bp, Glycine max
acggatctagagtcttcagtttctcctcgttgttcttcgctttcctgttttcaatttcgattctttcgttaatttaataagatgtttgggagggcaccgaagaagagcgataatacgaggtactacgaaatcctcgggtctccaagaacgtctcgcaggatgatctgaagaaggcttacaagaaagccgccattaagaatcaccccgacaagggcggtgatcccgagaagtttaaagagctggcgcaagtctatgaggttctgagtgacc

SEQ ID NO: 177337 - DNA, 265 bp, Glycine max
cgttgtgagctataagctagtttatcgtgaggagaatatgaagttgtttgtcttctttgttgctgtagtagtcttggtagcatggccatgccatggcgcaggctaccaaaggttccctctccgaatgaaaactggcatggtgagcgttcttcggaggtaaaatgcgcaagtcttaggcttgctgtggaagcacacaacatccgagcctttaaaaccattcctcaagagtgcgttgaaccaacaaaggactacattaatggcgaac

SEQ ID NO: 177338 - DNA, 267 bp, Glycine max
agagtttgttgtgagctataagctagtttatcgtgaggagaatatgaagttgtttgtcttctttgttgctgcagtagttttggtagcatggccatgccatggcgcaggctaccaaaggttccctctccgaatgaaactggctatggtgagcgttcttcggaggtaaaatgcgcaagttttaggcttgctgtggaagcacacaacatccgagcctttaaaaccattcctgaagaccgcgttgaaccaacaaaggactacattaatggc

SEQ ID NO: 177339 - DNA, 272 bp, Glycine max
cattttactctgcagcagcagccaccacccatggcgtcgttttccgccgccgtcgctcagttctcccgcgtttcaccttctcacacttcgctccactcctcactctcacggcacgctcttccaatctcaatgccgccctttttcctctcgcgcacttcccattcactccggaagggtcttactttaccacggggaagagaggcaccgagtacatctgtacgtgcttcatttacagatgtttcaccgaatgtgtccttggaggaaaaacaact

SEQ ID NO: 177340 - DNA, 271 bp, Glycine max
gttggcaacgccttggtgttggagatcgtgatgaccttcggtctggtgtacacggtctacgcaactgccattgaccccaagaagggtaatttgggaattattgctcccatcgccattggtttcattgtcggcgctaacatttgttgggtggggccttctctggagcggccatgaaccccgctgtgacatttgggcctgctgtcgtgagctggacctggaccaaccactggatctactgggccgggcctctcatcggtggtggaatcgctgg

SEQ ID NO: 177341 - DNA, 276 bp, Glycine max
tcaaggggagtgccaggatgaacaaaggggtacatctgtctaccttgttgagcggcggatagacatgcttcccaaacctcttacagaggacatatgttctcttcgttctgatgtggaaaggcttgcattctctgtcatatggaaatgacacctgaagccgacattatttctaccagatacacaaaaagtgtcataaaatcttctgcagcattgtcttatgttgaagcacaagcaaggatggatgatagtcgtttgatggatccaattactgctgat

SEQ ID NO: 177342 - DNA, 270 bp, Glycine max
cggggatggctcagagcatggaaaggcatcacgagaagatgaagcttgggggaaggaagtcccaagctagaaaggtggtactatagaggattacaaggacaagaacgtggatgaacatcttaatgatgaggaagaattgatgaatcagacaagtcagatcataatgaagctccagaatatagacacctaattgccattcatgctgggaagcctaaaggtggattagtggaatgcctcaaagtggatcctgaaaaagtgagacgtctaagt

SEQ ID NO: 177343 - DNA, 267 bp, Glycine max
agttgaaatcattacccctgtggagctcattaagaagggagacaaggttggatcttctgaagctgcattgcttgccaagctagggataaggcccttctcgtatgggcttgtggttctttctgtttatgataatggtcagtgttcagtcctgaggttcttgatcttactgaggatgaccttattgagaagtttgctgctggtgtctcaatggttacttcactttcattagctatctcatacccaacacttgctgctgcaccacacatg

SEQ ID NO: 177344 - DNA, 267 bp, Glycine max
atgaaagcaataagtccctccttcctctgccttataattcttgtgacccttttcgctggtagcattgaaagtgcaccagcaaacgtgaagccaagccattatgctgcacccttcaataggagtgtttttccttctgttttctatttggaataggctctgcagcttaccagatagaaggagcagcagctatagatggcagaggaccaagtatatgggacacctatactaaacagcaaccagggaagatttgggatcatagtgatggaa

SEQ ID NO: 177345 - DNA, 267 bp, Glycine max
cggaatccttgtcccatttgaagctcaacactgtctgcgaggaggcacagtgccccaacataggagagtgttggaatggaggtggagatggcattgcaactgcgacaatcatgcttcttggggatacttgcacacgcggtgtaggttttgtgctgtgaagaccagcagaaaccctccacctgctgatcctatggaactggaaaatactgccaaggcaattgccagttggggcgtggattatattgtcttaacaagtgtggatcgtga

SEQ ID NO: 177346 - DNA, 268 bp, Glycine max
gcaaaacagatagtgtgggagagagaagagcggaagagaaaatgacgaccaggttcaagaagaacaggaagaagagaggtcacgtcagcgccggacacggccgtatcggaaagcaccgcaagcatcccggaggtcgcgtaacgccggtggcatgcatcaccaccgtatcctcttcgacaagtaccatcctggtttcttcgggaaggtaggcatgcgctacttccacaaacttcgcaacaaattctacaatccgatcatcaacatcgac

SEQ ID NO: 177347 - DNA, 269 bp, Glycine max
aggctgaaatattggtgaatgttgtgccaataaccaaagaggatgacagaattcacaactaccaagtgccttctgatgactgttttgctcacttggaagttcagttcagactctttgctttgtcccagaaagttgatgtgtacttggaaggacttataggttggattttgagaacccagcaaagcctggtgtggctatgcctgttgttggaggagaagacaagtacaggactaactcattgctctctcctgattgtgtttcttgtgtgt

SEQ ID NO: 177348 - DNA, 272 bp, Glycine max
ctttaccagttgccacactacaccgagataccccctaaaccagtttgcgttgttgtttgcgaagaaatggcgactaagaggagcgtgggaacgttgaaggagggtgatttgaaagggaagagggtgttcgtgagggtcatctgaacgtgcctttggatgacaaccttaacatcaccgatgacactagagtccgtgctgctgttcccaccatcaagtacttaactggtcatggagccaaagtgatcctttctagccacttgggacgtcctaaa

SEQ ID NO: 177349 - DNA, 274 bp, Glycine max
ctctcattccctctctccctaaaatggccactcttccctcctacgaccacctcatcttcactgccttagctttcttcttatctggccttattttcttcctcaaacataaatccacatccaaatccaaaaaattcaacctcctccaggaccccctggatggcctattgttggaaacctcttccaagttgctcgttccgggaaacctttctttgaatacgtgaacgatgtgagactcaaatatggctcaatcttcaccctcaagatggggacaagg

SEQ ID NO: 177350 - DNA, 280 bp, Glycine max
catcatcaatgatataaactccttgctcctcttgactcattcattcactcccaatatgatggaattggaagccaccgccgctacttccccaccttctcgcgttctcctcatctccgccggtgccagccacaccgttgcccttcctctgggaatgttgtgtgttcgtcgggtcgcggagaggacggacagttaggccatggtgacaccgatgataggcccttacccacgcagctcagtgcattggatgcccaacacattgattctattgcctgtggagctg

SEQ ID NO: 177351 - DNA, 286 bp, Glycine max
cgcgaaccacaacggaagagtaaattaccgtcaaccgaatagccgtttctccgtcaaaggctccgccaaagagattgcctttgaccagcattcccgctctgctatgcaggccggcattgacaagctcgccgacgccgtcgggctcatcttgggcccagggggaggaatgttgtgttggatgagtttggaagtcctaaagtggttaacgatggtgtcaccattgctcgcgccatcgagcttccagatcctatggaaaatgccggtgcagctcttattagagaggttg

SEQ ID NO: 177352 - DNA, 268 bp, Glycine max
agagagagcgagcgagcgagcagtttcaaagagaggatttgggattgggaaggcgagggattgcgctgcgtctcttcctcttctctttcgattcatccctcattcataatcttccaatccaacaacctcagcctccactcacacatacacacatctgaacgcgtatcgtccctcccatggcttcaaagcgcatcctcaaggagctcaaggacttgcagaaagacccaccaacttcttgcagcgctggtccagtagctgaggacatgtt

SEQ ID NO: 177353 - DNA, 265 bp, Glycine max
agtttggtcttgttaggttacctctgtgacatttgtattgttagttcgtagttgcggctgacacccagaaagaaagaaagcaggaaaaaaacaaaaaggcgcagatgggtagcacaggtttctcatggaaattggggatcatccaaagcttccaaagggtaagactgtggctgtggtggtgttggatggttggggagaggccacacccaatgagtacaactgcatccacaaggctgaaacaccctgcatggattctcttaaaaag

SEQ ID NO: 177354 - DNA, 266 bp, Glycine max
tagcagcagaacagagagagcaaaaccctagagcatccatcacaagcagaggaagaagatggtgaagttcctgaagcctaacaaggcagtgatcgtcctgcagggccgctacgccgggcgcaaggcggtgatcgtaggcccttcgacgagggaaccagggagcgcccctacggccactgcctcgtcgccggaataaagaagtacccaagcaaggtcatcaagaaggactccgcgaagaagaccgcgaagaaatctagggttaaggc

SEQ ID NO: 177355 - DNA, 271 bp, Glycine max
gaaaatcctcacccattttcttcgtagccaaacactctgaaattctcagttatgtcgtggcaagcgtatgtggatgatcacctactgtgtgaaatcgaaggtaaccacctcactcacgccgctatcatcggccaagcggaagcgtttgggctcagagcaccaacttccctcagttcaaacctgaggaaataactgccatcaataatgactttaatgagcctggatcacttgctccaactggattgtatatcggtggcaccaaatacatggt

SEQ ID NO: 177356 - DNA, 272 bp, Glycine max
agcactgtggcagaagtcctaggagtgtaaaacagagacgcaaaatgaagacgatcttgtcgtctgagaccatgaatattcccgacggcgtgagcatcaaggttcacgctaaggttatcgaggttgagggccctcgtgaaaactcgtgcgagacttccagcatctgaacttggacttccaacttattaccgacgatcgcggtaaaaggaagctcaagattgattcttggtttggttctcgtaaaacctccgccgccatccgcaccgccctca

SEQ ID NO: 177357 - DNA, 271 bp, Glycine max
cacctttctcctaaaacatctccagtgggttcttcttcttctattacaacaacgtcgcccaagaccatgaccatggccatggccacgatcctgctcctgttcacggtcttcgcggtttcatcggccctagacatgtcgaaatctcgtacgacaacgcccacgccgccacgtcgcgcagcacgaggagctgatgtccatgtacgagcagtggctagtaaagcacggcaaggtgtacaacgcgctcggagagaaggagaagaggttccagatc

SEQ ID NO: 177358 - DNA, 272 bp, Glycine max
agagttacaagagaaatcatcatggcatcagcagcatctgggtttgtgttgtcacttaatgttgcagctgccaccacaaactcaagggtggtcatgttcaacaccaagaacaacacttctaggtttgttgtaaaggcttcaatgagcctgccgcggcggcacccgccaccgccacacccccagctgaagctgaagctaaaccaaagccaccacctattggccccaagagaggtgctaaggtgaagattcttaggaaggaatcttactggtac

SEQ ID NO: 177359 - DNA, 278 bp, Glycine max
cgaatgccgagggagattccgacgagcttgtagatcctccgaagtggaggacaagatcggtgctgtgcctcatggcctttccaccgattcagatgtcgtcaagagggagtcggagtcgatctcgaagagatctctccggagaatgcggagaagtttgagttccaagcggaagtgtcacggcttatggatattatcatcaattctctctacagtaacaaggatatcttcctcagagagttgatttccaatgcttctgatgctttggacaagattaggtt

SEQ ID NO: 177360 - DNA, 265 bp, Glycine max
taacaagctagctattagttcgattttgtagtaagtgaggtgccaatatggtgaagatagctcttggtactttggatgactcttttagcgctgcctctcttaaggcttatttcgcagagttccacgcaactctattttcgtgttcgctggtgttggatcagccatcgcttacaacgagcttacaaaagatgcagccttggatccaacggggctggtggcagtagctgtggcacatgcatttgcactgtttgtaggtgtctccgtc

SEQ ID NO: 177361 - DNA, 265 bp, Glycine max
gtggagttcaccgaggctgagagcaacatgaatgacttggtggcagagtatcaacagtatcaagacgccgccgccagcgaagaaggcgagaacgagatcgatgacgaggaagccatggctgcatgagagcctcttaaagcctctccggaagaaattattatataatctagattaccacgtcatcatggtcgactcaattttcactgttacattaatcaaaatttttaatatacaataacaaattttgattagatgcaatgtgaag

SEQ ID NO: 177362 - DNA, 265 bp, Glycine max
cctttctttctccaaagcccaattccaaagccctcgtttcacttttcccaatccgccatcgccgccgccactgcattgctccgctctctccgccgccgcgaccttccctcttcttctctctccgccttccgatgttgacgagtggcacaaagacatcatatgtaggtaacaagtgggcaagtttgtcacgaccgttcagttcaaagcctgctggtaatgatgtcattggaattgatctgggtactaccaattcgtgtgtctctgt

SEQ ID NO: 177363 - DNA, 267 bp, Glycine max
gtttctctttctctttctctgtctgcttcttcactttctctcgtttcaatcgaaaaaaatcatgggcagaaaattcttcgtcggtggcaactggaaatgcaatgggaccactgaggaggtgaagaagattgttatactttaaatgaagctaaagtccctggagaagatgttgtagaagttgttgtgagccctccttttgtgttccttccttttgtaaaaagtttgctgcgccctgatttccatgtctcggcccaaaattgttgggtt

SEQ ID NO: 177364 - DNA, 267 bp, Glycine max
aaacaaccatggtgcacgtctccttttacaggaactatgggaagacattcaagaagccgcgtcgtccgtacgagaaggagcgtctcgacgcggagttgaagctggttggtgagtacgggcttcggtgcaagagagactgtggagggtgcagtacgcgctcagccgcatccgcaacaacgcgcggaacctcctcagcctcgacgagaagaacccgcgccggatcttcgagggagaggcgctgctccgaacgatgttccgttacggtct

SEQ ID NO: 177365 - DNA, 271 bp, Glycine max
cagaaagggaaagttgaacgagcaatgaatgccagaccacgcaccactcttcactcaatgaaacctcctttaaatgaaaccaaagggaagatggaaactggaggagggaagagagcagtgggtggtggccacaagaagggcgtcgatccaatcgagaaaggaaaatggctttgatccaagatgtagataagctgaagaggaaactcagacatgaagagaatgtccatagagctttagaaagagcattcactaggcctttgggatctctacc

SEQ ID NO: 177366 - DNA, 270 bp, Glycine max
cgataaatcctgtgaaaaacacgatcgcctcgccagtggaaggctttctgcgttcagtcaatctactgagagtgaatcggtcactaaggaagcccccaccccgaaagggctgccgtccgatgggtacacgaaagtgacaagttgctttgactacagaaccatgccggtctgtcggagtgaattggatcatcgggccgagggctgccccctcttcccctcactctcctttccctaagatgaaccttgcttgagtcatcaaagcctgtctga

SEQ ID NO: 177367 - DNA, 279 bp, Glycine max
gagtcagatgccaaggagaggttgttgctcacaacaaaggcagcagaaaaaatgggagttccattggggttcaaattggttagaggtgcctacatgtccacagagagtaaattggctgagtcatttgggtatgcatccccaatcacaataccattcaagaaacacacaattgcttcaatggctgctcatcatttcttcttgagacgattgctaatggacccggttcaatttcagttgttcttgcaactcacaatattgaatcagggaaattggctgcag

SEQ ID NO: 177368 - DNA, 161 bp, Glycine max
attcatccaagttcaaagatgaagatgatccacgttcttttcctctttgctcttgtctcgttcacttcccatgcttctgtcaatgatttctgtgtagcagacctaaaaggtccagatagcccttcaggctatcagtgcaagccacctaacacagtcacagt

SEQ ID NO: 177369 - DNA, 164 bp, Glycine max
ttacctacctctttttcttctctctcaacaacttcaccttcttcctcctcgatcatgtctcacttcaagggcaagtaccatgatgagcttatcgccaatgctgcgtacattggcactcctggaaagggtattcttgctgctgatgagtcaacagggacaattgg

SEQ ID NO: 177370 - DNA, 166 bp, Glycine max
gtaagcaggacctttaagcttcctaatcccctgtactacattcagtagttccttcacctctcaacaatctagcttgctcctatctatctatatgtaataagatgcgttcaaataggggcactagcttcactttatgttgtttcagctgtgtgtcaacaagtcatgt

SEQ ID NO: 177371 - DNA, 166 bp, Glycine max
tcgagtttcacagccaagtcgtaaaagggtttcaagggatggaaaacatgcagagcttctggcaattgggtgatgaactccgtgggcactcaaaagcatcggaggatcacaagtggttaatggttgcctcgaaactggccgaacagacaagattgaagggggagcg

SEQ ID NO: 177372 - DNA, 164 bp, Glycine max
ctaatcctggaccatcacccccttcacctgtgaagccaccaaatgtctgtgacaactactacagctgtgctgatagtgctacttgttgctgtattttcgagttcggaaatgcttgctttgagtggggttgctgtcctcttgagggtgctacctgctgtgatgac

SEQ ID NO: 177373 - DNA, 166 bp, Glycine max
aaaaaaaaaaaatccgcgattcgctcttctcttggaaaagtgaaaaccagaagtacgaacgaaagagaagagcgatttagaagtgagagaagatggggttgtcgttcacgaagctgttcagcaggttgtttgcgaagaaggaaatgaggatcctgatggtaggtct

SEQ ID NO: 177374 - DNA, 167 bp, Glycine max
gctgctatcgataacatatttcacttgagacagttatctttatctacgcaagagaagaatagaaaatggatatcaggttgatggatttggactctccattgttcaacactctgcaccgaatcatggatctgacagaggacgcagagaagaacttgaacgctccgacg

SEQ ID NO: 177375 - DNA, 170 bp, Glycine max
gcttaaggacctccagaaagaccctccaacctcttgcagcgccggtcctgtagcggaagatatgtttcattggcaagcgactataatgggtccccctgatagcccttatgctgggggtgtttttctagttactattcattttcctccggattatccattcaagccaccca

SEQ ID NO: 177376 - DNA, 161 bp, Glycine max
aagtcattgctattctgctgcagcgggatgtccttgttgatggcaaagtcaggactgacaaaacataccctgctggttttatggatgtcttatcaatccctaaaacaaatgagaactttcgcctgctgtatgacaccaaaggtcgatcccgtctccactca

SEQ ID NO: 177377 - DNA, 160 bp, Glycine max
tacacattggatgattgaaatgaaaatccttttactagattggtaatgcacttgatctattgttccataactaataactaaagtgagctataagctagtttatcgtgaggagaatatgaagttgtttgttttctttgttgctgcagtagttttggtagca

SEQ ID NO: 177378 - DNA, 165 bp, Glycine max
agtgtttgagattgttatcacatttgggttggtttacactgtgtatgcaactgcagtagacccaaagaaggggtcattgggtatcattgcacccattgctattgggttcgttgtgggtgccaacatcttagcagcaggcccattcagcggcggttcaatgaaccc

SEQ ID NO: 177379 - DNA, 167 bp, Glycine max
cgaagagagagggagattctttgtttgctaccttctctcggaaaaatggttacgttcaggtttcaccagtaccaggtggttgggagggctcttcccacggaagcagatcagcaccccaagatctaccgaatgaagctctgggccaccaacgaggttcgcgccaagtc

SEQ ID NO: 177380 - DNA, 169 bp, Glycine max
ctctctcccttagtcaaagggattcatcgttcttcttcccaggctatttagaaaagcaaaatggtgaagatttgctgcattggtgctggatatgtggggggtcctactatggcagtcattgcacttaagtgcccatccattgaagtcgctgttgttgatatctctaaat

SEQ ID NO: 177381 - DNA, 169 bp, Glycine max
tgttgatcgagataactagaaacagtgtgatgaaaatgaaggtccttgttttcttcgttgctacacattttggtagcatggcaatgccatgcgtacgatatgttccctctccgaatgaacactggctatggtgcccgtactccggaggtgaaatgcgcaagttggaggc

SEQ ID NO: 177382 - DNA, 158 bp, Glycine max
caagtatagtgtagtattccaatatttgtcaaccctttgagagttagaatggctgctgctattgaaatccccacaatagtgtttccaaactcctctgcccaacagaggatgccagtggttggaatgggatctgcccctgacttcacatgcaagaaaga

SEQ ID NO: 177383 - DNA, 158 bp, Glycine max
cagagaggcttatggaaggagtaccgcacccaatacccagaactgtcgaagaggttttcaccgattttaagggcagacgcgctggtttgattaaggccctcactactgacgttgaaaagttttaccagcagtgcgatcccgagaaggagaatttgtgt

SEQ ID NO: 177384 - DNA, 163 bp, Glycine max
gtgactgaatgccaagccttggttttagcaccaactagggagcttgctcagcaaattgaaaaggttatgcgagcacttggagattatcttggtgtgaaggtgcacgcatgtgtgggaggtaccagtgttcgtgaagaccaacgcattctatcgagtggtgttc

SEQ ID NO: 177385 - DNA, 164 bp, Glycine max
ggactactgataagaaggcattagaagctttcaaaaggtttggaagcaaactgactggaattgaaggaaaaatcaatgcaaggaacagtgatccaagtctgagaaaccggactgggccagttcagctgccatacactttgctccatcgttcaagtgaggaaggg

SEQ ID NO: 177386 - DNA, 159 bp, Glycine max
cggctcgagagagagagatccatccatcaattccaatggccgatcagctcaccgacgaacagatctccgagttcaaggaagccttcagcctcttcgacaaggacggggatggttgtattaccaccaaggaacttgggaccgtgatgcggtcacttggcc

SEQ ID NO: 177387 - DNA, 157 bp, Glycine max
attatgcaaaaaataattaaggtcttttcctttaaatgggctggttcaatgaaccgagaccactgcaggttcatggggatgggaggattaagaggctatgttttttaatcttccgatgttactgttgttttttttttaatttcaataaggatattat

SEQ ID NO: 177388 - DNA, 160 bp, Glycine max
aaggaattctagcacaattgaatctggaaactggaattcccctttatgaagcggagctcttcttctgtttttcatcctcttcaccctgctaggagccattggaggtttaggtgaccgtggaaaatttgttgatgacgaacctactactggaggtgttatt

SEQ ID NO: 177389 - DNA, 165 bp, Glycine max
gcaactcacactgtcttccttctctagggtttttagctcctccaaattcttcgcccaacatggttcttcaaaatgatattgatttgctaaatcccccggctgagcttgagaagaggaaacacaagctcaagcgtcttgttcagtcaccaaactctttcttcatgg

SEQ ID NO: 177390 - DNA, 164 bp, Glycine max
gttttagcgcagttcttctagatttaaggaagatgggtaaggaaaaggttcacatcagtattgtggtcattggccatgtcgactctgggaaatccactaccactggtcacctgatttacaagcttggaggcattgacaagcgtgttattgagaggtttgagaag

SEQ ID NO: 177391 - DNA, 165 bp, Glycine max
gcagattcagatggaaccacattcagggagtaccatctcttttcaacctcaaggtgtgacaccatttttacccagtcttggattcctcgctctcctagcaataccatcaggggacttgttattcttatgcatggacttaatgaacacagtggcagatatactcat

SEQ ID NO: 177392 - DNA, 166 bp, Glycine max
caatgtccagcattacatccaagtggtttggtgaaggagaaaaatatgtcaaagcagtcttttctctggccagcaaaattgttccaagtgttatttttgttgatgaggttgatagtatgttaggaagacgtgaaaatcctggtgaacatgaggctatgcgtaaaat

SEQ ID NO: 177393 - DNA, 155 bp, Glycine max
caagaatggcacttcgttgcttggtgatgtccctttctgttctcttcactcttggtcttgcgagagaaagccatgccagagacgaagatttttggcatgctgtttggccaaacactcccattccaagttcattgcgagatcttctaaagcctggc

SEQ ID NO: 177394 - DNA, 157 bp, Glycine max
caaagatgaagatgatccacgttcttttcctctttgctcttgtctcgttcacttcccatgcttctgtcaatgatttctgtgtagcagacctaaaaggtccagatagcccttcaggctatcagtgcaagccacctaacacagtcacagtggatgactt

SEQ ID NO: 177395 - DNA, 160 bp, Glycine max
tttcttggaactttgttactctcacacttgtctcgctccgtgcccttggtttcaaccatttttcctaccagctctgcttctggtggccactgagatgatggggccaacaattgtggcagaagcaagaacttgtgagtctcagagccaccgtttcaagggg

SEQ ID NO: 177396 - DNA, 160 bp, Glycine max
gtttgttgtgagctataagctagtttatcgtgaggagaatatgaagttgtttgttttctttgttgctgcagtagttttggtagcatggccatgccatggcgcaggctaccaaaggttccctctccgaatgaaaactggctatggtgagcgttcttcggag

SEQ ID NO: 177397 - DNA, 161 bp, Glycine max
cagaaaccttcgccaagaaccgtgaactcgaagtgatccactccaggtgggccatgctcggagccttgggctgcgtcttcccggagttgctgtcccgcaacggggtgaagttcggagaagccgtgtggttcaaggccgggtcccagatcttcagcgagggt

SEQ ID NO: 177398 - DNA, 164 bp, Glycine max
cgttgttggcatggatgccaccaacacctaccctgccgatttcattgccatcaacctccaaatccagaccaatgtcattgattctgccttatcgcaacggtgctaagaaactattgtttttcggttcctcttgtatttaccccaaatatgcaccccaaccgatt

SEQ ID NO: 177399 - DNA, 164 bp, Glycine max
cttacggctaaattctcaaagatttaaactttgtctcagagtttccaaattcacccaaccccagagagaaaatgtctctaatcccaaatttcttcggtggcagaaggagcaacgttttcgatcctttttccctcgacgtctgggaccccttcaaggattttcct

SEQ ID NO: 177400 - DNA, 153 bp, Glycine max
cttgaagctaggtatccatgaggattcacagaacaagggaaagattgctgaattgctcaggtaccactccaccaagagtggtgatgaaatgacaagcctcaaggattatgtgaccaggatgaaggaaggtcagagtgacatctactacatcac

SEQ ID NO: 177401 - DNA, 155 bp, Glycine max
cagaaaatcctcacccattttcttcgtagccaaacactctgaaattctcagttatgtcgtggcaagcgtatgtggatgatcaccacactgtgtgaaatcgaaggtaaccacctcactcacgccgctatcatcggccaagacggaagcgtttgggc

SEQ ID NO: 177402 - DNA, 156 bp, Glycine max
gcaagtatatcatttctgctattcttggatcatttggagttgcatgggtttgtgattattatgtttcagacaaaaagctatttggaggttctacccctggaactattacaaacaatgagtgggcagaagagactgacaaaaaattgcaggcatggc

SEQ ID NO: 177403 - DNA, 160 bp, Glycine max
gtaccatagtccaaccaagtctattctactatccatcattgtctgccacatcttcccttagtactagaaatgaggctacaacaactcaacttgttctttctgttgctttgtgttgccaaagcaaacgggtctctgctcccattcatggatcctcccatca

SEQ ID NO: 177404 - DNA, 158 bp, Glycine max
agctggatttggaggagaacaagattgttgatttcatcaaatttgatgttgggaatgtagtcatggtgacgggtggaaggaataggggtcgtgttggagtgatcaagaacagagagaagcataagggaagctttgagactatccatgttcaggatgct

SEQ ID NO: 177405 - DNA, 162 bp, Glycine max
gttgatgattgcaagggccacacatttatccagtttgaacctgctcctaggagaggagaacctgatgtcactcgtagaacgcctgattacttcttataatgtagctcgttgaatgtcatactgttatatcatggttacctctactgcactaattttaggtag

SEQ ID NO: 177406 - DNA, 163 bp, Glycine max
tgtgagaatggagagcaaagaggaagatgtaagggttggagcaactaagttctcagaaaggcaaccaattggtacagcagctcagggtgacaaggactacaaagaaccacccccagcacctttgtttgagcctggtgagctaaagtcatggtccttctacaga

SEQ ID NO: 177407 - DNA, 162 bp, Glycine max
cacagcatcacatccaagtcgtttggtgaaggagaaaaatatgtcaaagcagtcttttctctggccagcaaaattgctccaagtgttatttttgttgatgacgttcatagtatgttaggaagacgtgaaaatcctggtgaacatgaggctatgcgtaaaatg

SEQ ID NO: 177408 - DNA, 301 bp, Glycine max
ctcttctcctctgtactgagacatggccgaagaagaagaagaagaagaatcagagctcagcgataagcagaaagtggaaatcgcgaaatggttcctcctcaattctcctcccggagaaatccaatacgttgccaaagatgtgaaatccattctcaacaacgacgatttgtacaaggaagccgcttccgaggcttttctcttttacaacaaatcgcacttgatttcccttccaatgtccaaccgaagcggagacgtactggttacttcttttggtgagcttgagggtaatgcattcttgaac

SEQ ID NO: 177409 - DNA, 291 bp, Glycine max
attaattgcaagaatggcacttcgttgcttggtgatgtccctttctgttctcttcactcttggtcttgcgagagaaagccatgccagagacgaagatttttggcatgctgtttggccaaacactcccattccaagttcattgcgagatcttctaaagcctggccctgcaagtgttgacatcgatgatcaccctatgcaaattgaagaaacacagtacccgaaaaccttcttctacaaagaagaccttcatccaggcaaaacaatgaaagtacaattcagcaagctcccttt

SEQ ID NO: 177410 - DNA, 287 bp, Glycine max
catttctccatttccattttctctctcacttttcaagaatcgtaagctatgggaaagtcttacccaactgtgagtgctcattaccagaaggccgttgagaaggcgaagaagaagctcagaggcttcatcgctgagaagagatgcgctcctctaatgctccgtttggcatggcactctgctggaacctttgacaagggcacgaagaccggtggacccttcggaaccatcaagcaccctgccgaactggctcacagcgctaacaacggtcttgacctcgctgtaggctt

SEQ ID NO: 177411 - DNA, 286 bp, Glycine max
caacaaaaaagtgtagtgggaaatggcaggtgcgggtgcaggaggagggtatggggacgcgaaccagaggatagactacgtgttcaaggtggtgctgataggggactcggcggtggggaagtcgcagatactagctcggtttgcgaggaacgagttcagcttggactccaagtccaccatcggtgttgaatttcagacgaggactttggttatcgatcacaagaccgttaaggctcagatctgggacactgccggccaagaacgatacagagcagttacagtgcat

SEQ ID NO: 177412 - DNA, 287 bp, Glycine max
tcgcgtgatggttggtggattcccaagacaagaaggtatggagaggaaggatgtgatgactaagaacgtctccatttacaagtcccaggcttctgcccttgaaaagcatgctgctgccaactgcaaggttcttgttgttgctaacccagcaaacaccaatgcattgatcttgaaggaatttgctccatctattcccgagaagaacatttcttgtttgactagattggatcacaacagggcattgggccaaatctctgaaagactgaccgttcaggtttctgagtaaa

SEQ ID NO: 177413 - DNA, 287 bp, Glycine max
ctttctgtgatgatttctttggagaagaatctatattttatgaaattttttcaggtccatttggtgtcattgatgagcacttcaattctatacttccaaattgttatgatgctataggtctcatgcttatgattcgaataatacacaagcatcagctcatcatgtctcggagacggattccatgcttggattcatatttagacaaggtcaatatatccttgtggcctcgatttaaattggtatttgacatgcacctcaacagcttgcgtaatgcaaatgtaagacat

SEQ ID NO: 177414 - DNA, 288 bp, Glycine max
cctggcagcttacagctatgatcatcaacaacgccccttttcctctatgattgattcgattcgattgaagtcgattccgtagagagtgagaaatcagatcacaataatcatcgatgggtaatttgttcgtgaagaagcccaaggtaacagacgttgataaagcaatcctcgcactcaagacccagagacgcaaactcgcccaatatcaacaaaagctagatgctgttattgaagcagaaaagcaagctgcacgagacttgattcgtgaaaagaagaaggacaggcctt

SEQ ID NO: 177415 - DNA, 288 bp, Glycine max
cagtgaaagagaatccgaggcgaagagaagagaaaaattaagatggaggggaaggagcaggatgtgtcgctgggagcgaacaagttcccggagagacagccgattgggacggcggcgcagagccaagacgacggcaaggactaccaggagccggcgccggcgccactggttgacccgacggagtttacgtcatggtccttttacagagcagggatagcagagtttgtggccacttttctgtttctatacatcactgtcttaaccgtcatgggagtcgccgggctaagt

SEQ ID NO: 177416 - DNA, 294 bp, Glycine max
gtgatttggagtttggagcgactgaactaatcattaatttgcactcgctgtttcagcttcatcacccttcttttgcatcatttatatctcttgagaaatggcacaagaaacctttctattcacatctgaatctgtaaacgagggtcaccccgacaagctgttggaccagatctctgatgcagtacttgatgcgtgccttgaacaggaccctgacagcaaggttgcctgtgagacatgcaccaagaccaacatggtcatggtcttcggagagatcacaaccaaggccacgtagat

SEQ ID NO: 177417 - DNA, 295 bp, Glycine max
aagagcgagagaacaagaacataagggaaccacagcggcggtaacagaagaacaagcagagaatgggtcgagtgagaacgaagacggtgaagaaatcctctcggcaggtgatagagcgtcactactcgcgcatgaccctggacttccacacgaacaagaagcctctggaggaagtggcgataatcccgtcgaagaggctaaggaacaagatcgcggggttctcgacgcacctgatgaagcgcatccagaagggccctgtgcgcggcatctccctcaagctccaggaggagagcgc

SEQ ID NO: 177418 - DNA, 295 bp, Glycine max
cttcctaccatagtctgaggcaagtgagtgagagacagagatcgcagacacagagcagaatggcttctacccaatgtttcttgcaccaccatgctcttaccacccctgccagtgccagatccccatcactacgcatcttggttagcaccaagcctaaccagcttgtttgccaggcacagaaacaacaaacaccacaagaggatattgatgtcagcccaatctctcgccgtttagctctaactgtgctcattggtgctgctgctgttggctccaaagtccaacctgctgtgcagcc

SEQ ID NO: 177419 - DNA, 290 bp, Glycine max
ctgagctataagctagtttatcgtgaggagaatatgaagttgtttgttttctttgttgctgcagtagttttggtagcatggccatgccatggcgcaggctaccaaaggttccctctccgaatgaaaactggctatggtgagcgttcttcggaggtaaaatgcgcaagttttaggcttgctgtggaagcacacaacatccgagcctttaaaaccattcctgaagactgcgttgaaccaacaaaggactacattaatggcgaacaatttagatcagactctaaacagttaac

SEQ ID NO: 177420 - DNA, 284 bp, Glycine max
caacaaaccagagtaataaaaatcttcaacttttagcagtttttttttttctatattgcagaagccatggatttcagggtgatgggtttggattctccattgttccacacgctgcaacacatgatggacatgtcagaggacgctgcaggggacaacaagacatacagtgctccgacacggtcatacgttcgagacgccaaagcaatggctgcaacacctgcggatgtgaaggaatatcccaactcctacgtattcgagattgacatgccagggttgaatctggg

SEQ ID NO: 177421 - DNA, 284 bp, Glycine max
gtaacaccactgcattttcaacatccactagaccccttaaccaaacaagagataagtcttgtccaaaccatagtccaaaacaagtacccaagctcaagtaacaggttgagcttccactacattggactcgccgaacctgaaaaggatgccatcctcaaatgggaatccatcaaaccaactgttataactgtccctcgcaaagccttggccattgttataatcaacagccaaacccacgagatcttaattgatctaaaggcaaggcgcattgtctccgaaatatt

SEQ ID NO: 177422 - DNA, 283 bp, Glycine max
ccgagttggtctaccgtgtagaaaagaatggaggggttgttaatcctacaactgggcagaagtccgatatcttgattcagatacctaatggacatgcacctaaaactgatgctgttcaagcagtcaagaagatgaagattgaggaaattgatgatgatgaaatggaagagtgaattttatgataaaatgtaattagtttgatggcgcaactcctcttgaacttccttctttgtcttttatgtgttttgaatgggtgtgagtgaaaattgaagaagtccttgta

SEQ ID NO: 177423 - DNA, 286 bp, Glycine max
ctgattctgaagaggaagaaaacgataatgagcaaaaagagaaacgcatctcaaacaagaagaaaaagcttcaacggaggatgaaaattgctcaactgaaacaaatttgctcaaggccagatgttgttgaggtgtgggatgctactgcatcagacccaaagttgctggtgttcttaaagtcttataggaatactgtacctgtacctaggcattggtgccagaagagaaaatttttacaggggagctgctgaggcaatcaccaatcctggacttgtagggtttggca

SEQ ID NO: 177424 - DNA, 283 bp, Glycine max
cttcagaagcttgaacctaggccatccccaaaatcccattccatagtgaaggagtatgggagtagattactataagcacttgcaggttgacaagcatgccaccgatgaagagttgaagaaagcttacagaaagcttgcaatgaaatggcaccccgataagaatccaaccaataagaaagaggctgagactaagttcaagcagatatccgaagcttatgaggttctgagtgatccccagaagagagcaatctatgatgaatacggagaagaagggcttaaaggc

SEQ ID NO: 177425 - DNA, 283 bp, Glycine max
caggattagagggtcgccacgtttagcaataaccaaaccctctctactcttttttcttctccttctcttcgctagggttttagcttcttcctcttcacttcgttctttttcgcctctacaatgagcaacgacaaggacacattcaacgtcgccgatctcacttctgctctcaacgaggacaatagagcagaccttgtcaatgctcttaagagcaagatacagagtttggctggacaacactcggatattctagagtctctgtcgcccaatgtccgaaaggtgt

SEQ ID NO: 177426 - DNA, 289 bp, Glycine max
caagttcaaagatgaagatgatccacgttcttttcctctttgctcttgtctcgttcacttcccatgcttctgtcaatgatttctgtgtagcagacctaaaaggtccagatagcccttcaggctatcagtgcaagccacctaacacagtcacagtggatgactttgtgttctctggctttgtagctggaaacaccacaaacactttcaatgctgcattaacctccgcatttgttactgattttccaggtgtgaatggtcttggtgtatctgtggcacggttcgcatagcc

SEQ ID NO: 177427 - DNA, 292 bp, Glycine max
cctttattcattttccgatggcttctgcagatgttgagtaccgttgctttgtcggtgggctcgcttgggccactgacgaccatgccctcgagagagccttctctcagtacggcgaaatcgttgaaacgaaggtctgtttgttgcaggcatcacatctgatctcacacgattcggattcggaactttctcgatcccgttctgatctgtgatctctgatctgtttgcgttacttgatcttatgatacttgtctcactatatgattctcttattactcacgccaatagttatcaa

SEQ ID NO: 177428 - DNA, 289 bp, Glycine max
gcagagtcagagagagagattcactgaaacagagcgcagaagaaaatacataaactaatccagaaaatgagcagcggcgctggaaaggtggtgtgtgtcaccggcgcttccggttacattgcttcctggatagtcaaattcctcctcaatcgcggctacaccgttaaggccaccgttcgcgacacaagtgatccgaaaaaaataaaccacttggttggcctcgacggtgctaaggagaggctgcacctctacaaggcgaatcttcttgaagaaggttcctttactctgt

SEQ ID NO: 177429 - DNA, 283 bp, Glycine max
ctcagaattctctaaaagagatctttttctgctctttgaagaaagaagggtctttgctctgattttggagatgtctctgctctcagatctcatcaaccttaacctctccgataccaccgagaaggtgatcgcagagtacatatggatcggtggatcaggaatggacctgaggagcaaagcaaggactctcccaggaccagttagcgacccttcagagcttcccaagtggaactatgatggttccagcacaggtcaagctcctggtgaagacagtgaatgattt

SEQ ID NO: 177430 - DNA, 281 bp, Glycine max
ccacgagatccctcgacatcgagagaccaacctacaccaacctcaacaggctcatttcccagatcatttcgtccctcaccacttccttgaggttcgatggtgccatcaatgtggatatcactgagttccagaccaaccttgtgccctaccctaggatccacttcatgctttcgtcctatgctccggttatctctgccgccaaggcctaccacgagcagttgtcggtgccggagatcaccaatgccgtgttcgagcccgccagcatgatggccaagttgatc

SEQ ID NO: 177431 - DNA, 273 bp, Glycine max
aagagacagagatcacatagcagcatggcttctactcaatgtttcttgcaccaccatgctcttaccacccctgccagatccccatcacaacgcatcatggttagcaccaagcctaaccagcttgtctgcaaggcacagaagcaagaggatattcatgtcagcccaatctctcgccggttcgctctaaccgtgctcattggtgctgctgctgttggctccaaagtccaacctgctgatgcagcttatggggcagctgccaatgtgtctggcaag

SEQ ID NO: 177432 - DNA, 283 bp, Glycine max
ctcctgaagagtgcgttgaaccaacaaaggactacattaatggcgaacaatttagatcagactctaaaacagttaaccaacaagctttcttttatgctagtgaacgcgaagtccatcacaacgacatatttatattcggcatagataacaccgtactctctaatatcccatactatgaaaaacatggatatggggtggaggaatttaatgaaaccttatatgatgaatgggttaacaagggcgacgcaccggcattgccagagactcttaaaaattcaacaag

SEQ ID NO: 177433 - DNA, 283 bp, Glycine max
gctttgaacgccgaagaaggttcatccaatccccgaagcccttcaccgcattgcaaccatgtcgaggagaaaggtcagagagccaaaggaagaaaacgtgactctgggcccagctgttagagatggtgaacatgtctttggcgtcgctcgcatctttgcctccttcaatgataccttcattcatgtcactgatttgtctgggagggaaacgcttgtccgcatcactggtggaatgaagggtaaggctgacagagatgaatcgtctccttatgctgcatgcttg

SEQ ID NO: 177434 - DNA, 286 bp, Glycine max
  unsure (1)..(286): unsure at all n locations
cctataagctagtttatcgtgaggcgaatatgaagttgtttgtcttctttgttgctgcagtagttttggtagcatggccatgccatggcgcaggctaccaaaggttccctctccgaatgacaactggctatggtgagcgttcttcggaggtaaaatgcgcaagtcttaggcttgctgtggaagcacacaacatccgagcctttaaaaccattcctgaaccgtgcgttgaaccaacaaaggactacattaatggcgaacaatttagatcagactctanaacagtaac

SEQ ID NO: 177435 - DNA, 288 bp, Glycine max
cagttatctttatctacgcaagagaagaatagaaaatggatatcaggttgatggatttggactctccattgttcaacactctgcaccgaatcatggatctgacagaggacgcagagaagaacttgaacgctccgacgcggacatacgtgcgcgacgcgaaggcaatggctgcgactcctgcggacgtgaaggagtaccctaactactacgtgttcgtgatcgacatgccaggcctgaaatccggggacattaaggtgcaggtggaggatgataacgtgctctgataag

SEQ ID NO: 177436 - DNA, 285 bp, Glycine max
ctctccctgcaggtgttgaaatcgatgaactccctaagcaaattgatgatacacagtacccaaaaacattcttctataaagaagaccttcatccaggcaaaacaatgaaagtacaattcaccaagcgtccctatgcacaaccttatggtgtatatacatggttaacggatattaaagacacctctaaagaaggatatagttttgaagagatatgcatcaagaaagaagcgtttgagggagaagagaagttttgtgcaaaatccttgggaacagtaattgttttgc

SEQ ID NO: 177437 - DNA, 279 bp, Glycine max
cttgagatagctagaagcaataagatgaaaatgaaagtgcttgttttgtttgttgctacagttttggtagcatatgaatgccatggctcagactaccagaagttccctctccaaatgaaaactgggtttggtgggcaatacagcaatgaggtggcatgtgccagttggaggcttggcgtggcagcaaacaacgtagtcaagtggcaaactgttcctgcagcttgcggcgagtacatagctgactacgttctaggagaccaatatagatcagatccaaaa

SEQ ID NO: 177438 - DNA, 272 bp, Glycine max
caactttcaacgccagttcacactctctgcttcgcgtgtaccaacaagtgcaagttcgaatcaatggccagcgctcagctcacagcaatagcgtcatcgatctctacggcgtcgtttgaagggcttcgaccttccgctgttcagtttgcttccacgggcagaattagaattggcaatctctcccaaaggtccttccggggcttggttgtcaaagccgccaccgttgttgcccccaaatacactgcgataaagcctctgggagatagagtgct

SEQ ID NO: 177439 - DNA, 276 bp, Glycine max
caccccactacgagaccctttgtggagacttttgcgaaggatcaaaatagattctttcaggtttttgctagggccatgcagaagttgagtctcttgaatgtgcagaatggtttggacacagcagcgaccagccattgccatcaactgtgttatcaaaacgtcagatgttggatagatttgaacagcacactctcaagtgttcatcatgtaaagcagcatatgagggattccaaacatggcagacagtcctaattggggcaacagttgtgtttgtgc

SEQ ID NO: 177440 - DNA, 280 bp, Glycine max
ctagctagctcctcgaaaatgctggcacgcctcgccgcgagtcgcttcaacgagatccgtcagattttccgacagccttctagggctttctcgaccgctctgaactaccaccttgacacaccggacaacaaccctaaacttccatgggaattcaccgaggccaatcaagcaaaggttaaggagattttgtctcactatccatccaactataagcaatctgctacaattcctcttttggatcttgcccagcagcagcatggtggctggctcccttttctgc

SEQ ID NO: 177441 - DNA, 280 bp, Glycine max
cgcacgaatatcttgttgtttggagcgatccgagaaaaactctgtcaacatgttggtttaccaggacctccttacaggtgatgagcttctctctgactccttccgttacaaggaaattgagaatggaatgctgtgggaagttgaggggaagtgggttgttcaaggagcagttgatgtagacattggtgcaaacccttctgctgagggtggaggagaagatgagggagttgatgatgcagctgttaaggttgttgacattgttgacacattcaacttcagg

SEQ ID NO: 177442 - DNA, 279 bp, Glycine max
ctccattctcttcaacctaacgcagcatcgctatactcttcattccatggctttgcccaatcagcaaaccgtggattaccctagtttcaaactcgttatcgtcggtgatggtggcacaggaaagacaacctttgtgaaaaggcatctcaccggagaattcgagaagaaatatgagccaaccatcggtgtggaggttcacccattggattttttcacaaactgtggaaagattcgattctactgctgggatactgctggacaggagaagtttggtgcctc

SEQ ID NO: 177443 - DNA, 281 bp, Glycine max
gctaacttaagggaaatgagatggccaatggcaacactagtcatcgcttcaagctcttgcttttccttctaactctgcactcttcattcgctgagattttcttcgaagagagattcgaagatggatggaagagccgttgggtgctatccgattggaaaaggagtgaaggaaaagcgggtaccttcaagcacacagcaggaaaatggtctggggatcctgatgacaaaggtcttcagacatataatgacgccaagcattttgccatatctgcacaatacccg

SEQ ID NO: 177444 - DNA, 280 bp, Glycine max
ctttgttgtgagctataagctagtttatcgtgaggcgaatatgaagttgtttgtcttctttgttgctgcagtagtcttggtagcatggccatgccatggcgcaggctaccaaaggttccctctccgaatgacaactggctatggtgagcgttcttcggaggtaaaatgcgcaagtcttaggcttgctgtggaagcacacaacatccgagcctttaaaaccattcctgaagagtgcgttgaaccaacaaaggactacattaatggcgaacaattagatcag

SEQ ID NO: 177445 - DNA, 281 bp, Glycine max
agttgtcaaagtcatgggcaagaacaaagtccttgtcaaggtccacccagaaggaaaatatgtcgttgatattgacaaaagtattgacattacaaagattactccatccactagagttgcacttcgcaacgacagtcatgttcttcacttagttctgccaagtaaagttgatccattggtcaatctgatgaaagttgagaaggttcccgattctacttacgacatgattggtggtttagaccagcaaattaaagaaataaaagaggtcattgagtaccaat

SEQ ID NO: 177446 - DNA, 291 bp, Glycine max
caacaacactctctcttctcgctcttggcttttcgctcttcactcactctcattcattcatttccaccgttcatggatcccctaagcgtgtggggtaacacgcccttggcgacggtggatcccgagatccatgacctcatcgagaaggagaagcgccgtcaatgccgcggaatcgagctcatcgcctccgagaacttcacctccttcgccgtcatcgaggccctcggcagcgctctcacgaacaaatactccgcaggcatgccgggcaaccgctactacggcggaatgaat

SEQ ID NO: 177447 - DNA, 296 bp, Glycine max
cggctctatagcttcttcctctgtgcaggaattaggaatattcgacaggtagagtttcttcaatggctcctaaagttgataagaagaatgatccaaaggcccaggccttgaagactgctaaggcagttaagtcaggtgctacctttaagaagaaggtaaagaagatccgaacttctgtcactttccacaggccgaagaccttgaagaaggacaggaaccccaagtactctcgcattagcgccccgccgaggaacaagcttgatcattatcagatcctgaaatagcccctcacactg

SEQ ID NO: 177448 - DNA, 282 bp, Glycine max
acacctactacaattgttaaagtcctttcttgttatagcaaaaatgaagcttgtctttgccaccctactgttatgttctcttcttctaagctcctctttcttggagccagtcatcgcctatgaagactcgtcttattgcagcaacaagtgttcggacagatgctcatcggcaggggttaaggataggtgtctgaggtactgtggaatatgctgtgctgagtgcaaatgtgttccttctgggacctatgggaacaagcaccagtgtccttgctacaggacaag

SEQ ID NO: 177449 - DNA, 279 bp, Glycine max
ctttgttgatccatctcttgtttcttgctttctttcttcaccatgtcacttgctgggaaaatcaccactgaaatcggggttcatgcaaccgctacaaagtggttcaacctcttcgcaacacaactccatcatgttcaaaacctaactgatagagtgcatggaaccaagctgcatcaaggtgaagactggcatcacaacgagacagtcaagcactggacttataccatagatggtaaggttacaacatgtctggagagtattgaatccattgagaacaga

SEQ ID NO: 177450 - DNA, 278 bp, Glycine max
cagcagagatctagcgtattctctcgctctttctttcactgtcacagagccacatccatgggcttcccagccaacggcgcctctgcggcccagcccctaaacttcctcatctacggccgcacgggctggattggcggcctcctcggctccctctgccgggcccagggcatctccttccattacggctcgggccgcctcgagaaccgggcctccctcgaaaccgacatagccctcctcaagccctcccacgtcttcaacgccgccggcgtcagggccgt

SEQ ID NO: 177451 - DNA, 278 bp, Glycine max
cttgttctagagccttcccttcacttcccttgcccttgaaaaggacgcgtgaagcgtttcccctccgcattagcctgtcgtttgacgtctgcaacaacttcttcttgagtgttttctcagttcctcacatcatgtaccgctttgcaacctccctcgcctccaaagctagaattgccaggcgcagccctcaacagattggcagtagggtcacttggaacaggaattatgcggccaaagacattaagtttggtgtgcaggctcgggctctgatcttaagg

SEQ ID NO: 177452 - DNA, 277 bp, Glycine max
ccacacggcgtcttcataaacgcctttcttctccgtttccgtttcctcggtcgaattcgctttttgatctgcgaaaatgagagagtgcatctcgatccacattggtcaggctggtatccaggtcggaaatgcttgctgggagctctactgcctcgagcacggcatcgggcccgatgggcaaatgccaagtgacaagacagttggcggtggtgatgatgctttcaatactttcttcagcgagactggtgctggaaagcacgtgccacgtgagtgtttt

SEQ ID NO: 177453 - DNA, 277 bp, Glycine max
gctgttttgaacattcacccaatttgcagagttccaagttatatacatacactgcataattaagagaaaatgtctctgattccaagtttcttcggtggccgaaggagcagtgttttcgaccctttctccctcgatgtgtgggagccctttaaggattttccatttcccagttctctttctgctgaaaattcagcctttgtgagcacacgagtggattggaaggagacaccagaagcacacgtgttcaacgctgatattccagggctgaagaggagga

SEQ ID NO: 177454 - DNA, 278 bp, Glycine max
ccgaaatgcgatacttggtgtgaattgcagaatcccgtgaaccatcgagtctttgaacgcaagtcgcgcccgaagccattaggccgagggcacgcctgcctgggtggaatgggcccaggctgcccacgcctggacacaggattcagtttaggctctatgctttggatgatgagctcaagcttggtaacaagttgacgaaggagaagttgttggaagataccattgaaggacatgtgtcaggagaagcgaccttgatggctatatgcccattaacaaca

SEQ ID NO: 177455 - DNA, 279 bp, Glycine max
cttcctcaccgattgctagaatggaatttcgatgctcagtcatcacttttaccattctcttctctcttgctcttgcaggagagagccatgtccatgcatcgctacctgaggaagattattgggaagctgtttggccaaacactcccattcccactgcactgcgagagcttctaaagcctctccctgcaggtgttgaaatcgctgaactccctaagcaaattgatgatacacagtacccaaaaacattcttctataaagaagaccttcatccaggaaaac

SEQ ID NO: 177456 - DNA, 286 bp, Glycine max
caagaacaagaacaacaaagtaacgtgaaagagagagagatggaggcgattgttccagtggtggatttccagaggctttcagaggaagaggagcgcaagaagctgagaaaaacatgtgagaaaccagggtgtttcagaatcatcaaccactcaattccactaacactcatggctgacatgaagtcagtggttaaatacttgcatgaccttcccacggaaatcaaaatgcgcaacaaaccctccgtccctgagagtggctatagggcggcaatgccaacaatcctct

SEQ ID NO: 177457 - DNA, 274 bp, Glycine max
cgacgaatgatgatgacttctggagaagctgtgaagtacaagagctctttgcatgcattccacacaatcgtcgcaaatgagggtgccaagtcactcttcaaaggtgctggtgcgaacatattgcgtgctgttgcaggtgctggtgtgcttgctggttatgacaagctgcagctcattttgtttggaaagaaatatggatctggcggcggctaaaaatgatgacgacaatttcctgggataatcatgccgattgccttgtcatttgaaaattatg

SEQ ID NO: 177458 - DNA, 272 bp, Glycine max
ccaagcaataagtccctccttcctctgccttataattcttgtgaccctttacgctggtagcattgaaagtgcaccagcaaacgtgaagccaagccattatgctgcacccttcaataggagtgtttttccttctggttttctatttggaataggctctgcagcttaccagatagaaggagcagcagctatagatggcagaggaccaagtatatgggacacctatactaaacagcaaccagggaagatttgggatcatagtgatggaagctagc

SEQ ID NO: 177459 - DNA, 271 bp, Glycine max
gttattgtggaaaagggaatgcagaacgggcagaagattacattccctggcgaactgatgaagcgccagacacaattactggggatattgtctttgtccttcagcagaaggaacatcccaaattcaaaagaaaggctgaagatctttttgtagagcacattttgtcccttactgaagccttatgtggcttccaatttgtgctgactcacttggatggccgtcagcttcttattaaatcaaatcctggggaagttgtcaagcctgatcatac

SEQ ID NO: 177460 - DNA, 270 bp, Glycine max
gtaacaaaagttgcgtagcatactctgattcattagtgaagaaaaatggcaaccatcatcgccggcatcccaactacatcgatcactcgcgcaggtcttgtgctcaaacgacctgttggagcctcgtcctctaccgttcttggattgccagcaatggctaaggcagggaaagtgaggtgctccatggaggaaaagccttcaagcagctcaaatatagggatgggggcatccttgttagcagctgcagttgccgcaaccatgtcaagccag

SEQ ID NO: 177461 - DNA, 275 bp, Glycine max
ctctgtgcaaatttgcgttgttcttcgcggcacacctcactcactgaacggtaagtatggcggacaaggctgttacaatccgaacccgaaagttcatgaccaacaggcttctttccaggaagcagtttgtcgttgatgtccttcatccagggagggcaaatgtttccaaggctgaacttaaggagaagctggctaggatgtatgaagtgaaagaccctaatactgtatttgtcttcaaattccgaacacattttggaggtggcaaatcactggat

SEQ ID NO: 177462 - DNA, 276 bp, Glycine max
ccgaacacgacagacacatctgagacaccaaacctgatagagatgtcgagtggaggcaaccttagttgcgtgttggtagctgtggatggcagcgaggcaagcatgaacgcgctgcgttgggcactgaacaacctcaagctccgatcccctgcacccgattccaccgatgctccttccctcaccgtcttccacgtccaatccccgcgctccatcgccactggcctcaatcccggtgccatccccttcggtggccccagtgatctcgaagtcctgctt

SEQ ID NO: 177463 - DNA, 273 bp, Glycine max
agaagatggagatgtatcagatctggagcaggagaatagcgttgggagcgttcgcgtttgttactgttttcctatcggcctcagcagacgacgtcgttgtgctctctgaagataacttcgagaaggaagttggtcaggacagaggagctctcgttgagttctatgctccttggtgtggacactgcaaaaagcttgctccagaatatgaaaagcttggtagcagcttcaagaaagccaaatctgttttaatcggcaaggttgactgtgagagca

SEQ ID NO: 177464 - DNA, 275 bp, Glycine max
cagcagttgcacacggcgcaaaggggaacaagaagaagaagatggtgtccttgaagcttcagaagcggctcgccgctagcgtcctaaagtgtggcagaggcaaggtctggctcgatccaaatgaagtcaatgaaatctccatggccaattctcgacaaaacataagacagttggttaaggatgggtttattatcaggaagccaactaagattcactctcgctctcgtgctcgtcgaatgaaggaggtcaagtagaagggacgtcactctggctat

SEQ ID NO: 177465 - DNA, 277 bp, Glycine max
ctcgttcgtcaccatgactttcaagcgcaggaatggaggtcgcaacaaacacggccgcggccacgtcaagttcattcgatgctccaactgcggcaaatgctgccctaaggacaaggctatcaagaggtttctggtgaggaacattgttgaacaggctgcagtcagagatgtgcaggaggcttgtgtctacgaacaatacacgcttccgaagctgtatgtgaagatgcagtattgtgtttcctgtgctatccactctcatgttgtgagggtcgatccc

SEQ ID NO: 177466 - DNA, 282 bp, Glycine max
cttcctctgaagcgaaacagattcgcaaaacaaaattaaaaaatcccaattctcttcgcaaaaatcgaaatcaatgtcgaaaactccgaaggagaaggaaacggaggagcctctgccagaccacctccgctgcgggcgcacggacgggcggcaatggcgttgccggcggcgagtgaaggagaatctgaagctctgcgagattcactacctccaaggtcgccaccgccagtacaaggagaaggttcccgagtcgctgaagcttcagcgcaagcgcaaactaac

SEQ ID NO: 177467 - DNA, 287 bp, Glycine max
tttacaatggccttccatggctatgctgcagcaccaacaattgcagcacttttctgctttctatacttcttccacaggagactatgttacagacacccccttttgacagactaccccatcctcggcatgctgccacaattactcttcaacctgtggcgtgcccatgattttttcactgagatattgaaacggcatggaccaacaggtgagttcactggaccttggtttaccagcatggactatttggtcacttgtgaccccatcaacgtccaccacatgctgagcaa

SEQ ID NO: 177468 - DNA, 285 bp, Glycine max
gaaaagagaaggcaatggctatcaggttgatggatttggactctccattcttcaacactctgcacagaatcatggatctgacggaggacgccgagaagaacttgaacgctccgactcggacatacgtgcgcgacgccaaggcgatggctgcgactcctgctgacgtgaaggagtaccctaactcgtacgttttcgtgatcgacatgcctggcctgaaatctggggacattaaagtgcaggtggaggacgacaacgtgcttctgataagcggcgagaggaagaggg

SEQ ID NO: 177469 - DNA, 287 bp, Glycine max
cattgaatcacttggcatcgcttctcctctctcccaagaaagaatcatcaatggcgattgaacacgaagacgatctcaaagacgagaagaaccctcgacctctcgacgaggatgacatcgccctcctcaagacctacggtttgggaccttactccacaagcataaaaaaggcggagaaggaaatcaaagatatggccaagaaagtgaatgacttatgtggtataaaggagtctgatactggtttagctgcaccaagccagtgggatcttgtttctgataagcaaatg

SEQ ID NO: 177470 - DNA, 280 bp, Glycine max
aagaaacccaataagtgattctcatttttatggctcttgccctgaagtcaagttgcttcttgcaattgaagaaacctgaggctggtttcaatgtttgtttttcatctaagaaagctataatctccgtgaaacgacacactcccgtggctgctatcaggaccatggaagcagtgggactctctgcaacattcaccaggttgaaaaaagaaggaaaagtagctttcatcccgtatgtcactgctggtgatcctgacctttcaaccacagcagaagcactgaa

SEQ ID NO: 177471 - DNA, 283 bp, Glycine max
agtggtttcagtgagtgatcggtgttcacttgatccttcataagtcgtcatcatcatcatcatcatcaccgttgattgaagaagatgccgatcagaaacatcgccatcggaaggcctgaagaggctactcaccccgacacgttgaaggcggggttggctgagttcatctccaccttgatcttcgtgttcgccggttcaggttccggcatcgcctacaacaagctcaccgacaacggcgccgccactcccgccggcctcatctccgcttccatcgcccatgctt

SEQ ID NO: 177472 - DNA, 273 bp, Glycine max
gttaattctgatatatatccaggtgaatattcagagatggaaggttacaatggatctgaatacgatcctacttatgaagacaaggatggtgactggatgctggttggagctcttccatagaagatgtttgtatcctcctgcaagacgctgaaaataatcaaaggatcagaagcaaaggggttgggttgtttgtgaccaacaaaacttgcaaaagcaaatcaaatcaaaatagtcacatgcggtcttcaaagacaaataccctttgtgttgtgc

SEQ ID NO: 177473 - DNA, 284 bp, Glycine max
  unsure (1)..(284): unsure at all n locations
tgatcgagataactagaaacagtgtgatgaaaatgaaggtccttgttttcttcgttgctacaattttcgtagcatggcaatgccatgcgtacgatatgttccctctccgaatgaacactggctatggtgcccgtactccggaggtgaaatgcgcaagttggaggcttgctgtggaagcacacaacatctttggctttgagaccattcctgaagagtgcgttgaagcaacaaaggaatacatccatggcgaacaatatagatcagactccanaacagttaaccaa

SEQ ID NO: 177474 - DNA, 271 bp, Glycine max
cacaaccactcttaatttctctctgccttgctcatttacacacctctccaacctttcactttcagctttatttgaatccctctctctcctttccaaatggccagcgttgaggttgcacatcaaacaccaacaacagttccagaaaatgaaacaaccgaggtaatcaagacccaggaaacaaccccggaaccagtaccagccactgaggctcctgcaacagaacaagcagcagctgaggttcctgctcaagaagaacaacaagcaactgagg

SEQ ID NO: 177475 - DNA, 278 bp, Glycine max
  unsure (1)..(278): unsure at all n locations
ttcagttaaagatcaaggcagctgcggatcatgctggacattcagcacaactggggattccgaagcagcctatgcacaagcatttgggaagagtatctctctttctgagcagcagctagtggactgtgctggccctttcaacaactttggctgccatggtgggttgccatcacaagcctttgagtacattanatacaatggtggactagagacagaggaagcatatccctacacaggaaaagatggtgtctgcaaattctcagctgaaaatgttgctg

SEQ ID NO: 177476 - DNA, 279 bp, Glycine max
cactcagcctcattaccaacacgaaagcatagccaaaaccttttttcgaagtctctgattttcctaatggctccggcaaaggcagagaagaagccggcggagaagaagccagcggcggagaaggcaccggcggagaagaagccgaagcggcagaagaagatctcgaaggaaggagggagcgagaagaagaagaagcgcacgaagaagagcgtggagacctacaagatctacatcttcaaggtcctcaagcaggttcaccccgacattggtatttccagc

SEQ ID NO: 177477 - DNA, 280 bp, Glycine max
cgagggtcaccaaccgcacgtgcctttcgggggccgaggcccctactgctggtcggcaaacggacggcgggcgcacgcgtcgcttctagcccggcttctgacttagaggcgttcagtcataatccaacgcacggtagcttcgcgccactggcttttcaaccaagcgcgatgaccaattgtgcgaatcaacggttcctctcgtactaggttgaattactattgcgacactgtcatcagtagggtaaaactaacctgtctcacgacggtctaaccccagctc

SEQ ID NO: 177478 - DNA, 283 bp, Glycine max
tattgtcgctgctcatcctccataacctccgagctctacaccgaagaacgaagccatggggaagacacatggaatgggagctgctcgcaagctcaagtctcaccgcaggaggcaaaggtgggctgataagtcatacaagaaatcccatcttgggaatgaatggaagaaaccttttgccggttcatcccatgccaagggaattgtccttgaaaagataggtattgaagctaagcagcccaactctgctattcgtaagtgtgccagagttcaacttatcaagaat

SEQ ID NO: 177479 - DNA, 283 bp, Glycine max
ttcataaacgccgcccaaaaccatttatagggttttcttttctttgccaagaaaatgagagagtgcatttcaatccacattggtcaggccggtatccaggtcggaaacgcctgctgggaactctattgccttgaacacggcattcagcccgatgggcagatgccgagtgacaagaccgttggaggaggagacgacgccttcaacacattcttcagcgagaccggcgccggaaagcacgtgcctcgcgccgtcttcgtggatcttgagcccaccgtgatcgacg

SEQ ID NO: 177480 - DNA, 283 bp, Glycine max
ccgcctccgtcaaaaccgtcgagaaagcaaccgcggacgccgcgctggtcgaaaaatccgtcaacacgatccgcttcctcgccatcgacgccgtcgagaaggcgaattcgggtcacccggggctccccatgggatgtgctccgatgggtcacgtgctatatgatgaaaccatgaagtataaccctaagaaccctttctggttcaaccgcgatcgcttcgttctctctgctgggcacgggtgcatgcttcagtacgcgcttctgcacctcgctgggttcgatag

SEQ ID NO: 177481 - DNA, 282 bp, Glycine max
ctagctattagttcgattttgtagtaagtgaggtgccaatatggtgaagatagctcttggtactttggatgactcttttagcgctgcctctcttaaggcttatttcgcagagttccacgcaactctgattttcgtgttcgctggtgttggatcagccatcgcttacaacgagcttacaaaagatgcagccttggatccaacggggctggtggcagtagctgtggcacatgcatttgcactgtttgtaggtgtctccgtcgccgccaacatctcaggtggcca

SEQ ID NO: 177482 - DNA, 282 bp, Glycine max
agctcccaacgactggttctgttttctctctgctgcttcgattcattcacacaaccatgactaaccttactaatggcgatgctggctccctcaacaaggtccccacgatcaagttcaccaagctcttcattaatggagacttcgttgactctttgtcaggaaagacatttgagacaatagatccaagaacaggagatgttatagcgaggataagcgagggagataaagaagacattgacattgctgttaaagcagcacgtcatgcatttgacaacggtccat

SEQ ID NO: 177483 - DNA, 279 bp, Glycine max
cttcttcgtctcaaacctcttcgttccttcgattcattccatttcttccaaaatggccaaagacccagttcgcgttctcgtcactggagccgcaggcaaattggatatgctcttgtccctatgattgctaggggagtgatgctgggtcctgaccagcccgtgatcctccacatgcttgacattcctccagcagcagagtcgttgaatggggttaaaatggaattggtggatgctgcattccctcttcttaaaggtgttgttgctacaaccgatgtggtt

SEQ ID NO: 177484 - DNA, 278 bp, Glycine max
ctttagccgaggtcaggaggagcactagctaagttcacaatttcaaaatggctaggggactaaagaagcatttgaaaaggctcaatgctcctaagcattggatgcttgacaaactgggtggtgcatttgcgcctaaaccctcatctggaccacacaaatcgagggagtgcctccccctcattcttattctgcgaaaccggctgaagtatgctctgacataccgtgaagtcattgctattctgatgcagcgccatgttcttgttgatggcaaagtcagg

SEQ ID NO: 177485 - DNA, 281 bp, Glycine max
caaacctaacgcagcatcgctattctcttcattccatggctttgcccaaccagcaaaccgtggattaccctagtttcaaactcgttatcgtcggcgatggtggcacaggaaagacaacctttgtgaaaaggcatctcaccggagaattcgagaagaaatatgagccaaccatcggtgtggaggttcacccattggattttttcacaaactgtggaaagattcgattttactgctgggatactgctggacaggagaaatttggtggcctcagagatggatac

SEQ ID NO: 177486 - DNA, 269 bp, Glycine max
gcagaaaagattaggagatggcgaacgctctgattccctgcttcaatcgcattctcatcgagaaaatcgtccctccctccaaaaccagcgccggcattctactcccggagaagacctcccagcttaattccggtaaggtgatagcggttggacctggatcacgtgacaaggcggggaacttgattccggtgtctgtgaaggaaggtgatcacgtgctcttgccggagtacggtggcacgcagatcaagctcgatgacaaagagtatggt

SEQ ID NO: 177487 - DNA, 265 bp, Glycine max
ttttcttcagaaatttgccatcgttgagagaagcgtgagagccttagtcgttcaagatgagagctaagtggaagaagaagcgcatgaggaggttgaagaggaagcgccgaaagatgagacaaagatctaagtaggtgcttgagcaggagttgagatgagctttccatctgctaccagcctcatgacattttaggctgttatggctcttatgatcttgaggtctagtcgctaggggagcttcactcttgacttagtttgctttact

SEQ ID NO: 177488 - DNA, 278 bp, Glycine max
gtgcatccatcgttaagctagtggcgatcggatccagctacagcatagagatcaaggaaggaaggaaggaagatgttgggtgttataaggcacaagagtattcgccctgccttctccgcaatcagacacttgtcttctgcagctaaagagattactgtcagggaggctctgaactccgcactcgatgaggaaatgtcagctgatcctaaagtgttcttgatgggtgaagaggttggggaatatcagggtgcatacaagatatccaaggggctgctcga

SEQ ID NO: 177489 - DNA, 281 bp, Glycine max
tgtttgttgtgagctataagctagtttatcgtgaggagaatatgaagttgtttgtcttctttgttgctgcagtagttttggtagcatggccatgccatggcgcaggctaccaaaggttccctctccgaatgaaaactggctatggtgagcgttcttcggaggtaaaatgcgcaagttttaggcttgctgtggaagcacacaacatccgagctgttaaaaccattcctgaagagtgcgttgaaccaacaaaggactacattaatggcgaccaatttagatca

SEQ ID NO: 177490 - DNA, 278 bp, Glycine max
gtaccctacacgtatcagagagagaatatttttgttcgtgcaggtgcagaagatggctcggagctccacaagaatgaaatgggtctctatcttcacacttctattcctctcccactcgcccctcacaatctccgcagaagatgggctagtggcgaatggagattttgaggctaccccaagaaacgggttcccaaacgaggcgattgtggagggccccagcgaggtcccaaactggaagtcaaacggcaacgttgagcttgtggaatcggggcaaaaac

SEQ ID NO: 177491 - DNA, 278 bp, Glycine max
gctcggccacccactagctggggtccccctgctgctcctatgcaacaatctggttatggctatgtgcagccaggagcatactctggtccaccccagtataacatgactcagcaacaatatgcaggctatcctccccagtcatctggtggatattctgccaccaactgggatcagtccactgccccacagcagcagtcaacccatgcagggtatgattactatagtcaacagcagcagcaaaatcctgcaccttcatctgatgggactgcttacaatta

SEQ ID NO: 177492 - DNA, 279 bp, Glycine max
tgttagatctgtacccgcctagccattgatttggaaaagtccaagcttcaaagatgagtaagcttcagagtgatgctcttagagaagctatctcaggaatcatgactgattccaaggaaaagaacaggaaatttgtggagaccattgaactccaaattgggctgaaaaactatgatccccagaaggacaagcgttttagtggctctgttaagttgcctcacattcctcgccccaagatgaagatttgtatgcttggagatgcccaacacgttgaagagg

SEQ ID NO: 177493 - DNA, 279 bp, Glycine max
ctcaggcgctgctgcccttcagtccttcagcaatggtttacgtgaagtcacagaaatcaaaagcctacttcaagaggtatcaagtcaagttcaagagaagaagagagggaaaaaccgattaccgtgccaggattcggttgattaatcaggacaagaacaaatataacaccccgaaatatcgctttgttgttcgtttcagcaacaaagacattgttgcacaaataatatctgctagcattgctggcgatattgttcttgctgcagcatatgcacatgagc

SEQ ID NO: 177494 - DNA, 277 bp, Glycine max
  unsure (1)..(277): unsure at all n locations
atgaaaatgaaggtccttgttttcttcgttgctacaattttcgtagcatggcaatgccatgcgtacgatatgttccctctccgaatgaacactggctatggtgcccgtactccggaggtgaaatgcgcaagttggagngttgctgtggaagcacacaacatctttggctttgagaccattcctgaagagtgcgttgaagcaacaaaggaatacatccatggcgaacaatatagatcagactccaaaacagttaaccaacaagcttacttttatgcca

SEQ ID NO: 177495 - DNA, 276 bp, Glycine max
ctcaagccaaaagggtccgcgtccttgagctttctcgcagattgaagcaccgtggtcctgactggagtgggctccaccaatatggtgataactatttggctcatcaacggttagccatagttgatccagcttctggtgatcaacccctcttcaatgaagacaaaactgttgttgttacggtgaatggagagatctacaatcatgaagaactcaggaaacaattgcctaatcacaccttccgtacaggaagtgattgtgatgttattgctcacctgt

SEQ ID NO: 177496 - DNA, 274 bp, Glycine max
gtcaaacgacagcgttctgagtcttttcttcttcgttaccctcttcacatgccttctctctgctaattcccacgatgaccatattttcctaccgagtcaactccatgacgatgactcagtgagttgcactgctaccgacccaaaccttaactacaagccggtgatcggaatcctgacccaccccggcgacggtgcctctggccggctcagcaacgccaccggggtttcttacatcgccgcctcctacgttaaattcgtggagtccggtggtgct

SEQ ID NO: 177497 - DNA, 274 bp, Glycine max
  unsure (1)..(274): unsure at all n locations
aacgaacacactctcacataactctctctctctctctctctctgagtccttcttcttcttcgtccagccaacatgagctcaatcgttcagggtttctccaagtcactggccatgaccattctctctgagatcggtgacaaaacgttttttgcagctgcgatactggctatgcgacaccctangacgctagtcttatcaggttgcttatcggctttgattgtgatgaccattctctctgctcttgttggctgggcagctccanatctgatctctc

SEQ ID NO: 177498 - DNA, 275 bp, Glycine max
aaaagatgaaggtttggagatgggtggtgagtttgatgttagtggggttactgcccgtgctcaacaatgggtcgattcgtggtggagaagaacagcctgagagtgacatcgccggagaaaataagagggacacacgacagtgccattggcaacttcggaatacctcaatacggtggtagcatggccgggaacgtaatttaccctaaggataacaaaaagggttgcaaagagttcgatgagttcgggatttccttcaaatcaacccccggtgctct

SEQ ID NO: 177499 - DNA, 275 bp, Glycine max
ctcaacttaagcgaaaagcaatagaattcaaagagagagtttcttgttctgtattttttgatttgatcatttcaatcttcaatttttttttatatatccaccaatccgcaaagtgcaaatttctaatctttcacgtattgggttcttctcttttccctcttcgtctccgatcgatccaattctcttcccatggctacgatcggacacaacaatctcaatgccaaattggttcttctcggggacatgggtgctgggaaatccagcctcgttttgcg

SEQ ID NO: 177500 - DNA, 276 bp, Glycine max
cggcgccgccggcgacgccctccgctacgacacggaggcaatccagtcggccatcaactcgtgcccagagggggatccctgccatgttaccttcccagcgccgggaaagtacctgacggccaccgtgttcctgaaatccggcgtggtgctgaacgtggagtccggggccaccatccttggcggcacgaggctggaggactaccccgaggagtcgtggcggtggtacgtggttgttgcggagaacgcgacggacgtgggaatccgcggcggcggacc

SEQ ID NO: 177501 - DNA, 273 bp, Glycine max
accactcaaacatttttcactaaaacacacactttctgaaaagaacaaggatccattttctttcccccaacatggccagaccacaacagcgttaccgaggtgtccgacaaaggcattggggctcttgggtctccgaaattcgccaccccatattgaagactaggatatggcttggtacatttgaaacagctgaggatgctgctagggcctatgatgaagcagctaggctaatgtgtggtgcaagggcaagaacaaacttccctttcaatccaa

SEQ ID NO: 177502 - DNA, 276 bp, Glycine max
gctagtttatcgtgaggagaatatgaagttgtttgtcttctttgtacgtgcagtagttcttcgtagcatggccatgccatggcgcaggctaccaaaggttccctctccgaatgaaaactggctatggtgagcgttcttcggaggtaaaatgcgcaagttttaggcttgctgtggaagcacacaacatccgagcccttaaaaccattccagaagagtgcgttgaaccaacaaaggactacattaatggcgaacaatttagatcagactctaaaacag

SEQ ID NO: 177503 - DNA, 275 bp, Glycine max
  unsure (1)..(275): unsure at all n locations
nccgcttattctctcgcattccgtggagatctagtgcttctgctgcaagacctcgctgaaaattagggtttcgattcggaggtagacgaagatgttcggaagggctccgaagaaaagcgacagcaccaggtactacgaaatcctcggcgtttccaagaacgcttcgccggatgacttaaagaaggcttacaagaaagccgccattaagaaccatcctgacaaaggcggggatcccgagaagtttaaagagcttgctcaagcctatgaggttctga

SEQ ID NO: 177504 - DNA, 274 bp, Glycine max
tctgctcgtgcctctagggttatcatatctccatttccatttcctctctctcagtttccaagaatcttaagctatgggaaagtcttacccaaccgtgagcgctgattaccagaaggccgttgagaaggcgaagaagaagctcagaggcttcatcgctgagaagagatgcgctcctctaatgctccgtttggcatggcactctgctggaacttacgacgtgagctcgaagaccggtggtcccttcggaaccataaagcacccctccgaactcgct

SEQ ID NO: 177505 - DNA, 274 bp, Glycine max
gctagcagagaaacaaagttacaagtaaagtaaattaagaagatcattaatggcttctcttgcaaccttagctgctgttcaaccagctgcgctcaatggccttgctggaagttccctctctggaactaagctctctttcaagccctctcgccacactgtcaaatccaagaacttcaggagtggtgccgtggtagcaaagtatggtgacaagagtgtgtactttgatttggaggatctgggcaacactacggggcagtgggacttgtatggctca

SEQ ID NO: 177506 - DNA, 259 bp, Glycine max
gaaagaaaaccctagctcaccgtttcaagatgcaaatcttcgttaagaccctcactggtaagaccatcactctcgaagtcgagagttcagataccatagacaatgtacaggccaaaattcaagacaaggaagggatcccaccagatcagcaacggctcatttttgctggcaagcagcttgaggatggacgtacccttgctgattataacatccaaaaggagtccactctccacttggttcttcgtctccgtggtgggat

SEQ ID NO: 177507 - DNA, 267 bp, Glycine max
gctgattggactccagaagaaagacaaatgctaaggaataaggttcctgtaactggtttgaagacaccattccgagacggtttgctgaagcatgttgctgaagatgttctaaagttggcaaaggatggcttggaaagaagaggcttcaaggaatcaggatttttgaatgaggttgccgaggtggttagaacaggtgtcactccagccgagaggcttttggaattgtatcatggaaagtgggagcaatccgtagatcacgtgtatgag

SEQ ID NO: 177508 - DNA, 273 bp, Glycine max
cttcgatcttcgtcgctgaaaatgagagagtgcatttcaatccacatcggccaggccgggattcaggttggaaacgcctgctgggagctttactgcctcgaacacggcattcagcctgatgggcagatgccaagtgacaagaccgttggtggaggtgatgatgctttcaacaccttcttcagtgaaactggggcaggaaagcacgtgccccgtgcgatttttgtagatcttgagcccactgtgattgatgaggttaggactgggacataccgc

SEQ ID NO: 177509 - DNA, 270 bp, Glycine max
atgaatttcattcacagggatgaggaggttaattacttcccttcaaggtatgatcctgttcgtcatgcagaaacgttccccatacctcctgctatctgcagtggaaggcgtgaaaagtgtggaattgagaaggagaacaactttaagcagcccggagagagataccgatcttgggcacctgacaggcaagatagatttaatcgccgatgggttgatgctttatctgacccacgggtcacccatgaaatccgcagtgtctggatatcttac

SEQ ID NO: 177510 - DNA, 272 bp, Glycine max
tgaagaaccaacaagaggggtattgagattgagattcaagtaatggggaagagcaaggttcttgtggtggggggaactgggtacatagggaggaggatagtgagggcaagcctggcactgggccatgagacctatgtggttcagaggccagagttgagcctccagatagagaagctgcagaggctcctctccttcaagaagcaaggtgctcatctcattgaggcctctttcaatgatcacaagagccttgttgatgctgtgaagcaggttga

SEQ ID NO: 177511 - DNA, 273 bp, Glycine max
agacgctgctgccgaaacccttccggaaccctaaggtaagtgagtaatcagtggttgagaatggtggagaaggcgaagggtagaaaggaggaggtggttacacgtgagtacaccattaacctccacaagcgcctccatggctgcacatttaagaagaaagctcctaaagctattaaggagataaggaaatttgcccaaaaggccatggggaccaatgatgtgagggtggatgtgaagttgaacaagtttgtctggagccagggaatcaggagt

SEQ ID NO: 177512 - DNA, 274 bp, Glycine max
gggatggcgaagttcaatgtggtgcagaagaaaagaagagctctaatagcagagaagaagagacagcttcacggagaccctttaaccggcaagctcaagatcaaggaccaacccctttccctatccggaaaacgcaaacgcaagctcttcaaaaaatggcgccgggaccaaaaggacgccttgcagaatggtttggtaaccatggaagatgttcaaatggcagttgctgaaggggataccaaagatgcccctagaccttcagcaaaaattcact

SEQ ID NO: 177513 - DNA, 273 bp, Glycine max
tgagtggccaaggaagagaaaaaggagaatacagtctcaagaactacttgcaagtgaaggctgttattacatccttgaagaaccctgcttggctttgaacatcattagctttagatttatttgatgaaaaagattaataaataggctccaataataaagataattaaattgggtttattccattcaaagtatctgataatgatgaatatgatctattttctttttctgtttttgcccctgcattttatgggtagcgcgaaatatactatggtg

SEQ ID NO: 177514 - DNA, 274 bp, Glycine max
atcattgattccgaagagaaaagaaaagatgtttgagccacaacagctatacactcgcgcgaagaccgaggaattcgacctcgaatcaggagaaaccctctacccagggctgagcgtcggcgagaaccagctccgatggggtttcatccgcaaggtctacggcatcctctccgcgcagatcgtcctcaccaccctcgtctccgtcaccaccgttttctatactccaatcaatgacctcctcaagggcaattccaccctcctcctcatcctcctc

SEQ ID NO: 177515 - DNA, 272 bp, Glycine max
atcataacctgaagtgcacctttctctctctgtctccctgtctctctctccctctctctcaatatacctcttttcctctgtgtgtgtgtgtgtgtgtgtgtctgtgtgcgtgtgatttgcgaagaaagcatagcaaaccctgatctggaaggtgcaataaggttatgaatgaaaccagtgactaaagctgtagatgattgttttaagctatgagatctgagggcttcaaattctcgttttccttccatatttcatccttgtgcctctacttt

SEQ ID NO: 177516 - DNA, 269 bp, Glycine max
ctcaagtccaacctacccctttttcttctcccaccaacttcaccgtcttcttcctcgatcatgtctcacttcaagggcaagtaccatgatgagcttattgccaatgctgcttacattggcactcctggaaagggtattcttgctgctgatgagtcaacagggacaattggcaagcgtttggccagcatcagtgtagagaatgttgaatccaacaggcgtgctcttagggagctgcttttcaccgctaccggtgctcttaaatatctcag

SEQ ID NO: 177517 - DNA, 272 bp, Glycine max
gttagggctttagagtgtcttttcttctttttcttcttcttcttcttcgttgaatcgcgattgttctgttgtgcgactgaaagaagagagatcgaaaatggcgttggctttcgacgagttcggaaggcctttcataatcctgaaggaacaggagcagaagagcagacttcgaggtttggacgctcagaaagccaacatctccgccggcaaagccgtcgctcgcatcctccgaacctccctcggccccaaaggcatggacaagatgctccaga

SEQ ID NO: 177518 - DNA, 271 bp, Glycine max
gtgtgaaggtagggttttagaaactgatcctacggcatgttcatgtttttggttagcagagtaactaaggattcaatttcacgcaaccgcaatgctcttgcttcttttgctttctctagcaggtgtgctcattcattatcatttgccacagtagaagcagaagagatatcaggttctaggcctgctgaagttttgaacctggtgcaaggtaaatgggtaggatcttcaaattggaacacaattgcagatcctttaaatggtgactcattta

SEQ ID NO: 177519 - DNA, 137 bp, Glycine max
caagtgctgtgaagccagatgactgggatgaggatgcacccatggaaattttagatgaagaagcagagaaacctgaaggatggttggatgacgagccagaggacattgatgacccagaggcgacaaaacccgaagac

SEQ ID NO: 177520 - DNA, 269 bp, Glycine max
catcaaagtttcttcctttctctgctctttgccttctctgacacatttggtgccttgtagagcgtgttttggcaggaaggtggtatggcgaaggacgttgaggttgctgagcgtggctccttctctgggaaggactaccaggaccctccaccagcaccactcattgatgctgaggagctcacaaagtggtccttttacagggctctcattgctgaattcattgccactttgctcttcctctacattactgtgctcacagtcatagggta

SEQ ID NO: 177521 - DNA, 270 bp, Glycine max
acaaatatttggaagatgatttgtattcaactcccttcaatttgagagcaatctgcaccctgtgcagaaatgggcttccaataaccaacaaaaggatcacctcttcctgacttgaagccattgaagcagcacttcacttcttctcttgacttgaagggagttgaatacaaatatttggaagatgatttgaacaacaagagtgatttgctcctcaagtataacccagtttataaaatgattccagtgtttgttcacaatgaaaagcccata

SEQ ID NO: 177522 - DNA, 256 bp, Glycine max
caaaaactccagtttcttccaagaaagccaaaaatgctactcctgaaaagactgatggtaagaaaggtggacatacagcaactcctcaccctgcaaagaaaggcggaaagactcccaacagcgaagccaaagccaagactcccaacagtgaagccaaagccaagactcctaagtctggtggactctcttgcaaaacctgcagcaagtctttcaccaatgaaagtggtctgcaacaacataacaaggcaaagcatgg

SEQ ID NO: 177523 - DNA, 249 bp, Glycine max
cgagacagggagacaagacagagtagtacagattactaccaatggctaccaaggtttacattgtttattattctacgtatggacatgttgagaagctagctagagagatagaaaaaggggctgcttctgtggagggagtagaagcaaaactgtggcaggtacctgaaacattgcctgaagaagtccttgctaagttgggagcacctccaaagagtgatgttccaattattactcccaatgagcttcctg

SEQ ID NO: 177524 - DNA, 249 bp, Glycine max
gtttgttgtgagctataagctagtttatcgtgaggagaatatgaagttgtttgttctctttgttgctgcagtagttttggtagcatggccatgccatggcgcaggctaccaaaggttccctctccgaatgaaaactggctatggtgagcgttcttcggaggtaaaatgcgcaagttttaggcttgctgtggaagcacacaacatccgagcctttaaaaccattcctgaagagtgcgttgaaccaacaaa

SEQ ID NO: 177525 - DNA, 248 bp, Glycine max
  unsure (1)..(248): unsure at all n locations
cttcaggtcaccatctagactgcaatcatggctgatggaccacagcatccatcagttgttcagaagctagctggacagtcttacctggtgtccaggcttagccccaactttaactctaggaattattctgcaactggctcttacgtcaatggcggaatgcactcgcctgggttggctgttgtgtcacctgtatctccagttactgtgcatgctncagcagagaaaggagtgagtggatttctagtgga

SEQ ID NO: 177526 - DNA, 249 bp, Glycine max
attttccaaacgagcatcttcgtagtttcttaagtcaagagaagaagtgaagtgctgcttcaatggcttcaagtcaggaagaggtgatccttttgggggttattggaagcccatttctgcacagggtgcagattgctctcaaattgaagggagttgaatacaaatatttggaagatgatttgaacaacaagagtcatttgctcctcaagtataacccagtttataaaatgattccagtgtttgttcaca

SEQ ID NO: 177527 - DNA, 251 bp, Glycine max
ctcacgtagcagtggttccaagtcctggcttcacccatctggttccaattcttgagttctccaaacgccttcttcatctccacccagagtttcacatcacttgtttcattccctcagttgggtcatccccgacttcctccaaagcatacgttcaaacccttccaccaaccataacttcgcttttccttcccccaatcacccttgaccatgtgtcagatccctcagtccttgcactccaaattgaactctca

SEQ ID NO: 177528 - DNA, 250 bp, Glycine max
ccttgctccctcagaagcgaagaagaagccacagagaaccagtctcctactctctctcacccacaagacaaatggcatctcacatcgttggatacccccgcatgggtcccaagacagagctcaagttcgctctcgagtctttctgggatggcaagagcagcgccgaggatttgcagaaggtggcttctgatctcaggtcatccatctggcagcagatcgctggtgctgggatcaagtacatccccagcaa

SEQ ID NO: 177529 - DNA, 252 bp, Glycine max
ccgcttctcaagtctctcgaagcctctttctctctcttctagaagctatctgtgtttggtgttactaagtctccaacaagcaaagtacatggttgatttggaaatccaggtccccaccccattcgacccgtttgccgaggcgagagaatcggatgcccccggagcaaaggagtatgtgcatattcgaattcagcagaggaatgggaagaagagtctgaccacagtgcaagggctgaagaaggagttcagcta

SEQ ID NO: 177530 - DNA, 252 bp, Glycine max
ctcgttcgtcaccatgactttcaagcgcaggaatggaggtcgcaacaaacacggccgcggccacgtcaagttcattcgatgctccaactgcggcaaatgctgccctaaggacaaggctatcaagaggtttctggtgaggaacattgttgaacaggctgcagtcagagatgtgcaggaggcttgtgtctacgaacaatacacgcttccgaagctgtatgtgaagatgcagtattgtgtttcctgtgctatcca

SEQ ID NO: 177531 - DNA, 248 bp, Glycine max
ctgcaaagcttttcgtcggaggtattccttacagcactgatgatatgagtttgcgagagtcttttgctcgctatggagaagtaattgatgtcaaggttattatggatcgtgaaactggcaggtcaagaggttttggctttgtaacttttgcaacaagtgaggatgcatcttctgccattcagggcatggatggccaggatcttcatggtcggaggatacgggtgaattatgctacagaaaggtcacgt

SEQ ID NO: 177532 - DNA, 253 bp, Glycine max
taggaacctaattgaggctgctgagcaagagtatgagaaagaaaagctgaatgagagaattgctaaattgtctggtggtgtggctgtgatacaggttggcgcacaaactgagacagagctcaaggaaaagaaattgagagttgaagacgctcttaatgctacaaaggcagctgtagaggaaggtattgttgttggtggtggttgcactcttctgagacttgcatcaaaggtggatgcaatcaaggatagcctt

SEQ ID NO: 177533 - DNA, 250 bp, Glycine max
ctcttcctttctctgctctttgtcttctctgacacatttggggccttgttgagtgtgtttttgcaagagggtatggcgaaggacgttgaggttgctgagcgtggctccttctctgggaaggactaccaggaccctccaccagcaccactcattgatgctgaggagctcacaaagtggtccttttacagggctcttattgctgagttcattgccactttgctcttcctctacattactgtgctcacagtta

SEQ ID NO: 177534 - DNA, 108 bp, Glycine max
ctctctctctctctctctctgaagatggcttcacgcaggctcgtatcttctctgattcgatcctcccttcgtagatctcaatcgaagccctcaatttccgcatcgaca

SEQ ID NO: 177535 - DNA, 245 bp, Glycine max
caaacaaacaaaccagagtaataaaaatcttcaacttttagcagtttttcttttctatattgcagaagccatggatttcagggtgatgggtttggattctccattgttccacacgctgcaacacatgatggacatgtcagaggacgctgcaggggacaacaagacatacagtgctccgacacggtcatacgttcgagacgccaaagcaatggctgcaacacctgcggatgtgaaggaatatccca

SEQ ID NO: 177536 - DNA, 249 bp, Glycine max
caaacctaacgcagcatcgctattctcttcattccatggctttgcccaaccagcaaaccgtggattaccctagtttcaaactcgttatcgtcggcgatggtggcacaggaaagacaacctttgtgaaaaggcatctcaccggagaattcgagaagaaatatgagccaaccatcggtgtggaggttcacccattggattttttcacaaactgtggaaagattcgattttactgctgggatactgctggac

SEQ ID NO: 177537 - DNA, 250 bp, Glycine max
gtttgcttcccaagtctctcgaagcatctttctttctcttcctgcagaagctatccgtgttacttgttcccaagtctccaacaagcaaagtacatggttgatttggaaatccaggtccccagcgcattcgacccgtttgccgaggcgagagaatcagatgcccccggggcaaaggagtatgtgcacatacgaattcagcagaggaatggaaagaagagtctgacaacagtgcaagggctgaagaaggagt

SEQ ID NO: 177538 - DNA, 180 bp, Glycine max
gagccgtagcagcagcggaagctctagcttgggcagcgaatcacaatggcgagaggattgaagaagcatttgaagaggcttaatgccccaaagcattggatgcttgacaaactgggtggtgcatttgctcctaagccctcatctggaccacacaaatccagggactgcctgccactcata

SEQ ID NO: 177539 - DNA, 249 bp, Glycine max
cacagttgccacactacaccgagattccccctaaacccgtttgcgttgttgtttgcgaagaaatggcgactaagaggagcgtgggaacgttgaaggagggtgatttgaaagggaagagggtgttcgtgagggtcgatctgaacgtgcctttggatgacaaccttaacatcaccgatgacactagagtccgtgctgctgttcccaccatcaagtacttaactggtcatggagccaaagtgatcctttcta

SEQ ID NO: 177540 - DNA, 251 bp, Glycine max
attactgctattacgagacgacgcagatttagttcggattgttcgcttgcgctggctaggaagatgcttatcgctggtgaagctgaattggctcaaggtggtggagaagaagtgccgaattttgacttcgacttgtttattattggggctggaagtggtggcgttcgtgccgctagattttcatccaattttggagctaaggtggggatttgtgagcttccatttcatccaattagttcagaaacaattgg

SEQ ID NO: 177541 - DNA, 239 bp, Glycine max
tgtttgttgtgagctaatagctagtttatcgtgaggagaatatgaagttgtttgttctctttgttgctgcagtagttttggtagcatggccatgccaaggcgcaggctaccaaaggttccctctccgaatgaaaactggctatggtgagcgttcttcggaggtaaaatgcgcaagttttaggcttgctgtggaagcacacaacatccgagcctttaaaaccattcctgaagagtgcgtt

SEQ ID NO: 177542 - DNA, 246 bp, Glycine max
gggatgctgttctgaggttgattaagaatgcaaatccagacatatttgtgcatggcattgtcaacggatcctatgatgtaccattctttgtgtcacggttccgggaggctctctttcattacactgcattgtttgacatgcttgacaccaacgttgctcgtcaagatcccatgaggttgatgtttgagaaggagttgtttggacgggagatagtgaacatcatagcttgcgaaggttttgagaggg

SEQ ID NO: 177543 - DNA, 247 bp, Glycine max
caaagtttcttcctttctctgctctttgtcttctctgacacatttggggccttgttgagtgtgtttttgcaagacggtatggcgaaggacgttgaggttgctgagcgtggctccttctctgggaaggactaccaggaccctccaccagcaccactcattgatgctgaggagctcacaaagtggtccttttacagggctcttattgctgagttcattgccactttgctcttcctctacattactgtgc

SEQ ID NO: 177544 - DNA, 248 bp, Glycine max
ctgcacataaaaaaccactctacaaaactctccagtaattctgaaaattttattttcttttggtgaaattaacagctctgtgattgatcaatggcgacaaaggaaggcaaagccataggcatcgatctcggcacgacctacagctgcgtgggcgtgtggcaaaacgaccgcgtcgagatcatccccaacgaccaaggcaaccgaaccactccctcttatgtagccttcaccgacaccgagaggctcat

SEQ ID NO: 177545 - DNA, 251 bp, Glycine max
tctcgagccgattcggctcgagggaaactgttttataatgcagttaccgttaaatgctgcagacctttccctaagaaactggacacaccaagaaaaagtgagattgtattcattgctccaactggagacgagatcagtaccaaaaaacaattggagcagtacctaaaggcacatcctggcaatcctgtcatttcagagtttgactggggaactggtgagacccctaggcgatcagcaaggatcagtgagaa

SEQ ID NO: 177546 - DNA, 247 bp, Glycine max
gtagccgtcgcactttgcgttttctgcgtcatctccgattccccgacaatggccacccaaatgagcaagaagagaaagttcgtagctgatggagtgttcttcgctgaactgaacgaggttctgacaagggagttagccgaggacggatactccggcgtggaagttagggttacgccgatgcgccccgaaatcatcatcagagccaccagaacccaagccgttctcggtgagaagggaaggagaatca

SEQ ID NO: 177547 - DNA, 248 bp, Glycine max
cgagtgaagagagaagaagatggcgtcgagcggagggatgccgttttggagggcagcggggatgacatacatcacatactcaaacatatgcgcgaatctggtcaggaattgcctcaaggaaccctacaaggctgaagccatctctcgtgagaaggtccattttgctctctccaaatgggtcgacgccaagcctgaaaaacctactattcgttcagacaccccagagcagtgatccggaatagttggaa

SEQ ID NO: 177548 - DNA, 250 bp, Glycine max
gccggagatcctccgctttaaggccttcgagcccatcctcctgttgggaaagagccgcttcgccggcgtcgacatgcgcatccgcgtcaagggcggcggccacacctcccagatctacgccattcgccagagcatcgccaaggcgctcgtcgcgttctaccagaagtacgttgatgaacagagtaagaaggagatcaaggacattctggtgaggtacgatcgtaccttgctcgtcgcggatcccggcgct

SEQ ID NO: 177549 - DNA, 252 bp, Glycine max
ctgaggttaagtctgttgagatgcaccatgaggctctcacagaggctcttccaggtgacaatgttggctttaatgtgaagaatgttgcagtcaaggatctcaagcgtggttttgttgcatccaactccaaggatgaccctgccaaggaagctgccaacttcacatctcaagtcattatcatgaaccaccctggccagattggaaatggatacgcaccggtgcttgattgccacacttctcacattgctgtca

SEQ ID NO: 177550 - DNA, 246 bp, Glycine max
cactctttgagaggttggtgtagtagctttttggagggttgacatggaagaacggtatgagccattgaaggagcttggtgctgggaattttggtgtggcaaggttggcaaaagacaagaaaactggagagcttgttgcggtcaaatacatagagaggggcaaaaagattgatgagaatgttcagagggagataattaaccaccgatctttaaggcatccaaatataatcaggtttaaagaggtgtt

SEQ ID NO: 177551 - DNA, 247 bp, Glycine max
gcgattaattatagtttaggcagcaaattatggaatcccatgatgaggagcatgctgccaaactacttagagctcaaacccacatatggaatcacatatttagcttcataaactccatgtcccttaaatgtgtggttgacttaggcataccagatatcatacacaactatggccaacccatgccactctcaaacctcattgcttcactaccaatccacccatccaaaacttgcttcgtccattgctt

SEQ ID NO: 177552 - DNA, 245 bp, Glycine max
tgagaataccagttgctccagtagccggcactaaacaacatggcggacaaggcagtcaccatccgaaccaggaagtttatgacaaacaggcttctctccagaaagcagttcgtcgttgatgtccttcatccagggagggctaatgtttccaaggctgaactgaaggagaagctgggaagaatgtatgacgtgaaagacaccaacactgtatttgtcttcaagttccgaactcattttggtggtgg

SEQ ID NO: 177553 - DNA, 245 bp, Glycine max
gcaccatggtctctctttaagcaagggggcactgctgctgaagcagctgctaaggaccttgtaattatattagagacagtgaggattattgcaattgcactctttcctgttacaccaagcttgagttggagaatatatgcacaacttggctattccagggaccaatttgatgcagcaacctggagagacaccaagtggggtgggcttaagggtggccaagtcatggctcaacctaaaccagtctt

SEQ ID NO: 177554 - DNA, 248 bp, Glycine max
ctgtgtcaaggcaactaaagcttctctcgctttgcaagagagggaggagtgagtgagatggaaggagtgatacacagaacagtggaagtgaatggcataaaaatgcacatagcagagaaaggacagggtccagtggtgttgttcctccacggcttccctgagctctggtactcatggcgccaccagattctctctctcagctccctcggctaccgcgccgtcgctcccgatctccgtggctacggtga

SEQ ID NO: 177555 - DNA, 246 bp, Glycine max
cgagtttgttgtgagctataagctagtttatcgtgaggagaatatgaagttgtttgttttctttgttgctgcagtagttttggtagcatggccatgccatggcgcaggctaccaaaggttccctctccgaatgaaaactggctatggtgagcgttcttcggaggtaaaatgcgcaagttttaggcttgctgtggaagcacacaacatccgagcctttaaaaccattcctgaagagtgcgttgaacc

SEQ ID NO: 177556 - DNA, 243 bp, Glycine max
cacggcgctaacaacggtcttgacatcgctgttaggcttttggagccactcaaagcggagtttcctattttgagctacgccgatttctaccagttggctggccttgttgccgttgaggtcaccggtggacctgaagttcccttccatcctggaagagaggacaaacctgagccaccacccgagggtcgcttgcccgatgccactaagggttctgaccatttgagagatgtgtttggcaaagct

SEQ ID NO: 177557 - DNA, 244 bp, Glycine max
caatcacttgcttttgatagttatatgattccagaagatgatctagaattagggcaattacgtttactagaagtggacaatagagtggtagtgccagctaaaactcatctgcgtgttattataacatcagctgatgtacttcatagttgggcagtaccttccctgggtgtcaaatgtgatgctgtgcctggtcgtttgaatcagatctctacttttatacaaagagaaggggtttactatggtc

SEQ ID NO: 177558 - DNA, 248 bp, Glycine max
tcgagataactagaaacagtgtgatgaaaatgaaggtccttgttttcttcgttgctacaattttcgtagcatggcaatgccatgcgtacgatatgttccctctccgaatgaacactggctatggtgcccgtactccggaggtgaaatgcgcaagttggaggcttgctgtggaagcacacaacatctttggctttgagaccattcctgaagagtgcgttgaagcaacaaaggaatacatccatggcgaa

SEQ ID NO: 177559 - DNA, 250 bp, Glycine max
cttaagtctctgcattattctcttcccttttctatctccctctgcaaaaacgaagtaaatgggtcggcttaatctcctacttgtgtggtcactctctttaacacttttccttaattatctacacccaacctctgcccagctcagtccaaaccactatgctaacatatgccccaaccttgaaagcatcgttagacaagccgttactaataagttccaacaaacctttgtcaccgtcccagccacccttcgc

SEQ ID NO: 177560 - DNA, 253 bp, Glycine max
ctcttcaaaagggagaagttaaggaaagaaaactctcaaaaaactattatagcaatggcagaacaaaaccaaaaccaaacaactgaagctggaaggcaccaagaggttggtcacaagagccttctccagagtgatgctctttaccagtatattctggagacaagtgtctacccaagagaacctgaatccatgaaagaactgagagagttgacagcaaaacacccatggaacatcatgacaacctctgcagacg

SEQ ID NO: 177561 - DNA, 245 bp, Glycine max
ccctcgagccgaatcggctcgagcggctcgagcgctatctcagtggacccgcagatgtggactggagcaagatccagacgactacggacgacagtggttgtgccttacgacactttggcgccaactcctgaaggttcttcggaggtgaagaatctattggacaagcttgtggtgttgaagctaaatggaggcttgggaacaactatgggttgcactggtcctaaatctgtaattgaagttcgtga

SEQ ID NO: 177562 - DNA, 245 bp, Glycine max
cgcagcatataatgaattgaagtctgctggagttgaatttccaccacgagatgagaaccgtgtaccattcttcactcccgctcaaactcagccaattattcattctgctgcagaatatgatgatgctactattcaggcttctcttctgtcagatgcatctgaccttagtttgctagagattcaaaatgctcaaggactagctgatgtattgatggaaatgcttagcgccttgagtcctaaagacc

SEQ ID NO: 177563 - DNA, 243 bp, Glycine max
gaaaacgcgtcttcataaacgccgcccaaaacttctcatacccttttattcattccattcgtttctagggttttcttttctttgccgagaaaatgagagagtgcatttcgatccacattggccaggccgctatccaggttggaaacgcctgctgggaactctattgccttgaacacggcattcagcccgatggacagatgccgagtgacaagaccgttggcggaggagacgacgccttcaaca

SEQ ID NO: 177564 - DNA, 247 bp, Glycine max
ttcccacaagatcgtcattttttccaagacctattgcccgtactgtagaagggcaaaagctgttttcaaagagttgaaccaagttccacatgttgttgagctcgacgagagagaggatggttcaaagattcaggatatcatgattaatactgttgggaggcgtactgtgccacaagttttcattaatggaaaacaccttggaggctcagatgacaccgttgaagcttatgagagtggacatctgcat

SEQ ID NO: 177565 - DNA, 246 bp, Glycine max
gctagctactcgtccgtcgttaagacaacaattatgttggctgacttgaaggacttcaagaaagtcaatgagatctatgctaaatacttcccttcacctttccctgctcgttcaacttatcaagtagctgcattgccattggatgccaagattgaaatagagtgcatagcaactttataagcatcaattgtactagtacatctggctccatcagcaaactcaggttaacaatgcaggaagggacat

SEQ ID NO: 177566 - DNA, 249 bp, Glycine max
tttttctctctccatccaacatcgaaacgaggtcgttttgtgttccgccgaaggatccggaggttgtagcaggctagcagctatggatttggcatccaatctcggtggcaagattgacaaagccgaagttctctctgccgttcagaagtatgagaagtatcatgtttgctatggaggtcaagaggaagagaggaaagctaattataccgatatggttaataaatactacgatcttgttaccacttttat

SEQ ID NO: 177567 - DNA, 251 bp, Glycine max
atttcctgtttacgatcttattgcaattttgcaactttcaaagcttattagctaaagtaacatcaaaagatgtcattgattccaagtattttcggtggcccaaggagcaacgtgttcgatccattctcactcgatatgtgggatcccttcaaggattttcatgttcccacttcttctgtttctgctgaaaattctgcatttgtgaacacacgtgtggattggaaggagacccaagaggcacacgtgctcaa

SEQ ID NO: 177568 - DNA, 245 bp, Glycine max
cttatcgataacatatttcacttgagacagttatctttatctacgcaagagaagaatagaaaatggatatcaggttgatggatttggactctccattgttcaacactctgcaccgaatcatggatctgacagaggacgcagagaagaacttgaacgctccgacgcggacatacgtgcgcgacgcgaaggcaatggctgcgactcctgcggacgtgaaggagtaccctaactactacgtgttcgtg

SEQ ID NO: 177569 - DNA, 246 bp, Glycine max
ccccgcctcttccgtaggcagcagcaatggcctcaaatcccaaaactttgacctttgaggaggtagctaagcacaacaacaaaaaggattgctggattattatcaatggaaaggtgtatgatatcacaccatttttggatgagcatccaggaggtgatgaagttttgctgacgtcaacagggaaggatgccaccattgattttgaagatgtgggccacagtgattctgctatagaaatgatggaaa

SEQ ID NO: 177570 - DNA, 242 bp, Glycine max
tgaaaacccaaagtgcttctctcctctgtctttttctctctcttgctatccttttggctagtcgcactgctgcaagtgcaactccaagaagcgcagtgccaagccaccatgtttcaacattcaacagaagcctttttccttccacttttctctttggaattggttcttctgcttaccaggcagaaggagcagcaagtgtagatgggagaggaccaagcatatgggacacctacactagacag

SEQ ID NO: 177571 - DNA, 245 bp, Glycine max
ggcgttctatatattattgaattgacaatgaggcctgctcttgctatgcttcctcttctatatgctttcttgttagctgccactacggaatcaagaaaagatccaggggaatattggaaaatgatcatgaaagatcaggaaatgccagaaggacttcaaggtcttgtttcatttcaatctgaaaataaccctaagactcaagagcagcttggtaaaggttccaaaaaccattgtgaagagtctct

SEQ ID NO: 177572 - DNA, 247 bp, Glycine max
gtcggtgtttacaagactacgtcgtcccacgatcaaccccgatgaccgtccctaacttggtggcttcctccttagcaatggacggtcatcggcattgatcttggaacaacctattcatgtgtcggtgtttacaagaatggccatgttgaaatcatagccaacgaccaaggtaaccgtatcaccccatcgacggttcctttcaccgacagtgagagactcattggggaggctgccaagaatcaggcag

SEQ ID NO: 177573 - DNA, 247 bp, Glycine max
cgctaagtgtgagagacagaaaatgccaaagtctcaatttcgaaccccatttcttgtttctttttctcttttgttattcatcttcaacctcaccccttcatacgcactctatggagcatccacacccgtgcttcaactcactccctctaacttcaagtccaaggttctgaattcaaatggagttgtccttgttgaattctttgctccatggtgtggacactgtcaggctctgactcctatatgggag

SEQ ID NO: 177574 - DNA, 251 bp, Glycine max
gaaccaccaatcaatctgttctaccctggcattgtgttgtttctagttggcatcattggcaacttctaccaccattaccttctgtccaaattgaggggaaagggtgaaaaggagtacaagattccaaagggtggcttttttgagcttgtgatttgcccccactacttctttgagattactgtgttttatgggatcttcttcatttctcagacattatattcattcgctttcgctgtaggcactactatgta

SEQ ID NO: 177575 - DNA, 275 bp, Glycine max
ctctccttcaaaatcgttgtcaatttcgcctctttctttctcaactcccttagattctctccatcgggtcttcaaaaatgcggatgagctgcaatggatgtcgagttctcagaaaaggttgcagtgaaaattgcagcatcagaccctgtttacaatggatcaaaagcccagaatctcaagccaatgctactgtgtttcttgccaagttctacggccgtgctggtctaatgaacctggttaacgcaggccccgaacatcttcgtccagcgatcttt

SEQ ID NO: 177576 - DNA, 272 bp, Glycine max
tgaacttctaataatggtggaaggtcaaatcactgctggttttatgaccccaactgcactttataccaagacactgaaacctggagatattatggtttttccacaaggacagttgcattttcaggttaattctggaaacggaaaagccactgcttttctggcattcagtagtgcaaaccctggagcacaactacttgaccttctgttatttggcaacaccttgccttctgacttggttgcacagactaccttccttgatgttgcacaagtca

SEQ ID NO: 177577 - DNA, 271 bp, Glycine max
gtgagatagagagagacgcttcgcaaatctcaatcgaatctcagaaaaatgagagaaatcatcagcattcacataggtcaggccgggatccaggtcggaaactcctgctgggaactctactgcctcgaacatggcatccagcccgacggcatgatgccttctgactccaccttcggtgtagcccacgacgccttcaacaccttcttcagcgaaaccggatctggcaagcacgtcccccgtgctgtcttcgtcgacctcgaacccaccgtca

SEQ ID NO: 177578 - DNA, 269 bp, Glycine max
caattatggtttccaatttattaattgtgtgttgagtttttgtttttggattttgggtactaaaacttatgtattggggtttaaatttcatagggttttagaaaaattgatccagataggtgggagtttgcaaatgaaggattccttagagggcacaggcacctgttggcaaacataaggagaaggaaacaaccttcttctcagccttcttcttcttcttcttcatcctcttattattattattcttcttcttctcaacaagcacaaca

SEQ ID NO: 177579 - DNA, 262 bp, Glycine max
gagagacttcctggcatctctgaaactgctgctatttttgctggtgtggatgttacaaaggaacccattcctgttttgccaactgtacattataacatgggcggtattcccacaaaccattatggagaggtggttaccattaaaggtgacaatccagatgcagtggttcctggattgatggctgccggggaaacggcctgtgcatcagtccatggtgccaataggcttggtgcaaattcacttctggatatcgttgtttttg

SEQ ID NO: 177580 - DNA, 260 bp, Glycine max
cgccagactgagaggaagagagagggagattctttgtttgctaccttctctcggaaaaatggttacgttcaggtttcaccagtaccaggtggttgggagggctcttcccacggaagcagatcagcaccccaagatctaccgaatgaagctctgggccaccaacgaggttcgcgccaagtccaagttctggtattttctgaggaacgtgaaaaaggtgaagaagaccaatggccaagtgcttgccatcaacgaaatttttg

SEQ ID NO: 177581 - DNA, 260 bp, Glycine max
actagccgcagcacgaggagcagcctcaggaggagaaggatgtctcacaggaagttcgagcacccaaggcacggttcactgggatttcttcccaggaagcgtgctgctcgtcacaggggaaaagtgaaggcattccccaaggatgacccatccaaggcacccaagctcactgcattcttgggttacaaggccggtatgactcacattgttagagaggtcgagaagccaggatcaaagcttcacaagaaggaaacttgtga

SEQ ID NO: 177582 - DNA, 275 bp, Glycine max
cgaattctgaatcaaaattcatcgaagaagaaggagaaggagatgtatagcaatttcaaagagcaagcaatagagtacgtgaaccaagcggtagatgaagacaataagggaaactacgcgaaagcatttcaactttacatgaacgcgttggagtatttcaaaacgcacctcaagtacgagaagaaccctaagatcaaggaggccatcactcagaaattcaccgagtatctccgccgggccgaggagatccgggccgtcctcgacgatgggcccag

SEQ ID NO: 177583 - DNA, 269 bp, Glycine max
cgcgcggcacccacacacacagttcgtcggaatgggaagggtgcttcgcgctcagcgtaagggtgctgggtcggtgttcaagtctcacactcaccaccgcaagggtccggcgaggttccgcagcctcgacttcggcgagcgcaacggctacctcaagggcgtcgtcaccgacatcatccacgaccccggtcgcggcgcccctctcgccaacgtggcattccgccagcccttccgctacaagaagcaaacggagctcttcgtcgccgccg

SEQ ID NO: 177584 - DNA, 269 bp, Glycine max
ctccatttgactacaaaacagtctccatttgacacagtcctagtgcgtgtactacttattatggccacaccagcatccatcactaatgtcactgtggagttccttcaattccccgcactggtgacacctcctggctctaccaaatcctatttccttggcggcgcaggggtgagagggttgaatattcaagaagaatttgtgaagttcacgggaataggtgtttatttggaagacaaggccgtgtcatcactcgctgccaaatggaaggg

SEQ ID NO: 177585 - DNA, 268 bp, Glycine max
ctagaaacagtgtgatgaaaatgaaggtccttgttttcttcgttgctacaattttcgtagcatggcaatgccatgcgtacgatatgttccctctccgaatgaacactggctatggtgcccgtactccggaggtgaaatgcgcaagttggaggcttgctgtggacagcacacaacatctttggctttgagaccattcctgaagagtgcgttgaagcaacaaaggaatacatccatggcgaacaatatagatcagactccaaaacagtta

SEQ ID NO: 177586 - DNA, 267 bp, Glycine max
cgattcatcaaattgtgcttcggactccaaggcgtgcttcagcacaggtatgcttacatggggcgcaggtcacttcatggcggaatgagcatggggaagaacttctattcacaagcagcaaggcaattttcaaggctccaaaagccatacgaggaggaattcctatatgttttccacagttcggaaactgtggatcgctggagctgcatggttttgcgagaactagaatgtgggcaattgatgataatcctcctcctctgcctgcaa

SEQ ID NO: 177587 - DNA, 261 bp, Glycine max
ccgccattgtcacaatgaggcaaaaaatgatatcaacattgatctgaagcttagacatgatattccacgacacgaagtcaaacaggtgatttgttcactttgtgggactgaacaagaggttcagcaaaactgtataaattgtggtgtttgtatgggaaaatacttctgtggaacatgcaagctttttgatgatgatatatctaagcagcagtaccattgctgtggctgtggaatttgcagaactggaggaagcgaaaattt

SEQ ID NO: 177588 - DNA, 263 bp, Glycine max
gtggaacgctctctctctctctctctcttcgctttccagaaaatggtgaaccctagatgcttcctcgacatcaccatcggcggcgagttagaaggcaggatcgtcgtcgagctcttccacgacgttgttcccaaaaccgccgagaatttccgcgccctctgcaccggcgaaaagggcatcggccccaacaccggcgtccccctccactacaagggcatgtgtttccaccgcgtgatcaaagggttcatgatccagggcggcga

SEQ ID NO: 177589 - DNA, 262 bp, Glycine max
cataacctcgctctcttcaccctcttcttcttcttcttcttcttcactttgtaactttcgaatcttcttccttccaccgcaatggccactcccacgcttagccccgccgacgccgacaagctctccaacctcaaatcctccgtcgctgcattgagccaaatcagtgagaatgagaagaatggattcacaagcctcgttgctcgttacctcagtggcgaagacagcatgttgagtggagtaagatcgagacgcctacggatga

SEQ ID NO: 177590 - DNA, 260 bp, Glycine max
actgaagcttcttccatcagcgtgctggccacatttcgcacctgaacgctgcgactattggtgaatctctcgccactgaagaggatgctttcgttcttccaagtgaggactttgctggccaagccaatgttcagtccccagaacagtatctgcagatgtataagagctcgattgacgaccctgctggattctggtctgagattgcctcagagttctattggcaacagagatcgggtgacaaagtgtgtgatgaaaatttt

SEQ ID NO: 177591 - DNA, 261 bp, Glycine max
gcaatatattcgttccgttccttctttctccgctcctcacttcgctctctcattctccattctcacttctcaaattgaatcgaacgaattcacaaaccctagttttcgaggatgggtcagatccagtactccgagaagtacttcgatgacacttacgaatatagacatgtggttcttcctcctgaagtcgcaaaactgcttcccaagaatcgtcttctctccgaaaatgagtggcgggcaattggggttcagcagagccgt

SEQ ID NO: 177592 - DNA, 276 bp, Glycine max
cttgcttcccaggcgcaagatggttaactctgatcttgccaggatcattaattctgacgaggttcagtctgttgtgaggcccattaagaaggatgtgaagaaggccacgctgaagaagaaccctcttaagaacctgaactctatgctgaagctgaatccttatgccaagactgctaagaggatggctcttcttgctgaagctcagcgcgttaaggccaagaaggagaagctcgacaagacgaggaagactgtctctaaggaggaagcttctgccat

SEQ ID NO: 177593 - DNA, 284 bp, Glycine max
tggtcccattgcttccgaagagaaaagaaaagatgtttgagccacaacagctatacactcgcgcgaagaccgaggaattcgacctcgaatcaggagaaaccctctacccagggctgagcgtcggcgagaaccagctccgatggggtttcatccgcaaggtctacggcatcctctccgcgcagatcgtcctcaccaccctcgtctccgtcaccaccgttttctatactccaatcaatgacctcctcaagggcaattccaccctcctcctcatcctcctcttcctt

SEQ ID NO: 177594 - DNA, 269 bp, Glycine max
gctatacacttgaaggaatcacgcattaatgccctaccaaggtacttgactgttcagtttgtccgtttctcttggaagagggaatccaaccagaaggctaagattttgcggaaagtagattatcctctggagttggatgtttatgattttcgttctgacgaacttcgtaaaaaattggaagctcctagacagatcctaagaactgaagaaggcaaaaagcttggtctgaaagtgaatgagaaaagctctgttcagaaggaaaatgatgt

SEQ ID NO: 177595 - DNA, 269 bp, Glycine max
ccagcatccgccgcacgacggtaaccctccaacaacaacacttccgctgcgaaaaatgtctctggtggcgaacgaggatttccagcacattctgcgtgtgctgaacaccaacgtggatgggaagcagaagataatgttcgcaatgacctccatcaagggtattggaaggagattcgccaacatcgcttgcaagaaggctgatgttgacatgaacaaaagggctggtgagttgactgctgctgagttggatagtgtcatgactgtggtgg

SEQ ID NO: 177596 - DNA, 267 bp, Glycine max
ctggtactggtactgttgtcggatcgaaaaccctaaattgaattcgaatcaacaacatgcagcagggaggaggctcggagacggaagtgacatgggaggaccagcagaacatcaacaaattcggaaggttgaacaatcgctttcacgagcttgaggatgagatcaaaatcgctaaggaaacaaacgataatttggaggatgcaagcaacgagttgattctcacagatgaagaggtcgttcggtttcaaataggagaggtttttgctc

SEQ ID NO: 177597 - DNA, 268 bp, Glycine max
tcttgttcctctcgcccagaatccgagatcaaccccgacgaaggcaaggggtttttctcggcttcttcagattcctgaacatggcgcctgtttcagctttagccaagtacaagctcgtcttcctgggtgaccaatccgtgggcacacaccagcatcatcactcgcttcatgtatgataaattcgataacacctatcaggctacaattggtattgattttctatcaaacactatgtatcttgaagatcgaactgttcgactgcagttgt

SEQ ID NO: 177598 - DNA, 262 bp, Glycine max
atttcagtgagtgatcggtgttcacttgatctcatcataatcgtcagcgtcaattgaagaagatgccgatcagaaacatcgccgtcggaaggcctgaagaggcgactcaccccgacacgttgaaggcggctttggctgagttcatctcaaccttcatcttcgtgttcgccggctcaggctccggcatcgcctacaacaagctcaccgacaacggcgctgccacccctgccggcctcatctccgcctccatcgcccatgcatt

SEQ ID NO: 177599 - DNA, 251 bp, Glycine max
cttattattaattactaaggaactctcccagaaaagaggcatcagttgcaatggctcgttacggtgagggcgacaagcggtggatcgtggaggaccgccccgacggcaccaatgtccacaactggcattggtccgagaccaactgcctcgactggtccaagaccttcttcaccagcctcctcactaacctccctatcctcgacggcgagggtaacctcttcctcaaaacgacgtcgcttcgctccctcgac

SEQ ID NO: 177600 - DNA, 258 bp, Glycine max
ctttctttcaagtttcatctcttttcctcatttcattcttctaaccttctctccgtttacttcacttcatgacggattcttctcctcttatccctccctcaccggtcacagtcaccgagatcgacctcgaagagggaccctccgaacaaattcaatgccggatttgtcttgaaactgatggtagaaatttcatagttccttgtaagtgcaaaggtacgtcaaagtacgtacatagagagtgtttagatcattggcgag

SEQ ID NO: 177601 - DNA, 243 bp, Glycine max
gttctttctctcgcaatcttcactacattcaccggccatttgcattcacattgaatatggctgagactacacaatctaatgctgagttgttggagtggcctaagaaagataagcgccgcttcctgcatgttgtgtatcgtgttggtgatcttgatcgcaccattaagttttatactgaatgttttgggatgaagcttttgaggaaaagatatattccagaggagaaatatgccaatgcttttc

SEQ ID NO: 177602 - DNA, 270 bp, Glycine max
ctagggttaccggattcttgcgttttaatatctgcaattcagaaacatggggcactccaatgtgtggaattctcaccctaagaactacggacctggttctcgcacttgccgtgtgtgtgggaatcctcatggattgatcaggaaatatgggcttatgtgttgcaggcagtgcttccgaagcaatgccaaggcaattggcttcatcaagtatcggtgaaagattagttttccactggccccacccggtttggattcttgcatcaggctatg

SEQ ID NO: 177603 - DNA, 273 bp, Glycine max
caaattctcaaatccaaatccaattccaattccaattcccaatcttctcaaaccctaattcctcatcttgaaaatgagagacatcttgcacatccagggagggcaatgcgggaaccagatcggagcgaagttctgggaggtgatatgcgacgagcacggcatcgaccacaccggaaagtacagtggcgactctgaactccaattggaacgcatcaatgtttattacaacgaagcgagtggcggaaggtacgttccacgcgccgtcctcatgga

SEQ ID NO: 177604 - DNA, 267 bp, Glycine max
cttcactctcacaatggactccctctctctcttctgcaccggagcccttctcgccggcggcctctactggttcgtctgtgttctgggccccgccgaacagaaggagcaacgcgccaccgatctatccggcggctccatctccgccgagaaagtccaaagacactacaagccgtactggtccttcttccggcgccccaaggagatcgagaacgccgacaaagttcccgacttcgtcgacaccttctacaatctagtcaccgacatcta

SEQ ID NO: 177605 - DNA, 106 bp, Glycine max
ctctctctctctctctctctgaagatggcttcacgcaggctcgtatcttctctgattcgatcctcccttcgtagatctcaatcgaagccctcaatttccacacaac

SEQ ID NO: 177606 - DNA, 269 bp, Glycine max
cactaaaccaaagtaagaggtatagtgttctaagagtgagcaacttgtgagacatggcttccaaggctgcacttctcttgtgtctcaatcttctctttttcactgtggttagttccacatatgtgccatgtaatccaccccccaaaactcccaaacacccacctgtcccaaagccaccatccccaaagctagcaagctgccccaaagacactattaagttcggtgtgtgtgctgatgtgttaggtttgattaatgtgcaacttgggaag

SEQ ID NO: 177607 - DNA, 265 bp, Glycine max
caatgggtggggagcgcaacaaggttttcactttggccgaggtctctcagcacaacaatgccaaagactgttggcttgtcattcatggcaaggtttataatgtaacaaagtttttggaagatcaccctggtggggatgaggtcctgttgtcttccacagggaaagatgcaaccaatgattttgcggatattggtcacagcaccagtgccgtagccatgatggatgagttctatgttggagacattgatacatcaaccatccccag

SEQ ID NO: 177608 - DNA, 261 bp, Glycine max
cgttctctgaaattttaattgacttttctcccctcataaaaaaaacctaccaatggctcccgcaaaggcagagaagaagcccgcggagaagaagccggcagagaaggccccagcggagaagaagccgaagggtacgaagaagatatcgaaggaaggaggaagcgagaagaagaagaagagaacaaagaagagcgttgagacctacaagatctacatcttcaaggtgttgaagcaagtgcaccccgacatcgggatctccag

SEQ ID NO: 177609 - DNA, 257 bp, Glycine max
gagctataagctagtttatcgtgaggagaatatgaagttgtttgtcttctttgttgctgcagtagttctcgtagcatggccatgccatcgcgcaggctaccaaaggttccctctccgaatgaaaactggctatggtgagcgttcttcggaggtaaaatgcgcaagttttacgcttgctgtggaagcacacaacatccgagcctttaaaaccattcctgaagagtgcgacgaaccaacaaaggactacattaatggcg

SEQ ID NO: 177610 - DNA, 259 bp, Glycine max
ctcaatccttttcgcctttgtctgcgaatggcgtcgttcgatcaggcacctcccggcgatgtcaaatccggtgacaaaatcttcaggaccaagtgtgctcagtgtcacaccgtcgaaaaaggtgccggtcacaagcaaggacccaatctgaatggtttgtttggaaggcaatcaggcactactcccggttattcttactcttcagctaacaagaacatggctgttacttgggaagaaaagacactatacgattacttgc

SEQ ID NO: 177611 - DNA, 260 bp, Glycine max
ttctaccgtcatcaactaggagaagaagcttcattttctgcaaaatggatccctctgcggcattgctatttaaccacctcaagggtgcagacccgttcttcctgctagcgggtcctaatgtgattgaatcggaggagcacattctgcggatggctaagaacatcaagagtgttgcatctgaagttggaataccattggttttcaagtcaagctttgacaaagctaaccgaacatcatcaaaatcatttcgtggcccgggg

SEQ ID NO: 177612 - DNA, 240 bp, Glycine max
attctaaacttttttcatctaataatggctgcaacaacacgttcacgtgcatccatctacgatgtgttcctcaacttcagaggggaagacacacgctatggtttcaccggcaatctctacagggctctttctgacaagggaattcgtaccttctttgacgaagagaagcttcacagcggagaggaaataacacctgcacttttgaaggcatttaaagattccagatttgccatcactatg

SEQ ID NO: 177613 - DNA, 259 bp, Glycine max
ggagggggccgaatcaactgtgataatggcgtctgggatgtgtgctagcgtagtcctgtttatgccactggttccagctggtggacatcttgtgaccactacggattgttataggaagactagaatattcattgagacttttcttccaaagatggggatcacgaccactgtaattgatccagcagatgttggagccttggaatctgcattggagcagcacaatgtgtctctattcttcactgagtctcctaccaatcca

SEQ ID NO: 177614 - DNA, 267 bp, Glycine max
ctctgaattattactataaggacacaccatattgccaacattttcactggaaaagtacagtctgttgaaattcataaaggtgaatggggcactgagggatccgtcatctcctggaattatttacatgagggcaaagtttgtgtggctaaggagatggttgaaggcatagacatgaaaaacaataaaatgacctttaaggtcatagagggagacctgctgggacattacaaaagcttcaagtttttattgcaagttactccaaaggaa

SEQ ID NO: 177615 - DNA, 270 bp, Glycine max
cagagagcaaccaccaatcgaagaagaaacaaccgtaacagatctccgtttctcgccaaacaaaaaacaaaaaaatggctgccttcagcggtgacgaaaccgctcctttctttggcttcctcggagccgccgctgccctcgttttttcctgtatgggcgcggcgtacggcaccgcgaagagcggcgtcggggttgcgtcgatgggcgtgatgaggccggagctggtgatgaaatcgatcgtgccggttgtgatggcgggtgtgttgggta

SEQ ID NO: 177616 - DNA, 271 bp, Glycine max
acggaaccttgcaatcctaaagtaactgatatcatgggatttagtttctccatggacagcaaggtccgtcaatatcctgccaataaccggagccatcttgaagccgtgaccagaaaagccggctccaagaaccacatccttcccaaagtccccacccaagacatcaatgaggaaatcctcatctggcgtcatggagtagatgcaagactgtttgatgacgggctcagtggattcaaccatccccttgaacgtaaactccacccattctttg

SEQ ID NO: 177617 - DNA, 264 bp, Glycine max
ctggaatggtggtgacttttgcaccaactggactgacaactgaagtcaagtctgtggagatgcaccatgaatctcttacagaggcacatcctggtgacaatgtgggattcaatgttaagaatgttgctgttaaggatttgaagcgtggttatgttgcctcaaactcaaaggatgaccctgcaaaggaggctgctaacttcacagcccaagtcatcatcatgaaccaccctggtcagattggaaatggctatgcccctgtcctcg

SEQ ID NO: 177618 - DNA, 267 bp, Glycine max
ctcaactttactcctcttcaatcagttgcatattctttgctattccaatggccactgttgaggttgtgtcagccaaggttgccctcccagaggacacaaaagaggcatcattgaaggttgacgaggagaagaacacagaagaagttgttgagactccaacaccagaaactgtggtcactgagcaaaccaaggaggaaagtactgaggccccacgacctgcagcttcagaagacaagccctcggttgaagttcagactaaagaggtgg

SEQ ID NO: 177619 - DNA, 265 bp, Glycine max
cgtaacttcatctgggtttcaggaaaaaagaaaaaggaaaacaatgggttccgataatcaccagaacttggagttcttgaaggagatcggtttgggctcttccaacattggctcttacattaatggccagtggaaagccactggttcttctgtcacttctgttaatccttctaacaatcagagtatagctcaagtgaccgaagcaactttgcaagattttgaggaggggttgcgagctctgcagtgaagcagctaagacatggat

SEQ ID NO: 177620 - DNA, 260 bp, Glycine max
gcttctcactgatctccattcccattccatggcttccactgaatcatcccctttcaagaaaattcagattcaaagggatgacactacatttgacgcatatgtggttggaaaagaggatgctcctggaattgttgtgattcaggagtggtggggtgtggattacgaaattaagaaccatgccgtgacagattctcagcttggtagtgggtttaaagctcttattccagatttatacagaggaaaggctggtctggatgttg

SEQ ID NO: 177621 - DNA, 258 bp, Glycine max
cagaagatccagtgatcatctgggtgggacctttcattggtgctgcacttgcagcactctaccaccaggtcgtaatcagggccattcccttcaagtccaagtgattcaatcaaaccgttcatgcttaatcaagttgggaacaacaaaaaaaatcaccacaatgtttctgggtttcggtttcatttcatcaagatgatctgtttatctttccctttttaatgttaatttaaagtctttgtattttgtatgtaaagatgt

SEQ ID NO: 177622 - DNA, 261 bp, Glycine max
ctgcaatggaaaatggaaccgaggaagggcttggagactcatctgaatcagcccctattgcctttcctcaagacatacaaatggaggaaaggcctgaacctgttaggaacaacccacctcacggtactcggcgctaccaggatcagatggtcccaagtattacttcttcccatgtgagagtggaagaggaagaaacatcttcagaccttcgctactcggctgcagacagcagagccgaagtgcctataaatgtaaccacac

SEQ ID NO: 177623 - DNA, 260 bp, Glycine max
caaatgaaaacccaaagtgcttctctcctctgtctttttctctctcttgctatccttttcggctagttcgcactgctgcaagtgcaactccaagaagcgcagtgccaagccaccatgtttcaacattcaacagaagcctttttccttccacttttctctttggacttggttcttctgcttaccaggcagaaggagcagcaagtgtagatgggcgaggaccaagcatatgggacacctacactagacagcatactgaaaag

SEQ ID NO: 177624 - DNA, 245 bp, Glycine max
gcacaagagtgagatcaagagcgatcaacatggtatcttggtgtcggcaaacagcattggtgtttaccacgaccacttctacatttaccatcttgaccttgacattgatggtgttgccaactcttttgagaagacaagtttgaagactgtaagagtgacagatggaagttcgaagaggaaaagctattggacaactgaggttgaaactgccaagactgaaaatgatgcaaagataatacttgggt

SEQ ID NO: 177625 - DNA, 223 bp, Glycine max
tcgagataactagaaacagtgtgatgaaaatgaaggtccttgttttcttcgttgctacaattttggtagcatggcaatgccatgcgtacgatatgttccctctccgaatgaacactggctatggtgcccgtactccggaggtgaaatgcgcaagttggaggcttgctgtggaagcacacaacatctttggctttgagaccattcctgaagagtgcgttgaagc

SEQ ID NO: 177626 - DNA, 273 bp, Glycine max
cccgatttaagaagaaccgcaagacgcgcggccacgtcagcgccggccacggccgtattggaaagcaccgcaagcaccccggcggccggggaaatgccggcggcatgcaccaccacaggatcctcttcgacaagtaccacccggggttcttcgggaaggtagggatgaggtactttcataagctccgcaacaaattctactcccccatcgtcaacatcgacaagctatggtctctgataccccaagacgcgaaggacaaagccctaaaatcga

SEQ ID NO: 177627 - DNA, 270 bp, Glycine max
tgctgattggctacgtaaaaactactcagataaatatgtcattcttgcagttaacaagtgtgaatctccacgcaaaagaattatgcaggcatctgaattttggtcccttggatttgaaccacttccaatatcagctatctcagggactggaactggagagcttcttgaccttgtttgttctggcctacagaaaattgaggaatctaataatcttgttgaagaagattatgttccagcaatttcaattgttggtagacctaatgttggcaa

SEQ ID NO: 177628 - DNA, 269 bp, Glycine max
ctaattcagtttttttctcccatcataaaaaaccgaccctctcctttccctcttcaccaaccaatggctcccccaaaggccgagaagaagcccgcggagaaaaagcccgcagacaaggctccggcggagaagaagcccaaggccgagaagaagatatcgaaggaaggaggaagcgagaagaagaagaagagaacaaagaagagcgtggagacctacaagatttacatcttcaaggtgctgaagcaggttcaccccgacatcggaatctc

SEQ ID NO: 177629 - DNA, 173 bp, Glycine max
ggcgcaacttatgaggttctgagtgacctgagaagcgtgagatatatgatcagtatggtgaagatgcgcttaaggaaggaatgggtggtggcggtggccatgatccatttgatatcttttcatctttctttggcggtgggagtccctttggatcaggtggaagtagtcgaagt

SEQ ID NO: 177630 - DNA, 257 bp, Glycine max
ctgatttccatgtttcggcacaaaactgttgggttcgcaaaggtggtgcttataccggtgaggttagtgctgaaatgcttgttaatttgggaattccttgggttattattggtcactctgaacggaggcagcttttaaatgaatcaaacgagcttgtgggagataaagttgcctatgcacttcaacaaggtctaaaagttattgcatgcattggggagactctcgaacagcgtgaagctggtacaacaacggctgtt

SEQ ID NO: 177631 - DNA, 213 bp, Glycine max
caagagtatcctttcacttcctttaaatacctcgagtgtccccattgacatcatcaaacaagagaagagttacagaatttcctgtttacgatcttattgcaattttgcacatttcaaagcttattagctaaagtaacatcaaaagatgtcattgattccaagtattttcggtggcccaaggagcaacgtgttcgatccattctcactcgatat

SEQ ID NO: 177632 - DNA, 257 bp, Glycine max
gggacttggtcggaaggcaaaccaggtttatataattgattttgggcttgcaaaacgatatagggactcctcaactaatcgccacatcccttacagggagaacaaaaacttaacagggactgcacgctatgctagttgcaatactcatcttgggattgagcaaagtcgacgggatgatttggagtcacttgggtatgtgcttttgtacttccttagaggaagccttccttggcaaaacctaaaggctgcaacaaaga

SEQ ID NO: 177633 - DNA, 190 bp, Glycine max
gagagagagaaatggcttgcaggcaattgtgggcttcaagagctgcctcttacctgaggatctctgtgtttcacagaggcttttctaatgttattaaagatttcaagtatgttgattctcatgagtgggtgaaagttgatggaaattacgcaaccatcggcataactgatcatgcccaagatcatttggg

SEQ ID NO: 177634 - DNA, 264 bp, Glycine max
atcaatcatcatatttatctttgcaactaaaatggcgtcgtcacaaccagagatggagcatccaaagaaggtttttggttgggctgctcgggactcatctgggcttctctccccattcaacttctccagaagagaaacgggggagaaagatttggtattcaaagtgcaatactgtggaatatgccactcagatctacatatgttaaagaacgagtggggcaacacaacctatcctctggttcctgggcacgagattgctggtgt

SEQ ID NO: 177635 - DNA, 262 bp, Glycine max
ctcattaattgcaagactggcacttcgttgcttggtgatgtccctttctgttctcttcactcttggtcttgcgagagaaagccatgccagagacgaagatttttggcatgctgtttggccaaacactcccattccaagttcattgcgagatcttctaaagcctggccctgcaagtgttgaaatcgatgctcaccctatgcaaattgaagaaacacagtacccgaaaaccttcttctataacgaagaccttcatccaggcaaa

SEQ ID NO: 177636 - DNA, 261 bp, Glycine max
gctcgtagggtttctccacctagagggaaatggctcccaaaccgcctagtacgggtctgtttgttggactgaacaagggtcacgtcgtcaccaagaaggaattgcctccacgcccctcagatcgtaaggggaaaacaagcaagagggtgcactttgtgaggaacctcataagagaggtagccggttttgcaccctatgaaaagcgtataactgagttgctgaaggttgggaaggataagagggcactgaaggttgcaaaga

SEQ ID NO: 177637 - DNA, 258 bp, Glycine max
ttttcaacactcatcagatcccagtcatcaattgcgttaacaactcgtaaggcaaccatgaggggcattctttctgtaaggacagccttggttcaacatcgtagtgagaaattgggccttggtttcaggctatttagcactcagggtgcttccactgctagtaccccacagccgccgccaccacctccaccaccagagaaaacccattttggtggccttaaggatgaggacaggatatttactaacttatatgggctg

SEQ ID NO: 177638 - DNA, 259 bp, Glycine max
cagaaacctcaatgggttccttcacactgtggatgttagcaaatcgcttccaccatcctctgtgagttttgtcattgtgaaaatcactgcaatatgccccatggcattgttagaaagaatgagtgaccttcttagatggcaacaaaaagacccttcattcgttttgccatggaagcaagattcccttccaattttcgctgagtctagtcctttgtaccacacacagaagagatcggagcctctaaccccagaagaagag

SEQ ID NO: 177639 - DNA, 257 bp, Glycine max
ccaacatttgaagaattgaacctgccattattgtaagtaagaattgggaaaggaaggaaggagatgaatctccctatcatagatctgtcctcacctgatcctctttccactgccatttccatccgtcaggcgtgcattgagtatggtttcttttaccttgtgaaccatggcgtggagaatgacttggtcaaagcctttgatgagagtaagaggttcttctcacttccaccaggagagaaaatgaagttggcccgcaa

SEQ ID NO: 177640 - DNA, 262 bp, Glycine max
gtcgtgtcgcagcaaaaccaagccacccactaacttgtttggtccaagacatggctctgatcctgcatgctaccaaaacaaacaagaatgccttcaagactctgattgcggcagagtacagtggcgtccaagtggaattggcccctaatttcgagatgggtgtctctaacaaaactcctgaatttctcaagatgaatcctattggaaaggttcctgttttggaaacgcccgatggtccagtctttgagagcaatgcaatcgc

SEQ ID NO: 177641 - DNA, 261 bp, Glycine max
cctcgagccgaatcggctcgagttgcaagaatggcacttcgttgactggtgatgtcccttacctgttctcttcactcttgaccttgcgagagaaagccatgccagagacgaagatttttggcatgctgtttggccaaacactcccattccaagttcattgcgagatcttctaaagcctggccctgcaagtgttgaaatcgatgatcaccctatgcaaattgaagaaacacagtacccgaaaaccttcttctataaagaaga

SEQ ID NO: 177642 - DNA, 262 bp, Glycine max
ggatagtaattaacctcactcaaactcgggatcacagaaaccaacaacagttcttgcactgaggtttcacgatgttgctggaacttgcacttggtttgtctgtgttagctttgtttctgcacttgcgtcccacaccaagtgcaaaatccaaaagcacttcgccacctcccaaaccctccaagcccaaagcctcgtcttcccttcattggccaccttcacctcttaaacgataaacttctccactatgcactcatcgatctct

SEQ ID NO: 177643 - DNA, 257 bp, Glycine max
gagaatggcagcacttggtgggaatcgtgatgtgacaggaagccagaacagcgttgagatcgatgctctagctcgctttgctgttgaagaacacaacaaaaaacagaatgcccttttggagtttgaaaaggtggtaactgcgaaacagcaagtggtttctggtaccttgtacaccatcactttggaggcaaaagatggtgggcaaaagaaggtttatgaagccaaagtttgggagaagtcatggttgaacttcaagg

SEQ ID NO: 177644 - DNA, 260 bp, Glycine max
catttctccatttccattttctctctcacttttcaagaatcgtaagctatgggaaagtcttacccaactgtgagtgctgattaccagaaggccgttgagaaggcgaagaagaagctcagaggcttcatcgctgagaagagatgcgctcctctaatgctccgtttggcatggcactctgctggaacctttgacaagggcacgaagaccggtggacccttcggaaccatcaagcaccctgccgaactggctcacagcgctaa

SEQ ID NO: 177645 - DNA, 251 bp, Glycine max
cacaaaaccacaatctaagtaagtgttgagagacgagtgcgtttgtctgtctgaacttaagtagtaaagatgtttggactcatcggaggaaacaagggtcacaagataaaggggaacttggtgattatgcgaaagactgtgttggatatcaacagcatcaccagtgttaagggtgtcattggaaccggcattaacatcattggcggtgtcgtcgacaccgatactgctttggcgtcccacatctccatcca

SEQ ID NO: 177646 - DNA, 253 bp, Glycine max
ctcaaataacccttgttatctctctttcattctcacttgtactcatctctttttcacaactttttttgtaccttctgatctaatggcagttccagtgattgatttttcaaagctgaatggtgaagaaagaaccaaaactatggcacagattgctaatgggtgtgaagagtggggattttttcagttgatcaaccatggtattccagaggaactccttgagagggtgaagaaggttgcctctgagttctataag

SEQ ID NO: 177647 - DNA, 256 bp, Glycine max
gttgtgagctataagctagtttatcgtgaggcgaatatgaagttgtttgttctctttgttgctgcagtagtcttggtagcatggccatgccatggcgcaggctaccaaaggttccctctccgaatgaaaactggctatggtgagcgttcttcggaggtaaaatgcgcaagtcttaggcttgctgtggaagcacacaacatccgagcctttaaaaccattcctgaagagtgcgttgaaccaacaaaggactacatta

SEQ ID NO: 177648 - DNA, 259 bp, Glycine max
cgcaacaaacaaagatgaaagacgcggatgagcaactatgcgaggcggccattaaaggtgacacgaagaaagtgaggtctcttatatactccggcgctgacgtcacccactttgacggcgatggcctcaatcctctgatgcacgccgcaaagcacggccatgcacccgtcctcaccctcctcctctccgtcggcgctccctggaacgctctttctccctccaacctctccgccggtgactacgccatgcaagaaggcca

SEQ ID NO: 177649 - DNA, 265 bp, Glycine max
cgattgcaaaattctcttccgtttcaggattagcgtttcaccgttacagtgaaacatggcaaaaccaaagcgaatctctctgcatatctgtgcgctgactcctcttgatttccacctcttcgtttcagcttctccgcgcttccgatgacgccgatgatgatgcgatcttctatgattcgttcgacgaggattttgaagaccgttgggttgtgtctcagaaagatgagtacagtggtgtctggaaacatgccaagagtgagggaca

SEQ ID NO: 177650 - DNA, 261 bp, Glycine max
acttacggctaaattctcaaagatttaaactttgtctcagagttaccaaattcacccaaccccagagagaaaatgtctctaatcccaaatttcttcggtggcagaaggagcaacgttttcgatcctttttccctcgacgtctggagacccttcaaggattttcctttcccaaacactctttcttcagcttcctttcctgaattttctcgggaaaattctgcattcgtgagcactcgtgtggattggaaggagaccccagaa

SEQ ID NO: 177651 - DNA, 244 bp, Glycine max
ctgctgtaacagctttctgtcgcaaattgatgatatttgggtgtcgatgcgcttctgtcatttggtttagagtgaaaatggcactggtttggcctctcttaacgaggcgaagattcagcacaagctctaaaaatcttgttgcttctgtgctctttgcgagattgccagtggtcattcccaaaattggtcctgcggtttatggatttcaagaattctcgtttcgatggcgacaacaatatcaacg

SEQ ID NO: 177652 - DNA, 256 bp, Glycine max
ctgatggcaaaccaagcttcactctccttctcttcggggtctccagttcacgcgcctctgaagcgcgtgggcacgcacaacggaagcttccactgcgacgaggcccctggctgcttcatgattcgcctcacgaacaaattcaacagcgccgaaatcgttcgctcccgagaccctcaggtgttggaggatcttgatgctgttcttgatgttgggggagtgtatgaccctgctcgagatcggtatgatcatcatcaaa

SEQ ID NO: 177653 - DNA, 252 bp, Glycine max
gcgtgagtacaatcgaagagtgagggaaattgtggagcagagttggacagcagattaagttcatccttatatgcatgggaagctttgaaggcatgaatttggttgcagtgatggcaactataagaatgattgtgcaaactcatcacatttatattctctgctgatatgaatgatagcatcatcttatctttaatttattatagcttctgcattgcatatgtcagctaatgtaaaatagaattatgcgtgtca

SEQ ID NO: 177654 - DNA, 253 bp, Glycine max
ccagccccatcatggcttcagagaagcaagcggctcttgccgtcactccctctgatgctgatgctcctaccatatttgacaagatcatcaataaggagattccttctactgtggtttatgaggatgacaaggtgcttgccttcagggacataactcctcaagctcctacacatattcttatcattcctaaattcaaagacgggttaagtggtctatccaaggctgaggagaggcactttgagattcttggccg

SEQ ID NO: 177655 - DNA, 254 bp, Glycine max
ccattcctgaagagtgcgttgaagcaacaaaggaatacatccatggcgaacaatatagatcagactccaaaacagttaaccaacaagcttacttttatgccagagacctcgaagtccatcccaaggacacatttgtgttcagtatagatggcaccgtactctctaatattccatactacaaaaaacatggatatggggtggagaaatttaactcgaccttgtatgatgaatgggttaacaagggcaatgcaccg

SEQ ID NO: 177656 - DNA, 255 bp, Glycine max
ctgtctctgtgtttgcggctgaggattccgaacgagcgaccttcctcgtttctcgcaaagtttaagtcatcatgggtaaggaaaagactcacatcaacattgtcgtcattggacatgtcgactctgggaagtcaactaccactggtcatttgatctacaagcttggaggtattgacaagcgtgtgattgagaggttcgagaaggaggctgctgagatgaacaagaggtcattcaagtatgcctgggtgcttgaca

SEQ ID NO: 177657 - DNA, 253 bp, Glycine max
gcccgtgtgtcgccgccatggccaccgtcaccacccaagcctccgccgcaattttccggccatgtacctcgaaatcgaggtttttgaccggctcttccggtaaacttaaccgggtagtgactatgcggccaatggggtgccctccttctgcctctttcaaggttgaagccaagaagggagagtggttacctggcttgcgctccccaacttacctcaatggcactcttcctggtgacaatggatttgaccctct

SEQ ID NO: 177658 - DNA, 253 bp, Glycine max
gtctcaccagagccgccaaggtgttggaacaacttagtggccaaaccccagtgttttccaaagcaaggtacactgttcgttcctttgggattagaagaaatgagaagattgcatgctatgtcactgtcagaggtgacaaggcaatgcaacttttggagagtggtttgaaggtgaaggaatatgaacttctcagaaggaacttcagtgatactggttgctttggctttggtattcaggagcatatcgatttggg

SEQ ID NO: 177659 - DNA, 253 bp, Glycine max
ggcgtacaagaccctcacatctctgaatggcgtcactgcatatgggtttgatttagtccgtggaacccatactcttgatttgatcaagggtggatttcccagtggaaaatacctctttgctggaatggttgatggatggtacatctgggccaatgaccttgctgcttctctcactacattgcagggtcttgagggcattgtgggccaagatacgcttgttgtgtccacctcctcctcccttcttcacactgct

SEQ ID NO: 177660 - DNA, 254 bp, Glycine max
caagctagctattagttcgattttgtagtaagtgaggtgccaatatggtgaagatagctcttggtactttggatgactcttttagcgctgcctctcttaaggcttatttcgcagagttccacgcaactctgattttcgtgttcgctggtgttggatcagccatcgcttacaacgagcttacaaaagatgcagccttggatccaacggggctggtggcagtagctgtggcacatgcatttgcactgtttgtaggt

SEQ ID NO: 177661 - DNA, 249 bp, Glycine max
tgaaaacccaaagtgcttctctcctctgtctttttctctctcttgctatccttttggctagtcgcactgctgcaagtgcaactccaagaagcgcagtgccaagccaccatgtttcaacattcaacagaagcctttttccttccacttttctctttggaattggttcttctgcttaccaggcagaaggagcagcaagtgtagatgggagaggaccaagcatatgggacacctacactagacagcatactg

SEQ ID NO: 177662 - DNA, 249 bp, Glycine max
caatgaacaagggtttctctttctctttctctgtctgcttcttcactttctctcgtttcaatcgaaaaaaatcatgggcagaaaattcttcgtcggtggcaactggaaatgcaatgggaccactgaggaggtgaagaagattgttactactttaaatgaagctaaagtccctggagaagatgttgtagaagttgttgtgagccctccttttgtgttccttccttttgtaaaaagtttgctgcgccctga

SEQ ID NO: 177663 - DNA, 252 bp, Glycine max
gcttagtgtcatagtgcagaaattacctccaccggaacctaagaaacctaagactattgaggttaaggttgcttgaacaacttgtagaacgaagttaaataaacgtttgtttccctctctagtagaagcaggggaagtaatgttttttctgatttgaaggtttttctgttctcaaagcaatggttttatggtattgtgattttgtgatgttgtaatcagatgatgctatatcagttgtttagtatttgctga

SEQ ID NO: 177664 - DNA, 204 bp, Glycine max
tcttgttgctcgcagtcattctggtagcatggcgatgccatggcgcaagattaccaaggtatcctctccgcatgaaaactggctatggtgagcgttcttcgagagtaacatgcgcaagttctagagctgctgtggaagcacacaacatccgagcgcttaaaaccattcctgaagcgtgcgttgctccaacaccggactacatta

SEQ ID NO: 177665 - DNA, 240 bp, Glycine max
gcttaactgctttgacaccaaacactgagcgacaggtatcaactcagatggtcggttcattcggttatagtgctcctgagtttgcattatcaggagtatacactgtaaaaagtgatgtttacagctttggggtggttatgctggaactattgactggtcggaagccacttgacagtttgcgggttcgatcggagcagtcacttgtgaggtgggctacaccccaactccatgatatagatg

SEQ ID NO: 177666 - DNA, 161 bp, Glycine max
ttaacctgaagttatgcagcactgatttcaatagccgggactactatgtcaacattagaaaggcaatgctagcagggtattttatgcaggtggcccatctggagcggacaggacattacttgacagtgaaagacaaccaggtcgtgcacttgcatccatca

SEQ ID NO: 177667 - DNA, 255 bp, Glycine max
gttgcttggtgatgtccctttctgttctcttcactcttgttcttgcgagagaaagccatgccagagacgaagatttttggcatgctgtttggccaaacactcccattccaagttcattgcgagatcttctaaagcctggccctcgcaagtgttgaaatcgatgatcaccctatgcaaattgaagaaacacagtacccgaaaaccttcttctataaagaagaccttcatccaggcaaaacaatgaaagtacaattc

SEQ ID NO: 177668 - DNA, 252 bp, Glycine max
caagaacgctcgcccgcaccgtccagatcgtaatcaagagaagaggagcgagtctcgtctttccttgcagcccaagccatggcgcctctgatcctgcatggtggaaaaaccaacaaaaattcttacaacacactcattgcggcggagtatgccggcgtccaagttgactttgccccaaattttgagatgggtgtctccaataaaactcctgaatttctcaagatcaatcctactggcaaggttcctgtgttg

SEQ ID NO: 177669 - DNA, 250 bp, Glycine max
gccaagtgaaagtgagacaaaataaaaatcaaagagcataatgtcagggatcattcacaagattggggagacccttcatgtgggagggcacaagaaggaggaggagcataagggtgagcaccatgctggagaatacaaaggggagcaccatggtgaacacagtagtgagtacaaaggagagcatcatggtgaacacaaagctggagagtaccatggtgagcacaagccagagcacaaagaggggttccta

SEQ ID NO: 177670 - DNA, 253 bp, Glycine max
gtgaccccaatatacttagccatatctttacttcccaaaacttgctctacaatgagtttccttcgttcttttgcaagaaacaaggatatatcaaaagtaggacgcagaggtatccattgcatgcagaaactatgtgcagaaaaaatatctcctgattcactagagaaggcccaaaatcgtgtgatagatgctgcactcacacttgttcgagaaaatacaaggcttaagacagaactcgtgcatagtttgggag

SEQ ID NO: 177671 - DNA, 250 bp, Glycine max
ccgattgctagaatggaatttcgatgctcagtcatctcttttaccattctcttctctcttgctcttgcaggagagagccatgtccatgcatcgctacctgaggaagattattgggaagctgtttggccaaacactcccattcccactgcactgcgagagcttctaaagcctctccctgcaggtgtcgccctcgatgaactccctaagcaaattgatgatacacagtacccaaaaacattcttctataaag

SEQ ID NO: 177672 - DNA, 247 bp, Glycine max
gttcgtagatagccgatgtgcttgtcttagtgtgtcagtcattcctgttcctcaagtcaagctttgtagtgagcagatataatggctgttgaaaggtccggaattgccaaagatgttacggaattgattggtaaaaccccattagtatatctaaataaacttgcggatggttgtgttgcccgggttgctgctaaactggagttgatggagccatgctctagtgtgaaggacaggattgggtatagta

SEQ ID NO: 177673 - DNA, 247 bp, Glycine max
caggagcgttggttggcggtgcgaaacaaagttagttgagagagagaggagctgaggagaatcaatcgagagaaatatgtctggtatcgctcgtggacgccttgctgaggaacgaaagtcatggcgcaaaaaccatccacacggtttcgttgccaagcccgagactctacctgatggcaccgtaaatttgatggtctggcattgcactattcctggcaagaccgggactgattgggagggtggatat

SEQ ID NO: 177674 - DNA, 250 bp, Glycine max
cagcattagggtttttcatctgcttcaatggggaagggaacagggagttttggtaagagaaggaacaagactcacactctctgtgtgaggtgtggccgccgcagcttccatctccagaagagtcgttgcgccgcttgtgctttccccgccgcacgcactaggaaatataactggagcgtcaaggcaatccgcagaaagaccaccggaactggcaggcatgaggtacttgcgtaacgtgcctcgccgattc

SEQ ID NO: 177675 - DNA, 251 bp, Glycine max
caaaaagttacctgtttgcgatctcattacaatctccccagtttctaatctcagctaagaaaaaccaaaagatgtctctgattccaggtttcttcggtgcccgaaggagcaacgtcttcgatccattctcactcgacatttgggatcccttcaaggattttcatgttcccacttcttctgtttctgctgaaaattctgcattcgtgagcactcgtgtggattggaaggaaaccccagaggcacacgtgttc

SEQ ID NO: 177676 - DNA, 251 bp, Glycine max
ggaaggcgcagtgccccattgttgagagactcaccaactctctcatgatgcacggaaggaacaatggaaagaagctcatggctgtcaggattatcaagcatgcaatggaaattattcacttgctcactgacctgaacccaattcaggtcattgttgatgccgtcatcaatagtggtccccgtgaagatgcaactagaattggttctgctggagtggtgaggagacaggccgttgatatctcacccttagac

SEQ ID NO: 177677 - DNA, 249 bp, Glycine max
  unsure (1)..(249): unsure at all n locations
gcaacttccaacaccatagtgaaatggcttccaaggctgcacttctcttgtgtttcaatgttctcttcttcaccgtggttagctccacatatgtgccatgcaacccacnccccaaaactccaaaacacccacctgtcccaaagccaccttccccaaagcaagcaagttgccccaaagacactattaagtttggtgtgtgtgctgatgtgttaggtttgatcaacgtgcaacttgggaagccaccaaaga

SEQ ID NO: 177678 - DNA, 250 bp, Glycine max
tgcctgagttttgcgtgacaggtggtactgggttcatcgcatcttacctggtcaaggccttactagagaagggtcacacagtgaggaccaccgtgagaaacccaggggatgtggagaaggttggttttctgactgaactaagtggagccaaagagagactgaagattttgaaagcagatctattagtggaaggaagctttgatgaggcagtgagaggagttgatggtgtctttcatatggcgtcccctgt

SEQ ID NO: 177679 - DNA, 251 bp, Glycine max
gaacgttatgatgtcatccagacaagaataaaggagatgggtttgcctgttgagccatatgagtggtaccttgatctgaggcggtatggaacagtgaaacatgccggatttggccttggctttgaaaggatgattctctttgccactggcctggaaaatattagagatgtgattcccttcccacgatatcctggcagagcagatctatgattacaagtggtttttacgaatctattgcaccaagtagttaa

SEQ ID NO: 177680 - DNA, 245 bp, Glycine max
tgctgaacaggatcagaggacccgaggggatgaaagtgatttgcatgttataatctttgatgaaattgatgctatttgcaagtcaagaggttcaactcgagatggtactggagttcatgatagtattgtaaatcagcttcttactaagatagatggtgtggagtcactaaataatgttttacttattggaatgactaacagaaaggacatgcttgatgaagctctcttaagaccagggaggttgg

SEQ ID NO: 177681 - DNA, 249 bp, Glycine max
tgaatgggttaacaagggcaatgcaccggcactgcccgagactcttaagaattacaacaagctggtgtctcttggcttcaagattatattcttgtcaggaagaacactggacaaacaggccgtaacagaagcaaactgataaggcagggatacaacattgttgggatcattggagaccaatggagcgatctcctcggaggccacagaggcgaaagcaggacctttaagcttcctaatcccctgtactac

SEQ ID NO: 177682 - DNA, 248 bp, Glycine max
ctcgaactgttgtttggtctcttctctcttatccatggcatcaacgtttctcaccctaccaactcccttcctacacaaaaccaatgccatcagtttctctaacaagagaccctcatttttgcagaggagctctctgaagattcatgcaattaccaaaaaatgggaacccacaaaggttgtgcctcaggctgatagagttcttattcgtttggaggagctttcagataaaacagttggtggagttttgc

SEQ ID NO: 177683 - DNA, 250 bp, Glycine max
cggctcgaggtcgaagagaggacgcggtggttcggcggggaacaagttccggatgtcgctgggtctgccggtggcggcgacggtgaactgcgccgacaatacgggggcgaagaacctctacatcatatcggtgaaagggatcaaagggcgtttgaaccgtctcccctcggcttgcgttggcgacatggtgatggccaccgtgaagaaggggaaacccgatctgaggaagaaggttttgccagctgtcatt

SEQ ID NO: 177684 - DNA, 251 bp, Glycine max
ctgattggcgcagagcagagagagagaaaacgcaaaggcattatttggtcttggatccctttcgatccgacgacttcgttcgttccttctccttccaagttctaaccatttcccactgtcttcgattttagggcattaaatctgccatggcagcagcacccgctagagctcgtgccgattacgattacctcatcaagcttcttcttatcggcgacacggtgtggggaagagttgtctacttttgaggtttt

SEQ ID NO: 177685 - DNA, 231 bp, Glycine max
  unsure (1)..(231): unsure at all n locations
gatgagataactagaaacagtgtgatgaaaatgaaggtccttgttttcttcgttgctacaattttgcgtagcatggcaatgccatgcgtacgatatgttccctctccgaatgaacactggctatggtgcccgtactccggaggtgaaatcgcaagttggaggcttgctgtggaacaccaacatctttggctttggacatcctgagggntgcttgagccacaaggaatacat

SEQ ID NO: 177686 - DNA, 274 bp, Glycine max
atggagatgtatcagatctggagcaggagaatagcgttgggagcgttcgcgtttgttctgcttttcctatcggcctcagcagacgacgtcgttgtgctctctgaagataacttcgagaaggaagttggtcaggacagaggagctctcgttgagttctatgctccttggtgtgcactgcaaaaagcttgcccagaatatgaaagcttggtagcagcttcaagaaagccaaatctgttttaatcggcaaggttgactgtgatgagcacaagagttg

SEQ ID NO: 177687 - DNA, 279 bp, Glycine max
gtccccaaagtaagtacatccacacatcacaacacaaaacactctattactgttttctgtcctcactgtcccttcgttctcacaaagtcacaatggcaccccctctctctcttctcgcaccggagaccctcctcgcacggcggcctctactggtctcgtgtgcgttcttgggccccgccgacagaagcggcaaacgcgcaccgatctttccggcggctccatctcgccgagcaaagtccaagacaactacaaacagtactggtccttcttccgccgccc

SEQ ID NO: 177688 - DNA, 260 bp, Glycine max
agagatggcagcattggtgggaatcgtgatgtgacaggaaccagaacagcgttgagatcgatgctctaagctcgctttgctgttgaagaacacaacaaaaaacagaatgcccttttggagtttgaaaaggtggtaactgcgaaacagcaagtggtttctggtacttgtacaccatcactttgaggcaaagatggtgggcaaaagaggtttatgaagccaaagtttgggagaagtcatggttgaacttcaaggaggtgcag

SEQ ID NO: 177689 - DNA, 252 bp, Glycine max
cctaatagagggtaatccttcacttgtttgttttgtggtgtattattacattttgcaccatgccttctctcttcgctagaacagaggttctcattggctactctcctgcttcttctggaactattgacaggaaccttcgcatggcagatgctcaaattgtgtgtgttatggcatgctggcaacaactaccgtcagcaaacgtgttataggtctttatagatcaaataacataaagagaatgagctctatgat

SEQ ID NO: 177690 - DNA, 263 bp, Glycine max
agttgtcttgtcgtttgcttctttctttgattaatgatgactactttaaggttgcatgtgtggttgcgatgatgtgcatggttgtcgccatgagtgttacacccatggcacaggccgcaatcacgtgcgggcaggtcgccggcgacgtgtctccgtgcctcagttatcttcgaagcggcggaaaccgtcggacgcctgctgcaacggatgaagtcgctcagcggcgcggcgaagaccaccgccgaccgccagcagcctgcaat

SEQ ID NO: 177691 - DNA, 262 bp, Glycine max
atgggaagcacttgaggtttttgagtctttgcctcttggcattgattgcatcaactcatgctcaacttcagcttggttttatgctaacagttgcccaaaagcagagcaaattgttttgaaatttgttcatgaccatatccacaatgctccatcactagcagctgattaataagaatgcacttcatgactgtttgtaaggggatgtgatgcatcagtccttctgaactcaacaaccaatcaggctgagaagatgctcctccaa

SEQ ID NO: 177692 - DNA, 267 bp, Glycine max
caaggcaacgtgttcaaggctgatattccagggctgaagaaagaggaagtcaaggttcagattgaagatgatagcggttcttcagattagcggagagaggaacgttgagaaggaagacaagaacgacacgtggcatcgcgtggagcgtagcagtggtaagttcgtgagaaggtcagattgccggagaatcaaatgattcagtgaaggctcaatggaattggggtcctccggtcatgttcctaaggaaaggttaaaagccgatgtcag

SEQ ID NO: 177693 - DNA, 273 bp, Glycine max
cacgaaactcaagaagatggagaaagcgatcaacagacagaagatttgcttcatcatctcaacccttcatcatccacccacccaacgaatcatcctccctccatgcttcagcatgtgtggcgggggatagcgctgcttatcaaggacatcgacattcggggacgatgttgtgatcgtggctgcttatcggactgctcattgcaaagctaaacgaggtggtttcaaagacactcttcctgatgatctactggctcctgttttgaggctgtaatg

SEQ ID NO: 177694 - DNA, 259 bp, Glycine max
agtggagctaacttaggtgggctcactgttgagcaggctatccaaacaagaagttgttcatcttagatcaccatgactatctcataccttatttgaggaaaataatgcaaataccacaaagacttatgctacaagaacatatttttcttgaaagatgatggacttgacaccattggccattgagttaagtagccacatcctcagggtgagaatatggtcctgttagcgagtctacgtgcctgccagcgaggagtggaac

SEQ ID NO: 177695 - DNA, 255 bp, Glycine max
ctcataacacaagcacaaagcaaagctcatccttgagttaaaaatggcagcagcttcttccatggctctctcatcccatccttggctggcaaggccgtgaagctgggcccatcagcccagaagtgggaagggtgagcatgaggaagaccgtcaccaagcagtctcctcaggaagcccatgtaggccagaccgagtcaagtattgggcccattctctggcgagccccgtcctacctaaccggtgattcccaggcga

SEQ ID NO: 177696 - DNA, 257 bp, Glycine max
gtgagctataactagtttatcgtgaggagaatatgaagttgtttgtcttctttgttgctgcagtagttttggtagcatggccatgccatggcgcagctaccaaaggttccctctccgaatgaaaactggctatggtgagcgttcttcggaggtaaaatgcgcaagttttaggcttgctgtggaagcacacaacatccgagcctttaaaccattcctgaagagtgcgttgaaccaacaaaggactacattaatggcga

SEQ ID NO: 177697 - DNA, 162 bp, Glycine max
ctcacaggctagtcttcctattatcacaaacaatgtctgacagtcaagaatctgacaagaacattgcagaatatggaagatcaagaaagttgatcaaggctctggaagctgctcgaggtaatggtaccagcatgatttctctgataatgcctccacgcgatc

SEQ ID NO: 177698 - DNA, 257 bp, Glycine max
atttttgttcattatcacaaacacctcgtccctcacaatgcagctagcaatggcggccaacgctgtcgtttcaccgtcgccgttccgacctcagcctttctccggtcatccttctccggcgtctccgtcaagctcactccccaatccataacgctttcagtccaagcccctcaccgtcttcgccgccacaagaaggccgtcgcgtcctcaagggcgactccgccgtcgaaggcgtcgccactctcatccaagaagac

SEQ ID NO: 177699 - DNA, 172 bp, Glycine max
ttgccaggagcagcactcaacagattggaagtagggtcacttggaacaggaattatgcggccaaagacattaattggtgtggaggctcggctctgatgcttaagggtgtcgaagagctcgctgatgccgttaaagtaacaagggccctaaggggcgtaatgtggttattgac

SEQ ID NO: 177700 - DNA, 273 bp, Glycine max
agcgcttctcctctttgtgttctggctatgcttcttggcaagagtagatcggacgaggattgcgtgtagcacggtgtacgttcggacgggttcgatcatcaagggaggcaccgattcagtaattggtctgaagctatacgacaatccggctacggcatatacatcaccaactcgaggcatggggcgggttatggtccgggtcacaactactacgacggggcaacctcgacatattcagtggtagaggcccttgcttggaagccccgtttgcga

SEQ ID NO: 177701 - DNA, 269 bp, Glycine max
cttaatttctctctgtctcgtttacacatctctccaacctttcactttcgtttctcagttttattcgaatccctgctctcaatctcctttccaaatccgccagcgttgaggttgcacagcaaacaccaacaacagttccagaaaatgaaacaaccgaggtaagcaagatccagaacaaccccagtcactgagctctgcacagaacaaccagcagctgggttcctgcaacagaacaaccaccgctgaggctctgccccagaatcaaccac

SEQ ID NO: 177702 - DNA, 265 bp, Glycine max
cttgcagtcgcagaggaaaaccctagctagtagtctcagttctttgagagagaaaaaatggcagagggtctcgttctccgcggaaccatgcgcgcccacaccgagtcgtgacggcgattgccactcccatcgacaatccgacatgatcgtgacggcgtcgcgcgacaaatccatcattctctggcctcaccaagaggacaagacctacgggtcccccgccgccgcctcaccggacattctcacttcgtccaggagtcgtcctctc

SEQ ID NO: 177703 - DNA, 264 bp, Glycine max
aaaaatctaaactttcgttctagaaaaccagaccaaacttgtctttctacggtggctccaatttggccttaacgaaacgaagaatctcgcatcgatcgcgattcgaacatcggaatctggcagcaagcgatgtcaacctcgagccagcaccagttccgatatacacaaccccttccaaggtctgcacttcgcaactcccctgggaatgctccgaggaggagctcagagagctctgcagacccttcggtaagatcgtcaacacca

SEQ ID NO: 177704 - DNA, 258 bp, Glycine max
  unsure (1)..(258): unsure at all n locations
nagttttctatatcactctcaactttactcctcttcaatcagttgcatattctttgctattccaatggccactgttgaggttgtgtcagccaaggttgcctcccagaggacacaaaagaggcatcattgaaggtgacgaggagaagaacacagaagaagttgttgagactccaacaccagaactgtggtcctgagcaaaccaaggaggaaagtactgaggccccacgacctgcagcttcagaagacaagcctcggttg

SEQ ID NO: 177705 - DNA, 258 bp, Glycine max
gtttggatgaatgcgcgaggggaagagagactctctctcactctgtccttctacacgttctagatgacgagaaaagtttaattcgccactgcatcgaatggaccctcgggttgcgaacaagttccgtcttcggccgcaagattggtcagcggatccttcggcgagatctatctcggtacgaatactcagcaaatgagaggttgcagttaactcgaaaatgtcacaactaagcatcctcaattgttgtacgaacacgtt

SEQ ID NO: 177706 - DNA, 256 bp, Glycine max
cgttgatccaagtttcttcggcaccggacgaagaccaacgtcttcgaccccttctccctcgacgtgtgggacccattccatggcttcccggcaccaccgccctctccgctccggctccgagacggcggcttacgccaacacgcgcatcgactggaagagacggcggaggcgcacgtgttcaaggcagacctgccggggctgagaaggaagaggtgaaggtggagatcgaggaggagggaagggtgctgcagataac

SEQ ID NO: 177707 - DNA, 250 bp, Glycine max
tcttcttcttcttcttcttcgttgaatcgcgattgttctctgcgagccgaagtaagaagagagatcgaaaatgcgcgttaggctttcgacgagttcggaaggccgttcataatcctgaaggagcagagcagaagagcagactccgaggattgagctcagaaagccaacatctcagccggcaagccgtggctcgcatctccgaacctccctcggccccaaaggcatggacaagatgctccgagccccgacg

SEQ ID NO: 177708 - DNA, 268 bp, Glycine max
tgagaataccagttgctgccagtacgccggcactgaaacaacatggcggacaaggcagtcaccatccgaaccaggaagtttatgacaacaggcttctctccagaaagcagttcgtcgttgatgtcttcatccagggagggctaatgtttccaaggctgaactgaaggagactgggaagaatgtatgacggaagacaccacactgtatttgtctcaagttccgaactcattttggtggtggcaagtccactgggtttggtttgatctat

SEQ ID NO: 177709 - DNA, 280 bp, Glycine max
acgtcgaggtgagctataagctagtttatcgtgaggagaatatgaagttgtttgttttctttgttgctgcagtagttttccgtagcatggccatgccatcggcgcaggctaccaaagggttccctgctccgaatgaaaactcggctatggtgagcgttgcttcggaggtaaaatgcgcaattttaggcttgctgtggagcaccaacatccgagcgcttaaaaccatcctgaagagtgcgttgaaccaacaaaggactacattaatggcgacaatttagat

SEQ ID NO: 177710 - DNA, 218 bp, Glycine max
tcgagcgctcttcaaaagggagaagaaaaggaaagaaactctcaaaaaactattatagcaatggcagaacaaaaccaaaaccaaacaactgaagctggaaggcaccaagaggttggtcacaagagccttctcagagtgatgctctttaccagtatattctggagacagtgtctacccaagacctgatccatgaagacctggagagttgccagcaaaca

SEQ ID NO: 177711 - DNA, 261 bp, Glycine max
tcctgaatacactcaggtgtctgtcttggcagatgacattctaaagaatgtggagtatgacgcattcaaggattgttttcaacaaatttcattctgttgtacaatttttcgccaacagtgtcaactgtactgtctcctgaggttattgagagagaggctgaatcaggaggaaagctcggggattggattctatgagattgaaggtgggaaacaaaagctgaaattcttcagaatctggctgagttccattttcttgtgtga

SEQ ID NO: 177712 - DNA, 251 bp, Glycine max
cgtactaagagttgctgcttcttcagccactccgcacctcgcagcctctgtgccctcaacaaccatggctgaatcgaaactaccgttccagatccacccaaatcgacgtcaaactcttcaatcgctggacttcgaggatgttgaggttaatgatatgctctggctgattacatgggtgtcccatcaaagcatgctaatatgttcctcacactgctggtaggtactcagtgaagaggttcaggaaagcgcat

SEQ ID NO: 177713 - DNA, 250 bp, Glycine max
gaaggatatagttttgaagagctatgcatcaagaagaagccattgagggagaagagaagttttgtgcaaaatccttgggaacagtaattggttttgccatttcaaagctgggaaagaacattcaagtatttcaagttcctttgtcaataagcaagacaatacactgtggaagagtgcagaatcttggagacaagcagtgatgtgtcataggctaaatttcagaactgcagtattttactgccatgaagtc

SEQ ID NO: 177714 - DNA, 252 bp, Glycine max
  unsure (1)..(252): unsure at all n locations
ctnctccggcgacgatctcagattccggccactcctctcgccggagagcccttactcttccctcctccgtcgagccctctccgattcgaatcgttcccagcctcgcaccaccatgaatcccgaatacgattatttgttcaagcttttgctgattggagattctggtgtaggcaagtcatgtcttctctgaggtttgctgatgattcataccttgacagctatatcagtaccattggagtggactttaaaatc

SEQ ID NO: 177715 - DNA, 254 bp, Glycine max
gcctgctgcttcttcactttctctcgtttcaatcgaaaaaaatcatgggcagaaaattcttcgtcggtggcaactggaaatgcaatgggaccactgaggaggtgaagaagattgttactactttaaatgaagctaaagtccctggagaagatgttgtaaagttgttgtgagcctcttttgtgttccttccttttgtaaaagtttgctgcgccctgatttccacgtctcggcccaaaattgttgggttcgcaaag

SEQ ID NO: 177716 - DNA, 252 bp, Glycine max
cactagttatcgtgaggagaatatgaagttgtttgtcttctttgttgctgcagtagttttggtagcatggccatgccatggcgcaggctaccaaagttccctctccgaatgaaaatggctatggtgagcgtcttcggaggtaaaatgcgcaagtttaggttgctgtggaagcaccacatccgagtcttaaaaccattcctgagagtgcgttgaaccaacaaaggctacattaatggcgaacaattagatcag

SEQ ID NO: 177717 - DNA, 256 bp, Glycine max
tgatctcaggtggaggattcagttcctggagaagagtatcaggaagctggactttaaccctggtgggataagcaccattgttcaggttaatgatctcaagaattctcctggccctgccaagtgggagcttagacaggctaccaaacaggccctccagtgttcaggataactatcctgagttgtagcaaacaggtgtttatcatgtgccttggtggtacttggcagtgaacaggatgataagccctttcttactcag

SEQ ID NO: 177718 - DNA, 259 bp, Glycine max
tgttgatcgagataactagaaacagtgtgatgaaatgaaggtccttgttttcttcgttgctacaattctggtagcatggcaatgccatgcgtacgatatgttccctctccgaatgaacactggctatggtgcccgtactccggaggtgaaatgcgcaagtggaggcttgctgtggaagcacacaacatctttggctttgagacattcctgaagagtgcgttgaagcaacaaaggaatacatccatggcgaacaatatag

SEQ ID NO: 177719 - DNA, 258 bp, Glycine max
  unsure (1)..(258): unsure at all n locations
aattgttgtaactttttgattcctaaattctctaaattcgaaattctaatttcgttagggcgaacagagattgtttgtgtgtgcagtgagtatggctggaaaaggcgagggtcctgctatcggaatcgatttggaacgacgtactcttgcgtcggcgtgtggcaacacngatcgtgttgaatcatagccaacgatcagggtaacagaactaccccatcctacgtggctttcaccgacacagaacggttgatcggcgat

SEQ ID NO: 177720 - DNA, 251 bp, Glycine max
cacttcccttgttcgtttcactctcacaatggactccctctctctcttctgcaccggagcccttctcgccggcggctctactggttcgtctgtgttctgggccccgccgagcagaagggcaaacgcgcaccgatctatccggcggctccatctccgcgagaaagtccaagacaatacaagcagtactggtccttcttcgccgccccaaggagatcgagaccgccgacaaagttcccgacttcgtcgacacc

SEQ ID NO: 177721 - DNA, 251 bp, Glycine max
tcgagccgcggctcgagcggctcgagcgcaggtgtcctaagatgagctcaacgagaacagaaatctcgtgtggaacaaaagggtaaaagctcgtttgattctgatttccagtacgaatacgaaccgtgaaagcgtggcctatcgatcctttagtcctcggaatttgaagctagagtgtcagaaaagttaccacagggataactggcttgtggcagccaagcgttcatagcgacgttgctttttgatccttc

SEQ ID NO: 177722 - DNA, 253 bp, Glycine max
ctttcttgcggctagggttttagcgcagttcttctagatttaaggaagatgggtaaggaaaaggttcacatcagtattgtggtcattggccatgtcgactctgggaaatccactaccactggtcactgatttacaagcttggaggcattgacaagcgtgttattgagaggttgagaaggaagctgctgagatgaacagaggtctttcaagtatgcctgggtgctggacaaacttaaggctgagcgtgaaagag

SEQ ID NO: 177723 - DNA, 261 bp, Glycine max
gtgaatgactctggttatcatcagctcgtgagccatggttaaatactcatgcagtgatggaaccatttgccatagcaaccaataggcatctcagtgtgtccaccctatttataaattctttatcctcactacgcgacaccataaatatcaatggacttgtaggcagtccctgattaatgcagatggcatatagagaaatcattttgcccggaaagtactccattgagatgtcttcatccgtctacaagaattgggttttca

SEQ ID NO: 177724 - DNA, 259 bp, Glycine max
tttcaaacaccaatgatgatgctattcgcaatcatttagccccaggataatcaaagagtttcatattaccagtttgtttatctactttgctactatttactgtcttgggataatcacttatggcattgctattccatccgggctcttcattcctgtcatacttgctggtgctgcctatcgcgtctcttcggccggctcttcgaacgattaccgaactcgacagaggactctttgccttacttggagctgcttccttcct

SEQ ID NO: 177725 - DNA, 257 bp, Glycine max
agggaatcttgcttcttatattcagaatcatgggagagttcagcaacaaatagccagaaaattcatgcagcagcttgggtctggtctaaaagtattacactcgcatgacattattcacagagacttgaaacagagaacattttgctatcaagccacgggttgaagcagtgctaaagtagctgatttggtctctcaaggactgtatgtcctggtgaatatgctgagacagtttgcggttctccattatatatggctca

SEQ ID NO: 177726 - DNA, 257 bp, Glycine max
cagaatggcacttcgttgcttggtgatgtcctttctgttctcttcactgcttggtcttcgcggagagaaagccatgccagagcacgaagatttttggcatgctgtttggccaaacactcccattccaagttcattgcgagatcttctaaagcctggcctgcaagtgttgaaagtcgtgtcacctatgcaaattgaagaaaccagtacccgaaaaccttcttctataaagaagaccttcatccaggcaaaacaatgaa

SEQ ID NO: 177727 - DNA, 248 bp, Glycine max
cgatcctctgtcctcgcgaagctttcatcgttgcacatattctcaccatctcagtcatcgggcctgctatcttgttttagcgtctaccgtcctgagaaaatgttccaaaggaagctctggcatgtcaaattcctgtatacgaacaattttcaagaacttgatttcgtctggtggcaatgaatcgtattatgggtatttaacaggagatcatacacttcactttatatgggaactcggaatgtgggtgg

SEQ ID NO: 177728 - DNA, 245 bp, Glycine max
tcatgggcaaggtcaagatcggaatcaacggatttggaagaattggccgtttggtggccagggtggctctgcagagagacgatgttgaactcgttgccgttaacgatcctttcattaccaccgattacatgacatacatgtttaaatacgacatgttcacgggcactggagcatcacgatgtcaccgttaaggagagaagacccttctcttcggtgacaagccagtcactgtttttggacacagg

SEQ ID NO: 177729 - DNA, 240 bp, Glycine max
cagctcagtgttgtgagctataagctagtttatcgtgaggagaatatgaagttgtttgttctctttgttgctgcagtattttggtagcatggcatgcatggcgcaggctaccaaggttccctctccgaatgaaaactggctatggtgagcgtctcgaggtaaaatgcgcattttaggctctgtggaagcacacacatccgagcctttaaaaccattctgaagagtgcgttgaacaacaaa

SEQ ID NO: 177730 - DNA, 248 bp, Glycine max
tcacttcccttctccaacatgccaaacgaagcgttctgagtcttttcttcttcgttaccctcttcacatgcttctctctgctaattcccacgatgaccatattttcctaccgagtcaactccatgacgatgactcagtgagttgcactgctaccgacccaaaccttaactacaagccggtgatcggaatcctgaccaccccggcgacggtgcctctggccggctcagcaacgccaccggggtttctta

SEQ ID NO: 177731 - DNA, 248 bp, Glycine max
  unsure (1)..(248): unsure at all n locations
agggtggttcagccttaccttaccctcgcagagaagaaccggaagaggaaaaactagaanaagatcccaacagtgagaagccgagcgattttgtttaccttccaagagatgaagcatttgcgtcacttgaagtcatgcagattttctcgcttatggaatcaatctgtatcccaagatgtcttgcctgtcttgactgatgcattcgatggaaatattttgagccttgagtttgataattttgctgaagt

SEQ ID NO: 177732 - DNA, 239 bp, Glycine max
aagaaaccctagcaagtggagcaatggcagacgttgaagtcgatgtggcggcagagcagcagcagggtgccgaagaagagaacgttcaagaagttcagttttcgaggcgtggatctcgatgcacttctcgacatgtccaccgatgaactcgtcagatgttcagtgcccggtcgtagaaggtccagagaggcctcacagaaagcccatggccttgatcaagaagctccgtaaagcgaaag

SEQ ID NO: 177733 - DNA, 257 bp, Glycine max
cgagtttgttgtgagctataagctagtttatcgtgaggagaatatgaagttgtttgttttctttgttgctccagtagttttggtagcatggccatgccatggcgcaggctaccaaaggttccctctccgaatgaaaactggctatggtgagcgttcttcggaggtaaaatgcgcaagttttaggcttgctgtggaagcacacaacatccgagcctttaaaaccattcctgaagagtgcgtttgaaccaacaaaggac

SEQ ID NO: 177734 - DNA, 252 bp, Glycine max
cgaaattagggttgatcgaggaagaagaagaagatgtcgtacctgttgcctcacttgcactctgggtgggcggttgatcaagcaatcctggcagaagaggagcgtctggtcgtgatccgtttcgggcacgactgggacgaaacctgcatgcagatggacgaggtgttggcgtcggtggcggagacgataaagaactttgcggtgatatacctggttgacataacggaggtgccggatttcaacaccatgtac

SEQ ID NO: 177735 - DNA, 258 bp, Glycine max
cgtttcgttcccactatcactttcttttcttcaccgttcgctcttcctctcccagacaaacacatggtaatgctattgatctctctctgtttttcgattttctctccacattcatttcattcttttgttttcgtcgcaggctttgcccaatcagcaaaccgtcgattaccccagcttcaagctcgtcatcgtcggtgacggtggcacaggaaagacaaccttcgtgaaaaggcatctcactggtgaattcgagaagaa

SEQ ID NO: 177736 - DNA, 243 bp, Glycine max
atagcatagagtgagaagtgagaagagaaaaatggcaatctccatacccagtagacaacttttcatagatggagagtggaaagtccctcttctcaacaatcggtttccgatcatcaaccccgctactgaagacatcatagggcatattccagccgctactaaggaagatgttgaccttgcggtggatgctgctaaaagagccttttcccataacaagggcaaagattggtcttcagctcctgg

SEQ ID NO: 177737 - DNA, 241 bp, Glycine max
gttcatcctttgcttcccaaagaaagagaaaataaaaagcaatgggtagccttgaagcggaaagaacaacagtaggattggcagcaagagacccttcagggattctctccccatacacctacaatctaagaaacacaggccctgatgatgtttacataaaagttcactactgtggaatttgccattctgatctccaccagattaaaaatgatcttggcatgtccaactatcccatggtccc

SEQ ID NO: 177738 - DNA, 240 bp, Glycine max
ctgctgcctcactctctcactctctcaggagtatataatctgagcgatgtcagatctcgaggctcccttgcgccctaagaggaagaaggtttgggtggactattttgttcagtttcgatggatccttgttatttttgtcgtccttcccatctccttcaccatttatttccttacataccttggggatgtaagatccgagtggaagtcctataagacgcgtcagaaggaacatgatgagaa

SEQ ID NO: 177739 - DNA, 242 bp, Glycine max
gtttctttttcagccagacataactgctcctggtgtgaacgtaattgcagcttttacacaaggagcaggtccgtctaatattgcatcagatagacgtcggtctcctttcaatgtgcaacagggaacttctatgtcttgccctcatgtcgctcggcattgcaggtcttctcaaagcatatcatcctacttggagtccagcagctatcaaatcagctattatgaccacagctacaacactagac

SEQ ID NO: 177740 - DNA, 241 bp, Glycine max
cggctcgagcgtcaatggcggaatgcactcgcctgggttggctgttgtgtcacccgtatctccagttactctgcatgctgcagcagagaaaggagtgagtggatttctagtggattttctgatgggtggagtatccgctgctgtatcgaagacagctgctgctccaattgaacgagtcaaattgcttatccaaaatcaggatgaaatgataaaaagtggtcggctatctgagccatacagg

SEQ ID NO: 177741 - DNA, 244 bp, Glycine max
attcttcagcgactgcgtttttggatcggaacctcttctgcggcgtagaactgggacactccaacgtttggaactctcacccaaaaaactacggtcctggttctcgcacttgccgtgtgtgtgggaatccacatggactgatcaggaagtatggccttatgtgctgcaggcagtgcttccgtagcaatgccaaggaaattggcttcatcaagtatcgctaaaagagcagttgtcaactacggac

SEQ ID NO: 177742 - DNA, 248 bp, Glycine max
ctttgtcgcaaagagaagagatctgcctcctttttccttcccaaatcaaatctatctcttcttcaagttgttcagccggctgtttgccaagaaagagatgcgtatactaatggtgggtctcgatgctgcgggtaagaccaccattctgtacacgctcaagcttggagagattgtcaccaccattcccaccattgggtttaatgtggaaactgtggaatacaagaacatcagcttcactgtctgggatg

SEQ ID NO: 177743 - DNA, 248 bp, Glycine max
cccaacacggcttctagttcagaatctcaatctccgtctaaaccgctccaagaccgagtcgcaatcgtcaccggctcgtcccgcggaatcggccgagaaatcgcgcttcacctcgcctcactcggcgcgcgactcgtcgtcaactacacctccaactcggcccaagccgactcagtcgcggcgcagatcaacgccggttccgccaccacgccaccgcgcgccgtcgtggtccaagccgacgtgtccga

SEQ ID NO: 177744 - DNA, 210 bp, Glycine max
ccgagcgcacttcctctcaccccgacacaaaacatggctatgcacaatcatcaaaccgacgagtaccccagcttcaagcttgtcatcgtcggagaagtgcgacatcgaaagagaccttcgtatagaagcatctcactagtgaattcgagaagaaatatgcaccgaccattggtatgaaagttcatccgttggatttgtgcacgagctgtg

SEQ ID NO: 177745 - DNA, 240 bp, Glycine max
caacagcacaaagcgggttactgtctgttcaagctaccatctctctctctctttcttagtgcctccttgccagaagttaaaatggcccaagaaactttcctattcacatctgaatcagtgaacgaggggcaccctgacaagctctgtgaccagatctccgatgctgtgctcgatgcatgcttggagcaggaccctgacagcaaggttgcctgtgaaacctgcaccaagaccaacatggtg

SEQ ID NO: 177746 - DNA, 240 bp, Glycine max
ccgagggattgcgctgcgtctcttcctcttctctttcgattcatccctcattcataatcttccaatccaacaacctcagcctcacactcacacatacacacatctgaacgcgtatcgtccctcccatggcttcaaagcgcatcctcaaggagctcaaggacttgcagaaagacccaccaacttcttgcagcgctggtccagtagctgaggacatgttccattggcaagcaacgattatgg

SEQ ID NO: 177747 - DNA, 238 bp, Glycine max
atccgaagcatgatgcattgtgcgagcattgtctcggctccgtcctacgcgttcccttttctctctggctccgcttccactactccaactgcgatctcgctcactaagcgcagttggaagccacctccgagcatggcaaaaggcccagtcagagccaccgtttctatagagaaagacaccccggaggccaatggtcccgaaacgtttctcagaggagtggacgaggcccattcttcca

SEQ ID NO: 177748 - DNA, 242 bp, Glycine max
cttactcaaatcctctctcatctcttccttttcgctggcaattaactcacgagggctgcacatcgacaatgggtggggagcggaacaaggtcttctctttggccgaggtctctcagcacaacaatgccaaagactgttggcttgtcattcatggcaaggtttataatgtgacaaagttcttggaggaccaccctggaggggatgaggccctgttgtcttccacagggaaagttgcaaccaat

SEQ ID NO: 177749 - DNA, 249 bp, Glycine max
gttctctccgcttcttatctccagattgctggggcgaaagacaaccgttgactagtctcaagcttaactctccgatccttcaggagtctattgctaaagagatcaatgaaaatcctgaggcaggatgggaggctgctataaatcctcatttctccaattatacagttgaacaatttaagcgccttcttggagtcaaaccaacgcctaagaaggaactgagaagtacacctgctatatctcacccaaagt

SEQ ID NO: 177750 - DNA, 245 bp, Glycine max
caaatcaaagccatggccacctccaacttctctattgttctctccgtctccctagccttctttttggtgctacttaccaaggcacactcgaccgataccgtttctttcaccttcaacaagttcaacccagtccaaccaaacattatgctccaaaaagatgctagtatttcatcctctggggtgttacaactcaccaaagttggcagcaacggcgtgcccacctcgggatctctcggtcgtgccct

SEQ ID NO: 177751 - DNA, 246 bp, Glycine max
catccatctcttgtttcttgctttctttcttcaccatgtcacttgctgggaaaatcaccactgaaatcggggttcatgcaaccgctacaaagtggttcaacctcttcgcaacacaactccatcatgttcaaaacctaactgatagagtgcatggaaccaagctgcatcaaggtgaagactggcatcacaacgagacagtcaagcactggacttataccatagatggtaaggttacaacatgtctgg

SEQ ID NO: 177752 - DNA, 244 bp, Glycine max
ctcgagccgtgttgctgtgggagtcatcaagaacgtggagaagaaggatcctactggagcccaggtcaccaaggctgcccagaagaagaagtgaatcgtgcggtttggttcatcaggggatgtcgtttcttatggttacaataaatgttggtttcttgcccttgtgtcttcgtttctaggtagcttgtttttcggacatagtttgaagtctccaccatcatctcgcaacttttgttcccagaat

SEQ ID NO: 177753 - DNA, 243 bp, Glycine max
gttgcgactaagagttgctgcttcttccgccactcagcacttcgctccctctgtgcttcaccaaccatggccgaaatcgaagctaccgttccagatccctctcaaatcgacgtcacacttttcaaccgctggagcttcgacgacgttgaggttactgatatgtctctggctgattacattggagtgtccccgtcaaagcatgctacatatgttcctcacactgctggtaggtactcagtgaag

SEQ ID NO: 177754 - DNA, 236 bp, Glycine max
  unsure (1)..(236): unsure at all n locations
ctctgaggcgagctcctccttcttcctcttccatcaaattcaaattccgaagatgctacgccgcgttcgccaatgagactcgcgagtacgtgatcgttggcggcggaaatgccgcgggatatgctgcgcgcactttcgttgagcatggaatggctgatggtcgtctctgtattgtaaccaaagagccgtccgnancttacgagcgtcccgctctgacgacagcctatttgttcccg

SEQ ID NO: 177755 - DNA, 215 bp, Glycine max
  unsure (1)..(215): unsure at all n locations
atttccttctatgctatcacacatcatcaacaacaaaaagctcttgatagtactcaagcaagctaaggcattattatggcttatcaagtgttgctaatttgtttggtctccaccatagtgtttgcatacatactatggagaaaacaaagcaagaaaaaccttccaccaagtccaaaggcctttgcnataattggcaacctcaaccttgtgtccca

SEQ ID NO: 177756 - DNA, 238 bp, Glycine max
atggaatgctgtgggaagttgaggggaagtgggttgttaagggagcagttgatgttgacattggtgcaaacccttctgctgagggtggagaagatgagggagtcgatgacgcagctgttaaggttgttgacattgttgatacattcagacttcaggagcaacccgcttttgataagaaacagtttgttaccttcatgaagaggtttatcaagaatttgactcccaagctcgatgcaga

SEQ ID NO: 177757 - DNA, 251 bp, Glycine max
gtaagctcaatttgtttccaaggttgctctgggaatccgaggttctaaactctgcaactaactttaatggcaactgggcaagtcattaataaacctccttcacttcctccgtaccctgagatgattcgggaggcaattgaagcactgaatgaagagaatggttcgaataaatcatcaatttcgaagtacatcgaatccacctatggtggattgcctcaggcccacaaggttttgctcaatgtgcacctcgc

SEQ ID NO: 177758 - DNA, 249 bp, Glycine max
cttgtccacgtcatcgactgccaaggtttgaccctcaaactggaatactgactgggacaaatgatgggacacttgttaacttctttctaagaaatttaggccgaaagtccgaaaaggcactttgtatttatcttcttgctttccaggctatagcgtgctgtttatgtttcttgctacggtatttccttgctggttggtacaaatgaaagcacgaagtggataaaagaaaagatatggatgagaaccacg

SEQ ID NO: 177759 - DNA, 246 bp, Glycine max
gatcgagataactagaaacagtgtgatgaaaatgaaggtccttgttttcttcgttgctacaactttcgtagcatggcaatgccatgcgtacgatatgttccctctccgaatgaacactggctatggtgcccgtactccggaggtgaaatgcgcaagttggaggcttgctgtggaagcacacaacatctttggctttgagaccattcctgaagcagtgcgttgaagcaacaaaggaatacatccatg

SEQ ID NO: 177760 - DNA, 241 bp, Glycine max
cggttatcatttctccatttccattttctctctcacttttcaagaatcgtaagctatgggaaagtcttacccaactgtgagtgctgattaccagaaggccgttgagaaggcgaagaagaagctcagaggcttcatcgctgagaagagatgcgctcctctaatgctccgtttggcatggcactctgctggaacctttgacaagggcacgaagaccggtggacccttcggaaccatcaagcac

SEQ ID NO: 177761 - DNA, 237 bp, Glycine max
atgtatcagaggccattcatgaaggggaaactttacattcacttcactgtggagtttccagattctctaaaccctgatcaagttaaggccttggaggctgttctgccaccaaagccttcttcacaattgacagacatggagctggatgaatgtgaggaaactacactccatgatgtcaacatggaggaggagactaggaggaagcagcaacaagctcaggaggcatatgatgaggat

SEQ ID NO: 177762 - DNA, 239 bp, Glycine max
gcaagaatggcacttcgttgcttggtgatgtccctttctgttctcttcactcttggtcttgcgagagaaagccatgccagagacgaagatttttggcatgctgtttggccaaacactcccattccaagttcattgcgagatcttctaaagcctggccctgcaagtgttgaaatcgatgatcaccctatgcaaattgaagaaacacagtacccgaaaaccttcttctataaagaagacct

SEQ ID NO: 177763 - DNA, 252 bp, Glycine max
agtcggatctagctgcttacattggcactcctggaaagggtattcttgctgctgatgagtcaacagggacaattggcaagcgtttggccagcatcagtgtagagaatgttgaatccaacaggcgtgctcttagggagctgcttttcaccgctcccggtgctcttaaatatctcagtggtgtcatcctctttgaggaaactctctaccagagtacagctgcaggcaacccctttgtggaactcttgaaggagg

SEQ ID NO: 177764 - DNA, 245 bp, Glycine max
ctttgttgtgagctataagctagtttatcgtgaggagaatatgaagttgtttgttttctttgttgctgcagtagttttggtagcatggccatgccatggcgcaggctaccaaaggttccctctccgaatgaaaactggctatggtgagcgttcttcggaggtaaaatgcgcaagttttaggcttgctgtggaagcacacaacatccgagcctttaaaaccattcctgaagagtgcgttgaaccaa

SEQ ID NO: 177765 - DNA, 238 bp, Glycine max
agttgctccagtagccggcactaaacaacatggcggacaaggcagtcaccatccgaaccaggaagtttatgacaaacaggcttctctccagaaagcagttcgtcgttgatgtccttcatccagggagggctaatgtttccaaggctgaactgaaggagaagctgggaagaatgtatgacgtgaaagacaccaacactgtatttgtcttcaagttccgaactcattttggtggtggcaa

SEQ ID NO: 177766 - DNA, 241 bp, Glycine max
ggagaagccaggaggaggaggagtgttatcggcgaaggaggcattcgagaagcttgaaaaggtgggagaagggacatatgggaaggtgtacagagcaagagagaaggccacggggaagatcgtggctctgaagaagactcgtctccacgaggacgaagaaggtgtccctcccaccactctccgtgaggtttccattctgcgaatgctctctcgcgatccccatgtcgttaggttaatggat

SEQ ID NO: 177767 - DNA, 240 bp, Glycine max
tggatcgctaccaggtgactatggctttgacccactaggccttgggaaggacccagcattcctcaaatggtacagagaagctgagctgattcatgggagatgggcaatggctgcagttctaggaatctttgtgggccaggcatggagtggagttccatggtttgaagctggagctgacccaaatgcaattgctcctttctcctttggtactcttctgggaacccagttgattctcatggg

SEQ ID NO: 177768 - DNA, 235 bp, Glycine max
ctcgtcatcacaagcttgaagactcaacaaatttcagtaccaaaatccaaccaagtctctactattatccattattgtctgccacatcttcccttagtactagaaatgaggctgccacaactaaacttgttcttagtgtcatttttcttgctctttgttgccagagcaaatggttctctgctcccattcatagatcctcccaccactctcttggctgatctctggtccgatcgct

SEQ ID NO: 177769 - DNA, 237 bp, Glycine max
ctagtttatcgtgaggagaatatgaagttgtttgttttctttgttgctgcagtagttttggtagcatggccatgccatggcgcaggctaccaaaggttccctctccgaatgaaaactggctatggtgagcgttcttcggaggtaaaatgcgcaagttttaggcttgctgtggaagcacacaacatccgagcctttaaaaccattcctgaagagtgcgttgaaccaacaaaggactac

SEQ ID NO: 177770 - DNA, 227 bp, Glycine max
gataactagaaacagtgtgatgaaaatgaaggtccttgttttcttcgttgctacaattttggtagcatggcaatgccatgcgtacgatatgttccctctccgaatgaacactggctatggtgcccgtactccggaggtgaaatgcgcaagttggaggcttgctgtggaagcacaccacatctttggctttgagaccattcctgaagagtgcgttgaagcaacaaagg

SEQ ID NO: 177771 - DNA, 240 bp, Glycine max
atgggatatgatctatgagtatgatgtctacaatgacttgggcaacccggatagcggtgataaatatgcacgccccgttcttggtggttcagccttaccttaccctcgcagaggaagaaccggcagaggaaaaactagcaacagttccaacagtgagaagccgagcgattttgtttaccttccaagagatgaagcatttggtcactttaagtcatcagattttctcgcttatggaatcaa

SEQ ID NO: 177772 - DNA, 241 bp, Glycine max
cagcaatcaaacgccgtttggggggtcgctatccatggttgtctcgagcatatgatccctgtactgagaggtactctaccttgtatttcaatcgtccagaagttcagaaggcacttcatgccaatgtaactgggattccttattcatgggcaggatgcaatgatgttattgtggaaaattggggtgattctccgctatctatgcttccaatatatcaagaacttattgaaggtggtatcag

SEQ ID NO: 177773 - DNA, 239 bp, Glycine max
ccgcgagccgctgcccttttgacttcaggtttcagccttgatgatcccaacacatttgcttcgaggattcacaggatgttgaagttgggtcttagcattgatgaggatgacaatggtggagacgatgttgatatgcccccattggaagaggacggtgctgaggagatcaagatggaggaagtggactaaatgccaaaggtctcgtgttaaatgaattgtggttcgtgtctgttaaatgg

SEQ ID NO: 177774 - DNA, 239 bp, Glycine max
cacaacaatcgagcttgcaacttcacccaagtctcaaacaaccttttaaacctcatcaaacatgtctctgattccatcattgctaagcaacagaaacatcatggaccccttctccaccaacatctgggcaccctctgactccgacagcgaggtttccgccttcgtgaacgcacgtgtggactggaaggaaaccccggagtcgcacgtgttcaaggcggacttgccggggctgaagaagg

SEQ ID NO: 177775 - DNA, 235 bp, Glycine max
caatctctcaatcgttttctacataatacaaacctctctaatttttgaagcttattatacccaatctcgatatgcagatcttcgtgaaaaccctaactggcaagacgatcaccttggaggtggagtcctctgacaccatcgacaacgtgaaggccaaaatccaagacaaggagggcattcctccggatcaacagcgtttaatcttcgccggaaaacagctcgaagacggcagaac

SEQ ID NO: 177776 - DNA, 234 bp, Glycine max
gtttgttgtgagctataagctagtttatcgtgaggagaatatgaagttgtttgttttctttgttgctgcagtagttttggtagcatggccatgccatggcgcaggctaccaaaggttccctctccgaatgaaaactggctatggtgagcgttcttcggaggtaaaatgcgcaagttttaggcttgctgtggaagcacacaacatccgagcctttaaaaccattcccgaagagtg

SEQ ID NO: 177777 - DNA, 223 bp, Glycine max
caaacaattcagatatagccaaagtccaacccatatagtctcattgctttcaattttccaataccttttctgagtaccaaaacagaaggcatatccgcacatacacattccaacgtacaaaatgaggcactttttagtactagtaccactgatcttgcttgtctttgctggtttcccatccaaagcaaaagggtctctgctaccattcacaaatcatccaaat

SEQ ID NO: 177778 - DNA, 235 bp, Glycine max
tgcaagactggcacttcgttgcttggtgatgtccctttctgttctcttcactcttggtcttgcgagagaaagccatgccagagacgaagatttttggcatgctgtttggccaaacactcccattccaagttcattgcgagatcttctaaagcctggccctgcaagtgttgaaatcgatgatcaccctatgcaaattgaagaaacacagtacccgaaaaccttcttctataaagaa

SEQ ID NO: 177779 - DNA, 276 bp, Glycine max
tgaaagcaataagtccctccttcctctgccttataattcttgtgacccttttcgctggtagcattgaaagtgcaccagcaaacgtgaagccaagccattatgctgcacccttcaataggagtgtttttccttctggttttctatttggaataggctctgcagcttaccagatagaaggagcagcagctatagatggcagaggaccaagtatatgggacacctatactaaacagcaaccagggaagatttgggatcatagtgatggaagtctagcaa

SEQ ID NO: 177780 - DNA, 269 bp, Glycine max
ggcatttattattcacctgagaattgtatgaatcaggatggatgtgattcaccacctgggatgcacaaagaccctggaatgtcatctttggaagcatgccaacatcagacgttacgaagcataggttctcatgtgaatcttaggatcaagtcatttagagtgccagagctttttatagaggttccagaaactgcaacaattgggtccttgaagaggacagtgatggatgcagtgactgctgtgcttggaggtgaattgcacattggtgt

SEQ ID NO: 177781 - DNA, 165 bp, Glycine max
gttgaaaatcgtgagcttatcctttgttgttgtaataagtgtcttctgtcttgtgtgcctttgagaaaaatcttccatgcatgcattgtggattgtaattgctccagtgattgataactgtgtggctgtgtaattcatgtgaataaagtcctaccttcagagttc

SEQ ID NO: 177782 - DNA, 257 bp, Glycine max
tagggttatcatttctccatttccattttctctctcacttttcaagaatcgtaagctatgggaaagtcttacccaactgtgagtgctgattaccagaaggccgttgagaaggcgaagaagaagctcagaggcttcatcgctgagaagagatgcgctcctctaatgctccgtttggcatggcactctgctggaacctttgacaagggcacgaagaccggtggacccttcggaaccatcaagcaccctgccgaactggc

SEQ ID NO: 177783 - DNA, 257 bp, Glycine max
cacagataatggcaattggaacacttgcattatgctacaataacattgaggtcttcagaggtgtagttaaaatgaggcgaggtaagagcaaatattttgatactaatttccttgtgatttgattttgaggcatactaaacataaagtcaaacttggtatatgtcagggaatgtgtctttgaagtcctaggaattgtgaattgctgcaatttgtatttcatgttatttcatgctcaatcaatctccataaaattaatt

SEQ ID NO: 177784 - DNA, 252 bp, Glycine max
cgagtgagtcactcttcctgcagaacccagatctgtagacaatatgggaagcactggtttgctacatttgatatgccttgtcattgctttagtaagtgtgtcgcttgtgcaagcagaagatgcgtataagtatttcacatggacggtgacttatgggactctttatcccttggctagtccccagcaggttattcttatcaatggtcagtttcctgggcctagacttgacttggtaactaatgaaaatgtaat

SEQ ID NO: 177785 - DNA, 246 bp, Glycine max
cgcgccttgctctaggaaaatcttgggatgaaatgacagttacatggacaagtggatatgacataaatgaagctgtgccttttgttgagtggggaccaaagggaggaaagaaaacacgatctcatgctggaacattgacatttaaccgaaacagcatgtgtggtgaacctgcacgaactgttggttggcgtgaccctggttttatacacacaagtttcttaaaagaactgtgagcaaattttaggt

SEQ ID NO: 177786 - DNA, 261 bp, Glycine max
cgctcgttcacccgacggagtttacgtcatggtcgttttacagagcagggatagcagagtttgtggccacttttctgtttctctacatcaccgtcttaaccgttatgggagtcgccggggctaagtctaagtgtagtaccgttgggattcaaggaatcgcttgggccttcggtggcatgatcttcgccctcgtttactgcaccgctggcatctcagggggacacataaacccggcggtgacatttgggctgtttttggcga

SEQ ID NO: 177787 - DNA, 266 bp, Glycine max
cccaagtgaaagtgagaaaaaataaaaatcaaagagcataatgtcagggatcattcacaagattggggagacccttcatgtgggagggcacaagaaggaggaggagcataagggtgagcaccatgctggagaatacaaaggggagcaccatggtgaacacagtagtgagtacaaaggagagcatcatggtgaacacaaagctggagagtaccatggtgagcacaagccagagcacaaagaggggttcctagacaaagtcaaggaca

SEQ ID NO: 177788 - DNA, 262 bp, Glycine max
ctcaatctcctcttctcttccagccatgcgctccttcctccgctctctccgccgccgcgatgtcgcctccgcctccctctctgcttatcgctcgttaacgggcagcaccaagccagcatatgtagctcacaactggtctagtttgtctcgaccattcagttcaaggcctgctggaaacgatgtcattggtattgatttgggtacaaccaattcatgtgtttccgttatggaaggaaagaaccccaaagttattgagaattct

SEQ ID NO: 177789 - DNA, 263 bp, Glycine max
caagcagagaaagagcatgaagctgcatttgcagtcgcctcactctccctctctctccccaccattttcccctccgtccaacccaagaatatcccatcaaccacccttcaaccaaccaagctcaaagtcccaacccaagcctcatccctcacacacctttctctctccaccaccactcctcctccttccaaaacctccttcaaatccaccgtctccgccaaccccctccacgcccctctctccctcgctccccaccgcccccg

SEQ ID NO: 177790 - DNA, 246 bp, Glycine max
ccatcgcaaattgtctcccagttatcacattcacaaaaccattgacgaatcctatgcagttatcttcgatgctggtagcacgggaagccgtgtacatgtctatcgttttaaccaacaattagatctccttcgcattggccaagaccttgagttgtttgtcaagactatgccaggtttaagtgcttacgctgagaatccacaagatgctgcagaatctcttattccacttttggaggaagcagaagc

SEQ ID NO: 177791 - DNA, 248 bp, Glycine max
cacaaactttgacaggtctaattttttgggtaccaagttcactatttatgacagccaacccccacaaggagctgcaattcaaccagataatagatctagtaggagatttcattctaagcaggtatctcctagagttccagcatgtaactatgttgtaagcaccattgcctatgagttgaatgttctccgtgcaagagggccaaggagaatgcactgcaccatgaactccatatctgtctcagctgttc

SEQ ID NO: 177792 - DNA, 215 bp, Glycine max
gtcggttgatccttctcaaatgttcttcagatccccattttctccgaagcaaagccatggctaagggtcctggtctctactctgacatcgggacgaaagctaggcatctgctgttcaaggactaccacagtgaccagaagttcaccatcagcacctactcaccgactggagtggctattacagcatcaggaaccaggaaaagtgaactgtttctg

SEQ ID NO: 177793 - DNA, 247 bp, Glycine max
gtgccttcgagcgaaggagttgaagcttatatttggttattggcaaaggcttatgttgttgtaaatcactcgtgctaccatcaactcgttagccattggctaaacactcatgcggttgttgagccattcgtcatagcaacaaataggcatctgagtgtggttcaccctatttacaaacttttgtttactcactatcgtgacaccatgaatattaattcacttgcccgcaaatccttggtcaatgcag

SEQ ID NO: 177794 - DNA, 246 bp, Glycine max
gtttggttttctcttcttcgttcgtttcgttgaaaagcgactttttctctctgcaactctcccttttcttccttcgtagatcgaaagggaatcttcttccatggcctccaagcggattctgaaggagcttaaggacctccagaaagaccctccaacctcttgcagcgccggtcctgtagcggaagatatgtttcattggcaagcgactataatgggtccccctgatagcccttatgctgggggtgt

SEQ ID NO: 177795 - DNA, 251 bp, Glycine max
cttaaaacgagcaataatggcgtttgctcacgacttggagttggcatcctcttcttcccctctggtgttctcagtacggaggagtgaaccggagctggtggctccggccaagcccactccccgcgaaattaagatcctatctgagatagattctcaggcgggtcttcgtacccaaattccaatcatacagttctaccgtaacgacccatcattggcaggcaaggacccagttcaagccattcgaaacgctc

SEQ ID NO: 177796 - DNA, 248 bp, Glycine max
ctgattagtgctcagaagggtcatggaatgcagttcccaaagggtggttgggaaactgatgaatccatggaacaagctgctttaagggagaccatagaagaagctggagttgttggcagtgttgaaagtaaactgggaaaatggtattacaagagcaaacgccaacccataatgcatgagggatacatgttccctttgcttgttaagaaggaattggataactggccagaaatgaccccagaaaacga

SEQ ID NO: 177797 - DNA, 264 bp, Glycine max
gctcgtgcacatccctacctctctcgttccttcgttgacgatggcgtttcgggtgcgaaccctgacctgtcctctctctttcttctctctctcttgtgcatcgcttccgccaatgtcttcttcgaagagcgtttcgatgacgggtgggaaaatcgatgggttaaatcagattggaaaaaagatgagaacgtggctggggagtggaaccacacctctggtcaatggaatggagacgctaatgacaaaggtattcaaaccagtgag

SEQ ID NO: 177798 - DNA, 272 bp, Glycine max
gctagtttatcgtgaggagaatatgaagttgtttgttttctttgttgctgcagtagttttggtagcatggccatgccatggcgcaggctaccaaaggttccctctccgaatgaaaactggctatggtgagcgttcttcggaggtaaaatgcgcaagttttaggcttgctgtggaagcacacaacatccgagcctttaaaaccattcctgaagagtgcgttgaaccaacaaaggactacattaatggcgaacaatttagatcagactctaaaa

SEQ ID NO: 177799 - DNA, 267 bp, Glycine max
ctcgagccgcaccgatagatagagagcgcggcataacctaaacctatctttcttctctctcacgtgtgtgcgcttcaacggcaaccagaagcagccatggccactgcaaggactgtgaaggatgtttcacctcatgagttcgttaaggcgtactcctctcacctcaagcgatccggcaagatggagctgccagagtggactgatattgtgaaaactgcaagatttaaggagttggctccttatgatcctgactggtactatgtcaga

SEQ ID NO: 177800 - DNA, 264 bp, Glycine max
gtgaatcagcaccacattcacctgagctttttgtgaggattccaaagcatggcttcccttgcagcatccactgctgctgcttcccttggcatgtcagaaatgcttggaaaccccatcaacctcagtggtgccacaaggccagctccatctgcctctagccctgcctccttcaagactgtggctcttttctccaaaaagaaggctgcacctccaaaaaaagctgcagctgctgctcctgccaatgatgagcttgccaagtggtat

SEQ ID NO: 177801 - DNA, 255 bp, Glycine max
cctcgagccgaatcggctcgagtctctcctctgtctttttctctcacttgctatccttttggctagtcgcactgctgcaagtgcaactccaagaagcgcagtgccaagccaccatgtttcaacattcaacagaagcctttttccttccacttttctctttggaattggttcttctgcttaccaggcagaaggagcagcaagtgtagatgggagaggaccaagcatatgggacacctacactagacagcatactga

SEQ ID NO: 177802 - DNA, 246 bp, Glycine max
atccttaggaagcacttcaggggaaagccatattacattgatcttcttgatttgtttaatgaggttgagtttcagactgcttcaggacagatgatagatctgatcaccacattggaaggagaaaaagacctttctaaatacacattaacactgcatcgacgtatagttcagtacaagactgcatactattcattttaccttccagttgcatgtgcattgcttatggcgggtgaggatctagacaaa

SEQ ID NO: 177803 - DNA, 246 bp, Glycine max
cccaagtgaaagtcagaaaaaataaaaatcaaagagcataatgtcagggatcattcacaagattggggagacccttcatgtgggagggcacaagaaggaggaggagcataagggtgagcaccatgctggagaatacaaaggggagcaccatggtgaacacagtagtgagtacaaaggagagcatcatggtgaacacaaagctggagagtaccatggtgagcacaagccagagcacaaagaggggtt

SEQ ID NO: 177804 - DNA, 248 bp, Glycine max
gacatatgaaaatggcctatttccatagtacctgctttctggtttttatgcttatcgcatcactgttggtccccggcagaggcggtgactacggtcccgaagaagaaaaacttctatcaaaaactataggcattcaaggcattgtctattgcaaatctgcctctaaactcaccccacttgaaggggccttgacaaggatagcatgcgaggctgttgatgaatatgggtttgaaacgacaccgttttct

SEQ ID NO: 177805 - DNA, 248 bp, Glycine max
cttagatagttcaatttccacccctgctcgtcccaaaaggcgcagaaccaaaagcaggaagaataaggaagagattgagaaccagagaatgactcacattgctgtagagcgcaacagaaggaagcaaatgaacgagtatctctctgttcttcgctctctaatgcctgaatcttacgtccaaaggggtgatcaagcatctataattgggggtgctatcaactttgttaaggagctggagcagaggctgc

SEQ ID NO: 177806 - DNA, 250 bp, Glycine max
agatattgcaagcgatagacaacaacactgatggtctagtggatttccgggagtttgtagacgctacattacacgtgcatgaattggaggaagactctgacaagtggcagcaactgtcacaggctgcttttgagaaatttgacctagataaagatggctatattactccggaagaacttagaatgcatacatgcttgagaggctccgttgatcctttgctagaggaagctgatattgacaaagatggaaa

SEQ ID NO: 177807 - DNA, 254 bp, Glycine max
catttaatggagttaaagccaacactatttgctggtgtcccacgggttttcgaaaaagtctatgaagggatcaagaaagcagtggaagaactcaatccagtgaggagaacagtttttggcatgctctacaactacaaacttggttggatgaaaaaaggatacaaacatagacaagcatcacgtttagccgatttattagccttcagaaaggtcaaagctaggcttgggggtcgtgttcgactaataatatctgg

SEQ ID NO: 177808 - DNA, 251 bp, Glycine max
caactagtctaagcagaaatggcctcttcagtgatggcatctgtggccctcaaacctgcccctttcactgttgagaagtcctcagttagaggccttccctccctctcaaggaactcctcttcattcagagttgtggccagtggtggcaagaagatcaagactgacaagccttatggaattaatggtggcatggctttgagggaaggagttgatgcatctggcaggaaaggaaagggaaagggcgtttacca

SEQ ID NO: 177809 - DNA, 252 bp, Glycine max
ccccaaacgaagaaaaaagactgagagcaattgcatcaacaacaaattgaaaggatgtcgatcttcgagtacaacggaagcgccgtggtggctatggtcggcaagaactgcttcgccattgccagcgaccgaacgctcggcgttcagctccaaaccatagccacggatttccaacgcatttccaagattcacgacaagctcttcatcgctctctctcgcctcgccaccgatgctcaaacattgtatcagcgt

SEQ ID NO: 177810 - DNA, 247 bp, Glycine max
aacaagccaagtgaaagacagaagaaaagtcaaagacaatgtcagggatcattcacaagattgaggagacccttcatgtgggaggccacaagaaggaggaggagcacaagggtgagcagcaccatggtggagaatacaaaggggagcatcatggtgaacacagtactgaatacaaaggagagcatcatgttggtgagcacaagccggagcaccatggaggagaagagcacaaagaggggttcctaga

SEQ ID NO: 177811 - DNA, 259 bp, Glycine max
ctgttgtaagactttgtaattgaggtgctgcaatggcttcaagtcaggaagaggtgactcttttgggagtaattggaagcccatttgcttgcagggtgaagattgcccttaagttgaagggagttgaatacaaatatgtggaagaaaatttggccaacaagagtgatttgcttctcaaatccaacccagttcacaagaaagttccagtttttattcacaatgagaagcccatagcagagtctcttgtgattgttgagta

SEQ ID NO: 177812 - DNA, 256 bp, Glycine max
gtggtttcagtgagtgatcggtgttcacttgatccttcataagtcgtcatcatcatcatcatcatcaccgttgattgaagaagatgccgatcagaaacatcgccatcggaaggcctgaagaggctactcaccccgacacgttgaaggcggggttggctgagttcatctccaccttgatcttcgtgttcgccggttcaggttccggcatcgcctacaacaagctcaccgacaacggcgccgccactcccgccggcct

SEQ ID NO: 177813 - DNA, 253 bp, Glycine max
gtgagctataagctagtttatcgtgaggagaatatgaagttgtttgttttctttgttgctgcagtagttttggtagcatggccatgccatggcgcaggctaccaaaggttccctctccgaatgaaaactggctatggttctcgttcttcggaggtaaaatgcgcaagttttaggcttgctgtggaagcacacaacatccgagcctttaaaaccattcctgaagagtgcgttgaaccaacaaaggactacatta

SEQ ID NO: 177814 - DNA, 249 bp, Glycine max
ctttcctcacttcaaacttgacaaaaatggcaacagaattggcatcctctcccaattgggttccaagcgcaccacatgtttggcagcctttgccgccctccttctcctcttcctccgcggtctccgccgccgccgatacaacctccccccaggcccaaagccctggcccatcataggcaacctaaacttaattgggtcccttccacatcggtcgatccacacgcttagcaaaaaatacgggcccatcat

SEQ ID NO: 177815 - DNA, 246 bp, Glycine max; identical to SEQ ID NO: 132390

SEQ ID NO: 177816 - DNA, 243 bp, Glycine max
  unsure (1)..(243): unsure at all n locations
cacctttctcctaaaacatctccagtgggttcttcttcttctattacaacaacgtcgcccaagaccatgaccatggccatggccacgatcctgctcctgttcacggtcttcgcggtttcatcggccctagacatgtcgataatctcgtacgacaacgcccacgccgccacgtcgcgcagacangtgtagctgatgtccatgtacgagcagtggctagtaaagcacggcaaggtgtacaacgcg

SEQ ID NO: 177817 - DNA, 245 bp, Glycine max
caagaagaagaagatggagaagtatcagatctggagcaggagaatagcgttggcagcgtttgcgtttgctctgctgttccaatcggcctcagcagacgacgtcgttgtgctctctgaagataacttcgagaaggaagttggtcaggacagaggagctctcgttgagttctatgctccttggtgtggacactgcaaaaagcttgctccagaatatgaacagcttggtagcagcttcaagaaagcca

SEQ ID NO: 177818 - DNA, 243 bp, Glycine max
cttcattttgctctttcttcaagccaacctcttcccaactctttgttcctttcttcctctcactctcaccatcattacagtaagcgtaagatggcaaaaggagattttcaaagatgtagaacttgacactacccagtctccttatgtttttaaatgccaattgtatgatttgactggtgtgcctcccgaaagacaaaaaattatggtcaagggtggtcttttgaaggatgatgctgattggtc

SEQ ID NO: 177819 - DNA, 246 bp, Glycine max
agaatcttcgctctcaagcactctctccctcgctctagggtttccatgagcgtctccgctggatctcaggcttccgttcaccaggctttgttcgccgattacaaggcctgcacttcattcctcttcccgggccagggtgctcaagctgttggaatggggaaagaagctcaaaatgtgcctgctgctgcggttttgttcaacaaggcaaatgacattttggggtttgatcttcttgatatatgcatc

SEQ ID NO: 177820 - DNA, 253 bp, Glycine max
caaaactacaaactttatttcctctccgtattctcacatttccacaacatggacgactacattcgacatggcggcggcggagccatgggcgaggacttcgacttcgccggcagcggcagcaaccccgtcctgaaggtcggcgaggagaaggagattgggaaagacggtttgaagacagaagctcctgaaagaaggtgaaggatgggacactcctgaagctggtgacgagttcaagttcactatactgggacgt

SEQ ID NO: 177821 - DNA, 258 bp, Glycine max
gccaagactctgacttacctggcccaggagaaaaccctagaatcgagcttcgttcgggacgaggaggagcgtcccaaggttgcctacaacgaattcagcgacgagatcccagtgatttctcttgccggaatcgacgaggtggatggacgcagaagagagatttgtgagaagatcgtggaggcttgcgagaattggggtatattccaggttgttgatcacggtgtggatcaacaactcgtggccgagatgacccgtctc

SEQ ID NO: 177822 - DNA, 254 bp, Glycine max
gtcggaaacaagcttttctttgataagcgccatgggtcgcagctcgatttgctctctgttcatgaaagctcgcaggagccattgcctgagtcgaaggatgatattaactctgcccattcgttgagcgttgaggctgcttatatcaaccagaatttctctcagcaggtgcttattagggatgggaataaggttacttttgatgaggctaacccttttgctaatgaaggtgaggaggttgcttctgtcgcttatag

SEQ ID NO: 177823 - DNA, 252 bp, Glycine max
cgatcacccttgaggtggagtcttctgacaccatcgacaacgtgaaggccaagatccaggacaaggaaggcatccctccggaccagcagcgcctcatcttcgccggaaagcagctggaggacggccgcaccctcgccgactacaacatccagaaggagtccaccctccacctcgtcctccgtctccgcggtggcgccaagaagcgcaagaagaagacctacaccaagcccaagaagatcaaacacaagcaca

SEQ ID NO: 177824 - DNA, 249 bp, Glycine max
taggaaacgagattgacgaaccctaagctgaaagaagaaaaaatgtctggcgtgaagagagcactgaggcagttcaccttcggaaccggcaagaccgccggtcgcaactcggcggggcgcataacgtccttccaccgcggcggcggagcaagcgcttgcaacgaaccgtcgatcacaaacggaataccgcttcttctctcggcgtcgtcgaaaggatcgagtacgaccctaaccgctcctccaaaatcg

SEQ ID NO: 177825 - DNA, 244 bp, Glycine max
taagacagcaggacgctggtcatggaagtcgaaatccgctaaggagtgtgtaacaactcacctgccgaatcaactagccccgaaaatggatggcgctaaagcgcgcgacctatacccggccgtcggggcaaggaccaagccccgatgagtaggagggcgcggcggtcgctgcaaaacccatggcgcgagccgaggcggagcggtcgtcggtgcagatcttggtcgtagtagcaaatattcaaat

SEQ ID NO: 177826 - DNA, 243 bp, Glycine max
cgcaccatggggcggagacctgcgaggtgttataggcaaattaagaacaagccataccccaagtcacgtttctgccgtggtgttcctgatcccaagatcaggatttatgatgttggtatgaagaagaagggtgttgatgagtttcctttctgtgtccatctggttagttgggagaaggaaaatgtttcaagtgaggccctggaagctgctcgcattccttgcaacaagtacatggccaaattt

SEQ ID NO: 177827 - DNA, 243 bp, Glycine max
cttgactgcaacctttgccgtcatgcagaatggcagggcggagaaccagcaagaattcgcatccaccatggggctactacttagctatgctctgaacattactagtttgcttaccggtgtgctgaggctggcaagtttggctgagaatagtttaaacgcagttgaacggattggcacttacattgatttgccctcggaggctccctctatcatcgatgataatcgccctcctcctggctggcc

SEQ ID NO: 177828 - DNA, 197 bp, Glycine max
cttctctcatcgcttcggatcttcaatctcatctccgatctcacaatgcccgctgtctatggacctcgcttgaccaccttcgaagactccgagaaggagagtgaatacggttacgttcgcaaggtttcaggacccgtcgtcgttgcggtggcatggctggtgctgctatgtatgaactcgtgcgtgttggtcatgat

SEQ ID NO: 177829 - DNA, 275 bp, Glycine max
cggctcgaggtggtgttagatctgtacccgcctagccattgatttggaaaagtccaagcttcaaagatgagtaagcttcagagtgatgctcttagagaagctatctcaggaatcatgactgattccaaggaaaagaacaggaaatttgtggagaccattgaactccaaattgggctgaaaaactatgatccccagaaggacaagcgttttagtggctctgttaagttgcctcacattcctcgccccaagatgaagatttgtatgcttggagatgc

SEQ ID NO: 177830 - DNA, 273 bp, Glycine max
ctttagtcttgttcttagagatggcttgtgaaaccaagtcatgcttggttatgtctcttgttttcttggttgctaattgcatgcaacattgtgtccacggggtgtctcaagtgccttgcctttttatctttggggactctatgtctgatagtggaaacaacaatgaacttccaaccacttcaaaatctaatttcagaccatatgggatcgactttccattaggaccaactgggagatataccaatggccgaccagaaattgacataatcactc

SEQ ID NO: 177831 - DNA, 278 bp, Glycine max
ctcaagcccagattcaaccagttaaacttggaacccaaggctttcaggtactattaactacattacttgctcttattttgataattgatacaattaatctcattctaggtttcaaaattgggattcggatgtatgggccttactggagcgtacaatgaccctctccaagaacaggatggcatatctgttatcaagtatgcgttcagtaagggaatcacattttttgatactgcggatgtttatggagccaatgctaatgaacttttggttggaaaggc

SEQ ID NO: 177832 - DNA, 279 bp, Glycine max
caaaaattggaaagagtacaaatttaagaggaaagataacattaccaaccttgggagctggcgaacaagcatacgatgttaattttgaatgggacagtgacttcggaattcccggtgcattttatattaagaacttcatgcaaaatgagtctacctcaagtctctaattctcgaagacattccaaaccacggaaccattcacttcgtatgcaactcctgggtttacaattcaaaaaactacaagactcatcgcattttctttgccaacaatacatatct

SEQ ID NO: 177833 - DNA, 279 bp, Glycine max
ctgagctataagctagtttatcgtgaggagaatatgaagttgtttgttttctttgttgctgcagtagttttggtagcatggccatgccatggcgcaggctaccaaaggttccctctccgaatgaaaactggctatggtgagcgttcttcggaggtaaaatgcgcaagtcttaggcttgctgtggaagcacacaacatccgagcctttaaaaccattcctgaagcgcgcgttgaaccaacaaaggactacattaatggcgaacaatttagatcacactcc

SEQ ID NO: 177834 - DNA, 245 bp, Glycine max
caactttgttactctcacacatgtctcgctccgtgcctttggtttcaaccatttttgtcttgcttctgcttctggtggccactggtaggcctttctttcttgacgctaattaatatctacacttttgggtttcttttattgtcatcttagttagttaacaagctattagctactgttcttacaccttaatttcttcacgtacttgtgtgtaatattttattgttcttgatcaatattcctggtat

SEQ ID NO: 177835 - DNA, 188 bp, Glycine max
tcgcgttctatatattattgaattgacaatgaggcctgctcttgctttgcttcctcttctatttgctttctcgttagctgccactacagaatcaagaaaagatacaggggaatattggaaaatgatcatgaaagatcaggaaatgccagaaggacttcaaggtcttgtttcatttcaatctgaaaata

SEQ ID NO: 177836 - DNA, 252 bp, Glycine max
cttgctaccaacactgagcttaaccgagcttcgcaaagatgaatcgggaaaagttaatgaagatggccggttcggttagaactggaggaaagggtactgtgagaagaaagaagaaggctgtccacaagacaacaaccacagatgccaaaaggcttcagagcaccctgaagagaataggggtgaatgccatccctgctattgaagaggtcaatatctttaaggatgacgtagttatccagtttctaaatccca

SEQ ID NO: 177837 - DNA, 275 bp, Glycine max
  unsure (1)..(275): unsure at all n locations
aatttctaaatccaccaccacaccctctcttctcttctcttctctccactcaacacaacgtcgcctncttcttctctcgaaccctnnagcgnaatgaccacccgcaccgagaagctctccgctctcaaatccgccgtcgccggatcgaacgaaatcagtgagagtgagaagaacccattcatcagcctcgtcagccgctatctcagtggcgaacgcagcatgtggaatggagcaagatccagacgcctacggacgaagtggttgtgccttacgac

SEQ ID NO: 177838 - DNA, 276 bp, Glycine max
tctctatcgagtaaattaactatgaagcctaccctactattatccctttccttcctgcctctctttgctttcctggctctttcagaagatgttgaacaagttgtggacataagtggcaaccccattttcccaggtggcacatattacattatgccatcaacttggggcgctgccggtggtggattgaaactaggccggacaggaaactcaaactgcccagttactgttttgcaagattactcagaaatcttccgtggcacaccagtcaaattcagc

SEQ ID NO: 177839 - DNA, 272 bp, Glycine max
atgaaattgaaccagctctaaaaaagcagcttatcatctctacagtactcatgactgttggaattgcaattattagttggattgctctgccaacatccttcacaattttcaactttggtgctcagaaggaagtaaagagctggcactgttcctctgtgtgggtgttggtctatgggctggacttattattgcgtttgttactgagtactatacaagcaatgcttacagtcctgtacaagatgttgctgattcctgccggactggagctgcaa

SEQ ID NO: 177840 - DNA, 274 bp, Glycine max
ctcggaaccacctactcttgtgtcggtgtgtggcaacatgaccgagttgaaatcatcgccaacgaccaagggaacagaacgacgccgtcttacgtcggcttcactgataccgagcgtctcatcggtgatgcggctaagaaccaagtcgccatgaaccccatcaacaccgtcttcgatgccaagaggttgattggtcgtagattcagtgactcctctgttcagagtgatatcaaattgtggccttttaaggtcattgctggtgctgctgacaagc

SEQ ID NO: 177841 - DNA, 273 bp, Glycine max
tcgcatggattgttgagcattcacatgcctgcatattctgattctattattaagggggtctctacagtcatggtttcatactccagttggaatggtgtaaggatgcatgcaaatcgtgatctagtcactggtttcctcaagaatacccttaagtttaaggggtttgtcatctcagattggcaaggtattgacagactcacatcaccacccagttcaaattacacatactctgtccaggcttccattgaagctggtgttgatatggtgatggtc

SEQ ID NO: 177842 - DNA, 270 bp, Glycine max
aaaatgcattcattcggctacagagccaacgcgttgctaacctttgccgtaaccattctggcgcttatgtgcgctatggcttctgtatccgacaacttcaacacccccactccctctgcacaagtccaggttctgaacatcaactggtttcagaaacaacccaatggcaaacacgaggtcagcatgacgatgaatatttccgcagacttgcagtcccttttcacatggaacacaaaacaggtttttgtttttctagctgctgagtatgaa

SEQ ID NO: 177843 - DNA, 267 bp, Glycine max
gagagtggtttcagtgagtgatcggtgttcacttgatccttcataagtcgtcatcatcatcatcatcatcaccgttgattgaagaagatgccgatcagaaacatcgccatcggaaggcctgaagaggctactcaccccgacacgttgaaggcggggttggctgagttcatctccaccttgatcttcgtgttcgccggttcaggttccggcatcgcctacaacaagctcaccgacaacggcgccgccactcccgccggcctcatctcc

SEQ ID NO: 177844 - DNA, 267 bp, Glycine max
ctcgagccgtgttgctgtgggagtcatcaagaacgtggagaagaaggatcctactggagccaaggtcaccaaggctgcccagaagaagaagtgaatcgtgcggtttggttcatcaggggatgtcgtttcttatggttacaaaaatgttggtttcttgcccttgtgtcttcgtttctaggtagcttgtttttcggacatagtttgaagtctccaccatcatctcgcaacttttgttcccagaattgggttcttgatcgacggtggcaa

SEQ ID NO: 177845 - DNA, 267 bp, Glycine max
cagcagacaagtttgctgctgatgctaacagcaagactgtgccagcatcaagcatcccagacgggtggatgggattagatattggtcccgattccatcaagacatttggtgaagcattggataagacccagaccgtcatttcgaatggaccaatgggtgtttttgagtttgataagtttgccacaggaacagaggccatagccaagaaactggcagagctgagtgggaagggagtaacgaccatcattggaggaggtgactctgttg

SEQ ID NO: 177846 - DNA, 272 bp, Glycine max
ataatatctctaaggaatgcttaccatggtaatgcaactgggacaatggcagccacagctcaaagcatctggaaatttaatgtagtgcagagtggcgttcatcatgcagtaaatccagacccttatagaggcattttcggttctgatggagagaagtatgcaagagatgtccaagatatcattaactttggaacttctggaaatgttgcagccttcatatctgaagccatacagggagtggggggtatcattgaattggctcctggttactt

SEQ ID NO: 177847 - DNA, 99 bp, Glycine max
ctctctctctctctctgaagatggcttcacgcaggctcgtatcttctctgattcgatcctcccttcgtagatctcaatcgaagccctcaatttccgcat

SEQ ID NO: 177848 - DNA, 262 bp, Glycine max
ctactcttagccgcagatctctcagggcttgcatcttctcagttgtgaagatgtacacatcaaggaagaaaatccacaaggataaggatgctgaaccaactgagtttgaagagtcagttggacaggcattgtttgatctggaaaataccaaccaggagcttaaaagtgatctgaaggatttatacataaactcagctgtgcaagttcatgtttctgggaaccgcaaggctgttgttattcatgtcccttacagattaaggaa

SEQ ID NO: 177849 - DNA, 270 bp, Glycine max
attaggaaggatctgtatggtaacattgttcttagtggtggctcaactatgttccctggtattgctgaccgtatgagcaaagaaatcactgcacttgctcctagcagcatgaagattaaggttgtggctccaccagagagaaagtatagtgtttggattggaggatcaatccttgcatccctcagcaccttccagcagatgtggatatcgaagggtgaatatgatgagtctggtccatccattgtccacaggaagtgcttctaagtccaa

SEQ ID NO: 177850 - DNA, 195 bp, Glycine max
catagagtgagaagtgagaagagaaaaatggcaatctccatacccagtagacaacttttcatagatggagagtggaaagtccctcttctcaacaatcggtttccgatcatcaaccccgctactgaagacatcatagggcatattccagccgctactaaggaagatgtggaccttgcggtggatgctgctaaaaga

SEQ ID NO: 177851 - DNA, 268 bp, Glycine max
taccgttcgctcttcctctcccagacaaacacatggtaatgctattgatctctctctgtttttcgattttctctccacattcatttcattcttttgttttcgtcgcaggctttgcccaatcagcaaaccgtcgattacccagcttcaagctcgtcatcgtcggtgacggtggcacaggaaagacaaccttcgtgaaaaggcatctcactggtgaattcgagaagaaatatgaaccgaccattggtgtggaggttcatccgttggattt

SEQ ID NO: 177852 - DNA, 247 bp, Glycine max
caacaacacagcacaatccttaaactctctctctctctctctctctcttcaatttcgttgatggcgtcacaagcaagcctcctccttcagaagcagctcaaagatctttgcaagaaccccgtcgatggcttttccgccgtttggtcgacgaaaccaacatttttgaatggagtgtgactataattggacctcccgatactctttatgaggggggatttttcaatgccattatgagcttccaaccaac

SEQ ID NO: 177853 - DNA, 268 bp, Glycine max
gcggtacccttgctctccaagaagatcgtgaagaagcgcgtcaagaagtttatacgcccccagagtgatcgcaagatctccgtcaagccaagctggcgcagacccaagggtattgattctcgtgtcaggagaaagttcaaggatgcactttgatgcccaacattggttatggctcagacaagaaaacccgccattatctaccaaatggtttcaagaaatttgtcgtgcacaatgtgaaagacctggaacttctcatgatgcataacag

SEQ ID NO: 177854 - DNA, 266 bp, Glycine max
gtgagtttcttgatcgagataactagaaacagtgtgatgaatctcttggtctctgttttcttcgttgctacaatcttcgtagcatggcactgccatgcgtatgatatgttccctctccgaatgaacactggctatggtcccgtactccggaggtgaaatgcgcaagttggaggcttgctgtggaagcacacaacatctttggtcttgagaccattcctgaagagtgcgttgcagcaacaaaggaatacatccatggcgtacaatat

SEQ ID NO: 177855 - DNA, 269 bp, Glycine max
ctcagaattctctaaaagagatctttttctgctctttgaagaaagaagggtctttgcttgattttggagatgtctctgctctcagatctcatcaaccttaacctctccgataccaccgagaaggtgatcgcagagtacatatggatcggtggatcaggaatggacctgaggagcaaagcaaggactctcccaggaccagttagcgacccttcagagcttcccaagtggaactatgatggttccagcacaggtcaagctccgggtgaaga

SEQ ID NO: 177856 - DNA, 268 bp, Glycine max
catggccatgccatggcgcaggctaccaaaggttccctctccgaatgaaaactggctatggtgagcgttcttcggaggtatgcgcaagttttaggcttgctgtggaagcacacaacatccgagcctttaaaaccattcctgaagagtgcgttgaaccaacaaaggactacattaatggcgaacaatttagatcagactctaaaacagttaaccaacaagctttcttttatgctagtgaacgcgaagtccatcacaacgacatatttat

SEQ ID NO: 177857 - DNA, 267 bp, Glycine max
cttccattgatttcttgcttctatatattacttgcttcttttcttgatcatgtcccttgctggtaaaatcagctctgaaattggtgttcaggcaaccgctgcaaagtggttcaacctcttcacaacacaacttcatcagttcaaaatcttactgatagaattcatggaaccgagctgcatcatggtgaagactggcatcacaatgagtcggtcaagcactggacttataccatagatggcaaggttacaacttgcaaggagagtatt

SEQ ID NO: 177858 - DNA, 235 bp, Glycine max
tcgcaagcaaaaagaaagaatcccaggcgaggagaaagatggaggggaaggagcaggatgtgtcgttgggagcgaacaagttccccgagagacagccgattgggacggcggcgcagagccaagacgacggcaaggactccaggagccggcgccggcgccgctggttgacccgacggagtttacgtcatggtcgttttacagagcagggataccagatttggtggcattttcctgt

SEQ ID NO: 177859 - DNA, 265 bp, Glycine max
gttgatcgagataactagaaacagtgtgatgaaaatgaaggtccttgttttcttcgttgctacaactttcgtagcatggcaatgccatgcgtacgatatgttccctctccgaatgaacactggctatggtgcccgtatccggaggtgaaatgcgcaagttggaggcttgctgtggaagcacacaacatctttggctttgagaccattcctgaagactgcgttgaagcaacaaaggaatacatccatggcgaacaatatagatcag

SEQ ID NO: 177860 - DNA, 267 bp, Glycine max
cagattagtgagcccaagaggccctctgacaagcccctcaggcttccccttcaggatgtgtacaagattggaggtattggaactgtgccagtgggacgtgttgagaccggtgtcttgaagcctggaatggtggtgactttgcaccaactggactgacaactgaagtcaagtctgtggagatgcaccatgaatctcttacagaggcacatcctggtgacaatgtgggattcaatgttaagaatgttgctgttaaggatttgaagcgtg

SEQ ID NO: 177861 - DNA, 253 bp, Glycine max
ctgatggcaaaccaagcttcactctccttctcttcggggtctccagttcacgcgcctctgaagcgcgtgggcacgcacaacggaagcttccactgcgacgaggcccttggctgcttcatgattcgcctcacgaacaaattcaacagcgccgaaatcgttcgctcccgagaccctcaggtgttggaggatcttgatgctgttcttgatgttgggggagtgtatgaccctgctcgagatcggtatgatcatcatc

SEQ ID NO: 177862 - DNA, 254 bp, Glycine max
cttcttcggaggtaaaatgcgcaagtcttaggcttgctgtggaagcacacaacatccgagcctttaaaaccattcctgaagagtgcgttgaaccaacaaaggactacattaatggcgaacaatttagatcagactctaaaacagttaaccaacaagctttcttttaggctagtgaacgcgaactccatcacagcgacatgtttatttcgggcagatataccgcggtcactcgctaatatcccatactatgaaaa

SEQ ID NO: 177863 - DNA, 265 bp, Glycine max
gttaaaagaagagcatcactgaactaacaaagcaaccctatgtcgaaggtggtttgtgtcaccggagccagcggcgccatcggatcatgggtggtcctactcctcctccagcgtggttacaccgtccatgccaccgtccaagatatcaaggatgaaaatgagacgaaacatttggaggaaatggaaggagcaaagagtcatctccatttttttgaaatggatcttcttgacatcgactccattgccgctgccataaagggttgtt

SEQ ID NO: 177864 - DNA, 253 bp, Glycine max
cggcaatggcacttggcaggctttcatcttccttcaacaagcctttacgtcctctcttcaatgctggctcagtttactacaagtcctctttgcctgctgaagctgcgtacgacaatgagaaaagctgtgatacggaatgaatgctccacttgaggttgttgatcctgagattgctgatataattgagcttgaaaaagctagacaatggaagggactggaactgataccctccgagaatttcacttctgtctct

SEQ ID NO: 177865 - DNA, 265 bp, Glycine max
cagaattagggttttccaattcacagagcaacacaacgaaccaacaatggcgcagctcagccgcagtcgcagccgcagcacgggcaagcagcgctggagcaggtgcagtgcttcggtcgcaagaagaccgccgtggccgtgacctactgcaagcgcgggcgcggtctcatcaagatcaacggctgccccattgagctcgtggagccggagatcctccgcttcaaggccttcgagcctatcctcctgttgggtaagagccgcttcg

SEQ ID NO: 177866 - DNA, 263 bp, Glycine max
cttaatacatatcactttcttcaccgttcgctctttctttctcccctacacaaaacatggctttgcccaatcagcaaaccgtcgattaccccagcttcaagcttgtcatcgtcggcgacggtggcacaggaaagaaaccttcgtgaagaggcatctcactggtgaattcgagaagaaatatgaaccgaccattggtgtggaggttcatccgttgaatttttcacgaacgtgtggaagattcgcttctattgttgggatactgc

SEQ ID NO: 177867 - DNA, 265 bp, Glycine max
aattgcctctttcaagaagcatctgagtgtttattattcgtaatatatagtcactcaagcttctaggatttctgccagctacatgaaaatgggaagcaacttgaggtttttgagtctttgcctcttggcattgattgcatcaactcatgcccaacttcagcttggtttttatgcccagagctgcccaaaagctgagaaaatcattttgaaatttgttcatgagcatatccacaatgctccatcactagcagctgcattgataaga

SEQ ID NO: 177868 - DNA, 257 bp, Glycine max
gtttatcgtgaggagaatatgaagttgtttgttttctttgttgctgcagtagttttggtagcatggccatgccatggcgcaggctaccaaaggttccctctccgaatgaaaactggctatggtgagcgttcttcggaggtaaaatgcgcaagttttaggcttgctgtggaagcacacaacatccgagcctttaaaaccatccctgaagagtgcgttgaaccaacaagggtctacattaatggcgaacaatttagctc

SEQ ID NO: 177869 - DNA, 266 bp, Glycine max
atggaactatcctctattgatggctacatggaaagttgctcctgctctagctgctggtcgtacagcaatattgaagccatctgaattggcatctgtgacctgtttggagctggctgaaatatgcagagaagttggccttcctccaggggtattaaacattgttactggattaggcaatgaagctggtgctcctttgtcatctcatcctgacgtagacaagatttcctttactggaagctctgcaactggaagcacgattatgacag

SEQ ID NO: 177870 - DNA, 263 bp, Glycine max
ctccatcactagcagctgcattaataagaatgcactttcatgactgctttgtaaggggatgtgatgcatcagtccttctgaactcaacaaccaatcaggctgagaagaatgctcctccaaatctcacagtaagaggctttgacttcattgacagaataaagagccttgttgaagctgaatgccctggtgtggtctcttgtgctgatatcctcactttggctgccagagacactattgtagccacaggtggacctttttggaaa

SEQ ID NO: 177871 - DNA, 262 bp, Glycine max
gtgagctataagctagtttatcgtgaggagaatatgaagttgtttgttttctttgttgctgcagtagttttggtagcatggccatgccatggcgcaggctaccaaaggttccctctccgaatgaaaactggctatggtgagcgttcttcggaggtaaaatgcgcaagttttaggcttgctgtggaagcacacaacatccgagcctttaaaaccattcctgaagagtgcgttgaaccaacaaaggactacattaatggcgaac

SEQ ID NO: 177872 - DNA, 259 bp, Glycine max
cactcacctgcctcttcctcacccctttctccacctaacgagtaaggaaaaatggcgcgtaagaagatcagagagtatgactcaaagaggttgttgaaggagcactttaagagactttctggcaaggagttgccgatcaagtctgcacaaattactgcatcaactgatttcactgagctacaagagaaggaaccctggctttcatcttctaaattggttgtgaaacctgacatgttatttggaaagcgtggcaaaagtg

SEQ ID NO: 177873 - DNA, 263 bp, Glycine max
atcatagggcattgaaatcagcagacaatgttagacaacaacttgtgcgaatcatggctcggtttaacctgaagttatgcagcactgatttcaatagccgggactactatgtcaacattagaaaggcaatgctagcagggtattttatgcaggtggcccatctggagcggccaggacattacttgacagtgaaagacaaccaggtggtgcacttgcatccatcaaattgcctggaccacaagccggagtgggtaatatataat

SEQ ID NO: 177874 - DNA, 259 bp, Glycine max
attggggacgctgccaagaatcaggcagctgtcaacccagaaaggaccatctttgatgtcaagagacttatcggaagaacattcgaagataaggaagttcaaaaagacatgaagcttgttccttataagattgtaacaaggatggaaaaccttacattcaggtgaaaattaaggatggtgagaccaaggtgttcagccctgaggaaatcagtgccatggttctgatcaagatgaaggaaactgcggaagcattcctcgg

SEQ ID NO: 177875 - DNA, 262 bp, Glycine max
caattgcaagaatggcacttcgttgcttggtgatgtccctttctgttctcttcactcttggtcttgcgagagaaagccatgccagagacgaagatttttggcatgctgtttggccaaacactcccattccaagtcattgcgagatcttctaaagcctggccctgcaagtgttgaaatcgatgaccaccctatgcaaattgaagaaacacagtacccgaaaaccttcttctataaagaagaccttcatccaggcaaaacaatg

SEQ ID NO: 177876 - DNA, 268 bp, Glycine max
ctctattcttcaagattcaggtactgcgtttcggaagcagacacagatggctcgtacgaagcaaaccgctcgtaagtccacaggaggaaaggctcctaggaagcagcttgcaaccaaggctgcacgtaagtctgcaccaactactggtggtgtgaagaagccccaccgttatcgtcctggtaccgtcgctcttcgtgagattaggaaataccagaagagtaccgagcttttgatccggaagctccccttccagaggctggttcgtgaa

SEQ ID NO: 177877 - DNA, 158 bp, Glycine max
cagcaacctctggcgatctgtaatatgtatgggaaggagcaagatgtgtcgttgggagcgaacaagttccccgagagacagccgattgggacggcggcgcagagccaagacgacggcaaggactaccaggagccggcgccggcgccgctggttgaccc

SEQ ID NO: 177878 - DNA, 161 bp, Glycine max
tactcattctccatacctcaacgaagaggttaaagagacggcaacactttggcgtccgccttgaccgagcagagcttcgtcttggccctcgattttgccctaaactactctcagtcacaacagacaccgtcgtcgtcgtcgtcgtcatcaatggcaccgaa

SEQ ID NO: 177879 - DNA, 168 bp, Glycine max
  unsure (1)..(168): unsure at all n locations
cgaaatctggtgccgntgtaactgcagaagcggctcgcagccagcgtcctcaagtgtggcagaggaaaggtttggcttgaccccaatgaagtcaacgaaatctccatggctaattctcgccaacacataaggaagctggttaaggatgggtttattatcaggaagccc

SEQ ID NO: 177880 - DNA, 166 bp, Glycine max
gtgcttgacaccgttcaatcagtgaaatggccaaggaagatgtgtttgagctcctcgggaacgttcctctgctacagaggcttcctggctcgtctgtaaggcagatatctgagcttgtgattctcaaacactatgagccgggagagtatgttgttcgtgagggaga

SEQ ID NO: 177881 - DNA, 169 bp, Glycine max
ggataatggggcccacatatatttctgtggtctgaaagggatgatgccagggatccaagatacgctgaagaaggttgctgagcaaagaggagaaagttgggaagagaagctttctcaacttaagaagaacaaacaatggcatgttgaagtctattgagattctctagtt

SEQ ID NO: 177882 - DNA, 168 bp, Glycine max
ggctcgacctcgacgacactgaaacattccaagatgcaaatctatgttaagacactcactggtaagacaatcacccttgaggtggagagttcagataccatagataatgtaaagtccaagattcaagacaaggaagggatcccaccagaccagcaacgtctcattttt

SEQ ID NO: 177883 - DNA, 174 bp, Glycine max
agttcggcgcgatttcagtgagtgatcggtgttcacttgatctcatcataatcgtcagcgtcaattgaagaagatgccgatcagaaacatcgccgtcggaaggcctgaagaggcgactcaccccgacacgttgaaggcggctttgcgctgagttcatctcaaccttcatcttcg

SEQ ID NO: 177884 - DNA, 162 bp, Glycine max
cgttacgggaattgcagattccgttcaagatccatatcgtgaaggatcatgacatgaaggagaggctttgcttggaggtggagaggcttgggctgagtgctgttattatggggagtagaggctttggcgctgtgaggcgtggcagcgatgggaagcttggga

SEQ ID NO: 177885 - DNA, 163 bp, Glycine max
gctagtttatcgtgaggagaatatgaagttgtctgtcttctttgttgctgcagtagttttggtagcatggccatgccatggcgcaggctaccaaaggttccctctccgaatgaaaactggctatggtgagcgttcttcggaggtaaaatgcgcaagttttagg

SEQ ID NO: 177886 - DNA, 164 bp, Glycine max
atgtatcagaggccattcatgaaggggaaactttacattcacttcactgtggagtttccagattctctaaaccctgctcaagttaaggccttggaggctgttctgccaccaaagccttcttcacaattgacagacatggagctggatgaatgtgaggaaactac

SEQ ID NO: 177887 - DNA, 155 bp, Glycine max
ctcgagccgttccacttgtaatcgtaaatgctttgctagaagaagagacaaagtgtgtctgtgtgtgtgagagagagattaatggctggctcgtgggcacggcgttctctgattgttctaggcatcatttccttcggatgtctatttgcgatttc

SEQ ID NO: 177888 - DNA, 166 bp, Glycine max
caaatggtcgtccatttcctcctctatttaacttcaaacaggaattatctgaagcatctccagtgcttgttaacaaattgatacctgaccacgtgaagcggcaaatagggctgcaatttgttcctccagcaggatcatgatgatgagctttaggggggctttagtg

SEQ ID NO: 177889 - DNA, 167 bp, Glycine max
tttccattcgttcaccgccccaatctctgcagcgccttcgatctagaaaacatgactaagagaacaaagaaggctggcattgttggaaagcacggtacccgttatggtgccagtctgcgaaagcagattaagaagatggaagttagtcagcacagcaaatttttctg

SEQ ID NO: 177890 - DNA, 170 bp, Glycine max
attttacactcttttcttcttctcgttgttgcttcgctgttgaatcatggatcagaaggtcgatttcagcgctccccattccatgggaaccactatcatcggcgttacttacaacggcggtgtcgttctcggagccgactctcgaaccagcaccggagtgtatgttgcca

SEQ ID NO: 177891 - DNA, 160 bp, Glycine max
gagtttgttgtgagctataagctagtttatcgtgaggagaatatgaagttgtttgttttctttgttgctgcagtagttttggtagcatggccatgccatggcgcaggctaccaaaggttccctctccgaatgaaaactggctatggtgagcgttcttcgg

SEQ ID NO: 177892 - DNA, 161 bp, Glycine max
ctcattaattgcaagaatggcacttcgttgcttggtgatgtccctttctgttctctacactcttggtcttgcgagatcaagccatgccagagacgaagatttttggcatgctgtttggcgaaacactcccattccaagttcattgcgagatcttctaaagc

SEQ ID NO: 177893 - DNA, 163 bp, Glycine max
ctcgagccgattcggctcgagaaaaaatttctagagcgagaaagtgagaggagagagaaagcagctgatcctccacggcctccaccaaggaacgcgaaaactttgtctacaccgccaagctcgccgaacaagccgaacgctatgaagaaatggtggaagcaat

SEQ ID NO: 177894 - DNA, 170 bp, Glycine max
ataagacagaagatggcaggaaagaaaatcccagatgtgttgctgaattcaggacacaaaatgccacttataggcatgggcacttcagtggagaatcgtccatcaaatgagacccttgcttctatctatgttgaagccattgaggtgggttaccgtcattttgacactgc

SEQ ID NO: 177895 - DNA, 161 bp, Glycine max
gaaggcaagatgtcgaagagaggacgcggtggttcggcggggaacaagttccggatgtcgctgggtctgccggtggcggcgacggtgaactgcgccgacaatacgggggcgaagaacctctacatcatatcggtgaaagggatcaaagggcgtttgaaccg

SEQ ID NO: 177896 - DNA, 159 bp, Glycine max
gtttgttgtgagctataagctagtttatcgtgaggagaatatgaagttgtttgtcttctttgttgctgcagtagttttggtagcatggccatgccatggcgcaggctaccaaaggttccctctccgaatgaaaactggctatggtgagcgttcttcgga

SEQ ID NO: 177897 - DNA, 162 bp, Glycine max
tctgtctatctctcgttgtagcgtacgcagcagttgaatttggaaaacaagatgtctcaccgcaagttcgagcacccgagacacggttcccttggctttctcccaaggaagcgagcttctcgtcatcgcggaaaggtgaaggctttcccaaaagacaatcct

SEQ ID NO: 177898 - DNA, 154 bp, Glycine max
ctctctcttgcaaaacctaattttcatttcttccctcaaatttcaaaatgcgtgagatccttcacatccagggtggccaatgcggcaaccagatcggcgccaagttctgggaggtggtttgcgcggagcacgggatcgaccctaccggaaggta

SEQ ID NO: 177899 - DNA, 160 bp, Glycine max
aaaacataataatgggttcacaaaattgtatggataggaagcactatgttctggtgcatggggcatgccatggagcttggtgttggtataagctcaagccacgcttggactctgcaggccataaggtcacagtacttgaccttgcagcttctggaaccaa

SEQ ID NO: 177900 - DNA, 162 bp, Glycine max
gaagcacacgtgttcaaggctgatattccagggctgaagaaggaggaagtgaagctggagattcaagatgacagaattcttcagataagtggagagaggaacgttgagaaggaagacaagaacgacacgtggcaccgcgtggagcgaacagtggtaagttca

SEQ ID NO: 177901 - DNA, 163 bp, Glycine max
cttgacaaaatggccgtaacagaagcaaacctaaagaaggctggcttccacacatgggagcagttaattctcaaggatccacatcttatcactccaaatgcactttcatacaaatcagcaatgagagagaatctgttgaggcagggatacagaattgttggaa

SEQ ID NO: 177902 - DNA, 153 bp, Glycine max
ccacagaggacccaattccttctctagttcaaggtctaccggctggatctctatggctgttgcagttaacgtttctcggtttgaaggcatacctctggcgcctcctgatccaattctaggagtttctgaggcatttaaggtggacaatagtga

SEQ ID NO: 177903 - DNA, 161 bp, Glycine max
ggtttcagtgagtgatcggtgttcacttgatccttcataagtcgtcatcatcatcatcatcatcaccgttgattgaagaagatgccgatcagaaacatcgccatcggaaggcctgaagaggctactcaccccgacacgttgaaggcggggttggctgagtt

SEQ ID NO: 177904 - DNA, 161 bp, Glycine max
ctagaaacagtgtgatgaaaatgaaggtccttgttttcttcgttgctacaattttggtagcatggcaatgccatgcgtacgatatgttccctctccgaatgaacactggctatggtgcccgtactccggaggtgaaatgcgcaagttggaggcttgctgtg

SEQ ID NO: 177905 - DNA, 163 bp, Glycine max
tctgtgtatttccctacctctcccttcaagatgcagatcttcgtcaagaccctcaccggcaagaccatcacccttgaggtggaaagctctgacaccatcgacaacgtcaaggccaagatccaggacaaggaaggaatccccccggaccagcaacgtctcattt

SEQ ID NO: 177906 - DNA, 116 bp, Glycine max
agtgtggcagaggataggtttggcttgaccgcaatgaagtcaacgaaatctccatggctaattctcgccaatccataaggtagctggttaaggatgggtttattatcaggaagccc

SEQ ID NO: 177907 - DNA, 160 bp, Glycine max
cttagccatatctttacttcccaaaacttgctctacaatgagtttccttcgttcttttgcaagaaacaaggatatatcaaaagtaggacgcagaggtatccattgcatgcagaaactatgtgcagaaaaaatatctcctgattcactagagaaggcccaa

SEQ ID NO: 177908 - DNA, 160 bp, Glycine max
  unsure (1)..(160): unsure at all n locations
gaaattagcgtgaaaaatgttgggtgtgttcagcagctccatagtgtcgcccccggaggagctcgttgccgccggctnccgtacaccgtcgccgaagatgacggcggcggcgctgcggaagtggttcgaggagaagaacccctccgcagtgtcggtggag

SEQ ID NO: 177909 - DNA, 293 bp, Glycine max
cttcaagaaagccaaatctgttttaatcggcaaggttgactgtgatgagcacaagagtttgtgcagcaaatatggagtctctgggtacccaacattcagtggtttccaaaaggatctcttgaacccaaaaagtatgaagggccacgcactgctgattcacttgctgagtttgtaaatacggaaggaggaacaaatgtgaagattgctacagctccttccaatgtagtggtgcttacatctgaaaattttaatgaggttgtcttagatgacaccacagatgtcttggttgagtt

SEQ ID NO: 177910 - DNA, 287 bp, Glycine max
ctctctccaacaaccacaatggctctcttgggcgccgcctcctcctccgctcgcatcattccctccgtctcactctcttcctcttctcgctcttcttctcactctcatcctcttcttccaaactccaatgcttgcgctcctctcctcgtatttcgcacctctttctcaatcagcgaagagcggaggttcgcgtttcgagtggaggatacggaactgtgtcggcaccgaagtcagttgcgtctgatcctgatcagttgaagagcgccagagaagatatcaaggagctt

SEQ ID NO: 177911 - DNA, 280 bp, Glycine max
ggcctcttcagtgatggcatctgtggccctcaaacctgcccctttcactgttgagaagtcctcagttagaggccttccctccctctcaagaactcctcttcattcagagttgtggccagtggtggcaagaagatcaagactgacaagccttatggaattaatggtggcatggctttgagggaaggagttgatgcatctggcaggaaaggaaagggaaagggcgtttaccagtttgtagacaaatacggtgctaatgtcgatggttacagtcctatctacg

SEQ ID NO: 177912 - DNA, 279 bp, Glycine max
gcgtattgaaggaccgcaacaaaccaataatcttcaccatggcaaggcttgaccgtgtgaagaacatcacggggcttgtcgagtggtcgggaagaacgcacgcctccgcgagttggtgaacctggtggtggtggctggagacaggaggaaggcgtcgaaggacttggaagagaaggccgagatgaagaagatgtatggcctcatcgagacctacaagttgaacggccaattcagatggatatcctctcagatgaaccgtgtgaggaacggagagctcta

SEQ ID NO: 177913 - DNA, 218 bp, Glycine max
  unsure (1)..(218): unsure at all n locations
ggtttaaacgtgaagtcacagcaaatcaaacagcctaacttcaacgaggtatcaacgtcacagttcaagagaagaagagagggaaaaaccgattaccgtgccaggattcggttgattaatcaggacaagaacaaatataacanccgaaatatcctttgttgtcgttcagcacaagacatgtgacaatatatcgtacatgcgggaatgtctgtgacata

SEQ ID NO: 177914 - DNA, 281 bp, Glycine max
agcagaacgaggagaagcagaaggagcaaaagcaatggcgccgaagaagccgagaaccacgacaaggaaccctgatttggttaggggattggcaagtattcgaggtcgcagatgtaccacaagaggggcatctgggccatcaaggccaaaaacggtggcgttttgccccgccacgatcccaagcccaagcccgaggccccggcccagaagccgcccaagttctaccccgcggacgatgttaagaagcccctcgtcaacaagcacaagcccaaacccgcgaa

SEQ ID NO: 177915 - DNA, 283 bp, Glycine max
tccatctcttgtttcttgctttctttcttcaccatgtcacttgctgggaaaatcaccactgaaatcggggttcatgcaaccgctacaagtggttcaacctcttcgcaacacaactccatcatgttcaaaacctaactgatagagtgcatggaaccaagctgcatcaaggtgaagactggcatcacaacgagacagtcaagcactggacttataccatagatggtaaggttacaacatgtctggagagtattgaatccattgatgaccagagcaaaacaatcac

SEQ ID NO: 177916 - DNA, 262 bp, Glycine max
aacgaatcgaaaaaagaaagatcatggcgatggcaaacttggctcgacggaagggttacgccgtcgttttgtcgtcgaggtcgtcgctttgtctacacggtggagggggttcgcgtccggatctgacgaaaacgacgtcgtggtcatcggcggcgggtccggcggctcacgtggcggccattaaagcgggcactgggtctgaaaaccattgcatgaaaacgtggcatttcggcggtactgctcaagtcgatgctcccttcca

SEQ ID NO: 177917 - DNA, 286 bp, Glycine max
gagtttgttgtgagctataagctagtttatcgtgaggagaatatgaagttgtttgttttctttgttgctgcagtagttttggtagcatggcatgccatggcgcaggctaccaaaggttccctctccgaatgaatcctggctatggtgagcgttcttcggaggtaaaatgcgcaagttttaggcttgctgtggaagcacacaacatccgagcctttaaaaccattcctgaagagtgcgttgaaccagcaaaggactacattaatggcgaacaatttagatcagactc

SEQ ID NO: 177918 - DNA, 285 bp, Glycine max
agactccccacattcaccaaagctcaatctgaaagtctcaaaggttcatatgattttcttggtataaattattacacctcaaatttcgtggatatgctccaccaaccaccactaacaagacctatttcactgatatgctagccaaactttcttcgaccaggaatggtgtacccattggcacaccgactcctctgagctggctctttatctatccggagggaatttataagctcatgacatacataagggacaactacaataatccaccagtgtacattaccgaaa

SEQ ID NO: 177919 - DNA, 282 bp, Glycine max
ctcgagccgcttctcagcagcttcggctagggttcagaaacgaaaaagggttcggtgttctgttcgcgatgagagccaagtggaagaagagcgtatgaggaggttgaagaggaagcgccgaaagatgagacagagatccaagtagtgcgttaaacctagtttgtttctgttgcttttacaattgcttatgttgtcgaatgggacacccagttgttagtggcactggtttctcctttttgatgtttgatacattttgttggattcaagtagtttatgttcgtc

SEQ ID NO: 177920 - DNA, 283 bp, Glycine max
ttcacacagtaacttggacaccaactcactctctcaccaacaaaacaaaatccaatggcgccgtctttcgcaatcaacggtggtttccccgcggcagacacactcctccttccgtcacccgccgaatcgccgccgtctacagcgaggtccaaaacagccgcatcgaccacgaactccctctcccctccgttctcaaaaaccctttcatcatcgtcgacggtccccaaagctccgccgccggcaaccctgaggagatcgcgaactgttcccgaaactgttcggg

SEQ ID NO: 177921 - DNA, 275 bp, Glycine max
cgacgtcgtctcccaaaggcgttgtccactgccaccgtggaacgtttattgttgcagtggactctcttattgattgggcggttccgagaacccggtttatctctggacgcttccgatgttccacgctaacggctggagcttcccgtatgggattgctgccgtgggtggaactaatatctgtgtccgcaagttcgacgctgagattgtttactctctcataaaacgccatcacgtgactcacatgtgcggcgcgccggtggtgctcaacatgttaa

SEQ ID NO: 177922 - DNA, 156 bp, Glycine max
tgttgatcgagataactagaaacagtgtgatgaaaatgaaggtccttgttttcttcgttgctacaactttcgtagcatggcaatgcctgcgtacgatatgttccctctccgaatgaacactggctatggtgcccgtactccggaggtgaaatgcgc

SEQ ID NO: 177923 - DNA, 276 bp, Glycine max
cttgaatcacttggcatcgcttctcctctctcccaagacagaatcatcaatggcgattccacacgaagacgatctcaaagacgagaagaccctcgacctctcgacgaggatgacatcgccctcctcaagacctacggtttgggaccttactccacaagcataaaaacggcggagaaggaaatcaaagatatggccaagaaagtgaatgacttatgtggtataaaggagtctgatactggtttagctgcaccaagccagtgggatcttgtttctgat

SEQ ID NO: 177924 - DNA, 279 bp, Glycine max
catagataagccttcctctctgcagagtgcagagctttctctccccgttgcttcattcattctcaacaacaaaccaatctttcttagaaatgagggggggcttgtggcaacttgggcaatcgatcactcgccgtcttgcccatggagataagaaggctgttgctcgtcgatgttttgcctcagaagctgagctgaaaaagacagtgtttcatgacttccatgttgctcatggtgggaagatggttccatttgctgggtggagcatgccaatccaataca

SEQ ID NO: 177925 - DNA, 279 bp, Glycine max
ctgactcatgcacgagattgaactgaaaactgcacctgctgattttcgttttcctaccacaaatcaaaccagacattgtttcactcgtacatagagtttcacagatgcttggcagcaaagggtgaaaactctggtgaatgtgagagatttgctaaatattaccgctccctttgcccgggtgaatgggttgaaaggtggaatgaacagagggagagtgggacttttccaggacctctttgaaatcatgtggcacttggatatccttctgaggcatgagaa

SEQ ID NO: 177926 - DNA, 284 bp, Glycine max
caaaggctctctcacgcagtcgcagtgagtgacaaggaaaaccctaattgcggtattctcagtgccttcgagagaaagaaaaaatggcaataatcttgttctccgtggcaccatgcgcgcccacaccgacgttgtgacggcgattgccactcccatcgacaactccgacatgatcgtcaccgcctcacgcgacaaatccatcatcctctggcatcttaccaaggaggacaagacttacggtgtcccccgccgccgcctcaccggccattctcattttgtccagg

SEQ ID NO: 177927 - DNA, 280 bp, Glycine max
gtctctccgcagcagccacacttcttcgccgtttcagctgaagagccatccgcaggtaagcaatggttaagcataataatgttatccccaagggcacttccggaaacactggcaaaactatgtgaagacttggtttaatcaaccagcccgaaagaccagaagacggttggctcggcagaagaaggctgtcaagattttccccaggcctactgctggatctctcaggcctattgttcatggccagactctgaaatacgacatgatagtcagagccgggaga

SEQ ID NO: 177928 - DNA, 284 bp, Glycine max
tgttgaggttttttgtagcagaattcagtgcggtgtgttgtagcagcgattagaaggaaggaggaaagatgaacacagacatcactgcacgacgaagccagagtacccagtcattgatcgcaaccctcctttcaccaaagtcgtcggcaacttcaacaccctcgactatctccgattcgtcacaatcaccggcgtttccgtcaccgtcggctacctctccgggattaagcctggaattaggggtccttcgatggtgacagggggtttgatcggtgtgatgggtg

SEQ ID NO: 177929 - DNA, 276 bp, Glycine max
gcgctctctctctctgtctcctacgcttcgttttgccccttttgttgccctaatttcaaccatgcctcgccgtagctccggtggaagactgaccgtcctgctcctcgggcagatcctcgtcctgctccagttcaccatgctcctcctccagcccctgctcagagtggtggtggatctatgcttggtggcattggttcaaccatagctcaaggtatggcttttggcaccggaagtgcagtggcacacagggctgtggatgcagtcatgggtcctcgt

SEQ ID NO: 177930 - DNA, 282 bp, Glycine max
ctcttattgttttcttcatatcttccttgtcactgcccgtgtgtcgccgccatggccaccgtcaccacccaagcctccgccgcaatttccggccatgtacctcgaaatcgaggtttttgaccggctcttccggtaaacttaaccgggaagtgactatgcggccaatggggtgccctccttctgcctctttcaaggttgaagccaagaagggagagtggttacctggcttggcctccccaacttacctcaatggcactcttcctggtgacaatggatttgacc

SEQ ID NO: 177931 - DNA, 278 bp, Glycine max
cgaagaaccaccactaccttatccatttccactcctcaccaagcctcaccatggcctcaaccaacgccctctcttcagcttccattcacgctctcccaaccgccagtctctgaccagaagagcgaaccacaacggaagagtaaattaccgtcaaccgaatagccgtttctccgtcaaagcctccgccaaagagattgcctttgaccagcattcccgctctgctatgcaggccggcattgacaagctcgccgacgccgtcgggctcactcttgggccca

SEQ ID NO: 177932 - DNA, 278 bp, Glycine max
cagctaacaaatatcaaaaagatgtctctgattccaagtttcttcagtggcccaaggagcaacgtgtttgatcctttctcacttgcgtgtgggatcccttcaaggattttcactttcccacttctgtttctgctgaaaattctgcatttgtgagcactcgggtggattggaaggagaccccagaagcacacgtgctcaaggcagatattccagggctgaagaaagaggaagtgaaggtgcagattgaagatgatagggttcttcagataagcggagag

SEQ ID NO: 177933 - DNA, 288 bp, Glycine max
agcagctagcgggtgaaggtttttgcgccgcgccttatatcacaccgtcgtccgaaagcctcgttgccgtgaaaccctagaaagaaccgacgagtaaatcgaggtggaacccgtggagccgcagtcgctgaagaagctaagcttcaagtctctgaagcgcgctctcgatctcttctctcccatccacggacacctcgctagtcccgatgccgaaagcaagaaaatacgcactagccacaaggtgaacgtggagtatggtggaatcaaaagcactgccaatcaacctcc

SEQ ID NO: 177934 - DNA, 254 bp, Glycine max
ctcgtgcctctagggttatcatatctccatttccatttcctctctctctgtttccaagaatcttaagctttgggaaagtcttacccaaccggagcgctgattaccagaaggccgttgagaaggcgaagaagaagctcagaggcttcatcgctgagaagagatgcgctcctctaatgctccgtttggcatggcactctgctggaacttacgtcctgagctcgaagaccggtggtcccttcggaaccataaagcac

SEQ ID NO: 177935 - DNA, 281 bp, Glycine max
cgacaatcctcaattttctgagcagccaaacactctctctctgtctctcgaaaattctcagtttgcagagaaaatctgaatcatgtcgggcaatcgtatgtcgacgatcaccttctgtgtgacatcgaaggtaaccacctcactcacgctgctatcatcggccaagacggcagcgtttgggctcagagtaccgacttccctcagttcaaacctgaggagataactgccatcatgaatgactttaatgagcctggatcacttgctccaactggattgtatct

SEQ ID NO: 177936 - DNA, 239 bp, Glycine max
gccacatagagacacaatacagagtgagttgttgctccttcgccacaactctctgccaacatgggtatctccagagattctatgcaaagaggcgtgccactggtggcaagaagaaggcctggaggaaaaagagagacgtatgagcttggtcgccagcctgctaacactaagctgtcaagcaacaagacagtcagaagatccgtgttagaagtggaaatgtgaaatggaaggcattgaga

SEQ ID NO: 177937 - DNA, 277 bp, Glycine max
atcgagataactagaaacagtgtgatgaaaatgaaggtccttgttttcttcgttgctacaattttggtagcatggcaatgccatggtacgatatgttccctctccgaatgaacactggctatggtgcccgtactccggaggtgaaatgcgcaagttggaggcttgctgtggaagcacacaacatctttggctttgagaccattcctgaagagtgcgttgaagcaacaaaggaatacatccatggcgaacaatatagatcagactccaaaacagttaa

SEQ ID NO: 177938 - DNA, 280 bp, Glycine max
ctcctttgacatgaaaggaatatgggaggctatggaagagtgttacagattgggcttagccaagtctattggtgttagcaacttcgcatcaaaaagctaagccagctcctggaaaatgcaaccatccctcctgctgtcaatcaggtggaaatgagcccagcatggcagcaggggaaactcgaagaattctgcaagcagaaaggaattcatgtgagtgcatggtcaccactaggagcttacaaaagtgctcaaggtacaaatgcagttatggagagcccaa

SEQ ID NO: 177939 - DNA, 280 bp, Glycine max
cttttcttcctctaaaccctaaacaactctttctcttcttccttcgctcgttgttctccctcgcgtagatcgacaatggcggagaagagacgtttgctttccaggctgagatcaaccagctcctcagtctcatcatcaacaccttctactccaacaaggagattttccttcgtgaactcatcagcaacgcctccgatgctttggacaagattcgatttgagagtttgacagataagagcaagctcgatgctcagccagagttgttcattcatattattcc

SEQ ID NO: 177940 - DNA, 278 bp, Glycine max
caccaccctattattacaagtctccacctccacctgaaaagtctccaactccatccccctattactacaagtctctgccatgtgacaaggatgtgttgggtgacaaggtggagaaagttgtggtgtctgatcgtgttgtggattctccttgctgtctcgtgactggtgaatatgggtggacagccaacatggaaaggattatgaaagcacaggcattgagggacagcagcatggctggatacatgtcgagcaagaagaccatggagattaaccctgag

SEQ ID NO: 177941 - DNA, 275 bp, Glycine max
aaaagctggaattttagagcttgataagattattggattcaagctctctcctgattgcttagaagtgcgggcgaggatgtttattctcttaaggattatggcagtgccataaaagatatcagggcattgttaactttggaaccaaattatataacttcaaatgacaagatctcagggaaatacttggttcatctccttagccatgtggtacagcaaaagagtcaggctgaatgctggatgcaattatacgaaccatggtcttctgtagatgatgt

SEQ ID NO: 177942 - DNA, 275 bp, Glycine max
atcctctatatatagttctctggcaattaaggtctcatccaaataagcacaaatgggtagccagagttacttcaaggctttgatatttgccttatagcactaattggatcaactcaagctcaattgcagcttggtttctatgccaaaagttgtccaaaggctgagcaaataattctgaagtacgttgttgagcatatccacaacgctccatcactagcagttgctctcataagattgcacttccatgattgttttgtcaatggttgtgatggatc

SEQ ID NO: 177943 - DNA, 270 bp, Glycine max
cttctaaagcctctccctgcaggtgctgaaatcgatgaactccctaagcaaattgatgatacacagtacccaaaaacattctctataaagaataccttcatccaggcaaaacaatgaaagtacaattcaccaagcgtccctatgcacaaccttatggtgtatatacatggttaacggatattaaagacacctctaaagaaggatatagttttgaagagatatgcatcaagaaagaagcgtttgagggagaagagaagttttgtgcaaaat

SEQ ID NO: 177944 - DNA, 273 bp, Glycine max
gagtgatcggtgttcacttgatccttcataagtcgtcatcatcatcatcatcatcaccgttgattgaagaagatgccgatcagaacatcgccatcggaaggcctgaagaggctactcaccccgacacgttgaaggcggggttggctgagttcatctccaccttgatcttcgtgttcgccggttcaggttccggcatcgcctacaacaagctcaccgacaacggcgccgccactcccgccggcctcatctccgcttccatcgcccatgctttcg

SEQ ID NO: 177945 - DNA, 278 bp, Glycine max
cccgctccctctccatcccatcacaaagacaacagagattcgcattattagcagatcggactcaatcgatgaagttgaagccgcgtgcaacaaaccagaataattgacgcatcatcaattagatcgagctgctagaaatgaaggatgaggacgggcttccgacgaccgccgccacgaagaacgacagcatggattcgagtctgtctgggcaagggaggtacaaattctgggccttcacggccatcttgcttctggcgttctggtccatgttcaccggc

SEQ ID NO: 177946 - DNA, 279 bp, Glycine max
cccatctgcttctcactgatctccattcccattccatggcttccactgaatcatcccccttcaagaaaattcagattcaaagggagacactacatttgacgcatatgtggttggaaaagaggatgctcctggaattgttgtgattcaggagtggtggggtgtggattacgaaattaagaaccatgccgtgaagatttctcagcttggtagtgggtttaaagctcttattccagatttatacagaggcaaggttggtctggatgttgctgaagctcagca

SEQ ID NO: 177947 - DNA, 280 bp, Glycine max
cgaatatctgagagtgagatacagataagaaaaaggaaaccctagctggataggtcaaacatcatcatgtcggacgaagagcaccattcgagtccaaggcagacgccggtgcctccaaaacctaccctcagcaagccggtaccattcgcaagaacggctacatcgtcatcaaaggacgcccctgctaggttgtggaagtttcgacttccaaaactggaaagttcggtcacgccaagtgccactttgttggaattgatattttcactgccaagatacttga

SEQ ID NO: 177948 - DNA, 277 bp, Glycine max
attgaagatccctctgcaccccatggccttcgccttgtgatagaggactacccttatgctgttgatggacttgaaatatgggatgtattaagacatgggttcatgaatatgtctccttgtattacccaacagatgcagcagttcaactagatactgaactacaagcatggtggaaggaagctgtggagaagggtcatggtgacttaaaagaaaagccttggtggcctaaaatgcagacaactgaagatctcattcaatcatgctctattatcgtttg

SEQ ID NO: 177949 - DNA, 267 bp, Glycine max
gaaaagagttatttgtttacgatctcattagtcattacaatctgccaagtctctaatctaagctaacaaatatcaaaaagatgctctgattccaagtttcttcagtggcccaaggagcaacgtgtttgatcctttctcacttgacgtgtgggatcccttcaaggattttcactttcccacttctgtttctgctgaaaattctgcatttgtgagcactcgggtggattggaaggagaccccagagcacacgtgctcaaagcagatatt

SEQ ID NO: 177950 - DNA, 274 bp, Glycine max
attcattcatctatggctacccttattgctcccagcaaccactctccccaagaagatgctgaagctctcagaaaggcttttgaggatggggtgctgatgagaacactgtcatagtaattttgggtcatagaactgtgtatcagaggcagcaaatcagaagagtttatgaggaaatttaccaggaggatcttgtgaagcgcctagagtctgagatcaaaggagactttgagaaagccgtgtaccgatggatactggaacctgcagatcgtgatgc

SEQ ID NO: 177951 - DNA, 274 bp, Glycine max
caacacaacaacactctctcttctcgctcttggcttttcgctcttcactcactcccattcattcatttccaccgttcatggatccgtaagcgtgtggggtaacacgcccttggcgacggtggatcccgagatccatgacctcatcgagaaggagaagcgccgtcaatgccgcggaatcgagctcatcgcctccgagaacttcacctccttcgccgtcatcgaggccctcggcagcgctctcacgaacaaatactccgagggcatgccgggcaac

SEQ ID NO: 177952 - DNA, 276 bp, Glycine max
atcgagataactagaaacagtgtgatgaaaatgaaggtccttgttttcttcgttgctacaattttcgtagcatggcaatgccagcgtacgatatgttccctctccgaatgaacactggctatggtgcccgtactccggaggtgaaatgcgcaagttggaggcttgctgtggaagcacacaacatctcttggctttgagaccattcctgaagagtgcgttgaagcaacaaaggaatacatccatggcgaacaatatagatcagactccaaaacagtt

SEQ ID NO: 177953 - DNA, 277 bp, Glycine max
gactctatctctcttcgttttgttcttccttgcgctcctcctcgttcgttcgttctccctcgcgtagatcggcaatggcggagccgagacgtttgctttccaggctgagatcaaccagctcctcagtctcatcatcaacaccttctactccaacaaggaaatcttccttcgtgaactcatcagcaacgcctctgatgctttggacaagattagatttgagagtttgacggacaagagcaagctcgatgctcagccagagttgttcattcatattatt

SEQ ID NO: 177954 - DNA, 275 bp, Glycine max
ctctaatccgctatgagaagctgaaccttcctctgcacaatctccttcaaaaagcttctcatccatggcgacaacgctcatttcgctcaatcgttcatcggcacaccgctcccctcactccctcgccaccacctcccctaccgcaccaggctcgtcgccaccaaagtcctcgtcagcctccacgaaattcccccaatccactccataagccgcaacattgacttcgccggaatcgtgactagagccgaagccttctctacacgctcgccgatgct

SEQ ID NO: 177955 - DNA, 248 bp, Glycine max
cttgcttcgattaggatcagtcaccatgtatcttcagtttgacataaacgataacggtgacaaagttgacaccactaggaaagattcgccgctagggctacctacacaatctgctcatccagcccggttttcacctgatgataaatattcaaggcagagagttcttctgaagaagcgttttggattgttaccgacccagcagccacctcaaaagtattgagtgatatagaagctctactttttaagtg

SEQ ID NO: 177956 - DNA, 299 bp, Glycine max
ctgaaacactcagtagggtttgcggtttcagagtttgtgacgcacgcatccatggccaccaccaccaacgccgccgcagccccgccgcgccagctctcccagaaggaagccgacatccagatgatgttagccgccgacgtccacctcggcaccaaaaactgcgacttccaaatggaacgttacatcttcaagcgccgcaacgacgggatttacattattaaccttgggaagacatgggagaagcttcagttagcagctagggttattgttgcaattgagaaccctcaggatatcattgt

SEQ ID NO: 177957 - DNA, 292 bp, Glycine max
ctgaaacacgccacactcttcttaccatgggcctcctcgatcacttgtgggatgacaccgtcgccggtcctcgcccggagaacggccttggcaagctccgaaagcaccacaccttcgctttccgatctgcctcccgcaagggtacgcatgcgcatgcccttgctgaacttaatttcccaaattcattttagttattctaaaaataatgataataataataacaagaaccgcagcaagaattagttcttatgatctcacgcgatcataaaacgaagcaagatttgtgaggttt

SEQ ID NO: 177958 - DNA, 288 bp, Glycine max
ccccttcatcagagataacttgacaaataaaatcaccatgtctatcatcccaaacttgttcggtggtagacgaagcaacgtcttcgacccattctctctggacgtatgggaccctttcgaggggtttcctttttccacaggtcacgtgccttcctctggtggggaaagcagtgccatagccaacactcgcgtggactggaaggagactccggcggctcacgtgttcaacgttgatcttcccgggttgcagaaggaggaagtgaaggttgaagttgaagatgggagggt

SEQ ID NO: 177959 - DNA, 290 bp, Glycine max
caattatcagatatataaaattcttgcacaaaaagaagcaacgcaaggttgcagaatactacaagaaacaagagaggctccttgaagggtataatgacatggatacaatgactgaaactggttgttttccaggaagtctcactgaggatgaaatgaagcaattagcaagaagtgagagcctggcagttaatgtgtcaaatgcagctaacttggtgctatttgcagcaaaggtttatacttccattgagagcagatcattagcagtcattgcttccactatggattctctc

SEQ ID NO: 177960 - DNA, 287 bp, Glycine max
atcaattccttccacacccttgagaaacccaaaggaaatgggttctctggaagcaatcaagaagccccatgccgtgtgcgttccattccctgcacaaggccatataaacccaatgctgaaactagcaaaactccttcacttcaaaggctttcacataacctttgtcaacactgagtacaaccacaaacgccttctcaaagcgagaggccctgattcccttaatggtctctcttcatttcgttttgagaccctcgccgacgggcttccccagcctgacattgaaggca

SEQ ID NO: 177961 - DNA, 294 bp, Glycine max
acggctcgagcgagtgaagcagcagagggaggagcggcattaaaaatgcagatcttcgtgaaacgcctaacggggaagaccataaccctcgaggtcgaaagcagcgacaccattgacaatgtcaaggctaagattcaagacaaggaaggcatccctccggatcagcagcgtttgattttcgccggaaagcaacttgaagatggaaggaccttggccgattacaacatccagaaggaatcaacccttcaccttgtcctcaggcttcgtggtggcatcatcgagccttccctcatg

SEQ ID NO: 177962 - DNA, 279 bp, Glycine max
caagaaaagaagaggaaaaggagagtggagaggaagaaaaggattgaagttgttgctgtgagaaagagaaagagtgaaatcggagtttgggaaggaaacgcaatcaatggatgtgataaagacgcagcaaatctcatctcgaccaatcgagaaggtggtggttcaccctctcgtgcttctcagcatcgtcgacaactacaacagagtcgccaaagacactcgcaagcgcgtcgtcggcgtcttgctcggctcctccttcaaaggcaccgtcgacgtcac

SEQ ID NO: 177963 - DNA, 284 bp, Glycine max
cgagaatatgaagttgtttgtcttctttgttgctgcagtagttttcgtagcatggccatgccatggcgcaggctaccaaaggttccctctccgaatgaaaactggctatggtgagcgttcttcggaggtaaaatgcgcaagttttaggcttgctgtggaagcacacaacatccgagcctttaaaaccattcctgaagagtgcgttgaaccaacaaaggactacattaagggcgaacaatttagatcagactctacaacagttaaccaacaagtttcttttatgc

SEQ ID NO: 177964 - DNA, 285 bp, Glycine max
ctattatcatccgcagctgcttttattcgcaccgcaaacagtgagccatggccgtcggaaagaacaagcgcatctccaaggggaagaagggtggcaagaagaaggcagctgatccctttgccaagaaggattggtatgacattaaggctccttctgtttttcaagtgaaaaatgttggcaaaaccctcgtctctcgtactcagggtaccaagattgcttctgaaggactcaagcatagagtgtttgaggtctccttggctgatcttcaaggggatgaggatcatg

SEQ ID NO: 177965 - DNA, 294 bp, Glycine max
ccgctctctctctctgtctcctacgattcgttttgccccttttgttgccctaatttcaaccatgcctcgccgtagctccggtggaagatctgcccgtcctgctcctcgggcagctcctcgtcctgctccagttcaccatgctcctcctccagcccctgctcagagtggtggtggatctatgcttggtggcattggttcaaccatagctcaaggtatggcttttggcaccggaagtgcagtggcacacaggcctgtggatgcagtcatgggtcctcgtaccattcaacatgaaac

SEQ ID NO: 177966 - DNA, 297 bp, Glycine max
aaaagagctagggaagaaagcaatttatttgggtgtgccttttattgctgagtggtttagaaacaaagggcactctattaaatctcaagttacagcagcaacaggggcaattgctttaatccaattgcaggaggatatgaaaaagcaactcagttcagaaggggactatactgaagaagagcttgaagaatacatgcaaaatcacaagacattaatgattgactcattgtggaagcttaatgtggcagacattgaagccactctttcccgcgtttgtcaaatggttcttcaagacac

SEQ ID NO: 177967 - DNA, 295 bp, Glycine max
cctcgagccgattcggctcgaggttatttctcagcgcgtaaagcaacgctttgttggtggacaaaaccacgagtggtcgcgcgtacaaggtcaaggacctttcccaggccgacttcggccgcctcgagatcgagctggccgaggttgagatgcccggcctcatggcctgtcggaccgagttcggcccctcccaccccttcaagggggcccgcatcaccggctccctccacatgaccatccagaccgccgttctcattgagaccctcaccgcccttggcgccgaggtccgctggtg

SEQ ID NO: 177968 - DNA, 287 bp, Glycine max
caactctgcttcccctggcaaccttcttcttagttctctccgcttcttatctccagattgctggggcgaaagcacaaccgttgactagtctcaagcttaactctccgatccttcaggagtctattgctaaagagatcaatgaaaatcctgaggcaggatgggaggctgctataaatcctcatttctccaattatacagttgaacaatttaagcgccttcttggagtcaaaccaacgcctaagaaggaactgagaagtacacctgctatatctcacccaaagtcattg

SEQ ID NO: 177969 - DNA, 286 bp, Glycine max
cccaagtgaaagtgagacaaaataaaaatcaaagagcataatgtcagggatcattcacaagattggggagacccttcatgtgggagggcacaagaaggaggaggagcataagggtgagcaccatgctggagaatacaaaggggagcaccatggtgaacacagtagtgagtacaaaggagagcatcatggtgaacacaaagctggagagtaccatggtgagcacacgccagagcacaaagaggggttcctagacaaagtcaaggacaagatccatggtgagggcggc

SEQ ID NO: 177970 - DNA, 280 bp, Glycine max
ctcgcagcaaaaccaagccacccactaacttgtttggtccaagacatggctctgatcctgcatgctaccaaaacaaacaagaatgccttcaagactctgattgcggcagagtacagtggcgtccaagtggaattggcccctaatttcgagatgggtgtctctaacaaaactcctgaatttctcaagatgaatcctattggaaaggttcctgttttggaaacgcccgatggtccagtctttgagagcaatgcaatcgctcgttacgttgctcgactaaagg

SEQ ID NO: 177971 - DNA, 274 bp, Glycine max
aatagtggcctgcaaccaattgaaacattatctgctgttaagtctcagcaaataaaggataataaccctcactttggcattgattgtaatgatgttggcactaatgacatgcgtgagaaaatgtctttgaaactttgatcggaaagcagcaacagctcctactcgctactcaagttgtcaagatgatactgaaaattgatgatgtcatctccccatctgagtactgatatttttaaactcagtcatggtctacgtcaagatgctgaattggtga

SEQ ID NO: 177972 - DNA, 280 bp, Glycine max
ccgtgtacccattggcacaccgactcctctgagctggctctttatctatccggagggaatttataagctcatgacatacataagggacaactacaataatccaccagtgtacattaccgaaaatggcgttgcggaatcaaagaatgactcacttgcaatcaatgaagcccgaaaggatggtattcgaattagataccatgatggccatctcaaatccctgcttcatgcgatcaaagatagagttaatgtgaagggctactatatatggtcattttcagat

SEQ ID NO: 177973 - DNA, 278 bp, Glycine max
ctttgttgtgagctataagctagtttatcgtgaggagaatatgaagttgtttgtcttctttgttgctgcagtagttttggtagcatggccatgccatggcgcaggctaccaaaggttccctctccgaatgacaactggctatggtgagcgttcttcggaggtaaaatgcgcaagttttaggcttgctgtggaagcacacaacatccgagcctttaaaaccattcctgaagagtgcgtcgaaccaacaaaggactacattaatggcgaacaatttagat

SEQ ID NO: 177974 - DNA, 269 bp, Glycine max
ctataagctagtttatcgtgaggagaatatgaagttgtttgtcttctttgttgctgcagtagttttggtagcatggccatgccatggcgcaggctaccaaaggttccctctccgaatgacaactggctatggtgagcgttcttcggaggtaaaatgcgcaagtcttaggcttgctgtggaagcacacaacatccgagcccttaaaaccattcctgacgagtgcgttgaaccaacaaaggactacattaatggcgaacagttgagatcag

SEQ ID NO: 177975 - DNA, 274 bp, Glycine max
cttccttttctcttctctgtctaaggggtgccctgagatcacattgaacaatggtgaaggctgtggccgttcttggcagcagtgagggtgtcactggaactattcacttcgttcaggagggaagtggtccaaccaccgtaactggatctcttgctggtcttaagcctggtctccatggtttccatgtccatgccttgggggacactaccaatggttgcctctcaactggagcacatttcaatcctaataacaaggagcatggtgcccctgagga

SEQ ID NO: 177976 - DNA, 289 bp, Glycine max
cctaactgtatgaagaagaaaggtcggggaatgtccatatttgtctctatactagatggggattaccatgaatgtgctgaagatgccaagactgcttgcaaacaacttagcacctacatcgattacaaaaattgtgaaggtgtggctgagattgttgttgcccctaacatgtctgaaggcttccgtggcattattcagacaatgggccttggcaatctcaagccgaacattgtggtgatgcgttatccagaaatttggcggagggaaaacttgatagaaatccctgcca

SEQ ID NO: 177977 - DNA, 264 bp, Glycine max
caacgtgagacacatggcttccttaagctccttagtgctgctccttgcagctctaattctatcccctcaagttcttgcacactatgagaatctcccagtgtacaagcctcccactgagaaaccaccagtttataagcccccagttcagaagcctcctgtttacaagcctccagttgaaaagccaccaatttataagcctccagtagagaagccaccagtgtacaagccaccagttgagaatgccccagtttacaagcctccagt

SEQ ID NO: 177978 - DNA, 280 bp, Glycine max
ctcttgtttgcttcccaagtctctcgaagcatctttctttctcttcctgcagaagctatccgtgttacttgttcccaagtctccaacaagcaaagtacatggttgatttggaaatccaggtccccagcgcattcgacccgtttgccgaggcgagagaatcagatgcccccggggcaaaggagtatgtgcacatacgaattcagcagaggaatggaaagaagagtctgacaacagtgcaagggctgaagaacgagttcagctacgagaagatcctcaagga

SEQ ID NO: 177979 - DNA, 276 bp, Glycine max
ctacttttggtgaatctgaagagcaagggtattgatggctccagagttcagaaggtgttggaatcagttcacattgcagctaacaaaaacacagttccaggagatgtgtcagctatggttcctggtggtatcagaatgggaactcctgctcttacttctaggggatttgctgaggaggattttgttatggtggcagagttttttgatgcagctgtaaatttagctgtgaagatcaagtcagagacaaaaggatcaaaattgaaggacttcttggcc

SEQ ID NO: 177980 - DNA, 277 bp, Glycine max
  unsure (1)..(277): unsure at all n locations
cgcaggctaccaaaggttccctgtgcgaatgaaaactggctatggtgagcgttcttcggaggtaaaatgcgcaagttttaggcttcntgtggaagcacacaacatccgagctcgtaaaagtattcctgaagagtgcgttgaaccaacaaaggacacgattaatggcgaagaatttagatcagactctaaaacagttaaccatgaagctttcttttatgctagtgaaggcgaagtccatcacaacgacatatttatattcggcatagataacaccgta

SEQ ID NO: 177981 - DNA, 279 bp, Glycine max
ctttgttgtgagctataagctagtttatcgtgaggagaatatgaagttgtttgtcttctttgttgctgcagtagttttggtagcatggccatgccatggcgcaggctaccaaaggttccctctccgaatgacaactggctatggtgagcgttcttcggaggtaaaatgcgcaagtcttaggcttgctgtggaagcacacaacatccgagcctttaaaaccattcctgaagagtgcgttccaccaacaaaggactacattaatggcgaacaatttagatc

SEQ ID NO: 177982 - DNA, 291 bp, Glycine max
gcagaaggagcaaaagcaatggcgccgaagaagccgagaaccacgacaaggaaccctgatttggttagggggattggcaagtattcgaggtcgcagatgtaccacaagacgggcatctgggccatcaaggccaaaaacggtggcgttttgcctcgccacgatcccaagcccaagcccgaggccccggcccagaagccgcccaagttctaccccgcggacgatgttaagaagcccctcgtcaacaagcacaagcccaaacccgcgaaactcagggctagcattactccaggg

SEQ ID NO: 177983 - DNA, 284 bp, Glycine max
ctcgagataactagaaacagtgtgatgaaaatgaaggtccttgttttcttcgttgctacaattttcgtagcatggcaatgccatgcgtacgatatgttccctctccgaatgaacactggctatggtgcccgtactccggaggtgaaatgcgcaagttggaggcttgctgtggaagcacacaacatctttggctttgagaccattcctgaacagtgcgttgaagcaacaaaggaatacatccatggcgaacaatatagatcagactccaaaacagttaaccaaca

SEQ ID NO: 177984 - DNA, 280 bp, Glycine max
ctgtttcttgctttctttcttcaccatgtcacttgctgggaaaatcaccactgaaatcggggttcatgcaaccgctacaaagtggttcaacctcttcgcaacacaactccatcatgttcaaaacctaactgatagagtgcatggaaccaagctgcatcaaggtgaagactggcatcacaacgagacagtcaagcactggacttataccatagatggtaaggttacaacatgtctggagagtattgaatccattgatgaacagagcaaaacaatcacctac

SEQ ID NO: 177985 - DNA, 279 bp, Glycine max
catcgagataactagaaacagtgtgatgaaaatgaaggtccttgttttcttcgttgctacaattttcgtagcatggcaatgccatgcgtacgatatgttccctctccgaatgaacactggctatggtgcccgtactccggaggtgaaatgcgcaagttggaggcttgctgtggaagcacacaacatctttggctttgagaccattcctgaagagtgcgttgaagcaacaaaggaatacatccatggcgaacaatatagatcagactccaaaacagttaa

SEQ ID NO: 177986 - DNA, 277 bp, Glycine max
ctcagccacagtttcggaggagaagaaaatagtcgttcgagatggcccgtacgaagcaaactgctcgtaagtccacaggaggaaaggctcctaggaagcagcttgcaaccaaggctgcacgtaagtctgcaccaactactggtggtgtgaagaagccacatcgttaccgtcctagtaccgttgctcttcgtgagattaggaaataccagaagagtaccgagcttttgatcaggaagctccccttccagaggctggttcgtgaaattgctcaggactt

SEQ ID NO: 177987 - DNA, 278 bp, Glycine max
cttgttccggcaatcgctcacatgtacaaaactgaccgggccaactatgaggccactgcacgcagctggacccagaagtatgccatgggctgatttgtgtttggataatgtatattgaaatggattgcatctatgaaaacttttgtgggtttgcttttcacttcctgttttctgggtaagattatgtctctgttatgaggggctagggaagggaggtgtcttaatttgataaaaaaaataactgtgttcaacaaccactgtgatgtttttatcatgat

SEQ ID NO: 177988 - DNA, 272 bp, Glycine max
cataactagacacagtgtgatgaaatgaaggtccttgttttcttcgttggtacaattttcgtagcatggcaatgccatgcgtacgatatgttccctctccgaatgaacactggctatggtgcccgtactccggaggtgaaatgcgcaagtcggaggcttgctgtggaagcaccccacatctttggctttgagaccattcccgaagagtgcgttgaagcaacaaaggaatacatccatggcgaccaatatagagcagactccaaaacagttaa

SEQ ID NO: 177989 - DNA, 286 bp, Glycine max
cttctagctaacatccccttttcttcttctcacttctctccaagttttttcttcacatttctctgcctttgatctgcacacacaacaacatccctctaaaaaacatagagggataaaataagaacatgaagaaatttgtactcaagtcagatttgccagatgacaaggcaaagcagaaggccctgataacagtttcaacactttcagggattgatgccatctctatggacatgaaggagaagaaatcaacagtgataggcacagttgatccagtgaatgttgtgag

SEQ ID NO: 177990 - DNA, 284 bp, Glycine max
cactctcatagctgtagcggcgacactaagatcggagaaagaatggcgaaaacgacgtcgttgctgctctttacactgctcctcttcggaaccctagctctcatccaggcgaagaaatcgaaggaggatttgaaggaggtgacccacaaggtttactttgatgttgagattaatggaaaagaagcaggtcgtattgtaatgggtctttatgggaaggctgttccaaaaactgcagaaaacttccgagcactttgcacaggggaaaagggaactggtaaaagtgg

SEQ ID NO: 177991 - DNA, 281 bp, Glycine max
acgaatgttcgggatagtcaccgtaaggttagggatagccatgatgggctcatcattcaaagaaacatggccctatttttctctggtggggatagaaaggaactgaagctcagagtcacaggaagaatatggaaggaacaacagcaacagaattcggaagctggggtgtgcatgccaaatctctgtagttgacacgttatttgaaggggaatttttatcgtgtgtttctgacactcttttgagatatatttataccaactttgcgcatgttgtaatagatt

SEQ ID NO: 177992 - DNA, 277 bp, Glycine max
  unsure (1)..(277): unsure at all n locations
ggacctttaagcttcctaatgcgatgtantagattgagtagtagcttgagctctctcaagacttctgtatgagtgtatgaacagctttattgtaattaagatgaagccctgactagctgtaagattattacatgnttaggattaatgagagggaatatgttgaggtagggatagagaattgttggaataattggagagtaatggagtgatatgcttggagagtagagaggtgaaagtaggagctttaagcttcgtaataggatgtagtagattgagt

SEQ ID NO: 177993 - DNA, 274 bp, Glycine max
ccttcaacatccttgctgcttgctatagaaggccatggtgagaaagaaagattgcgccgcaaaatgatggtttttcacaagcttcatgatcatgatcttacgttggaagcagcatggcctcaattatttgttgaccacaaaggaaaatattgggatgtccctgagtctttatctgttgatttgtcatcccttgtgtctgaatctggattgcgatatcactttgggatacataaaaatggtggtaatccccaggcaatgaatgcaaccgatggta

SEQ ID NO: 177994 - DNA, 257 bp, Glycine max
cttttgttctcattctgtgactctgtgcttagttaacgttaacagtgacttaagatggcggattctgcagatgtcacccacgatgttgtgtccctcctctcttctcctcaaagggactttcttcttcgaaacaacggcgatcacgttaaaattgacagcttgaagggtaagaaacttggtttgtatttttcggcatcctggtgtggtccatgtcaaacatttacgccaactttggtggatgtgtacaatgaggttgc

SEQ ID NO: 177995 - DNA, 273 bp, Glycine max
caacatcagtgctggtgttatgaagtcattgaatattccgaggggcgtacgtcgtgtgctcttccgaacattaaatacttacaggcggcttatgtatcagaaggaatttgacacaagctatgtgggattcacagaagatggagcaaattggctagtggagaacactgacattaagcttgtgggaatagattatctatctgttgctgcttacgaccacttgattccagctcaccttgtttttctgaaaggcagggaaatcattctcgtggaagg

SEQ ID NO: 177996 - DNA, 272 bp, Glycine max
cagttattacaaccagcagcaaccgccggtcggagttccgccgccgcaaggttatccgccggaggggtacggaaaggagggatatccaccgccgggatacccgccagccggatacccgccagccggatacccaccgccgggatatccgccacaacaaggctatcctccgccggcctacccggcgcaggggtatcctccgccctacgctcctcaatacgctcagcctccgccccgtcaacaaaattcaactggccctggttgtttggaagctg

SEQ ID NO: 177997 - DNA, 277 bp, Glycine max
cggctcgagatcgagataactagaaacagtgtgatgaaaatgaaggtccttgttttcttcgttgctacaatactcgtagcatggcaatgccatgcgtacgatatgttccctctccgaatgaacactggctatggtgcccgtactccggaggtgaaatgcgcaagttggaggcttgctgtggaagcacacaacatctttggccctgagaccattcctgaagagtgcgttgaagcaacaaaggaatacatccatggcgaacaatatagatcagactccc

SEQ ID NO: 177998 - DNA, 268 bp, Glycine max
ccctccctttcaacaaccatggggtgttggtacatggttaaaggaaattaaagacactactaaagaaggatatagttttgaagagctatgcatcaagaaagaagccattgagggacaagagaagttttgtgcaaaatccttgggaacagtaattggttttgccatttcaaagctgggaaagaacattcaagtactttcaagttcctttgtcaataagcaagaccaatacactgtggaaggagtgcagaatcttggagacaaagcagtg

SEQ ID NO: 177999 - DNA, 273 bp, Glycine max
ctgaaagtgagacaaaataaaaatcaaagagcataatgtcagggatcattcacaagattggggagacccttcatgtgggagggcacaagaaggaggaggagcataagggtgagcaccatgctggagaatacaaaggggagcaccatggtgaacacagtagtgagtacaaaggagagcatcatggtgaacacaaagctggagagtaccatggtgagcacaagccagagcacaaagaggggttcctagacaaagtcaaggacaagatccatggtg

SEQ ID NO: 178000 - DNA, 266 bp, Glycine max
tcactccccatttctctcttctgctcattcctttgactcctcattatcagggaaatggctctcactgggttactcttgttggcctttctcacgatgttctcctctgctcatgcctatggtggagggtggactaatgctcatgccacattctatggagggagtgatgcatctgggacaatgggtggggcatgtgggtatgggaacctctacagccaagggtatggaacaaacactgctgctcctgagactgcactcttcaacaatgg

SEQ ID NO: 178001 - DNA, 277 bp, Glycine max
cgggttttgaagaagaagcagttcaattgatcaactcagatttcagggacctaagtctagctgctaatagactcgcccatcatgccatcaaacttggtggcattggctttggagcctcttttttcggattgtttgctgccattgctgctatttatctgttgattttggatcgtacaaactggaaaacaaatattctcacagcactactcattccatacattttcttcagcttgccttcattaattttcgacgtcttcaggggagagcttggaaaatg

SEQ ID NO: 178002 - DNA, 278 bp, Glycine max
cttttacttctcagcagcttcggctagggttcagaaacgaaaaagggttcggtgttctgttcgcgatgagagccaagtggaagaaccagcgtatgaggaggttgaagaggaagcgccgaaagatgagacagagatccaagtagtgcgttaaacctagtttgtttctgttgcttttacaattgcttatgttgtcgaatgggacacccagttgttagtggcactggtttctcctttttgatgtttgatacattttgttggattcaagtagtttatgttcg

SEQ ID NO: 178003 - DNA, 280 bp, Glycine max
gttagtggcagtagcactactcccttattgtgctctttgttctttatttcttccttactttttgcttcctgcacccatgcctcctcccaggcacctcctccaattgtggatggactttcatgggatttctataggacgagctgtcccatgcttgaagggatagtgagcaagcatctccagaaggtgttcaagaaggacaatggtcaagctcctgccttactcaggatcttcttccatgactgctttgttcagggttgcgatgggtcgatattgttggatg

SEQ ID NO: 178004 - DNA, 281 bp, Glycine max
cttccagtgaaagaaaggcagcgatggaagaagacttcgacatacccggcggcgaggaaatggatctcggcgaagacgaggtcggcgaggagagggagatcggctctggcggcctcaagaagaagctcctcaaggaaggtcaaggctgggaaacccccgaagtcggtgacgaagtccaagttcattacacggggactttgctcgacgggactaagttcgattcgagccgcgacagggattctcccttcagcttcacgctcggacaagggcaagtaattaaa

SEQ ID NO: 178005 - DNA, 281 bp, Glycine max
caaacacaagccaagtgaaagtgagacaaaataaaaatcaaagagcataatgtcagggatcattcacaagattggggagacccttcatgtgggagggcacaagaaggaggaggagcataagggtgagcaccatgctggagaatacaaaggggagcaccatggtgaacacagtagtgagtacaaaggagagcatcatggtgaacacaaagctggagagtaccatggtgagcacaagccagcgcacaaagaggggttcctagacaaagtcaaggacaagatcc

SEQ ID NO: 178006 - DNA, 277 bp, Glycine max
ctctttgtcgcaaagagaagagatctgcctcctttttatcaaatctatctcttcttcaagaatagttgaaaatggggctgtctttcaccaagttgttcagccgactgtttgccaagaaagagatgcgtatactgatggtgggtctcgatgctgcgggtaagaccaccattctgtacaagctcaagcttggagagattgtcaccaccattcccaccattgggtttaatgtggacactgtggaatataagaacatcagcttcactgtctgggatgttgg

SEQ ID NO: 178007 - DNA, 251 bp, Glycine max
gttagcagttttgtagattcaacctcaatttgcagagttacgttctaatatatttacacaagactgataagagaaaatgtctctgattccaagtttcttcggtggccgaaggagcagtgttttcgaccctttctccctcgatgtgtgggaccccttcaaggattttccatttcccagttctctttctgctgaaaattcagcgtttgtgagcacacgagtggattggaaggagacaccagaagcacacgtgt

SEQ ID NO: 178008 - DNA, 199 bp, Glycine max
ccaaggccaacgtagactatgaaaagattgtccgcgacacatgccgcgaaattggattcatctctgatgatgttggtcttgatgctgacaaatgcaaggtgttggtcaacattgagcaacagagcccggatatcgcccagggtgtgcacggccacttcaccaagcgcccagaggaggttggtgctggtgaccagggtca

SEQ ID NO: 178009 - DNA, 281 bp, Glycine max
tgagatcaaccttgcatcagggttagggaatggctgctatcttagctcggaaatcactccttgctcttcgtgcgcgccaattggctgtaagcggtcaagggctgcacagctcccaaaactatggccttcgattaagtgcacactcctactctaccaaaagagaggatgaagaaagggagcaactcgcaaaggaaatttcaaaggattggagttctgtttttgaacgtagcatcaacactctctttctcactgaaatggttcgaggtctaatgctgactctg

SEQ ID NO: 178010 - DNA, 277 bp, Glycine max
ttccttatctatattcacctccatcttaaaacagttcccctagaaacttcgatctgaagatgggtggcattgcatttggacgctttgatgattctttcagtttaacctcaatcaaggcctatattgctgagttccattcaaccttgctctttgtttttgccggtgttggttcagccatagcctatggtaagttgacatcagatgcagcacttatacctgctgggttactggcagttgctatttgccacggttttgcactctttgttgcagtttctgt

SEQ ID NO: 178011 - DNA, 265 bp, Glycine max
gttagtgagagaaagttctctctgcttctgtctcttagactcaagaccctattgcgtgctttgcaatcgaccccgattatggccaacagtaacctccctcgaagaatcatcaaggatacgcagcgtttgctcagtgagccagcacctggaattagtgcgtccccttcggaagacaatatgcggtatttcaatgtgatgatccttggcgcaactcagtcgccttatgaagggggagtcttcaagttggaattattgttgccagaag

SEQ ID NO: 178012 - DNA, 278 bp, Glycine max
atgtctttgaggctgacatagtgtttgtctctgtcaacaccccaaccaaaactcagggtcttggagctggcaaagcagcagatttgacatattgggagagtgcagctcgcatgattgctgatgtctcgaagtctgacaagatcgtggtggagaaatccacagtccctgtcaaaactgctgaagccatagagaagattctgacccacaatagcaagggaatcaaattccagattctatcaaaccctgaattccttgcagagggaactgcaatcaaagat

SEQ ID NO: 178013 - DNA, 274 bp, Glycine max
cgagataactagaaacagtgtgatgaaaatgaaggtccttgttttcttcgttgctacaattttcgtagcatggcaatgccatgcgtacgatatgttccctctccgaatgaacactggctatggtgcccgtactccggaggtgaaatgcgcaagttggaggcttgctgtggaagcccacaacatctttggctttgagaccattcctgaagagtgcgttgaagcaacaaaggaatacatccatggcgaacaatatagatcggactccaaaacagtt

SEQ ID NO: 178014 - DNA, 273 bp, Glycine max
  unsure (1)..(273): unsure at all n locations
caagaatggcacttcgttgcttggtgatgtccctttctgttctcttcactcttggtcttgcgagacaaagccatgccagacacgaagatttttggcatgctgtttggccaaacactcccattccaagttcattgcgagaccttctaaagcctggccctgcacgtgttgaaatcgatgatcaccctatgcaaattgaagaaacacagtacccgatcanctacttctataaagaagaccttcatccaggcaacacaatgaaagtacaattcagca

SEQ ID NO: 178015 - DNA, 256 bp, Glycine max
gctgagggtacagcaattgcagacctgtttaagccggatcgagtcctcatcggaggcagggaaaccccagagggtcaaaaggctattcattctctgaagagtgtttatgcccattgggttcctgaggacagaatcctttgcaccaatttgtggtctgctgaactctcaaagcttgcagccaatgctttcctggcccagaggatctcctctgtgaatgccatgtcggcgctttgcgaggcaactggtgctgatgtct

SEQ ID NO: 178016 - DNA, 234 bp, Glycine max
tcagaaattcggtatcatcaagggtaccatgaccaccactcactcctacaccggtgaccaaaggcttcttgatgcgagccaccgtgacctgaggcgtgcaagggcagcagcactcaacattgtccccacttcaacaggagcagcaaaggcagtggcccttgtcctcccaaccctcaaaggcaaactcaatggcattgcactccgtgtgccaacaccgaacgtctcagtggtgga

SEQ ID NO: 178017 - DNA, 280 bp, Glycine max
ctgcaattcactacttgagagtttgaaaatggtacttgtgctatggtcaagagggactaagaacatggacttcctaaccctcttcactcttctactcttgttattcattcatacagcactctcttctacccaatatcatgatgggaacatcttactcactcatcgtaagatcttccccaaacaggaagctatcacctcgtacgctgtcatctttgatgctggtagcactggtagccgtgtgcatgtcttccatttcgaccagaacttggatctccttcgt

SEQ ID NO: 178018 - DNA, 280 bp, Glycine max
ctgcaagtgttgaaatcgatgatcaccctatgcaaattgaagaacacacagtacccgaaaaccttcttctataaagaagaccttcatccaggcaaaacaatgaaagtacaattcagcaagcctccctttcaacaaccatggggtgttggtacatggttaaaggaaattaaagacactactaaagaaggatatagttttgaagagctatgcatcaagaaagaagccattgagggagaagagaagttttgtgcaaaatccttgggaacagtaattggttttg

SEQ ID NO: 178019 - DNA, 273 bp, Glycine max
gcgtcgctcggcgcggagaagctgattctgctgaccgatgtggcgggaattctggaagatcggaacgaccctgacagcttggtgaagaagattgacataaaaggagtgaagaaaatgatggaagatggaaaagttggtggtggaatgatacctaaggttaattgttgcgttaggtccttggcgcaaggggttattacagcgagtattattgatggtagggttccgcattctttgttgcttgagattttgactgatgaaggtgctggaactatg

SEQ ID NO: 178020 - DNA, 275 bp, Glycine max
gaagagaggaacgaagactgaaaaatggcgtcatggaattcatttccgcttcaagttacctacgaggctctgggttggttcgccttcgtttcctggtccatcagtttctatcctcaagtcatcttgaattttcgcaggaagagtgtggttggactcaacttcgatttcgtggtgctaaatctgaccaagcacagttcctatctcatatacaacgcttctctctacttcagctctgctattcagaagcagtactttgagaaatacggttatggaga

SEQ ID NO: 178021 - DNA, 277 bp, Glycine max
ctcacctgcttcttcctctttttttcatttctcttcaacttcctcttctttcaattctcttcagtctctctccgccttcccaaaatggtgaaccctagatgcttcctcgacgtcagcatcggcggcgagttagaaggccggatcgttgtggagctcttccacgacgtcgttcccaaaactgccgagaatttccgcgccctctgcaccggcgaaaagggcatcggtcccaacaccggcgtccccctccactacaaaggcgtgtgtttccaccgcgtga

SEQ ID NO: 178022 - DNA, 274 bp, Glycine max
gcgtgcttttgtgggggcaaatagtagatagtagatctgtcgcagagcaaagaatcgtcggcgacggcgaggctgcactataaccgcgattaactatgattagccttcgccggagcgtaaacaagatcccggcgaaatcgaagcgattcaaatgccgattggtgaagttcgaggagctgccggagtacttaaaggacagcgagttcatattggactattaccgctctgaatggcccgtgaaggaagccttgtggagcatcttcgcgtggcacaa

SEQ ID NO: 178023 - DNA, 273 bp, Glycine max
ctctgctcgtgcctctagggttatcatatctccatttccatttcctctctctcagtttccaagaatcttaagctatgggaaagtcttacccaaccgtgagcgctgattaccagaaggccgttgagaaggcgaagaagaagctcagaggcttcatcgctgagaagagatgcgctcctctaatgctccgtttggcatggcactctgctggaacttacgacgtgagctcgaagaccggtggtcccttcggaaccataaagcacccctccgaactcg

SEQ ID NO: 178024 - DNA, 271 bp, Glycine max
gccacatgcactgttgacaccattaccacttcaaggccatatcaacccattgttgagattagcaaagctgcttcatctgagaggctttcacataacctttgtccacactgaatacaacattaaacgcttgctcaactcaaggggtcctaaagcccttgatggccttcaagactttcattttgagaccataccagatagtcttccccccacatatggtgatggtgatgtcactgaagacgcagtgtctcttgctaaatcagtgagagagaag

SEQ ID NO: 178025 - DNA, 251 bp, Glycine max
cattcccttcaagtccaagtgattcaatcaaacggttcatgcttaatcaagttgcgaacaacaacaacaacaaaactcaagccaatgtttgtgggttttggtttcatttcattaagatgatctgttactctcttttcttctttttaaaatttaaagtctttgtattttgtatgtaaagatgtaaaattatgattattaggtggtgcatgtgtcgcgtcatgggccaatcctaccctctgcttttaagttgg

SEQ ID NO: 178026 - DNA, 274 bp, Glycine max
gcatataacaagatggcttcttttcatatccttgtgctcgtggttgctatggtcacattgatgatccctacgaatgcaaacctctctccccatttctatgataaagtatgccctcaggcattgccagtcataaagtcagtggttcaacgagcaattatccgtgagcgacgcatcggagcatctcttctcgcgcttgcatttccatgattgttccgtaaatgggtgtgatggatcaatattgctagatgacacccgaaacttcactggcgagaag

SEQ ID NO: 178027 - DNA, 274 bp, Glycine max
cagaagaacaagtagttgagaactaagaaggagaagcaaatggcttcctcaatgatctcttccccagctgttaccactgtcaaccgtgccggtgccggcatggttgctccattcactggcctcaagtccatggctggcttccccaccaggaagaccaacaatgacattacctccattgctagcaacggtggaagagtgcaatgcatgcaggtgtggccaccagttggcaagaagaagtccgagactctttcctacctgccagaccttgatgatg

SEQ ID NO: 178028 - DNA, 271 bp, Glycine max
ggctggaaggattccattgtgactttacaaaccacaaaggcattgcctttgtggtcagaggacttagcaatttcaagcagatgcattgaggcaattgcctcaaaggccttaagccacccatcaaaggtgagtttgtcacacaacgcttcccggagggtgagggatgatgtgtcttcatgcaccggaagcgaaagcttgagacacaaatcaacaagcagaggttggtgggctgaggatttagcagatttgagcatagacttgtattggagaa

SEQ ID NO: 178029 - DNA, 270 bp, Glycine max
agtttgttgtgagctataagctagtttatcgtgaggagaatatgaagttgtttgttctctttgttgctgcagtagttttggtagcatggccatgccatggcgcaggctaccaaaggttccctctccgaatgaaaactggctatggtgagcgttcttcggaggtaaaatgcgcaagttttaggcttgctgtggaagcacacaacatccgagcctttaaaaccattcctgaagagtgcgttgaaccaacaaaggactacattaatggcgaac

SEQ ID NO: 178030 - DNA, 268 bp, Glycine max
gatttgcatctccctgtggtgtctcatgagtatggaaatggtttggctgtggagagtgcttggattgggaccagggattatagtgctcagttggtggttccggccgcggtggagtttgttaaccggtttgaatcagggattgaggggatcaagaagaggaatcatgaggctgttgtggagatgggggagatgctggcgaaggcgtgggggactcggctagggagtcccccgcatatgtgtgctagcatggttatggttggcttgccgg

SEQ ID NO: 178031 - DNA, 209 bp, Glycine max
tttctctctcacttttcaagaatcgtaagctatgggaaagtcttacccaactgtgagtgctgattaccagaaggccgttgagaaggcgaagaagaagctcagaggcttcatcgctgagaagagatgcgctcctctaatgctccgtttggcatggcactctgctggaacctttgacaagggcacgaagaccggtggacccttgggaacca

SEQ ID NO: 178032 - DNA, 274 bp, Glycine max
gtagaactgaacaagggtttctctttctctttctctgtctgcttcttcactttctctcgtttcaatcgaaaaaaatcatgggcagaaaattcttcgtcggtggcaactggaaatgcaatgggaccactgaggaggtgaagaagattgttactactttaaatgaagctaaagtccctggagaagatgttgtagaagttgttgtgagccctccttttgtgttccttccttttgtaaaaagtttgctgcgcgctgatttccatgtctcggcccaaaa

SEQ ID NO: 178033 - DNA, 268 bp, Glycine max
  unsure (1)..(268): unsure at all n locations
gtaggttaaacactcttcttcatcgtcgtcgcaatgggacgtgtgatccgtgcgcacgtnaaggcagcaggctcggtcttcaagtcccacacgcaccaccgcatcggncctgcccgcttccggagcctggatttcggagagcgcaacggctacctgaagggtgtcgtcactgacgtcatccacgatcctggccgtggcgcgcctctcgctaaggtcgccttccgccacccgttccgctacaagaagcagcccgagctcttcatcgccg

SEQ ID NO: 178034 - DNA, 271 bp, Glycine max
gcgaaaccggcaaggtagccagctgggctacatcctttaaattcaacattttcgcacccaacaaatcaaactcagctgacgggcttgccttcttcttggcacccgtcgggtctcatccccaatccgacgatggatttcttggtcttttcaacagtcccttaaaggacaagtctctccaaaccgtggcgattgagttcgatactttctcgaacaaaaaatgggatcctgcaaaccgacacatcggcattgacgtgaactcgatcaagtccgt

SEQ ID NO: 178035 - DNA, 268 bp, Glycine max
ggaaagaatcccaaagttattgagaattctgaaggagctcgaacaacaccatcagtggttgccttcaaccagaaagcggacttcttgttggtacaccagccaagcgtcaggctgtgacaaacccaacaaacactctttttggaaccaagcgtttgataggtaggcgttttgatgattctcaaactcagaaggagatgaaaatggttccatacaagattgttaacactcccaatggagatgcttgggttgaagccatgggcagcagtat

SEQ ID NO: 178036 - DNA, 272 bp, Glycine max
ctcgagccgctcgagccgattcggctcgaggcagagtgttattttcagtatcagcatcaatgcgctccaattcgcagtgggaaacgtgattccagacggacattttggcttacttggatgaagaaaacaaaccccaaactgtctccattcactctctcgccaccggcaagaaagtcatcatctttggggttcccggtgccttcactcctacttgcagcttgaagcacgttcctggcttcattgagagagcagaagagctgaaagggaagggt

SEQ ID NO: 178037 - DNA, 243 bp, Glycine max
gcaaaaacaaaatcccagtatcaaaattcttctctttttttcatatttcgcaaagacatggatttcagagtgatgggtttggagtctccactgttccacacgctgcaacacatgatggacatgtcagaggacggtgcaggagacaacaagacacacaatgctccaacatggtcatacgttcgagacgcgaaagcaatggctgcaacacctgcggatgtgaaggagtatccgatttcttacgtg

SEQ ID NO: 178038 - DNA, 232 bp, Glycine max
gttgtttaaagtgagagacaaagaaagaagaaaatggcaaactttccagttgttgacatggggaaacttaacaccgaagagagagcagcagccatggagattataaaagatgcctgtgagaactggggtttctttgagttggtgaaccatgggatatccattgagttgatggacactgtggagacgctcacaaaagagcactacaagaagactatggagcaaaggttcaaag

SEQ ID NO: 178039 - DNA, 266 bp, Glycine max
ccaaatcgtagatctacggttaaattggtgtagtgtggtaagatgggaggaggatttagagtgcttcacttagttaggccatttctctcgtttcttcctgaagttcaaactgctgacaggaaagtgccatttagagagaaggtcatatacactgtgatctctcttttcattttcctggtttgtagtcagctccctctatatgggatacactcaacaacaggtgctgatccattctattggatgcgtgttattctcgcttcaaaccg

SEQ ID NO: 178040 - DNA, 267 bp, Glycine max
cacagtcttgcgagtcaacacaagttacaacaatggctttctttggtagaattgggaatttgttacgacagacagcgagcaggcaggttagttcaaaattgcgttcgcccccttcattttttcaggctatacgctgtatgtcatctgccccaagcacaaaactgtttattggaggtgtttcatattctactgacgagcaaagcttgagggaagctttttcaaaatatggtgaagttgttgatgctcggataattatggatcgtgaaa

SEQ ID NO: 178041 - DNA, 265 bp, Glycine max
gttaacttcgttttctctctctctcactctttcgaggtaatttgcaatggctgaaccttccaaggtcattcacgttcgaaatgtggggcatgagatatctgaaaatgatttgcttcaactatttcagccttttggagtaataacaaagcttgtgatgttgcgtgccaaaaatcaggctcttcttcaaatgcaagatattccttctgcagttaatgctttacaattttatgcaaatgtccagccaagcataagggggagaaatgtt

SEQ ID NO: 178042 - DNA, 248 bp, Glycine max
attctctgcactttgcagtttcttcttgcttgcattctttgggagttcaggacagataatggcttatgttggcatagatctaagctctcctactcttgcatcagccatgcttaatctcattccagctttcacttttatacttgctctcatttttaggatggaagaagtacattggaaacattccagcagccaagccaagttcttaggaacaatagtatcaattgctggagcatttgttgtgatactgt

SEQ ID NO: 178043 - DNA, 183 bp, Glycine max
ccaaaaccctaccgacaccacactcaatcgaaattcttcattctcttctcatcgatggggcagaagtctctgatctacgcgttcgtgtcgcggggaacagtgattctcgcggagtacaccgaattcagcggaaacttcaactccatcgccttccagtgccttcagaagctccctgccaccaac

SEQ ID NO: 178044 - DNA, 247 bp, Glycine max
tcgcagagtcagagagagagattcactgaaacagagcgcagaagaaaatacataaactaatccagaaaatgagcaacggcgctggaaaggtggtgtgtgtcaccggcgcttccggttacattgcttcctggatagtcaaattcctcctcaatcgcggctaaaccgttaaggccaccgttcgcaacacaagtcatccgaaaaaaatcaaccacttggttggcctccacggagctagggagaggctgca

SEQ ID NO: 178045 - DNA, 258 bp, Glycine max
cgagatcaaccttggatcaggtttagggaatggctgcaatcttagctcgaaaatcactccttgctcttcgtgcgcgccaattggctgtaagcggtcaagggctgcacagctcccaatactatggccttcggttaagtgcacactccttctctaccaaaagagaggatgaggaaagggagcaactcgcaaaggacatttcaaaggattggagttctgtctttgaacgtagcattaacactctctttctcactgaaatgg

SEQ ID NO: 178046 - DNA, 258 bp, Glycine max
actgaaaggacggtttgagcagagtataaaggaatctgctgacaaatatcaaggtgtgaacctgtatctcaagaacttggatgatactatcagtgatgaaaaacttaaggaaatgtttgctgaatatggtaccataacttcatgccaggttatgcgagactccactggaatcggtagaggatcaggctttgttccatattcaactcctgaggaagcatctcgtgctctccgtgagacgaatggtcacaatgattgccg

SEQ ID NO: 178047 - DNA, 214 bp, Glycine max
ctttcttctaaaccctatggccgacgaagccaaagccaaaggcaacgcagccttctcctccggggactatcctgccgccatccaccacttctccgatgccatcgccctggctccctccaaccatgtcctctatatcaaccgatccgccgcacacgggtacctcaaaaactacgcagatgcattagcggatgccacaaagacagttgaagtcaag

SEQ ID NO: 178048 - DNA, 260 bp, Glycine max
catcaagccgaatcggctcgagcaaattagttcattctctttgcgcacttccctacctctccactcaagatgcagatcttcgacaagaccctcaccggaaagaccatcacccttgaggtggaaagctctgacaccatcgacaacgtcaaggccaagatccaggacaaggaaggaattcccccggatcagcaacgtctcatctatcgccggaaagcagctcgatgacggccgtaccctcgccgactacaacatccagaagg

SEQ ID NO: 178049 - DNA, 257 bp, Glycine max
tgtgagctataagctagtttatcgtgaggagaatatgaagttgtttgttttctttgttgctgcagtagttttggtagcatggccatgccatggcgcaggctaccaaaggttccctctccgaatgaaaactggctatggtgagcgttcttcggaggtaaaatgcgcaagttttaggcttgctgtggaagcacacaacatccgagcctttaaaaccattcctgaagagtgcgctgaaccaacaaaggactacattaatg

SEQ ID NO: 178050 - DNA, 252 bp, Glycine max
caaggaggaagggcgcaagaacgacgaccacgtgtccctcgtgaagcactacagatccaaggtcgagaacgagctcacgcaggtctgcgccagcatcctcaacctcctcgactccaacctcgtaccctccgtcttcgccagcgagtccaaggtcttctacttgaagatgaacggcgattaccaccgctatctcgcagagtttaaggttggggatgagacgaaaaccgctgctgaggataccagttgtcttac

SEQ ID NO: 178051 - DNA, 253 bp, Glycine max
ctagggatatacagaggactctaagaggagcaacatcgagcaaaatctcgtgcgaattgctagcaatggcgaggatcaaggtttacgagctgaggcagaagacgaaggctgatctgatgaatcaactgaaggacctgaaggcggacttgccttgcttcgtgttgctaaagtcaccggtgggtgccctaacaagctttccaagataaaggtggtgagcacccacattgcccaggttttgacggtgattactcag

SEQ ID NO: 178052 - DNA, 217 bp, Glycine max
cgctgttgaatcatggatcagaaggtcgatttcagcgactccccattccatgggaaccactatcatcggcgttacttacaacggcggtgtcgtctctcggagccgactctcgaaccagcaccggagtgtatgttgccaaccgagcatcggacaaaatcactgcgctcactgataatgtatacgtgtgtcgccctggatcggctgctgattctcagat

SEQ ID NO: 178053 - DNA, 210 bp, Glycine max
gtttttatcacagaaactagttccatcattttatacatcagggatgttgagaagctcgttctccaatcaccaaggttatataatttactacaaaaaatgataaagaaactatcaggttcagtgttgatccttggttcccagatattagattcagaagatgattgcaaagaagttgatgaaaggttctctgcactattccacacaacatac

SEQ ID NO: 178054 - DNA, 251 bp, Glycine max
ctcatcctccgtaacctccgagctctgcaccgaagaacgaagccatggggaagacacatggaatgggatctgctcgcaagctcaagtcccaccgcaggaggcaaaggtgggctgacaagtcatgcaagaaatcacatcttggaaatgaatggaagaaaccttttgctggttcatcccatgccaagggaattgtccttgaaaagataggtattgaggctaagcagcccaactctgccattcgtaaatgtgcc

SEQ ID NO: 178055 - DNA, 254 bp, Glycine max
aagaaataaaagattaaattatcaaaaacaaaacaagccaagtgaaagagagaagaaaagtcaaagacaatgtcagggctcattcacaagattgaggagacccttcatgtgggaagccacaagaaggaggaggaacacaagggtgagcagcaccatggtggagaatacagaggggagcatcatggtgaacacagtactgaatacaagttctctcacatgttggtgagcacaagccggagcaccatgggaggaga

SEQ ID NO: 178056 - DNA, 256 bp, Glycine max
tttctccatttccattttctctctcacttttcaagaatcgtaagctatgggaaagtcttacccaactgtgagtgctgattaccagaaggccgttgagaaggcgaagaagaagctcagaggcttcatcgctgagaagagatgcgctcctctaatgctccgtttggcatggcactctgctggaacctttgacaagggcacgaagaccggtggacccttcggaaccatcaagcaccctgccgaactggctcacagcgct

SEQ ID NO: 178057 - DNA, 254 bp, Glycine max
taggtgttgagtttgcaaagagtgcagttactattccagctgtgtggaatattcaagtcagcacctggcttcgtcattatgtttaccaaaggcttattcagactgggaagaaacctggtttcattcagctaattgccaaccagaccgttagtgctgtttggcatggcttgtaccctggatacataatattctttgttcagtcagcattaatgattgctggttccagagtcatttacagatggcagcaagccgta

SEQ ID NO: 178058 - DNA, 251 bp, Glycine max
gtttgctacctaaaccctagtctccatacatcaacttgggaggttaaagagacggcaacgttgtgctgtccgccttgaccgagccagagcttcgtcttggccctcgattttgccctgtaaaactaatcccagtcacaacagatataatcaatggcaccgatacagaccaaggctgagaagaagatcgcttacgatgcgaactgtgcgacctagtggaggagtacggccaaatctcgttgtaaatccgacaa

SEQ ID NO: 178059 - DNA, 254 bp, Glycine max
ctataagctagtttatcgtgaggagaatatgaagttgtttgttctctttgttgctgcagtagttttggtagcatggccatgccatggcgcaggctaccaaaggttccctctccgaatgaaaactggctatggtgagcgttcttcggaggtaaaatgcgcaagttttaggcttgctgtggaagcacacaacatccgagcctttaaaaccattcctgaagagtgacttgaaccaacaaaggactacattaatggcg

SEQ ID NO: 178060 - DNA, 255 bp, Glycine max
caaggtttggtcttgttaggttacctctgtgacatttgtgttgttagttcgtagttgcgcgtgacacccagataggatagacagcaggaaaaaaacaaaaaggcgcagatgggtagcacaggtttctcatggaaattggcggatcatccaaagcttccaaagggtaagactgtggctgtggtggtgttggatggttggggagaggccacacccaatgagtacaactgcatccacaaggctgaaacaccctgcatg

SEQ ID NO: 178061 - DNA, 257 bp, Glycine max
ggcttccactgcacatcatcccctttcaagaaaattcagattcaaagagatgacactagatttgacacgtatgtggttggaaaagaggatgctcctggaattgttgtgattcaggagtggtggggtgtggattacgaaattaagcaccatgttgtgaagatttctcagcttggtagtgggtttaaagctcttatcccagaatcaccgcttcatgcgttatctggttgcacttgttacattttgcatctagtctcctc

SEQ ID NO: 178062 - DNA, 242 bp, Glycine max
cgatcaactctttcaaaagggatcagacaaggacaggaaacaaaacgcacaaaggattattgtagcaatggcagaacaaaaccaaaaccagacaactgaagctgcaaggcaccaagaggttggccacaagagccttctccagagtgatgactttgccagtatattctggagaccagtgtctacccaagacaacatggatccatgaacagaactgagagagttgagcagcagaacacccatgg

SEQ ID NO: 178063 - DNA, 270 bp, Glycine max
ttcggctcgagagaatgttacgtatgcagtacagtccttggatgctttcgaaagtctagtacctgattttatgaagccaagaattagtgaggttgatgagctgctggctcttggggtcaacgtgactgtgtacagtgggcaagtagatctcatttgtgcaaccaaggggactgaagcttggcttaaaaaactcgagtggacagggcttcaaaatttcttggagaaagacagaacccccctctactgtggaagtgacaaaacggacaaagg

SEQ ID NO: 178064 - DNA, 251 bp, Glycine max
gttacctctgtgacatttgtgctgctagttcatatatttgcggctgacaccgagaaggaaagcaggaaaaaaacaaaaaggagcagatgggtagctcaggtttctcatggaaattggcggatcatccaaagcttccaaagggtaagactgtggctgttgtggtattggatggttggggagaggccacacccaatgagtacaactgcatccacaaggctgaaacaccctgcatggattcacttaaaaagggt

SEQ ID NO: 178065 - DNA, 267 bp, Glycine max
ttcagctcgaagcctgataaaccataaccgcccgcaccaccgttttcctttgctttgcgttctacaatgtcgaaaaccccagagattattacatgcaaagctgctatttgctggggaataagaaaacctgtgactgtggaagagatacaagtagaccctcccaaagccaccgaagttcgagttcagatgctttgtgccagtatatgctccacagacatctctagcccaaaaggattcccacataccaattttcctatagcacttgga

SEQ ID NO: 178066 - DNA, 249 bp, Glycine max
gttaatagcaatttcgataagaaaagttccaaaattcagctaagagaaaatgtctctcattccaaacattttcggtggccgtaggagcaatgtgttcgatcccttcaaggattttcctttcccaaattccgtctctacttccttccctgagttttctcgggaaaattctgcgtttgtgagcactcgtgtggattggaaggagaccccagatccgcacgtgttcaaggccgatattcccgggctgaagaa

SEQ ID NO: 178067 - DNA, 251 bp, Glycine max
ggtaacgtatgtgttgcatgatttgattggagctgcagtggaatttgcaagtcagtggagaagattaaatatgtccactcaaagtgtggtgaaggagatgaagctgtttggagtgctttattttagattgtttcaaagggagatggttttttctggttcggagagggactgattatttaattgcagctgggacaaagtcaattttcagatttgagatgaagcaaatagatataacatgaaaagatctcgta

SEQ ID NO: 178068 - DNA, 144 bp, Glycine max
caatcttctgatattggttggtttaatgtagcaaggatgtttcctttcgggtaaaagggtcaaaagataatggtggctatggtggatatgcatcataatgtgttggatatcaacagaatcaacagtgttggaggagatagttga

SEQ ID NO: 178069 - DNA, 159 bp, Glycine max
cgaagtttgggctgaccaccgctcagattcttagggttgtgaagaacctggacctcgcgggcatgctggattggctgcgactgacacattttcacaccggttctcagattccctcaacagcgttgcttgacagatggtgtgggcacacgctgcgcagat

SEQ ID NO: 178070 - DNA, 252 bp, Glycine max
ctgaactaattggtaagctacaagatggtaccgcttttttgaaaaagggccatgatgaagaagagaagctgtttgaattcaaaacagatgaggaacaagttgttgatggacttgatagcgctgtattgactatgaagaagggtgaggttgcgttgttgaccattgcacctgattatgctttcggtacatcagagtcccaacaggagttggctgtagttcctcctaactcagccgtgtattttgaagttgagc

SEQ ID NO: 178071 - DNA, 202 bp, Glycine max
gtgagctataagctagtttatcgtgaggagagtatgaagttgtttgtactctttgttgctgcagtagttttggtagcatggccatgccatggcgcaggctaccaaaggttccctctccgaatgaaaactggctatggcgagcgttcttcggaggtaaaatgcgcaagttttaggcttgctgtggaagcacacaacatacgag

SEQ ID NO: 178072 - DNA, 249 bp, Glycine max
acctgagctttttgtgaggattccaaagcatggcttcccttgcagcatccactgctgctgcttcccttggcatgtcagacattcttggaaaccccatcaacctcagtggtgccacaaggccagctccatctgcctctagccctgcctccttcaagactgtggctcttttctccaaaaagaaggctgcacctccaaaaaaagctgcagctgctgctcctgccaatgatgagcttgccaagtggtatggtc

SEQ ID NO: 178073 - DNA, 251 bp, Glycine max
agtgttcaccatacatggactctggcctgactatcatgatggaacctggccgtcctgttgctctggatctagtttcgatccaaaagagatattgacattgactaatagtttagagcagtattggccatcattgagctgtagcaagccatcattatgccatggtgggaaaggaacattttgggctcatgagtgggagaaacatggcacatgctcttgtcctgtgtttcgaactgaatatgattattttgtgg

SEQ ID NO: 178074 - DNA, 226 bp, Glycine max
ctaaaccaaacctctcactcgccgtcgtagggtttgtcctttcgtttagcaacaacaacaatggttgcagccaagaaaaccaagaagacccatgagagcatcaacaacaggctcgctcttgtcatgaagagtggaaaattcaccctcggttacaagacggttctcaaatcacttaggagctccccagggacattgattatcattgctaacaactgcccccctttga

SEQ ID NO: 178075 - DNA, 249 bp, Glycine max
ctgagatatttcccatacatttgaaggggagtgctggaagcttggtggttttggtggcttggctaggagcttgggtagtttcatatactttcaactttcttatgagctggagttctcctggtacattgtttttgtatggtggatgttccctcttaactattctatttgtagcaaaattagtcccagaaaccaaaggaacaactttggaagagatccaggcttgtattagttcatagagatgaaagatca

SEQ ID NO: 178076 - DNA, 253 bp, Glycine max
caagcttgcctggtgatgtgatatttgacaattcatcaggctttagctttacatgtgatttgagtgataacattgctgcaccctggccttcttcatcatcttcatttgcatctatgtcactctgtgcacctgagatgtcattacctgctctcccaacttcttctcagacattagaaaataatggttgtacttctgatggagtgggattgcttgtgcttattttttcatctttcatcttcagtacactgttgta

SEQ ID NO: 178077 - DNA, 247 bp, Glycine max
attgtttttgaggatgttgaccttgacaaggctgctgaatggaccatatttggttgcttctggacaaatggtcagatatgcagtgcaacttcccgccttattgtacatgaaagtatagcaacagaatttttgaatatcattgtgaaatgggtcaaaaacatcaaaatttctgatcccttggaagaaggttgcagactaggccctattgttagtgaaggacagtatgaaaagatattgaagtttatct

SEQ ID NO: 178078 - DNA, 253 bp, Glycine max
ccaaacccctaccgacaccacactcaatcgaaattcttcattctcttctcatcgatggggcagaagtctctgatctacgcgtccgtgtcgcggggaacagtgattctcgcggagtataccgaattcagcggaaacttcaactccatcggcttccagtgccttcagacgctccctgccatcatcatcaagttcgcctacagttgggacgcacacaccttcaattacctcgtcgacaatggctacacatattgtg

SEQ ID NO: 178079 - DNA, 241 bp, Glycine max
gtttgttgtgagctataagctagtttatcgtgcggagaatatgaagttgtttgttctctttgttgctgcagtagttctggtagcatggccatgccatggcgcaggctaccaaaggttccctctccgaatgaaaactggctatggtgagcgttcttcggaggtataatgcgcaagttttaggcttgctgtggaagcacacaacatccgagcctttaaaaccattcctgaagagtgcgttgaa

SEQ ID NO: 178080 - DNA, 239 bp, Glycine max
cttcgttgcttggtgatgtccctttctgttctcttcactcttggacttgcgagagaaagccatgccagagacgaagatttttggcatgctgtttggccaaacactcccattccaagttcattgcgagatcttctaaagcctggccctgcaagtgttgaaatcgatgatcaccctatgcaaattgaagaaacacagtacccgaaaagcttcttctataaagaagaccttcatccaggcaa

SEQ ID NO: 178081 - DNA, 241 bp, Glycine max
ccttttctcaatttcgctctctattgtcatcaattcacacatccaccgttcagttaaaaaccacccaaatccgatggcggcgtcgcggcgtctccgggacctccaatcccaaccggcgaacaagatctgcgtggactgttcccagaagaacccgcaatgggcctccgtatcgtacggcgtcttcatgtgcctagagtgctcaggcaagcaccgcggcctgggcgtgcacatctccttcgtg

SEQ ID NO: 178082 - DNA, 242 bp, Glycine max
tgcaactgaaccaatcaacaactttcttgtattccaaatgatctacaccattacaatcctcatagtcaacaagtgatgaccttaacataaaacaaaacacaatggtaatatgggtatttgggtatggttctttgatctcgaaagctgggtttcactatgacgaacgtattgttggtttcatcaaacgctatcgacgagtcttctaccaaggctctactgaccacagaggaacccctgagttc

SEQ ID NO: 178083 - DNA, 240 bp, Glycine max
  unsure (1)..(240): unsure at all n locations
gactcggtactgatgacttggtatattctgctgggcaatcaaagagacgacattcttccccgacaaatttggagttagaccaattcatgacaatccagatgaaatgactgctgctttgtatctacaagtcagtatagttagccaggctttgatatttgtcacccgttcgcgcactggtccttcatcgaacgncctggattgctgttagtgactgctttcgttattgctcagctgattgct

SEQ ID NO: 178084 - DNA, 239 bp, Glycine max
cgagaattagagatggaaaagagcagagtgcttattgttgggggaactggctacataggaaaaaggttggtgaaggcaagtttagctcaaggacatgaaacatttgttcttcacaggccagagattggtgttgatattgagaaagttcagcttctattgtcactcaaggagcaaggagctaggcttgtttcaggttcatttaacgaccataagagcctagtgaatgctgtgaaactgtt

SEQ ID NO: 178085 - DNA, 240 bp, Glycine max
cgcccccattctcatcctcttctttctctctctaccattgccatggatccctacaagcaccggccatccagcgccttcaattctcccttctggactttatattctgctgctcctatttggatgaacaactcctctttaaccgttggagctataggtccaattctgctggaggattatcatcttgtggagaagcttgcacgttttgatagggcacgtatcccagaacgtgttgtccatgcc

SEQ ID NO: 178086 - DNA, 237 bp, Glycine max
  unsure (1)..(237): unsure at all n locations
agcttaangttaaatactcatgcagtgatggaaccatttgccatagcaaccaataggcatctcagtgtgctccaccctatttataaacttctttatcctcactaccgcgacaccataaatatcaatggacttgctaggcagtccctgattaatgcagatggcattatagagaaatcatttttgcccggaaagtactccattgagatgtcttcatccgtctacaagaattgggttttc

SEQ ID NO: 178087 - DNA, 235 bp, Glycine max
cagaaagacgctttcttgagttgagttaacagcatggagagggaggaagatgttaaggttggagcacagaaattctcagagaggcaagcattggggacaggagctcagggtgacaaggactacaaggaggcaccaccagcacccttgtttgagccaggggagttaaagtcatggtctttttacagagctgggattgcagagtttgtggccacatcttgttcctctacatcactgt

SEQ ID NO: 178088 - DNA, 250 bp, Glycine max
acacatcttaatttctctctgccttgctcatttacacacctctccaacctttcactttcagctttatttgaatccctctctctcctttccaaatggccagcgttgaggttgcacatcaaacaccaacaacagttccagaaaatgaaacaaccgaggtaatcaagacccaggaaacaaccccggaaccagtaccagccactgaggctcctgcaacagaattagcagcagctgaagctcctgctcaagaaga

SEQ ID NO: 178089 - DNA, 244 bp, Glycine max
gtttccgctgttctctttcaagttccaagaaatgtcaattataacacgcagaggcatccgttacatgccaagactagatgcagcaaaagtatctgctgctttgctagaaaaaggccaaaatcgtgtcatagatgcttcacttacacttattcgagaaagagcaaagcttaagggagaacttgtgcgtgctttgggaggtgctaaagcaacttcaactcttcttggagttcctttgggacataat

SEQ ID NO: 178090 - DNA, 239 bp, Glycine max
cgaggcctctgagtctcagtctgacggagctaacctcctatgtcctatgcttcatcatcctcctgcttctcctggaacagatctcctacatactaaaaaaagcttccatcccaggaccctcctttgtacttcccttcataggcaacgctctcccattggtccgagacccaaccaatttctgggacctccaatcctcttttgctaaatccaccccctcgggcttctccgccaactacatc

SEQ ID NO: 178091 - DNA, 237 bp, Glycine max
caagaagtttccaatatgtctctgatttggtggagggtctaatccgccttatggaaggcgaacacgtgggacctttcaatcttggaaatcccggagaatttaccatgcttgaacttgccaaggtggttcaagaaacaatagaccctgatgctaggatagagtacaggcccaacacagatgatgatccgcacaagagaaagcctgatataagtagggctatggatcaacttggctggg

SEQ ID NO: 178092 - DNA, 237 bp, Glycine max
ctgagcagcagtgcagggaagttggtgtgtgtcaccggtgctgccggttatattgcttcatggattgtcaagttcctacttgaacgtggttacactgtcagggccactgttcgaaacccaaatgatcacacgaaggtagaccatttgctaaaacttgaaggtgcaaaggagagactgcacctttttaaggcagatcttttgggtgacaattcttttgactccattgttgagggctgt

SEQ ID NO: 178093 - DNA, 235 bp, Glycine max
gtttgttgtgagctataagctagtttatcgtgaggcgaatatgaagttgtttgtactctttgttgctgcagtagttttggtagcatggccatgccatggcgcaggctaccaaaggttccctctccgaatgaaaactggctatggtgagcgttcttcggaggtaaaatgcgcaagttttaggcttgctgtggaagcacacaacatccgagcccttaaaaccattcctgaagagtgc

SEQ ID NO: 178094 - DNA, 238 bp, Glycine max
cttgatttccttgcctggttcaaagaaactgtgcaatatgctgattttgtggtcctcaagatgaatgcaggcagtgttgaactcaagttcctctctgatatatttgagaatggagctatatgctatgttgatgagttgtttctcaagtgtcccgagaggggaggtgatgccagcaagggaagttgcatggatatttacaaggatctccgaagcaatggtgtctatgtgcatcaatggt

SEQ ID NO: 178095 - DNA, 237 bp, Glycine max
gtaaatcctcacccattttcttcgtagccaaacactctgaaattctcagttatgtcgtggcaagcgtatgtggatgatcacctactgtgtgaaatcgaaggtaaccacctcactcacgccgctatcatcggccaagacggaagcgtttgggctcagagcaccaacttccctcagttcaaacctgaggaaataactgccatcaataatgactttaatgagcctggatcacttgctcca

SEQ ID NO: 178096 - DNA, 248 bp, Glycine max
cgctagttcaattaaatttgcaaaacatggaatttgataatgaagaccattatgcaaaactacttcgagctcaaacccacatatttgatcaaactttcggattcataaactctatgtcccttaaatgtgcaattgatttgtgcatacctgatgtaatacacaagtatggccaacccatgccactctctcaactcattgcttcacttccaattcacccttctaaggcttgcttcattttccgcttgatg

SEQ ID NO: 178097 - DNA, 245 bp, Glycine max
cgagcttctttatatagtaggattgtgtcttccttcatcacactaaacaacttaaaagaagagcatcactgaactaacaaagcaaccctatgtcgaaggtggtttgtgtcaccggagccagcggcgccatcggatcatgggtggtcctactcctcctccagcgtggttacaccgtccatgccaccgtccaagatatcaaggatgaaaatgagacgacacatttggaggcaatggacggcgcaaag

SEQ ID NO: 178098 - DNA, 242 bp, Glycine max
cgcgttctgagtcttttcttcttcgttaccctcttcacatgccttctctctgctaattcccacgatgaccatattttcctaccgagtcaactccatgacgatgactcagtgagttgcactgctaccgacccaaaccttaactacaagccggtgatcggaatcctgacccaccccggcgacggtgcctctggccggctcagcaacgccaccggggtttcttacatcgccgcctcctacgttaa

SEQ ID NO: 178099 - DNA, 240 bp, Glycine max
cgcattggtcgaatgtgtccaattctgcttgaggattatcatcttgtggagaagcttgcaaactttgacagggaacgtatcccagaacgtgttgtccatgccaggggagctagtgcaaagggtttctttgaggtcacacatgacatttctcacctgacatgtgcagatttccttcgagcccctggagttcagacgcctgtaattgttcgtttctcaactgtcattcatgagcgtggtagc

SEQ ID NO: 178100 - DNA, 233 bp, Glycine max
ctttgattgtgcagcctttatgacaacatgtgggaggatgggaattctctagggccgaaggaggtgcataattatttaacccgtgtaatgtataatagacgtaacaagttcaatccattgtggaatgcacttgtacttggtggggtgaaaaatgggcagaagtaccttggcatggttaacatgattggcattaattttgaggacaaccatgtagcaaccgggcttggaaatca

SEQ ID NO: 178101 - DNA, 238 bp, Glycine max
gtttcaaatcttacattcttgaatgctccagcttatagcatacacccagtttattgcagccatgtacatattcacactgtttcaatctctactcctccagaatccccttatactgttggtatagtgccagattcttcctgataatgtgtgtatagaagattgtattgttgccatgggatttgatgcaatttctcttaaaagtggctgggatgagtatggcattgcttatggcaggcct

SEQ ID NO: 178102 - DNA, 242 bp, Glycine max
gtggtttcagtgagtgatcggtgttcacttgatccttcataagtcgtcatcatcatcatcatcatcaccgttgattgaagacgatgccgatcagaaacatcgccatcggaaggcctgaagaggctactcaccccgacacgttgaaggcggggttggctgagttcatctccaccttgatcttcgtgttcgccggttcaggttccggcatcgcctacaacaagctcaccgacaacggcgccgcc

SEQ ID NO: 178103 - DNA, 248 bp, Glycine max
tagagcggtgattctctcacaagcacttcgacttctccgtttctcactagactcacatcgcgcctccatttcgctgcattccctctgcgttctccaacgaggaaactcatgtcgcacactctcgcacgtcccactctcggtctcacacatccttctaacatcgaaacacccaagatactcttccgctctacggatgtcgctctcacggactggaaaggcgacattctggcagtcggtgttacggagaa

SEQ ID NO: 178104 - DNA, 242 bp, Glycine max
gtagtaacagctgctccagtgccttatgtccaagaaattgcaaaggaggcattgaccatagtgcctgagcgttatgttcgaccagttcatgaacgtcctatattatctaactctacacctttacctgaaattcctgtcattgacttgagcaaattgttgtctcaagaccacaaggagcatgaactcgacaggcttcactatgcatgcaaagcatggggtttctttcagctaattaatcacgg

SEQ ID NO: 178105 - DNA, 239 bp, Glycine max
gcaatgaaagcaataagtctctccttcctctgccttataattcttgtgacccttttcgctggtagcattgaaagtgcaccagcaaacgtgaagccaagccattatgctgcacccttcaataggagtgtttttccttctggttttctatttggaataggctctgcagcttaccagatagaaggagcagcagctatagatggcagaggaccaagtatatgggacacctatactaaacagca

SEQ ID NO: 178106 - DNA, 236 bp, Glycine max
ctttttctctaagtctaaggggtgccctgagatcactttgagcaatcgtgaaggctgtggcagttcttggcagcagcgagggtgtcactggaactattttcttcactcaggagggaaatggtccaaccaccgtaactggatctcttgctggtcttaagcctggtctccatggcttccatgtccatgccttgggggacactaccaatggttgcctgtcaactggagcgcatttcaat

SEQ ID NO: 178107 - DNA, 237 bp, Glycine max
ggcattatggggttgacgaatttcgtgctgacagtggcgggtgtaagcgccgtcgttcttctccttaggagtgccgcgaagcaatctgcctccatcttccggcgcaacgtcaagcacattcgcaactggctcgaagaagaaagcgccgcttcatccacgacaatggagaagtccactcccaaagaacttgaatcaaaggttcctccgaaagacattcctaaggaggacaaacattaa

SEQ ID NO: 178108 - DNA, 236 bp, Glycine max
ctgcactcgatcaaacacaaaatggaaaagaatgtggggattctcgccattgacatctacttccctcccgcttgcgttcagcaggaagcattggagactcatgatggtgccagtaaagggaagtataccattggacttggccaagactgcatgtcattctgtaccgaagtagaagatgtcatctcaatgagtttgacagtggttacttctcttcttgagaagtatgggattgatcc

SEQ ID NO: 178109 - DNA, 234 bp, Glycine max
ctcgttttttctcagaaccttctgcggttaaagcaaaaaacaaagagagagagagcgagacaatgatgaagccatcgatgctcagatctctccactccgccgccacccgacgcgcctctcatctcttccgccgtgggtacgcctccgagccggtgccggagcgcaaggtagccgttctcggcgccgcggcgggctcgggcagcctctctcccttccatgaagtcaatcccctcg

SEQ ID NO: 178110 - DNA, 209 bp, Glycine max
ctcgcacgcattgcttcgcctcacaacagcagctgcagcagcaatggctcccaaacgaggtggactggctccggatcttgccgctaagaagatgcctgagaaggtcacgaatccgttgttcgagaagactccgcagcagttcggaatcggaggggcgttgcctccgaagagcgacttgactaggttcgtgaaatggccaaagaatgttc

SEQ ID NO: 178111 - DNA, 236 bp, Glycine max
gcaaagcatccttcatttcaatttctctctctcagcgctttctgcaatcgaacctttcatctccaaagggatccacaggccgaaggagaaatggggctgacattcacaaagcttttcagtcggcttttcgcgaagaaggaaatgcgaattctgatggttggtacttgatgctgctggtaagaccactatcctgtacaagctcaagctcggagagatcgttaccacaattcctacca

SEQ ID NO: 178112 - DNA, 235 bp, Glycine max
cgcattgttcctagccatcatttccttcggatgtctatttgccatttccattgctaaggcggaagccaccaagttagggacggtcatcggcattgatcttggaacaacctattcatgtgtcggtgtttacaagactggccatgttgaaatcatagccaacgaccaaggtaaccgtatcaccccatcgtgggttgctttcaccgacagtgagagactcattggggaggctgccaag

SEQ ID NO: 178113 - DNA, 236 bp, Glycine max
cttctcttcccttttctatctccctctgcaaaaacgaagtaaatgggtcggcttaatctcctacttgtgtggtcactctctttaacacttttccttaattatctacacccaacctctgcccagctcagtccaaaccactatgctaacatatgccccaaccttgaaagcatcgttagacaagccgttactaataagttccaacaaacctttgtcaccgtcccagccacccttcgcct

SEQ ID NO: 178114 - DNA, 238 bp, Glycine max
gatttgttgtggattggatgatggaaaaaccagcaagcccctttcattgaaagggcgcagtgaactgtaattgtgaaaaggttggaagatctggccaaagaaggtgatagccctgtagattcgttcccatggttcgatccttcccagtaaaacgacggcgtgttcgaattctgatcgcttttacgcgagacagggggaccaccctctaagcctaagtattcctcaatgaccgatagcg

SEQ ID NO: 178115 - DNA, 235 bp, Glycine max
gccttgtgccgtttgtgttgttttcgggacgaagaagaagatggtgtcaggttctggaatctgcgcaaagcgggtggtggtggacgcgcgccaccacatgctgggtcgtctagcctccatcgtggcgaaggagcttctgaacggccagaaagtggtggtcgttcgctgtgcagagatttgcatctcgggcgggctggtgaggcagaagatgaaatacttgaggttccctcgcaaa

SEQ ID NO: 178116 - DNA, 240 bp, Glycine max
acttggaatccaaaaatgagagacatcatcagcattcacataggtcaggccgggatgcaggttggcaactcctgctgggaactctactgcctggaacatggcatccagcccgatggcatgatgccaagtgactcctccttcggtgtagcccacgacgccttcaacaccttcttcagcgaaaccggatccggcaagcacgtccctcgcgccgtcttcgtcgatctcgagcccaccgtcatc

SEQ ID NO: 178117 - DNA, 239 bp, Glycine max
ctaaaccaaagcaagaatagtgttctaagagtgagcaacaacttcaaacaccattgtgagaactggcttccaagggtgcacttctcttgtgtctcaacattctcttcttcactgtggtaagctccacatatgtcccatgcaacccaccccctaaaactcctaaacacacacctgtcccaaagccaccttccccaaagcaaccaagttgccccaaagacaccattaagtttggtgtgtgt

SEQ ID NO: 178118 - DNA, 251 bp, Glycine max
ggcattcgcctcgacgttgtgtcggtcgcatttttgttggttcgcgtgagcgagggaagatgtactctagagattcatggggtggtccgttggagataaacgcgacggactcggcaacggaggacgagcggagccggaacctgcaggacgtggacagggcggcgctgtcgcgtcccttggacgagacgcagcagagctggctcctaggccccggcgagcagaagaagaagaagtacgtcgatctcggctgc

SEQ ID NO: 178119 - DNA, 236 bp, Glycine max
gttgattcggatctagagtcttcagtttctcctcgttgttcttcgctttcctgttttcaatttcgattctttcgttaatttaataagatgtttgggagggcaccgaagaagagcgataatacgaggtactacgaaatcctcggcgtctccaagaacgcttcgcaggatgatctgaagaaggcttacaagaaagccgccattaagaatcaccccgacaagggcggtgatcccgagaa

SEQ ID NO: 178120 - DNA, 233 bp, Glycine max
gccggatctgctaaaatacgcttgatccatatgggcctcctcgaccacttgtgggacgacaccgtcgccggcccaaggccggaaaacggtctcggcaagctccgaaaacaccacaccttcactttccgacctagctccggcaaggaaacggagggcgggagcgtgagatcgtacggagacgaaccgtcggaggaagcgacgagagtgacgcgtagtatcatgatcgtgaaacc

SEQ ID NO: 178121 - DNA, 236 bp, Glycine max
cggttttcgaaggcgagaggagtctcacaaaggattgccgcctccttgggaaatttgatctgtctggaattcctccagccccaaggggtacgcctcaaattgaagtgaccttcgaagttgatgccaacggcattctaaatgtgatgcagaagacaagggcactggtaaatcagaaaagatcaccattacaaacgaaaagggacgtcttagccaggaagaaattgagagaatggttc

SEQ ID NO: 178122 - DNA, 234 bp, Glycine max
ctcgagccgtttcactacttgtctcttccctttttctttccagaacaacagaacaacagagcacaaagctccaccaatggcgggttacagagccgacgacgactacgactacctcttcaaggtggtcctcatcggcgactccggcgtgggcaagtccaacctcctctcgcgcttcaccaagaacgagttcaacctggagtccaagtccaccattggcgtcgagttcgccacccg

SEQ ID NO: 178123 - DNA, 242 bp, Glycine max
gaagaaagaagaaaaagaagcgaaactaaagtcagcattcgaaaaagatgagtagcatcggtacaggttacgatctatcggtcaccactttctcccctgatggccgcgttttccagatcgagtatgccgctaaagccgtcgacaacagcgggactgttattgggatcaagtgcaaagatggggttgtgttgggcgttgagaagcttattccgtcgaaaatgatgcttccgggttccaataga

SEQ ID NO: 178124 - DNA, 251 bp, Glycine max
aagaaagaaagaaaaccctagcttaccttttcaactttcaagatgcaaatctttgttaagacactcactggtaagacaatcacccttgaggtggagagttcagataccatagataatgtaaagtccaagattcaagacaaggaagggatcccaccagaccagcaacgtctcatttttgctggcaagcagcttgaggatggacgtacacttgctgattacaacattcagaaggagtccactctacacttggt

SEQ ID NO: 178125 - DNA, 250 bp, Glycine max
gagataactagaaacagtgtgatgaaaatgaaggtccttgttttcttcgttgctacaattttcgtagcatggcaatgccatgcgtacgatatgttccctctccgaatgaacactggctatggtgcccgtactccggaggtgaaatgcgcaagttggaggcttgctgtggaagcacacaacatctttggctttgagaccattcctgaagagtccgttgaagcaacaaaggaatacatccatggcgaacaat

SEQ ID NO: 178126 - DNA, 233 bp, Glycine max
attcgtgaacgctatagaacagcatctcaagtggtccagaatcaaggaaaaatgagctgtttgatgatcaatgatattgatgctggccttggtagatttgggaatactcaaatgacagtcaacaatcaaattgttgttgggactcttatgaatctgtcagacaatcctacaagagtaagtgttggtcaagattggcgagaatcagatgtcacaaacagaattccaatcattgt

SEQ ID NO: 178127 - DNA, 235 bp, Glycine max
aaccaaacaactactcgttgattgaaagaaacagtgtgtgttgtgttgtcttgtgtcggtggcatttttgttggttcgagtgagcgagggaagatgtactctagagattcatggggtggtccgttggagataaacgcgacggactcggcaacggaggacgagcggagccggaacctgcaggacgtggacagggcggcgctgtcgcgtcccttggacgagacgcagcagagctggc

SEQ ID NO: 178128 - DNA, 170 bp, Glycine max
gctggtttaaatccaaatgtcattaagattatagaggagttcccactaagtagcaagctagatactcaagcctatggtgatcatacctgtataatagcaaaagcacatttggagcctaacttaggtgggctcactgttgagcaggcctatccaaacaagaagttgtccat

SEQ ID NO: 178129 - DNA, 218 bp, Glycine max
ccaccccaatcgtagccgtcgcactttgcgttttctgcgtcatctccgattccccgacaatggccacccaaatgagcaagaagagaaagttcgtagctgatggagtgttcttcgctgaactgaacgaggttctgacaagggagttacccgaggacggatactccggcgtggaactaagggttacgccgatgcgcaccgaaatcatcatcagagccccc

SEQ ID NO: 178130 - DNA, 251 bp, Glycine max
gtttcgtcttcttcgtctttactcttttcttcaccgaagcgaaaaagaaaaggcttgacttgagagaaatagagcttcgaatcgaaactcagaattagaaaaaaacacaaatcacaatcacaatggcaaggtacgaccgagcaatcaccgttttctcccccgacggccacctcttccaggtcgagtatgccctcgaagccgtccgcaagggcaacgccgccgtcggcgtccgcggcaccgacaacgtcgtc

SEQ ID NO: 178131 - DNA, 243 bp, Glycine max
ctcattctgtgactctgtgcttagttaacgttaacagtgacttaagatggcggattctgcagatgtcacccacgatgttgtgtcactcctctcttctcctcaaagggactttcttcttcgacacaacggcgatcacgttaaaattgacagcttgaagggtaagacacttggcttgtatttctcggcatcctggtgtggtccatgtcacacatttacgccaactttggtggatgtgtacaatga

SEQ ID NO: 178132 - DNA, 248 bp, Glycine max
cgcagcttgaaacagagcagagcgaccttgaagagctatggctgtcggaaagaataagaggatttccaagggaaagaagggtggcaagaagatagccgctgatccctttgccaagaaagactggtacgatatcaaggccccttccctcttccaggtcacgaatattggcaaaaccctcgtctctcgtacccagggaaccaagattgcatccgaaggactcaaacatcgggtttttgaggtctcattgg

SEQ ID NO: 178133 - DNA, 249 bp, Glycine max
  unsure (1)..(249): unsure at all n locations
acgcacactgtcacaggtgtagcggcgaaactgaggtcgtagaaagaatggcgaaaacgacgtcgttgttgctctttacactgctcctcttcggaaccttagctctcatccaggcgaagaaatcgaaggaggatttgaaggccccccccacaaggtttactttgatgttgagattaatggtaaagaagcaggtcgtattgtgatgggtctttttggcaaggctgttccanaaactgcagaacactttcg

SEQ ID NO: 178134 - DNA, 242 bp, Glycine max
gtttgttgtgagctataagctagtttatcgtgaggagaatatgaagttgtttgttttctttgttgctgcagtagttttggtagcatggccatgccatggcgcaggctaccaaaggttccctctccgaatgacaactggctatggtgagcgttcttcggaggtaaaatgcgcaagttttaggcttgctgtggaagcacacaacatccgagcctttaaaaccattcctgaagagtgcgttgaac

SEQ ID NO: 178135 - DNA, 97 bp, Glycine max
agaaaaccctgtgtcctttgccttctccttgagtaggctcccgaagcaacaacaacaactagtcttttttctctttgcatcgacgatcttcactaag

SEQ ID NO: 178136 - DNA, 250 bp, Glycine max
ctataatcctcacccattttcttcgtagccaaacactctgaaattctcagttatgtcgtggcaagcgtatgtggatgatcaccacactgtgtgaaatcgaaggtaaccacctcactcacgccgctatcatcggccaagacggaagcgtttgggctcagagcaccaacttccctcagttcaaacctgaggaaataactgccatcaataatgccctttatgagcctggatcacttgctccactggattgtat

SEQ ID NO: 178137 - DNA, 192 bp, Glycine max
gccttgtgccgtttgtgttgttttcgggacgaagaagaagatggtgtcaggttctggaatctgcgcaaagcgggtggtggtggacgcgcgccaccacatgctgggtcgtctagcctccatcgtggcgaaggcagcttctgaacggccagaaagtggtggtcgttcgcggtgacgagattcgcatcccgggcg

SEQ ID NO: 178138 - DNA, 164 bp, Glycine max
atctctcaatcgttttctacataatacaaacctctctaatttttgaagcttattatacccaatctcgatatgcagatcttcgtgaaaaccctaactggcaagacgatcaccttggaggtggagtcctctgacaccatcgacaacgtgaaggccaaaatccaaga

SEQ ID NO: 178139 - DNA, 241 bp, Glycine max
ctcaaactagtaatatatactattattcatccattccattctatatatttcataatgggtgttttcacattcgaggatgaaaccacctctcctgtggctcctgctaccctttacaaagctctagttacggatgctgacaacgtcatcccaaaggctgttgacgccttcaggagtgttgaaaacgttgagggaaatggtggccccggaaccatcaagaagatccatttccttgaggatggag

SEQ ID NO: 178140 - DNA, 246 bp, Glycine max
gttttatgaagccttctctaagaatctgaaacttggtattcatgaggattctcagaacaagacaaaacttgctgaattgctcaggtatcactccaccaagagtggtgatgagatgaccagcctcaaggactatgtgaccaggatgaaggaagggcagaatgacatctactacattactggtgaaagctagaaagctgttgagaattcccctttccttgaaaagcttaagaagaaggggttcgaggt

SEQ ID NO: 178141 - DNA, 238 bp, Glycine max
ctggattacaaggatggaaagtactctcaggttgtgtctaatgctcttcctgttcactattctatccgggatcttgaattgcctagggttcgccaccacagtcatcacactatccaactctgcagcactcaagatcccggattggtttttgaacaggaagaaggattacaaggatggaaagtactctcaggttgtgtctaatgctcttgatatgaagctcagggatgacttagagaga

SEQ ID NO: 178142 - DNA, 245 bp, Glycine max
gtcaagtgaaagtgagataaaataaaaatcaaagagcataatgtcagggatcattcacaagattggggagacccttcatgtgggagggcacaagaaggaggaggagcataagggtgagcaccatgctggagaatacaaaggggagcaccatggtgaacacagtagtgagtacaaaggagagcatcatggtgaacacaaagctggagagtaccatggtgagcacaagccagtgcacaaagaggggt

SEQ ID NO: 178143 - DNA, 240 bp, Glycine max
  unsure (1)..(240): unsure at all n locations
cgcggctcgagcggctcgaggaaaatgttggggatcttcagcagttcagtggtgtcgccgccggaggagctggtgaccgctggcagcagaacgccgtcgccgaagacgacggcggggaagctgctgaaccggttcgtggagagcaaggcgtcggcggtgtcgctgcaggtgggggaacacgtgcagtcggcttacacacaacatacccaattaacntcngcatcccaggtcattcgctgt

SEQ ID NO: 178144 - DNA, 243 bp, Glycine max
ctaacatcacaatttcaattgtctttctttaacataatcatggccatgaaacgtgctgttcaatccctgcttgcctcatcttccaccctcaccaggcaccttcatgcctcaggagaaaaaaagcagattgtaggggtgttctacaaagggaatgagtatgcttcgaatcccaattttgtgggatgtgttgaaagagccttgggtatacgtgagtggttggactcacagggtcaccagtacata

SEQ ID NO: 178145 - DNA, 240 bp, Glycine max
cattaatggcgaacaatttagatcagactctaaaacagttaaccaacaagctttcttttatgctagtgaacgcgaagtccatcacaacgacatatttatattcggcatagataacaccgtactctctaatatcccatactatgaaaaacatggatatggggtggaggaatttaatgaaaccttatatgatgaatgggttaacaagggcgacgcaccggcattgccagagactcttaaaat

SEQ ID NO: 178146 - DNA, 172 bp, Glycine max
cgcctttctctctcttctttttactctctctctgtctctctctacgctttctcgttcgacatccctcaagggatccactaactgaaggagaaatggggttgacattcaccaagcttttcagccggcttttcgccaagaaggaaatgcgaattctgatggtgggtctcgatgc

SEQ ID NO: 178147 - DNA, 140 bp, Glycine max
cgttgccattctcatcctcttctttctctctctaccattgccatggatccctacaagcaccggccatccagcgccttcaattctcccttctggactacaaattctggtgctcatattcggaccaacaactcctctttaac

SEQ ID NO: 178148 - DNA, 216 bp, Glycine max
tggcaatgtgggattgattttcaccaaaggtgacctgaaggaggtcagtgaggaggttgccaagtacaaggttggagctcctgctcgtgttggtttggttgccccaattgatgttgttgttcctcctggcaacacagggctcgatccctcccagacctctttcttccaggtgctcaacattcctaccaagattcccaagggtcatgttgaaatcat

SEQ ID NO: 178149 - DNA, 248 bp, Glycine max
atttttggttctatcgagaagcagaggtggtcttatgcatgtgcaaaacagttgattgagaggctgatttttgctgagggtgctgaaaatggcttggagttcacaattgtaaggccatttaactggattggacctcgaatggatttcattcctgggattgatggtccaagtgagggtgttcctcgggttcttgcttgctttagcaataatcttctccgaggagagcccctcaagcttgtggacggtgg

SEQ ID NO: 178150 - DNA, 247 bp, Glycine max
gcgagccattcaagatgcatcggtcatcattggcgcccatggtgccggtcttactcatatagtatctgctttgcctaaaactgtgattctggagatcattagcagctatttcagacgacctcattttgcatatatttcgcggtggaaagggttagagtatcatgcaatcaaccttgctggatcacatgcggatactggaaccgtgatcaaagaactggttgacataatgaaaagccttggatgttga

SEQ ID NO: 178151 - DNA, 238 bp, Glycine max
cgtcctatggtcttcaatgttgttatcctttctccgcatggttactttgcccaagataatgtcttgggataccctgacactggtggacaggttgtttacatcttggatcaagttcgtgccttggagaatgagatgctcaactgcatcaagacacaagggcttgatatcacccctcgcattctcattatcactcgtcttctcactgatgcagtaggaactacctgtggacacgtctaga

SEQ ID NO: 178152 - DNA, 204 bp, Glycine max
ctcggtggaagaatcaccagcacttaatacttgctcatggagcagcagtcaattgctacaagaacaaataccaggctcatcagaaaggacaaattggagtcaccatagtgactttcttctttgaaccaaaatctaatagtgatgctgatcgcaaggcagcaaggcgagctctggacttaatgtttggctggtttgcaaacccca

SEQ ID NO: 178153 - DNA, 199 bp, Glycine max
tgagacacaatacagagtgagttgttgctccttcgccacaactctctgccaacatgggtatctccagagattctatgcacaagaggcgtgccactggtggcaagaagaaggcctggaggaaaacgagaaagtatgagcttggtcgccagcctgctaacactaagctgtcaagcaagaagacagtgaggaggatcggtgt

SEQ ID NO: 178154 - DNA, 200 bp, Glycine max
tctccctctgcgcaggaattgggaacattcgacaggtagagtttcttcaatggctcctaaagttgataagaagaacgacccaaaggcacaggccttgaagactgctaaggcagttaagtctggtgctacctttaagaagaaggcaaagaagatccgaacttctgtcactttccacagaccgaggacattgaagagggata

SEQ ID NO: 178155 - DNA, 165 bp, Glycine max
catctagtagtgtgagagagagtggtttgtctgtctgaacttaagtagtaaagatgtctggaatcatcggaggaaacaagggtcacaagataaaggggaacttggtgattatgcgaaagaatgtgttggatatcaacagcatcaccagtcgttaagggtgtcatt

SEQ ID NO: 178156 - DNA, 248 bp, Glycine max
ctggggagtatcctagtcctccctctgaatatgaaacctgcctggctgacctgtacagtgttgcttggatggaagacagtgacatacacaatttgcaaacagaaactttacatcaacaatacgaattggtcaaacaaaggactatgaatggaaattcaatttatggttcccacgtgatgcagtatggtgacatagggcttagcgagaacaatctcgtcttatatttgggtacaaatcctgctaatgat

SEQ ID NO: 178157 - DNA, 257 bp, Glycine max
ctcataacacaaagcacaaagcaaagctcatccttgagttaaaaaatggcagcagcttcttccatggctctctcatccccatccttggctggcaaggccgtgaagctgggcccatcagccccagaagtgggaagggtgagcatgaggaagaccgtcaccaagcaggtctcctcaggaagcccatggtacggcccagaccgagtcaagtacttgggcccattctctggcgagcccccgtcctacctaaccggtgagtt

SEQ ID NO: 178158 - DNA, 211 bp, Glycine max
cagagtttgttgtgagctataagctagtttatcgtgaggagaatatgaagttgtttgttctctttgttgctgcagtagttttggtagcatggccatgccatggcgcaggctaccaaaggttccctctccgaatgaaaactggctatggtgagcgttcttcggaggtaaaatgcgcaagttttacgcttgctgtggacgcacacaacatccg

SEQ ID NO: 178159 - DNA, 170 bp, Glycine max
ctacaacccagttgagtaactaagatggcgcaagtgaggaacaagcaagtgcttctacaggactatgttaccggttttcccacagaatccgacatgaatattgtcgaaagtaccataacattgaagcttccacaaggttccaatgatgtcttgctcaaaaatttgaactt

SEQ ID NO: 178160 - DNA, 241 bp, Glycine max
  unsure (1)..(241): unsure at all n locations
tgacagcaataagtcnctccttcctctgccttataattcttgtgacccttttcgctggtagcattgaaagtgcaccagcaaacgtgaagccaagccattatgctgcacccttcaataggagtgtttttacttctggttttctatttggaataggctctgcagcttaccagatagaaggagcagcagctatagatggcagaggaccaggtatatgggcacactatgttaaacagcaaccagg

SEQ ID NO: 178161 - DNA, 252 bp, Glycine max
cgagcaacgagacagagaaaccctagcaaaaatgccggctggtcacggtttgagatcccgcaccagagattccttctctcgtcccttcaggaagaagggtaccatcgccctcaccacatacctcagaacctaccacgtcggcgattatgtcgacgtcaaggttaacggcgccgtccacaagggaatgcctcacaagttctaccatggccgcaccggtcgcgtctggaatgtcaccaaacgtgctgttggggt

SEQ ID NO: 178162 - DNA, 243 bp, Glycine max
ggctctctcacgcagtcgcagtgagtgaaaaggaaaaccctaattgaggtattctcagtgccttcgagagaaagaaaaaatggcagataatctcgttctgcgtggcaacatgcgcgcgcacaccgacgttgtgacggcgattgccaatcccatcgacaactccgacatgatcgtcaacgcctcacgcgagaaatccatcatcctctggcatcttagcaaggagggcaagacttccggtgtccc

SEQ ID NO: 178163 - DNA, 243 bp, Glycine max
cactcattaattgcaagaatggcacttcgttgcttggtgatgtcctttctgttctcctcactcttggtcttgcgagagaaagccatgccagagacgaagatttttggcatgctgtttggccaaacactcccattccaagctcattgcgagatcttctaaagcctggccctgcaagtgttgaaatcgatgatcaccctatgcaaattgaagaaacacagtacccgaaaaccttcttctataaag

SEQ ID NO: 178164 - DNA, 205 bp, Glycine max
ctaaaccaaagtaagaggtatagtgttctaagagtgagcaacttgtgagaaatggcttccaaggctgcacttctcttgtgtctcaatgttctctttttcactgtggttagttccacatatgtgccatgtaatccaccccccaaaactcccaaacacccacctgtcccaaagccaccatccccaaagctagcaagctgccccaaag

SEQ ID NO: 178165 - DNA, 238 bp, Glycine max
ttttccctcactttctcgctcgccaaacgcccctctctctcctccaatggccgaccagctcaccgacgaccagatcgccgagttcaaggaggccttcagcctcttcgacaaggacggcgatggttgtattactactaaggaacttgggactgtgatgcggtcactagggcaaaacccaactgaggcagaactgcaggatatgattaatgaggttgatgctgatggcaatggaaccatc

SEQ ID NO: 178166 - DNA, 209 bp, Glycine max
cacaactctctgccaacatgggtatctccagagattctatgcacaagaggcgtgccactggtggcaagaagaaggcctggaggaaaaagagaaagtatgagcttggtcgccagcctgctaacactaagctgtcaagcaacaagacagtcaggaggatccgtgtcagaggtggctatgtgaaatggagggcattgagattggacactgga

SEQ ID NO: 178167 - DNA, 196 bp, Glycine max
cgctaacactcattaattgcaagaatggcacttcgttgcttggtgatgtccctttctgttctcttcactcttggtcttgcgagagaaagccatgccagagacgaagatttttggcatgctgtttggccaaacactcccattccaagttcattgcgagatcttctaaagcctggccctgcaagtgttgaaatcgatg

SEQ ID NO: 178168 - DNA, 260 bp, Glycine max
gagacttggttttctgacccgggtttctgtagggaatcacagatgtggtatacactttcaaagactttggccgaagatgctgcctggaaattcgtaaaagagaacaacattgacatggttactattaacccagcaatggtgataggacctctcttgcaaccagtccttaacacaagtgctgcttcaattttaaacgtaattaatggtgcacaaacatttccaaatgcatcttttggttgggtcaatgtgaaagatttggc

SEQ ID NO: 178169 - DNA, 246 bp, Glycine max
aatacatggtcatccagggtgagcctggtgctgtcattcgagggaagaagggtcctggtggtgttactgtgaagaagaccggtgcggccttgatcattggcatttatgatgaaccaatgactccaggtcaatgcaacatggtagttgaaaggcttggcgattatctcattgatcagggtctctaatctttgctttatgtcttgttatcgtgcatatctcattggcttcagtacaagtttttgcatc

SEQ ID NO: 178170 - DNA, 263 bp, Glycine max
cgaagaaattaggtgatagcgtgcttcacattgagcttcgcaaatgggctgatatcatggtcatcgctccattatcagcaaacacccttggcaagattgatggagggttgtgtgacaatctactgacatgcatcgttcgagcctgggactacagcaagccattctttgttgcaccagccatgaacacttttatgtggaacaatcctttcacagagcggcatctcatctccattgatgagcttggcatttctctcatcccggct

SEQ ID NO: 178171 - DNA, 269 bp, Glycine max
caaaccaattacaaattacactctttgcctcgcaccttcaacttaaccttttctactcataatcttaacaacttgctagaacaagataaagaaagagaaaaagtgtgtgtgtgtgagagagagcaatggctggctcgtgggcacgccgttctctgattgttctggctatcatgtccttcggatgtttatttgcaatttccattgctaaggaggaagccacaaaattggggacgtcatcgggattgatcttggaacggactattcatgtg

SEQ ID NO: 178172 - DNA, 268 bp, Glycine max
atcaagttcctggtaagtcaagggtgtattaagcccttgtgtgatcttctcatatgtcctgatcctaggattgtgacagtttgtttggaagggcttgaaaacatcttgaaggtaggtgaagctgagaaaaatgttagcaatactgatggtgtgaatctatatgctcaaatgattgatgatgctgaggggttggagaaaatcgagaacctccagagtcatgataacactgagatttatgaaaaggcagtgaaaattcttgagacatact

SEQ ID NO: 178173 - DNA, 273 bp, Glycine max
aaaagttacctgtttgcgatctcattacaatctccccagtttctaatctcagctaagaaaaaccaaaagatgtctctgattccaggtttcttcggtgcccgaaggagcaacgtcttcgatccattctcactcgacatttgggatcccttcaaggattttcatgttcccacttcttctgtttctgctgaaaattctgcattcgtgagcactcgtgtggattggaaggaaaccccagaggcacacgtgttcaaggctgatattccagggctgaag

SEQ ID NO: 178174 - DNA, 272 bp, Glycine max
atggtttcagtgagtgatcggtgttcacttgatccttcataagtcgtcatcatcatcatcatcatcaccgttgattgaagaagatgccgatcagaaacatcgccatcggaaggcctgaagaggctactcaccccgacacgttgaaggcggggttggctgagttcatctccaccttgatcttcgtgttcgccggttcaggttccggcatcgcctacaacaagctcaccgacaacggcgccgccactcccgccggcctcatctccgcttccatc

SEQ ID NO: 178175 - DNA, 123 bp, Glycine max
gtttacttacgtacatagcttgaaaacacagtgcttgtttagactagtatcttccatggctccgaaagatagaatcctggttttgggccaagagcattggaagacaatattgggatgtaagag

SEQ ID NO: 178176 - DNA, 247 bp, Glycine max
agacagttcatccaatctccgaagcccttcaccgcattgcaaccatgtcgagaagaaaggttagagagccaaaggaagaaaacgtgactctgggcccagctgttagagatggcgaacatgtctttggcgtcgctcgcatctttgcctccttcaatgataccttcattcatgtcactgatctgtccgggagggaaacatttgtccgcatcacaggtggaatgaaggttaaggctgacagagatgaatc

SEQ ID NO: 178177 - DNA, 193 bp, Glycine max
caacgctctctcttcagcctccattctacgctctcccaaccgccagtctctgacccgaagagcgaaccataatggaagagtaaattaccggaaacctcataaccgtttctccgtgaaagcctccgccaaagagattgcctttgaccagcattcccgttctcttatgcaggccggcattgacaagctcgccgac

SEQ ID NO: 178178 - DNA, 253 bp, Glycine max
actagaaacagtgtgatgaaaatgaaggtccttgttttcttcgttgctacaattttcgtagcatggcaatgccatgcgtacgatatgttccctctccgaatgaacactggctatggtgcccgtactccggaggtgaaatgcgcaagttggaggcttgctgtggacgcacacaacatctttggctttgagaccattcctgaagagtgcgttgaagcaacaaaggaatacatccatggcgaacaatatagatcag

SEQ ID NO: 178179 - DNA, 257 bp, Glycine max
tgttgatcgagataactagaaacagtgtgatgaaaatgaaggtccttgttttcttcgttgctacaactttcgtagcatggcaatgccatgcgtacgatatgttccctctccgaatgaacactggctatggtgcccgtactccggaggtgaaatgcgcaagttggaggcttgctgtggaagcacacaacatccctggctttgagaccattcctgaagagtgcgttgaagcaacaaaggaatacatcaatggcgaacaa

SEQ ID NO: 178180 - DNA, 265 bp, Glycine max
ctacatcttctttccaaatcccaactactaatcacactcactgcagatctcaatccatggctaccattgttagcatcaaggcccgccagatctttgacagtcgtggcaatccaaccgtcgaggtggatttgacatgctccgatggtacttttgctagagctgctgttccaagtggtgcatccactgggatttatgaggccttgaattgagagatggaggatctgactaccttggaaagggtgtatcaagggctgttgacaatgtg

SEQ ID NO: 178181 - DNA, 265 bp, Glycine max
tccatctcttgcttcttgcttctattacttgcttctttcttcaccatgtcacttgctgggaaaatcaccactgaaattggggttcatgcaaccgctgcaaagtggttcaacctctttgcaacacaacttcatcatgttcaaaaccttactgatagagtacatggaaccaagctgcatcaaggtgaagactggcatcacaacgagacagtcaaacactggacttataccatagatggtaaggctacaacatgtctggagagtattg

SEQ ID NO: 178182 - DNA, 262 bp, Glycine max
gcaaaggagtgatttggagtttggagcgactgaactaatcattaatttgcactcgctgtttcagcttcatcacccttcttttgcatcatttatatctcttgagaaatggcacaagaaacctttctattcacatctgaatctgtaaacaatggtcaccccgacaagctgtgcgaccagatctctgatgcagaacttgatgcgtgccttgaacaggaccctgacagcaaggttccttgtgagacatgcaccaggaccaacaggg

SEQ ID NO: 178183 - DNA, 276 bp, Glycine max
ctccgcagcagccacacttcttcgccgtttcagctgaagagccatccgcaggtaagcaatggttaagcataataatgttatccccaatgggcacttccggaaacactggcaaaactatgtgaagacttggtttaatcaaccagcccgaaagaccagaagacggttggctcggcagaagaaggctgtcaagattttccccaggcctactgctggatctctcaggcctattgttcatggccagactctgaaatacaacatgaaagtcagagccgggag

SEQ ID NO: 178184 - DNA, 258 bp, Glycine max
ctcactttctcgctccccaaacgcccctctctctcctccaatggccgaccagctcaccgacgaccagatcgccgagttcaaggaggccttcagcctcttcgacaaggacggcgatggttgcattactaccaaggaacttgggactgttatgaggtcacttggtcaaaacccaactgaggcagaactgcaggatatgataaacgaggttgatgctgatggcaacggaaccatcgatttcccagagttcctcaacctgat

SEQ ID NO: 178185 - DNA, 225 bp, Glycine max
cagaaagagagagagagagagagaaactgagagaaattcgcaaaccctaatttcggaaagatcggcgatggctgcctccaaggatcgcgagaacttcgtctacatcgccaagctcgccgaacaggccgagcgatacgaagagatggtggaatcaatgaagaacgttgcgaatctcgacgttgaactgactgtggatgagcggaatttactttctgttgggtacag

SEQ ID NO: 178186 - DNA, 273 bp, Glycine max
gcattccctgacgcagagaaagcaaaagacagtcgcagcattcgtcctggaaaggggaaaatgcgtaaccgtcgctacatctcacgccgtggaccactcatcgtgtacggaacggaaggagccaaagccgttaaggccttccgtaacgtccccggcgtggaagtcgctaacgtcgagaggcttaaccttctgaaacttgctccaggaggtacactcgggaggtttgtggtttggacaaaaagcgcttttgagaagctggattcgatttatggg

SEQ ID NO: 178187 - DNA, 259 bp, Glycine max
cgttctagtaattcagtgctgctagaagatggaaactagtgaatggcatatcgagcgaagatctagcttcggctctgaatcccccttagcaagacacgcaggaaatgtgcctgacactgggtcactctctattgtggtgcttggtgcttctggtgatcttgctaagaagaagacatttcgtggcacttttccacctatacctgcaggacttcttaccaccagatgaagttcatatttttcgctatgcaaggacaaaaat

SEQ ID NO: 178188 - DNA, 227 bp, Glycine max
accaattcctaattgtttaaacctaattctcatttcttcatcgttcgattcttctcctcctaaagatgcagatcttcgtgaaaactttgaccggtaagaccatcacccttgaggtggagtcctccgacaccatcgataacgtgaaagctaagattcaagacaaggaagggatcccacctgaccagcagagacttatctttgcgggtaaacagcttgaagatggtcga

SEQ ID NO: 178189 - DNA, 265 bp, Glycine max
gtgaagctgttgaacttttgggtgagtccatttggtaaaagggttgagtgggctttgaaactaaagggtgtggagtacgagtacattgaagaagatatctttaacaagagcaatctccttctggagttgaatccggttcacaagaaggttccggttcttgttcatgcccagaaacccatcgctgagtcattcatcatccttgaatacatggatgaaacatggaagaagtatccattgttacctcacaatccttatcaaagagcac

SEQ ID NO: 178190 - DNA, 220 bp, Glycine max
gctataagctagtttatcgtgaggagaatatgaagttgtttgttctctttgttgctgcagtagttttggtagcatggccatgccatggcgcaggctaccaaaggttccctctccgaatgaaaactggctatggtgagcgttcttcggaggtaaaatgcgcaagttttaggcttgctgtggaagcacacaacatccgagcctttaaaaccattcctgaaga

SEQ ID NO: 178191 - DNA, 256 bp, Glycine max
caaaacaaagaaaaaaaaaaacccttagccaacacaaccatcatggccacctctgctattcagcaatcagcattcactggtcaaactgctctgaagcagctcaatgagttcgtccgcaagacaggtggcgccggcaaaggtcgcactaacatgcgccgaaccgtcaagagtgctcctcagagcatttggtatggccctgaccgtcccaagtacttgggtcaattctcggagcagattccttcatacctgacgggag

SEQ ID NO: 178192 - DNA, 225 bp, Glycine max
gcacgaagaaagaatctcaggcgaggagaaagatggagggcaaggagcaggatgtgtcgttgggagcgaacaagttccccgagagacagccgattgggacggcggcgcagagccaagacgatggtaaggactaccaggagtcggcgccggagcaggtggttaacccgacggactttacgtcatggtcgtttaacagagcagggatagcagagtttgtggccactt

SEQ ID NO: 178193 - DNA, 238 bp, Glycine max
gtttgttgtgagctataagctagtttatcgtgaggagaatatgaagttgtctgttttctttgttgctgcagtagttttggtagcatggccatgccatggcgcaggctaccaaaggttccctctccgaatgaaaactggctatggtgagcgttcttcggaggtaaaatgcgcaagttttaggcttgctgtggaagcacacaacatccgagcctttaaaaccatccctgaagagtgcgtt

SEQ ID NO: 178194 - DNA, 271 bp, Glycine max
agttttcagcggctttttgtcacaatggtgcttcaaaacgatattgatttgctgaatcctcctgctgaattggagaagagaaagcacaagcttaagcgtcttgttcaatcaccaaattcgttcttcatggatgtcaagtgccagggctgcttcaacataacaactgtgtttagccactcccagacagttgtagtatgtggtaactgccagactgtgttgtgccaaccaacgggtggacgggcgaggttaaccgaagggtgctcttttagga

SEQ ID NO: 178195 - DNA, 207 bp, Glycine max
gtgatttcagtgagtgatcggtgttcacttgatctcatcataatcgtcagcgtcaattgaagcatatgccgatcagaaacatcgccgtcggaaggcctgaagaggcgactcactccgacacgttgaagccgcgtttggctgagttcatctcaaccttcatcttcgtgttcgcaggctcaggctccggcatcgcctacaacaagttca

SEQ ID NO: 178196 - DNA, 242 bp, Glycine max
gcatctttatgcatcctcagggtctttatataagtttgaaagagaagggaaagatccgtgaagtactaaggaattggcctgagaagaacattcaagtcatagttgtaactgatggagaacggatcctgggtcttggggatcttggttgtcaggggatgggaataccagtgggaaaactttctttatatacagcacttggaggagtccgcccttaagcttgtttaaccattacaattgatgtg

SEQ ID NO: 178197 - DNA, 224 bp, Glycine max
cagcaattcacactggtctttgcttctcgttactcatttctcacctaactttctattcttctcagtctcagatcagaaccttagccatggcagcgttccagaagatcaaggtcgccaaccccatcgtcgagatggacggagatgagatgactagggttatctggaagtcaatcaaggacaagctcattttgcccttcttggagttggacatcaagtattatgac

SEQ ID NO: 178198 - DNA, 264 bp, Glycine max
  unsure (1)..(264): unsure at all n locations
aatgaaagcaataagtccctccttcctctgccttataattcttgtgacccttttagctggtagcattgaaagtgcaccagcaaacgtgaagccaagccattatgctgcacccttcaataggagtgtttttacttctggttttctatttggaatagggtctgcagcttaccagatagaaggagcagcagctatagatggcagaggaccaagtatatgggacacctatactanacagcaaccagggaagatttggggatcatagtg

SEQ ID NO: 178199 - DNA, 239 bp, Glycine max
aagttacagaatttcctgtttacgatcttattgcaattttgcaactttcaaagcttattagctaaagtaacatcaaaagatgtcattgattccaagtattttcggtggcccaaggagcaacgtgttcgatccattctcactcgatatgtgggatcccttcaaggattttcatgttcccacttcttctgtttctgctgaaaattctgcatttgtgaacacacgtgtggattggaaggaga

SEQ ID NO: 178200 - DNA, 266 bp, Glycine max
gcaagatgtcgaagagaggacgcggtcgttcggcggggaacaagttccggatgtcgctgggtctgccggtggcggcgacggtgaactgcgccgacaatacgggggcgaagaacctctacatcatatcggtgaaagggatcaaagggcgtttgaaccgtctcacctcggcttgcgttggcgacatggtgatggccaccgtgaagaaggggaaacccgatctgaggaagaaggttttgccagctgtcattgttcgccagcgcaagcca

SEQ ID NO: 178201 - DNA, 272 bp, Glycine max
ctcaagtctctcgaagcatctttctttctcttcctgcagaagctatccgtgttacttgttcccaagtctccaacaagcaaagtacatggttgatttggaaatccaggtccccagcgcattcgacccgtttgccgaggcgagagaatcagatgcccccggggcaaaggagtatgtgcacatacgaattcagcagaggaatggaaagaagagtctgacaacagtgcaagggctgaagaaggagttcagctacgagaagatcctcaaggacctca

SEQ ID NO: 178202 - DNA, 252 bp, Glycine max
ctctctcatcaggagcgaatttgatcatggctaatggacagaaaacttggtgtgtggcaaagccttcatcagatcaagcaacccttttggccaacctcaattatgcctgctctcaagttgattgcaggattctgcagaaaggatgcccctgctcttaccctgacaatctcatgaaccatgcttccatagccatgaatctctattaccaatctagggggaaaaaccatggaattgtgatttcagggcctctgg

SEQ ID NO: 178203 - DNA, 266 bp, Glycine max
gcaattatggaagtgattcctgcaaagtacaggcacatgattggggggccttctttgaaagtggatttgcacactggggctgtcgctgaaggggtgttgacttttgtgattacctttgtcgttctcctcatcttcctcaagggccctcgtagtgacttgttgaagacttggttgctggccacggcaactgtagttttggtcatggttggatctgcctacactgggccagccatgaatcctggcaacgcttttggctgggcatacat

SEQ ID NO: 178204 - DNA, 227 bp, Glycine max
ctaggtgatgacgatcaatccattgaggatgattttgttgcttggaaggaatctctatggtctgagttggatcagttgctccgggatgaggatgatgtaaatactgtatctactccttataaggctgctattcctgaatatcgataggttattcatgattccaccgtcacatcttgcactgataatcacttaaatgtggcaaatggtaatgctgtgtttgatattca

SEQ ID NO: 178205 - DNA, 262 bp, Glycine max
acccaacccacattcacccgcgtcataaaaatcctattctccctcattgcctccctttttatactcaaaaccctaagacacagaggagaacacaaacagcagcgtcttggtttgtgagacagacagaggcacagagagagaatggtttcggggtcaggaatctgcgcgaagagggtagttgtggacgcgcggcaccacatgctgggggaggttggcatcgatcgtggcgaaggaatttctgaattggcaaaaggtggtggtg

SEQ ID NO: 178206 - DNA, 262 bp, Glycine max
  unsure (1)..(262): unsure at all n locations
gaaaccctcttcatcttgttctatctgtgacgagcatcatggcctcaagagcagtgttattgttggctatgtgtgtgcttccggcgatggttgtggccattcgcccagcaaagaaccctttttgcgtgaagggtcgtgtctactgtgnaccttgccgtgctggttttgagacctcagctaccacctacattgctggtgctgagattatgttgcaatgcaagagcagggttagcaacgaggttgtttacacgaagaaggggta

SEQ ID NO: 178207 - DNA, 168 bp, Glycine max
agagtttgttgtgagctataagctagtttatcgtgaggagaatatgaagttgtttgtattctttgttgctgcagtagttttggtagcatggccatgccatggcgcaggctaccaaaggtttcactctccgaatgataactggctatggtgagcgttcttcggaggtaa

SEQ ID NO: 178208 - DNA, 197 bp, Glycine max
tgagataactagaaacagtgtgatgaaaatgaaggtccttgttttcttcgttgctacaattttggtagcatggcaatgccatgcgtaggatatgttccctctcggaatgaaaactggctatggtgcccgtactcacgaggtgaaatgcgaaagttggaaggcttgctgtggaagcacacaacatctttggctttgag

SEQ ID NO: 178209 - DNA, 260 bp, Glycine max
tcgctactggagaggattattccgtggaacctgctgagagcaggaggccattccgtgctctccttgatgttggtcttattaggactacaaccggtaaccgtgtgtttggtgcccttaagggagctctggatggggggttggatattcctcacagtgacaagaggtttgctgggtttgataaggagaagaaggagcttgatgcagaggttcatcggaaatatgtttttggtggacatgttgctgcctatatgaagatcttg

SEQ ID NO: 178210 - DNA, 211 bp, Glycine max
agggtgcttagtgtaaccgtgcagaaattgcctccacgtgagcctaagaaacctaggactattcaggttaaggttgcttgaacaacttgtggaacgaagtttaataaatgattgtattccctttctggcagaagcaggggaagaagtaatgttgtttgaaggataagatggatcttatcttttgagttgtttcaaggtttttctgttctta

SEQ ID NO: 178211 - DNA, 246 bp, Glycine max
caaaggcaccaatttcattgctcagagttcccaaattctccccaagagataaaatgtctctaatcccaaacttcttcggtggccggagaaacaatgtgttcgatcctttctcactggacgtgtgggatcccttcaaggattttcctttcacaaatacgctttcttcagcttccttccctgaattctctcgggacaattcagcatttgtgagcacccgtgtggactggaaggagaccccagaggcgc

SEQ ID NO: 178212 - DNA, 218 bp, Glycine max
ctagggttatcatttctccatttccattttctctctcacttttcaagaatcgtaagctatgggaaagtcttacccaactgtgagtgctgattaccagaaggccgttgagaaggcgaagaagaagctcagaggcttcatcgctgagaagagatgcgctcctctaatgctccgcttggcatggcactctgctggaacctttgaccaagggcacgaagacc

SEQ ID NO: 178213 - DNA, 263 bp, Glycine max
  unsure (1)..(263): unsure at all n locations
atcttcttcccttttcactccattatcctaaaaacttgcagattttcacatcccaaacaacatgaaggctccngttcatgtttctgtcggtgctcctttgtgccacttttcatgtctccttctctattatcgacggtttagttgccaacggaactttgagttgggtccaaagccctccgccctaaaaggaacagtggtggtgggcgggagcactcgatcccagaatcggagatctccggctttgtggagtacataaaatccgg

SEQ ID NO: 178214 - DNA, 262 bp, Glycine max
taaaactcggtatcacgatgccaagaataaactgcaaggataagagcttgatttactcattgttatcttgccggataataatggatcactatatggtgacctcaaacgtatttgtgagacagatctaggacttgtctcacaatgttgcttaactaagcatgtcttcaaaatgagcaagcagtaccttgaaaatgttgctttgaaactaatgtcaaagttggagggagaaacactgtactggttgatgcgctctcacgacgca

SEQ ID NO: 178215 - DNA, 268 bp, Glycine max
gagaaatagagagagaacttcaagtgagggtgagagagacataaatctagagacagtgatagcactctaaaagtctattatattcttcagaatatgaccatgcatcgcgagtcttgggcttatgtcttcggcgttatgggcaacatcatctcctttggagtgttccttgctccattgccaaccttttaccaaatctacaagaagaaatccactgaaggtttccagtcacttccttatgttgttgcactgttcagtgcaatgctttgga

SEQ ID NO: 178216 - DNA, 209 bp, Glycine max
gtttgttgtgagctataagctagtttatcgtgaggagagtatgaagttgcttgtcttctctgttgctgcagtagtcttcgtagcatggccatgccatggcgcaggctacgaaaggttccctctccggatgacaactggctatggtgagcgctcttcggaggtaaaatgcgcaagttttaggcttgctgtggaaccacacaacatccgag

SEQ ID NO: 178217 - DNA, 254 bp, Glycine max
acgcttcaatcatatagcattctaagaaatgaagagccctaccattttcattctctttctactttctgccttctacacctcactcctaccttcagccaccgctcaagtcgtggttgacatggaaggtaatgatcttcaaaatgggggaaatattatgtgttgccagtactagagtcatcatatggtggaataagagtagccgcaactggaaaagaaagatgcctctcactgttgtacaatctgccgatccgtat

SEQ ID NO: 178218 - DNA, 261 bp, Glycine max
  unsure (1)..(261): unsure at all n locations
actccctctctctcttctgcaccggccnccttctcgccggctgcctctactggttcgtctgtcttctgggccccgccgagcagaagggcaaacgcgccaccgatctatccggcggctccatctccgccgagaaagtccagacaactacaagcagtactggtccttcttccgccgccccaaggagatcgagaccgccgacaaagttcccgacttcgtcgacaccttctacaatctagtcaccgccatctacgagtggggctg

SEQ ID NO: 178219 - DNA, 257 bp, Glycine max
gtgttctaagagtgagcaacttcaaaacaccatagtgagaaatgacttccaagggtgcaattctcttgtgtctcaatgttctcttcttcactgtggttagttccacatatgttccatgcaacccaccccccaaaactccaaacacccacctgtcccaaagccaccttccccaaagcaagtttcttgccccaaggacactgttaagtttggtgtgtgtgctgatgtgttaggtttgattaacgtgcaactagggaagc

SEQ ID NO: 178220 - DNA, 250 bp, Glycine max
gtttgttgtgaaaattccagagggtttggcgccagagcaagtggcaccattactgtgtgcgggtgtgacagtgtacagtccactggtacactttgggctgatagatagtgggctgagaggtggaatattggggcttgaggagtgggacacatgggggtgaagagagcaaaggcactgggtcaccatgtgactgttataaggtcttctgacaagaagaaacaggaggcacttgagcaccttggagctgatc

SEQ ID NO: 178221 - DNA, 257 bp, Glycine max
cgccttcttctcccaatgccttccctccgcctgggcccactcggcgatcctcctcccgggtcaactcgcccgtgactcaccgcagagctgccccgcccctgaccccaacctctactacaagccagtcatcggaatcgcagccatcccggcgacggcgcctccggccgcctcagcaacgccaccggcgcctcctacatcgccgcctcctatgtcaaattcgttgaggccgccggcgcccgtatcgttcccctcatcta

SEQ ID NO: 178222 - DNA, 253 bp, Glycine max
actttcttttttcccgcagtcatgggcaaggtcaagatcggaatcaacggatttggaagaattggccgtttggtggccagggtggctctgcagagagacgatgttgaactcgttgccgttaacgatcctttcattacaccgattacatgacatacatgtttaaatacgacagtgttcacgggcactggaagcatcacgatgtcaccgttaaggatgagaagacccttctcttcggtgacaagccagtcactgt

SEQ ID NO: 178223 - DNA, 256 bp, Glycine max
ctatttttcttcctcagtagtgtcatttacgcttctcttctctgcagcaactatgcctaaccctaaggtcttcttcgacatgaccatcggcggtcaatctgctggccgcatcgtgatggagctctacgccgacgtcatccccgcaccgccgagaacttccgcgcgctttgcaccggcgagaagggcgtagggcggagcggcaagcccctccactacaagggctcgtccttcaaccgcgtgatcccgagtttcatgt

SEQ ID NO: 178224 - DNA, 260 bp, Glycine max
cgaagacaaacctctgttctcaactgtgtttctttacctctcacctactttcagaccataccaggctgagaagatgcagcagacaccgcctatgattcctatgatgccttcgttcccacctacgaacataaccaccgagagattcaaaaataccttgatgagaacaagaagctgattctggcaatattggacaatcaaaatcttggaaaacttgcagaatgtgcccagtaccaagctcagcttcaaaagaatttgatgtt

SEQ ID NO: 178225 - DNA, 264 bp, Glycine max
actcgaccgctcgagccgctcgagccggctagccaacctcaaataacccttgttatctcacttgcattctcacttgtactcatctctttttcacaactttttttgtaccttctgatctaatggcagttccagtgattgattttcaaagctgaatggtgaagaaagaaccaaaactatggcacagattgctaatgggtgtgaagagtggggattttttcagttgatcaaccatggtattccagaggaactccttgagagggtgga

SEQ ID NO: 178226 - DNA, 260 bp, Glycine max
ctcgagccgcttacggctaaattctcaaagatttaaactttgtctcagagtttccaaatacacccaaccccagagagaaaatgtctctaatcccaaatttcttcggtggcagaaggagcaacgttttcgatccttttccctcgacgtctgggaccccttcaaggattttcctttcccaaacactctttcttcagcttcctttcctgaattttctcgggaaaattctgcattcgtgagcactcgtgtggattggaaggaga

SEQ ID NO: 178227 - DNA, 250 bp, Glycine max
ggacaagtatgggttggtggacttatccagaaaggaagccctgtagtagctataactgatgatggtgaaacatggcaagctgaagttccagagattcagggaaacaagttgagagggggccctcagatgattcaatgagtttagatgggaagcggctctatgctaccaactcactatttagtacttgggacaaacaattttatccagagcttgtccagaaaggctcccacataatacagattgatgttga

SEQ ID NO: 178228 - DNA, 254 bp, Glycine max
gataactagaaacagtgtgatgaaaatgaaggtccttgttttcttcgttgctacaattttcgtagcatggcaatgccatgtgtacgatatgttccctctccgaatgaacactggctatggtgcccgtactccggagtgaaatgcgcaagttggaggcttgctgtggaatcacacaacatcttgggcttggagaccattcctgaagagtgcgttgaagcaacaaaggaatacatccagggcgaacaatatagatc

SEQ ID NO: 178229 - DNA, 258 bp, Glycine max
tagtgactgacttttcgagaaaggaaaaaaaaagagtttccggcattattccatcatgaacgctcttcccattcttctcttcttcctcttcgtttcggcattagtttatgcgaagaaaactggcgatgtgacggagttcaaattggcgtgaagcataaaccagcatcatgtgaagttctggcacacaaaggtgacagagtcaaagtacactatcggggaaaactcactgatggaactgttttcgattctagctttgaa

SEQ ID NO: 178230 - DNA, 169 bp, Glycine max
gacaagatgccggctggtcatggtttgagatcccgcaccagagattccttctctcgtcctttcaggaagaagggaaccatcgccctcaccacatacctgagaacctaccacgtcggcgactatgttgacgtcaaggtaacggtgccgttaacaagggagtgcccacaaa

SEQ ID NO: 178231 - DNA, 256 bp, Glycine max
aaaagctgcaattttacagcttgataagatcattggatacaagctctctcctgattgcttagaattgcgggcgaggatgttgattgctcttaaggattatggcagtgccatagaagatatcagggcattcttaacttggaaccaaattatataacttcaaaggaaaagatctcatggaaatacttggttcatctccttagccatgtggtacagcaaaagagtcaggctgaatgctggatgcaattatacgaacaat

SEQ ID NO: 178232 - DNA, 256 bp, Glycine max
gaagaagatggtgtcaggttctggaatctggcaaagcgagtggtggtggacgctcgccaccacatgttgggtcggctagcgtccatcgtggcgaaagagcttctgaatgggcagaaggttgcggtggtgcgctcgaagagatttgcatctccggcggtctggtgaggcagaagatgaaatacttgcgattcctccgcaaacgcatgaacaccaaaccctcccatggccctatccacttccgcgccccagccaagat

SEQ ID NO: 178233 - DNA, 252 bp, Glycine max
tggagaagtatcagatctggagcaggagaatagcgttggcagcgtttgcgtttgctctgctgttccaatcggcctcagcagacgacgtcgttgtgctctctgaagataacttcgagaaggaagttggtcaggaagaggagctctcgttgagttctatgctccttggtgtggacactgcaaaaagcttgctccagaatatgaaaagcttggtagcagcttcaagaaagccaaatctgttttaattggcaaggt

SEQ ID NO: 178234 - DNA, 255 bp, Glycine max
tctcgagccgattcggctcgatagtggaatgtgttaatcatgagtctcctgcaaccttattctgttctgcatgaaaagcctggtgatgatgttgcacatatcaaattcactgtattgctaatgcctaatggatcaatcgtgtcacatctcacccactccaggaattgcagcccaccaaaacaatagacgatcctgaaatcaaggcatggctagcattgggtacgaagacaaagaagaagggtggtggaaagaaga

SEQ ID NO: 178235 - DNA, 255 bp, Glycine max
gttaagtgtaccaagttaataggtctttatatttagttgttgacatcaacaaagtcatggaggaagttaatgtggttcaaaccaagaatggaactgttgcagtagcttctgcgtttgctggacataaggaagctaacagcaaagggaccacaaatttttaagaattgctgttgaagaagcctataaaggggtagactgtgaagatgggggtccctttggtgctattatagtatgtaatgatgaaatagttgctcg

SEQ ID NO: 178236 - DNA, 258 bp, Glycine max
aagatagacaagagtcaggttcatgaggttgtgcttgttggaggttccactaggatccccaaggttcagcaactcttgcaggatttcttcaacgggaaagagctttgcaagagtattaaccccgatgaagctgtgcgtacggtgctgctgttcaggccgcgatcttgagcggcgaaggagacgagaaggttcaggatttattgctgctggatgttacaccactcagtctcggtcttgaaactgctggtggtgtcatga

SEQ ID NO: 178237 - DNA, 255 bp, Glycine max
acgttgagaagaaggatcctaccggagccaaggtcaccaaggctgcccagaagaagaagtgaatcgtgcgggctggttcatcaggggatgttggttacaataaatgttggtttcttttctgtactcttgtgtctcttttctaggtagcttgtttttcggacaaagtttgaagtctccaccatcatctcgcaactgttgttcccagaactgggttcttgatcgacggtggcaaaattgcttttatttatctgtgtt

SEQ ID NO: 178238 - DNA, 249 bp, Glycine max
gctataagctagtttatcgtgaggagaatatgaagttgtttgttttctttgttgctgcagtagttttggtagcatggccatgccatggcgcaggctaccaaaggttccctctccgaatgaaaactggctatgtgagcgttcttcggaggtaaaatgcgcaagttttaggcttgctgtggaagcacacaacatccgagctcttagaaccattcctgaagagtgcgttgaaccaacaaaggactacattaa

SEQ ID NO: 178239 - DNA, 252 bp, Glycine max
tgcacataaaaaaccactctacaaaactctccagtaattctgaaaattttattttcttttggtgaaattaacagctctgtgattgatcaatggcgacaaaggaaggcaaagccataggcatcgatctcggcagacctacagctgcgtgggcgtgtggcaaaacgaccgcgtcgagatcatccccaacgaccaaggcaaccgaaccactccctcttatgtagccttcaccgacaccgagaggctcatcggaga

SEQ ID NO: 178240 - DNA, 250 bp, Glycine max
gttaacaccagatgaaaagcgacggaatgctataatgttcgacttgatctttgtgaattcttgtcatcctctctctgcatgcataagtacacttgacaacaagtgtaaaaacatgccaaatagtgaacgggtgtggtcaaggaaaaaatcaaccccaaagaaagtggtggaatgaatggttacatatccttatgtggtggagaaccttgccctcctatttttaggtctcctattgcaagcatggaagata

SEQ ID NO: 178241 - DNA, 231 bp, Glycine max
cgaaagcgattttgagggaagaagaagatgaggccgatttttgctgggaacttggagtacgatactcgtcaatcagagcttgagcgcttgttctcaaagtatggaaggattgccgcgtggacatgaaatctggttttgcttttgtctattatgaggatgagcgtgatgcagaagaagcaattcgtgcacttgacaatgttccatttggtcatgaaaagcgaaggctgtcag

SEQ ID NO: 178242 - DNA, 253 bp, Glycine max
ttctaactcaacaattgagatctcacactgcaattccttcttctcccagaatcggtcactaaatccgcaatcatgaagctcgataccaccggtctcgaatcgtttcccacactgcttgcgccctgaaacgacgcgttggagaactctccgccgctccatccttcgaccttccgaattccaacgatttcgatgggtttgtgaaagaagctattcagatggtgaagcccgcgaagggtactacgactcttgcttt

SEQ ID NO: 178243 - DNA, 250 bp, Glycine max
cattggctctagatttgggaagcatgggaaagggtgaagtgtgggtaaacggtcgaagcattggtcgccattggcctggatatatagcacatggtagttgcaatgcttgtaattatgctggatattatactgaacaaaatgccggacgaattgtggacaaccttctcagagatggtatcatgttcctcgctcatggctgagctcaggtggtaactccttggttgtgtttgaagaatggggaggtgaccct

SEQ ID NO: 178244 - DNA, 230 bp, Glycine max
gtgtgatcttccttgaactaaccatcaaccttctcctactaccaataaccatgattgttctcctcatagctcaaactgtttgagacagcttcaacccaagcatctatgagatcatttgcacctgatatgcctccctttcatggatgcaaaccctgagccatggatgagaaacccactgtgggtgagcttgttgatgtgaaccagcagtggttagcttcaaaggagtagaa

SEQ ID NO: 178245 - DNA, 258 bp, Glycine max
gctggttgccacactacaccgatatttccaccaaacccgtttggtttgttgtttccgaataaatggcaactaagaggagcgtgggaacgttgaaggagggtgatttgaaggggaagagggtattcgtgagggtcatctgaacgtgcctttggatgacaaccttaacatcaccgatgacactagagtccgtgctgctgttcccaccatcaagtacttgactggttatggtgctaaagtgatcctttctagccatttggg

SEQ ID NO: 178246 - DNA, 257 bp, Glycine max
gtcgctactaagagttgctgcttcttcagccactccgcacctcgcagcctctgtgccctcaacaaccatggctgaaatcgaaactaccgttccagatcccacccaaatcgacgtcaaactcttcaatcgctgggcttcgaggatgttgaggttaatgatatgtctctggctgattacattggagtgtccccatcaaagcatgctacatatgttcctcacactgctggtaggtactcagtgaagaggttcaggaaacc

SEQ ID NO: 178247 - DNA, 248 bp, Glycine max
ggtggagggagggagccgtagcagcggaagctctagcttgggtagcgaatcacaatggcgagaggattaaagaagcatctgaagaggcttaatgccccaaagcattggatgcttgacaaactgggtggtcatttgctcctaagccctcatctggaccacacaaatcgagggaatgcctgccactcatactcattttgcgaaaccggctgaagtatgctctaacataccgtgaagtcattgctattctg

SEQ ID NO: 178248 - DNA, 243 bp, Glycine max
ccggagtcaccaccgccgcgatggcgtggcgcgtccgacgccgacgacatcctgatccgtcaggtggtgcagatgttgggaacgaagaggaacacaacctgctgaacgccgagcaccacttcggagcttcaaggccaagttcgccaagacctacgccaccaaggaggagcacgatcatcgcttcggcgtcttcaagtccaacctccgcagagccaggctgcacgccaagctcgacccctccgc

SEQ ID NO: 178249 - DNA, 245 bp, Glycine max
cagaaaaaatgggttcttcttcttctatgtggacggtgtgtgtgattttggcatcactggcctctgcagcactctgtgccaacccacgcaggccagtggatgtacaatttggccgaaactacgtgccccatgggcctttgatcacatcaaatatttcaatggtggttctgacattcagcttcatcttgacaagtacactggtactggcttccagtccaaagggtcttacttgtttggtcacttca

SEQ ID NO: 178250 - DNA, 249 bp, Glycine max
aggttttcgaaggcgagaggagtctcacaaaggattgccgccttcttgggaaatttgatctgtctggaattcctccagccccaaggggtacgcctcaaattgaagtgaccttcgaagttgatgccaacggattctaaatgtgatgcagaagacaagggcactggtaaatcagaaaagatcaccattacaaacgaaaagggacgtcttagccaggaagaaattgagagaatggttcgcgaacgagaggag

SEQ ID NO: 178251 - DNA, 253 bp, Glycine max
aggttttcgaaggcgagacgagtctcacaaaggattgccgccttcttgggaaatttgatctgtctggaattcctccagccccaaggggtacgcctcaaattgaagtgaccttcgaagttgatgccaacggcatctaaatgtgatgcagaagacaagggcactggtaaatcagaaaagatcaccattacaaacgaaaccggacgtcttagccaggaagaaattgagagaatggttcgcgaagcagaggagtttg

SEQ ID NO: 178252 - DNA, 252 bp, Glycine max
tctcgagccgaatcggctcgagatcttgataaaggtgaaactcaccagggtcctgctgtgcttggaattgctatggtagctatggctgaagaattaggacttgagatggcgattcgatcattagaacatttctacaatatggagagcagaatattcgccgagcagttcctttggcacttggtctactctgtatatcaaatccaaaggtcaatgttatggataccttaagcagacttagccatgatactgatt

SEQ ID NO: 178253 - DNA, 251 bp, Glycine max
cactcattaattgcaagaatggcacttcgttgcttggtgatgtccctttctgttctcttcactcttggtcttgcgagagaaagccatgccagagacgaagatttttggcatgctgtttggccaaacactccattccaagttcattgcgagatcttctaaagcctggccctgcaagtgttgaaatcgatgatcaccctatgcaaattgaagaaacacagtacccgaaaaccttcttctataaagaagacctt

SEQ ID NO: 178254 - DNA, 247 bp, Glycine max
gtggtttcagtgagtgatcggtgttcacttgatccttcataagtcgtcatcatcatcatcatcatcaccgttgattgaagaagatgccgatcagaaacatcgccatcggaaggcctgaagaggctatcaccccgacacgttgaaggcggggttggctgagttcatctccaccttgatcttcgtgttcgccggttcaggttccggcatcgcctacaacaagctcaccgacaacggcgccgccactccc

SEQ ID NO: 178255 - DNA, 244 bp, Glycine max
aattaactatctactgggaaacttgggaaagcattattcagaaactgttgcagtagttgatcttggaggtggatctgttcaaatggcttatgcagtctcagagacagatgctgcgaaggctccacagcaccggacggagtggaatcatacataacggagatgttccttaggggaaagaaatattacctctatgtacacagttacttgcgatacggtatgctagcagctcgtgcagaggctttaa

SEQ ID NO: 178256 - DNA, 243 bp, Glycine max
ctgcacataaaaaaccactctacaaaactctccagtaattctgaaaattttattttcttttggtgaaattaacagctctgtgattgatcaatggcgacaaaggaaggcaaagccataggcatcgactcggcacgacctacagctgcgtgggcgtgtggcaaaacgaccgcgtcgagatcatccccaacgaccaaggcaaccgaaccactccctcttatgtagccttcaccgacaccgagaggc

SEQ ID NO: 178257 - DNA, 242 bp, Glycine max
atgggacaaagcgcatgtgttctcgccagaaagattcttgcactctgacatagacgtcaagggtcgccacttcaagctcacgcccttcgggagtggcagacgcatttgccctggctcgccactcgcgtcagaatgctccacaacatgctcggctccttgatcaacaactttgactggaagcttcagaacaacatggaccccaaggacatggacttggatcagtccctcatggccatccctct

SEQ ID NO: 178258 - DNA, 248 bp, Glycine max
ctccgcactccgtcttcatcaatcagcatcaccaccgctccaacacaggggaaaatgagggagatccttcacgttcagggagggcaatgcgggaaccagatcggttcgaagttctgggaagtggtgtggacgagcacggcatagatccgacggggaagtacgtcggaaactcagatctacaactcgagcgcgtgaacgtgtactacaacgaagcttcctgcgggcggtttgtcccacgcgcagtgctg

SEQ ID NO: 178259 - DNA, 248 bp, Glycine max
atccatggctggcttccccacgaggaagaccaacaatgacattacctccattgctagcaacggtggaagagtacaatgcatgcaggtgtggccaccaattggcaagaagaagttcgagactctttcctcttgccagacctcgatgatgcccaattggcaaaggaagtcgaataccttctaaggaaaggatggattccttgcttggaattcgagttggagcacggtttcgtgtaccgtgagcacaacag

SEQ ID NO: 178260 - DNA, 144 bp, Glycine max
ctcttttctcttttcttttctctttagttctctcttcccctttctttttctttttcttcttcttctgagcttgtttaagcttttcttccattaacatattatcacaatgtgtggtattcttgctgttcttggttgttctgtgac

SEQ ID NO: 178261 - DNA, 265 bp, Glycine max
caagtttcttcctttctctgctctttgccttctctgacacatttggtgccttgtagagcgtgttttggcaggaacgtggtatggcgaaggacgttgaggttgctgagcgtggctccttctctgggaaggactaccaggccctccaccagcaccactcattgatgctgaggagctcacaaagtggtccttttacagggctctcattgctgaattcattgccactttgctcttcctctacattactgtgctcacagtcatagggtac

SEQ ID NO: 178262 - DNA, 266 bp, Glycine max
ctatcctatcgtagcaaagaaagaaagaaagaaaaccctagctacaccttttcaactttcaagatgcaaatctttgttaagacactcactggtaagacaatcacccttgaggtggagagttcagataccatagataatgtaagtccaagattcaagacaaggaagggatcccaccagaccagcaacgcctcatttttgctggcaagcagcttgaggatggacgtacacttgctgattacaacattcaaaaggagtccaatctacac

SEQ ID NO: 178263 - DNA, 212 bp, Glycine max
cagcaagagattacgttggtgaggcaagttgagtatcaagattctctcgtggaaccagcatggccactaggcagtgccatagaagccatatcatcattacctaaatttgagaaattaatgtatttcatttaagctttaaacgaggagccatatgtatgtgtggaatgaactccatcactcttaaataaaaatcgttttgttcctttttttct

SEQ ID NO: 178264 - DNA, 268 bp, Glycine max
gtttgttgtgagctataagctagtttatcgtgaggagaatatgaagttgtttgtactctttgttgctgcagtagttttggtagcatggccatgccatggcgcaggctaccaaaggttccctctccgaatgaaaactggtatggtgagcgttcttcggaggtaaaatgcgcaagttcttaggcttgctgtggaagcacacaacatccgagcctttaaaaccattcctgaagagtgcgtacgaccaacaaaggactacattaatggcgaa

SEQ ID NO: 178265 - DNA, 269 bp, Glycine max
cttggtgaacgtagactttgctgatgttcgagctataatggccaatgcagggtcttcacttatggggataggaactgcaactgggaaaacaagggcaagggatgctgcattaaatgctatccagtcacctttactggaattggtatagaaagggctactggaattgtatggaacataactggtggaagtgatttgaccttgtttgaggtaaatgttgcagcagaagttctatatgaccttgtggaccccctgctaatttaatatttggg

SEQ ID NO: 178266 - DNA, 271 bp, Glycine max
gaatggctcccaagggtttaacctttctggctgtgttaatatgcgtttcagcactgtcactgagtccttctgttgcgggggaagggcaaaataatggccttgttatgaacttctacaaggaatcatgccctcaggctgagacatcatcacagaacaagtcaagcttctctacaagcgccacaagaacactgctttctcctggctcaggaacatcttccatgactgtgctgttcagagttgtgatgcttcactgttgctggactccacaaga

SEQ ID NO: 178267 - DNA, 269 bp, Glycine max
gtagtagtacactagtacagtgaactcttctgttcattttctttgcaaccaacacgaaagcttcgttatcatcggcaactacaagcatggactaagctatcagagtttaccacttacgcgaccctgaggttctgaagtggaggatgtggaaatcggagagccgtgtgaggaacaccgctgttggggataatttcattgatgtctactttcgcactggggtttataaagtcccctccttaccttacactccagtcatcaggtacacctga

SEQ ID NO: 178268 - DNA, 266 bp, Glycine max
gggtggttaaggaaatattgctgaagcggtactttagcaaggaaattcgaggtggcactcaattgccggagtcagatatagttaaatcttgtcgaaggttgttggatgagaggcaacagtttgaatgtgtggcgattctggaagctattaacgagagacctgacataagtgaagggttgagaaaactacattgccgttcgcttatttttgttggggatatgtcaccatttcactcggaggctgttcacatgacttcaaagttagac

SEQ ID NO: 178269 - DNA, 261 bp, Glycine max
cttcgctgttcctcttcagatcaaacgcacacagttacgctcttacaaatcaatctcttctcagaaatgggtgtggctcaaaacattcccgatgcggaggagggaaccttggagattggaatggaatacagaactgttctggagttgctgggccattggtcattcttgataaagttaagggacctaagtttcaagagattgttaatattcgcttgggagatggaactactcggcgtggcacaatgctagaagttgatggtg

SEQ ID NO: 178270 - DNA, 133 bp, Glycine max
caggaacgtggcgatcatgcgccacttgctcgcagcatccgtacatcgtgaccttgaaggatacctacgacgacgacaataccgtgcatctcgtcatggagctctgcgacgctggggagctcttcgaccgcat

SEQ ID NO: 178271 - DNA, 265 bp, Glycine max
ctgaagctaagtttcgttgccactgaggaatgaaatggccaatggtaacaacattagtcatttcttcaagctcttgcttttccttctaactttccactcttgtctcgctgccattttcttccaagagagattcgaagtggatggaagagccgttgggtgctatccgattggaaaaggagcgagggaaaagcgggtaccttcaagcacacagcagggaaatggtctggggatcctgatgacaaaggtcttcagacatataatgacg

SEQ ID NO: 178272 - DNA, 140 bp, Glycine max
gtaagcactatagtaaaaaaaggacattcattcatctatggctacccttattgctcccagcaaccactctccccaagaagatgctgaagctctcagaaaggcttttgaaggatggggaactgatgagaacactgtcatgt

SEQ ID NO: 178273 - DNA, 267 bp, Glycine max
ccgcttccaagtcctacaagaacaacccattccctccctcattgcccccactcttctccacttctcaatcctctgtaacttcaaaacatacacctcttctctctgtttctcttcactctctctctccctccctcttaactaacatggcaattgaaaaccaagacaccgctgtcagagaaatcaagcccaagaacaggagaatcatgggtgctggagggcctgatgatgaggacaataggtggccaccgtggttgaagccactgctga

SEQ ID NO: 178274 - DNA, 261 bp, Glycine max
cgatccgaagtgagatttgcgatggagaggcttcagcgaatgttcgcaggtgcaggtggacgtctagggcaccctcccccagattccccaactctcgattcctccgagcaggtctacatctcctcactcgctctatcaagatgctgaagcacggaagggctcgggttcccatggaagtgatgggtctgatgcttggagaattcgtggacgagtacaccgttcgtgtggttcatgtactcgcaatgccgcagagtggtactg

SEQ ID NO: 178275 - DNA, 137 bp, Glycine max
tgcacaacacaacgcagagtaaacactgcaatagccagagttttcaaatggcagagggaaaaggtcaagtttgtgtcacgggaggcactgggttccttggttcatggatcatcacgagactctgtgaagatggactg

SEQ ID NO: 178276 - DNA, 264 bp, Glycine max
cgcacaaacatggcccatgctcccaactaaatcatagtggcaaagcagaggctacaatatcacacaatgatattatgaacctagacaatgaaagggtaaagtatattcagtccaggctctctaagaatttgggtgggaaaatagagtgcaggaattggattcaactaccctacccgccaagtctggtagacttattgggtctggagactattatgttgttgttggtcttggtacacccaagagggacttgtcactcacttttga

SEQ ID NO: 178277 - DNA, 269 bp, Glycine max
cgatacctaagccctctcctgctcgggattttactctcacgagattagagattgaagatggtgtctgacgcgagcaagaagaaggctgcgcaggagaaggccgcggcagcggccaagagacgaagccaagccgcaactgttcgtcgaaaacgacgtcgttgcgacaggccgccgacaagcttgccgacggaattggggacattcagatatccgatcgaacctgcaccggtgtcctctgctcgcatcctctttccaaggatattcggata

SEQ ID NO: 178278 - DNA, 140 bp, Glycine max
cagaacaaaaccaaaaccaaacaactgaagctggaaggcaccaagaggttggtcacaagagccttctccagagtgatgctctttaccagtatattctggagacaagtgtctacccaagagaacctgaatccatgaagaac

SEQ ID NO: 178279 - DNA, 264 bp, Glycine max
taacactcattaattgcaagaatggcacttcgttgcttggtgatgtccctttctgttctcttcactcttggtcttgcgagagaaagccatgccagagacgaagatttttggcatgctgtttggccaaacactccattccaagttcattgcgagatcttctaaagcctggccctgcaagtgttgaaatcgatgatccccctacgcacattgaagaaacacagtacccgaaaaccttcttctataaagaagaccttcctccaggca

SEQ ID NO: 178280 - DNA, 265 bp, Glycine max
cagggtccaggcttccaaatcaacggacacagtattagttgggccaactggaagttccatattggatttgatccacgtgccggaattgtaatatcactggcatccatttatgatttggagaagcacaaatctcgagagtgttatacaaaggttacatttctgagctgtttgtgccataccaagacccaacagatgatttttactataagactttctttgatgctggagagtttgggtttggtctctccacggtctcattggtgcc

SEQ ID NO: 178281 - DNA, 264 bp, Glycine max
catgcaacatgctcttacaaggattgcactttcggagggatatggaatggtggtgggggagctggagaaaacaacttttttattgcctcatttttctttgaagttgccgatgaggctggttttgttgatccaacgcccccaatgccaaagttcgtcctgtggattttgagaatgcagcaaaggttgcctgtaacacagaattaaaggatctcaaatccattttccctcgtgttaaggatggagacgttccttatatatgcttag

SEQ ID NO: 178282 - DNA, 261 bp, Glycine max
ttgttgtgagctataagctagtttatcgtgaggagaatatgaagttgtttgttctctttgttgctgcagtagttttggtagcatggccatgccatggcgcaggctaccaaaggttccctctccgaatgaaactggctatggtgagcgttcttcggaggtaaaatgcgcaagttcttaggcttgctgtggaagcacacaacatccgagcctttaaaaccattcctgaagagtgcgttgaaccaacaaaggactacattaatg

SEQ ID NO: 178283 - DNA, 258 bp, Glycine max
ctagaatggaaggctggccatgttctctatgtttggattctttgttcaagctattgtcactggaaaaggcccattggagaacctcttggaccaccttgacaaccctgtggctaacaatgcttgggtctatccactaagtttgccccaggatcttaaatgtatatgacttcttcttccctaatccctatgatcatatcccttgtgtttgcctttgtgatttatgtgtagattatatgatcataataattgttggattag

SEQ ID NO: 178284 - DNA, 254 bp, Glycine max
acgagattccacctaaacccgtttgcgttgttgtttgcgcagaaatggcgactaagccgagcctgggaacgttgaaggagggtgatttgaaagggcagagggtgtccgtgagggtcgatctgaacgtgccttggatgacaaccttaacatcaccgatgacactagagtccgtgctgctgttcccaccatcaagtacttaactggtcatggagccaaagtgatcctttctagccacttgggacgtcctaaaggtg

SEQ ID NO: 178285 - DNA, 134 bp, Glycine max
ggcatcgttagcagttttgtagattcaacctcaatttgcagagttacgttctaatatatttacacaagactgataagagaaaatgtctctgattccaagtttcttcggtggccgaaggagcagtgttttcgacc

SEQ ID NO: 178286 - DNA, 268 bp, Glycine max
gtttattctatctcactttcctattacagtatctttacctcaatggcaccaagttctgcagtgccagatgaacaggttgttgttggagaggagattgagcatgtaagagtggtcactttgaacaggccaaggcaattaatgccatctcaccagaactggtttctcagctagcaacatatttggaaaagtgggcgaaggatgcgaaagcagaactagttattataaagggagctggtcgggctttttgtgctggaggcgatttgagagt

SEQ ID NO: 178287 - DNA, 135 bp, Glycine max
ctcactctcaactttactcctcttcaatcagttgcatattctttgctattccaatggccactgttgaggttgtgtcagccaaggttgccctcccagaggacacaaaagaggcatcattgaaggttgacgaggaca

SEQ ID NO: 178288 - DNA, 136 bp, Glycine max
ctaacgcagcatcgctattctcttcattccatggctttgcccaaccacgcaaaccgtggattaccctagtttcaaactcgttatcgtcggcgatggtggcacaggaaagacaacctttgtgaaaaggcatctcacg

SEQ ID NO: 178289 - DNA, 262 bp, Glycine max
gtctcacgatctcaacggagcacctctcttcaggtcgccatctagactgcaatcatggctgatggaccacagcatccatcagttgttcagaagctagctggacagtcttacctggtgtccaggctaagccccactttaactctgggaattattcctcgactggttcttacttcaatggaggactgcactcttctgcgttggctgttgtgtcgcctggatctccagttactgtgcatgctccagcagagaaaggagtgagtgg

SEQ ID NO: 178290 - DNA, 257 bp, Glycine max
cgttcagcagctgagactcagattactccaacccatgtatctgatgaagaggcaaacctttttgccatgcaactagccagtgcctctgtactccctatggttctcaaatcagctcttgagcttgatctgttgaaatcatagccaaggctggccctggtgttcatctttcccccactgacatttcttctcagcttccaacacagaaccctgatgcacccgttatgttggaccgcattttgcggctcttggcttgctac

SEQ ID NO: 178291 - DNA, 257 bp, Glycine max
gcttcatggattttggtatagtccctacactttgagggtggtatggaccttaaagttaaaggatataccatatcaaaacatagaagaagaccgctacaataagagtcttcaacttcttgaatacaacccagatacaagaaaactccagtgcttgtccataatggaaaacccttatgtgagtccatgcttattgttgaatacattgatgagatttggtcacataattcattacttcctgctgatccctacgagagagc

SEQ ID NO: 178292 - DNA, 219 bp, Glycine max
gctataagctagtttatcgtgaggagaatatgaagttgtttgttctctttgttgctgcagtagttttggtagcatggccatgccatggcgcaggctaccaaaggttccctctccgaatgaaaactggctatgtgagcgctcttcggaggtaaaatgcgcaagttttaggcttgctgtggaagcacacaacatccgagcctttaaaaccattcctgaaga

SEQ ID NO: 178293 - DNA, 260 bp, Glycine max
tctgaaaccactctcgcgtcgttaccatgccgcaaggggattacatagaacgccacagaagagactatggctaccgtctcgatcacttcgagcgtaacgcaagaaagaggcacgtcaagttcacaagcgcttgcaattgcccagaaggctctgggtattaagggcaaaatgattgccaagaaaaattatgctgaaaaggcgcagatgaagaagactttggctatgcatgaagaatcatcgtctaggcgcaagactgatga

SEQ ID NO: 178294 - DNA, 262 bp, Glycine max
ggcgaacaatttagatcagactctaaaacagttaaccaacaagctttcttttatgctagtgaacgcgaagtccatcacaacgacatatttatattcggcatagataacaccgtactctctaatatcccatatatgaaaaacatggatatggggtggaggaatttaatgaaaccttatatgatgaatgggttaacaagggcgacgcaccggcattgccagagactcttaaaaattacaacaagctgttgtctcttggcttcaa

SEQ ID NO: 178295 - DNA, 133 bp, Glycine max
ccaacatctgcctcacccgtctttgttgctgctccagcagagaaaggccattttcttttagactttctcatgggaggtgtttcagcagctgtctccaaaactgctgctgctcccattgaacgtgttaagtttt

SEQ ID NO: 178296 - DNA, 289 bp, Glycine max
cggagcgtgttgtacaaggggcaattttttcaaaacctttttctctctcgcaacctcacctcttcctccttcaatctctttcggaatttcccaaaatccttagtgggaggaagagatggttctgactcagaagcttcacgaagccttcaaaggcaccgtcgagaggattactggcccccgaaccgtttccgccttcaaagaaaaaggagttctcagtgtctctgagttcgtcaccgctggcgataatctcgttgccaaatgccccacctggtcctgggaatcgggtgat

SEQ ID NO: 178297 - DNA, 281 bp, Glycine max
cgcagagaagaacagagagagatccatccatcaattccaatggccgatcagctcaccgacgaacagatctccgagttcaaggaagccttcagcctcttcgacaaggacggggatggttgtattaccaccaaggaacttgggaccgtgatgcggtcacttggccagaacccaactgaggcagagctgcaggacatgataaatgaggttgatgctgatgggaatggtaccattgatttcccagaattcctgaatctcatggctcgcaagatgaaagacactga

SEQ ID NO: 178298 - DNA, 285 bp, Glycine max
ctagtttatcgtgaggagaatatgaagttgtttgtcttctttgtcgctgcagtagttttggtagcatggccatgccatggcgcaggctaccaaaggttccctctccgaatgaacactggctatggtgagcgttcttcggaggtaaaatgcgcaagttttaggcttgctgtggaagcacacaacatccgagcctttaaaaccatccctgaagagtgcgttgaaccaacaaaggactacattaatggcgaacaatttagatcagactctaaaacagttaaccaacaa

SEQ ID NO: 178299 - DNA, 149 bp, Glycine max
ccggtttgatttgacttctctgtgtagagcgtatcatattcaccagactttagggttagaggatcggtttaagcagtattattttgagaacaggaagcttcagttgacttcggattttcaggtttcgtcgatgactccttttctggagt

SEQ ID NO: 178300 - DNA, 285 bp, Glycine max
ctttttggttctatcgagaagcagaggtggtcttatgcatgtgcaaaacagttgattgagaggctgatttttgctgagggtgctgaaaaatggctggagtttccatttgtaaggccatttaactggattggacctcgaatggatttcattcctgggattgatggtccaagtgagggtgttcctcgggttcttgcttgctttagcaataatcttctccgaggagagcccctcaagcttgtggacggtggccagtcccagagaaccttcatttacattaaagatgct

SEQ ID NO: 178301 - DNA, 161 bp, Glycine max
tctgtttgttgtgagctataagctagtttatcgtgaggagaatatgaagttgtttgtcttctttgttgctgcagtagttttggtagcatggccatgccatggcgcaggctaccaaaggttccctctccgaatgacaactggctatggtgagcgttcttcgg

SEQ ID NO: 178302 - DNA, 283 bp, Glycine max
ctttgttcactcttcttctcttgcggctagggttttagcgcactaccttctagatttaaggcagatgggtaaggaaaaggttcacatcagtattgtggtcattggccatgtcgactctgggaaatccactaccactggtcacctgatttacaagcttggaggcattgacaagcgtgttattgagaggtttgagaaggaagctgctgagatgaacaagaggtctttcaagtatgcctgggtgctggacaaacttaaggctgagcgtgaaagaggaatcaccatt

SEQ ID NO: 178303 - DNA, 279 bp, Glycine max
gtaaaagaaaagccttccactattccatatatagcagccaaaaaagaatgaagaatactgcgttgttcactatctttctactccttgctttcacctcatacctaccttcagccaccgctgctagtgtgtacgatacggatggtaatattcttcaaaagggtcgcacatattttgtgttggcagctacaagaggaaacggcggtggaatagaatttgccgcaactggaaacgacactgccctctaactgtcgtgcaatctcccagtggcgatctattggg

SEQ ID NO: 178304 - DNA, 279 bp, Glycine max
cagagacagagcagcactcacattcacaacgaaggtttcctattcatcagacatggtgaaggcaatcagagttcacgaactcggtggccctcaagttctgaagtgggaggatgtggaaattggagatccaaaagaaggcgaggtccgtgtgaggaacaaagccattggggttaatttcattgatgtctactttcgcaaaggagtttacaaagccccttcttttcccttcactccaggtatggaagctgttggggttgtgacagctgtcggtgctggact

SEQ ID NO: 178305 - DNA, 149 bp, Glycine max
ctagggttatcatttctccatttccattttctctctcacttttcaagaatcgtaagctctgggaaagtcttacccaactgtgagtgctgattaccagaaggccgttgagaaggcgaagaagaagctcagaggcttcatcgctgagaaga

SEQ ID NO: 178306 - DNA, 152 bp, Glycine max
attctctttgcgcagttccctacctctcctttcaagatgcagatcttcgtcaagaccctcaccggaaagaccatcacccttgaggtggaaagctctgacaccatcgacaacgtcaaggccaagatccaggacaaggaaggaattcccccgga

SEQ ID NO: 178307 - DNA, 277 bp, Glycine max
gttcatttctacacatccctagctctgtcgttccgtcgttgacgatggcgtttcgggtgcgaagcctgacctccgctctctctttcttctctctctcttgtccatcgcttccgccaatgtcttcttcgaagagcgtttcgatgacgggtgggaaaatcgatgggttaaatcagattggaaaaaagatgagaacgtggctggggagtggaaccacacctctggtcaatggaatggagacgctaatgacaaaggtattcaaaccagtgaggattacaga

SEQ ID NO: 178308 - DNA, 265 bp, Glycine max
tcgtgaacacaaagctggagagtaccatggtgagcacaagccagagcacaaagaggggttcctagacaaagtcaaggacaagatccatggtgacggcggcgccgccgagggcgagaagaagaagaaggagcagacgaggaaggagcatggccatgagcatggccatgacagcagcagcacgcgtgacagacgttagactgctgcatcacctatatatttacacggtttatgcggaccatagtagcgagggctgtgccctaatttc

SEQ ID NO: 178309 - DNA, 156 bp, Glycine max
cttaaaatctgtgaagcttctgatgtggtttcagtttagatgaatcataggatcagccatataataatcttagataatggatatgaggtcattgtaatgataattatatttatctttagctgcttgcaatggtatttctggctttactatgttaaa

SEQ ID NO: 178310 - DNA, 294 bp, Glycine max
tgagagaaatggcttgcaggcaattgtgggcttcaagagctgcctcttacctgaggatctctgtgtttcacagaggcttttctaatgttattaaagatttcaagtatgttgattctcatgagtgggtgaaagttgatggaaattacgcaaccatcggcataactgatcatgcccaagatcatttgggtgatgttgtatatgttgaattgccagaagtgggagcagctgtgacacaaggagtagttttggtgcagttgaaagtgtgaaggctactagtgatattaactctcctat

SEQ ID NO: 178311 - DNA, 153 bp, Glycine max
gtggaaggctgtggccttgacctctcatctgctaaagattaccatcgcaaacaccgagtttgtgaagctcattccaaatcccctaaggtggttataactggtttggaacgccgattttgccagcaatgtagcaggttccatgctctgtcagag

SEQ ID NO: 178312 - DNA, 146 bp, Glycine max
ctaagctaaacaatttcatcaagcctgccatggcttcctcgtgtgcttcctctgccattgcagctgttgccatctccacaccaagttcccagaagaatggatcactcttgggaagcacaaaagcttcttttcttagtgggaggaaa

SEQ ID NO: 178313 - DNA, 277 bp, Glycine max
tctaaaacatggattgaagtctctggttcatctgctaaagatgttgccaagcagcttaaggaacaacaaatggtaatgcctggacaccgtgagtcaaacttgcagaaagagctgaaccgatacattcccacggccgcagcatttggaggcatctgtatcggtgctctgacagtgttggcagacttcatgggggccatcggttcaggaaccggaatattgcttgcagtaacaatcatctatcagtactttgagacatttgagaaggagagagctagtg

SEQ ID NO: 178314 - DNA, 149 bp, Glycine max
cccaagtgaaagtgagacacaataaaaatcaaagagcataatgtcagggatcattcacaagattggggagacccttcatgtgggagggcacaagaaggaggaggagcataagggtgagcaccatgctggagcctacacaggggagcacc

SEQ ID NO: 178315 - DNA, 280 bp, Glycine max
cttctaaagcctctccctgcaggtgttgaaatcgatgaactcccacacgcaaattgatgatacacagtacccaaaaacattcttctataaagaagaccttcatccaggcaaaacaatgaaagtacaattcaccaagcgtccctatgcacaaccttatggtgtatatacatggttaacggatattaaagacacctctaaagaaggatatagttttgaagagatatgcatcatgaaagaagcgtttgagggagaagagaagttttgtgcgaaatccttggga

SEQ ID NO: 178316 - DNA, 276 bp, Glycine max
gctagtttatcgtgaggagaatatgaagttgtttgttttctttgttgctgcagtagttttggtagcatggccatgccatggcgcaggctaccaaaggttccctctccgaatgaaaactggctatggtgagcgttcttcggaggtaaaatgcgcaagttttaggcttgctgtggaagcacacaacatccgagcctttaaaaccattcccgtagagtgcgttgaaccaacaaaggactacattaatggcgaacaatttagatcagactctaaaacagt

SEQ ID NO: 178317 - DNA, 278 bp, Glycine max
gtcactctcgtgtcgggtgaaggcgaaaaccaaatcaagatgctgagagtgggcgcaaagaggcttttgggaacgacgtcgttgggcgttagggttccggcgaggctgtaccacgagagggttgtggatcactacgacaacccccggaacgttggatcgttagacaagaacgacccgagcgtggggaccggtttggtgggggcgccggcgtgcggcgacgtgatgaagctccagattaaggtcgacgacaaaaccggaaaaatcgtcgatgctcgatt

SEQ ID NO: 178318 - DNA, 148 bp, Glycine max
cacaagacgaatgtggtggggaccttgaacatgctggggcttgcaaagagagtgggcgcgaacttcttgttgacgagtaccagtgaggtttatggagatcctctgcagcaccctcagaaggcgacttactggggcacagtcaacccaa

SEQ ID NO: 178319 - DNA, 150 bp, Glycine max
tttcgctaacactcattaattgcaagactggcacttcgttgcttggtgatgtccctttctgttctcttcactcttggtcttgcgagacaaagccatgccagacacgaagatttttggcatgctgtttggccaaacactcccattccaagt

SEQ ID NO: 178320 - DNA, 282 bp, Glycine max
ctacatctatgaagacgagttgagtcacttcgttaatactggcgcccttgatgagctcattcttgccttctctcgagagggacccaccaaggagtatgtacaacataaaatgatggagaaggcttcagaaatttggagcatgatatcacaaggagcttacatttatgtgtgtggtgatgccaagggcatggccagggatgtacaccgcgccctgcacacaattttgcaagagcagggttctctcgatagtttctaggctgagagcatggtaaagaatctaca

SEQ ID NO: 178321 - DNA, 280 bp, Glycine max
gatccatctcttgtttcttgctttctttcttcaccatgtcacttgctgggaaaatcaccactgaaatcggggttcatgcaaccgctacaaagtggttcaacctcttcgcaacacaactccatcatgttcaaaacctaactgatagagtgcatggaaccaagctgcatcaaggtgaagactggcatcacaacgagaccgtcaagcactggacttataccatagatggtaaggcttacaacatgtctggagagtaattgaatccattggatgaacagagcaa

SEQ ID NO: 178322 - DNA, 103 bp, Glycine max
caacagcagctgcagcagcaatggctcccaaacgaggtggaaaggctccggctcttgccgctaagaagaagcctgagaaggtcacgaatccgttgttcgagaa

SEQ ID NO: 178323 - DNA, 274 bp, Glycine max
  unsure (1)..(274): unsure at all n locations
ctgtgcagtttcctcgctctcttttctgcaattttcttttttgtaccttctctgcggttatctttttgagcttcaatggcggacgctgaaaccttcgctttccaggctgagatcaaccagcttctcagcctcatcatcaacaccttctacagcaacaaggactctttcttgcgtgaactcatcagcaacgcttctgatgctttggataagattcgatttgagagtttaaccgacaagagcaagctcgatgctcagncagagctcttcattcgtc

SEQ ID NO: 178324 - DNA, 274 bp, Glycine max
ggccaggcaagccccactcaaccaccacacctctcctcgttcacgctacccctttctgctcttcttctacctttcaagttttaaaagtataaagatggcagagacattcctatttacctcagagtcggtgaacgagggacaccctgacaagctctgcgaccaaatctccgatgctgtcctcgacgcttgcctcgagcaggacccagacagcaaagttgcctgcgaaacatgcaccaacaccacttggtcatggtcttcggagaaatcacgacca

SEQ ID NO: 178325 - DNA, 148 bp, Glycine max
ctagaagggagagaaagtgcttctgacagtgaagccacaatatggatttggtgagaagggtaagccagcacatgatgaagaaggtgcagttccaccaaatgcaacattgcagattactcttgagttagtttcttggaagactgtctca

SEQ ID NO: 178326 - DNA, 147 bp, Glycine max
ctaaggagatgggagtggagaagcagttgttgaggtctggcaccggtccgaagccaattcccggtcagaacgtaaccgttcactgcactggtttcgggaagaacggtgacctttctcagaaattctggagcacaaaggatcctggcc

SEQ ID NO: 178327 - DNA, 149 bp, Glycine max
tggaatagcaatatcaacactgtgttgggctaccatgttttctctgcttatctatctctcattcataactagtccacttctagtgctcaagctctatggaattccatattggatatttgttatgtggctggactttgtcacatacttgc

SEQ ID NO: 178328 - DNA, 143 bp, Glycine max
caatgtcgttgattccaagtttcttcggcaccgggcgaagaaccaacgtcttcgaccccttctccctcgacgtgtgggacccattccatggcttccccggcaccaccgccctctccgctccacgttccgagacggcggccttc

SEQ ID NO: 178329 - DNA, 154 bp, Glycine max
cttaactagaaacagtgtgatgaaaatgaaggtccttgttttcttcgttgctacaattttcgtagcatggcaatgccatgcgtacgatatgttccctctccgaatgaacactggctatggtgcccgtactccggaggtgaaatgcgcaagttgg

SEQ ID NO: 178330 - DNA, 273 bp, Glycine max
ctctttctctttctctgccaacctgcacactcttcactcgatcaaacagaaaatggcaaagaatgtggggatccttgccattgacatctacttccctcccgcttgcgttcagcaggaagcattggagactcatgatggtgccagtaaagggaagtataccattggtcttggacaagattgcatgtcattctgtaccgaagtagaagatgtcatctcaatgagtttgacagtggttacttctcttcttgagaaatatgagattgatcctaagct

SEQ ID NO: 178331 - DNA, 273 bp, Glycine max
ggagttgatgatgcagctgttaaggttgttgacattgttgacacattcagacttcaggagcaacccgcattcgataagaagcagtttgttaccttcatgaagaggtttatcaagaatttgactcccaagctcgatgcagagcaacaggagttgtttaagaagcacatcgagggagcaactaaatacctgctctctaagattaaagatttccaattttttgttggtgagagcatgggtgatgatgcttgcttggtctttgcctactacaaggac

SEQ ID NO: 178332 - DNA, 144 bp, Glycine max
ctcttcttctcttgcggcgttggttttagcgcagcttcttctagacttaaggaagatgggtaaggaaaaggttcacatcagtattgtggtcattggccatgtcgactctgggaagtccactaccactggtcacctgatttacaa

SEQ ID NO: 178333 - DNA, 144 bp, Glycine max
cgataaaatattgtacacataaatctagctccaattcctaatcacctggttaatttcttcacatagagctatccagatccaacgttaacatgaagaatgttttagtaaggtcagctgcgcgagctctgcttggcggcggtgggc

SEQ ID NO: 178334 - DNA, 144 bp, Glycine max
gtcggtgttccaaggaagcctggcatgactcgtgacgaccttttcaacatcaatgctggcattgtcagggacttggtttctgctgttgcggattactgccctgatgcttttgttcaaattatcagtaaccctgtgaactctacc

SEQ ID NO: 178335 - DNA, 152 bp, Glycine max
ctgagctataagctagtttatcgtgaggcgaatatgaagttgtttgttctcgttgttgctgcagtagttctcgtagcatggccatgccatggcgcaggctaccaaaggttccctctccgaatgacaactggctatggtgagcgttcttcgga

SEQ ID NO: 178336 - DNA, 268 bp, Glycine max
ctacctacaggtttagaaaatccagaagttcttgcaagacaaacagtgtttagtgtaagtgagattgaagcgctatatgaattgttcaagaagatcagcagtgcagtgattgatgacggactaattaatacggaagaatttcagttggcattgttcaagacgaacaagaaagagagcttatttgcagatagggtgtttgacttgtttgatacaaagcacaacgggcaacttgattttgaagagtttgcacgagctctctctgtctttc

SEQ ID NO: 178337 - DNA, 84 bp, Glycine max
gtctcctgtttacaaacctccagttgaaaaccccccaatttataagcctccagtagagaagccaccagtgtacaagcccccagt

SEQ ID NO: 178338 - DNA, 268 bp, Glycine max
gtttgttgtgagctataagctagtttatcgtgaggtgaatatgaagttgtttgttttctttgttgctgcagtagttttggtagcatggccatgccatggcgcaggctaccaaaggttccctctccgaatgaaaactggctatggtgagcgttacttcgatctaaaatgcgccagttttaggcttgctgtggaagcacacaacatccgagcctttacaaccattcctgcagagtgcgttgacacaacgctggactacattaatggcgaa

SEQ ID NO: 178339 - DNA, 273 bp, Glycine max
cgagataactagaaacagtgtgatgacaatgaaggtccttgttttcttcgttgctacaattttcgtagcatggcaatgccatgcgtacgatatgttccctctccgaatgaacactggctaatggtgcccgtactccggaggtgaaatgcgcaagttggaggcttgctgtggaagcacacaacgtctttggctttgagaacattcctgaagcgtgcgctgaagcaacaaagggatacatccatggcgaacaatatagatcagactccaaaacag

SEQ ID NO: 178340 - DNA, 258 bp, Glycine max
gggctaacaaaagacgacgccgttttgacccggcgaccgggaaatggtggagccggtggagcttcgctgcgaggagcagctctcgcttctgtcagattcgagcaatggtgatccgtcgtggcggttgaacttcgacgggtttcagctatcttcggagcacgcggagaagcaagtgcaaacccctcgcggactccacgactgttacggggttctaggtcaagaagataatattgcagagtactatcagcagcaggttga

SEQ ID NO: 178341 - DNA, 272 bp, Glycine max
tctgtatggaaacatcgtgcgtagtggagggtctactatgtttccgggaattgctgatcgcatgagcaaggaaattagtgctcttgcacccagtagcatgaaaatcaaggtggttctacctcctgagagaaagtacagtgtccggattggtggttctatcttggcatcacttagcaccttccaacagatgtggatctccaagggtgcatatgatgaatctggggcagccatcgttcatcggaagtgcttctaaagttgggtcaagtcgagct

SEQ ID NO: 178342 - DNA, 144 bp, Glycine max
ctacaagacaactatcataagtgaccaaaacagacaacctttggggaatcataaaattcttcagaatggctcgcacaattacaattgcagcaatgtgtcttcttctctcattagtgtccctctgtgtcaccaccaacgcattaa

SEQ ID NO: 178343 - DNA, 180 bp, Glycine max
ctttttacttcccctatggctcgtcactccttgctcttagccctacctcctcttcgccgccgtggccaccgccgcgatggcggtggccgcgtccgacgccgacgacatcctgatccgtcaggtggtgccagatgttggcgagccgaagaggaggacaactgctgaacgccagcaccactt

SEQ ID NO: 178344 - DNA, 256 bp, Glycine max
ctagtttatcgtgaggagcatatgaagttgtttgttttctttgacgctgcagtagttttggtagcatggccatgccatggcgcaggctaccaaaggttccctctccgaatgaaaactggctatggtgagcgttcttcggaggtaaaatgcgcaagttttaggcttgctgtggaagcacacaacatccgagcctttaaaaccattcctgaagagtgggttgaaccaacaaaggactacattagtggcgaacaattta

SEQ ID NO: 178345 - DNA, 95 bp, Glycine max
gtttatgttatgtgggtaagtcacctaagacactccacgtacctcgttgttgtctcttacgcggctttaataaatcttctgcccttgttccaaaa

SEQ ID NO: 178346 - DNA, 270 bp, Glycine max
tgttgatcgagataactagaaacagtgtgatgaaaatgaaggtccttgttttcttcgttgctacaattttggtagcatggcaatgccatgcgtacgatatgttccctctccgaatgaacactggctatggtgcccgtactccggaggtgaaatgcgcaagttggaggcttgctgtggaagcacacaacacgctttggctttgagaccattcctgaacagtgcgttgaagcaacaaaggaatacatccatggcgaacatatagatcagact

SEQ ID NO: 178347 - DNA, 271 bp, Glycine max
ggttttctcattaacgcttcttctctcttcactctgcgaaggtgcaacctgacagcctccaaatccaatggcttcagagaagaaactttcgaacccaatgagggagataaaagtgcagaagctcgtcctcaatatctctgttggcgagagtggagatcgtatcaccagagccgccaaggtgttggaacaacttagtggccaaaccccagtgttttccaaagcacggtacactgttcgttccttgggattagaagaatgagaagattgcatg

SEQ ID NO: 178348 - DNA, 161 bp, Glycine max
  unsure (1)..(161): unsure at all n locations
cacaagccaagaagaagccacagagaactagtgtacgcatctcacgcgcaagaaaaaaatggcatctcacatcgctgcatanccccgtatgggtcccaagagagagctcaagttcgctctcgagtctttctgggatcgcaagagcagcgccgaggatttgc

SEQ ID NO: 178349 - DNA, 233 bp, Glycine max
ataccctaaacgactctatctctcttcgttttgttcttccttgcgctcctcctcgttcgttcgttctccctcgcgtagatcggcaatggcggagaccgagacgtttgctcttccaggctgagatcaaccagctcctcagtctcatcatcaacaccttctactccaacaaggaaatcttccttcgtgaactcatcagcaacgcctctgatgctttggacaagattagatttgag

SEQ ID NO: 178350 - DNA, 280 bp, Glycine max
ctgagagagagagaaacaaagcagcacccatttggatcctctcttctcttctttgatctccgttaccctttttgttttctcaacagagagagagagagagaatcttccgaagttcgtttgcgtgtgttgtgtggtcagtcaccgatggcagcaccacctgcgaaggcacgtgccgattacgattacctcatcaagcgtcttcttattggcgatagcggtgtgggaaagactttgtcgcttttgcgattttctgatggttccttcaaaccagttttatcac

SEQ ID NO: 178351 - DNA, 275 bp, Glycine max
ccagacttaacaacagcacaaagcgggttactgtctgttcaagctaccatctctctctctctttcttagtgcctccttgccagaagttaaaatggcccaagaaactttcctattcacatctgaatcagtgaacgaggggcaccctgacaagctctgtgaccagatctccgatgctgtgctcgatgcatgcttggagcaggaccctgacagcaaggttgcctgtgcaaacctagcaccaagaccaccatggtgatggttttcgagagatcacaacc

SEQ ID NO: 178352 - DNA, 276 bp, Glycine max
tgataactagacacagtgtgatgacaatgaaggatcttgttttcttcgttgctacaattttcgtagcatggcaatgccatgcctacgatatgttccctctccgaatgaacactggctatggtgcacgtactccggaggtgaaatgcgcaagttggaggcttgctgtggaagcacacaacatctttggctttgagaccatctctgaagagtgcgttgaagcaacaaaggaatacatccatggcgaacaatatagatcagctccaagacagttaacca

SEQ ID NO: 178353 - DNA, 256 bp, Glycine max
tgtttgttgttgtaactcgttcttcttcttttgttgttctgtgtttgtgtttgttttttctctcacctgaaaatgtcttgctgcggtggtaactgtggttgcggaagctcctgcaagtgcggcaacggctgcggaggctgcaagatgtacccagacttgagctacactgagtcaaccaccaccgagaccttggtcatgggagtggcacctgttaaggctcaatttgagggtgccaaaatgggtgtgcccgctgaaa

SEQ ID NO: 178354 - DNA, 271 bp, Glycine max
caactcgttagccattggctaaacactcatgcggttgttgagccattcgtcatagcaacaaataggcatctgagtgtggttcacccaatttacaaacttttgtttcctcactatcgtgacaccatgaatattaattcacttgcccgcaaatccttggtcaatgcagacggtattatagagaaaacatttttgtggggtaggtacgctttggaaatgtctgctgttgtttacaaggactgggttttcactgatcagcactgcccaatgatct

SEQ ID NO: 178355 - DNA, 252 bp, Glycine max
atctgcttcaaaatgctgagtttgatatcaagaaagaagctgcttgggctatctcaaatgctacatccggtggttctcatgaacaaatcaagttcctagtaagccaagggtgtattaagcccttgtgtgatcttctcatctgtcctgatcctagaattgttacagtttgtctggaaggccttgaaaacatcttgaaggtgggagaagctgataaaaacataggaaatactggtgatgtgatctatatgccca

SEQ ID NO: 178356 - DNA, 272 bp, Glycine max
gtcggcagcgatgacaaggctagctgtgcggaatcctgggcttctgcattgatttcagaattggagcactttagaagcggaaaggagaaggaaccattgtcatgcaaaagtgttggagcttcagacatagaccttatggatgactttgttgaaatggaaaatttagcagtggtctctgttgaaaaagccactgaaatctcgtctgcttctctgaacgccattagtgagatcaatggcttctcagggattgacaaaaagaaaccatcctgaag

SEQ ID NO: 178357 - DNA, 269 bp, Glycine max
ctgcactccgtcttcatcaatcagcatcaccaccgctccaacacaggggaaaatgagggagatccttcacgttcagggagggcaatgcgggaaccagatcggttcgaagttctgggaagtggtgtgcgacgagcacggcatagatccgacggggaagtacgtcggaaactcagatctacaactcgagcgcgtgaacgtgtactacaacgaagcttcctgcgggcggtttgtcccacgcgcagtgctgatggcctggagcccggaaccat

SEQ ID NO: 178358 - DNA, 267 bp, Glycine max
ctcgagccgggcttgccagaaatatgggagcatcttcaagcgtcctcagggtcttttcatacggtttgaaagagaaggggaagattcttgaagtattgaaaaactggcctgagaaaagtattcaagttattgttgtaacagatggtgaacgaattttgggacttggggatcttggatgtcaggggatgggaattcctgttggtaaattggccttgtacacagcactaggaggagttagaccatcagcatgttgcctattacgattga

SEQ ID NO: 178359 - DNA, 266 bp, Glycine max
agcgtttctcttattgcttggtctctcactctttcgacaaagaacgagttcgcaaaccgagtccactcattctcggccactacgatgattattccagcgagcgtgttgagtttgtttacacctccatgcttcggaatccgaagcattcttatttctactgcgtcggactcaccggaatctctgtagggaagaggactattctggccccggaaatgctacggagggtggaccgcaaaggggacggaggcgtggtgttgacagcggaa

SEQ ID NO: 178360 - DNA, 256 bp, Glycine max
gtcttctgatgctttggataagattcgattcgagagcttaaccgacaagagcaagctcgatgctcagccagagctcttcattcgtcttgtgtctgacaaggataacaagactctttccattattgacagcggcattggaatgaccaaagcagatttggtgaacaacttgggtaccattgcgaggtccgggaccaaggagttcatggaggcgttgcaggccggtgctgatgtcagcatgatagctcattcggtgtgg

SEQ ID NO: 178361 - DNA, 241 bp, Glycine max
taaaggccatccccattaatcgtcatatgagccagtcaaagagacttggagccttgaataagttcaaatctgggggaatgccaatatctcctctgtactgatgtagctagtagaggactggatattccgactgtagatatggtgattactatgacatcgcacaaactccaacgatatatacatcgcgtgggaaggatgctcgtgcagggcgctctggggtcgccattcccctgtaatcagt

SEQ ID NO: 178362 - DNA, 271 bp, Glycine max
gtcagaaaagcgctggagattctaccacaagacaatgtcacactgaagtttttgttggaggcgacaggtgatgtaaacacaagtgatgtggacctttcagttgcaagcaaggccatcattttgggatttaatgtgaaagcaccaggctctgtgaaaagctatggagagaacaaagctgttgagattagattatacagagtcatttatgaattaattgatgatgtacgaaaagcaatggaagggctactagaaccgttgaggaacaagtaac

SEQ ID NO: 178363 - DNA, 263 bp, Glycine max
cttgagccgtaaattctcaaaggcaccaatttcattgctcagagactcccaaattctcccactgagataaaatgtctctaatcccaaacttcttcggtggccggagaaacaatgtgttcgatcctttctcactggacgtgtgggatcccttcaaggattttccttttccaaatacgctttcttcagcttccttccctgaattttctcgggaaaattcagcatttgtgagcacccgtgttggactggacggaacccagaggcgc

SEQ ID NO: 178364 - DNA, 263 bp, Glycine max
gtcattgaccccaagaagggtaatttgggaattattgctcccatcgccattggtttcattgtcggcgctaacattttgttgggtggggccttctctggagcggccatgaaccccgctgtgacatttgggcctgctgtcgtgagctggacctggaccaaccactggatctactgggccgggcctctcatcggtggtggaatcgctggccttgtttacgaggttcgtcttatcagccacacccacgagagcttcccaccctgact

SEQ ID NO: 178365 - DNA, 219 bp, Glycine max
ctaaaagaaagaatcccaggcgaggagaaagatggaggggaaggagcaggatgtgtcgttgggagcgaacaagttccccgagagacagccgattgggacggcggcgcagagccaagacgaaggcaaggactaccaggagccggcgccggcgccgctgagttgacccgacggagtttacgtcatggtcgttttacagagcagggatagcagagtttgtgg

SEQ ID NO: 178366 - DNA, 132 bp, Glycine max
gtgattctaagagcagattttgctgctctttgaagaagggtgtttgcttgattttggagatgtcgctgctctcagatctcatcaaccttagactctcagacactactgagaaggtgatcgcagagtacatat

SEQ ID NO: 178367 - DNA, 255 bp, Glycine max
cacacccttagtcgcctgaaaacgattgttgttgcagggcaaacacaaagatccgggtcgacccgtcgcagatccgatccaaataagaaagatgaatattttcaggttagccggagacatgacccatttggccagcgtcctcgtcctcctcctcaagatccacaccatcaaatcctgcgccggtgtcctcattgaaaactcaagaactctatgcactcgtttttgcttgtcgctacttagatatctttactatta

SEQ ID NO: 178368 - DNA, 251 bp, Glycine max
ctgcaaggaggtttacctaacccccgccgttctccgcgagtgccgtcgcatcatcgcctcgagcgagattatgaaggaagatgataacaactggcccgaaccggatcgggtggggcggcaggagctcgagattgttatggggaacgagcacatttcgttcaccacgtcgaagattgggtctcttgttgatgttcagagcagtgctgaccccgagggtcttcgcatcttttactatcttgttcaggattgaa

SEQ ID NO: 178369 - DNA, 256 bp, Glycine max
atagtttgttgtgagctataagctagtttatcgtgaggagaatatgaagttgtttgttttctttgttgctgcagtagttttggtagcatggccatgccatggcgcaggctaccaaaggttccctctccgaatgaaaactggctatggtgagcgttcttcggaggtaaaatgcgcaagttttaggcttgctgtggaagcacacaacatccgagcctttaaaaccattcctgaagagtgcgttgaccacataggacta

SEQ ID NO: 178370 - DNA, 256 bp, Glycine max
ttcacacccaccattggatccaccaatctccaaccttcttctccactgttccgtttctctctccaacggagagtcttttgttttttgtggcgagtttgttgcacgtttaagaagcaatggcacgcaagaagatcagagagtatgactccaagaggttgttgaaggagcactttaagagaatctctggccaggagttgcccatcaagtctgcacaggttacagaatccaccaatttcagtgagtagcagagaaggaa

SEQ ID NO: 178371 - DNA, 257 bp, Glycine max
ctcgactctatctctcttcgttttgttcttccttgcgctcctcctcgttcgttcgttctccctcgcgtagatcggcaatggcggagaccgagacgtttgctttccaggctgagatcaaccagctcctcagtctcatcatcaacaccttctactccaacaaggaaatcttccttcgtgaactcatcagcaacgcctctgatgctttggacaagattagatttgagagtttgacggacaagagcagctcgatgctcagc

SEQ ID NO: 178372 - DNA, 264 bp, Glycine max
gagcaagaacactgttccaatacggaatctaaggcaaagcaaaccaaacatcttgaatcatgggttcaacaggtgagactcagattaccccaacccacgtatctgatgaagaagcaaaccttttcgccatgcaactagccagtgcttctgtccttccaatgatcctcaaatcagcacttgagcttgatctgttggaaatcatagccaaggctggccctggtgttcatctttcccccactgacatttcttccagctcccaacaca

SEQ ID NO: 178373 - DNA, 174 bp, Glycine max
gttgaacatgtcaaagctgagagaaatctacttgctgaagttgacagcaattgcattgttaaactttattgttcctttcaagatgaggactatttatatctcataatggagtatctacctggtggagatatgatgacattgctgatgcggaaggatatactcacagaagatgag

SEQ ID NO: 178374 - DNA, 257 bp, Glycine max
ctacaacattgtggtcttagtcataatcttcgtgacgaagatgtggttcagattgttaagaaaaaggaaaaggaagagggaggaaggggacgatttaaatcacattccaatgctcctgctaggatatctgacagagagaagaaggcaccactgaagacataattatatgacactgcctgtgatatcattgatttttgcctggtggatgggaaaaaatgactggaggtgatgatacatccaaaggcaaggttcttatc

SEQ ID NO: 178375 - DNA, 248 bp, Glycine max
  unsure (1)..(248): unsure at all n locations
ctacgtcgttttgatacagcttctaagaatatagtgatcttcgaacgtgtcccttattatgcntctctcattcaattttcttcttggatgggtggagatcgtgatggcaatccaagagtaactcctgaagtgaccagagatgtttgcttattggctagaatgatggctgctaacttgtactactcccagatagaggatcttatgtttgagctgtcaatgtggcgctcccatgacgagctagtgccgtg

SEQ ID NO: 178376 - DNA, 256 bp, Glycine max
cttacccttcttctctctgtgtgtgtgcgcatcaaacgcaaccagacgcagccatggccactgcaagaactgtgaaggacgtttctcctcatgagttcgtcaaagcttactcttctcacctcaagcgatctggcaagatggagctgccagagtggactgatattgtgaaaactgcaagatttaaggagttggctccttatgatcctgactggtactatgtcagagctgcttcccatggcagaagatctacttgaga

SEQ ID NO: 178377 - DNA, 258 bp, Glycine max
gcttcgtgttgtagctagctcctcgaaaatgctggcacgcctcgccgcgagtcgcttcaacgagatccgtcagattttccgtcagccttctagggctttctcgaccgctccgaactaccaccttgacacaccggacaacaaccctaaacttccatgggaattcaccgacgccaatcaagcaaaggttaaggagattttgtctcactatccatccaactataagcaatctgctacaattcctctttggatcttgcccag

SEQ ID NO: 178378 - DNA, 251 bp, Glycine max
gtttgacaatgagacatcagtgcctccttctggtctccctggtgttggtctcctacgctgcccggtcggaatcagcgctgggcggctggagccccatcaaggacgtaaacgacagccacgtggcggagatcgccaactacgcgctgagcgagtacgacaagcgttctggggccaagctcacccttgtcaaggtcgtcaaccgcgagactcaggtcgtttccggcaccaactaccgtctcgcctcaaagcca

SEQ ID NO: 178379 - DNA, 230 bp, Glycine max
aatttcctgtttacgatcttattgcaattttgcaactttcaaagcttattagctaaagtaacatcaaaagatgtcattgattccaagtattttcggtggcccaaggagcaacgtgttcgatccattctcactcgatatgtgggatcccttcaaggattttcatgttcccacttcttctgtttctgctgaaaattctgcatttgtgaacacacgtgtggattggaaggaga

SEQ ID NO: 178380 - DNA, 282 bp, Glycine max
gagtgatcggtgttcacttgatccttcataagtcgtcatcatcatcatcatcatcaccgttgattgaagaagatgccgatcagaaacatcgccatcggaaggactgaagaggctactcaccccgacacgttgaaggcggcgttggctgagttcatctccatcttgcatcttcgtgttcgccggttcacgttccggcatcgcctacaacaagctcaccgcaacggcgccgccactcccgtcggcctcatctccgcttccatcgcccatgctttcgacctcttc

SEQ ID NO: 178381 - DNA, 289 bp, Glycine max
  unsure (1)..(289): unsure at all n locations
attgtcttcttcatatcttccttgtcactgcccgtgtgtcgccgccatggccaccgtcaccacccaagcctccgccgcaattttccggccatgtacctcgaaatcgaggtttttgaccggctcttccggtaaacttaaccgggaagtgactatgcggccaatggggtgccctccttctgcctctttcaaggttgaagccaagaagggagagtggttacctggcgcggntcnccaacttacctcaatggcactcttcctggtgacaatggatttgancctctggggctag

SEQ ID NO: 178382 - DNA, 289 bp, Glycine max
aaggtttatgaggcaaggcaccagtaattaataacaagctagctattagttcgattttgtagtaagtgaggtgccaatatggtgaagatagctcttggtactttggatgactcttttagcgctgcctctcttaaggcttatttcgcagagttccacgcaactctgattttcgtgttcgctggtgttggatcagccatcgcttacaacgagcttacaaaagatgcaccttggatccaacggggctggtggcagtagctgtggcacatgcatttgcactgtttgtaggtgt

SEQ ID NO: 178383 - DNA, 290 bp, Glycine max
gtacagagttgcagcatcatcattcagaaggcatctcaagggccatggaggtaacttgggatccactaggttttcaacttcagccgcggtagctgcaaggacttcatcaggtggtttgtttagctggcttactggagagcgttctagtgctcttcctcctctggacatgccccttggtggtgttgctctccccgattcacttccagattacgtcgaacccagcaagccacgatcacaacactccccaatggactcaaaattgcgtcagagacctctcctaaccctgcagc

SEQ ID NO: 178384 - DNA, 289 bp, Glycine max
atccatggctggcttccccacgaggaagaccaacaatgacattacctccattgctagcaacggtggaagagtacaatgcatgcaggtgtggccaccaattggcaagaagaagttcgagactctttcctacttgccagacctcgatgatgcccaattggcaaaggaagtcgaataccttctaaggaaaggatggattccttgcttggaattcgagttggagcacggttcgtgtaccgtgagcacaacaggtcacctggatactatgatggacgctactggaccatgtgga

SEQ ID NO: 178385 - DNA, 287 bp, Glycine max
attctcataagaacaaaggaaagacaaagagagagatggagaactttcccgtgatcaacttggagaatctcaacggtgaggcgaggaaagctaccctgcaccagattgaagatgcttgccagaactggggattttttgagttggtgaatcatggaataccccttgaacttttggatacggtggaaaggttaacaaaagagcattataggacatgcatggagaagagttcaaggaggcagtgtcaagcaaagggttagaagatgaagtaaaggacatggattgggaga

SEQ ID NO: 178386 - DNA, 236 bp, Glycine max
  unsure (1)..(236): unsure at all n locations
tgtgacagagaatccgaggcgaagagaagagaaaaattaagatggaggggaaggagcaggatgtgtcgctgggagcgaacaagttcacggagagacagccgattgggacggcgggcagagcaagacgcggcaggactacaggagctgcgccgcgcacntgtgaccgacgagttacgcatgtcctntacaacaggatacaagttggcacttctgttcaacatatgtctacgcatgga

SEQ ID NO: 178387 - DNA, 285 bp, Glycine max
ctcagccgttgctctgcttcaaccttgcggaagaagaagacgccgcagccatggtgaagtactccagagaacccgacaatcccaccaagtcctgcaaggccagaggcgctgaccttagagtgcatttcaagaacactagggagactgcctttgccatcaggaagttgcccctggttaaagctaaaagatacctggaggatgttttggcccacaaacaggccatcctttccgacgcttctgtggtggtgttgggaggacagccaggctaagagcagacactccaat

SEQ ID NO: 178388 - DNA, 283 bp, Glycine max
agagggggtcagagtgagaaagagaaagagagaattcgtaaaccctaatttcggaaagatcggcgatgactgcctccaaggatcgcgagaacttcgtctacatcgccaaactcgccgagcaggccgagcgttacgaagagatggtggaatcaatgaagaacgttgcgaatctcgacgttgaactgacggtggaggagcggaatttgctttctgttgggtacaaaatgtgattggtgctcgcagaggtcctggaggatcctgtcttacattgagcagaaggaag

SEQ ID NO: 178389 - DNA, 282 bp, Glycine max
gtcgatagtagagaaaaatatatccaactaatggctacccttattgctcctagccaccattcccgggttgaggatgctgaagctctccgaaatgctttcaaaggatggggggctgatgacaaggccattatagcaatactgggtcacagaaatgttcatcagaggcaagaaatcagaaaagcttatgaggagatttaccaagaggatctcatcaaacgcctgagtccgagatctctggtgactttgagagagctatgtaccggtggatgttgcagcctgcgg

SEQ ID NO: 178390 - DNA, 285 bp, Glycine max
cttccttgcgctcctcctcgttcgttcgttctccctcgcgtagatcggcaatggcggagaccgagacgttcgctttccaggctgagatcaaccagctcctcagtctcatcatcaacaccttctactccaacaaggaaatcttccttcgtgaactcatcagcaacgcctctgatgctttggacaagattagatttgagagtttgacggacaagagcaagctcgtgctcagccagagttgttcattcatattattcccgacaagactaacaattcgctgaccattgt

SEQ ID NO: 178391 - DNA, 286 bp, Glycine max
cccacctgaccagcagagacttatctttgcgggtaaacagcttgaggatggtcgaacccttgccgactacaacatccaaaaggaatccactctccacctcgtgcttcgcctcaggggtggcatgcaaatctttgtcaagactttgactggcaagaccatcaccctcgaggtcgaatcctcggacaccattgataatgtcaaggccaagatccaggacaaggaggtatccctccagatcagcagaggttgatatttgctggtaaacaacttgaggatggaagaaccc

SEQ ID NO: 178392 - DNA, 292 bp, Glycine max
cctgaatatgccaagcaactggctgaagaaacatggggcaagcacaaggatgttgagaagacagcatttgaagaggctgagaagaagagggaagaggaggaatcaaaggatgacccagttgactctgatgctgatgaggaagaggaagatgctgatgaagctggcaatgactccgatgctgaatcaaagacggaagctggggaagacaccaaggaagagggtgtacatgtgaactctaggaagtttgcaaacggataaagagtgaccggaagttatattccggatagttata

SEQ ID NO: 178393 - DNA, 291 bp, Glycine max
  unsure (1)..(291): unsure at all n locations
tttacttcccctatggctcgtcactccttgctcttagccctcctcctcttcgccgccgtccccaccgccgcgatggcggtggcgcgtccgacgccgacgacatcctgatccgtcaggtggtgccagatgttggcgaagcgaaccaggaggacaacctgctgaacgccgagcaccacttcgcgagcttcaaggccctgttcgncaagacctacgccaccaaggagggcacgatcatcgcttcggcgtcttcaagtccaacctccgcagagccaggctgcacgccaagctcga

SEQ ID NO: 178394 - DNA, 287 bp, Glycine max
gtaaaaagaaagaaggtttttttagtatagttaacagcatggagagggaggaagatgttaaggttggagcacagaaattctcggagaggcaagcactgggtacaggagctaagagtgacaaggactacaaggaggcaccaccagcacccttgtttgagccaggggagttaaagtcatggtctttttacagagctgggatcgcagagtttgtggccacattcttgtcctctacatcactgtcttgactgtcatgggtgtcaacagggcacccaacaagtgctcttctg

SEQ ID NO: 178395 - DNA, 288 bp, Glycine max
agagtttgttgtgagctataagctagtttatcgtgaggagaatatgaagttgtttgtcttctttgttgctgcagtagttttggtagcatggccatgccatggcgcaggctaccaaaggttccctctccgaatgaaaactggctatggtgagcgttcttcggaggtaaaatgcgcaagttttaggcttgctgtggaagcacacaacatccgagcccttaaaaccacctgaagagtgcgttgaaccatcaaaggactacattaatggcgaacaatttagatcagactcta

SEQ ID NO: 178396 - DNA, 286 bp, Glycine max
ctacaaaacagtctccatttgacacagtcctagtggtgtactacttattatggccacaccagcatccatcactaatgtcactgtggagttccttcaattccccgcactggtgacacctcctggctctaccaaatcctatttccttggcggcgcaggggtgagagggttgaatattcaagaagaatttgtgaagttcacgggaataggtgtttatttggaagaaaggccgtgtcatcactcgctgccaaatggaagggcaagagtgcagctgaattgctcgactccc

SEQ ID NO: 178397 - DNA, 282 bp, Glycine max
gccaaaagcaagagaaaaattcacacatacacacacaaagaaaattagagagagagagagaagataagatgggtgtgaacgaagatttcaacaaggatattgatgatcatcatcatgagtatgtggatgatgatgatgttcctcttccggggtttcgtttccaccctacagatgaagaacttgttagtttctatcttcgaaggaagcttcacaagaaacccatcgcatcgagctcatcaaacagattgatatttacaaatacgatccttgggatcttccaaa

SEQ ID NO: 178398 - DNA, 283 bp, Glycine max
agtggtttcagtgagtgatcggtgttcacttgatccttcataagtcgtcatcatcatcatcatcatcaccgttgattgaagacgatgccgatcagaaacatcgccatcggaaggcctgaagaggctactcaccccgacacgttgaaggcggggttggctgagttcatctccaccttgatcttcgtgttcgccggttcaggttccggcatcgcctacaacaagtcaccgacaacggcgccgccactcccgccggcctcatctccgcttccatcgcccatgcttt

SEQ ID NO: 178399 - DNA, 284 bp, Glycine max
cttcaatcatatagcattctaagaaatgaagagccctaccattttcattctctttctactttctgccttctacacctcactcctaccttcagccaccgctcaagtcgtggttgacatggaaggtaatgatcttcaaaatggtgggaaatattatgtgttgccagtaatagagtcatcatatggtggaataagagtagccgcaactggaaaagaaagatgcctctcactgttgtacaatctgccgatccgtatgataaggggattgcaacaattatttcaacccc

SEQ ID NO: 178400 - DNA, 281 bp, Glycine max
attattcttccatttccattaaaaagaaaatatcataaatgggtattttcacattcgaggacgaaatcacctcccctgtggctcctgctactctttacaaagctctagttacagatgccgacaacatcatcccaaaggctcttgattccttcaagagtgttgaaaacgttgagggaaatggtggccctggaacaatcaagaagataactttcgttgaggaggagaaaccaagtttgtactgcacaagatagaagcagttgatgaggcaaacttgggatata

SEQ ID NO: 178401 - DNA, 280 bp, Glycine max
cggagcctctcttcaggtcaccatctagactgcaatcatggctgatggaccacagcatccatcagttgttcagaagctagctggacagtcttacctggtgtccaggcttagccccaactttaactctaggaattattctgcaactggttcttacgtcaatggcggaatgcactcgcctgggttggctgttgtgtcacctgtatctcaagttactgtgcagctccagcagagaaaggagtgagtggatttctagtggattttctgatgggtggagtatccg

SEQ ID NO: 178402 - DNA, 285 bp, Glycine max
ggcgcagagtagagcagcacagaagagggaaaacggcaccgccgccgtagaagaaaacaaccatggtgcacgtctccttttacaggaactatgggaagacattcaagaagccgcgtcgtccgtacgagaaggagcgtctcgacgcggagttgaagctggttggtgagtacgggcttcggtgcaagagagagctgtggagggtgcagtacgcgctcagccgcatcgcaacaacgcgcggaacctcctcaccctcgacgagaagaacccgcgccggatcttcgaggg

SEQ ID NO: 178403 - DNA, 285 bp, Glycine max
ctcattaattgcaagaatggcacttcgttgcttggtgatgtccctttctgttctcttcactcttggtcttgcgagagaaagccatgccagagacgaagatttttggcatgctgtttggccaaacactcccattccaagttcattgcgagatcttctaaagcctggcactgcaagtgttgaaatcgatgatcaccctatgcaaattgaagaaacacagtacccgaaaccttcttctataaagaagaccttcatccaggcaaaacaatgaaagtacaattcagcaag

SEQ ID NO: 178404 - DNA, 288 bp, Glycine max
cacaaagcgggttactgtctgttcaagctaccatctctctctctctttcttagtgcctccttgccagaagttaaaatggcccaagaaactttcctattcacatctgaatcagtgaacgaggggcaccctgacaagctctgtgaccagatctccgatgctgtgctcgatgcatgcttggagcaggaccctgacagcaaggttgcctgtgaaacctgcaccaagacaacatggtgatggttttcggagagatcacaaccaaggccaacgtggactatgagaagattgtgc

SEQ ID NO: 178405 - DNA, 282 bp, Glycine max
ggcatgtcgtgagacattacgaagggataaactaaatgagaggcatgctattattttgcatattgtgtgattgagtttagtcttctaaatctcatgtcttcaatttggcatgattttaaggtttctggaattgagttccatcctggagcctagtaggcagcccaaatcagacaaagttgcaatattaagcgatgcggctcgagtggtaatccaattgagaatgaagccaagaggctgaaggaaatgaatgatgaactacaggcaaaagttaaagaattgaag

SEQ ID NO: 178406 - DNA, 281 bp, Glycine max
acaggatggtcaagtcatgttgcgttatgtgcttgtgtttgatcttacttcacattttcctgcgctttgtgccaatacagtcagcacctgaaagtgccattgtgacacagattcctggcttcagtggcactctaccttccaagcactatgctgggtatgtgacggtggataagagtcatgggaggaacttgtactactattttgttgaatcagagggtaaccttccgaggaccctgtggttctgtggcttaatgggggacctggctgctctagcttcgatg

SEQ ID NO: 178407 - DNA, 276 bp, Glycine max
tcttcatcttgttctatctgtgacgagcatcatggcctcaagagcagtgttattgttggctatgtgtgtgcttccggcgatggttgtgagcattcgcccagcaaagaaccctttttgcgtgaagggtcgtgtctactgtgacccttgccgtgctggttttgagatctcagctaccacctacattgctggtgctgagattatgttgcaatgcaagagcgggttagcaacgaggttgtgtacacgaagaaggggtacaccgactcaaccggagcatac

SEQ ID NO: 178408 - DNA, 284 bp, Glycine max
gttcatttctacacatccctagctctgtcgttccgtcgttgacgatggcgtttcgggtgcgaagcctgacctccgctctctctttcttctctctctcttgtccatcgcttccgccaatgtcttcttcgaagagcgtttcgatgacgggtgggaaaatcgatgggttaaatcagattggaaaaaagatgagaacgtggctggggagtggaaccacacctctggcaatggaatggagacgctaatgacaaaggtattcaaaccagtgaggattacagattctatgc

SEQ ID NO: 178409 - DNA, 283 bp, Glycine max
ggccggtgtcgaagaatctgtaccggcggatgaacagggtggtggcggagtgctctggctggagctcgtgtggattattgattggtgggccggtgttaaggttcaagtattcacagatcctgaaacctttcgttcaatgggtaaagagcatgctcttgttatctccaatcacagaagtgacattgattggcttgttggatgggttttagctcagcgttcagttgccttggcagcactcttgctgtgatgaagaaatcatcgaagtttctaccggtcattggtt

SEQ ID NO: 178410 - DNA, 281 bp, Glycine max
cactcttcttctcttgcggctagggttttagcgcagttcttctagatttaaggaagatgggtaaggaaaaggttcacatcagtattgtggtcattggccatgtcgactctgggaaatccactaccactggtcacctgatttacaagcttggaggcattgacaagcgtgttattgagaggtttgagaaggaagctgctgagatgaacaagaggtctttcagtatgcctgggtgctggacaaacttaaggctgagcgtgaaagaggaatcaccattgatattg

SEQ ID NO: 178411 - DNA, 280 bp, Glycine max
cctgaatatgccaagcaactggctgaagaaacatggggcaagcacaaggatgttgagaagacagcatttgaagaggctgagaagaagagggaagaggaggaatcaaaggatgacccagttgactctgatgctgatgaggaagaggaagatgctgatgaagctggcaatgactccgatgctgaatcaaagacggaagctggggaagacaccaaggaagaggtgtacatgatgaactctaggaagtttgcaaaacggataaagagtgagcggaagttatatt

SEQ ID NO: 178412 - DNA, 280 bp, Glycine max
gtaagccacatcctcagggtgaagaatatggtcctgttagcgaagtctacgtgcctgccagcgaaggagtggaagcttatatttggttactggcaaaggcttatgttgttgtgaatgatgcatgctaccatcaaatcattagccattggctaagcactcatgcaattgttgagccatttgtcatagcaacaaacaggcaactgagtgtggttcaccctattacaaacttctgtttcctcactaccgtgacaccatgaatattaattcacttgcccggaaa

SEQ ID NO: 178413 - DNA, 280 bp, Glycine max
ggatgcatttctatttctaactaattattgtgcttattattattgttgagaaagaaaagaatggcaaagttaataaaattctttgagttgaacacaggggccaagattccttctgttgggttaggcacttggcaagctgagcctggtgttgtagccaaagctgtcaccacagccattctggttggatacaggcatattgattgtgctcaagcgtataaaatcaagcagagattggttctgctcttaagaagctttttgatgatggtgtggtgaagcgtga

SEQ ID NO: 178414 - DNA, 277 bp, Glycine max
atttcctgtttacgatcttattgcaattcacaaactttcaaagcttattagctaaagtaacatcaaaagatgtcattgattcccagtattttcggtggcccaaggagcaacgtgttcgatccattctcactcgatatgtgggatcccctcaaggattttcatgttcccacttcttctgtttctgctgaaaattctgcatttgcgaacacacgtgtggttggaaggagacacaagaggcacacgtgctcaaggctgatattccagggctgaagaaaga

SEQ ID NO: 178415 - DNA, 291 bp, Glycine max
agacagagagaaagaactgacctcagcggcggcggcggcggcaacagaagaacaaccaccaccacacacaatgggtcgcgtgagaacaaaaacggtgaagaaatcctcccgccaggtgattgagcgttactactcgcgcatgaccctcgacttccacacaaacaaaaagctctctcgaagaagtggccatcatcccttccaagaggctgcggaacaagatcgcgggttctccacgcatctcatgaagcgcatccagaagggtcccgttcgcggcatctcgctcaagctcca

SEQ ID NO: 178416 - DNA, 280 bp, Glycine max
gcttctcactgatctccattcccattccatggcttccactgaatcatcccctttcaagaaaattcagattcaaagggatgacactacatttgacgcatatgtggttggaaaagaggatgctcctggaattgttgtgattcaggagtggtggggtgtggattacgaaattaagaaccatgccgtgaagatttctcagcttggtagtgggtttaaagctcttttccagatttatacagaggaaaggttggtctggatgttgctgaagctcagcattcgatgg

SEQ ID NO: 178417 - DNA, 281 bp, Glycine max
caaattctctgtgttgtgttgtgtacttgtgttaattgtgttgttgttgtaggaaatttaagtgaagagagaatgatgatgaagtctgctatgtgtgcattggtgcttgtggcactggttgtggttgaagtggggcccatggctgaggctgcggtgacttgcaacccaacacagttgactccttgtcttccggcaattaattcaggttctgcaccttcagtgcttgttgccagaagctgaaggagcaaaagccatgcttctgtggctacctcaaaaaccct

SEQ ID NO: 178418 - DNA, 280 bp, Glycine max
cacaatttcaattgtttttattttacataatcatggccatgaaacgtgctgttcaatccctgcttgcctcatcttccaccctcaccaggaaccttcatgcctcaggagaaaaaaagaagattgtaggggtgttctacaaagggaatgagtatgcttcgaatcccaattttgtgggatgtgttgaaagagcattgggtatacgtgagtggttggaatcacgggtcaccagtacatagtcactgatgacaaagaaggaaccgattcagaaatagagagacac

SEQ ID NO: 178419 - DNA, 278 bp, Glycine max
ttcttctcttgcggctagggttttagcgcagttcttctagatttaaggaagatgggtaaggaaaaggttcacatcagtattgtggtcattggccatgtcgactctgggaaatccactaccactggtcacctgatttacaagcttggaggcattgacaagcgtgttattgagaggtttgagaaggaagctgctgagatgaacaagaggtctttcaagtagcctgggtgctggacaaacttaaggctgagcgtgaaagaggaatcaccattgatattgct

SEQ ID NO: 178420 - DNA, 280 bp, Glycine max
gcgcatttccatccacattggccaggccggcattcaggtcggaaatgcttgctgggagctttattgcctcgagcatgccattcaggctgatgggcagatgccgagtgataagaccataggtggtggtgacgatgctttcaacaccttcttcagcgagaccggtgccggaaagcacgtgcctcgtgcagttttcgtggatctcgagcccactgtcattatgaaatcagaactggcacataccgccaattgttccatcctgagcagctcatcagtggaaagg

SEQ ID NO: 178421 - DNA, 277 bp, Glycine max
gtttagggtttcggttccttaccctacctttgacgtatcgaaaccttaaatttgggattaggtctgagcaatctggttggtagaacctttggtcttagagagtcaagttttatgtctggattagacgatcaaattcctactgccttcgatccttttgctgatgcaaatgctgatgactcgggtgctgggtcaaaggagtatgtgcatattcgcgtcagcagcgaaatggtaggaaaagcctgacaaccgttcagggattgaaaaaagaattcagcta

SEQ ID NO: 178422 - DNA, 275 bp, Glycine max
gcacctctctctttcttcccgtgtgcgtcaaagcgaagaacgcgacacgatggtgttctacttcaaagcgcgccccgaagccggcgatttcaccatcttcatgggccttgacaagtacgagaacgaggaactcatcaaatacggttttcccgaagacatctggttccatgtcgataaaatgtcttcagcccatgtctatgtcaggttgcacaaagccagaccatcgatgacatgagtgagggcttactggaagactgtgctcagcttgtcaaagc

SEQ ID NO: 178423 - DNA, 280 bp, Glycine max
gtaaaacgtagttactggtttgacatatataagaatatcgacaaaattccactcgttaattgccctattctcataattcatggaacttcagatgaagttgtagattgctcccacggaaaacaactgtgggaactgtgtaaagagaagtatgagccactatggctcaaaggaggaaaccactgtgatttagagcaatttcctgagtatatcaggcatctgagaagttcatagccactgttgagaagtctacatcccaaagatacagcttcagaagaagcat

SEQ ID NO: 178424 - DNA, 281 bp, Glycine max
atccagctttatttagtgggctatccaaaattgatagaagggagattgcgatcagtatacataaggactgaaaaaggtgttcttatagaggttaagccctttgttcgtattccaagaacattcaaacgctttgctggtgtcatgttggaactgcttcaaaaattgagcatatctgctgttggcaagcgcgagaaacttctccgaaccatcaaaaacccttcacacagtatttgcctatcaactcacgaaaaataggtctatcatatctacaagcttttctg

SEQ ID NO: 178425 - DNA, 272 bp, Glycine max
ccaagttcaaagatgaagatgatccacgttcttttcctctttgctcttgtctcgttcacttcccatgcttctgtcaatgatttctgtgtagcagacctaaaaggtccagatagcccttcaggctatcagtgcaagccacctaacacagtcacagtggatgactttgtgttctctggctttgtagctggaaacaccacaaacactttcaatgctgcattacctccgcatttgttactgattttccaggtgtgaatggtcttggtgtatctgtg

SEQ ID NO: 178426 - DNA, 278 bp, Glycine max
gttgtcccaaagaaagagcatctttctcctttctttcatcaccgttggaagagactgagatgggttcaaaaaccaagacttttacctttgaggaggtggctaagcacaatcacaggaaggattgctggattatagtcaaagggaaggtgtatgatgtcaccccatttttggatgatcatccaggaggtgatgaagttttagtgactgcaacagagaggatgccaccactgattttgaagatattgggcacagtgattcagcaacagagatgatggaaa

SEQ ID NO: 178427 - DNA, 271 bp, Glycine max
cattacaaattacactctttgcctcgcaccttcaacttaaccttttctactcataatcttaacaacttgctagaacaagataaagacagagcaaaagtgtgtgtgtgtgagagagagcaatggctggctcgtgggcacgccgttctctgattgttctggctatcatttccttcggatgtttatttgcaatttccattgctaaggaggaagccacaattggggacggtcatcgggattgatcttggaacgacctattcatgtgttggtgttt

SEQ ID NO: 178428 - DNA, 275 bp, Glycine max
gccttttcaacatatccaaggacatatgaccttattcacgcccatggtgtctttagtctgtacaaggataaatgcaaggccgaagatatacttctggagatggaccggattttgcgaccagaaggtgctgtcatattccgcgacgaagtagatgtgctaattaaggtaaagaaaatagttggaggaatgagatgggacactaaaatggttgacatgaggatggtcctcttgttcctgagaaggtgcttgttgctgtcaagcagtattgggttact

SEQ ID NO: 178429 - DNA, 272 bp, Glycine max
tcagcagtcgtcagaaagactccataacccaaaaatgcctttcaagaggtacgttgagattggaagggttgctcagatcaactatggcaaagagtacgggcggctcgtgatcattgtcgatgtcattgaccagaatagggctcttgttgatgctcccgacatggtgaggtcccaagtgaacttcaagaggctctcgctcactgacatcaagattatattaagaggattcccaagaagaaggtctcattcagccatggaggctgctgatgtta

SEQ ID NO: 178430 - DNA, 258 bp, Glycine max
ctgagctataagctagtttatcgtgaggagaatatgaagttgtttgttctctttgttgctgcagtagttttggtagcatggccatgccatggcgcaggctaccaaaggttccctctccgaatgaaaactggctatggtgagcgttcttcggaggtaaaatgcgcaagttttaggcttgctgtggaagcacacaacatccgagccattaaaaccattcctgaagagtgcgctgaacaacaaaggactacattaatggcg

SEQ ID NO: 178431 - DNA, 271 bp, Glycine max
  unsure (1)..(271): unsure at all n locations
attaattgcaagaatggcacttcgttgcttggtgatgtccctttctgttctcttcactcttggtcttgcgagagaaagccatgccagagacgaagatttttggcatgctgtttggccaaacactcccattccaagttcattgcgagatcttctaaagcctggccctgcaagtgttgaaatcgatgatcaccctatgcaaattgaagaaacacagtacccgaaaaccttcttctataaagaagcacttcatccaggcanaacaatgaaagta

SEQ ID NO: 178432 - DNA, 262 bp, Glycine max
cgcgaaagaggacctttaagcttcctaatcccatgtactacattgagtagtaccttcacctctctcaacaatctagctagagtttgctcctatctatatgtaataaggtatgctgatatgcactattcaaataggagcattagctatctttgttaatgtcactttatgttatgtgggtaagtcacctaagacactccacgtacctacttgttgtctcttacgcggctttaataaatcttctgcccttgttccatatttaaaa

SEQ ID NO: 178433 - DNA, 263 bp, Glycine max
gagtgaggcttcttctacccagatttgtttcattttaaccaaagaagaatctctcacaaatggcgtcaagagcaattgttcaacaacaacaagccagaggtgaagcagtagtagggggaggaaaacagcagaagaagaacggtgttgcggatggaaggaaccgcaaggcattgggtgacattgggaatttggccaatataagaagtgccgttgaagtcaagccaaatcgccctatcacaaggagttttggtgcgcaattactt

SEQ ID NO: 178434 - DNA, 197 bp, Glycine max
aaaagattaacaataaaagtgtgccgtactgttgatagcaaagatgtgggggatcttcgacaaggggcaaaagataaaggggacagtggtgtggatgccaaagaatgtgttggacttcaacgcgataacctcgatcggtaaaggtggtgttattgacacagccaggggcatcttaggccaatgcgtcagcttaggtg

SEQ ID NO: 178435 - DNA, 262 bp, Glycine max
gagaaatgattgacagtggtgtcattaagcttgatgataagcagagtgaaagcaagtgtgctcttgtgtatggtcaaatgaatgagccccctggtgcccgtgcccgtgttggtcttactgggcttactgtggctgaacacttccgtgatgctgaagggcaagatgtgcttcttttcgtagacaacattttccgttttacccaagctaactcagaggtgtctgctttgcttggtcgtatctcatctgctgttggttaccaacc

SEQ ID NO: 178436 - DNA, 261 bp, Glycine max
tgaagaaccaacaagaggggtattgagattgagattcaagtaatggggaagagcaaggttcttgtggtggggggaactgggtacatagggaggaggatagtgagggcaagcctggcactgggccatgagacctatgtggttcagaggccagagttgagcctccagatagagaagctgcagaggctcctctccttcaagaagcaaggtgctcatctcattgaggcctctttcaatgatcacaagagccttgttgatgctgtg

SEQ ID NO: 178437 - DNA, 264 bp, Glycine max
cttcaattctctaacaggtgacctccctcagactatgagatcactttcacgcataaccaccaacaatctgcaaaataaccagtttacaggcactattgatgtccttgctaatctgcctctggataatctgtgtgtctctgttgtatcatataacatagctggaatatcctattttcataaagaaaaactaaagccaattttatttactatcttaaattattctcaggaatgtggaaaacaataattttactggatggatacggg

SEQ ID NO: 178438 - DNA, 265 bp, Glycine max
ctcgttttttctcagaaccttctgaggttaaagcaaaaaacaaagagagagagagagagaaaatgatgaagccatcgatgctcagatctctccactccgccgccacccgcggcgcctctcatctcttccgccgtgggtacgcctccgagccggtgccggagcgcaaggtagccgttctcggcgccgccggcgcggatcgggcagcctctctcccttctcatgaagctcaatcccctcgtttcgagcctctccctttacgatatcg

SEQ ID NO: 178439 - DNA, 259 bp, Glycine max
ctttgaaagggttcacgaagaaacaccaatccgctccgagagctagaagaaatcaacgatgcctcgctatgatgataaatatggtaatacccgcctctatgttggacgcttgtcttcgaggactcgttcccgtgacctggagcgtgtcttcagcagatatggaagagttcgaggcgtagatatgaagaatgatttcgcctttgttgaatttagtgatcctcgagatgctgatgatgctagatacaacctggatggtcgt

SEQ ID NO: 178440 - DNA, 267 bp, Glycine max
tgaattctccagagagaagaagaaacttaatcgatcatcacttcacttcactaatacatcatggcagacgagacccagaacaagtatgagagctctgaggttgaggtccaggatcgtggtgtttttgactttctcggtaagaaaaaggatgaagaagacaagcctcatcctcaggaggaggtcatcgccaccgagtttcaaaaagtcactgtctcagaccaaggagagaacaacacagcctcttagaaaagcttcaccgatctgaca

SEQ ID NO: 178441 - DNA, 259 bp, Glycine max
atttatatctcataatggagtatctacctggtggtgatatgatgacgttgctcatgcgaaaggatatactgacagaagatgaggccaggttctatgttggggagactgtcttagctatagagtcgattcataaacataattatattcatagagatatcaagcctgacaatttgctgctagatagaaatggtcacatgaaattatcagactttggattatgtaaaccatggactgcagtaatcttcaggaaaaggactct

SEQ ID NO: 178442 - DNA, 263 bp, Glycine max
cgttctagtaattcagtgctgctagaagatggaaactagtgaatggcatatcgagcgaagatctagcttcggctctgaatcccccttagcacgagacgcaggaaatgtgcctgacactgggtcactctctattgtggtgcttggtgcttctggtgatcttgctaagaagaagacatttcctgcacttttccacctatacctgcaggcattcttaccaccagatgaagttcatatttctggctaatgcaggacaaaaatctctg

SEQ ID NO: 178443 - DNA, 269 bp, Glycine max
  unsure (1)..(269): unsure at all n locations
acgaaggtctccttcagctaccttctgacaaggctcttttgtctcccnctgtattccgccctctcgttgataaatatgcagcggacgaagatgccttctttgctgattacgctgaggctcaccaaaagctttccgagcttgggtttgctcgatgcctaagcaacgtttaggggattgttgaagaggcatggtgcccataatatttctctagaaaattgtatggtcatggtttttaatgccaatgtgggttccccagattttagatagct

SEQ ID NO: 178444 - DNA, 265 bp, Glycine max
cgacactaagatcggagaaagaatggcgaaaacgacgtcgttgctgctctttacactgctcctcttcggaaccctagctctcatccaggcgaagaaatcgaaggaggatttgaaggacgtgacccacaaggtttactttgatgttgagattaatggaaaagaagcaggtcgtattgtaatgggtctttatgggaaggctgttccaaaaactgcagaaaacttccgagcactttgcacaggggaaaagggaactggtaaaagtgga

SEQ ID NO: 178445 - DNA, 264 bp, Glycine max
ctcaaatcactgaaccagccatggctaccttctccaaggaacgcgagaactttgtatacgttgccaagttagctgaacaagctgaacgctatgatgaaatggtggaggccatgaagaaggtggcgaagctggacgttgcgttgagtgtggaagagaggaacctgttctctgttgggtacaagaatgtggtggggtcacggagagcttcatggagaatcttgtcatcgatagagcagaaagaggattcccaaagggatgagttgc

SEQ ID NO: 178446 - DNA, 197 bp, Glycine max
cctctcccttcaagatgcagatctgcgtcaagaccctcaccgtcaagaccatcacccttgatgtggaaagctctgacaccatcgacaacgtcaaggccaagatccaggactatgaaggaatccccccggaccagcaacgtctcattttcgccggtaatcaacttgaggacggccggacccctgctgactacaacatt

SEQ ID NO: 178447 - DNA, 258 bp, Glycine max
gaaaaaatggcggtgcctcttctctcgaagaagatcgtgaagaagaggctgaagaagttcaagaggcctcaaagtgacaggaagatttctgtgaagacaaactggcgcagaccaaagggtatcgattcccgtgttaggagaaagttcaagggatgcactttgatgccgaacattggttatgcttcagacaagaagacccgccactatctcccgaatggtttcaagaaatttgttgttcacaatgtgaaggatttggaa

SEQ ID NO: 178448 - DNA, 262 bp, Glycine max
tttccattgatttcttgcttctatatattacttgcttcttttcttgatcatgtcccttgctggtaaaatcagctctgaaattggtgttcaggcaaccgctgcaaagtggttcaacctcttcacaacacaacttcatcacgttcaaaatcttactgatagaattcatggaaccgagctgcatcatggtgaagactggcatcacaatgagtcggtcaagcactggacttataccatagatggcaaggttacaacttgcaaggag

SEQ ID NO: 178449 - DNA, 257 bp, Glycine max
atttcattccatggccgattcaacctcaagcgattcactctctttagacatcgattccttatctccttcacctcaggaacatatcatcagaacacgtcatggttccgtatctgttgctgtatatggagaccaggataagccagctcttatcacatacccagatttggctttaaattatgtctcctgctttcaggggttattattttgtcccgaggcatattaccttctgctccataatgtctgcatttatcatatta

SEQ ID NO: 178450 - DNA, 266 bp, Glycine max
gacaccttgaggcaagcatacagaaaaattttcaagaaagagaagattggcaacattgaaacccttttgataggatcagcagctggtgctatttcaagtagtgctacctttccgctcgaactggctcgcaaacacatgcaagtcggagcccttagtggaagacaagtatacaaaaatgcgattcatgcccttgcaagcattcttgaacaagtaggcatccaatgtatgtataaagggttgggcactagctgcatgaagttgggtgc

SEQ ID NO: 178451 - DNA, 254 bp, Glycine max
gtttaaggaggcattggttagtttcaagagggcttgtgagttgcagcctgtggatcgtgaggcctcattttagaacagggaactgtttgtatgttcttggcaggtacaaggaggccaaggaggagttcctcttggctcttgagtctgctgaggctggagggaatcaatgggcttacttgctaccccagatttatgtcaacctcggcatcgcactcgagggtgaagggctggttatgagtgcctgtgagtattat

SEQ ID NO: 178452 - DNA, 249 bp, Glycine max
cgtgcctctagggttatcatatctccatttccatttcctctctctcagtttccaagaatcttaagctatgggaaagtcttacccaaccgtgagcgctgattaccagaaggccgttgagaaggcgaagaagaagctcagaggcttcatcgctgagaagagatgtcctcctctaatgctccgtttggcatggcactctgctggaacttacgacgtgagctcgaagaccggtggtcccttcggaaccataaa

SEQ ID NO: 178453 - DNA, 136 bp, Glycine max
gagaatatgaagttgtttgtcttctctgtcgctggcgtagtcttggtagcatggccatgccatggcgcaggctaccaaaggttccctctccgaatgaaaactggctatggtgagcgttcttcggaggtaaaatgcg

SEQ ID NO: 178454 - DNA, 265 bp, Glycine max
tagaaacagtgtgatgaaaatgaaggtccttgttttcttcgttgctacaattttcgtagcatggcaatgccatgcgtacgatatgttccctctccgaatgaacactggctatggtgcccgtactccggaggtgaaatgcgcaagttggaggcttgctgtggaagcacacaacatctttggctttgagaccattcctgaagagtgcgttgaagcaacaaaggaatacatccatggcgaacaatatagatcagattccaaaacagtt

SEQ ID NO: 178455 - DNA, 260 bp, Glycine max
tctcgagccgctcccagaggatctctggagatgctttgaaagatctgtacaagtcatttgtgtacgagtacccaattgtctcaattgatgatccatttgaccaggatgactgggagcactatgctaagctaactgctgatgttggagccaatgtacaaattgttggtgatgatctcttggttaccaaccccaagagggttcagaaggcaattgatactaaagcatgcatgcgcttctcctcaaggtcaaccaaattgggt

SEQ ID NO: 178456 - DNA, 261 bp, Glycine max
ccataattctcttctagttttctccactgggagatcgcctactatatatggagagttaagacaacagaaacctttgttgactcctgatataacaataatgtctgtgggaactgagattacatatggtgaatccatggtacctgatgatggttggaaacagtatctagatcataagtggaatagggacatagttatggaggaaacagccaagtttcctgaactaactttgcagtcagacacagaacaacggcctcacaaggt

SEQ ID NO: 178457 - DNA, 259 bp, Glycine max
tcaaacttcacagatacaaatgttgcctagcaattctaggttgttatcatgggagacctatgatgaagatgtatcttccctagccgaaagttccaagattacagcttctggactattagaacagatcagcactaccagagacactagtgactatctatggcatataaccagtgctgacataagttcatcagaatcctttcttagaggaaggaacaagcccagcattactgtgcattcttcaggccatgctgttcatgtg

SEQ ID NO: 178458 - DNA, 258 bp, Glycine max
gactgaattccagaccaacttggtcccataccctagaatccatttcatgctttcctcctatgcaccagttatctctgctgagaaggcctaccatgaacagctctcagtggcagaaattaccaacagtgcttttgagccatcgtccatgatggccaagtgacatcctcgtcacggaaagtacatggcgtgttgcctgatgtaccgtggtgatgttgtgcccaaagatgtaaacgctgctgttgccaccatcaagaccaa

SEQ ID NO: 178459 - DNA, 257 bp, Glycine max
cggagttaggttctgcacgctctgcttccagcgagtgttctttcttcgtttcaacaccttaatttgcacacgctgcttcttacaattgagaaatggcacaagaaacctttctattcacatctgaatctgtaaacgagggtcaccccgacaagctgtgcgaccagatctctcatgcagtgctcgatgcgtgccttgaacatgaccctgacagcaaggttgcctgtgagacctgcaccaagaccaacatggtcatggtc

SEQ ID NO: 178460 - DNA, 260 bp, Glycine max
cggctcgacagcatagagtgagaagtgagaagagaaaaatggcaatctccatacccagtagacaacttttcatagatggagagtggaaagtccctcttctcaacaatcggtttccgatcatcaaccccgctactgaagacatcatagggcatattccagccggtactaaggaagatgttgaccttgcggtggatgctgctaaaagagccttttcccataacaaaggcaaacattggtcttcagctcctggctctgttcgt

SEQ ID NO: 178461 - DNA, 219 bp, Glycine max
ccgatctgcttggagaccacagaggcgtgagcaggaccttggagcttcataatcacatgtactacattgagtagtaccttcacctctctcaacaatctagctagaatctgctcctatctatatgtaataaggtatgctgatatgcactattcaactaggagcactagctatgtgggtaactgtcactttatgtcatgtgggtatgtcacctaagacact

SEQ ID NO: 178462 - DNA, 260 bp, Glycine max
gcaataagtctctccttcctctgccttataattcttgtgacccttttacgcggtagcattgaaagtgcaccagcaaacgtgaagccaagccattatgctgcacccttcaataggagtgtttttccttctggttttctatttggaataggctctgcagcttaccagatagaaggatgagcagctatagatggcagaggaccaagtatatgggacacttatactaaacagctaccagggaagatttgggatcatagtgatgg

SEQ ID NO: 178463 - DNA, 258 bp, Glycine max
ctcaccgattgctagaatggaatttcgatgctcagtcatctcttttaccattctcttctctcttgctcttgcaggagagagccatgtccatgcatcgctacctgaggaagattattgggaagctgtttggccaaacactcccattcccactgcactgcgagagcttctaaagcctctccctgcaggtgttgaaatcgctgaactccctaagcaaattgatgatacacagtactcaaaaacattcttctataaagaaga

SEQ ID NO: 178464 - DNA, 258 bp, Glycine max
gcgatctgcttggagaccacagaggcgaaagcaggacctttaagcttcctaatcccatgtactacattgagtagtaccttcacctctctcaacaatctagctacgagtttgctcctatctatatgtaataaggtatgctgatatgcactattcaaataggagcattagctatgtttgttaatgtcactttatgttatctgggtaagtcacctaagacactccacgtacctacttgttgtctcttacgcggctttaata

SEQ ID NO: 178465 - DNA, 258 bp, Glycine max
  unsure (1)..(258): unsure at all n locations
cgctcgccttgcttcgccacacaacagcaactgcagcaatggctcccaaacgaggtggaaaggctccggctcttgccgctaagaagaagcctgagaaggtttcgaatccgttgttcgagaagcgtccaaagcagttcggaatcggaggggcgttgcctccgaagagagacttgactcggttcgtgaagtggccanagaatgttcaaattcagaggaagaagaggattctgaagcagaggttgaaggttcctccagctt

SEQ ID NO: 178466 - DNA, 256 bp, Glycine max
cttcatcttgttctatctgtgacgagcatcatggcctcaagagcagtgttattgttggctatgtgtgtgcttccggcgatggttgtggccattcgcccagcaaagaaccctttttgcgtgaagggtcgtgtctactgtgacccttgccgtgctggttttgagacctcagctaacacctacattgctggtgctgagattatgttgcaatgcaagagcagggttagcaacgaggttgtgtacacgaagaaggggtaca

SEQ ID NO: 178467 - DNA, 279 bp, Glycine max
atccaagttcaaagatgaagatgatccacgttcttttcctctttgctcttgtctcgttcacttcccatgcttctgtcaatgatttctgtgtagcagacctaaaaggtccagatagcccttcaggctatcagtgcaagccacctaacacagtcacagtggatgactttgtgttctctggctttgtagctggaaacaccacaaacactttcaatgctgcattaacctccgcatttgttactgattttccaggtgtgaatggtcttggtgtatctgtggcac

SEQ ID NO: 178468 - DNA, 280 bp, Glycine max
gctacttcctactccaaccgcacttctgctccgcaattatcatgggcaaggtcaagatcggaatcaacggatttggaagaattggccgtttggtagccagagtggctctgcagagagacgatgttgaactcgttgccgttaacgaccctttcatcaccaccgattacatgacatacatgtttaaatacgacagtgttcatggacactggaagcatcacgatgtcaccgttaaggacgagaagacccttctcttcggtgacaagccagtcactatttttgg

SEQ ID NO: 178469 - DNA, 281 bp, Glycine max
ctctgcattattctcttcccttttctatctccctctgcaaaaacgagtaaatgggtcggcttaatctcctacttgtgtggtcactctcttcaacacttttccttaattatctacacccaacctctgcccagctcagtccaaaccactatgctaacatatgccccaaccttgaaagcatcgttagacaagccgttactaataagttccaacaaacctttgtcaccgtcccagccacccttcgcctattctttcacgattgctttgtccagggttgtgatgct

SEQ ID NO: 178470 - DNA, 282 bp, Glycine max
caatagttgatgataatgactcattattggatatatactgtcggagtgacataacagctttggcaaagaacagagcatatacacatattaatcttgacgaaatgactgttcatcaggctttgcagttgggccaggacgcatatagtccctatgagcttagaagtcaaagatgtcagatgtgtttgcgttctgatcctctgcataaagtgatggaacgcttggcaaatccaggtgtcaggcggcttgtcatcgtggaagctggcagcaagcgtgtagaaggca

SEQ ID NO: 178471 - DNA, 282 bp, Glycine max
gtgagctataagctagtttatcgtgaggagaatatgaagttgtttgttttctttgttgctgcagtagttttggtagcatggccatgccatggcgcaggctaccaaaggttccctctccgaatgaaaactggctatggtgagcgttcttcggaggtaaaatgcgcaagttttaggcttgctgtggaagcacacaacatccgagcccttaaaaccattcctgaagagtgcgttgaaccaacaaaggactacattaatggcgaacaatttagatcagactctaaa

SEQ ID NO: 178472 - DNA, 269 bp, Glycine max
atcaatggcgacaaaggcaggcaaagccataggcatcgatctcggcacgacctacagctccgtgggcgtgtggcaaaacgaccgcgtcgagatcatccccaacgaccaaggcaaccgaaccactccctcttatgtagccttcaccgacaccgagaggctcatcggagacgcggcgaagaaccaagtcgccatgaacccgcagaacaccgtcttcgacgcaaagcgtttaatcggtcggaaattctcagactcttcatttcaaaacgaca

SEQ ID NO: 178473 - DNA, 277 bp, Glycine max
gctgtagcggcgacactaagatcggagaaagaatggcgaaaacgacgtcgttgctgctctttacactgctcctcttcggaaccctagctctcatccaggcgaagaaatcgaaggaggatttgaaggaggtgacccacaaggtttactttgatgttgagattaatggaaaagaagcaggtcgtattgtaatgggtctttatgggaaggctgttccagaaactgcagaaaacttccgagcactttgcacagggtgaaagggactggtaaaagtggaaag

SEQ ID NO: 178474 - DNA, 280 bp, Glycine max
aaacaaatcaaagccatggccacctccaacttctctattgttctctccgtctccctagccttctttttggtgctacttaccaaggcacactcgaccgataccgtttctttcaccttcaacaagttcaacccagtccaaccaaacattatgctccaaaaagatgctagtatttcatcctctggggtgttacaactcaccaaagttggcagcaacggcgtgcccacctcgggatctctcggtcgtgccctttacgctgccccaatccagatttgggacagcg

SEQ ID NO: 178475 - DNA, 281 bp, Glycine max
gtttcgggagaaaaagcaatccactcagagagctagaagaattcaacaatgcctcgctatgatgataaatacggcaatacccgcctctatgtgggacacttgtcttcgaggactcgttcccgtgatctggagcgtgcctttagcagatatggaagagttcgaggtgtggatatgaagaatgatttcgcttttgttgattttagtgatcctcgagacgctgatgatgcaagatataacctggatggtcgggatgttgatggaagtcggattattgtggaatt

SEQ ID NO: 178476 - DNA, 281 bp, Glycine max
gtggtggccaaggaggtggggttggatagccgtcagcttcttattaaatcaaatcccggggaagttgtgaaccctgattcatacaaggctataaatgatgagggaatgcccatgtatcagaggccattcatgaaggggaaactttacattcacttcactgtgcagtttccagattctctaaaccctgatcaagttaaggccttggaggctgttctgccaccaaagccttcttcacaattgacagacatggagctggatgaatgtgaggaaactacactcca

SEQ ID NO: 178477 - DNA, 280 bp, Glycine max
  unsure (1)..(280): unsure at all n locations
atgccgattctccaggacaattcccttcacccaacctaattggtacttgcaattagtgtagaagatgagtacgttggatgcaacaagggctgaacttggtcttcttgttttatatttgggcaaggctgaagcaagggacaaaatatgcagggcaatacaatatggctccaaatttttgagtaacggggaacctggtactgctcagaatgtcgacaaaacaaccagcttggcacgaaaagtcttccgntcttttaagtttgtcaatgaactacatgctttg

SEQ ID NO: 178478 - DNA, 277 bp, Glycine max
cttttagcaagttaacaacacttttgtcttcgttccattatctacttctcaattctcttcaccctttgcctctgaaagaaatgggtagtcttgaagcggaaagaacaacagtaggattggcagcaagagacccttcagggattctctccccatacacctacaatctaagacacacaggccctgatgatgtttacattaaagttcactactgtggaatttgccattctgatctccaccagattaaaaatgatcttggcatgtccaactatcccatggt

SEQ ID NO: 178479 - DNA, 282 bp, Glycine max
tgatcggtgttcacttgatctcatcataatcgtcagcgtcaattgaagaagatgccgatcagaaacatcgccgtcggaaggcctgaagaggcgactcaccccgacacgttgaaggcggctttggctgagttcatctcaaccttcatcttcgtgttcgccggctcaggctccggcatcgcctacaacaagctcaccgacaacggcgctgccacccctgccggcctcatctccgcctccatcgcccatgcattcgccctcttcgtcgccgtctccgtcggcgcc

SEQ ID NO: 178480 - DNA, 279 bp, Glycine max
caggcccgctccattaggacaaaccttacagcaagtcgaccgaggccaaacccgcaaggatcgcaccattacggtatgataaacacgacaaagacgatcatattggcgagttcggctggtcaagtaaatgggaagcatcgatacgcaattaacagcgtgtcttatgttgccccagacacccctcttaagctcgcggattacttcaaaatctccggtgttttccgccccggaagcatatctgacacatccactggtggaggcatttgacttgacacctct

SEQ ID NO: 178481 - DNA, 278 bp, Glycine max
aaaagatcaaggaaggaaggaagcaagatgttgggtgttataaggcacaagagtattcgccatgccttctccgcaataagacacttgtcttctgcagctaaagagattactgtcagggaggctctgaactccgcactcgatgaggaaatgtcagctgatcctaaagtgttcttgatgggtgaagaggttggggaatatcagggtgcatacaagatatccaaggggctgctcgaaaagtttggccccgagagggttcttgatactccaatcactgaggc

SEQ ID NO: 178482 - DNA, 281 bp, Glycine max
cacgaatttcattgcagagtgttattttgagtatcagcatcaatggctccaattgcagtgggaaacgtgattccatcacggcattttggcttacttggatgaagaaaacaaaccccaaactgtctccattcactctctcgccaccggcaagaaagtcatcatctttggggttcccggtgccttcactcctacttgcagcttgaagcacgttcctggcttcattgagagagcagacgagctgaaagggaacggtgtggacgaaataatctgtatcagtgtga

SEQ ID NO: 178483 - DNA, 277 bp, Glycine max
catagcagcgatgggaatcgatcttaaggctgggggtaagagcaaaaagaccaaaagaacagcaccaaaatccaatgacatctacctcaaattacttgtcaagctttatcggttccttgttcgaaggactggcagcaatttcaatgctgttatactcaagcgcttgttcatgagcaaggttaacaagcctccaatttctttgtcaaggttaattaagtatacaaaggggaaggaggatagaattgctgtaatagtggggactgtaactgatgatatc

SEQ ID NO: 178484 - DNA, 269 bp, Glycine max
gaagtgttggatgcatttctatttctaactaattattgtgcttattattattgttgagaaagaaaagaatggcaaagttactaaaattctttgagttgaacacaggggccaagattccttctgttgggttaggcacttggcaagctgagcctggtgttgtagccaaagctgtcaccacagccattctggttggatacaggcatattgattgtgctcaagcgtataacaatcaagcagagattggttctgctcttaagaagtttttgatg

SEQ ID NO: 178485 - DNA, 282 bp, Glycine max
aaaacaacataacatcctcaagcctttgaacatcgttttgcagccatggaaacaggcatatcatgctacactcgcgggcctttcctgcctagtgtttcttccaagcactctccaccctccatctctccatcttttggcttgaggagtctgaaatcgagctctttatttggagaatctctaagagtggcatccaaatcaacactaaaggtttcaaagacaaagaatcattcactcgtgaccagatgtgaaattggtgacagtctggaagaattcctcacaaaa

SEQ ID NO: 178486 - DNA, 280 bp, Glycine max
ctggtttatagatctttgcgaaggaggtttacagcgctcaaccaaagatgcagaacgaggaaggacagatcactgagctttacattcctaggaagtgctccgccacaaacagattgattaccgctaaggaccatgcttcggttcagatcaacattgggcatgtggatgagaatggcgtctacaatggccatttctccacttttgccctctgcggattcatccgtgctcagggtgatgctgacagtgctctagaccgcttgtggcagaagaagaaagttga

SEQ ID NO: 178487 - DNA, 279 bp, Glycine max
gcttcttataacaagtgtgttctcatcttcaaccgtcacctgaatttcagacttggagagaccaggaacatattattatactagtcatcataaaatgaaaattttgcttgctttgtagtttatccagggaatggtatataaatagataaggctctctatctagctgtcttaagtgttgtgccatccacatcttgtctttattttctatttatgtcacctgaacactatcataatgtactggatttccaagaaaatgttatcagttaaatttgaatgcat

SEQ ID NO: 178488 - DNA, 243 bp, Glycine max
agagtttgttgtgagctataagctagtttatcgtgaggagaatatgaagttgtttgttctctttgttgctgcagtagttttggtagcatggccatgccatggcgcaggctaccaaaggttccctctccgaatgaaaactggctatggtgagcgttcttcggaggtaaaatgcgcaagttttaggcttgctgtggaagcacacaacatccgagcctttaaaaccattcctgaagagtgcgttga

SEQ ID NO: 178489 - DNA, 275 bp, Glycine max
acaagatggcttcttttcatatccaatattcattccttgtgcttgtgcttgctatggtgatcacattgatgaaccctaccaatgcaaccctctctccccatttctatgataaagtttgccctcaggcattgccagttataaagtcagtggttcaacgagcaattatccgtgagcgacgcatcggagcatctcttctgcgcttgcatttccatgattgtctcgtaaatgggtgtgatggatcaatattgctagatgacacccgaaacttcactggc

SEQ ID NO: 178490 - DNA, 244 bp, Glycine max
  unsure (1)..(244): unsure at all n locations
gcagaacaagatcctgaaggtgatcaggaagaatcttgtgaagaagtgcattgagatgttcaatgaaattgcggagaacaaggaagactacaacaagttctatgatgctttttcgaagaatttgaagttgggtatccacgaggatagccagaacaggtccaagttggctgatttgctcagataccacacaacatacgacacaatcagncaacttggacctgttctggctatcctcgtggatacc

SEQ ID NO: 178491 - DNA, 277 bp, Glycine max
gttgatgggtcggcgaaagaacaacagcaacaacaatcagtgctcctcaagcaaggaagacgctgacatgaatagcaaccaccttcggtttgaagaagctgacgaggctgtcgacgagagttccaacctcgaccaatccatgtgcgacatcgaagaatccgatgataaaaccagcgccgactattacttcgattcctactctcattttggaattcacgaagaaatgttgaaggacagtgtgagaaccaagacatatcaaaatgttatttatcagaac

SEQ ID NO: 178492 - DNA, 280 bp, Glycine max
gatcgagataactagaaacagtgtgatgaaaatgaaggtccttgttttcttcgttgctacaattttggtagcatggcaatgccatgcgtacgatatgttccctctccgaatgaacactggctatggtgcccgtactccggaggtgaaatgcgcaagttggaggcttgctgtggaagcacacaacatctttggctttgagaccattcctgaagagtgcgttgaagcaacaaaggaatacatccatggcgaacaatatagatcagactccaaaacagttaac

SEQ ID NO: 178493 - DNA, 279 bp, Glycine max
gcccgagggaaaaagagctattgaacttgttgcagggaaagagagtgcacttgcacaggtagtgattactacaatcggcaagacttatgacctcactttcgccgtgggtgatgccaacaatgaatgcgaacttccatgatggtagaagcatttgctggcgcaaacactgtccaagttccatatcaatctaagggtaaaggaggttttgtcagaggcaagcttcggttcaaggccgtctcaacacgtactcgtcttaggttcctaagcacattttacacc

SEQ ID NO: 178494 - DNA, 275 bp, Glycine max
ctacatccctggctctgttccgtcgatgacgatggcgtttagtacgcgaaaccctgacctccgctttctcattcttctctctctcttgtccatcacttccgccaagctgctcttctaggagcgtttcgatgacggatggggaaatcgttgggctaaatcagattggaaaaaagatgagaacctggctggggagtggaaccacacctctggccaatggaatggagacgctaacgacaaaggtattcaaaccagtgaggattacagattctacgcta

SEQ ID NO: 178495 - DNA, 277 bp, Glycine max
gtttgttgtgagctataagctagtttatcgtgaggagaatatgaagttgtttgttctctttgttgctgcagtagttttggtagcatggccatgccatggcgcaggctaccaaaggttccctctccgaatgaaaactggctatggtgagcgttcttcggaggtaaaatgcgcaagttttaggcttgctgtggaagcacacaacatccgagcacttaaaaccattcctgaagagtgcgttgaaccaacaaaggactacattaatggcgaacaatttaga

SEQ ID NO: 178496 - DNA, 274 bp, Glycine max
cgggaaaagattttgacatcagaaccacctgaagtagttcaggcacgaaatgacaattctcatggtacaaacttcccggattcccccgagcccatctatggaactcagttcttgccaaggaaattcaaaattgctgttactgtgccaactgataactccgtggacattctcacaaatgatattggtgttgttgttgttaccgatgacgatggggagcctcaagggttcaacatatatgttggtggtggaatgggaagaactcataggttggaaa

SEQ ID NO: 178497 - DNA, 275 bp, Glycine max
acaagttcccggagagacagccgattgggacggcggcgcagagccaagacgacggcaaggactaccaggagccggcgccggcgccactggttgacccgacggagtttacgtcatggtccttttacagagcagggatagcagagtttgtggccacttttctgtttctatacatcactgtcttaaccgtcatgggagtcgccggggctaagtctaagtgcagtaccgttgggattcaaggaatcgcttgggccttcggtggcatgatcttcgccctc

SEQ ID NO: 178498 - DNA, 270 bp, Glycine max
tgttggctatgtgtgtgcttccggcgatggttgtggccattcgcccagcaaagaaccctttttgcgtgaagggtcgtgtctactgtgacccttgccgtgctggttttgagacctcagctaccacctacattgctggtgctgagattatgttgcaatgcaagagcagggttagcaacgaggttgtgtacacgaagaaggggtacaccgactcaaccggagcatacacaatgtacgtggatgaggatcacgcagatcagatctgcagtgcca

SEQ ID NO: 178499 - DNA, 274 bp, Glycine max
  unsure (1)..(274): unsure at all n locations
ctctcaagtccaacctaccccttttccttctcccaccaacttcancgctcacttcctcgatcatgtctcacttcaagggcaagtaccatgatgagcttatcgccaatgctgcttacattggcactcctggaaagggtattcttgctgctgatgagtcaacagggacaattggcaagcgtttggccagcatcagtgtagagaatgttgaatccaacaggcgtgctcttatggagctgcttttcaccgctcccggtgctcttaaatatctcagtgg

SEQ ID NO: 178500 - DNA, 276 bp, Glycine max
ctctctctctagggtttgatcagactcaagggtttaagccatggcaaaaaggaaggcaaaggcaaagcctcctccaaagaagcgaatggataagctcgataccgtcttcagctgccctttctgcaatcatggcagcagcgtcgaatgccgccttgacatgaagaacttgataggggaagctatttgcgggatatgccaagagagctttagcactaccatcacagctttatcagagccaatagacatatacagtgagtggattgatgaatgtgaact

SEQ ID NO: 178501 - DNA, 278 bp, Glycine max
gctagtttatcgtgaggagaatatgaagttgtttgttttctttgttgctgcagtagttttggtagcatggccatgccatggcgcaggctaccaaaggttccctctccgaatgaaaactggctatggtgagcgttcttcggaggtaaaatgcgcaagttttaggcttgctgtcgaagcacacaacatccgagcccttaaaaccattccaccagagtgcgttgaaccagcaaaggactacattaatggcgaacaatttagatcagactctaaaacagtta

SEQ ID NO: 178502 - DNA, 279 bp, Glycine max
tccagtgtctctttcaaagtgctgctgctgccagcattgacctgagctagagcagtaaccgtcatcaccactgccagtacggtaccatggctgtgcttcaatctttcgtttcggtccacccagattctcacttccccatacagaacctcccctacggagcgttccagccccaatccgcttctcctcctcgtcccggcgtcgccatcggagacttcgtcctcgacctctccgaaatctcttccgctggtctcttcgacggccctctcctcaaaaactccg

SEQ ID NO: 178503 - DNA, 260 bp, Glycine max
ggaagagagaaaaaccatggcaataacactcaacaatggcttcaagatgcctatcattggattgggcgtgtggcgcatggaaggaaacgaaatcagggacctaattctcaattccatcaaaattggttatcgccattttgattgtgctgctgactacaaaaacgaagcagaagttggagatgcgcttaaggaggcttttgatagtggccttgtgaagagagaggatctcttcattaccaccaagctttggaattctgatc

SEQ ID NO: 178504 - DNA, 270 bp, Glycine max
  unsure (1)..(270): unsure at all n locations
atagcccaagccctatacaaccaaaccctaacacacacccatttgattcagtttccatggctagcctcaaggttgcatttttcgctgcagtgctctgcatggttgtggtgagtgcacccatggcacatgcagctatcacgtgcgggcaggtgacgaatagcctgatcaattgcatcggttacctccagaacggaggaccgccgncgtcgggatgctgcaacggagtgaagagcctcaatgccgccgccaagaccaccggccgaccgcaga

SEQ ID NO: 178505 - DNA, 238 bp, Glycine max
acacaacctatcctctggttcctgggcacgagattgcaggtgtggtaacagaagttggaagcaaggtgcaaaagttcaaagttggagaccgggtaggtgtggggtgcatgattggatcctgtcgttcatgtgaaagctgtgatgaaaatcttgagaattactgccccaaaatgattctcacatacggtgtcaagtattttgatggcaccataacacatggaggctactctgacttgat

SEQ ID NO: 178506 - DNA, 275 bp, Glycine max
cggaattagaggatttccaactataaaagtgtttgcacctggaaagccacctgttgattaccaaggagcaagagatgtcaaaccaattgctgaatttgcacttcaacaggtaaaggctcttttgaaggatcggttaagtggaaaagcaacaggaggatctagtgacaagacagaaaccagttcttcagtagaattgaactctggcaactttgatgaattggtgatcaaaagcaaagaactctggattgtggaatttttcgcaccttggtgtggac

SEQ ID NO: 178507 - DNA, 261 bp, Glycine max
tcacccctacgtcccacgcgatttgcacttacccggctacgctacctgcttcctttccatgtccaacattctttccgtcttcgcctcctcctcattgctcatcgtcactctcgtctggatcttctctggacgcttcaagaaaaccaaagttgatagagtgctgatgtgctggtgggccttcacaggtctcacacacattattcttgagggatattttgtattctctcctgagtttttcaaggatcaaactggcttctacct

SEQ ID NO: 178508 - DNA, 171 bp, Glycine max
  unsure (1)..(171): unsure at all n locations
tcaacctttcagatcgtctgcatcaagttcttcggtgggctcttgggtctgttgagatttttttcagcagacattgtccaatctggtatggttatggtcgtgtcctgaaatggttggtcangattttcctacattaactcagttgtatatccctggacttccctcccactg

SEQ ID NO: 178509 - DNA, 170 bp, Glycine max
gagacagaggtattggtatgacgaaggaggatttgataaagaatttggggacaatagcaaaatctggaacttctgcatttgttgagaagatgcaaacaagtggagatctcaatctgattgggcagtttggagtcggcttctactctgtttatctcgtggctgactatgtc

SEQ ID NO: 178510 - DNA, 182 bp, Glycine max
ctccagatcaatggcgacacaggaacgcaaagccataggcatcgatctcggcacgacctacagctgcgtgggcgtgtggcaaaacgaccgcgtcgagatcatccccaacgaccaaggcaaccggaacactccctcttatgtagtcttcaccgacaccgatacgttcatcggagacgcggcga

SEQ ID NO: 178511 - DNA, 166 bp, Glycine max
gttaactagaaacagtgtgatgaaaatgaaggtccttgttttcttcgttgctacaattttggtagcatggcaatgccatgcgtacgatatgttccctctccgaatgaacactggctatggtgcccgtactccggaggtgaaatgcgcaagttggaggcttgctgtg

SEQ ID NO: 178512 - DNA, 166 bp, Glycine max
cttacggctaaattctcaaagatttaaactttgtctcagagttactaaattcacccaaccccagagagaaaatgtctctaatcccaaatttcttcggtggcagaaggagcaacgttttcgatcctttttccctcgacgtctgggaccccttcaaggattttccttt

SEQ ID NO: 178513 - DNA, 164 bp, Glycine max
ggcggggctaccgctgagtttaagcatatcaataagcggaggaaaagacactaacaaggatttccttagtaacggcgagcgaaccgggaaaagcccaccatgaaaatcggtcgccctcgcgtccgaattgtagtctggagatgcgtcctcagtggcggaccggg

SEQ ID NO: 178514 - DNA, 166 bp, Glycine max
ctgaatctcgcggtgttgttagttctgcggcggttgtagttccggcggcgatgggacagcaatcgttgatctacagcttcgtcgctcgcggcaccgtgatcctagcggagtacaccgagttcaccggaaacttcaccagcgtggcggcgcagtgcctccagaaact

SEQ ID NO: 178515 - DNA, 157 bp, Glycine max
  unsure (1)..(157): unsure at all n locations
gtaaatgaaggtccttgttttcttcgttgtcacaattttcgtagcatggcaatgccatgcgtacgatatgttccctttccgaacgaacactggctatggtgcccgtactccggatctgaaatgcgcaaacttagngctgctgtggaagcacacaaca

SEQ ID NO: 178516 - DNA, 152 bp, Glycine max
atagtttgttgtgagctataagctagtttatcgtgaggagaatatgaagttgtttgttctctttgttgctgcagtagttttggtagcatggccatgccatggcgcaggctaccaaaggttccctctccgaatgacaactggctatggtgagc

SEQ ID NO: 178517 - DNA, 163 bp, Glycine max
tggagatttatatgctactgtttttgagaacattctaatgcaacaccatattgcacttcctcctgataacatgggtattattacctacattgcaccacctggccaatattccttacaggatactgtattggaacttgagtttcaaggtgtcaaaaagaaattc

SEQ ID NO: 178518 - DNA, 157 bp, Glycine max
ctgtgatgtccactgtgcagagccagattgtaaaataattttgttaagatacttcaacccagttggtgcacaccccagtggttatattggggaggatcctcgtggaattccaaacaatctcatgccatttgttcagcaagtagcagttggccgacgg

SEQ ID NO: 178519 - DNA, 298 bp, Glycine max
ctgctcttttctcttttcttttctctttagttctctcttcccctttctttttctttttcttcttcttctgagcttgtttaagcttttcttccattaacatattatcacaatgtgtggtattcttgctgttcttggttgttctgatgactctcgagccaaaagggtccgcgtgcttgagctctctcgcagattgaagcaccgtggccctgactggagtgggctccatcaacatggtgactgctttttggcacatcaacggttagccatagttgatcctgcttctggggatcaactctct

SEQ ID NO: 178520 - DNA, 297 bp, Glycine max
tgggttaagcggtgagatttgcgaatctgagaaatggcggattcttctcgggaggagaacgtttacatggcgaaattggcggagcaggccgagcgttacgaggagatggttgagttcatggagacggttgcaaagactgtggaggttgaggagttgacggtggaggagaggaatctcctctctgtggcttacaagaacgtgattggtgcgaggagggcttcgtggaggatcatatcctccattgagcagaaggaggagagcaggggcaatgaggaccacgtggccattataaaggag

SEQ ID NO: 178521 - DNA, 285 bp, Glycine max
ctagaccagtcaggaggggctggacaggctgcacaaaaatcggcttgttgtggttgaggacaaatgttacaaattggaggcaacattcttgtacaagaacaagaagaaagaagaaattacgtgtataatgatcatgatgctgactttgtgcttaaccttgtcattctttataaatttgtgtgataagtagtgtctctgacttttttaacaagttacattaaatccaaaactaaatgtgattgtggtgattgcatgtctaactgcccctcgctttctttggttggg

SEQ ID NO: 178522 - DNA, 294 bp, Glycine max
cattaattgcaagaatggcacttcgttgcttggtgatgtccctttctgttctcttcactcttggtcttgcgagagaaagccatgccagagacgaagatttttggcatgctgtttggccaaacactcccattccaagttcattgcgagatcttctaaagcctggccctgcaagtgttgaaatcgatgatcaccctatgcaaattgaagaaacacagtacccgaaaaccttcttctataaagaacaccttcatccaggcaaaacaatgacagtaccattcagcaagcctccctttc

SEQ ID NO: 178523 - DNA, 291 bp, Glycine max
catagtggcctgcaaccaattgaaacattatctgctgttaagtctcagcaaataaaggataataaccctcactttggcattgattgtaatgatgttggcactaatgacatgcgtgagcaaaatgtctttgaaactttgatcggaaagcagcaacagctcctactcgctactcaagttgtcaagatgatactgaaaattgatgatgtcatctccccatctgagccctgatatttttaaactcagtcatggtctacgtcaagatgctgaattggtgatactattttgtttcga

SEQ ID NO: 178524 - DNA, 281 bp, Glycine max
ggctcgagaatatagcccaagccctatacaactaaaccctaacacacctccatttgattcagtttccatggctagcctcaaggttgcatttttggctgcagtgctctgcatggttgtggtgagtgcacccatggcacatgcagctatcacgtgcgggcaggtgacgaatagcctgatcaattgcatcggttacctccagaacggaggaacgccgccgtcgggatgctgcaacggagtgaagagcctcaatgccgccgccaagaccaccgccgaccgccaga

SEQ ID NO: 178525 - DNA, 294 bp, Glycine max
ttaagtgtttgcacctggaaagccacctgttgattaccaaggagcaagagatgtcaaaccaattgctgaatttgcacttcaacaggtacaggctcttttgaaggatcggttaagtggaacagcaacaggaggatctagtgacaagacagaaaccagttcttcagtagcattgaactctggcaactttgatgaattggtgatcaaaagcaaagaactctggattgtggaatttttcgcaccttggtgtggacattgtaagacattagctcctgagtggaagacagcatccaatag

SEQ ID NO: 178526 - DNA, 304 bp, Glycine max
gagagagacatgggttgaggaagatgcttcttggacattagcataggggaagagcttgaagggagaatagtggtggagctttatgatgatgttgttcccaaaactgctgagaatttcagagccctatgcactggtgagaaaggcattggttcaaatactggagtgccccttcatttcaagggatcttgctttcatcgtgttattaaaggcttcatgattcaaggaggtgatatatctgctggggatggtactggaggagaatctatatatggacttaagtctgaagatgaaatttcgagttgaa

SEQ ID NO: 178527 - DNA, 304 bp, Glycine max
ttccaatatattccattctctctgtgtatttccctacctctcccttcaagatgcagatcttcgtcaagaccctcaccggcaagaccatcacccttgaggtggaaagctctgacaccatcgacaacgtcaaggccaagatccaggacaaggaaggaatccccccggaccagcaacgtctcattttcgccggaaagcaacttgaggacggccgtacccttgctgactacaacattcagaaggagagtactcttcacctcgtcctccgtctccgtggtggcatgcagatcttcgttaagacactcac

SEQ ID NO: 178528 - DNA, 249 bp, Glycine max
gtagtgttggatgcatttctatttctaactaattattgtgcttattattattgttgagaaagaaaagaatggcaaagttaataaaattctttgagttgaacacaggggccaagattccttctgttgggttaggcacttggcaagctgagcctggtgttgtagccaaagctgtcaccacagccattctggttggatacaggcatattgattgtgctcaagcgtataacaatcaagcagagattggttcgg

SEQ ID NO: 178529 - DNA, 302 bp, Glycine max
tgccaaaagcaagagaaaaattcacacatacacacacaaagaaaattagagagagagagagtcgataagatgggtgtgaacgaagatttcaacaaggatattgatgatcatcatcatgagtatgtggatgatgatgatgttcctacttccggggtttcgtttccaccctacagatgaagtcacttgttagtttctatcttcgaaggaagcttcacaagaaacccatcagcatcgagctcatcaaacagattgatatttacaaatacgatccttgggatcttccaaaaaccagtgccactgca

SEQ ID NO: 178530 - DNA, 298 bp, Glycine max
  unsure (1)..(298): unsure at all n locations
ctcaccgtctggttaatttattccttctcacaatgcttgccctgctcatcaaagctgaaattagaagcagcagccttgatgagcagtgagtctcattgtgagaaggaatcaattaaccattccttgttaaacctacttacttacccctggatagaagaaaaggtggcaaatggagaactctctaactctggtggttactangactttaccgactgttcatttgagaagtggacattggattaccggggaacccaattggaggaaaatggcagcattgctaacaaaaacaaaacttttg

SEQ ID NO: 178531 - DNA, 299 bp, Glycine max
cgttttctttgaaacgcacagcttcaatcaccgaccacaccacccatcaaccacatccttcctctttcccttctcaagactgcccaaggccaccctatgttggtggaactgaaaaatggggagacatataacgggcatttggttaattgcgacacatggatgaacatccatctgcgagaagtcatttgtacatctaaagacggagatagattttggaggatgcctgaatgctacatacgaggcaatacaatcaagtaccttcgagtacctgatgaggttattgataagttcaagaagaa

SEQ ID NO: 178532 - DNA, 295 bp, Glycine max
tcgataacacctgcttctggcgtcttaaaaatacgtcacactccttctcaaccctaaaatcagtgttctttgtttttttgcagaaaagattaggagatggcgaacgcttgattccctgcttcaatcgcattctcatcgagaaaatcgtccctccctccaaaaccagcgccggcattctactcccggagaagacctcccagcttaattccggtaaggtgatagcggttggacctggatcacgtgacaaggcggggaacttgattccggtgtctgtgaaggaaggtgatcacgtgct

SEQ ID NO: 178533 - DNA, 295 bp, Glycine max
caaaaccctcttttttctctctcttgcaaaacctaattttcatttcttccctcaaatttcaaaatgcgtcagctccttcacatccagggtggccaatgcggcaaccagatcggcgccaagttctgggaggtggtttgcgcggagcacgggatcgaccctaccggaaggtacggtggggactcggagttgcagctcgagaggatcaatgtctactacaacgaggctcgttgcggtcggttcgtgccgcgcgcggttctcatggacctcgaaccgggcaccatggacagcgtccggt

SEQ ID NO: 178534 - DNA, 256 bp, Glycine max
gagaatggtgctttcggaggaggaaatcggtcgtctataccgaataaggaagacggtgatgcagatgctgcgggacagaaattttctggttggtgacttcgagatcaacatgtccaagcacgagttcaagtccaagtacggcgaacacatgaagcgcgaggacctcgtcatcaacaaatccaagaaggacaactccgccgaccagatctacgttttcttccccgacgaacccaaggtcggcgtcaagaccatgaag

SEQ ID NO: 178535 - DNA, 314 bp, Glycine max
cgggattccgctcgagcttatctctgccgaggaaaagaaagacataggaaaagaagataaattcacagcgtcctagatttcctcttctctgcttcggaagaaagagaaaacaaacaaaacaatggcgttcgcttctttcctcggcagagtcctacttcgcttctgtcttcatactctctgcttaccaacaatttaatgaatatggagttgatgggggacatgctacaaaagcactcagacctaagtttgatgcctttacacatcgggtgcattctcaagtgggctttcaaattccagagattaatctgaaattt

SEQ ID NO: 178536 - DNA, 295 bp, Glycine max
gcgagccagcagtttcaaagagaggatttgggattgggaaggcgagggcttgcgctgcgtctcttcctcttctctttcgattcatccctcattcattatcttccaatccaacaacctcagcctcacactcacacatacacacatctgaacgcgtatcgtccctcccatggcttcaaagcgcatcctcaaggagctcaaggacttgcagaaagacccaccaacttcttgcagcgctggtccagtagctgaggacatgttccattggcaagcaccgattatgggtcctgctgatagt

SEQ ID NO: 178537 - DNA, 293 bp, Glycine max
atggaactttcctcagctcttgagaagatgttcagctgcttcaccattggtcaatgcaattctcctggacttcctgggaaagatggactaagtgagagctctttgagggatcttctccatggatctgaatatgttcttacatatgaagataaagatggagactggatgcttgtgggtgatgttccttgggagatgttcactgattcatgtcggagactaaggatcatgaagggctctgaggcaattgggctagctccaagggccatggaaaaatctaggagccaaaactaatg

SEQ ID NO: 178538 - DNA, 291 bp, Glycine max
gtaacttatggtttcacacctaggaagttggaagtcatggcagcaacattgatggcagcaacaacaagttctggtactcttaaagcaactcctttccttggccaaggcaagggtgccaatgccaatgctcttagggatgttgtctccatgggaactgggaagtacaccatgggcaatgatttgtggtatggaccagacagagtgaaatacttgggacccttctcagctcagaccccttcatatttgacaggagaattccctggggattatggatgggacactgctggctta

SEQ ID NO: 178539 - DNA, 290 bp, Glycine max
tgtgtattctcttgttggggagctgtaaaatgtgggcatatattcatgatcttgatgagctcttcaattgtgctaatgggcaagatattaatcctctttaatcagaaactgcttttgaagtctttcgtctcgcatggttcatcatccaactttgtgattcagtttggcagcttaacgaggcgtcttaatgggttcatttcaaaagcggaaaagcattcaaggaaaagcagttggtggcagaatttttttttcaatgatgatgggaattggcttggtttgagggacgatga

SEQ ID NO: 178540 - DNA, 290 bp, Glycine max
gtagtcgcaaccctaatcagaagaagcgcagtctcacgcgagtgacagccaccagccatgggtcgtatgcacagccgcggtaagggtatatcctcttctgctttgccctacaaaagcacacctcctagctggctcaagatctcttcgcaagatgtcgaagaaaatatctgcaagtttgcgaagaaaggtttgaccccgtctcagattggtgtcattctcagagattctcacggtattgctcaggtcaatagcgtcactggcagcaaaatccttcgcatcctcaaagctca

SEQ ID NO: 178541 - DNA, 292 bp, Glycine max
tttctatagtcccaattatagtaacagtgcaagatctattttccgcatcttggatatctggctaaaagattgactattgtgttaatctttctagtagtcaaggggaacaatgaatgcactagcagccaccaacaggaactttaagttggcctctaggcttctgggattggattcaaagcttgagaaaagtttgctgattccattcagggaaatcaaggttgaatgtaccatacctaaagatgatggcacgttgcaatcttatgttgggttcagggttcaacatgataatgcc

SEQ ID NO: 178542 - DNA, 295 bp, Glycine max
ccctcgagccgattcggctcgagctgagatggcaaagaatgtggggactctcgctcccgacatgctattccctcccacctgtactcagcaggaattgctggaggctcatgatggtgccagtaaagggaaatatactattggacttggtcaagattgcatggcgttttgtacagaagtagaagatgtcatctcgatgagtttgacagtagtttcttcccttcttgaaaagtatgcgattgatcctaaacaaattggtcgtctggacgtaggcagtgagactgtgattgacaaaagc

SEQ ID NO: 178543 - DNA, 279 bp, Glycine max
  unsure (1)..(279): unsure at all n locations
cgggacttaccttgttcttcatctaagaatggagaaggatgtgtgggtgaggaccggatgcctccccggtttgagtcncgaatttgatgagattgttaacaatgagaggatacaacggccggagctcttgactgcaagatcaagcatgacttaccatgaaaggaagatggctggtctatgccccttgaatgctgtggaggttactaggcttttgaaaggtctaggagctccaaagaatgcaagaatttactgggctggaggacaaccattgggtggaaa

SEQ ID NO: 178544 - DNA, 275 bp, Glycine max
tcggctcgaggcaactcatttcgttagagtgagagagagatagagagagagagacgggtatcaccgtgaaacgcagaagccgccaatacgcacgcactcattcttgagaaagctctatattcgttcgaccatggcactctcttctcgtcgctcatgcatatccatattgatctatggctgtcaaatacttctgtaaaaggcgcatgctactccagttcgtctatttgctagagagtctgcccctcctgcccttacgggagatcagatgctgaaga

SEQ ID NO: 178545 - DNA, 271 bp, Glycine max
ctaactcatacactttgtactctccgtcctttcttcttccatccagatctctctccttctccctcaaatggcttcccttctgcaatgttccatgcccctcgtctctctttccaatcgagctctggtacccggtaccaggatctccaacccaagttcagtttccctttcaattaagggacgaagtttcccatccgttacattgcagcccagagggcgtcggtttcagcttagatgtgcggcaaaaccagagacagtgaagaaggtgtgtgac

SEQ ID NO: 178546 - DNA, 288 bp, Glycine max
tgctcatcaagtccaagaaccaacctaccttttgcaatctcaattcaatggcgtcctctctcattgcgaacgcttcctctcctcttctctcctctccaggtccctccttcgccccgccgcttccgcttcccaccgtcctttcaacaccaacgccatgcgccagtatgacaaccgcgccgacgaccacagcaccgacatcgatcgtcactccgaacgctctttccctagcactgcgcgccgcgacgatatcttctcagatgtgttggatccattttttccgactcggag

SEQ ID NO: 178547 - DNA, 290 bp, Glycine max
gcaagaatggcacttcgttgcttggtgatgtccctttctgttctcttcactcttggtcttgcgagagaaagccatgccagagacgaagatttttggcatgctgtttggccaaacactcccattccaagttcattgcgagatcttctaaagcctggccctgcaagtgtcgaaatcgatgatcaccctatgcaaattgaagaaacacagtacccgaaaaccttcttctacatagaagaccttcatccaggcaaaacactgaaagtacaattcagcaagcctcccctttcaac

SEQ ID NO: 178548 - DNA, 292 bp, Glycine max
cattaattgcaagaatggcacttcgttgcttggtgatgtccctttctgttctcttcactcttggtcttgcgagagaaagccatgccagagacgaagatttttggcatgctgtttggccaaacactcccattccaagttcattgcgagatcttctaaagcctggccctgcaagtgttgaaatcgatgatcaccctatgcaaattgaagaaacacagtacccgaaaaccttcttctataaagaagaccttcatccaggcaaaacaatgaaagtacaattcagcaagcctccctt

SEQ ID NO: 178549 - DNA, 292 bp, Glycine max
ttcccttcccatggtctctctctcttcaattaattccatttagctttccccaaatcccaaaccctttttcgcttagatcccaatccaattgggttatggacatggcttccagtccccgcaccgtagaagagatcttcaaggattacagcgccagacgaacctctgttattcgcgctctcactcacgacgttgatgaattttacggcctctgtgatccagataaggataacctgtgcctctatggacatccaaatgaggcctgggaagtaactctgccagcggaggaagttcc

SEQ ID NO: 178550 - DNA, 292 bp, Glycine max
gggagactccaaattggactactgataagaaggcattagaagctttcaaaaggtttggaagcaaactgactggaattgaaggaaaaatcaatgcaaggtacagtgatccaagtctgagaaaccggactgggccagttcagctgccatacactttgctccatcgttcaagtgaggtagggttgactttcaaaggaattcccaacagtatctctatctaattaaaaagagtttgtggtttccttatctatgttgtacttctgaataacatagactttatgcatgtctatgcgta

SEQ ID NO: 178551 - DNA, 287 bp, Glycine max
cttttacaatcacaactacggttactgaagaagatgcttctaaacgccatgagaaagaaataatggagtttggaacctcctctccaatgctcactgtattagccactcttgcattgctcaatttattttgttttcttagtgtattgaaggatgcaatcctaggtgaaggtgacattggagcttatgagacaatggggttgcaagttctattgtgtggttttcttgttttcatcaatttgcctatataccaaggacttttcttaaggaaggacaatggaagattgcct

SEQ ID NO: 178552 - DNA, 278 bp, Glycine max
cgctagtttatcgtgaggagaatatgaagttgtttgtcttctttgttgctgcagtagttttggtagcatggccatgccatggcgcaggctaccaaaggttccctctccgaatgaaaactggctatggtgagcgttcttcggaggtaaaatgcgcaagttttaggcttgctgtggaagcacacaacatccgaaccattaaaaccattcctgaagcgtgcgttgaaccaacaaaggactacattaatggcgaacaatttagatcagactctaaaacagtt

SEQ ID NO: 178553 - DNA, 294 bp, Glycine max
cgcatcgatcgtggagaaagagaaggattatgaggttaaggtggagtgtactcgtaatggtcacgtttgctgtatactttgaaatggcttggacccctgcaagtcaaagcctctaattctgtttccgccttcgttcaaaacgccatctactccaacagaatcgccgttttctccaaatcctattgcccctactgtttgcgcgccaaacgcttgcttgctgaactcaatgaaaaaccttttgtggtggagctcgatttgcgagatgatgggtttcaaattcagagtgttcttctg

SEQ ID NO: 178554 - DNA, 215 bp, Glycine max
tcatttctccatttccattttctctctcacttttcaagaatcgtaagctatgggaaagtcttacccaactgtgagtgctgattaccagaaggccgttgagaaggcgaagaagaagctcagaggcttcatcgctgagaagagatgcgctcctctaatgctccgtttggcatggcactctgctggaacctttgacaagggcacgaagaccggtggac

SEQ ID NO: 178555 - DNA, 292 bp, Glycine max
tgcagacttaacagcagcacaaagcgggttactgtctgttcaagctaccatctctctctctctttcttagtgcctccttgccagacgttaaaatggcccaagaaactttcctattcacatctgaatcagtgaacgaggggcaccctgacaagctctgtgaccagatctccgatgctgtgctcgatgcatgcttggagcaggaccctgacagcaaggttgcctgtgaaacctgcaccaagaccaacatggtgatggttttcggagagatcacaaccaaggccaacgtggacta

SEQ ID NO: 178556 - DNA, 288 bp, Glycine max
ctaatcctctaattcaagtttgcaccaagttttcctgagacaatgtctggtcgtggaaagggtggaaagggtttgggaaagggaggtgccaagaggcacaggaaggttcttcgcgacaacattcagggcattacgaaacctgcgattcgtaggttagcgagaagaggtggcgtgaagaggatcagtggtttgatctacgaggaaaccagaggggttctgaagatattcttggagaacgtgattcgcgatgctgtgacttataccgagcacgctaggaggaagacggtt

SEQ ID NO: 178557 - DNA, 287 bp, Glycine max
  unsure (1)..(287): unsure at all n locations
caaactcactctttctaagttttttctatctctttctctctctctctgtctgccatggttctctccaaaaccacctccgaatccgacgtctctgtccacacaacatacgctgcgcgatatgtcagaanttcgcttcccaggtttaagatgccggaggagtcgataccaaaggaggcagcgtatcaaataataaacgatgagttgatgtctggatgggaacccaaggttggccttggcatcatttgtgacaacctggatggaggcagagtgtgataaactcatcatgg

SEQ ID NO: 178558 - DNA, 289 bp, Glycine max
gtgctgtgtgttgtgcaagtactaccttctctagctagattgctagagctagaatttcaacctacctatgtgtactgataagatctgcttccctacttaaagagagcatcatcctgtgatcagtgtgcttcgtattctctctctctatatatatatggtaaaaagtggttatctcgtgccaaaaaaaaaaaaaaaaaaaaaaaaaaaaaaaaagggggggccccccaataaaggccctcccccccggggatttttttccgggcggggacctggggggggaacatttttc

SEQ ID NO: 178559 - DNA, 287 bp, Glycine max
ggagttcagaagcttgaacctaggccatccccaaaatcccattccatagtgaaggagtatgggagtagattactataagattttgcaggttgacaagcatgccaccgatgaagagttgaagaaagcttacagaaagcttgcaatgaaatggcaccccgataagaatccaaccaataagaaagaggctgagactaagttcaagcagatatccgaagcttatgaggttctgagtgatccccagaagagagcaatctatgatgaatacggagaagaagggcttaaagggc

SEQ ID NO: 178560 - DNA, 286 bp, Glycine max
cttgcaagaagtttctgagcttttatatcctctatatatagttctctggcacttaaggtctcatccaaataagcacaaatgggtagccagagttacttcaaggctttgattatttgccttatagcactaattggatcaactcaagctcaattgcagcttggtttctatgccaaaagttgtccaaaggctgagcaaataatcctgaagtacgttgttgagcatatccacaacgctccatcactagcagctgctctcataagattgcacttccatgattgttcttgtc

SEQ ID NO: 178561 - DNA, 295 bp, Glycine max
gcattaccagctgatctcgtcaagagaggattggcaattgaagatccctctgcaccccatggccttcgccttgtgatagaggactacccttatgctgttgatggacttgaaatatgggatgctattaagacatgggttcatgaatatgtctccttgtattacccaacagatgcagcagttcaacaagatactgaactacaagcatggtggaaggaagctgtggagaagggtcatggtgacttaaaagaaaagccttggtggcctaaaatgcagacaactgaagatctcattcaat

SEQ ID NO: 178562 - DNA, 296 bp, Glycine max
cgagataaccctagttcgcttgcagtcacacaagaggccaatcctattcatagctcgagatgggtgaagaagtgaaggtagttgttccagaatcagtgttgaagaagcgcaagagggacgaggaatgggcgttggccaagaagcaagaactcgatgctgccaagaagaagagagccgagagccgcaaactcatctacaacagagctaagcagtacgctaaggagtacgatcaccaggagaaggaattgattcggttgaaacgcgaggccaagctgaaaggtggtttctatgtggat

SEQ ID NO: 178563 - DNA, 293 bp, Glycine max
cgtcaaggcaatccgcagaaagaccaccggaactggcaggatgaggtacttgcgtaacgtgcctcgccgattcaagagtggcttcagagaaggtaccgaagctgcacctaggaagaagggagcagctaccactgcataaacctgtcaaggatcgttgtttgctgggtacggacttacaagaatagattgcttttttgtgcttatggcaagtattttggaacaattatttttagagtctgattgctactttgtccttcatttaatttgtagttgctttatatttcaacaagatc

SEQ ID NO: 178564 - DNA, 292 bp, Glycine max
ctagttcacagcttcagttcgtttttgttgatcctgtgaacttatgcctgacggggtggttctgttggatacatgggccagcatgtttgggatgagggttaggattgcattagctgaaaagggtgttgagtatgaatacaaggaagaaaatctcaggaacaagagtcctttgcttttgcaaatgaacccaattcacaagaaaattccagttctgatccataatggcaaaccaatttgtgaatctgcaattatagtgcagtacattgatgaggtctggaatgataaagctcca

SEQ ID NO: 178565 - DNA, 293 bp, Glycine max
cagcttgatacagagcagagcgaccttgaagagctatggctgtcggaaagaataagaggatttccaagggaaagaagggtggcaagaagaaagccgctgatccttttgccaagaaagactggtacgatatcaaggccccttccctcttccaggtcaagaatattggcaaaaccctcgtctctcgtacccagggaaccaagattgcatccgaaggactcaaacatcgggtttttgaggtctcattggctgatctccaaggggatgaagaccactccttcaagaagattcgtttg

SEQ ID NO: 178566 - DNA, 288 bp, Glycine max
gaggaattaacatatatatagcaagcatggcagtcacactctacgaccttagctcttcctctgggttgaagaaacttgatgagtaccttctcccacgcagttacatcaccgggtaccaagctacaaaggatgatcttactgtttatgcagctttgccaactgctccatcagatgaatatggaaatgtttccaggtggtacaagcacattgatgctttgttgagaatctctggtgttactggcgagggatctggtgttattgttgagggatctctagttgcagagcctg

SEQ ID NO: 178567 - DNA, 289 bp, Glycine max
cagaccttaattgttctctcattcgcttcaaatttcaggaaatcaattatggctcaaccctcaacaagaataggccttgctggactggctgttatgggccaaaatctagcactcaatattgctgagaaaggctttcccatttctgtttataaccgaaccacttccaaggttgatgagactgtagaacgagcaaaacaagaaggaaatcttccagtttatggctaccatgaccccgaagcttttgttcattccattcaaaagcctagggtgataataatgcttgttaagg

SEQ ID NO: 178568 - DNA, 266 bp, Glycine max
ttcaccgattgctagaatgaatttcgatgctcagtcatctcttttaccattctcttctctcttgctcttgcaggagagagccatgtccatgcatcgctacctgaggaagattattgggaagctgtttggccaaacactcccattcccactgcactgcgagagcttctaaagcctctccctgcaggtgttgaaatcgatgaactccctaagcaaattgatgatacacagtacccaaaaacattcttctataaagaagccttcatcca

SEQ ID NO: 178569 - DNA, 259 bp, Glycine max
gtttgttgtgagctataactagtttatcgtgaggagaatatgaagttgtttgttctctttgttgctgcagtagttttggtagcatggccatgccatggcgcaggctaccaaaggttccctctccgaatgaaaactggctatggtgagcgttcttcggaggtaaaatgcgcaagttttaggcttgctgtggaagcacacaacatccgagcctttaaaaccattcctgaagagtgcgttgaaccaacaaaggacacattaa

SEQ ID NO: 178570 - DNA, 262 bp, Glycine max
tttgcgggcgagaggcatttacttggtgctgttcatggggttgtggagtccctgtttaggagatacactgaaaatggaatgaacgaagatctggcctataagaatactgttgagtctataacaggaattatatctaaaaccatctcaactaagggcatgctagctgtatacaatgctttatctgaagatgagaaaagggaatttgagaaggcttatagtgcttctttttatccttgcatggcaattctgtatggtgctacga

SEQ ID NO: 178571 - DNA, 259 bp, Glycine max
ctcattaattgcaagaatgcacttcgttgcttggtgatgtccctttctgttctcttcactcttggtcttgcgagagaaagccatgccagagacgaagatttttggcatgctgtttggccaaacactcccattccaagttcattgcgagatcttctaaagcctggccctgcaagtgttgaaatcgatgatcaccctatgcaaattgaagaaacacagtacccgaaaaccttcttctataaagaagaccttctccaggcaa

SEQ ID NO: 178572 - DNA, 261 bp, Glycine max
tctttttctaagtgtagtcgaggagaggaaccgcgccaaccctctcttcttcttcttcttcaatccttttataacatttatagtttcattcttaatcgttgggaaaaatgttcatcgagaattttaaggtagagagtcctaatgtgaagtacaccgagactgagattcagtccgtgtacaactacgaaaccaccgaacttgttcacgagaacaggaatggcacctatcagtggattgtcaaacccaaatccgcaactacca

SEQ ID NO: 178573 - DNA, 261 bp, Glycine max
cttcaacccgacggtgctggcctcagtcgcctcatggccgccctcgaaggcaccgaggccgcctactgcaccgccagcggcatgtccgccatctccgccgtcctcctccagctctgcagccacggcgaacacgtggtcgcctccagaactctctacggtgggacccacgcgctcctctcacactttctcccgcgcacgtgcggaatatccactagcttcgtggaggtgacggatcttgacatggttgatgctccatagtag

SEQ ID NO: 178574 - DNA, 264 bp, Glycine max
ctccgataggcggcgccggcgacttcgccagacagttcttcgccgagtcgaagaagctctggtacctcgccggccctgccatcttcacctccgtctgccagtactccctcggcggcgtcacccaagtcttctccggccacgtcaacaccctcgccctcgccgccgtctctgtcgaaaactccgtcatcgccggcttcagcctaggcatcacgtttggactgggaagcgcgttggaaacgctatgtggacaagcttcggagcggg

SEQ ID NO: 178575 - DNA, 263 bp, Glycine max
ctccttctctcgttgattcggtctagagtcttttttcactcttcagttctcgttgttgttcttcgctttcctgaaactagggttttcaatttcgattcattcgttaataattaaagatgtttgggagggcaccgaagaagagcgataatacgaggtactacgaaatcctcggcgtctcgaagaacgcttcgcaggatgatctgaagaaggcttacaagaacgccgccatcaagaatcaccctgacaagggcggtgacccgaga

SEQ ID NO: 178576 - DNA, 267 bp, Glycine max
caacactttccacttgtctccgaattagttatcttgagaaacattattcccattgctatatattatggctagcatgaaggttacatgggtggttgtgatcatgtgcatggccgtggtgggtgcaccgatgatggcgcaagccatgacatgcaatgatgtgacggtgaacatggcacagtgcctatcctacctgatgcagggaggaacaccttcaacactttgctgcagcggagtcaagaacattcttggctctgctgtcccaccgtt

SEQ ID NO: 178577 - DNA, 270 bp, Glycine max
tgaatagtgagttcttctcaacaagcctctaccttgtgatccctcaagcttaccaaagtatcctcctagcaaagaatttgatgccaaagttcgggatgaagaagctagaagacaaggagcagcaggaagcaagggccagagacatgatcttgagagaagaggtgctagagaatcacgagccattcctgcacctgatgccaatgctgaactggtcttgtcaatgcagaagagacaagggcaggccaattctcagagcaagaggagaagttt

SEQ ID NO: 178578 - DNA, 263 bp, Glycine max
ttttaatcctaattctgcacttcttgatcattcgatttttctcctcaagatgcagatattcgtaaaaactttgaccggcaagaccatcacccttgaggtggaatcctccgacaccattgacaacgtaaaagctaagattcaagacaaggaagggatcccacctgaccagcagagacttatctttgcgggtaaacaacttgaggatggtcgcacccttgccgattacaacatccaaaaggaatcaaccctccattcgtgcttcg

SEQ ID NO: 178579 - DNA, 261 bp, Glycine max
attaattgcaagaatggccttcgttgcttggtgatgtccctttctgttctcttcactcttggtcttgcgagagaaagccatgccagagacgaagatttttggcatgctgtttggccaaacactcccattccaagttcattgcgagatcttctaaagcctggccctgcaagtgttgaacatcgatgatcaccctatgcaaattgaagaaacacagtacccgaaaaccttcttctataacgaagaccttcatccggcaaaaca

SEQ ID NO: 178580 - DNA, 259 bp, Glycine max
ccgtaactggatctcttgctggtcttaagcctggtctccatggcttccatgtccatgccttgggggacactaccaatggttgcctgtcaactggagcgcatttcaatcctaataacaacgagcacggtgcccctgaggacgagaatcgtcatgctggtgatcttgggaatgttaatgtcggtgatgatggtaccgttagcttcagtattaccgacagtcagattcctctcactggaccaaactccatcatagaagggct

SEQ ID NO: 178581 - DNA, 260 bp, Glycine max
gggaaatcgagacaccctgtggagccggaagtggcagtgaagagagtaaatgacgatctcttcggtggtgatacagaagctgcttagcaccaatgctcaggtgggtcgacgtgttgccgctcaccatttgaaggagttcacctatggcttccgctccaaaatggccaccatcgactccgacaagaccctcatttgcatgcgcagtgcctgcaacttcatggcctccctcgcccgccacaacggccgcttcatttcatcaa

SEQ ID NO: 178582 - DNA, 258 bp, Glycine max
atagaaaagaccatcaaagttcacttcagccttatccggtttagggtttcggtttttgacccaacctttgacgtatcgaaaccttaagtttcggatcaggtctgagcaatctggttggtagaacctttggtcttagagagtcaagttttatgtctgaattagacgatcaaattcctactgccttcgatccttttgctgatgcaaatgctgatgactcgggtgctgggtcaaaggagtatgtgcatattcgctacagca

SEQ ID NO: 178583 - DNA, 260 bp, Glycine max
cctttcttctctctctttcgctttcagcgcaacacaaccctcgttgttccgtgttcaggtgaaacgacaccgttttacccttcctcttctcggcacagcatctagcaggttgtagaaaatatggccaagcatcatcctgatttgattatgtgccggaagcagccagggattgccattggacgactgtgcgtgaactgtgacggcacggtcgatgtgtcatatgcggaggagttggaatatctgatgcctactactcaagg

SEQ ID NO: 178584 - DNA, 265 bp, Glycine max
tacggctctgcctgttgctttatgattcatgataactcgtcggatcgcacggcctttgtgccggcgacgcatcattcaaatttctgccctatcaactttcgatggtaggatagtggcctaccatggtggggacgggcgaggttaaccgaaggttgctcatttaggacgaagggagattgaatggtttgttaaccagacttttctttgtcaatgcatttgacattttcggttgttaggtttttgagatggaatcaattcagttatg

SEQ ID NO: 178585 - DNA, 241 bp, Glycine max
  unsure (1)..(241): unsure at all n locations
agagtttgttgtgactataagctagtttatcgtgaggagaatatgaagttgtttgtcttctttgttgctgcagtagttttggtagcatggccatgccatggcgcaggctaccaaaggttccctctccgaatgaaaactggctatggtgagcgttcttcggaggtaacatgcgcaagttttaggcttgctgtggaagcacacaacatccgagcttttanaaccattcctgaagagtgcgttg

SEQ ID NO: 178586 - DNA, 256 bp, Glycine max
tgatctatcatcttctactcgtgttgttaattaaccactttgtgtttgagaataagggttacccattctactatgggtttctttgtttgcctcttattttatctagttagagatccttttatgaaacgagtgatcagtgtgaaaaaaaaaaaaaaaaaaaaaaaaaaaaaaaaaaaaaaaaaaaaaaaaaaaaaaatttaaaaaaaaaaaaaggggggggccccgagaattttcccccccgccgggggtttttttc

SEQ ID NO: 178587 - DNA, 256 bp, Glycine max
ttcatcggaggtggattgctgggcttatctacgaggttgtcttcatcagccacacccacgagcagcttcccagcactgactactagaggggaaaaatgaaataataaaaaaaaaaaatgtgtattattgaatttctccggaatcttcttctgtgtatggttttccttcctttgtgttttctttcctgttgaatcggtggccgttgatctttctctggatggttgatgatcctgaagttttcttttaattaatttaa

SEQ ID NO: 178588 - DNA, 256 bp, Glycine max
gtttatcgtgaggagatatgaagttgtttgttctctttgttgctgcagtagttttggtagcatggccatgccatggcgcaggctaccaaaggttccctctccgaatgaaaactggctatggtgagcgttcttcggaggtaaaatgcgcaagttttaggcttgctgtggaagcacacaacatccgagcctttaaaaccattgctgaagagtgcgttgaaccaacaaaggactacattaatggcgaacaattagatca

SEQ ID NO: 178589 - DNA, 258 bp, Glycine max
cagaaccatatttttctgaaaagtgatggaactttgacgccattggccattgagttaagtaagccgcatcctcaaggtgaagaatatggtcctgttagcgaagtctacgtgccttcgagcgaaggagttgaagcttatatttggttattggcaaaggcttatgttgttgtaaatgactcgtgctaccatcaactcgttagccattggctaaacactcatgcggttgttgagccattcgtcatagcaacaataggcatc

SEQ ID NO: 178590 - DNA, 261 bp, Glycine max
cggcgttctatatattatgaattgacaatgaggcctgctcttgctttgcttcctcttctatttgctttcttgttagctgccactctcggaatcaagaaaagatccaggggaatattggaaaatgatcatgaaagatcaggaaatgccagaaggacttcaaggtcttgtttcatttcaatctgaaaataaccctaagactcaagagcagcttggtaaaggttccaaaaaccattgtgaagagtctctagttacaatacacaa

SEQ ID NO: 178591 - DNA, 258 bp, Glycine max
ctaaggacctctcccagaaagaggcatcagttgcaatggctcgttacggtgagggcgacaagcggtggatcgtggaggaccgccccgacggcaccaatgtccacaactggcattggtccgagaccaactgcctcgactggtccaagaccttcttcaccagcctcctcactaacctccctatcctcgacggcgagggtaacctcttcctcaaaacgacgtcgcttcgctccctcgacggcgaggcctacatcaatgccg

SEQ ID NO: 178592 - DNA, 264 bp, Glycine max
tttatccctccattgcttgcactgccgccgataacaattttctgtatcgtgtatttttcttttctttgttcacagctctgcgagatcttcattcgccgattttaaaagatgagtaagcttcagagtgatgctttgcgtgaagccatttcaggaatcatggccgattccaaggagaagaatcgcaaatttgtggagaccatcgaactccaaatcgggttgaaaaactacgatccacagaaggacaagcgtttcagtgctctgtca

SEQ ID NO: 178593 - DNA, 255 bp, Glycine max
ttcttctcttgcggtagggttttagcgcagttcttctagatttgaggcagatgggtaaggaaaaggttcacatcagtattgtggtcattggccatgtcgactctgggaaatccactaccactggtcacctgatttacaagcttggaggcattgacaagcgtgttattgagaggtttgagaaggaagctgctgagatgaacaagaggtctttcaagtatgcctgggtgctggacaaacttaaggctgaggtgaaag

SEQ ID NO: 178594 - DNA, 256 bp, Glycine max
gcattccattgttgtatattgtattgtagccggagaagaagagaagagatagcggcgaagaaagaaagatgacggaggcatatataaggaagaagcccgggatggcgagcgtgaaggacatgccggttctccaggacggtccaccaccaggcgggttcgctccggtccggttcgcccggcgcatccccaacaagggccccagcgccgttgccatcttcctcactgctttcggcgctttctcttggggctgtaccag

SEQ ID NO: 178595 - DNA, 243 bp, Glycine max
gttctcttaactgagcccctcttaaccccaaggctaatcgtgagaagatgacccaaatcatgtttgagaccttcaacacccctgctatgtacgtagccatccaagctgttctttcactgtatgcaagtggtcgtacaactggtattgtgttggattctggtgatggtgtcagccacactgtccctatctatgagggttatgcactcccacatgccatcctcgtcttgatctggccggtcgtga

SEQ ID NO: 178596 - DNA, 257 bp, Glycine max
tttgaaggaaattatattcgcacgcttcttcttttgctcgaatcatggagggtggttatgctcgtcgactcttgcaggtcggtataagatcaataaacaaagaagggcgtgaacaagccaaaaagttcggggtagagcagtttgaaatgcgacatttttcgaaagatcgtccatttttggaaaacctgaatctaggagaaggtgctaaaggagtatacatttcaatcgatgtggattgtcttgatccaggtatgctg

SEQ ID NO: 178597 - DNA, 257 bp, Glycine max
cgagtcttgaatcccttttcaaccttaacactcctcacttcgtttccgtcgcagctttttacacactccaccgctgcttccccttcacctccgatttcgttaatcagagatcaaaatgtctcgaagatatgacagccgtacaacaatcttctccccggaaggacgtctttaccaagtggaatatgcaatggaggctattgggaatgctggtaccgcaatagggatcttatcaaaagatggggtagtgctgttggtga

SEQ ID NO: 178598 - DNA, 259 bp, Glycine max
cctttcgttcacttccgtttccctctcactcacacacttctccccaaaactcaaaacctcaactctctttcgcgctcgttctctcgctcgctgcaaccatgaattgctccatctccggcgaagttccggaagatcccgtcgtgtcccggaactccggtctcctcttcgagaagcgtttgattgagcgacacatctcggattatgggaagtgtccaattactggagaaccacttactcatggatgacattgtccaatcaa

SEQ ID NO: 178599 - DNA, 256 bp, Glycine max
gtcgggtgtactttctgcgaaaccgagagagcgaaggggcaaacacaattttttttatcttcttttttattttttgtagagagagagagagagaaaatgttggggatcttcagcagttcagtggtgtcgccgccggaggagctggtggccgctggcagcagaacgccgtcgccgaagacgacggcggggaagctgctgaaccggttcgtggagagcaaggcgtcggcggtgtcgctgcaggtgggggacacgtgca

SEQ ID NO: 178600 - DNA, 261 bp, Glycine max
gtgtatttccctacctccccttcaagatgcagatgttcgtcaagaccctcaccggcaagaccatcacccttgaggtggaaagctctgacaccatcgacaacgtcaaggccaagatccaggacaaggaaggaatccccccggaccagcaacgtctcattttcgccggaaagcaacttgaggacggccgtacccttgctgactacaacattcagaaggagagtactcttcacctcgtcctccgtctccgtggtggatgcagat

SEQ ID NO: 178601 - DNA, 260 bp, Glycine max
ccagcccggggacgagcacgcacgtcgcgtggtgtccggtgcgcctccggcggcccttgaaaatccggaggaccgagtgcctcccacgcccggtcgtactcataaccgcatcaggtctccaacgcgaacagcctctggtcgatggaacaatgtaggcaagggcagtcggcaaaatggatccgtaacctcgggaaaaggattggctctgagggctgggcacgggggtcccagtcccgaacccgtcggctgtcggggactgc

SEQ ID NO: 178602 - DNA, 264 bp, Glycine max
gcgagactcacacatggtgcgaagatccgcgaggtgttataggcaaattaagaagaaaccataccccaagtcacggttttgacgtggtgttcctgatcccacgatcaggatttacgatgttggtatgaagacagaagggtgttgatgagtttcctttctgtgtccatctggttagttgggagaaggaatacgtttctagtgaagccctggaagctgctcgtattgcttgcaacaagtacatggccaaatttgctggaaggatgc

SEQ ID NO: 178603 - DNA, 276 bp, Glycine max
tcgtcgagctcgagccgcgttcacctctcaacctctgcagcgccttcgatccagaaaacatgactaagagaacaaagaaggctggcattgttggaaaatacggtacccgttatggcgccagtctgcgtaagcagattaagaagatggaagttagtcaacacagcaagtttttctgtgaattttgtggaaagtatgctgtgaagaggaaagctgtgggaatatggggatgcaaggactgtggtaaagtgaaagctggcggtgcttacatttgaatac

SEQ ID NO: 178604 - DNA, 260 bp, Glycine max
cgtgaccgcacgatcaagctgtggaacaccctgggagagtgtaagtacacaatccaagacggcgatgcgcattctgattgggtaagctgcgtccgtttcagccctagcacccttcagcccactattgtttctgcctcgtgggaccgcaccgttaaggtttggaacctgacaaactgcaagttgaggaacacgcttgctggacacaatggttatgtgaacactgttgctgtttcccctgatggctctctgtggccagtggt

SEQ ID NO: 178605 - DNA, 257 bp, Glycine max
attaggttcctctcctcacggataaggaggtgttgggagaaggtgataacaccaagcttgatattcagattaagttggacaaggaaaagaaaattctctcaattcgagacagaggtatcggtatgacgaaggaggatttgataaagaatttggggacaatagcgaaatctggaacttctgcatttgttgagaagatgcaaacaagtggagatctcaatctgattgggcagtttggagtcggcttctacctgtttatc

SEQ ID NO: 178606 - DNA, 256 bp, Glycine max
tggaactacttagtctccgttacctccacgaatcaggttttcttcattctgcatttgcattcggctatgaagctgggattgctaaaagcaaaaatgatgatagtgtggttccaccgggtgctcttgctactttcatacagaaaggacttcaatatcttgagctggaagcaaacttgagtggtagtgctgctgacatggatgaggatttttcatttctacaacctctggatcttatcacaaaggggccaatgcaata

SEQ ID NO: 178607 - DNA, 256 bp, Glycine max
cgttccgagtttctgatcgctcatagagagttcgacgcggcggttgcagaagacgattgcaagatgaagttcaacatcgcgagtcccaccactggatgccagaagaagctcgagatcgacgacgatcagaaactacgagcattttgggacaagaggatctcacaggaggtcagcggagatgcacttggtgaggactttaagggctatgtcttcaaaattactggaggttgtgacaaacaaggcattccgatgaaac

SEQ ID NO: 178608 - DNA, 254 bp, Glycine max
cctagcccctgcagacaaagaagaaaacatcagtcactgctgatgacaatggctgtaaacggtgcaactgtaagaagtgtaaatgtttaacactttactgtgattgttttgctgctggaacgtactgtaccgacccttgtgcttgccaaggctgcttaaacagaccagaatatgtagagacagttgtcgagactaaacaacaaattgaatcccgtaatccaattgcatttgctcccaagattgttcgcctacca

SEQ ID NO: 178609 - DNA, 255 bp, Glycine max
ttctgagagtgttggttgacagtagcgaagatgtttcctttcgggcaaaagggtcacaagataacacgggactatggtggttatgcagaagaatgtgttggacatcaacagcatcaccagtgttggagggatcgttgaccaaggcttaggcttcataggcagtgcagtcgatgcacttacttttgcagccaccaaaatctccatccagttgattagtgctaccaaggctgatggtgggacaggaacattggaaag

SEQ ID NO: 178610 - DNA, 259 bp, Glycine max
aaatttaactcgacctgtatgatgaatgggttaacaagggcaatgcaccggcactgcccgagactcttaagaattacaacaagctggtgtctcttggcttcaagattatattcttgtcaggaagaacactggacaaacaggccgtaacagaagcaaacttaaagaaggctggctaccacacatgggaaaaattaattctcaaggatccacaagatccttccactccaaatgcagtttcatacaaaacagcgcgagagag

SEQ ID NO: 178611 - DNA, 260 bp, Glycine max
gcatttgcgtcacttgcagtcatcagattttctcgcttatggaatcaaatctgtatcccaagatgtcttgcctgtcttgactgatgcattcgatggaaatattttgagccttgagtttgataattttgctgaagtgcacaaactctatgaaggtggagttacactacctacaaactttcttagcaagatcgcccctataccagtgatcaaggaaatttttcgaactgatggcgaacagttcctcaagtatccccacctaa

SEQ ID NO: 178612 - DNA, 263 bp, Glycine max
aaaaaagacaacccagcgagcgcgtcttaataaacgctcttctctgaaaacccccatttcttttcttctttcttcttctctttcgcttcttcgatcttcgatcttcgtcgctgaaaatgagagagtgcatttcaatccacatcggccaggccgggattcaggttggaaacgcctgctgggagctttactgcctcgaacacggcattcagcctgatgggcagatgccaagtgacaagaccgttggtggaggtgatatgctttca

SEQ ID NO: 178613 - DNA, 261 bp, Glycine max
ctaacactttcttctcctgttttccttcttcctcgcatcaatggagttggacggcgttctcctcggcatgtgcaaccctctcctcgacatctctgccgtcgtcgacgacgctttcttgcaaaaatacggtatcaagttgaacgatgcgattctcgccgaggataaacacaaacctatgtatgaagaattggctaacaatcctaatgtggagtacattgctggaggtgctactcagaattcaatcagggttgctagtggatg

SEQ ID NO: 178614 - DNA, 267 bp, Glycine max
ctcaagcacaacatctctatcgagtaaattaactatgaagcctaccctactattatccctttccttcctgcctctctttgctttcctggctctttcagaagatgttgaacaagttgtggacataagtggcaaccccattttcccaggtggcacatattacattatgccatcaacttggggcgctgccggtggtggattgacactaggccggacaggaaactcaaactgcccagttactgttttgcaagattactcagaatcttccgt

SEQ ID NO: 178615 - DNA, 258 bp, Glycine max
gaggacgggccatagacgcaagcgacgacccgggagcggattccccaccggcagggggacaggagacggccatctcgaggcacatcacgacctacaggcaagaccggcgagacctgggaaggctacccgattgggagtcagaggatccatagtacctgcagccccgcggacttcatcttcatcatttttgaaagcggggggaagggatctcctttctgcaacggaaaaaaacggagcttatttgactcgcacaaccta

SEQ ID NO: 178616 - DNA, 254 bp, Glycine max
gttgatcgagatactagaaacagtgtgatgaaaatgaaggtccttgttttcttcgttgctacaattttcgtagcatggcaatgccatgcgtacgatatgttccctctccgaatgaacactggctatggtgcccgtactccggaggtgaaatgcgcaagttggaggcttgctgtggaagcacacaacatctttggctttgagaccattcctgaagagtgcgttgaagcaacaaaggcatacatccaggcgaacaa

SEQ ID NO: 178617 - DNA, 254 bp, Glycine max
gcaaaaatggcactgcaacactgtctctgtctctcctcctcctgttctcactcagcatcgccgtaaccgttagatcgagcgactacgactacgattgtgtgtacactgcatacgttagaaccggttcggtgttgaagggcggaacggactctaagatcgggctgaagctgtacgacaagtacggctactacatctacattaaaaacctcgaagcatggggcggcttgatgggcaagggctacgacacttcgagc

SEQ ID NO: 178618 - DNA, 255 bp, Glycine max
ctccgctctaaatctctgtctctctctctctctctcgatcaatcatggctttgcccaatcagcaaaccgtcgattaccctagtttcaaactcgtcatcgtcggtgacggtggtacaggaaagacaacgttcgtgaaaaggcatcttaccggtgaatttgagaagaaatacgaaccgaccattggagtggaggttcacccattggatttcttcacaaactgtggaaagattcgcttctactgttgggtactgccgg

SEQ ID NO: 178619 - DNA, 262 bp, Glycine max
cattagttcattctcttgcgcagttccctacctctcctttcaagatgcagatcttcgtcaagaccctcaccggcaagaccatcacccttgaggtggaaagctctgacaccatcgacaacgtcaaggccaagatccaggacaaggaaggaattcccccggatcagcaacgtctcatcttcgccggaaagcagctcgaggacggccgtaccctcgccgactacaacatccagaaggagtcaacccttcaccttgtcttcgtctc

SEQ ID NO: 178620 - DNA, 267 bp, Glycine max
tctcgagccgaatcggctgaggttttagtcaagtatgaagcatgcgctgaagatggaactcgcgtggcaaaatctgatggagtggagttcacagtcaatgatggttatttttgtactgctttgtcaaaggctgttaaaaccatgaagaagggagagaaagtgcttctgacagtgaagccacaatatggatttggtgagaagggtaagccagcacatgatgaagaaggtgcagttccaccaaatgcaacatctgagattatcttgagt

SEQ ID NO: 178621 - DNA, 238 bp, Glycine max
ctttgttcactcttcttctcttgcggctagggttttagcgcactccttctagatttaaggaagatgggtaaggaaaaggttcacatcagtattgtggtcattggccatgtcgactctgggaaatccactaccactggtcacctgatttacaagcttggaggcattgacaagcgtgttattgagaggtttgagaaggaagctgctgagatgaacaagaggtctttcaagtatgcctggg

SEQ ID NO: 178622 - DNA, 268 bp, Glycine max
atttggccagaaaacttgcaggtgatcctaacttgcactttgtggagtctccagcattggctccaccagaagttctaattgatttagctgcacagcaacaacatgaggccgagcttcttgcagctgctagtcagccccttcctgacgatgatgatgaatcttttgagtaaaattatgccttttgagtcgtgctactgcttatgctacagtatgtattttggggggtgtaatgttgacagttttggatgccggatttgagtgtcagaaa

SEQ ID NO: 178623 - DNA, 263 bp, Glycine max
gttcaggtgacccatctcgcgggagtcctcggttttggtggattttgcttccttttaggggcacgaccccaagatattccctatgtatattgtttgttttacgtcatctttgttcctcttcgttggatatactataggtccaagaaatggcattactatctactggatttttgctattatgccaatacaatatttttgattgatcttcttttttactcatcaaatgagaagcttttcatggtttgcttttcttttgcggaggg

SEQ ID NO: 178624 - DNA, 257 bp, Glycine max
atcctcccaacacattctgctcaccggtagtgccggtttcattggcacccacacggtcgttcagcttctcaaagctggcttcagcgtttcaataatcgacaatttcgataactccgtcatggaagcagtggaccgcgtccgccaagtggttggccctctggttgctcagaacctccaattcacccagggcgatctccggaatagggatgacttggagaaactcttctccaaaacaacatttgatgccgtgatcaact

SEQ ID NO: 178625 - DNA, 268 bp, Glycine max
aacatgccaaacgacagcgttctgagtctgttcttcttcgttaccctcttcacatgtcttctctctgctaattcccacgatgaacatattttcctaccgagtcaactccatgacgatgactcagtgagttgcactgttaccgtcccaaaccttaactacaatccggtgatcggaatcctgacccaccccggcgacggtgcctctagccggctcagcaacgccaccggggtttcttacatcgccgcttcctacgttagattcgttgagt

SEQ ID NO: 178626 - DNA, 271 bp, Glycine max
tggaaaacaaagtatagagtgaaagaatgggtgagaaaagcaagattttgatcataggaggcaccggctacatcggcaaacatatagtggaagcaagcgcaaaggctggaaatcccacttttgctttggtgagggaatccacactctctgacccctccaaggcacaactcatccacaattttgaggctttgggcgttaatttggtccgcggggatctgtacgatcatgagaagttggtgaaagctatcaagcaagtagatgtcgtcatatc

SEQ ID NO: 178627 - DNA, 261 bp, Glycine max
gtttttcttcctttctctttctttttcttctttgccttaaacaagcataactgaagttcaatggaagtttctgatatttgatcttgtccttcatcatagcataccaaagaggatctgcaattggagaaaagcatctgcttgtaagatttgcagtagacataggaggattagttggaccagatggttccacacactatggtgcacctgatgtcactttgacggcctgcctccctaacatggtggtgatggttccttctgatg

SEQ ID NO: 178628 - DNA, 274 bp, Glycine max
gcatctgcatcttcaccctcctcggagtgtttcaccctaaatgaggctagattgaaagaacgcaattacctgggattgtcagattgctcttcggtggacagttctattgtcccgagtttgtctgatgagaaaaaggagaatctgaatttgaaggctactgagttgaggcttggacttcctggatcccagtcacctgaaagggatccggatcttttctcgttgagctcaacgaaactcgatgagaagccactgttctctttgcttcctacaaagg

SEQ ID NO: 178629 - DNA, 280 bp, Glycine max
cttttctcagctgctgttcctgcgcgtgaacaagcctcaggtaagccaaagccatggttaagcataacaatgttatccccaacggacacttccgtaagcactggcagaactatgtgaagacctggttcaatcagccagcacggaagacaagaagacggttggctcgtcagaagaaagctgtgaagattttccccagacctacagctggacctcttagacccattgtacatggtcaaactttgaaatacaacatgaaagtgagagctggaaggggattttc

SEQ ID NO: 178630 - DNA, 218 bp, Glycine max
  unsure (1)..(218): unsure at all n locations
attaggctttgccgattgacagaggcagataaatgggagaacgataaggaatcccaatggctttggggctcttggcgatgatcctcttcttcattgcttcctcttcctctcacctcgttcgcccttccgatgacgttgangacgcgatcttctacgagtcgttcgacgaggattttgatggacggtggattgtatccgacaaggaggattacaatggt

SEQ ID NO: 178631 - DNA, 262 bp, Glycine max
aaaaaaaaaaaaaaaaaaaatccgggattcgctcttctcttggaaaagtgaaaaccagaagtacgaacgaaagagaagagcgatttagaagtaaaaaaagatggggttgtcgttcacgaagctgttcagcaggttgtttgcgaagaaggaaatggggattctgatggaaggtctcgatgctgctggaaagacacccatcttgtacaggctcaagtttggagaaatcgtcacaattacccccacaatgggtttaaatttggaa

SEQ ID NO: 178632 - DNA, 268 bp, Glycine max
caccgcacgaatatcttgttgtttggagcgatccgagaaaaactctgtaaacatgttggtttaccaggacctccttacaggtgatgagcttctctctgactccttccgttatcacgaaattgagaatggaatgctgtgggaagttgaggggaagtgggttgttaaaggagcagttgatgtagacattggtgcaaacccttctgctgagggtggaggagaagatgagggagttgatgatgcagctgttaaggttgttgacattgttgac

SEQ ID NO: 178633 - DNA, 270 bp, Glycine max
cttccttttctcttctctgtctaaggggtgccctgagatcacattcgaacaatggtgaaggctgtggccgttcttggcagcagtgagggtgtcactggaactattcacttcgttcaggagggaagtggtccaaccaccgtaactggatctcttgctggtcataagcctggtctccatggtttccatgtccatgccttgggggacactaccagtggctccctctcagctggatcacatttcaatcctaataacaaggagcatggtgcccct

SEQ ID NO: 178634 - DNA, 268 bp, Glycine max
cagaatccgaggcgaagagaagagaaaaattaagatggaggggaaggagcaggatgtgtcgctgggagcgaacaagttcccggagagacagccgattgggccggcggcgcagagccaagacgacggcaaggactaccaggagccggcgccggcgccactggttgacccgacggagtttacgtcatggtccttttacagagcagggatagcagagtttgtggccacttttctgtttctatacatcactgtcttaaccgtcatgggagtc

SEQ ID NO: 178635 - DNA, 268 bp, Glycine max
cattttctctctttctctttctctccgacctagcgagaccgagcgatccgatcctaaccccgcgatgctccgccgcgcaaccacctccctcatctccggcgcctcccgccgccgcctctccaccgacgtgccggcgacgcggcggcggattccgtcttcgcggaggcgtggaagaaagtgagccccaacatcgacccgccgaagacgccgctggcgtacatgaagccccgaccacccactccttcgactctcccctccaaactcaccg

SEQ ID NO: 178636 - DNA, 235 bp, Glycine max
ctacagtgtagcagcagatctcttgtagggctcatgttagaccacaaagatgttaccctatcccactttagttttgctagcttctttctggtgttccacactgggtctttatgtccatattgatgttttgcttccttttggtgtttgacagaagtaaattttgatctaacttgtatttgaccataaaaaaagtgaagcatatacagaaaaagaaaaaggaaatgaagaatggtgc

SEQ ID NO: 178637 - DNA, 277 bp, Glycine max
cgaatatgaccgggcacgggcacgtatctttagtagccctagaagctctgaatcaggtgatacctcatccgtggttccaatggatgggagatattcttctactagcaaggatgagaatgaaactagcaagaaccccatggctgattcagaaagatatatcagtaccagggatagttgttcgactcgagttgccatactcagagatagggaaaaggatcgtagtgatccagattatgaccgtagttatggaaggtatgctaggagtatcccaacctct

SEQ ID NO: 178638 - DNA, 277 bp, Glycine max
agaatatgagcagcagtgcagggaagttggtgtgtgtcaccggtgctgccggttatattgcttcatggattgtcaagttcctacttgaacgtggttacactgtcaggagcactgttcgaaacccaaatgatcacacgaaggtagaacatttgctaaaacttgaaggtgcaaaggagagactgcacctttttaaggcagatcttttgggtgaaaattcttttgactccattgttgagggctgtgatggcgtctttcatactgcttctccttttattat

SEQ ID NO: 178639 - DNA, 271 bp, Glycine max
cttggaagaaagcttgtacactgcagtacccacactgccagtatcgttatcttgattgtcaaagcatgggtgacccagataggattgtctggttaagatcaagcaatctctcacgtctatgtgatcagaacagtgatttctttcaatttggcatttttgttgatgctctcaatttggaagttacagcttcacaattcttcaacaaatactgctactgtctatggtggggactaaggaatctaagctcgtgggacagttctcttaacaggta

SEQ ID NO: 178640 - DNA, 194 bp, Glycine max
cagctataagctagtttatcgtgaggagaatatgaagttgtttgttttctatgttgctgcagtagttttggtagcatggccatgccatggcgcaggctaccaaaggttccctctccgaatgaaaactggctatggtgagcgttcttcggaggtaaaatgcgcaagttttaggcttgctgtggaaccacacaaca

SEQ ID NO: 178641 - DNA, 271 bp, Glycine max
cttccttctccttctctctgagaacaacaccccacactcctctctctctctccgcttccttctcttctcacacctccatggcccacacttcccttccctccgccgatgccgccatggacgctgtccagcgccgtctcatgttcgaagacgaatgcattttggtggatgagaatgaccgtgtggttggtcatggattcaaagtacaattgtcacttgttggagaattttgacgctgagattttgctgcatagcgcttacagtgtattcctgt

SEQ ID NO: 178642 - DNA, 263 bp, Glycine max
cttttcgttctgttttggcttcttcgctgcaactctctagcttccctctttttccgaatctgaatagaaatggcttcggagactgagacgttcgcttttcaggccgagatcaaccaggtcctcagtctaataatcaacaccttctacagcaacaaggagacctgtcttcgtgagctcatcagcaatgcctctcacgctttggacaagattcgatctgagagtcttacagacaagagcaagcttgatgctcagccagagttgtt

SEQ ID NO: 178643 - DNA, 270 bp, Glycine max
cgagctctgcgagatcttcattcgccgattttaaaagatgagtaagcttcagagtgatgctttgcgtgaagccatttcaggaatcatggccgattccaaggagaagaatcgcaaatttgtggagaccatcgaactccaaatcgggttgaaaaactacgatccacagaaggacaagcgtttcagtggctctgtcaagctgccccacatccctcgccccaagatgaaaatttgcatgcttggtgatgctcagcatgttgaagaggcggagaa

SEQ ID NO: 178644 - DNA, 264 bp, Glycine max
ctttattctatctcactttcctattacagtatctttacctcaatggcaccaagttctgcagtgccagatgaacaggttgttgttggagaggagattgagcatgtaagactggtcactttgaacaggccaaggcaattgaatcccatctcaccagaactggtttctcagctagcaacatatttggaaaagtgggagaaggatgagaaaccagacctagttataataaagggagctggtcgggtcttttgtgctggaggagatttg

SEQ ID NO: 178645 - DNA, 270 bp, Glycine max
gaggaatttaatgaaaccttatatgatgaatgggttaacaagggcgacgcaccggcattgccagagactcttaaaaattacaacaagctgttgtctcttggcttcaagattgtattcttgtcaggaagatatcttgacaaaatggccgtaacagaagcaaacctaaagaaggctggcttccacacatgggagcagttaattctcaaggatccacatcttatcactccaaatgcactttcatacaaatcagcaatgagagagaatctgttg

SEQ ID NO: 178646 - DNA, 149 bp, Glycine max
gctgatatgcactattcaaataggagcattagctatgtttgttaatgtcactttatgttatgtgggtaagtcacctaagacactccacgtacctacttgttgtctcttacgcggctttaataaatcttctgcccttggttccatattta

SEQ ID NO: 178647 - DNA, 240 bp, Glycine max
ctggctttagctagcgcttattctcacgcattccgtggagatctagctgtactgctgcaagacctcgctgaaaattatggtttcgattcggaggtagacgaagatgttcggaagggctccgaagaaaagcgaagcaccaggtactacgaaatcctcggcgttccaagaacgcttcgccggatgacttaaagaaggcttacaagaaagccgccattaagaaccatcctgacaaaggcgggg

SEQ ID NO: 178648 - DNA, 272 bp, Glycine max
cgcaccaagaccaacatggtgatggttttcggagagatcacaaccaaggccaacgtggactatgagaagattgtgcgtgacacatgcaggaacattggtcttgtctctgatgatgttggtcttgatgctgacaactgcaaggtcctcgtcagcattgagccacagagtcctgatattgctcaaggtgtgcacggccacctcacaaagaggcctgaggagattggtgctggtgaccaaggtcatatgttcggctatgccactgacgagactcc

SEQ ID NO: 178649 - DNA, 275 bp, Glycine max
gagagtccagcctgccgcttcatgagatggaaggaggaagaacttactatctgggaatgtttttgggtggggcttacgaggaggcgctcggtggagtccacaacttgttcggcggccccagcgtggtcagggtgtcgcagagcgatggccctcacagctttgcggtcacgcgtgccgtgccggggccatcctgtggagatgttcttcgagtgatgcagcaccagcccgagctcatgttcgagacactcaagcaccgcgcgcaggagtatgtcagc

SEQ ID NO: 178650 - DNA, 219 bp, Glycine max
gcttcgtgttgtagctagctcctcgaaaatgctggcacgcctcgccgcgagtcgcttcaacgagatccgtcagattttccgtcagccttctagggctttctcgaccgctctgaagtactaccttgacacatcgcacaacaaccctaggcttccatgggaattcaccgaggccaatcatccaaaggttaaggagattttgtctcactatccatccagtta

SEQ ID NO: 178651 - DNA, 266 bp, Glycine max
acagaatttcctgtttacgatcttattgcaattttgcaactttcaaagcttattagctaaagtaacatcaaaagatgtcattgattccaagtattttcggtggcccaaggagcaacgtgttcgatccattctcactcgatatgtgggatcccttcaaggattttcatgttcccacttcttctgtttctgctgaaaattctgcatttgtgaacacacgtgtggattggaaggagacccaagaggcacacgtgctcaaggctgatatt

SEQ ID NO: 178652 - DNA, 267 bp, Glycine max
gcattccctgacgcagagaaagcaaaagacagtcgcagcattcgtcctggaaaggggaaaatgcgtaaccgtcgctacatctcacgccgtggaccactcatcgtgtacggaacggaaggagccaaagccgttaaggccttccgtaacgtccccggcgtggaagtcgctaacgtcgagaggcttaaccttctgaaacttgctccaggaggacacctcgggaggtttgtggtttggacaaaaagcgttttgagaagctggattcgattt

SEQ ID NO: 178653 - DNA, 260 bp, Glycine max
ccggagcatacacaatgtacgtggatgaggatcacgcagatcagatctgcagtgccaagcttgtaagcagccctcaccctcaatgcaaggaagtcaccccaggccgcgacgaagccgtcgtgattctcacccgctacaacggcattgcctccgacgataggttcgccaatgccatgggcttcatgtctcaggaggttgcttctggctgtgctgagatcctcaggcaataccaggagttcgacaatgagaattaattacgt

SEQ ID NO: 178654 - DNA, 189 bp, Glycine max
ttctttctctctcacttagtcaaagggactcggtgttcttctgtcatgttatttagaaaagcaagatggtgaagatttgctgcattggtgctggatatgtggggggtgctactatgggagtcatggcagttaagtgcgcatctattgaagttgtggtgttgatatctgtaaatcccgcattgcaggttg

SEQ ID NO: 178655 - DNA, 270 bp, Glycine max
gctctactagctagggtttcgcaagtgcgatcgaagaagaacgatggcgatggctgctgctctgcgtcgcgaaggaaggcgtttgacccaaccaatcaacgccctccgttcctctctcatctctcaagaccaatcccctcatggcgcgcgcttcatttccactcaagtggtgagaaaccgaatgaagagtgtgaggaatatccagaagatcaccaaggccatgaagatggttgccgcatccaagctgagagccgttcagaccagagctga

SEQ ID NO: 178656 - DNA, 271 bp, Glycine max
agacgcttcgcaaatctcaatcgaatctcagaaaaatgagagaaatcatcagcattcacataggtcaggccgggatccaggtcggaaactcctgctgggaactctactgcctcgaacatggcatccagcccgacggcatgatgccttctgactccaccttcggtgtagcccacgacgccttcaacaccttcttcagcgaaaccggatctggcaagcacgtcccccgtgctgtcttcgtcgacctcgaacccaccgtcatcgacgaggtccg

SEQ ID NO: 178657 - DNA, 271 bp, Glycine max
gatcgagataactagaaacagtgtgatgaaaatgaaggtccttgttttcttcgttgctacaatcttcgtagcatggcaatgccatgcgtacgatatgttccctctccgaatgaacactggctatggtgcccgtactccggaggtgaaatgcgcaagttggaggcttgctgtggaagcacacaacatctttggctttgagaccattcctgaagagtgcgttgaagcaacaaaggaatacatccatggcgaacaatatagatcagactccaaa

SEQ ID NO: 178658 - DNA, 266 bp, Glycine max
cgttctctgaaattttaattgacttttctcccctcataaaaaaaacctaccaatggctcccgcaaaggcagagaagaagcccgcggagaagaagccggcagagaaggccccagcggagaagaagccgaagggcgagaagaagatatcgaaggaaggaggaagcgagaagaagaagaagagaacaaagaagagcgttgagacctacaagatctacatcttcaaggtgttgaagcaagtgcaccccgacatcgggatctccagcaagg

SEQ ID NO: 178659 - DNA, 269 bp, Glycine max
gcttctgattattcctcttcccattctagggttcccaaatggacgctggcggaaagatcaagaagggcgccggaggaagaaagggcggcggccctaagaagaagccggtttcaaggtccgtcaaggccggtctccaattccccgtcggaagaattggccgttatttgaagaaaggaaggtacgcccagcgtgtcggtaccggtgctcccgtttacttggccgcagttctcgagtacctagctgctgacgtgcttgagttggctgggaat

SEQ ID NO: 178660 - DNA, 227 bp, Glycine max
gttgatcgagataactagaaacagtgtgatgaaaatgaaggtccttgttttcttcgttgctacaattctcgtagcatggcaatgccatgcgtacgatatgttccctctccgaatgaacactggctatggtgcccgtactccggaggtgaaatgcgcaagttggaggcttgctgtggaagcacacaacatctttcgctttgagaccattcctgaagagtgcgtcgaag

SEQ ID NO: 178661 - DNA, 263 bp, Glycine max
gtttgttgttgttgttggaagccaaaaccctagcagccggcgagaatggcagacgttgaggttgatgtggcggcggcggcggcggcggcggctgcagggcagacaaagaagagaacgttcaagaagttcagcttcaggggggtggatctggacgcgcttctggacatgtccactgacgaactcgtgaagatgttcagtgctcgcgcacgcagaaggttccagagaggtctcaccagaaagcccatggccttgattagaaagct

SEQ ID NO: 178662 - DNA, 276 bp, Glycine max
ctcaccattcaccaacctgcttctctgttctcttctttcccttcccaagaagaagaagaagaagatgccttcttcagaatcatcaacaggcttctccgaaaccatttgtgtgaccggcgctggtggcttcatcgcctcttggatggtcaaactcctcttggagaaaggctacactgtccgaggaaccctcagaaacccagatgatcccaagaacgggcacttaaaagagtttgaaggagcttcccagagactaactctgcataaggttgacctcct

SEQ ID NO: 178663 - DNA, 274 bp, Glycine max
tgcactatagtagaaaaaggacattcattcatctatggctacccttattgctcccagcaaccactctccccaagaagatgctgaagctctcagaaaggcttttgaaggatggggaactgatgagaacactgtcatagtaattttgggtcatagaactgtgtatcagaggcagcaaatcagaagagtttatgaggaaatttaccaggaggatcttgtgaagcgcctagagtctgagatcaaaggagactttgagaaagccgtgtaccgatggata

SEQ ID NO: 178664 - DNA, 266 bp, Glycine max
gacaccgcttgttggtttatgagtacatgaaccgtggttcccttgaccgaaacctctttgctggtgaaccggttttggaatggcaagagaggttcgatgtggcgcctggaacagcacgtggacttgcttaccttcacagtggatgtgtacaaaagattatccattgtgacatcagaccagagaacattctcttgcaggatcagtttcaggctaagatatctgattttggactctccaaactcttgagtgcggaacagtctggtttg

SEQ ID NO: 178665 - DNA, 262 bp, Glycine max
catttctccatttccattttctctctcacttttcaagaatcgtaagctatgggaaagtcttacccaactgtgagtgctgattaccagaaggccgttgagaaggcgaagaagaagctcagaggcttcatcgctgagaagagatgcgctcctctaatgctccgtttggcatggcactctgctggaacctttgacaagggcacgaagaccggtggacccttcggaaccatcaagcaccctgccgaactggctcacagcgctaaca

SEQ ID NO: 178666 - DNA, 263 bp, Glycine max
ctcttcctcaccgattgccagaatggaatttcgatgctcagtcatctcttttaccattctcttctctcttgctcttgcaggagagagccatgtccatgcatcgctacctgaggaagattattgggaagctgtttggccaaacactcccattcccactgcactgcgagagcttctaaagcctctccctgcaggtgttgaaatcgatcaactccctaagcaaattgatgatacacagtacccaaaaacattcttctataaagaag

SEQ ID NO: 178667 - DNA, 200 bp, Glycine max
caaatcttaaaaatattcagtgaagatcaacctcaatggcatctcttggcgtgcgaccagttcttccccctccattaacttccatctccgacccacctcctcttttcgatggcaccaccaggttgtacatcagttattcttgcccctatgcacaacgtgtgtggatcgctaggaactacaaggggctacaagataagatc

SEQ ID NO: 178668 - DNA, 271 bp, Glycine max
atctcttctctctgcatcgcttcaggttcttctgaaaagatgtctcgcgtgtatgttggtaacttggattcacgagtcaccgagagagatctcgaagacgaattccgtgttttcggagttattcggagtgtttgggttgcacgtagaccacctggtaatgcttttattgactttgatgaccgcagagatgcacaggatgctatccgtgaattggatggcaagaatggttggagggttgagctttctcacaactctagaggtggaggtggtg

SEQ ID NO: 178669 - DNA, 278 bp, Glycine max
  unsure (1)..(278): unsure at all n locations
ccagttcaaaggtaaggtaggttaacactcttcttcatcgtcgtcgcaatgggacgtgtgatccgtgcgcacgtaagggagcaggctcggtcttcaagtcccacacgcaccaccgcaagggccctgcacgcttccggagcctggacttcggggagcgcaacggctacctcaagggcgtggtcaccgnacgtcatccaatgacccatggccgcggcgcgccgctcgccaaggtcgccttccgccaccctttcagatacaagaagcagaacgagctcttc

SEQ ID NO: 178670 - DNA, 266 bp, Glycine max
cattgctacaagaacaaataccaggctcatcagaaaggacaaattggagtcaccatagtgactttcttctttgaaccaaaatctaatagtgatgctgatcgcaaggcagcaaggcgagctctggactttatgtttggctggtttgctaatcccattacatttggtgactatcctgagagtatgagatctttagttggttctagactccccacattcaccaaagctcaatctgaaagtctcaaaggttcatatgattttcttggtat

SEQ ID NO: 178671 - DNA, 271 bp, Glycine max
cagttagcctcttcttgtttctcctgcaatcaacgacacccccccaaaaatgacaggagagacagtgaacccaaaagcttaccctttggccgatgcgcaactcgcaataacaatactggatcttgtgcaacaagctgccaactacaagcaactcaaaaagggtgctaatgaagcgaccaagacactgaacagaggcatctctgagttcgttgtgatggccgcggacactgagcctcttgagattcttctccatcttcctctcctagctgag

SEQ ID NO: 178672 - DNA, 266 bp, Glycine max
cagaagttttaaacattcaacctcaatttgcagagttctaatattacattgcagagaaaatgtctttgattccaagtttctttggtggcagaaggagcaatgttttggatcctttctccctcgatgtgtgggaccttttaaggattttaccttttcccacttctctttctgctgaaaattcagcgtttgtgagcacacgagtggattggaaggagacaccagaagcacacgtgttcaaggctgatactccagggctgaagaaggag

SEQ ID NO: 178673 - DNA, 266 bp, Glycine max
ctgtcactcttggggaacatggttccagatactacaccaagagtttcaaaggatcggtagatgctttccatgtcaatacagttgatacaactggtgccggtgactcctttgttggtgctttattggccaagattgtcgatgatcagtccatacttgaagatgaaccaaggttaagagaagtactaaagtttgcaaatgcatgtggagctattacaactacccaaaagggagcaattccggcccttcccaaagaggaggctgcactg

SEQ ID NO: 178674 - DNA, 267 bp, Glycine max
cccacgttgcaggctatggtggtgatgtttggcccatacaaccagctccaaaggaccatccatggcgctacatgccaaaccatgccatgactcctcatatttctggcaccaccattgatgcacagttacgttatgctgctggtgtcaaagacatgcttgataggcacttcaagggtgaagactttccagaacaaaactacattgtgaaggagggtcaatttgcaagccagtatcgttgaagtgatgcttttgttgaatttgaatctt

SEQ ID NO: 178675 - DNA, 269 bp, Glycine max
cattagacaacgtgtttttctactagagatctcttttctctagctagtgtaatatcattaatcaatggctggcactatctttggataccctttcagacacttcatctggggtcacccaccaattttcaaagaatggtccggctcaacagccctcttagattggctcgaatcacccactgcccacatcttaaaaattaacgttccaggattcagcaaggaagacataaaggtgcagattgaggatgggaatattcttcacatcaaagggg

SEQ ID NO: 178676 - DNA, 261 bp, Glycine max
attgatttcttgcttctatatattacttgcttcttttcttgatcatgtcccttgctggtaaaatcagctctgaaattggtgttcaggcaaccgctgcaaagtggttcaacctcttcacaacacaacttcatcacgttcaaaatcttactgatagaattcatggaaccgagctgcatcatggtgaagactggcatcacaatgagtcggtcaagcactggacttataccatagatggcaaggttacaacttgcaaggagagta

SEQ ID NO: 178677 - DNA, 260 bp, Glycine max
ctcattgttgaaaagaaaccctagcaagtggagcaatggcagacgttgaagtcgatgtggcggcagagcagcagcagggctgccgaagaagagaacgttcaagaagttcagttttcgaggcgtggatctcgatgcacttctcgacatgtccaccgatgaactcgtcaagatgttcagtgcccgcgctcgtagaaggttccagagaggcctcaccagaaagcccatggccttgatcaagaagctccgtaaagcgaaaaggg

SEQ ID NO: 178678 - DNA, 261 bp, Glycine max
ctcgcagaggaaaaccctagctagtagtctcagttcgtttgagagagaaaaaatggcagagggtctcgttctccgcggaaccatgcgcgcccacaccgacgtcgtgacggcgattgccactcccatcgacaactccgacatgatcgtgacggcgtcgcgcgacaaatccatcattctctggcacctcaccaaggaggacaagacctacggtgtcccccgccgccgcctcaccggacattctcacttcgtccaggacgtcgt

SEQ ID NO: 178679 - DNA, 260 bp, Glycine max
gtttgttgtgagctataagctagtttatcgtgaggagaatatgaagttgtttgttctctttgttgctgcagtagttttggtagcatggccatgccatggcgcaggctaccaaaggttccctctccgaatgaaaactggctatggtgagcgttcttcggaggtaaaatgcgcaagttttaggcttgctgtggaagcacacaacatccgagcctttaaaaccattcctgaagagtccgttgaaccaacaaaggactacatta

SEQ ID NO: 178680 - DNA, 261 bp, Glycine max
gttacaggcctgatgcaccactagtacttcgtggaatcacatgcacatttgaaggaggtcacaaaattggtattgttggcagaacaggcagtggaaagtctactcttataggcgccttattccgtctagtggagccagcaggtggaaaaatcattgttgatggaatagacatttgttctattggacttcatgacttgaggtcacgctttggtattatacctcaggatcctactctttttaatgggacagtcagatacaatt

SEQ ID NO: 178681 - DNA, 257 bp, Glycine max
cacacactctcatagctgtagcggcgacactaagatcggagaaagaatggcgaaaacgacgtcgttgctgctctttacactgctcctcttcggaaccctagctctcatccaggcgaagaaatcgaaggaggatttgaaggaggtgacccacaaggtttactttgatgttgagattaatggaaaagaagcaggtcgtattgtaatgggtctttatgggaaggctgttccaaaaactgcagaaaacttccgagcacttt

SEQ ID NO: 178682 - DNA, 267 bp, Glycine max
agagtttgttgtgagctataagctagtttatcgtgaggagaatatgaagttgtttgttttctttgttgctgcagtagttttggtagcatggccatgccatggcgcaggctaccaaaggttccctctccgaatgaaaactggctatggtgagcgttcttcggaggtaaaatgcgcaagttttaggcttgctgtggaagcacacaacatccgagcctttaaaaccattcctgaagagtgcgtcgaaccaacaaaggactacattaatgg

SEQ ID NO: 178683 - DNA, 264 bp, Glycine max
ctcacactggtcttcgcttctcattcatcatttctcacctaaccttctcttcctctcagtctcagatcagaaacctcagccagccatggcagcgttccagaagatcaaggtcgtcaaccccatcgtcgagatggacggagatgaaatgactagggttatctggaagtcaatcaaggacaagctcattttgcccttcttggagttggacatcaagtattatgacttaggccttccttaccgtgatgagaccgatgataaagttac

SEQ ID NO: 178684 - DNA, 262 bp, Glycine max
ctcacactggtcttcgcttctcattgatcatttctcacctaaccttgtcttcctctcagtctcagatcagaaacctcagccagccatggcagcgttccagaagatcaaggtcgtcaaccccatcgtcgagatgcacggagatgaaatgactagggttatctggaagtcaatcaaggacaagctcattttgcccttcttggagttggacatcaagtattatgacttaggccttccttaccgtgatgagaccgatgataaagtt

SEQ ID NO: 178685 - DNA, 263 bp, Glycine max
caggcatctttatgcctcctcagggtctccatacaagtttgaaagataacggaaagatccgcgaagcactaaggaattggcctgagaagaacattccaagtcatagttgtaagtgctggagaacggatcctgggtcttggggatcttggttgtcagggtatgggaataccagtgggaaaactttctttatatacagcacttggaggagtccgcccttcagcttgtttacccattacaattgatgtgggcacaaacaatgagaa

SEQ ID NO: 178686 - DNA, 261 bp, Glycine max
cgaagacaaacctctgttctcaactgtgtttctttacctctcacctactttcagaccataccaggctgagaagatgcagcagacaccgcctatgattcctatgatgccttcgttcccacctacgatcataacacaacgagcagattcaaaaataccttgatgagaacaagaagctgattctggcaatattggacaatcaaaatcttggagaacttgcagaatgtgcccagtaccaagctcagcttcaaaagaatttgatgt

SEQ ID NO: 178687 - DNA, 259 bp, Glycine max
gcccatcatcaaagtttcttcctttctctgctctttgccttctctgacacatttggtgccttgtagagcgtgttttggcaggaaggtggtatggcgaaggacgttgaggttgctgagcgtggctccttctctgggaaggactaccaggaccctccaccagcaccactcattgatgctgaggagctcacaaagtggtccttttacagggctctcattgctgaattcattgccactttgctcttcctctacattactgtgc

SEQ ID NO: 178688 - DNA, 256 bp, Glycine max
cggctcgacgaagcatcgagaacatcgcagcgatggcgagagtgggtagaatgaagttgggttcacaaggcatggaggtgtctttgcagggacttgggtgcatgggcatgtctgcgttctatggtcctcccaagcctgaccccgatatgattgctctcatccaccacgctgttcaaactggtgtcacttttcttgacacttctgacgtctatggtcctcacaccaacgaacacattctaggaaaggctctgaaggg

SEQ ID NO: 178689 - DNA, 261 bp, Glycine max
gtgtgatgaaaatgaaggtccttgttttcttcgttgctacaattttgcgtagcatggcaatgccatgcgtacgatatgttccctctccgaatgaacactggctatggtgcccgtactccggaggtgaaatgcgcaagttggacgcttgctgtggaagcacacaacatcttcggctttgagaccattcctgaagagtgcgttgaagcaacaaaggaatacatccatggcgaacaatatagatcagactccaaaacagttaac

SEQ ID NO: 178690 - DNA, 264 bp, Glycine max
cttcttcgtctcaaatctcttcgttccttcgattcgttccatctcttccaaaatggccaaagacccagttcgcgttctcgtcactggagctgcagggcaaattgggtatgctcttgtccctatgattgctaggggagtgatgttgggatctgaccagcccgtgatcctccacatgcttgacattcctccggcagcagagtcattgaatggggttaaaatggaattggtggatgctgcattccctcttcttaaaggtgttgttgc

SEQ ID NO: 178691 - DNA, 258 bp, Glycine max
aaaagtggtccttgtcgggcatagctttggagggatcagtatagcccttgcaatggacaaattcccagagaaaatatcacttggaattttcctaacagcttttgttcctgatacccaacacaaaccatcacatgtcttagaagagtacattgatagatacccatataccggatggatggacactgagctctggaatagtggaggcaaaacaacattgctttttggcatcaaattcttgtccactaagttctatcaact

SEQ ID NO: 178692 - DNA, 261 bp, Glycine max
taacaagctaggctattagttcgattttgtagtaagtgaggtgccaatatggtgaagatagctcgtggtagtttggatgactcttttagcgctgcctctcttaaggcttatttcgcagagttccacgcaactctgattttcgtgttcgctggtgttggatcagccatcgcttacaacgagcttacaaaagatgcagccttggatccaacgggggctggtgggcagtagctgtggcacatgcatttgcactgtttgtaggtg

SEQ ID NO: 178693 - DNA, 256 bp, Glycine max
aaaattcgcactgttgagcaggatgggaagacaattaaactacagatttgggatactgctggacaagaacgatttaggacaataactagtagctactatcgtggagcacatggaatcattattgtttatgacgtgacagatgaagatagcttcaataatgtgaagcaatggctcagtgaaattgaccgctatgccagtgataatgttaacaaacttttggttggaaacaagagtgatctgacagcaaatagagttg

SEQ ID NO: 178694 - DNA, 259 bp, Glycine max
ccaaaccaaagcaagaatagtgttctaagagtgagcaacaacttcaaacaccattgtgagaaatggcttccaagggtgcacttctcttgtgtctcaacattctcttcttcactgtggtaagctccacatatgtcccatgcaacccaccccctaaaactcctaaacacacacctgtcccaaagccaccttccccaaagcaaccaagttgccccaaagacaccattaagtttggtgtgtgtgctgatgtgttaggtttgat

SEQ ID NO: 178695 - DNA, 260 bp, Glycine max
cctgaagctaacttaagggaaatgagatggccaatggcaacactagtcatcgcttcaagctcttgcttttccttctaactctgcactcttcattcgctgagattttcttcgaagagagattcgaagatggatggaagagccgttgggtgctatccgattggaaaaggagtgaaggaaaagcgggtaccttcaagcacacagcaggaaaatggtctggggatcgtgatgacaaaggtcttcagacatataatgacgccaag

SEQ ID NO: 178696 - DNA, 257 bp, Glycine max
ctttgttgtgagctataagctagtttatcgtgaggagaatatgaagttgtttgtcttctttgttgctgcagtagtcttggtagcatggccatgccatggcgcaggctaccaaaggttccctctccgaatgaaaactggctatggtgagcgttcttcggaggtaaaatgcgcaagtcttaggcttgctgtggaagcacacaacatccgagccgttaaaaccattcctgaagagtgcactgaaccaacaaaggactaca

SEQ ID NO: 178697 - DNA, 258 bp, Glycine max
catacccacacacaccttgttttcctttctatagagacacacagagagagcaataaacacccttcaatggctaccactaccactaaagtttacattgtttactattctatgtacggacatgttgagaagctagctgaagagattaaaaaaggagctgcttctgttgaaggagtagaagcaaagctatggcaggtacctgaaacactgcctcaagaggtccttgggaaaatgggagcacctccaaagagtgatgtacca

SEQ ID NO: 178698 - DNA, 257 bp, Glycine max
aaaatgtggaagagaacgggttttgaagaagaagcagttcaattgatcaactcagatttcagggacctaagtctagctgctaatagactcgcccatcatgccatcaaacttggtggcattggctttggagcctcttttttcggattgtttgctgccattgctgctatttatctgttgattttggatcgtacaaactggaaaacaaatattctcacagcactactcattccatacattttcttcagcttgccttcatt

SEQ ID NO: 178699 - DNA, 254 bp, Glycine max
gccgattacaatattcagaaagaatcgacgcttcatctggtgcttcgactccgcggagggatgcagatcttcgtgaagacgctcaccgggaaaactattactctggaggtggagagttctgatacgatcgataacgtgaaggcgaagattcaggataaggaagggattccaccggatcagcagcgtcttatcttcgctgggaagcagctcgaagacggacgcactctcgccgattacaatattcagaaggaatc

SEQ ID NO: 178700 - DNA, 253 bp, Glycine max
gcggaaagaacaacagtaggattggcagcaagagacccttcagggattctctccccatacacctacaatctaagaaacacaggccctgatgatgtttacattaaagttcactactgtggaatttgccattctgatctccaccagattaaaaatgatcttggcatgtccaactatcccatggtcccaggacatgaagtggttggtgaggtactggaggtgggatcaaacgttagcaggttcagagtgggagagt

SEQ ID NO: 178701 - DNA, 250 bp, Glycine max
ttccttcttcttcttcttcttcttcttcttcgttgaatcgcgattgttctgtgcgagagaaagaagagagagatcgaaaatggcgttggctttcgacgagttcggaaggccgttcataatcctgaaggagcaggagcagaagagcagactccgaggattggacgctcagaaagccaacatctccgccggcaaagccgtggctcgcatcctccgaacctccctcggccccaaaggcatggacaagatgctc

SEQ ID NO: 178702 - DNA, 256 bp, Glycine max
ctcgagcgaatcggctcgagcgcgggtgaggtagaacccttcacactgtggtgactctgcgatgggtgcctacaagtaactttcagagctatggcgcaagaagcagtctgatgtcatgcgcttcttgcagcgggtgaggtgctgggagtataggcagcaaccttccattgttcgtttgacaaggtctacccgccctgacaaggctcgtcgcttgggcttcaaggctaagcagggctatgtgatttaccgtgttcgt

SEQ ID NO: 178703 - DNA, 261 bp, Glycine max
tgaagattgagagaagatacaaaacagaagagagatgggcgtgacgaaggaacaagttgaattatccttgaaggccaaactgaacccttctcaccttgaagtggttgatatatctggagggtgcggtgcaagttttgtggtagagattgtatccgaacagtttgaaggcaaaaggctacttgagaggcatcgaatggtgaatgctgccttagaggaggaaatgaaacaaattcatgctctctctattaagaaagctgttac

SEQ ID NO: 178704 - DNA, 257 bp, Glycine max
ctgcaaaggaggaagaggaaaagaggattagagggtcgccacgttttccaataaccaaaccctctctactcttttttcttctccttctcttcgctagggttttagcttcttcctcttcacttcgttctttttcgcctctacaatgagcaacgacaaggacacattcaacgtcgccgatctcacttctgctctcaacgaggacaatagagcagaccttgtcaatgctcttaagagcaagatacagagtttggctggac

SEQ ID NO: 178705 - DNA, 254 bp, Glycine max
attgaatctcagaattctctaaaagagatctttttctgctctttgaagaaagaagggtctttgcttgattttggagatgtctctgctctcagatctcatcaaccttaacctctccgataccaccgagaaggtgatcgcagagtacatatggatcggtggatcaggaatggacctgaggagcaaagcaaggactctcccaggaccagttagcgacccttcagagcttcccaagtggaactatgatggttccagca

SEQ ID NO: 178706 - DNA, 255 bp, Glycine max
gtccgagacatctcggaaaggatatcttgctgccctgtctgcatcaagttactcttatatttctttactcaaacactttcttccaatcatgaacccagatggatctgcaatttctcttacatacattgcttcagaaaggatcattcctggatatggtggtggtatgagttctgcaaaagctgctttagaaagtgatacaagagtgcttgcttttgaagctggtagaaagaaaagaatcagagtcaatactatatc

SEQ ID NO: 178707 - DNA, 255 bp, Glycine max
cgagataactagaaacagtgtgatgaaaatgaaggtccttgtattcttcgttgctacaattttcgtagcatggcaatgccatgcgtacgatatgttccctctccgaatgaacactggctatggtgcccgtactccggaggtgaaatgcgcaagttggaggcttgctgtggaagcacacaacatctttggctttgagaccattcctgaagagtgcgttgaagcaacaaaggaatacatccatggcgaacaatatag

SEQ ID NO: 178708 - DNA, 251 bp, Glycine max
gtgagttgcactgctaccgacccaaaccttaactacaagccggtgatcggaatcctgacccaccccggcgacggtgcctctggccggctcagcaacgccaccggggtttcttacatcgccgcctcctacgttaaattcgtggagtccggtggtgctagagttattccccttatctacaatgagtcacctgagaaccttaacaagaagctcgatttggtcaatggagtgctcttcactggtgggtgggctgt

SEQ ID NO: 178709 - DNA, 252 bp, Glycine max
cttctgagagtgtttggttgaaagtagcaaagatgtttcctttcgggcaaaagggtcaaaagataaaggggactatggtggttatgcagaagaatgtgttggatatcaacagcatcaccagtgttggagggatcgttgaccaaggcttaggcttcataggcagtgcagtcgatgcacttacttttgcagccaccaaaatctccatccagttgattagtgctaccaaggctgatggtgggaaaggaaaaattg

SEQ ID NO: 178710 - DNA, 253 bp, Glycine max
ccaaaaagactgttgttgggaaagagtgcttctattgatgcagacaaatctatgatctccaagttgaagaccgagtgtggcagccagttcacaaacaaactagaagggatgtttaaggacattgaattatcaaaagacataaacgagtccttcaaacagtcatcccaggctaggacaaaactcccatccgggattgaaatgagtgttcatgttttgacaactgggtactggccgacgtatccacccatggatg

SEQ ID NO: 178711 - DNA, 256 bp, Glycine max
ctcgagccgcaaagccatggccacctccaacttctctattgttctctccgtctccctagccttctttttggtgctacttaccaaggcacactcgaccgataccgtttctttcaccttcaacaagttcaacccagtccaaccaaacattatgctccaaaaagatgctagtatttcatcctctggggtgttacaactcaccaaagttggcagcaacggcgtgcccacctcgggatctctcggtcgtgccctttacgct

SEQ ID NO: 178712 - DNA, 245 bp, Glycine max
catttatccaagcaggactgaatgaactaatggagtctaaaggtgggaaaaagaagtctagtagtagtagtagtaaatcattgttctacgaagctcccctcggatacagcattgaagacgttagaccaaacggtggaatcaagaaattcagatctgctgcttactccaactgcgctcgcaaaccttcctgatatccatccagattgatagttcattgcatgcaaccatagttttattaggttttt

SEQ ID NO: 178713 - DNA, 257 bp, Glycine max
aaagtccctgaatgaaattacaaaggagctttgcccagttctcagtatacaacagttatacaggataagtacaatgtactgggatgacaaatacggcactcacagtgtgtctacggacgttataacaaacatgagagctatgatgtctgaggactctaataatgctgtcagcacttctttcctgttagatgatgactcgagcattccgttttcggtggatgacatttccaaatcaatgcaacaagtagaagtagcag

SEQ ID NO: 178714 - DNA, 279 bp, Glycine max
aggctcataaatcttttttatgggtttcagggtcactactactctgtctctgctctccctgttttggctcttgtccctgcaccaagcaagagctgcaaagttccacaatgtgagtggcttgagagggaaaaagccagttgtagcaaatgggtgcaatttgttcctgggaagttgggtggttgacacgtcttatcctctctatgactcttcaacatgccccaccattgatcccgagtttgattgccaaaagtatggaagacctgacaaacagtacctcac

SEQ ID NO: 178715 - DNA, 284 bp, Glycine max
acctttcacattctaatggggttccagtgcataaagattatgttgtatttgttcccaatggagaaccacggcaggacctgtggcttgcattgcatccaaatgaaagtaataagcccatgtattatgatgcaatcttgaatggagtggagatattcaaaattaatgatactgcaggtaatctggcagggacaaatcctattcctcctcctgtgcaagacataattgacccgtcaatggctagggcatctcatcatggtaaatcaaagaatcatacaggcataatt

SEQ ID NO: 178716 - DNA, 283 bp, Glycine max
gtttgttgtgagctataagctagtttatcgtgaggagaatatgaagttgtttgttttctttgttgctgcagtagttttggtagcatggccatgccatggcgcaggctaccaaaggttccctctccgaatgaaaactggctatggtgagcgttcttcggaggtaaaatgcgcaagtcttaggcttgctgtggaagcacacaacatccgagcctttaaaaccattcctgaagagtgcgttgaaccaacaaaggactacattaatggcgaacaatttagatcagac

SEQ ID NO: 178717 - DNA, 288 bp, Glycine max
acagaatcaagaaaagatacaggggaatattggaaaatgatcatgaaagatcaggaaatgccagaaggacttcaaggtcttgtttcatttcaatctgaaaataaccctaagactcaagagcagcttggtaaaggttccaaaaaccattgtgaagagtctctagttacaaatacacaagttaatagtgacttcgaacccataccaagtgttaccaaatatgatgatttggaattcaagtcaagcattatcaagaacgatgattttgaatcgagaccaagtgttaccaag

SEQ ID NO: 178718 - DNA, 286 bp, Glycine max
ggcatacgataggtacaagtgcttgccgatctttcgcagacagaatatacaaccccaatggcactgatccttccatcgacccttcatttcttccatttccccgacaacttttcccacaaacacaaccaacgaagcgagtcgcactagacacaggaagccaattcaaattcgacacgtcctacttcgctcacctagttagaggccgtggaattctccgttctgatcaggttctttggactgatgcttccacaagaggctttgttcagaaatacttagccacaggtcc

SEQ ID NO: 178719 - DNA, 282 bp, Glycine max
ctgcttggtgcgaccaaatattcccgttcctcgggccttgactattgcgccatatattcgcattcgcgcgtttccttcggctcttgcttccgtgacttgagaaaagagaattagggtcacgagggtttcatcctgcggcatcagacatgggaggaggcaatgggcaaaaggcaaagatggctcgcgagaagaacatcgagaagcagaaggccgcctcaaagggaagccagctggattcaaacaagaaagcaatgtcgatccagtgcaaggtgtgcatgcaaa

SEQ ID NO: 178720 - DNA, 263 bp, Glycine max
ggctcgagcgatgatgaaaatgaaattggtacaaaacattactgcttatcctttgtgtgaaactcttcacttatgcagtgattggtgctcctcaaacttgtcctgctaacaatgaggataaatgcggcgattcagatgaatggaaaggggagtttttccctgacattcccaaaattaaatatgagggtccgtcaagtaagaatgtgctttcatttaaatggtataatgcagaggaggaaattcttgggaagaagatgaaggat

SEQ ID NO: 178721 - DNA, 278 bp, Glycine max
cgagtgagtcactcttcttgcataacccagatctgacaatatgcgaagaactggcttgttacatttgttatgccttgtcattgctttagtaagtgtgcaagcagaagatgcgtataagtattacacatggacggtgacttatggaactatttctccattgggtagtccccagcaggttattcttatcaatggtcagtttcctgggcctagacttgacttggtgactaatgagaatgtaattctcaaccttatcaacaagctggacgagccatttttac

SEQ ID NO: 178722 - DNA, 280 bp, Glycine max
cactcgagccgaatcggctcgagctcattcacacattcacagttatcctctctctctctttgacgcttggatcactgatctcacctcaattttcagatatgtcgacatctgataagccagaagtggtggaaaggggtagcaaggatgaaaaacacaaggaagatgatcaagaggaggggaagggtggattcattgagaaggtgaaggatttcattcatgacattggtgagaagattgaggaagctattgggtttgggaagccaactgctgacgttactgc

SEQ ID NO: 178723 - DNA, 279 bp, Glycine max
ctgatcataaatcacatagctagttgtttaaagtgagagacaaagaaagaagaaaatggcaaactttccagttgttgacatggggaaacttaacaccgaagagagagcagcagccatggagattataaaagatgcctgtgagaactggggtttctttgagttggtgaaccatgggatatccattgagttgatggacactgtggagaggctcacaaaagagcactacaagaagactatggagcaaaggttcaaagaaatggtggccagcaaagggcttga

SEQ ID NO: 178724 - DNA, 276 bp, Glycine max
tcgattgaggaaaatatggtcaaaatcgacatgagaggatgtcgagccacactatctctcttctgtcctgattggaactgctgttgtttgttttgctattatttgaaaaaccaatttgtttttaattcagattgttgcatgtatgttttaatcctaggcaagtagcagcaaagatgcttctctgtgacatgttcaattattaatttatatgaattgcgctttaatttgttgaatatatcaggttcgtacgcgtctctctagttgtatagcatttgc

SEQ ID NO: 178725 - DNA, 284 bp, Glycine max
gctctgtttctgtctctgtgtttgcggctgaggattccgaacgagcgaccttcttcgtttctcgcaaagtttaagtcatcatgggtaaggaaaagactcacatcaacattgtcgtcattggacatgtcgactctgggaagtcaactaccactggtcatttgatctacaagcttggaggtattgacaagcgtgtgattgagaggttcgagaaggaggctgctgagatgaacaagaggtcattcaagtatgcctgggtgcttgacaagctcaaggctgagcgcgaa

SEQ ID NO: 178726 - DNA, 281 bp, Glycine max
aaacgctacataaaccccgcaacaaacaaccaacccccaaacccctcactcttctcggcgtccatcggaaatttccaaggtaaaaagatgaatctgaagaacatgaagattccgaacgttccaggcggcggtgcgtcctctgcgctgctgaagcttgggcttcttggtggaattggtttatatgcagctgctaacagtctctacaacgttgaaggaggtcaccgagccattgttttcaaccgtctagttggtgtcaaagacaaggtctatcctgaaggaac

SEQ ID NO: 178727 - DNA, 277 bp, Glycine max
atcatcacatgcttcatgaactcatgggagttgatcctggaactaaccctgtttgccatttccttggaagcaaggccattttatgggcacccaatttatctatggacactgcctatcagactaacgttgttgtttacttagtccatgcatctgcatcttgggcaccataagattgtatataaaataaattatggtgtgttgtgtatgttgtgcaagacctggaacttcacctttctacgtacgtgtgctgttaggatgcagtgtgctttgatgatgc

SEQ ID NO: 178728 - DNA, 280 bp, Glycine max
atttctctctgtctcgtttacacatctctccaacctttcactttcgtttctcagtcttattcgaatccctctctcaatctcctttccaaatggccagcgttgaggttgcacagcaaacaccaacaacagttccagaaaatgaaacaaccgaggtaagcaagacccaggaaacaaccccagtcactgaggctcctgcaacagaacaaccagcagctgaggttcctgcaacagaacaaccagccgctgaggctcctgccccagaatcaaccaccgaagcacc

SEQ ID NO: 178729 - DNA, 225 bp, Glycine max
tttatgttttcttattctgaggatcatttgtgtgagtcgtgtgaaaaatatttcaggttttatgttggctaagaggcctaatgtttgggccctagaaatctctggttaaactgtgtaaagatctgttacttggtttaaagtttgtgtgttttgttcacttccaaggaatttatgtgtgcaagaaagatgtaattgaaaaatttagcaatagactaatggttttat

SEQ ID NO: 178730 - DNA, 278 bp, Glycine max
atttgagcagactgagaaagtgagaatggagttggacgaacaaagaatgaggcaatcaaggatgttggtgagcgcaatccaagaggcaatggtgaataagctgaaggaaaaagacgaagagattcagcgtatggagaagctgaattgggcccttcaagaaagagtcaaaagcatgtgcatggagaaccaaatttggagggaattggcacaaacgaacgaagccacagccaactacctaagaagcaatttggaacaagtcttggcacatgtcggcgagg

SEQ ID NO: 178731 - DNA, 284 bp, Glycine max
cgattgcgcaattcatcaagcactttggtaaatacggtgagataacggattccgtcatcatgaaggaccggaagaccggccagccgcgtggtttcggcttcataacttacgctgatccctccgtggttgatacagtgattgacgacactcacattatcaatggcaagcaggtggagattaagcggacgataccgaggggggctgctggctcgaactcaaaggacttccgaacgaagaagatttttgtgggtggaattccttcgactgttactgaagatgaattt

SEQ ID NO: 178732 - DNA, 279 bp, Glycine max
cagcagtgcagggaagttggtgtgtgtcaccggtgctgccggttatattgcttcatggattgtcaagttcctacttgaacgtggttacactgtcagggccactgttcgaaacccaaatgatcacacgaaggtagaacatttgctaaaacttgaaggtgcaaaggagagactgcacctttttaaggcagatcttttgggtgaaaattcttttcactccattgttgagggctgtgatggcgtctttcatactgcttctccttttattatcaacgtcaaaga

SEQ ID NO: 178733 - DNA, 281 bp, Glycine max
gcaaaaatggcacctgcaacactgtctctgtctctcctcctcctgttctcactcagcatcgccgtaaccgttagatcgagcgactacgactacgattgtgtgtacactgcatacgttagaaccggttcggtgttgaagggcggaacggactctaagatcgggctgaagctgtacgacaagtacggctactacatctacattaaaaacctcgaagcatggggcggcttgatgggcaagggctacgactacttcgagcgcggcaacctcgacatcttcagcgg

SEQ ID NO: 178734 - DNA, 283 bp, Glycine max
ccgattgctagaatggaatttcgatgctcagtcatctcttttaccattctcttctctcttgctcttgcaggagagagccatgtccatgcatcgctacctgaggaagattattgggaagctgtttggccaaacactcccattcccactgcactgcgagagcttctaaagcctctccctgcaggtgtacacatcgatgaactccctaagcaaattgatgatacacagtacccaaaaacattcttctataaagaagaccttcatccaggcaaaacaatgaaagtac

SEQ ID NO: 178735 - DNA, 283 bp, Glycine max
accaggagttggatactggtcgtgctagctagcgggccaaagtagtgcctaagtcttcctcatatcttccaccctttggcttattagtgggagcaatacatatcattcattcagaggcaacaaaggagttgtaaattaagagcatggctgcacaagctcttgtatcatcatcatctcttaccttctcagccgaggctacaagacaaagtcttggaccaagatcactccaatctccatttggcttctcaagaaaagcctcctttcttgttaaggcagctgctac

SEQ ID NO: 178736 - DNA, 282 bp, Glycine max
gtttgtcattagcacttcttcttttcacactgccgctgcaacaatggcttcagagaagaaactttacccacccaatgagggagataaaagtgcagaagctcgttctcaatatctctgttggcgagagtggagatcgtctcaccagagccgccaaggtgttggaacaacttagtggccaaaccccagtgttttccaaagcaaggtacactgttcgttcctttgggattagaagaaatgagaagattgcatgctatgtcactgtcagaggtgacaaggcaatgc

SEQ ID NO: 178737 - DNA, 277 bp, Glycine max
cttccttcagttgacaacgcccagaagtttctcgaagcttccaagaaggggaacgtcattcctctcttccgctgcatattttccgatcacctcactccggtgcttgcgtaccggtgcctggttaaggaggacgagagagatgctccgagttttctctttgaatcggtcgagccaggccaaatttctagcatcggacggtacagtgtggttggagcacagccgtgtatggaaattgtggcgaaagagaacgtggttactattatcgaccacgtggaag

SEQ ID NO: 178738 - DNA, 274 bp, Glycine max
ggtcaacacaggctctgcctgttgctttgatgattcatgataactcgtcggatcgcacggcctttgtgccggcgacgcatcattcaaatttctgccctatcaactttcgatggtaggatagtggcctaccatggtggtgacgggtgacggagaattagggttcgattccggagagggagcctgagaaacggctaccacatccaaggaaggcagcaggcgcgcaaattacccaatcctgacacggggaggtagtgacaataaataacaataccgg

SEQ ID NO: 178739 - DNA, 274 bp, Glycine max
atcactacctctgcattttgctctcgctctctgccttccatcaccctcgccactcgccttcccaagatagtagaagatggcagacgctgaggatattcaacctctagtatgcgacgatggaacaggaatggtctaaggctggtttgtctggagatgatgccccacgtgctgtgtttcccatcattgtaggtcgtactgttcacactgttgtgatagatggcatgggccagaaatatgcacatggttgtgatgaggcacagtctatgaggggtat

SEQ ID NO: 178740 - DNA, 282 bp, Glycine max
tcaaaatctagtttcatacttttcatcttcttcttgaaatggctctccaggctgcttctcttgttcctgattctttctcggttcttaaagacggtgagatgtggtgtgtctctcaaggactccacctagttcggtctggcattttcagaacctatcaaagctaacttaagctcttctgcattgaggtgcaagagggattccgcacaaaagctctgtgctgtgagtgccgagacagtggctacagcgtctgcagcagttaccaagtctacacgagaagggaag

SEQ ID NO: 178741 - DNA, 284 bp, Glycine max
  unsure (1)..(284): unsure at all n locations
ctgagctataagctagtttatcgtgaggagaatatgaagttgtttgtcttctttgttgctgcagtagttttggtagcatggccatgccatggcgcaggctaccaaaggttccctctccgaatgaaaactggctatggtgagcgttcttcggaggtaaaatgcgcaagtcttaggcttgctgtggaagcacacaacatccgagccatntaaaccattcctgaagagtgctctagacaacaaaggactacattaatggcgaacaatttagatcagactctaaaacc

SEQ ID NO: 178742 - DNA, 282 bp, Glycine max
gtaattaataacaagctagctattagttcgattttgtagtaagtgaggtgccaatatggtgaagatagctcttggtactttggatgactcttttagcgctgcctctcttaaggcttatttcgcagagttccacgcaactctgattttcgtgttcgctggtgttggatcagccatcgcttacaacgagcttacaaaagatgcagccttggatccaacggggctggtggcagtagctgtggcacatgcatttgcactgtttgtaggtgtctccgtcgccgccaa

SEQ ID NO: 178743 - DNA, 279 bp, Glycine max
cggttaagcggtgagatttgcgaatctgagaaatggcggattcttctcgggaggagaacgtttacacggcgaaattcgcggacaggccgagcgttacgaggagatggttcacttcatggagaacgttgcaaagactgtggaggttgaggagttgacggtggaggagaggaatctcctctctgtggcttacaagaacgtgattggtgcgacgagggcttcgtggaggatcatatcctccattgagcagaaggaggagagcaggggcaatgaggaccacgt

SEQ ID NO: 178744 - DNA, 276 bp, Glycine max
ctccttctctcgttgattcggatctagagtcttttttcactcttcagttctcgttgttgttcttcgctttcctgaaactagggttttcaatttcgattcattcgttaataattaaagatgtttgggagggcaccgaagaagagcgataatacgaggtactacgaaatcctcggcgtctcgaagaacgcttcgcaggatgatctgaagaaggcttacaagaaagccgccatcaagaatcaccctgacaagggcggtgatcccgagaagtttaaagag

SEQ ID NO: 178745 - DNA, 279 bp, Glycine max
cctgtttcgtgaagctcagtgcatcaagatctctctctctgtaatcgaaaatgagcaagggaccgggtctctttaccgatatcggcaaaaaatccaaagatcttttgactaaggactacaactccgatcagaaactcaccatttcctcatacagcatctccggagtcgccctcacttcaacatctgtcaagaaaggaggactctccactggggatgtggcagcactgtacaagtataagaacactattattgatgttaaactggacaccgcatcaacta

SEQ ID NO: 178746 - DNA, 276 bp, Glycine max
cgttattctctctccgagcttcactctcttttcgcctctgctaaagggagaaaaatggggttctcctcctttctgggtcgtgttctctttgcctccctcttcatcctctccgcatggcagatgtttaatgaatttgatgccaatcgtggacccatctcgaaagagttgattcccaaactcagtgtggtgaagaataatttatcctctaaactgggggtagcgctaccagatattgatgcccggcaattcattgctaccatcatatttcttaagggg

SEQ ID NO: 178747 - DNA, 275 bp, Glycine max
caacaaaccagagtaataaaaatcttcaacttttagcagttttttttttctatattgcagaagccatggatttcagggtgatgggtttggattctccattgttccacacgctgcaacacacgatggacatgtcagaggacgctgcaggggacaacaagacatacagtgctccgacacggtcatacgttcgagacgccaaagcaatggctgcaacacctgcggatgtgaaggaatatcccaactcctacgtattcgagattgacatgccagggttg

SEQ ID NO: 178748 - DNA, 277 bp, Glycine max
ggtcaacacaggctctgcctgttgctttgatgattcatgataactcgtcggatcgcacggcctttgtgccggcgacgcatcattcaaatttctgccctatcaactttcgatggtaggatagtggcctaccatggtggtgacgggtgacggagaattagggttcgattccggagagggagcctgagaaacggctaccacatccaaggaaggcagcaggcgcgcaaattacccaatcctgacacggggaggtagtgacaataaataacaataccgggct

SEQ ID NO: 178749 - DNA, 279 bp, Glycine max
cgagggccacattgtgacaaattatcacgtaattggcaatgccctttcaagaaacccaaattctggtgaggttgttgcccgagttaatattctagcatcagaagggttacagaagaattttgaaggtagactcattggagctgaccgtttaaaggatcttgctgtcttgaaggtagaagcccctaaagatattttaaggcctatcaaggtgggtcaatcgtcatctctaaaagttgggcagcaatgtttggctattggaaatccatttggctttgatca

SEQ ID NO: 178750 - DNA, 268 bp, Glycine max
  unsure (1)..(268): unsure at all n locations
gtcgcctccgccaagttcctctctcgctctttcactcgcaccttccacgccacatacgacacgatccgntncgccgnaagctctcacgtggcgcagacggacttcacccatatggcatgcgaggggattgtcggtgctgttgatgcggcgccagttagtaaacaacaaattgtggagtctgagcacttaatgacagctcttttggacgaacaggatggcttggctagaaggatatttaccaaggcagggatggacaacacgtccgttc

SEQ ID NO: 178751 - DNA, 276 bp, Glycine max
cagaaatagagagagaacttcaagtgagggtgagagtgacacaaatctagagagagcactagtactctaaaagtctattatattcttcaaaatatgaccatgcatcgcgagtcttgggcttttgtcttcggcgttatgggcaacatcatctcctttggagtgttccttgctccattgccaaccttttaccaaatctacaagaagaaatccactgaaggtttccagtcacgtccttatgttgttgcactgttcagtgcaatgctttggatttactat

SEQ ID NO: 178752 - DNA, 275 bp, Glycine max
ctcgtgaatcgtgatttagcatttaccacaccaaaatcaccccgcggagtcagaacgccatggatccctacaagaatcggccatcaagcgccttcaattctcccttctggactacaaattccggtgctcccatctggaacaataactcatcgctgactgttggatctagaggtccaattctgctggaggattaccatctggtggagaagcttgcaaactttgacagggaacggatccccgaacgtgttgtccacgctcgtggagctagcgcaaag

SEQ ID NO: 178753 - DNA, 273 bp, Glycine max
caacttcttcttcagttcttcacaccaatcatgcacagctttgcaacctccctcgcctccaaagctagaattgctagcagcagcactcaacagattggaagtagggtcagttcgaacaggaattatgctgccaaagacattaagtttggtgtggaggcccgggccttgatgcttaagggtgttgaagagctcgccgatgccgtcaaagtaaccatgggccctaaggggcgtaatgtggttattgagcaaagttttggagcacccaaagtgaca

SEQ ID NO: 178754 - DNA, 270 bp, Glycine max
aagaagagcatcactgaactaacaaagcaaccctatgtcgaaggtggttcgtgtcaccggagccagcggcgccatcggatcatgggtggtcctactcctcctccagcgtggttacaccgtccatgccaccgtccaagatatcaaggatgaaaatgagacgaaacatttggaggaaatggaaggagcaaagagtcatctccatttttttgaaatggatcttcttgacatcgactccattgccgctgccataaagggttgttccggcgtaat

SEQ ID NO: 178755 - DNA, 273 bp, Glycine max
cttttatccggttccttatttccagggcaacagacatcctcgtatccaatatccaagaggctagctttcttgcttactggccttcatgcattgctgctgcagccatactcactgcagctaatgaaattcctaattggtctgtggttaagcccgaaaatgctcagtcatggtgcgagggactaagagaagacaaagtaatagggtgctaccagttgatgcaagagcttgtgattaaccataaccaacggaaactccctactaaagtgttgccgc

SEQ ID NO: 178756 - DNA, 277 bp, Glycine max
ctgcagtctgcaacaacttcttcttcagttcttcacaccaatcatgcccacgtttgcaacctccctcgcctccaaagctagaattgctaggagcagcactcaacagattggaagtagggtcagttggaacaggaattatgctgccaaagacattaagtttggtgtggaggcccgggctttgatgcttaagggtgttgaagagctcgccgatgccgtcaaagtaaccatgggccctaaggggcgtaatgtggttattgagcaaagttttggagcaccc

SEQ ID NO: 178757 - DNA, 277 bp, Glycine max
ggcaccaatttcattgctcagagttcccaaattctccccaagagataaaatgtctctaatcccaaacttcttcggtggccggagaaacaatgtgttcgatcctttctcactggacgtgtgggatcccttcaaggattttcctttcccaaatacgctttcttcagcttccttccctgaattttctcgggaaaattcagcatttgtgagcacccgtgtggactggaaggagaccccagaggcgcacgtgtccaaggcagatattccaggactgaagaag

SEQ ID NO: 178758 - DNA, 271 bp, Glycine max
taacaagctagctattagttcgattttgtagtaagtgaggtgccaatatggtgaagatagctcttggtactttggatgactcttttagcgctgcctctcttaaggcttatttcgcagagttccacgtaactctgatttccgtgttcgctggtgttggatcagccatcgcttacaacgagcttaacagaggagcagtcttcgatccaacgaggctggtggcagtatctgtggcacatgcatttgcactgtctgtaagtgtctccgtagccgc

SEQ ID NO: 178759 - DNA, 280 bp, Glycine max
ctttacttgaaactcagaccaactgacacagagagagagagaagcatcagcagacatgggaagagctccttgctgtgacaaagccaacgtgaagaaaggtccatggtcacctgaagaagatgccaaactcaagtcttatattgagcagcatggcactggtggcaactggattgccttgccccagaaaataggccttaagagatgtgggaaaagctgtcgtcttagatggctgaattatcttcgcccatacatcaaacatgggggtttctcagaagaagaa

SEQ ID NO: 178760 - DNA, 274 bp, Glycine max
  unsure (1)..(274): unsure at all n locations
gatccttctgtttttgcactactgatgcctttttgggcaccagatttccaccattctgngtaacttcacacactatataacagaaaatgagggggggcttatggcaactcgggcaatcaatcactcgccgtcttgcccagggtgataagaaggctgttgctcgtaggtattttgcctcagatgctgagctgaaaaagacagtcgtttatgacttccatgttgctaatggagggaagatggtgccatttgctggatggagcatgccaattcaata

SEQ ID NO: 178761 - DNA, 274 bp, Glycine max
tcggcatagataacaccgtactctctaatatcccatactatgaaaaacatggatatggggtggaggaatttaatgaaaccttatatgatgaatgggttaacaagggcgacgcaccggcattgccagagactcttaaaaattacaacaagctgttgtctcttggcttcaagattgtattcttgtcaggaagatatcttgacaaaatggccgtaacagaagcaaacctaaagaaggctggcttccacacatgggagcagttaattctcaaggatcc

SEQ ID NO: 178762 - DNA, 285 bp, Glycine max
caagttcaaagatcaagatgatccacgttcttttcctctttgctcttgtctcgttcacttcccatgcttctgtcaatgatttctgtgtagcagacctaaaaggtccagatagcccttcaggctatcagtgcaagccacctaacacagtcacagtggatgactttgtgttctctggctttgtagctggaaacaccacaaacactttcaatgctgcattaacctccgcatttgttactgattttccaggtgtgaatggtcttggtgtatctgtggcacggttagaca

SEQ ID NO: 178763 - DNA, 271 bp, Glycine max
cacatgggttcgtggggcagctaaagtgaggagacttgcattgcctatcagcatacttgttggtcttactgcagtctctggtgcattcgttgctggaaatgatgctgggcatgcttttaatactttcccaaagatgggtgatacatggataccaggagacatttttgaaatgaagcctctgattcgaaatttctttgagaatacggcaactgtgcagcttgatcaccgtatacttgcaactgcaactctgatttctgtgagcattttatgg

SEQ ID NO: 178764 - DNA, 271 bp, Glycine max
ggttaacaacttagatgatgcacacgaacggattgacacggccattgcaactgctttgagagacagcaagcctgtctatatcagcatagcctgtaacttgtctgccatccctcaccattccttcattgatcagcctctcccattttatttgactcccaagttaactagtgaaaggtgtctggaaattgcggtggaaataacatcagagtttttaaataaggcagtgaaaccagtgatggtgggtgggccaaggttgcgaatggcaaaggct

SEQ ID NO: 178765 - DNA, 292 bp, Glycine max
cctgaatttctttgcaactcatgggtttacaacttcaggagttacaaaaagaatcgcattttctttgtcaatgatatctatcttccaagtgccacaccagctccactacttaagtacagaaaagaagaattggaggttttaagaggagatggaacagggaagagaaaggactttgacagaatctatgattatgatgtctataatgatttgggcaatccagatggtggtgatcctcgcccaatccttggtgggtctagcatctatccctaccctcgcagggttagaacaggaa

SEQ ID NO: 178766 - DNA, 269 bp, Glycine max
gtttggttgaaagtagcaaagatgtttcctttcgggcaaaagggtcaaaagataaaggggactatggtggttatgcagaagaatgtgttggatatcaacagcatcaccagtgttggagggatcgttgaccaaggcttaggcttcataggcagtgcagtcgatgcacttacttttgcagccaccaaaatctccatccagttgattagtgctaccaaggctgatggtgggaaaggaaaattggaaagagtacaaatttaagaggaaagata

SEQ ID NO: 178767 - DNA, 266 bp, Glycine max
cgatacttatggaggatggggtgctcatggtggtggtgctttctccgggaaggaccctaccaaggttgataggagtggtgcttacattgtgagacaggctgctaagagcattgtggcaagtggacttgccagaaggtgcattgtgcaagtgtcttatgccattggtgtgcctgagcctttgtctgtgtttgttgacacctatggcactgggaagatccatgataaggagattctcaacattgtgaaggaaaactttgatttcaggc

SEQ ID NO: 178768 - DNA, 273 bp, Glycine max
ctcaatcacaatttctctctcttttctctcttctgaattattgtcatggctaagagctcattcaagatggaacacccacttgagaggaggcacgctgaagcatctcggataagggagaagtatcccgaaagaattccagtaattgttgaaagggcagagaagagtgatgttcctgaaattgataagaaaaagtatctggtccctgctgatttgactgttggccagtttgtgtatgtggtgcggaagagaatcaagctgagtcccgagaaggcc

SEQ ID NO: 178769 - DNA, 290 bp, Glycine max
cggaattcggtcgactcgagcgaatcggctcgagctcaaagcaacacaagaacaaactcttgaacattcacggatccagtgagcgtgtacggtaacacgcacttggcgacggtggatcccgagatccatgacctcatcgagaaggagaagcaccgccaatgccgcggcatcgagctcatcgcctccgagaacttcacctccttcgcagtcatcgaggccctcggcagcgccctcaccaacaaatactccgatcgcatgcacggcaaccgctactacggcggcaacgaatt

SEQ ID NO: 178770 - DNA, 282 bp, Glycine max
agaagacccttctcttcggtgacaagccagtcactgtttttggacacaggaaccctgaagagatcccatggaagtcgactggagctgacatcattgttgagtccaccggagttttcaccgataaggataaggctgccgcacatttgaagggtggtgcaaagaaggttattatttctgcccccagtaaggatgcccccatgtttgttgttggtgttaacgagcacgagtacaagccagagcttgacattatttccaatgctagctgcacaaccaactgccttg

SEQ ID NO: 178771 - DNA, 268 bp, Glycine max
cttttgttctgcagtagttgagtttgatctctttagttgcttcagcttctctgataaagtgatacttgattgctatgtgttttgttctgctgtgatggactggattctttgtcattggaattgctgatttgttgtcacagttgattttagtaggctcatcttgtttttctcccatgtcttcaagtatcctacaaagccatatagcttgactcgttgcttcagcagctgccacatactctacttctactgttgattgtgctattgtagc

SEQ ID NO: 178772 - DNA, 268 bp, Glycine max
cctctctctctttctctttctctctcatccagatcttgcaaaaaaaaaaaaacacaatggcagcgagcgctcccattccacgcgaagagttcgtgtacatggcgaactggcggacaggccgagcgctacgaggagatggtggagttcatggagaaggtctccgcctccgccgagagcgaggagctgaccgtggaggagcgcaacctcctctccgtcgcctaaaagaacgtaatcggcgctcgccgcgcctcctggcgcatcatctcct

SEQ ID NO: 178773 - DNA, 274 bp, Glycine max
cgcactatagtaaaaaaaggacattcattcatctatggctacccttattgctcccagcaaccactctccccaagaagatgctgaagctctcagaaaggcttttgaaggatggggaactgatgagaacactgtcatagtaattttgggtcatagaactgtgtatcagaggcagcaaatcagaagagtttatgaggaaatttaccaggaggatcttgtgaagcgcctagagtctgagatcaaaggagactttgagaaagccgtgtaccgatggata

SEQ ID NO: 178774 - DNA, 277 bp, Glycine max
  unsure (1)..(277): unsure at all n locations
cacaaccctcttttctctctctcttgcagaacctaattttcatttcttccctcaaatttcacaatgcgtgacatccctcacatccagccaacgnnaatgcggnaancagatcggcgnnaagttctgggaggtggtttgcgnggagcacgggatcgaccctaccggaacgtacggtggggactcggagttgcagctcgagacgatcaatgtctactacaacgaggccacttgcggtcggttcgtgccgcgcgccgttctcatggacctcgaccgggca

SEQ ID NO: 178775 - DNA, 282 bp, Glycine max
cttcttcgtctcaaatctcttcgttccttcgattcgttccaactcttccaaaatggccaaagacccagttcgcgttctcgtcactggagctgcagggcaaattgggtatgctcttgtccctatgattgctaggggagtgatgttggcgtcctgaccagcccgtgatcctccacatgcttgacattcctccggcagcagagtcattgaatggggttaaaatggaattggtggatgctgcattccctcttcttaaaggtgttgttgccacaactgatgtggttg

SEQ ID NO: 178776 - DNA, 291 bp, Glycine max
acagtcgagctcgagccgtgcaactatgagcaaggattatctagtcatactatctctccttctttccacagtgcttgcaacccccagtcgttgttctgcttcttcctccctctatcttgggaagggcttctcccatcgcaaattgtctcccagttatcacattcacaaaaccattgacgcatcctatgcagttatcttcgatgctggtagcacgggaagccgtgtacatgtctatcgttttaaccaacaattagatctccttcgcattggccaagaccttgagttgtttgt

SEQ ID NO: 178777 - DNA, 281 bp, Glycine max
tgaagaagttaaaatcgtgaagggttcaatagattttgttggaatcaaccaatatactacgtactacatgtatgatcctcatcaagcaaaacctaaagtcccaggctatcaaatggactggaatgcaggatttgcttatgcaaagaacggagtgcctattggtccaagggcttattcttattggctttacaacgtaccatggggcatgtacaaatcattgatgtacataaaggaacgttatggaaacccaactgtgttcttatccgaaaatggcatggatg

SEQ ID NO: 178778 - DNA, 268 bp, Glycine max
cagctataagctagtttatcgtgaggagaatatgaagttgtttgtattctttgttgctgcagtagttttggtagcatggccatgccatggcgcaggctaccaaaggttccctctccgaatgaaaactggctatggtgagcgttcttcggaggtaaaatgcgcaagttttaggcttgctgtggaagcacacaacatccgagcctttaaaaccattcctgcagagtgcgttgaaccaacaaaggactacattaatggcgaacaatttaga

SEQ ID NO: 178779 - DNA, 275 bp, Glycine max
caaaatgtcctccatggcttcctccaccgctttcttcacacccctccatgatttcactcaagccagaacaaccccatcaccccctttgcctttcatcaaatcctcctttgcttcctccaagtcaaccttttttcaccctgccctttccctacaaacctcttccaactttcccaggctttttggaaagcctaagtttttctctgttcatgcaagggctgccacagaaaaaaccatttatgattttactgtcaaggatattgacagaaaggatgttt

SEQ ID NO: 178780 - DNA, 270 bp, Glycine max
gtttgttgttgtaactcgttcttcttcttatgttgttctgtgtttgtgtttgttttttctctcacctgaaaatgtcttgctgcggtggtaactgtggttgcggaagctcctgcaagtgcggcaacggctgcggaggctgcaagatgtacccagacttgagctacactgagtcaaccaccaccgagaccttggtcatgggtatggcacctgttcaagctcaatttgagggtgctgaaatgggtgtgcccgctgagaacgatggctgcaaat

SEQ ID NO: 178781 - DNA, 270 bp, Glycine max
tgaatctgatgcaggcggttcgctacgacgcctacgggggaggtcctgccggcctcaagcacgttgaagttgccgttcccagtccaaaggcaaatgaggttttaatcaaactggaagcagttagcattaaccctattgattggaagattcagaagggtcttctccgtcctttatttctccccagaacctttccccacataccttgcactgatgtggctggagaaatagttgagatcggaactcaagtcaaagatttcaaagttggcgacc

SEQ ID NO: 178782 - DNA, 269 bp, Glycine max
gtacaagtccaccatcaagggagtgatctccaagggcaagttgtcgaagctgaaaggtgttagtgtgaagattgaagtgttgtggctcaaaatcgtggagctaactcgcgacggcgatgacctccaattctcggtgggtgttgcctctgctggcttcagcgtcgacagcttctccgagagcccccagtgtggctgtggattcgcttgcgacaatttcaatcaaaatggtgatgtttcttctctttagaattcggatctgttactatgtt

SEQ ID NO: 178783 - DNA, 268 bp, Glycine max
agaagatgaagttcaatccacgtgtgtcgagcagccgccgcaagagccgaaaggctcatttcacggcgccgtcgagcgtgcggcgggtgcttatgagcgcccctctgtcggcggagctgcggtccaagtacaacgtgaggtcgatcccagtacggaaggaggacgaggtgcaggtggtgcgaggaacatacaagggtcgcgaggggaaggtgactcaggtctaccgtcgaaagtgggtgattcacattgagcgcataacccgcgagaa

SEQ ID NO: 178784 - DNA, 269 bp, Glycine max
  unsure (1)..(269): unsure at all n locations
gggcaaagaggactctctcttccactgctcaaaccaccctagagattgattccttgtacgagggtattgacttccacacaacatacaccccccgnagnttngnggagntngacatgggtttattcaggaagtgcattgagtccgtggagaagtgtttgggggatggaaagattgataagatagaagtacatgatgttgatcttgttggtggttctactaggattcccaaggttcaacagtaagttgcacgacttcttcaacgggaagga

SEQ ID NO: 178785 - DNA, 271 bp, Glycine max
cgaatgatgaatagagagtagccaaaatgggcatatggagaaacgagatttcagatgaagcaaagatgcagctattgctatcaaggccattggtatctgtaaatgtcactcgtttcagtgtgctgctatgtatgtcaagtgcacttgacacattttgtggtcaatcatgtggagcacagcattatcatatcgttggcatacacatgcagagagtcatagtgatcatcatgcttgctactataccagtgtcatcaatttgggcagcttgagg

SEQ ID NO: 178786 - DNA, 282 bp, Glycine max
ctgcctcacgagcttctcagagacgtcctcctccgaattgaatcgtcggagtccacgtggccgcagcggaggagcgtcgtggctactcgcggagtgtgccgcacctggaggaggctcatcgtcaaggagattgtacagccacctcaattctcttccaacataaccttccccatctctctcaaacagcctggcccgagggaacatctacttcagtgcttcattaggcgcaacagtgcctcacagacatattatctgtctctcagtttatctagtgcctagtag

SEQ ID NO: 178787 - DNA, 276 bp, Glycine max
gaaagaagctttcttgagttgagttaacagcatggagagggaggaagatgttaaggttggagcacagaaattctcagagaggcaagcattggggacaggagctcagggtgacaaggactacaaggaggcaccaccagcacccttgtttgagccaggggagttaaagtcatggtctttttacagagctgggattgcagagtttgtggccacattcttgttcctctacatcactgtcttgactgtcatgggtgtcaacagggcacccaacaagtgctc

SEQ ID NO: 178788 - DNA, 271 bp, Glycine max
ttcaaagatgaagatgatccacgttcttttcctctttgctcttgtctcgttcacttcccatgcatctgtcaatgctttctgtgtagcagacctaaaacgtccagatagcccttcaggctatcagtgcaagccacctaacacagtcacagtggatgactttgtgttctctggatttgtagctggagacaccacaaacactttcaatgctgcattaacctccgcatttgtaactgattttccaggtgtgaatggtctcggtgcatatgtggca

SEQ ID NO: 178789 - DNA, 268 bp, Glycine max
gccatttacaaaaatggtaaccattaaagcatcttacacagaccttccaaatgaaccaactccggagggccttttatggctatctgatattgatcaagtggcacgtctacgccacacacccaccatctacattttccatgcaaaacacaaccatgatacattaattgagaggatgagaaactctcttagcaagattttggttcactactatccaatagccggtcgattgagaaggatagaaggtagtggtcgattggaattggattgc

SEQ ID NO: 178790 - DNA, 269 bp, Glycine max
cttggttgccatgcggtgtgttgcgaatcactgtccaatcccgatcgcttgatccagacagtgaatcagaatcagaatcagaatcagaatcagagagaaacgatgagggcagtaagtgcgttaatggtggctcggatgttgacgcgggaccactcgctccctgtccttggcaacgaaagcatacccttcggatcggtgttctggttcgcctatgccggcgtctcctgtttcctcgtcctcttcgctggcatcatgtccggtctcaccct

SEQ ID NO: 178791 - DNA, 271 bp, Glycine max
caatcttaaaaatattcagtgaagatcaacctcaatggcatctcttggcgtgcgaccagttcttccccctccattaacttccatctccgacccacctcctcttttcgatggcaccaccaggttgtacatcagttattcttgcccctatgcacaacgtgtgtggatcgctaggaactaccaggggctacaagataagatcaatttggtccctattaaccttcaagacaggccagcttggtataaggagaaagtctaccctgaaaataaggtg

SEQ ID NO: 178792 - DNA, 221 bp, Glycine max
aggatagagagaggagaagagaagagaaaaattaagatggaggggaaggagtaggatgtgtagctgggagagaacaagattgaggagagagagtagattgggatggaggagagatggaagaagatggtaaggactactaggagcaggagcaggagctagtggttgaaaagatggagtttatgtgatggtggttttacagagtagggatagaagagtttgtg

SEQ ID NO: 178793 - DNA, 269 bp, Glycine max
ctcaagcaaccatggcaatggcaacccaagcctctctcttaaccccacccctctccggtctcaaagccagcgaccgcgcctccgtgccatggaagcaaaactccagcctctccttctccagcccgaagcccctcaagttctccagaacaatcagagcagcagccgccgacgagaccacagaggcaccagcaaaagtagaggctgcaccggtcgggttcaccccaccagaacttgacccaaacaccccttccccgatcttcgggggcagc

SEQ ID NO: 178794 - DNA, 270 bp, Glycine max
agataacagagaaaaaggatgaactaggaaagcttgaagcaattgattgtggaaaaccactagatgaagcactggcagacctggatgatgttattggttgtattaactactatgccgagcttgcagaaggattggacgcaaagcaaaatgctcctgtatcccttcctatggaaaccttcaagagttatgttctcaaggagcccatcggagttgttgcattaattactccatggaactatcctctattgatggctacatggaaagttgctc

SEQ ID NO: 178795 - DNA, 269 bp, Glycine max
tccatctcttgcttcttgcttctattacttgcttctttcttcaccatgtcacttgctgggaaaatcaccactgaaattggggttcatgcaaccgctgcaaagtggttcaacctctttgcaacacaacttcatcatgttcaaaaccttactgatagagtacatggaaccaagctgcatcaaggtgaagactggcatcacaacgagacagtcaaacactggacttataccatagatggtaaggctacaacatgtctggacagtattgaatc

SEQ ID NO: 178796 - DNA, 273 bp, Glycine max
gatgctttcacatccagatcagagctttttagggcagaatcaaaatactggaatgaaataatagcaagctatgttcgtgttttacactggaaagaaatcagattaagaaatgttatggacatgcgagcaggttttggaggatttgcagacacattgattaatcagaatcttgacagctgggttatgaatgtggttcctgttagtggcccaaacaccttgcctgttatatatgaccgtggattgattggagttatgcatgactggtgtgaggca

SEQ ID NO: 178797 - DNA, 279 bp, Glycine max
aaaaccactctacaaaactctccagtaattctgaaaattttattttcttttggtgaaattaacagctctgtgattgatcaatggcgacaaaggaaggcaaagccataggcatcgatctcggcacgacctacagctgcgtgggcgtgtggcaaaacgaccgcgtcgagatcatccccaacgaccaaggcaaccgaaccactccctcttatgtagccttcaccgacaccgagaggctcatcggagacgcggcgaagaaccaagtcgccatgaacccgcaga

SEQ ID NO: 178798 - DNA, 258 bp, Glycine max
tggaaagctgatgcaggtgaggaaggtctgaagctatcaccttggttcagactagttgtggacaaattcctattcaaatggtgggaccatcttgagcaaggaactcttggggaggccagagacatgaagaacattcacaagttgacataagtaagttcagaggagcttcctgcatcccagtaatgaagggtggctgcattccgaccaaattagaacgaaattgggaccgattttcgagaagaattttcggagcagtga

SEQ ID NO: 178799 - DNA, 282 bp, Glycine max
  unsure (1)..(282): unsure at all n locations
cagaacttcaactgagggtgagagtgacacaaatctagggagcactactctaaaagttctattagattctccanaacatgaccatgcatcgcgagtcttgggcttttgtcatcggcgttatgggcaacatcatctcctttggagtgttccttgctccattgccaaccttttaccaaatctacaagaagaaatccactgaagggttccagtcacttccttatgttgttgcactgttcagtgcaatgctttggatttactatgctttcgtcaaaagggaagctg

SEQ ID NO: 178800 - DNA, 276 bp, Glycine max
ccaaaaagggacattttgcgggtatttgtgagtgtgtgagagagagagcgagcagtttcagacacagagagaggggtttgggattggagggattgacgctgcgtctcttcctcttctctttcgatccatccctcattcctaatcctccaatccaaccacctcagcctcacactcacatatacacatatctgaacgcgtatcgtccctcctatggcttcaaagcgcatcctcaaggagctcaaggacttgcagaaagacccaccaacttcttgcagc

SEQ ID NO: 178801 - DNA, 267 bp, Glycine max
gtttgttgtgagctataagctagtttatcgtgaggagaatatgaagttgtctgtactctctgttgctgcagtagtcttggtagcatggccatgccatggcgcaggctaccaaaggttccctctccgaatgaaaactggctatggtgagcgctcttcggaggtaaaatgcgcaagtcttaggcttgctgtggaagcacccaacatccgagcctttaaaaccattcctgaagagtgcgccgaaccaacaaaggactacattaatggcga

SEQ ID NO: 178802 - DNA, 268 bp, Glycine max
gagatggtggagtcagtaattttgatgttcaaggcacattgtctctccaaattcttgacaaagaggatggacatattcaagttcaggtccaaactggggagaatcaagccatcattttcaagacacaccctaacatgaataaagaattatttgccaatgaaaatgtactaggtctaaaggatcccaataggcctttccccacgggtcaagctggtggttctgaaggtgttggtcttttaaagtggcgaatgcaaagcactgatgagtc

SEQ ID NO: 178803 - DNA, 281 bp, Glycine max
gttgatcgagataactagaaacagtgtgatgaaaatgaaggtccttgttttcttcgttggtacacttttcgtagcatggcaatgccatgcgtacgatatgttccctctccgaatgaacactggctatggtgcccgtactccggaggtgaaatgcgcaagttggaggcttgctgtggaagcacacaacatctttggctttgagaccattcctgaacagtgcgttgaagcaacaaaggaatacatcatggcgaacaatatagatcagactcccaaacagttaa

SEQ ID NO: 178804 - DNA, 281 bp, Glycine max
ctcgagccgcaaaattagggtttttgtcgtagcaggaagaagcagcaatggcgccgaagataacacgcaaggtcagcagaaaccccgaattgataaggggaatcggaaagtactcgaggtcgcagatgtaccacaagaggggcatttgggctatcaaggccaaaaaccgtggcgttttacctcgccacgaccccaaacccaaacctgaaactcccactgaaaaaccacccaaattttaccccgctgatgatgtcaagaaaccccttgtcaacaagcacaaa

SEQ ID NO: 178805 - DNA, 276 bp, Glycine max
cttcatttcaaatcccaacaaaaaaccaaagtaatctaacaaactaagcacaatgagggagatattgcacgtgcaaggtgggcaatgcgggaaccaaatcggttccaagttctgggaagtgatatgcgacgagcatggcatcgaccccaccggaaagtacaccggcgacgaggcctccgatctccaactggagaggatcaacgtctactacaatgaagcctccggcggaaggtacgttcaccgggccgtcctcatggatctcgagcccggcaccat

SEQ ID NO: 178806 - DNA, 274 bp, Glycine max
cttacaagttacatccattgagaaacatgaaggtctcccccttagcattttcaatcctttttttgtccttcaccatagaactcttcattggcattgcttcagcagcacaagaaccagtgcttgacacctcaggccagaagctgagaacaggtgtcaagtactacattctaccagtcttcagaggcagaggtggaggcctaacagtttcaagcagtggcaacaacacatgccccctctttgtggtgcaagagaagcatgaagtctcaaagggcac

SEQ ID NO: 178807 - DNA, 270 bp, Glycine max
gttacagccgcagcttgaaacagagcagagcgaccttgaagagctatggcttacggaaagaataagaggatttccaagggaaagaagggtggcaagaagaaagccgctgatccctttgccaagcaagactggtacgatatcaaggccccttccctcttccaggtcaagaatattggcaaaaccctcgtctctcgtacccagggaaccaagattgcatccgaaggactcaaacatcgggtttttgaggtctcattggctgatctccaaggg

SEQ ID NO: 178808 - DNA, 270 bp, Glycine max
tcttaagcttgctactgagtttccacactgcataccttacgtcttccgaattcgaagttaatttgcaagatggctaaggaaaaggctcagatcaacattgtggtggttggtcatgtggaccctgaggaggcaaccaccattaacgagctgaagaagcctgttgtggagaaagaagctccagggcatgccatatgagggcatgcacgtacggcctcggaggggaaccagaaaattatgttaacaaaataatctggaaccctaatgtatcag

SEQ ID NO: 178809 - DNA, 264 bp, Glycine max
  unsure (1)..(264): unsure at all n locations
gttgtccaccccttgttttcagccaccgtctttaagttactgtcgacgtttgagctctataatgcccagtgattcttctgtaatctccaatgtcacacagcaatggcactgtcaatccactacctaacctgcacaggacttaccaagtggtagtggctgccactcaagattggggctctncgtaaggatgggaaattaccctggagattgcctactgatctcaagtcttttaagagatcactatgaaaacatctgatcctggga

SEQ ID NO: 178810 - DNA, 257 bp, Glycine max
aaacccccaagtggggtccgcagaggtgctcaaccagtgggagaacgaagggaggcacctcacgaagtgggagctttcaagagtcgttaaagagttgatgaagtacaagagatttccaagagccctcgaggtatatgactggatgaacaatagaccagagcggtttagagtttccgagagtgatgcagcaattcagttagatttaattgcaaaacatcgtggagtttctagtgcagaagcattctttctgagtctgg

SEQ ID NO: 178811 - DNA, 273 bp, Glycine max
ctcactgaaaaggttggctggcaggatgaggccatatatgctatcaatcgaactgtgtcccgttgtagatcctgcgctggaaagcgtagtagtggctcacatgttagagcagacatatggcttgcatttctcggaccagatagacttggaaaaagaaaagttgcatcagcacttgctgagattttatttggagacaaacaaagcctaatcactgtggatttgagctcccaagacaggtcttatccaacaaactcgatttttgaattccaaaat

SEQ ID NO: 178812 - DNA, 277 bp, Glycine max
aagaaaatcaacatttttcttctatcaattcacacgacaaaatttaccagagttcaaaacaccaaccaagtaaagtaaagaacggaagatgtcactgataccaagtttcttcggtggtcgaaggagcaatgttttcgaccctttctcgctcgacgtatgggaccccttcaaggatttgtcattcccttctgctgaagattcagctttcttgaaaacacgagtggattggaaggagaccccagaagcgcacgtgttcaaggctgatattccggggctg

SEQ ID NO: 178813 - DNA, 286 bp, Glycine max
tggaaccttctacgtgttctccattccctctctcactcctccatctacgtttcttgaatcatttccctctatctctcgttctttatcttctcattgtcctcattacactctttcccttctctcaacttttctcttattaaccatagttcacatattatatcatcacatatcatagtgatatattatatcatatcacaatgtgtggcatacttgctgtgcttggttgctctgattcatctcaagccaaaagggttcgcgtccttgagctttctcgcagattgaagca

SEQ ID NO: 178814 - DNA, 302 bp, Glycine max
gcgacacgtatcttcatcaataatcgcagaagcagtttccggtgcatctcatcgtcttccaaaatgaacgacgcagatgtctcgaagcaaatccagcagatggtgcgtttcatccgccaggaagctgaggagaaagccaacgagatctctgtatctgccgaagaggaattcaatatcgagaagctgcagttggttgaagccgaaaagaagaagatcaggcaagaatacgaacgcaaagagcgccaagtcgaaattcgcaagaagattgagtactcaatgcagctgaatgcttcggattaaag

SEQ ID NO: 178815 - DNA, 302 bp, Glycine max
gagagagagagagggaggagggagagtgttgacgctccatcaagatgggtatttctagggattccatgcacaagaggcgtgccactggtggcaagaagaaggcatggagaaagaagagaaagtatgagcttgggcgtcaggccgcaaacaccaagttatcaagcaacaaaactatccggaggattcgtgttcgaggtggcaatgttaaatggagggcattgaggttggataccggcaattactcatggggtagtgaagcagttactcgcaagactcgtattctagattgtttacaatgcctc

SEQ ID NO: 178816 - DNA, 299 bp, Glycine max
gaattcttcttctggtcagagcagtggctatgatctctccttcaagatcttgctgatcggtgactctgctgtgggaaaaagtagcctccttgttagcttcatctccaattctgctgaagatattgcccccacaattggtgttgattttaagatcaagatgctcactgtaggacggaagagattgaaactaactatttgggacactgctggacaggaaaggttcagaacgctaactagttcttactatagaggagcgcaaggcatcattcttgtttatgatgtaagagaagagacacctt

SEQ ID NO: 178817 - DNA, 296 bp, Glycine max
gcaaaattctcttccgtttcaggattagcgtttcaccgttacagtgaaacatggcaaaaccaaagcgaatctctctgcgtatctttgcgctgctcctcttgatttccacctcttcgtttcagcttctccgcgcttccgatgacgccgatgatgatgcgatcttctatgattcgttcgacgaggattttgaagaccgttgggttgtgtctcagaaagatgagtacagtggtgtctggacacatgccaagagtgagggacatgatgattatgggcttcttgtcatgagaaagcaagga

SEQ ID NO: 178818 - DNA, 299 bp, Glycine max
ccctactctgaaaagcagaacagacttacagccctgcatggttcaattgaacagctattatttgctcctgagcagactgatgaatacattggtttattgaaagacaagtcaaagcccataattttctccatggcaaggctagacagagtaaaaaacataactggattggtagaaagctttggtaagaacagcaaattgagggaactggtcaaccttgtcatagtagctggttatattgatgtaaagaagtccagtgacagagaagaaattgcagaaattgagagatgcatgagctcatg

SEQ ID NO: 178819 - DNA, 295 bp, Glycine max
ctagagaggacgagagagcgtgcacctttcggcaaccacagaccatgacattcaagcgcacgaatggaggtcgcaacaaacacggccgcggccatgtcaaattcatccgatgctccaactgcggaaaatgctgccccaaggacaaggccatcaagaggtttttggttaggaacattgttgaacaggctgcagtcagagatgtgcaggaagcttgtgtctatgaacaatatacacttccaaaactctatgtgaagatgcagtactgtgtttcctgtgctcatccactcatgttgtg

SEQ ID NO: 178820 - DNA, 297 bp, Glycine max
cagaagacaggttcaaaccggagcaaaaaaacttgttacgatggtttcttccgacaaggatccacgagaggaagtccttcaagcatggtacatggatgatagtgatgaagatcaaagactcccccaccacaaagaacccaaggagtttgtctcgttggaccaacttgctgaacttggagtccttagctggaaattagatgctgataaccatgaaaatgatccagagctgaaaaagattcgtgaagagcgtggctacacctacatggatgtttgtgaggtctccagaaaagttgccaa

SEQ ID NO: 178821 - DNA, 300 bp, Glycine max
cacctttgttcactcttcttctcttgcggctagggttttagcgcacttcttctagatttaaggcagatgggtaaggaaaaggttcacatcagtattgtggtcattggccatgtcgactctgggaaatccactaccactggtcacctgatttacaagcttggaggcattgacaagcgtgttattgagaggtttgagaaggaagctgctgcgatgaacaagaggtctttcaagtatgcctgggtgctggacaaacttaaggctgagcgtgaaagaggaatcaccatgatattgctttgtgga

SEQ ID NO: 178822 - DNA, 303 bp, Glycine max
ctccaaacccacctttctatcttttccatcagagcattatttgataccctctctgcagcaacgcatttttcctcattctcttaaacactttctcttttctccttcgtttgatctgcattaaaattgcataaatatataaaaaatgaagaagtttgtactcaagttagatttgcatgatgacaaggataagcagaaggccttgaaaacagtttcaactctttcaggaattgatgccatcgccatggatatgaaagagaagaaattaacagtgattggaacagttgatccggaactgtggtgagc

SEQ ID NO: 178823 - DNA, 304 bp, Glycine max
gtttcacagcagcaatggtgtacgtcaaggctcagaaatcaaaagcctacttcaagagatatcaagtcaagttcaagagaagaagagagggaaaaaccgattaccgtgccaggattcggttgattaatcaggacaagaacaaatataacactccgaaataccgatttgttgttcgctttagcaacaaggacattgttgcacaaataatatctgctagcattgctggcgatattgttcttgctgcagcatatgcacatgagctgccacgatatggtcttgaagtagggcttcaaattatgctgca

SEQ ID NO: 178824 - DNA, 300 bp, Glycine max
cttgctgagagaagaaagctagaagacttgacaatcggcccagtcctcacatgtacgactggtatgatgctagaacacaagaataaattgcttgagataccaggatcaaagctgctctttgggggtagtcctctagagaaccattcaattccacctatttatggtgccattaaaccaacagctgtctatgttcctctcgaggaaattatgaaggataagaattttgatcttgtaacaaaagaaatatttggaccctttcaggttatcacggactacaaaaacagtcactatcagttgtat

SEQ ID NO: 178825 - DNA, 300 bp, Glycine max
tttcagctgaagagccatccgcaggtaagcaatggttaagcataataatgttatccccactgggcacttccggaaacactggcaaaactatgtgaagacttggtttaatcaaccagcccgaaagaccagaagacggttggctcggcagaagaaggctgtcaagattttccccaggcctactgctggatctctcaggcctattgttcatggccagactctgaaatacaacatgaaagtcagagccgggagaggattttcactggaagaattgaaggctgcaggatcccaagaaacttgctc

SEQ ID NO: 178826 - DNA, 298 bp, Glycine max
cagataactagaaacagtgtgatgaaaatgaaggtccttgttttcttcgttgctacaattttcgtagcatggcaatgccatgcgtacgatatgttccctctccgaatgaacactggctatggtgcccgtactccggaggtgaaatgcgcaagttggaggcttgctgtggaagcacacaacatctttggctttgagaccactcctgaagagtgccttgaagcaacaaaggaatacatccatggcgaacaatatagatcagactccaaaacagttaaccaacaacgtacttttatgccag

SEQ ID NO: 178827 - DNA, 298 bp, Glycine max
cgtggtgccttatcgctgtggttttcatcgtcttccttctcttatatttctcttttcttttggtcttcgccgaacgccgaaacaatggccggaaaaggagagggtcctgctatcggaatcgatctcggaaccacctactcttgtgtcggtgtgtggcaacatgaccgagttgaaatcatcgccaacgaccaagggaacagaacgccgccgtctcacgtcggcttcactgataccgagcgtctcatcggtgatgcggctaagacccaagtcgccatgaccccctcaacaccgtcttcga

SEQ ID NO: 178828 - DNA, 298 bp, Glycine max
gtgaggtagaacccttccacggtggtgactgcgcgatgggtgcctacaagtatgtttcagagctatggcgcaagaagcagtctgatgtcatgcgcttcttgcagcgggtgaggtgctgggagtataggcagcaaccttccattgttcgcttgacaaggtcgacccgccctgacaaggctcgtcgcttgggcttcaaggctaagcagggctatgtgatataccgtgttcgtgttaggaggggtggccgaaagaggccagttcccaaaggtattgtttatgggagcccacaaaccagggt

SEQ ID NO: 178829 - DNA, 280 bp, Glycine max
cttactctagcacctaaacaacatcttctcctcttccctcgcaccgtggtcttccctcgggtgatcgacaatggcggagacagagacgtttgctttcccaggctgagatcaaccagctcctcagtctcatcatcaacaccttctactccaacaaggagattttccttcgtgaactcatcagcaacgcctccgatgctttggacaagattcgatttgagagtttgacagataagagcaagctcgatgctcagccagagttgttcattcatattattccaga

SEQ ID NO: 178830 - DNA, 302 bp, Glycine max
agagtctgttgtgagctataagctagtttatcgtgaggagaatatgaagttgtttgttctctttgttgctgcagtagttttggtagcatggccatgccatggcgcaggctaccaaaggttccctctccgaatgaaaactggctatggtgagcgttcttcggaggtaaaatgcgcaagttttaggcttgctgtggaagcacacaacatccgagctcttaaaaccattcctgaagagtgcgttccaccaacaaaggactacattaatggcgaacaatttagatcagactaaaacagttaaccaa

SEQ ID NO: 178831 - DNA, 303 bp, Glycine max
aattgcaagaatggcacttcgttgcttggtgatgtcactttctgttctcttcactcttggtcttgcgagagaacgccatgccagagacgaagatttttggcatgctgtttggccaaacactcccattccaagttcattgcgagatcttctaaagcctggccctgcaagtgtcgaaatcgatgatcaccctatgcaaattgaagagacacagtacccgaaaaccttcttctctaaagaagaccttcatccaggcaaaacaatgaaagtacaattcagcaagcctcgcttcaacaaccatggggt

SEQ ID NO: 178832 - DNA, 302 bp, Glycine max
gcactatagaaaaaacgacattcattcatctatggctacccttattgctcccagcaaccactctccccaagaagacgctgaggctctcagaaaggcttttgaaggatgggggactgatgagaaaactgtcatagtaatattgggtcatagaactgtttatcagaggcagcaaatcagaagagtctatgaggaaattttccaggaggatcttgtgaaacgcctagagtctgagatcaaaggagactttgagaaagccgtgtaccgatggatactagaacctgcagatgtgatgctgttttggc

SEQ ID NO: 178833 - DNA, 297 bp, Glycine max
ccctcgagccgaatcggctcgagcggctcgagctgaaatctgaagctaacttaagggaactcagatggccaatggcaacactagtcatcacttcaagctcttgcttttccttctaactctgcactcttcattcgctgagattttcttcgaagagagattcgaagatggatggaagagccgttgggtgctatccgattggaaaaggagtgaaggaaaagcgggtaccttcaagcacacagcaggaaaatggtctggggatcctgatgacaaaggtcttcagacatatatgacgccaag

SEQ ID NO: 178834 - DNA, 295 bp, Glycine max
cttcatgtggagacctttatgatgatcacaaggcttaccatcacagggtttcttacagaatcatactggctgtaattggttctggtttggctgtttttatgtcagtaactatagttgtcttgctgtttatgatcagagagaggcaggaaaaagtagccaaagatgctgggattgttgaagatggcaccaatgacaacccaactataattgccgggacgatttttgttgataatctaaaacaagcagtagatcttgatgtcgtcgttaaagcaactctgaagacagcaacaagctc

SEQ ID NO: 178835 - DNA, 296 bp, Glycine max
agcaaaaagaaagaatcccaggcgaggagaaagatggaggggaaggagcaggatgtgtcgttgggagcgaacaagttccccgagagacagccgattgggacggcggcgcagagccaagacgacggcaaggactaccaggagccggcgccggcgccgctggttgacccgacggagtttacgtcatggtcgttttacagagcagggatagcagagtttgtggccacttttctgtttctctacatcaccgtcttaaccgttatgggagtcgccggggctaagtcaagtgtagtaccgtt

SEQ ID NO: 178836 - DNA, 299 bp, Glycine max
ctagccacaatgcagatattcgcgaaacacctaacggggaagacgataaccctagaggcagagtcttcggacacgatcgacaatgtgaaggcgaagatccaggacaaggagggcatcccgccggatcagcagcgcctgatcttcgccggaaagcagctggaggacgggcgcacccttgccgactacaacatccagaaggagtccaccctccacctcgtcctccgcctccgcggcggcgccaagaagcgcaagacgaagacctacaccaagcccaagaagatcagcacaagcacaagaag

SEQ ID NO: 178837 - DNA, 300 bp, Glycine max
gctaacactcattaattgcaagactggcacttcgttgcttggtgatgtccctttctgctctcttcactcttggtcttgcgagagaaagccatgccagagacgaagatttttggcatgctgtttggccaaacactcccattccaagttcattgcgagatcttctaaagcctggccctgcaagtgttgaaatcgatgctcaccctatgcaaattgaagaaacacagtacccgaaaaccttcttctataaagaagaccttcatccaggcaaaacaatgaaagtacattcagcaagcctccctt

SEQ ID NO: 178838 - DNA, 300 bp, Glycine max
caatgaaccatatggctacagcgtgaatggctacagtggtggaaattttgcaccaggtagatgttctaactacgttggaaaatgccctgctggtgattcttccaccgagccctacattgttaaccaccacttaatacttgctcatggagcagcagtcaattgctacaagaacaaataccaggctcatcagacaggacaaattggagtcaccatagtgactttcttctttgaaccaaaatctaatagtgatgctgatcgcaaggcagcaaggcgagctctggactatgtttggctggtttg

SEQ ID NO: 178839 - DNA, 305 bp, Glycine max
ggtgattgggaaaggaagaataggctgaaagtgtatgaaggcctgtactgcatgtccactcgaaatttcaagaaggctgccaagttatttttggattctatttcaaccttcaccacctatgaactttttccctatgacacctttatattttatactgttttgaccagcattatatcattggatagagtttccctaaagcaaaaggtagtagatgctccagagatcttgacagtgattggcaaaatcccatatctttcagagtttttgaactccttatatgattgccatacaagtcttttttctca

SEQ ID NO: 178840 - DNA, 306 bp, Glycine max
cccaattcctaattgtttaaacctaattctcatttcttcatcgttcgattcttctcctcctaaagatgcagatcttcgtgaaaactttgaccggtaagaccatcacccttgaggtggagtcctccgacaccatcgataacgtgaaagctaagattcaagacaaggaagggatcccacctgaccagcagagacttacctttgcgggtaaacagcttgaggatggtcgaacccttgccgactacaacatccaaaaggaatccactctccacctcgtgcttcgcctcaggggtgcatgcaaatctttgt

SEQ ID NO: 178841 - DNA, 300 bp, Glycine max
  unsure (1)..(300): unsure at all n locations
ccgagattccncctaaacccgtttgcgttgttgtttgcgaagaaatggcgactaagaggagcgtgggaacgttgaaggagggtgatttgaaagggaagagggtgttcgtgagggtcgatctgaacgtgcctttggatgacaaccttaacatcaccgatgacactagagtccgtgctgctgttcccaccatcaagtacttaactggtcatggagccaaagtgatcctttctagccacttgggacgtcctaaaggtgtaacacctaaatacagtttgaagcctcttggccaaggctgtctca

SEQ ID NO: 178842 - DNA, 298 bp, Glycine max
gctcgtgcctctagggttatcatatctccatttccatttcctctctctcagtttccaagaatcttaagctatgggaaagtcttacccaaccgtgagcgctgattaccagaaggccgttgagaaggcgaagaagaagctcagaggcttcatcgctgagaagagatgcgctcctctaatgctccgtttggcatggcactctgctggaacttacgacgtgagctcgaagaccggtggtcccttcggaaccataaagcacccctccgaactcgctcacggcgctacaacggtcttgacatcg

SEQ ID NO: 178843 - DNA, 296 bp, Glycine max
cgccactgctacgaatgccgccgccgccccaccacgccagctctcccagaaggaagctgacatccagatgatgttggccgccgacgtccacctcggcaccaagaactgcgacttccaaatggaacgttacatcttcaagcgccgcaacgacgggatttacattattaaccttgggaagacgtgggagaagcttcagctagcagctagggttatagttgcaattgagaacccccaggatatcattgttcaatctgcaaggccttatgggcaaagagcggttcgaagtttgctcagta

SEQ ID NO: 178844 - DNA, 294 bp, Glycine max
cacataacccactttctcttgatttctctctctgttgaagaattctattcaatttcctctgtttcagatccaagtcgggtattcgaacccagtcctgcatcagaatggaagggagtaacaccaccgtgcccagcattgttgtctatgtcactgttcccaacaaagatgcaggtaagaagttggctgacagcatcgtcaaagagaagcttcccgcatgtgtcaacagggtaccgggtattgaatcggtgtaccagtgggagggaaagatccaaactgattcgaggaacttcttat

SEQ ID NO: 178845 - DNA, 295 bp, Glycine max
ctttgttgtgagctataagctagtttatcgtgaggagaatatgaagttgtttgtactctttgttgctgcagtagttttggtagcatggccatgccatggcgcaggctaccaaaggttccctctccgaatgaaaactggctatggtgagcgttcttcggaggtaaaatgcgcaagttttaggcttgctgtggaagcacacaacatccgagcctttaaaaccattcctgaagagtgcgtcgaaccaacaaaggactacattaatggcgaacaatttagatcactctaaaacagttaa

SEQ ID NO: 178846 - DNA, 297 bp, Glycine max
gagtttgttgtgagctataagctagtttatcgtgaggagaatatgaagttgtttgttttctttgttgctgcagtagttttggtagcatggccatgccatggcgcaggctaccaaaggttccctctccgaatgaaaactggctatggtgagcgttcttcggaggtaaaatgcgcaagttttaggcttgctgtggaagcacacaacatccgagcctttaaaaccattcctgaagagtgcgttgcaccaacaaaggactacattaatggcgaacaatttagatcgactctaaaacagtta

SEQ ID NO: 178847 - DNA, 295 bp, Glycine max
caattcgaccgagggaagtgttcccgccatgggaatggagcgagtgcagtgtgcctatgcctctctggacgaagcgttcgaaatagggaaagaggcgtatcaggggcagcagtacagccagatttacttcgcgcgccttcacttgatgcgaacacttttatattccctcgttcctcattggaaacccaattttcccgtgtgcatagtgctgggattggcagaggggaaggagtgtgtccttgttcggcacctctataaacacatgaaggtcaagacttgcttcttggcgagtagt

SEQ ID NO: 178848 - DNA, 298 bp, Glycine max
tgaaaaacatggatatggggtggaggaatttaatgaaaccttatatgatgaatgggttaacaagggcgacgcaccggcattgccagagactcttaaaaattacaacaagctgttgtctcttggcttcaagattgtattcttgtcaggaagatatcttgacaaaatggccgtaacagaagcaaacctaaagaaggctggcttccacacatgggagcagttaattctcaaggatccacatcttatcactccaaatgcactttcatacaaatcagcaatgagagagaactgttgaggcagg

SEQ ID NO: 178849 - DNA, 299 bp, Glycine max
attgagcactggaggatctgactaccttggaaagggtgtatcaaaggctgttgacaatgtgaacaccgtcattggccctgctttgattggcaaggacccaactgagcagactgctattgacaacttaatggctcaacagcttgatggaactgttaacgaatggggttggtgcaagcaaaagctaggagcaaatgccatattggcagtgtctcttgcagtctgcaaagctggtgctagcgtcctgaaaattcctctttacaagcatattgctaatatcgcgggtaacaaagttggttttg

SEQ ID NO: 178850 - DNA, 297 bp, Glycine max
cgagaatcgctcttcttccatcctttcctctcctctctccgcatttcccaagcagagcagatattccaagatggcagacgctgaggatattcaaccccttgtttgcgacaatggaacaggaatggttaaggcaggatttgcaggagatgatgccccacgtgctgtgtttcctagcattgttggtcgtcctcgtcacactggtgtgatggttggtatgggccagacagatgcatatgttggtgatgaagcacagtctaaacgtggtattctgactctcaagtatccgattagcatggt

SEQ ID NO: 178851 - DNA, 300 bp, Glycine max
gctactgcgactgcgcttcagcacaatgggtgcctacaagtatgtttcggagctatggcgcaagaagcagtctgatgttatgagattcttgcagcgggtgaggtgctgggagtatcgccagcaaccttctattgtccgtttgacaaggtctactcgcccagataaggctcgtcgcttgggtttcaaggctaagcagggttacgtgatttaccgtgttcgcgtacgaaggggtggccgtaagagaccagttccaaagggtattgtttatggtaagcccaccaaccaaggtgttctcaactg

SEQ ID NO: 178852 - DNA, 302 bp, Glycine max
cgtcacagggtaaagagtatgtatttcttgccaattcagataacttgggagctatagttgacttgatgtacttgactcattgatgtagagatcttaaatcatttgatccagaacaagaatgaatactgtatggaggtgactcccaaaacattggctgatgtaaagggtggcactttgatttcttacgaaggaagggttcagcttttggaaattgcacaagtcccagatgaacatgtcaatgagttcaagtcaatagagaagttcaaaattttcaacacaaatcatagtcggtgaacttaaat

SEQ ID NO: 178853 - DNA, 299 bp, Glycine max
ttcaggagttgggtttggaaattttggagaggttggtcctttggatgctaatttgaagccacgaaatttcacatggttgagaaaagcagatctcttgtttgtggacaacccagttggaaccgggtacagttacgtggaggattccaatctctatgccaaaacagacgaagaggcaaccacagacttgacaacattgttagttgaattattcaacaatgatgcaagtctccaaaagagtcctctgttcattgtggcagagtcttatggtggcaaatttgctgtgctcttgcattatcggc

SEQ ID NO: 178854 - DNA, 295 bp, Glycine max
ccaaaaccctcttttttctctctcttgcaaaacctaattttcatttcttccctcaaatttcaaaatgcgtgacatccttcacatccagggtggccaatgcggcaaccagatcggcgccaagttctgggaggtggtttgcgcggagcacgggatcgaccctaccggacggcacggtggggactcggagttgcagctcgagaggatcaatgtctactacaacgaggccagttgcggtcggttcgtgccgtgcgcggttctcatggacctcgaaccgggcactggacagcgtccggtc

SEQ ID NO: 178855 - DNA, 295 bp, Glycine max
tctttgttgtgagctataagctagtttatcgtgaggagaatatgaagttgtctgtcttctttgttgctgcagtagtcttcgtagcatggccatgccatggcgcaggctaccaaaggttccctctccgaatgacaactggctatggtgagcgttcttcggaggtaaaatgcgcaagtcttaggcttgctgtggaagcacacaacatccgagcctttaacaccattcctgaagagtgcgttcaaccaacaaaggtctacattaatggcgagcaatttagatagactctaaaacagtt

SEQ ID NO: 178856 - DNA, 288 bp, Glycine max
cttcaaccgctacagagagatccatggcacttccatctctaagaaattggtggatgaaggatctgatgagtttcagacggcattgtacactgccattcgtgccatcaatgatcctattaagtactatgaaaaggtggtgcgcaatgcaatcaaaaaggttggaaccgatgaggatgcactcactcgcgtggttgtgagccgggccgagaaggacctgaagataatctcagaggtttactacaagagaaacagcgttcttcttgagcatgctattgccaagaaatctca

SEQ ID NO: 178857 - DNA, 293 bp, Glycine max
ctcgagccgtacaacttacggctaaattctcaaagatttaaactttgtctcagagtttccaaattcacccaaccccagagagaaaatgtctctaatcccaaatttcttcggtggcagaaggagcaacgttttcgatcctttttccctcgacgtctgggaccccttcaaggattttcctttcccaaacactctttcttcagcttcctttcctgaattttctcgggaaaattctgcattcgtgagcactcgtgtggattggaaggagaccccagaagcacgtattcaaggctgat

SEQ ID NO: 178858 - DNA, 297 bp, Glycine max
cttgtgtttccctccagacattgattttatctaagaatcaaatcacagattggccaggttcaattcttaaatcactttcgagcctttcatgtttgaagctggataacaatcccctcagacagataccttcagatggctttgaaatggtgcctaagcttcagatcctggatctaagtggtaatgcagcttcattactagatggtcctgcattttctagtttgccatacctgcaagagctttacctaaggagaatgaggctcagtgaagtcccatcagatatagggggctgcatcagct

SEQ ID NO: 178859 - DNA, 296 bp, Glycine max
cacacctcagaagaacagaacagaaccaccacataacagtgcttttcaaaggcggtttgagcaatggcgttcttaaataaaatcgggaatctgctcaagaattctgctgtcaagcacatcaatcaggatttttcggcgtctaccccttcacttttccaagcaattagatccatgtcatctgcaaagcttttcgtcggaggtatttcttacagcactgatgatatgagtttgcgagagtcttttgctcgctatggagaagtaattgatgtcaaggttattatggcattgaaactggc

SEQ ID NO: 178860 - DNA, 294 bp, Glycine max
ctggtaaataaataacctaacctaacccttgcgacttgcgacttgcgagtcagactgaggttgggtttggaaggcaagggcttgtgttgtcacaatccaagagagaagtaatggcgaacatagacatcgaagggatcttgaagcagcagcagccttatgatgggcgcgttccgaagacgaagatagtgtgtactttgggccctgcttctcgatccgtagaaatgaccgagaagcttctgagggcagggatgaacgttgctcgtttcaatttctctcatggcacacgactatcac

SEQ ID NO: 178861 - DNA, 297 bp, Glycine max
catcgagccgggtcgcagctcgatttgctctctgttcatgaaacctcgcaggagccattgcctgagtcgaaggatgatattaactctgcccattcgttgagcgttgaggctgcttatatcaaccagaatttctctcagcaggtgcttattagggatgggaataaggttacttttgatgaggctaacccttttgctaatgaaggtgaggaggttgcttctgtcgcttataggtataggaggtggaagcttgatgatgatatgtatcttgttgcgaggtgtgagttcatagtgttgttg

SEQ ID NO: 178862 - DNA, 293 bp, Glycine max
agtttgttgtgagctataagctagtttatcgtgaggagaatatgaagttgtttgttttctttgttgctgcagtagttttggtagcatggccatgccatggcgcaggctaccaaaggttccctctccgaatgaaaactggctatggtgagcgttcttcggaggtaaaatgcgcaagttttaggcttgctgtggaagcacacaacatccgagcctttaaaaccattcctgaagagtgcgtaccaccaacaaaggactacattaatggcgaacaatttagacagactctaaaacag

SEQ ID NO: 178863 - DNA, 294 bp, Glycine max
cttcatatgagcaaaaagtaaacagaactgaacaactagtaatgggagatccttgcttctttgtggtcttatcgtccttgctgctcctcatagttagtacacaaacaagctcaggtcaacttactcgcggcttctatctaaacacatgccccaatgtggaacagttggttcgttcagctgtggagcagaagttccagcagacctttgtgactgcccctgccactcttagcattttcttccatgattgctttgtgaggggttgtgatgcttccattttcttgcatctccaaacaa

SEQ ID NO: 178864 - DNA, 294 bp, Glycine max
cgaagagctgcttcatttaacatcattcctagcagcactggagctgccaaggctgttggaaaagtcctccctgctttgaatggaaaattgactggtatggcattccgtgttcccactgtggatgtctctgttgttgacctcacagtgaggctggagaaggaagcctcctacgatgaaattaaaaatgctatcaaggaggaatcagagggcaagttgaagggaattcttggttacactgaagatgatgtggtctccaccgactttgtgggcgatagcagtcaagtatttttgatg

SEQ ID NO: 178865 - DNA, 293 bp, Glycine max
cacagggcccaatgagggagatccttcacgtgcagggagggcaatgccggaaccagatcggttccaagttctgggaagtggtgtgcgacgagcacggcatagatccgacggggaagtacgtcggaaactcagatctgcaactcgagcgcgtgaacgtctactacactgaagcctcgtgcgggcgcttcgtgccacgcgcggtgctgatggccctggagcccggacccatggacagcgtgcggaccgggccgtacgggcagatcttccgccccgacaacttgtgttcgggcagt

SEQ ID NO: 178866 - DNA, 298 bp, Glycine max
agcatttgcagttccaaagggttataatgcacctcaacaagtgcacatcacgcaaggtgactatgatggaaaagcagtaatcatctcatgggtgaccacagaagagccagggcacagccatatacagtatggcacatcagagaataaatttcaaactagtgaagaaggcacagttacaaactatactttccacaaatacaagtctgcctacattcatcactgtcttattgaaggccttgagtatgagactaaatactactatagaattggaagtggtgattcctcgagaattttggtt

SEQ ID NO: 178867 - DNA, 300 bp, Glycine max
caaacattctcatcattcacccaacaaaatggctctgcttctgatagtacccatttcactggtaaccctctggctcggttacaccctataccagcggctacgcttcaagctccctcctggcccacggccctggccggtagtcggtaacctctacgacataaaacccgtccggttccggtgcttcgctgagtgggcgcagtcttacggccctatcatatcggtctggttcggttcgaccctaaacgtcatcgtttcaaactcggagttggccaaggaggttctgaggagcacgatcagcag

SEQ ID NO: 178868 - DNA, 300 bp, Glycine max
cggctcgagctgttctctctccccctccccgattcgttttgcccctttcgttgccctaatttaaaccatgcctcgccgtagctccggtggaagatctgcccgtcctgctcctcgtgcagcacctcgtcctgctccagttcaccatgctcctcctccagcccctgctcagagcggtggcggatctatgcttggtggcattggttcaaccatagctcaaggtatggcttttggcactggaagtgcagtggcacacagggctgtggatgctgtcatgggtcctcgtacattcaacatgaagca

SEQ ID NO: 178869 - DNA, 301 bp, Glycine max
cgatagcaagagagagaaaaagacagaggagagacgcactgctgcaagtgcaactccaagaagcgcagtgccaagccaccatgtttcaacattcaacagaagcctttttccttccacttttctctttggacttggttcttctgcttaccaggcagaaggagcagcaagtgtagatgggagaggaccaagcatatgggacacctacactagacagcatactgaaaagatttgggatcatagcaccggtgacatgggagctgatttttatcatcgatacaagggtgataaaaatagcgaaaga

SEQ ID NO: 178870 - DNA, 302 bp, Glycine max
gggatcattcacaagattggggagaccttcatgtgggagggcacaagaaggaggaggagcataagggtgagcaccatgctggagaatacaaaggggagcaccatggtgaacacagtagtgagtacaaagaagaccatccttatctgccaaagcacattttatacaggcagaaagaacaattcagtgatggagttggctatggttggattgatggccttaaagctcatgctgagaaacatgtgactgacagaatgatgctcaatgctgctaacattttccccttcacacaccaaccaccaaag

SEQ ID NO: 178871 - DNA, 305 bp, Glycine max
acctaaaccctactcattctccatacctcaacgaagaggttaaagagacggcaacactttgctgtccgccttgaccgagcagagcttcgtcttggccctcgattttgccctaaagtactctcagtcacaacagacaccgtcgtcgtcgtcgtcgtcatcaatggcaccgaagcagaccaaggctgagaagaagatcgcttacgatgcgaagctgtgcgacctaatggaggagtacggccagatcctcgttgtgaactccgataacgtgggatcgaaccagctccagaacacgcaagggtctccgt

SEQ ID NO: 178872 - DNA, 275 bp, Glycine max; identical to SEQ ID NO: 172705

SEQ ID NO: 178873 - DNA, 271 bp, Glycine max
atttttcaagtaacttaaggtttcaaacctaggaagttggaagtcatggcagcaacattgatggcagcaacaacaagttctggtactcttaaagcaactcctttccttggccaaggcaagggtgccaatgccaatgctcttagggatgttgtctccatgggaactgggaagtacaccatgggcaatgatttgtggtatggaccagacagagtgaaatacttgggacccttctcagctcagaccccttcatacttgaaaggagaattccctg

SEQ ID NO: 178874 - DNA, 269 bp, Glycine max
atcctctatatatagttctctggcaattaaggtctcatccaaataagcacaaatgggtagccagagttacttcaaggctttgattatttgccttatagcactaattggatcaactcaagctcaattgcagcttggtttctatgccaaaagttgtccaaaggctgagcaaataattctgaagtacgttgttgagcatatccacaacgctccatcactagcagctgctctcataagattgcacttccatgattgtcttgtcaatggttgtg

SEQ ID NO: 178875 - DNA, 270 bp, Glycine max
gcaataagtccctccttcctctgtcttataattcttgtgacccttttacgtggtaccattgaaagtgcaccagcaaacgtgaagccaagccattatgctgcacccttcaataggagtgtttttccttctggttttctatttggaataggctctgcagcttaccagatagaaggtgcagcagctatagatggcagaggaccaagtatatgggacacctatactaaacagcaaccagggatgatttgggatcatagtgatggacgtctagca

SEQ ID NO: 178876 - DNA, 270 bp, Glycine max
tactgctgaggttatgaagtccttgaatatccctagaggtgtaagccgcgtgcttttcagaactttaaacactgacaggcaactcatgtttaagaaagaatttgacacaagctatgtgggattcaaggaggatggtgcaaaatggctggcagagaacactgacatcaaacttgtaggagtcgattacttatctgttgctgcttatgatcactccattccatctcatcttgttttcctggaaagcaaggaaatcattcttgtggaaggcct

SEQ ID NO: 178877 - DNA, 268 bp, Glycine max
gttccgcacccattatccctcgcaagtgtaagttttgctaaccgaacctcctccatctccagatccactctcaaatgctgagctcaatctccttctccttcactagttgacaacgcccataagtttctcgaagcttccaagaaggggaacgtcattcctctcttccgctgcatattttccgatcacctcactccggtgctttcgtaccggtgcctggttaaggaggatgagagagatgcacaaggccaaactttgaatcggtcgagcc

SEQ ID NO: 178878 - DNA, 271 bp, Glycine max
gcgcgtgaacaagcctcaggtaagccaaagccatggttaagcataacaatgttatccccaacggacacttccgtaagcactggcagaactatgtgaagacctggttcaatcagccagcacggaagacaagaagacggttggctcgtcagaagaaagctgtgaagattttccccagacctacagctggacctcttagacccattgtacatggtcaaactttgaaatacaacatgaaagtgagagctggaaggggattttcccttgaagaact

SEQ ID NO: 178879 - DNA, 271 bp, Glycine max
ccgctcgagctgctcgagcacaacataaaaagatactaagagagaagcgtcttaataaacgctcttctatgaaaaacctgatttcttctcttcttctcttctctttcgtttcgatcttcgatctctgaaaatgagagagtgcatttcaatccacatcggtcaggccgctattcaggtcggaaacgcctgctgggagctctactgcctcgaacacggcattcagcctgatgggcagatgccaagtgataagactgttggtggaggtgatgat

SEQ ID NO: 178880 - DNA, 273 bp, Glycine max
ctttgaaacacagctagcatagcatttttcttttacaaagcaagacacccttttccttttcattccatcatctctttagctttgtccaaagaccatgtctgtggtggctgataattctgcaaacaatggaagccaccaagtggttttaaatgtaaacggtgatgcccccaagaagtgtgatgactcagccaaccaagactgtgtacctcttctgcagaagttggtagcagaggtggtggggacgtacttcttgatatttgcagggtgtgcttc

SEQ ID NO: 178881 - DNA, 278 bp, Glycine max
gtttagtggtaaaagtgcgattcgttccatggacccctaaatagttaagggatcccccgtttgattcatattccgatcaaaaactttatttcttacttaaagggaatcctttataccctcaatgaatgatttgcggtataatatacattatcgtaatttgtatacaagaagaatcaattctaaattgacaacttgagttctaaaattatgagacataagtttttggaattggatctataatccgaatttttttgagtatgacgaaaggatctatggag

SEQ ID NO: 178882 - DNA, 273 bp, Glycine max
agacatcatcatgagttcaaaaaatagtatagataggaagccgaagcactatgttctggtgcatggggcttgctatggagcttggctttggtataagctcaagccacgcttggaatctgcagggcacaaggtcacagtgctcgaccttgcagcttctggaaccaacatgaagaaaattgaagatgttgacactttctcacagtacactgagcctttgttgcagctaatggccacaattcccccaaataagaaggtagttctagttggtcacag

SEQ ID NO: 178883 - DNA, 273 bp, Glycine max
gactacgggaacttggccagctggagcaagatcttgttttcggagatgcaacaacaaaagatgtgatcaaattttttaccatgaaagaagatataacccatgaaaataagttgcgcctgctaatgattcttgcatctgtttatcctgagaaatttgagggagaaaagggtcagaatttgatgaggctagcaaaattgacagaagaggatatgaacattgtgcccaatttcagaatgcttggaggacaaccagtaaccaagaaaagtttgaccg

SEQ ID NO: 178884 - DNA, 272 bp, Glycine max
cagagagtggtttcagtgagtgatcggtgttcacttgatccttcataagtcgtcatcatcatcatcatcatcaccgttgattgaagaagatgccgatcagaaacatcgccatcggaaggcctgaagaggctactcaccccgacacgttgaaggcggggttggctgagttcatctccaccttgatcttcgtgttcgccggttcaggttccggcatcgcctacaacaagctcaccgacaacggcgccgccactcacgacggcctcatctctgct

SEQ ID NO: 178885 - DNA, 269 bp, Glycine max
gtttgttgtgagctataagctagtttatcgtgaggagaatatgaagttgtttgttttctttgttgctgcagtagttttggtagcatggccatgccatggcgcaggctaccaaaggttccctctccgaatgaaaactggctatggtgagcgttcttcggaggtaaaatgcgcaagttttaggcttgctgtggaagcacacaacatccgagcctttaaaaccattcctgaagagtgcgttgaaccaacaaaggactacattaatggcgaac

SEQ ID NO: 178886 - DNA, 271 bp, Glycine max
cttttcttttcttcaaatcaaggagctcagctatgactaccagagaaatccttcaaaagatgtaggtaaaagttggtttgggttcatcagaccctgattcagggaaaggaaagagcaagatgtcaaagaacataactcatggctttcatttggtgaaaggtaaatcatatcatgacatggaggattacgttgtggctcaatctatgcaaatagataacaatgaattgggtttgtatgcaatatttgccggccatgcgggtcacaacgtacc

SEQ ID NO: 178887 - DNA, 267 bp, Glycine max
gtttgttgttgtaactcgttcttcttcttttgttgttctgtgtttgtgtctgtatagtctctcacctgaaaatgtcttgctgcggtggtaactgtaggtcgcggaagctcctgcaagtgcggcaacggctgcggaggctgcaagatgtagccagacttgagcgacactgagtcaaccaccaccgagaccttggtcatgggagtggcacctgttgaggctcaatttgagggtgctgaaatgggtgtgcccgctgagaacgatggctgc

SEQ ID NO: 178888 - DNA, 261 bp, Glycine max
tcggctcgagctcgtctccttgcggtagctttaccgcattcttctagatttaaagacactgggtaaggaaaagcgtcacatcagtactgtggtccttggccatgtcgactctgggaattccactaccactggtcacctgatttacaagcctggaggcattgacaagcgtgttattgagacgtttgagacagacgctgctgagatgtacaagaggtctttcgagtatgcctgggtgctggccccccttaaggctgagcgtga

SEQ ID NO: 178889 - DNA, 283 bp, Glycine max
gttcaaagatgaagatgatccacgttctttatcctgctttgctcttagtctcggttcactatccgcatgctctctagtcaactgcttactctcgtagcagacctaaaaggtccagatagcccttcaggctatcagtgcaagccacctaacacagtcacagtggatgactttgtgttctctggctttgtagctggagacaccacaaacactttcaatgctgcattaacctccgcatttgttactgattttccaggtgtgaatggtcttggtgtatctgtagcac

SEQ ID NO: 178890 - DNA, 275 bp, Glycine max
tgaatctgatgcaggcggttcgctacgacgcctccgggggaggtcctgccggcctcaagcacgttgacattgccgttccccgtccaaaggcaaatgaggttttaatcaaactggaagcaattagcattaaccctactgattggaagattcagaagggtcttctccgtcctttatctctccccagaacctttccccacataccttgcactgatgtggctggagaaatagttgagatcggaactcaagtcaaagatttcaaagttggcgaccaagtc

SEQ ID NO: 178891 - DNA, 278 bp, Glycine max
gacggcagcacgcgcaaaaatggtgaagtttctgaaaccaaacaaagccgtcatcgtccttcagggacgctacgccggcaaaaaagccgtgatagtgcgaaccttcgatgaaggcacgcgcgacgcccctacgggcactgcttggtggcagggataaagaagtaccctgcgaaggtgatcaagaaggattcggccaagaagacggccaagaagtcgcgtgtgaaggcgttcgtgaagctcgtgaactaccagcacctcatgcccacgcgctacacgct

SEQ ID NO: 178892 - DNA, 269 bp, Glycine max
ttcacttgagacagtgatcttgatctacgcaagagaagaatagacaatggatatcagtgtgatggatttggactctccattgttcaacactctgcaccgaatcatggatctgacagaggacgcatataagtacttgaacgctccgacgcggagatacgtgcgcgacgcgcatgtaatagctgcgactcctgcggacgtgaaggagtaccccaactactacgtgttcgggctcgacatgccaggcctgacatccggggacattaaggtgc

SEQ ID NO: 178893 - DNA, 272 bp, Glycine max
attgttcaagtaacttaaggtttcaaacctaggaagttggaagtcatggcagcaacattgatgggagcaataacaagttctggtactcttaaagcaactcctttccttggccaaggcaagggtgccaatgccaatgctcttaggtatgttgtctccatgggaactgggaagtacaccatgggcaatgatttgtggtatggaccagacagagtgaaatacttgggacccttctcagctcagaccccttcatacttgaaaggagaattccctgg

SEQ ID NO: 178894 - DNA, 269 bp, Glycine max
gttcaaacaaatcaaagccatggccacctccaacttctctattgttctctccgtctccctagccttctttttggtgctacttaccaaggcacactcgaccgataccgtttctttcaccttcaacaagttcaacccagtccaaccaaacattatgctccaaaaagatgctagtatttcatcctctggggtgttacaactcaccaaagttggcagcaacggcgtgcccacctcgggatctctcggtcgtgccctttacgctgccccaatcc

SEQ ID NO: 178895 - DNA, 270 bp, Glycine max
ctgttctctgtcactgctgcgtctctcgtaaccatgcctaagcaaatccacgagattaaggatttccttctcactgctagaaggaacgacgcaaggtcggtgaagatcaagaggagcagagatgtggttaagttcaaggtcagatgctcgaagtacctctacacactttgtgtgtatgacccagagaaagctgataaattgaagcaatctcttcctccaggtttgagtgttcaagacctgtaaaggtacagggcgagataccaagaagaa

SEQ ID NO: 178896 - DNA, 226 bp, Glycine max
caaaactagctcggttggaccaattcgaagcgaacttagacggagagagtgatagagaatgatgttggacggaaccgaagacgaagagcagtttctcgccgccggaatcgccggccttcagcagaattccttctacatgcagcgtgcatcggactcgaacaatctcagggatgctttgaagtattcggctcagatgctctccgagctcaggacttccaagccttct

SEQ ID NO: 178897 - DNA, 266 bp, Glycine max
gaaagctgaagagatcacaacagaagaatatgctgctttctacaagagtcttaccaatgagcattaaggagatatctcatgagtggtcattggtgaacaagcagaagcctatttggatgaggaaacctgaagagatcagaaaagaagaatatgctgctttctacaagagtcttaccaatgattgggaagagcatttggctgttaagcacttttctgttgagggtcagctggagtttaaggctgtcctctgtatccccaagagggca

SEQ ID NO: 178898 - DNA, 275 bp, Glycine max
ggaagagagagggagattctttgtctgctaccttctctcggaaaaatggttacgttcaggtttcaccagtaccaggtggttgggagggctcttcccacggaagcagatcagcaccccaagatctaccgaatgaagctctgggccaccaacgaggttcgcgccaagtccaagttctggtattttctgaggaaactgaaaaaggtgaagaagagcaatggccaagtgcttgccatcaacgagatttttgacaagaacccaaccaaaattaagaacta

SEQ ID NO: 178899 - DNA, 269 bp, Glycine max
ctacaaaacagtctccatttgacacagtcctagtggtgtactacttattatggccacaccagcatccatcactaatgtcactgtggagttccttcaattccccgcactggtgacacctcctggctctaccaaatcctatttccttggcggcgcaggggtgagagggttgaatattcaagaagaatttgtgaagttcacgggaataggtgtttatttggaagacaaggccgtgtcatcactcgctgccaaatggaagggcaagagtgcag

SEQ ID NO: 178900 - DNA, 267 bp, Glycine max
ggaagagagagggagattctttgtttgctaccttctctcggaaaaatggttacgttcaggtttcaccagtaccaggtggttgggagggctcttcccacggaagcagatcagcaccccaagatctaccgaatgaagctctgggccaccaacgcggttcgcgccaagtccaagttctggtattttctgaggaaactgaaaaaggtgaagaagagcaatggccaagtgcttgccatcaacgagatttttgagaagaacccaaccaaaatt

SEQ ID NO: 178901 - DNA, 268 bp, Glycine max
tgcacctttctctttctccgatggctaatccctcactcttgttcttcagtctcctcctattatccgccaccgtagccgccgccgaacggatcgacgatgaagacgaccttctgatccgtcaagtggtgccggatgcggaggaccaccacctgctcaacgcggagaccacttctccgccttcaagacaaagttcggcaagacctacgccacgcaggaggagcacgaccaccgcttccgtatcttcaagaacaacttgctccgcgccaag

SEQ ID NO: 178902 - DNA, 271 bp, Glycine max
cgctataagctagtttatcgtgaggagaatatgaagttgtttgtattctttgttgctgcagtagttttggtagcatggccatgccatggcgcaggctaccaaaggttccctctccgaatgaaaactggctatggtgagcgttcttcggaggtaaaatgcgcaagtcttaggcttgctgtggaagcacacaacatccgagactttaaaaccattcctgaagagtgcgttgaaccaacaaaggactacattaatggcgaacaatttagatcag

SEQ ID NO: 178903 - DNA, 268 bp, Glycine max
gccaggtttaaagttctcaaccgactgaatggaaccattcctaagagttttgagttcctcagaaacctgcaggtattaaatcttggaactaattctttgactggtgatatgcctgtaactcttggaactctctcaaatttagtaatgttagacctttcatctaatttgttagaaggatctataaaagagtcaaattttgtaaaacttttgaaattaaaggaactacgtttgtcttggacaaacttgttcctcagtgtcaactcaggat

SEQ ID NO: 178904 - DNA, 269 bp, Glycine max
gcttgagctctgcgagatcttgagtcgccgatttgaaaagatgagtaagcttcagagtgatgctttgcgtgaagccatctcaggaatcatggccgattccaaggagaagaatcgcaaatttgtggagaccatcgaactccaaatcggtttgaagaactacgatccacagaaggacaagcgtttcagtggctccgtcaagttgccccacatccctcgccccaagatgaaaatttgcatgcttggtgatgctcagcatgttgaagaggcag

SEQ ID NO: 178905 - DNA, 266 bp, Glycine max
tttatccctccattgctttgcactgccgccgataacaatttactgtatcgtgtatttttttagtctttgttcacagatctgcgagatcttcattcgccgattttaaaagatgagtaagcttcagagtgctgctttgcgtgaagccatttcaggaatcatggccgattccaaggcgaagaatcgcaaatttgtggagaccatcgaactccaaatcgggttgaaaaactacgatcctcagaaggccaagcgtttcagtggctctgtca

SEQ ID NO: 178906 - DNA, 268 bp, Glycine max
gaagcccatggctgcctgtctgaactgtactctggtgggagggtgaaagagttacctgcacaaggtgtgtcacaaagtcgctatcatgagaagactccagaacaggaaaggttggaaagaagacggcaaatgccttatcatatgcacatcaatcttgagctcctggagacagtacatcttgtatctgctatgctgctggaagttcctaatatggcagccaatgttcatgatgcaaaacgcaaactcatatctaagactttccgtcgct

SEQ ID NO: 178907 - DNA, 268 bp, Glycine max
acaaagtatagagtgaaagaatgggtgagaaaagcaagattttgaccataggaggcaccggctacatcggcaggcatatagtggaagcaaacgcaaaggctggcaatcccactttttctttggtgagggaatccagactctctgaagacaccaaggcacaactcatccacaattttgaggctttgggcgttaatttggtccgcggggatctgtacgatcatgagaagttggtgaaagctatcaagcaagtagatgtcgtcatatccac

SEQ ID NO: 178908 - DNA, 261 bp, Glycine max
gttcgtcaccatgactttcaagcgcaggaatggaggtcgcaacaaacacggccgcggccacgtcaagttcattcgatgctccaactgcggcaaatgctgccctaaggacaaggctatcaagaggtttctggtgaggaacattgttgaacaggctgcagtcagagatgtgcaggacgcttgtgtctacgaacaatacacgcttccgaagctgtatgtgaagatgcagtattgtgtttcctgtgctatccactctcatgttgt

SEQ ID NO: 178909 - DNA, 264 bp, Glycine max
cagaaggaacgctagctatatgcttaacacatgctagtcgaacgttgttttcggggagctgggcagaaggataagaggctcctagcgtgaatggtgcttgtctcgcccaggaggcgggaacagttgaaaacaaagtggcgaacgggtgcgtaatgcgtgggaatctgccgaacagttcgggcgaaatcctgaagaaagctagaaagcgctgtttgatgagcctgcgtagtattaggtagtcggtcaggtaaaggctgaccaagc

SEQ ID NO: 178910 - DNA, 170 bp, Glycine max
caaggaggtggacgagcagatgataaacgtgtagatcaagaactcttcatattttctcgactggatatccctcaatgtcaagtcgaccgtgtgtcacattactcctagagggctctccatggcgtccagatgcattggaaactcgccatcgattcaggagatgttcacga

SEQ ID NO: 178911 - DNA, 220 bp, Glycine max
gtgctgcaatggcttcaagtcaggaggaggtgacccttttccggagctactggaagcccatgtgtgagcagggttcatattgcgcgcaagttgaagggatcgcaatacctatatgtcgaagtcaattcgaggagcacgagggaactgcctcgcagatccaacccagtgcgcaagaaggttccactgttgatgcactctgtgatgcccatagcagagcctc

SEQ ID NO: 178912 - DNA, 268 bp, Glycine max
aattgtcatttcttcatcgttcgattcccctcctcctaaagatgcagatcttcgtgaaaactttgaccggtaagaccatcacccttgacgtggagtcctccgacaccatcgataacgtgaaagctaagattcaagacaaggaagggatcccacctgaccagcagagacttatctttgcgggtaaacagcttgacgatggtcgaacccttgccgactacaacatccataaggaatccactctccacctcgtgcttcgcctcaggggtgg

SEQ ID NO: 178913 - DNA, 267 bp, Glycine max
ctttggaagacaatgttgacatttatggatgacaccaaatgactgtttatggtgctgttcactactattttttagatgtattttttattgacgtgcaactgcagttctacaatccgggacaaaattattcctcatgccgtgtcatggttcacggtggaggctgcacagagtgattttgaggatatagatgaagatgattatgaagatgaagaaggtgatgatgatgatgatgaggatgaggatgaggatgaggatgaggaggatgag

SEQ ID NO: 178914 - DNA, 270 bp, Glycine max
ataatctcctggttacgatctgattataatattgcaattttcaaagcttatcagttagagtaacatcataagatgtcattgattccaagtatttacggtggagcaatgagcaactcgatcgatctaatatcaacgcgatatgagggatcacgttaaagagcttcatgtacatacgtcctctgaatgtgctgaaaagtctggaactgtgatggcacgtgtggattggaaggtgagacatgaggtacatgtggtcaaagctggtattccagg

SEQ ID NO: 178915 - DNA, 267 bp, Glycine max
tcgagatattattcaaaaccatctgctgcaggatctttgcgtggttgttatggaaaaaccagtaactctcaggcgtgatcacatacgggatgagatagtgaaagttcttggatcagtgctccctattaatgatgatgaggttgtcctttgagaatatgaaggctataaagatgatccaaccgtacctgatgagtctaacaccccaacatttgcaactgttgttctgcgaatacacaatgatagatgggaaggtggtcctttcatact

SEQ ID NO: 178916 - DNA, 265 bp, Glycine max
ctctcccttagtcaaagggattcatcgttcttcttcccaggttatttagaaaagcaaaatggtgaagatttgctgcattggtgctggatatgtggggggtcctactatggcagtcattgcacttaagtgcccatccattgaagtcgctgtcgttgatatctctaaatcccgcattgcagcctggaacagcgaccagcttcctatctatgaacctggccttgatggtgttgtgaagcaatgccgtggcaagaacctcttcttcagc

SEQ ID NO: 178917 - DNA, 246 bp, Glycine max
ggctcgaggagaaagcgaaacgcatagaatcgaaagaccgggaaaagccaaagaaaagttagggttagggattttcagagatggcatcgactaagaagatcaccctgaagagttcggacggtgaggccttcgaggtggaggaggcggtggcgctggagtcgcagacgatcaagcacatgatcgaggacgactgcgccgacagtggaatccctctccccaatgtcaccagcaagattctggcgaagg

SEQ ID NO: 178918 - DNA, 270 bp, Glycine max
cgcattctcaatacccttttgatttgtgaaaggtcagcaaacatggttgatcaggtccaacaccctacaatcatggacaaggttgctggtcagctccatctccgttctggtctttcatctggtattagatcgttatgatggagcctaccgccacccagctatgtaccaaagaccctcttttgggaattactcgaatgctgcattgcagtttcctgtgatgcccacatgcaaagctaccatggatttgtctgctactgcaacatctgcctc

SEQ ID NO: 178919 - DNA, 247 bp, Glycine max
  unsure (1)..(247): unsure at all n locations
ggcttgaggagaaagcgaaacgcatagaatcgaaagacgggaaaagctnaagtcatcgttagggttagggattttgagagatggcatcgactaagaagatcaccctgaagagttcggacggtgaggccttcgaggtggaggaggcggtcgcgctggagtcgcagacgatcaagcacatgatcgaggacgactgcgccgacagtggaatccctctccccaatgtcaccagcaagattctggcgaaggt

SEQ ID NO: 178920 - DNA, 191 bp, Glycine max
gctagagaatgatgatgaagtctgctatgtgtgcagtggtggttgtagcacttcttctctggcggaggtggggcccatggctgaggctgtgacatgcaccccaacagagttgagtccgtgtcttccagcaatcacttccggtgctaaaccttccaatgcttgttgcacgaagctgaagcagcaaaaaccat

SEQ ID NO: 178921 - DNA, 190 bp, Glycine max
tgatgagctgtcagctgggcaattgcgcaacttggagaagatttttggtggagatgtagagtttgtgatcgaactgctctcatccttgatatatttaatcaacgagcagcaacacatgaagcgtctttacaggtttcattagcacaaatggaataccaactacctcgtctaactaaaatgtggactcatc

SEQ ID NO: 178922 - DNA, 191 bp, Glycine max
gtaaagggtggcactttgatttcttacgaaggaagggttcagctcctggaaattgcaaagtccccgatgaacatgtcaatgagttcaagtcaatagagaagttcaaaattttcaacacaaataatttgtgggtgaacttaaacgcagttaaaaggcttgttgaagctgatgctcttaagatggaaattatt

SEQ ID NO: 178923 - DNA, 189 bp, Glycine max
ctgttctctgtcactgctgcgtctctcgtgaccatgactaagcaaatccacgagataaggattaccttctcactgctagaaggaaggacgcaaggtcggtgaagatcaagaggagcagagatgtggttaagttcaaggtcagatgctcgaagtacctctacacactttgtgtgtttgacccagagaaag

SEQ ID NO: 178924 - DNA, 187 bp, Glycine max
cttttctcagctgctgttcctgcgcgtgaacaagcctcaggtaagccaaagccatgttaagcataacaatgttatccccaacggacacttccgtaagcactggcagaactatgtgaagacctggttcaatcagccagcacggaagacaagaagacggttggctcgtcagaagaaagctgtgaagatt

SEQ ID NO: 178925 - DNA, 187 bp, Glycine max
tcagagacttatctttgcgggtaaacaacttgaggatggtcgcacccttgccgatacaacatccaaaaggaatcaaccctccatctcgtgcttcgcctcaggggtggcatgcaaatctttgtcaagactttgaccgggaagaccatcacccttgaggtggaatcctcggacaccattgataatgtta

SEQ ID NO: 178926 - DNA, 183 bp, Glycine max
cggctttagccaagtggcagaaaggcaaggtaaatatttagcattcttattaccaaaataggtaaagccaatggaggccgtgcaaacagtgcaaaagatgtagactttggggatcagtttgtttacaagcacatgggaagcatggcatctatagggagttacaaagctctagtggacctcaga

SEQ ID NO: 178927 - DNA, 187 bp, Glycine max
tgcaaataactattaccaacaaactctactttcggcaaccttcaatttttttgaaatcatggatttcagagtgatgggtttggagcctccgttgttccacacgctgcaacacatgatggacatgtcagaggacgctgcaggggaaaacaagacgtacagtgctccgacacggtcatacgttcgagac

SEQ ID NO: 178928 - DNA, 180 bp, Glycine max
ctatcaattcacacgacaaaatttagcagagttcaaaacaccaacaggtaaagtaaagaagggaagatgtcactgataccaagtttcttcggtggtcgaaggagcaatgttttcgaccctttctcgctcgacgtatgggaccccttcaaggatttgtctttcccttctgctgaagattca

SEQ ID NO: 178929 - DNA, 189 bp, Glycine max
atgatattgaagccattgatcctgatatgtaactttgactccaagaatgtgcttgtgaatgaccgagtaaaatgaacatccaagagtcaaagttacatatcatgatattgaagccattgatcctgattatttcaaaaatttgaaatggatgcttgagaatgatatcagtgatgttctggatcttacttt

SEQ ID NO: 178930 - DNA, 189 bp, Glycine max
ttcatacctgctgctcttcggcaggtggaggatttttcacctcaatggtgggatctgtgaaatcttcaacatggtttcgtgattattggttgagccaacataaggaggaagaatttgaagttgccaatgactctagtaatgatgatattgagaatatgctctcagaaacttttgatctaggcatggaag

SEQ ID NO: 178931 - DNA, 185 bp, Glycine max
cagggaagttggtgtgtgtcaccggtgctgccggttatattgcttcatggatgtcaagttcctacttgaacgtggttacactgtcagggccactgttcgaaacccaaatgatcacacgaaggtagaacatttgctaaaacttgaaggtgcaaaggagagactgcacctttttaaggcagatcttt

SEQ ID NO: 178932 - DNA, 188 bp, Glycine max
ctatagtaaaaaaaggacattcattcatctatggctacccttattgctcccagcaccactctccccaagaagatgctgaagctctcagaaaggcttttgaaggatggggaactgatgagaacactgtcatagtaattttgggtcatagaactgtgtatcagaggcagcaaatcagaagagtttatgag

SEQ ID NO: 178933 - DNA, 148 bp, Glycine max
ctataggctagtttatcgtgaggagaatatgaggttgttagttttctttgttttgaagtacttaatgtaccattggcataacatgggggctgatatcacaggaagcctctcgtagagcagactgaacatggtcagcgttcttaagagc

SEQ ID NO: 178934 - DNA, 187 bp, Glycine max
ctggtctaccaattgaccattctaacatggtcgatctttcaactcaaacttctgcactttgagcagggattggagcccaatgagtatatgtcctcctcatggaagggtgtcatcatcagtcatttccttattggaagcagttctagtaatgctcctgtagatgttggaggttttcataatgaatttg

SEQ ID NO: 178935 - DNA, 187 bp, Glycine max
cactcataacacaaagcacaaagcaaagctcatccttgagttaaaaaatggcgagcttcttccatggctctctcatccccatccttggctggcaaggccgtgaagctgggcccatcagccccagaagtgggaagggtgagcatgaggaagaccgtcaccaagcaggtctcctcaggaagcccatggt

SEQ ID NO: 178936 - DNA, 187 bp, Glycine max
ctataagctagtttatcgtgaggagcatatgaagttgtatgtcttctttgttgtgcagtagttttggtagcatggccatgccatggcgcaggctaccaaaggttccctctccgaatgataactggctatggtgagcgttcttcggaggtaaaatgcgcaagtcttaggcttgctgtcgaagcacaca

SEQ ID NO: 178937 - DNA, 192 bp, Glycine max
ctgttctctgtcactgctgcgtctctcgtaaccatgcctaagcaaatccacgagattaggatttccttctcactgctagaaggaaggacgcaacgtcggtgaagatcaagaggagcagagatgtggttaagttcaaggtcagatgctcgaagtacctctacacactttgtgtgtttgacccagagaaagctg

SEQ ID NO: 178938 - DNA, 183 bp, Glycine max
cagaatttaagaaggttagcaatttcttgagccggttcaagtcaatccccatattgttgagcttgacagtctaaaagtggcaggcgatgtatggtttggagctggtgtaatccttaagggaaaagcaagtattcttgcaaaaccgggtgtgaagctggaaatacctgacggagctgtgatcgc

SEQ ID NO: 178939 - DNA, 182 bp, Glycine max
gatcgagataactagaaacagtgtgatgaaaatgaaggtccttgttttctcgttgctacaattttcgtagcatggcaatgccatgcgtacgatatgttccctctccgaatgaacactggctatggtgcccgtactccggaggtgaaatgcgcaagttggaggcttgctgtggaagcacacaa

SEQ ID NO: 178940 - DNA, 186 bp, Glycine max
ctagcgagactattaccggtatttggcagaatttaaagctggcaatgaaaagacaacgtggcagatcagtcacttagagcatatcagacagcttctaccactgctgagagtgaactacaacctacacatcctattcgtttgggtctggctctaaatttctcagtgttttattatgagatattgaat

SEQ ID NO: 178941 - DNA, 186 bp, Glycine max
gatcgagataactagaaacagtgtgatgaaaatgaaggtccttgttttctcgttgctacaattttcgtagcatggcaatgccatgcgtacgatatgttccctctccgaatgaacactggctatggtgcccgtactccggaggtgaaatgcgcaagttggaggcttgatgtggaagcacacaacatc

SEQ ID NO: 178942 - DNA, 185 bp, Glycine max
cgtcggcggcaaggccggtgcactcggcgattccattaccgtcaccagggacagagcaagatcaccgtcacctccgacagcaacttctctaaacggtatctgaaatatttgaccaagaagtacttgacaaagcacaatgtgagggattggcttcgcgtgattgcatccaacaaggagcggaatgt

SEQ ID NO: 178943 - DNA, 186 bp, Glycine max
gagaagttttgtgcaaaatccttgggaacagtaattggttttgccatttcacgctgggaaagaacattcaagtactttcaagttcctttgtcaataagcaagaccaatacactgtggaaggagtgcagaatcttggagacaaagcagtgatgtgtcataggctaaatttcagaactgcagtatttt

SEQ ID NO: 178944 - DNA, 181 bp, Glycine max
atttgtgtgcacagcagatccagatattgagccagcaatgatggtgattacacagtgctatctgttatggcttatgattatccaactgaaaaattgagtgtgtatctctctgatgatgctggatcgcaaatcacgttctatgctctgctagaggcttcaaactttgcaaaacattgggtcc

SEQ ID NO: 178945 - DNA, 181 bp, Glycine max
gagtttgttgtgagctataagctagtttatcgtgaggagaatatgaagtgtttgttttctttgttgctgcagtagttttggtagcatggccatgccatggcgcaggctaccaaaggttccctctccgaatgaaaactggctatggtgagcgttcttcggaggtaaaatgcgcaagttttag

SEQ ID NO: 178946 - DNA, 182 bp, Glycine max
ttctagtcccaaagagctaacaagagattcaagaccggcatggctaatgagaggaacagaaaaaccacctcttcggcatcaaagatctcggtcacaagactctccttcagagtgatgcactctatcagtatatacttgaaaccagtgtctatccaagagagcacgagtgcttgaaagagata

SEQ ID NO: 178947 - DNA, 182 bp, Glycine max
catttctccatttccattttctctctcacttttcaagaatcgtaagctagggaaagtcttacccaactgtgagtgctgattaccagaaggccgttgagaaggcgaagaagaagctcagaggcttcatcgctgagaagagatgcgctcctctaatgctccgtttggcatggcactctgctgga

SEQ ID NO: 178948 - DNA, 187 bp, Glycine max
acagtacgatagtcccaccaagtctattctactatccatcattgtctacctctcttcccttagtactagaaatgaggctacaacaactcaacttgttctttctgttgctttgtgttgccaaagcaaacgggtctctgctcccattcatggatcctcccatcactctcttggctgatctctggtccgc

SEQ ID NO: 178949 - DNA, 183 bp, Glycine max
aaaagaagaagcgtgcgaataatggagggtggttatgctcgtcgactctgcaggtcggtataagatcaataaacaaagaagggcgtgaacaagccaaaaagttcggggtagagcagtttgaaatgcgacatttttcgaaagatcgtccatttttggaaaacctgaatctaggagaaggtgcta

SEQ ID NO: 178950 - DNA, 183 bp, Glycine max
ctggggagtatcctagtcctccctctgaatattgaacctgcctgggtgactgtacagtgttgcttggatggaagacagtgacatacacaatttgcaaacagaaactttacatcaacaatacgaattggtcaaacaaaggactatgaatggagattcaatttatggttcccacgtgatgcagta

SEQ ID NO: 178951 - DNA, 184 bp, Glycine max
caatcttaaagtttctttgactacagctcctctctcaagacctcgtgagttgaagaggattgcactataggtggctacactgtcaaaaagggaactcgtctaattacaaatctttccaagatccacacagatcataacgtttggtcaaatccattagagtttaaaccagaaaggttccttacga

SEQ ID NO: 178952 - DNA, 179 bp, Glycine max
tgttaattcaattatagcacctgctctgcttggcaaggacccaacgagcagactgaaattgacaattttatggtacagcagcttgatggaactgttaatgaatgggggtggtgcaagcagaagcttggagccaatgctattttggcagtgtcacttgctgtctgcaaggctggtgctgc

SEQ ID NO: 178953 - DNA, 182 bp, Glycine max
caagaacggcgagaagatcttcaaaaccaagtgcgctcagtgccacacgtcgacaaaggtgccggccacaaacaaggacccaatctgaatggtttgtttggaagacaatctggtacaactcctggatattcctattctactgctaacaaaaacatggccgtgatttgggaggaaaagaccct

SEQ ID NO: 178954 - DNA, 182 bp, Glycine max
atttcacttgagacagttatctttatctacgcaagagaagaatagaaatggatatcaggttgatggatttggactctccattgttcaacactctgcaccgaatcatggatctgacagaggacgcagagaagaacttgaacgctccgacgcggacatacgtgcgcgacgcgaaggcaatggct

SEQ ID NO: 178955 - DNA, 178 bp, Glycine max
gaataatcgagacacagatcatagtgatcattttgtaatttctcatgttatccgacgtcgctgcagatccaccaaccgttatggctgccttcagcggtgatgaaacggcaccgtttttcggcttccttggcgccgcagatgccctcgtcttctcctgtatgggagctgcctatggcac

SEQ ID NO: 178956 - DNA, 283 bp, Glycine max
ctcacctcaacacagcagaagcagcaatgaagaagaagatgatggcaagcacggccatctccctcgtcttcgccgcgctcttcctcttctcctccgtccactctttctacctccctggtgtcgctcctcgcgatttccaaattggtgaccccctctttgtcaaagtgaacaagttatcatctaccaagactcaacttccatatgactactacttcttgaagtattgcaaacccaaaacgatattgaacaatgcagaaaatttgggagaggttcttagaggtga

SEQ ID NO: 178957 - DNA, 279 bp, Glycine max
gggagtgtcaagagataccaatgcccatcacaatgctcgaggagatgtagccagacccaataccacaagccctgcatgtttttctgtcagaagtgctgcaggaaatgcctgtgtgtgcccccggggtattatggtaataaagctgtgtgccttgctacaacaactggaagaccaaggaaggaggacccaagtgcccttgaacttcaacttcatcaaattgttgcttttcactatatttttatcatctcccttgggccaatttaatgcactagcttactt

SEQ ID NO: 178958 - DNA, 281 bp, Glycine max
cagaagagaagatgggatctgtgtgtatctgagactgtgcatcatccctgttcctaacgattcttgtggacagacagcgcactggtattttaaacaggcctgatgggttctagattcccatctcatcagctcagcaatggcctgtatgtatcaggtcgccctgaacagcccaaagaaagaactccaacaatgacctcagttgccatgccttacactggtggagacatcaagaaatcaggagaattagggaaaatgtttgatatccccatggatgcttctaa

SEQ ID NO: 178959 - DNA, 123 bp, Glycine max
gcattagctatgtttgttaatgtcactttatgttatgtgggtaagtcacctaagacactccacgtacctacttgttgtctcttacgcggctttaataaatcttctgcccttgttccatattta

SEQ ID NO: 178960 - DNA, 197 bp, Glycine max
ctataagctagtttatcgtgaggagaatatgaagttgtttgctctctttgttgctgcagtagttctcgtagcatggccatgccatggcgcaggctaccaaaggttccctctccgaatgacaactggctatggtgagcgttcttcggaggtaaaatgcgcaagttctaggcttgctgtggaagcacacaacatccgag

SEQ ID NO: 178961 - DNA, 259 bp, Glycine max
cgtttttgttttcagaccaaaccctagctccgcatcgcaaccatgtcgaccaagcaaggtggaaaagctaagcctttgaagaaacccaagtctgataagaaggattacgacgaggttgacatggctaacattcagaagaaaaaggaagaggagaaggcgctaaaggagttgaaagccaaggcgcaacagaagggaagctttggaggttctgggctcaagaaaagtggaaagaaataagggctctttatcatgattgtat

SEQ ID NO: 178962 - DNA, 278 bp, Glycine max
cacacacgtaacttcatctgggtttcaggaaaaaagaaaaaggaaaacaatgggttccgataatcaccagaacttggagttcttgaaggagatcggtttgggctcttccaacattggctcttacattaatggccagtggaaagccactggttcttctgtcacttctgttaatccttctaacaatcagagtatagctcaagtgaccgaagcaactttgcaagattttgaggaggggttgcgagcttgcagtgaagcagctaagacatggatgactatac

SEQ ID NO: 178963 - DNA, 278 bp, Glycine max
tgcacactctctgctcctagggtttctccttcgagtgagggaaatggctcccaaaccgcctagtacgggtctgtttgttggactgaacaagggtcacgtcgtcaccaagaaggaattgcccccacgcccctcagatcgtaaggggaaaacagcaagacggtgcactttgtgaggaacctcataagagaggttgctggttttgcaccctatgaaaagcgtataactgagttgctgaaggttgggaaggataagagggcactgaaggttgcaaagagaaa

SEQ ID NO: 178964 - DNA, 284 bp, Glycine max
cgaataaagaagtacccaagcaaggtcatcaagaaggactccgcgaagaagaccgcgaagaaatctagggttaaggccttcgtgaagctcgtgaactaccagcacctcatgcccacgcgctacacgctcgacgtggatctaaaggacgctgttacccccgatgttctagccaccaaggacaagaaggttaccgctctcaaggagaccaagaagcgcctcgaggagaggttcaagaccggcaagaataggtggttcttcaccaaactcagattctgatttcgaaa

SEQ ID NO: 178965 - DNA, 282 bp, Glycine max
ccaagttccaagatgaagatgattcactttcttttcctctttgctcttgtctcgttcacttcccatgcttctgtcaatgatttctgtgtagcagacctaaaaggtccagatagcccttcaggctatcagtgcaagccacctaacacagtcaagtggatgactttgtgttctctggctttgtagctggaaacaccacaaacactttcaatgctgcattaacctccgcatttgttactgattttccaggtgtgaatggtcttggtgtatctgcggcacggttag

SEQ ID NO: 178966 - DNA, 273 bp, Glycine max
tgcaagatgggaaatcttcggatcattctgatgcgattaaggatctggtgggagggtactatgatgcaggggatgctatcaagtttaactttcctgcttcgttttccattactatgttgagtcggagtgtgattgagtacagtgcaaatatgaggctgctggggagcttgatcatgtgaaggagattatcaagtggggtactgattatcttctcaagagttttaatagcactgctgataccatcaccacccttgctgctcaggttgggcttgg

SEQ ID NO: 178967 - DNA, 280 bp, Glycine max
ctcagattcagcaattttctattttcttctctcatggcttcagcttccaaaaaggatttccctgctgatgacaaagctggaacagcagagaataaagcatccaaagatgaaacgtcatctaaagattctccagcagcacaaagagccatacagctacttctggacctgcaactggttttccaggcaacccttttgatcttcactgcaatgtctggcctgctcaatgatccaagtatcaaggaattggctgaacagatagcaaaagatccatcattcaacc

SEQ ID NO: 178968 - DNA, 273 bp, Glycine max
  unsure (1)..(273): unsure at all n locations
ataaatttgagagacaactctgcaaacatgttggtttatcaggacctccttacaggtgatgagcttctctcggactccttccgttacaatgaaattgagaatggaatgctgtgggaagttgaggggaagtgggttgttaagggagcgttgatgttgacattggtgcaaacccttctgctgagggtggagaagatgagggagtcgatgacgcagctgttaaggttgttgacatcngtgatacattccgacttcagagcaaccgcttttgataag

SEQ ID NO: 178969 - DNA, 268 bp, Glycine max
  unsure (1)..(268): unsure at all n locations
cttgaggctagggttaccggattcttgcgttttaatatctgccattcagaagcatggggcactccaatgtgtggaattctcacnctaagaactacggacctggttctcgcacttgccgtgtgtgtgggaatcctcatggattgatcggaaatatgggcttatgtgttgcaggcagtgcttccgaagcaatgccaaggaaattggcttcatcaagtatcggtgaaagattagttttccacctgctccacccggtttggattcttgcatc

SEQ ID NO: 178970 - DNA, 276 bp, Glycine max
cggctcgaggtttagaagaacaaagcttcccacctagctaggcctttctattgtagcactcaagtttctttcttcgtggaacttaagaaaatgaaggaaaaaatcagttggacagttgcagacgccgtggactataaaggcttccctgcagacaggtccaaaacaggtggttgggtacccgcagctcttattttagggattgaaatcgtggagaggctctccaccatggggattgcagtgaacctggtaacatacatgatctcaatcatgcatctg

SEQ ID NO: 178971 - DNA, 285 bp, Glycine max
cggtcgacttctctgggaaggactaccaggaacctccaccagcaccactcattgatgctgaggagctcacaaagtggtccttttacagggctcttattgctgagttcattgccactttgctcttcctctacattactgtgctcacagttatagggtcaagcaccagacggatcatgctgatgcgtgtggtggggttggcattcttggcattgcatgggcctttggtggcatgatcttcatccttgtctactgcactgctgggatttcaggaggtcacattaaccc

SEQ ID NO: 178972 - DNA, 277 bp, Glycine max
gagaagaccatcttccaccttaacccttctggccgttttgtcattggtggccctcatggtgatgctggtctcactggaagaaagatcatcattgatacctatggtgggtggggtgctcatggtggaggtgccttttcagggaaggacctaccaaggttgacagaagtggtgcctatatcgtgaggcaggctgcaaagagtgttgtggcaaatggccttgccagaaggtgcattgtccaagtttcctatgccattggtgtccctgagcccttgtcagt

SEQ ID NO: 178973 - DNA, 276 bp, Glycine max
attctctttgcgcagttccctacctctcctttcaagatgcagatcttcgtcaagaccctcaccggaaagaccatcacccttgaggtggaaagctctgacaccatcgacaacgtcaaggccaagatccaggacaaggcaggaattccccggatcagcaacgtctcatcttcgccggaaagcagctcgaggacggccgtaccctcgccgactacaacatccagaaggagtcaacccttcaccttgtccttcgtctccgtggtggcatgcagatcttcg

SEQ ID NO: 178974 - DNA, 274 bp, Glycine max
cattccattctctctgtgtatttccctacctctcccttcaagatgcagatcttcgtcaagaccctcaccggcaagaccatcacccttgaggtggaaagctctgacaccatcgacaacgtcaaggccaagatccaggacaaggaaggcatccccccggaccagcaacgtctcattttcgccggaaagcaacttgaggacggccgtacccttgctgactacaacattcagaaggagagtactcttcacctcgtcctccgtctccgtggtggcatgc

SEQ ID NO: 178975 - DNA, 274 bp, Glycine max
cttaagcttgctactgagtttccacactgcataccttaggtctcccgaattcgaagttaatttgcaagatggctaaggaaaaggctcagatcaacattgtggtggttggtcatgtggaccctgaggaggcaaccaccattaacgagctgaagaagcctgttgtggagaaagaagctccagggcatgccatatgagggcatgcacgtacggcctcggaggggaaccagaaaattatgttaacaaaataatctggaaccctaatgtatcagtgtca

SEQ ID NO: 178976 - DNA, 273 bp, Glycine max
cagaagccagattgcaatatgtagactttactgtgccatatgcagaatcaggattgtcaatgatagttacagaaaagtccaacgaatccacatggatgtttatgaagcccttcacctggcaaatgtgggtggcaactggggccgtttgacttacacaatggtagttgtgtggtacctggagcgggaaccaaatcctgagtttcaaggcaattggaaaagccaagtcagcactgctcttatgtttaccttctcctctctattctttgctcaaag

SEQ ID NO: 178977 - DNA, 272 bp, Glycine max
caagtgagtcatcggtggttgagaatggtggagaaggcgaagggtaggaaggaggaggtggttaccagagagtacaccattaacctccacaagcgcctccatggctgcacatttaagaagaaagctcctaaagctattaaggagtaaggaaatttgcccaaaaggccatggggaccaatgatgtgagggtggatgtgaagttgaacaagtttgtctggagccagggaatcaggagtgttccaaggaggattagggtaagactcgctcgcaag

SEQ ID NO: 178978 - DNA, 275 bp, Glycine max
agttaatgagagatttggcaaatgcttgcttgagttaagtggtaacaatgcaataattgtcatggatgatgcagacatcaaattggctgtacgctctattttgtttgctgctgtgggtactactggtcagcggtgtacaacttgtcgtagactgtttctgcatgacagtatttatacagacgtactagaccaacttgttgaagtctacaaacaagtcaaaattgggaaccccttggagaaggggactctagttgggcccttgcatactcgtactt

SEQ ID NO: 178979 - DNA, 279 bp, Glycine max
gcgcaagacaacaaaatccccaaaatatctctcgctctgaaaccgccatggatttgcagcagagcgagttcgatcgcctcctgttcttcgagcacgctcgtaaggccgcagaagccgaatacgagaagaaccctctcgacgctgataacttaacaagatggggtggagctttattagagttgtctcagtttcagagttttcctgaatcgaagaaaatgacccaagaggctgtttcaaagctagaggaggcgcttgcggtgaatcccaagaagcatgaca

SEQ ID NO: 178980 - DNA, 280 bp, Glycine max
cattaacatgactctttatttataatgcaggagctattatagatgcacgagtcagaagtgcggtgtaaagaaaagggtggagaggtcattccaggacccaacaattgtgatcacaacatacgaagggcaacacaaccatcactgtccagcaactctgaggggcagtgctgcaagcatgttgtcatcaccttccttttttggttcctcttatatggcgtcaagcttaccccaagattttcttgctcagttggttccaagttatagccaaattaatgatcac

SEQ ID NO: 178981 - DNA, 275 bp, Glycine max
gctggaattgcattgaataagaactttgtgaagcttgtttcttggtacgacaacgagtggggatacagctcacgtgtcattgatcttcttgtattcgttgccaagaagtctctttaaggtgttacttcaaagtagcttgtcttacattattaccgtatgtttatgtttagctgcgatttagtgtcttgctcgagcaaaaaatgagaggtcctgaataaatcggtttctgaaaccagtggtgttacttgttggaggagcattagctcttttttgga

SEQ ID NO: 178982 - DNA, 272 bp, Glycine max
tgatttgcagggttggattataaacttcaagtagggattggacacttttatcatatattctacgagggatgtttagcaaattttgaaattggagaggaaggagaagaagcatccaagctttaccctgaagtgaattacacacgatggacgagtacctaaaaatttatgtgtaaaaggaactcattcagtaggagttcagtgattcaaacaggaacacggtttttagctacaataaccttaatttaaggagatgattttgtgcttataattcg

SEQ ID NO: 178983 - DNA, 273 bp, Glycine max
tgggttaacaagggcgacgcaccggcattgccagagactcttaaaaattacaacaagctgttgtctcttggcttcaagattgtattcttgtcaggaagatatcttgacaaaatggccgtaacagaagcaaacctaaagaaggctgcttccacacatgggagcagttacattctcaaggatccacatcttatcactccaaatgcactttcatacaaatcagcaatgagagagaatctgttgaggcaggcctacagaattgttggaatcattgga

SEQ ID NO: 178984 - DNA, 269 bp, Glycine max
  unsure (1)..(269): unsure at all n locations
gtgatttcagtgagtgatcggtgttcacttgatctcatcataatcgtcagcgtcaattgaagaagatgccgatcagaaacatcgccgtcggaaggcctgaagaggcgactcaccccgacacgttgaaggcggctttggctgattcatctcaaccttcatcttcgtgttcgccggctcaggctccggcatcgcctacaacaagctcaccgacaacggcgctgncacccctgccggcctcatctccgcctccatcgcccatgcattcgccc

SEQ ID NO: 178985 - DNA, 271 bp, Glycine max
caaggacttgtgcgcaggatgaagttttgaggatctctgtgcctccacagactggtgatgttcctttgcagaccctttatagcctcaatggtgacgttattgcttgggggtttaaggccacttctagtgttgtcaaagtgactttccaaaccctggagttcaagaagatccatcttgtggccctcttttggatgccattgctatcagagagttctacccgccaatgcctacaagagttaacttggtaaaacatcctggctttgaggagggt

SEQ ID NO: 178986 - DNA, 269 bp, Glycine max
gttttgttctcattctgtgactctgtgcttagttaacgttaacagtgacttaagatggaggattctgcagatgtcacccacgatgttgtgtccctcctctcttctcctcaaagggactttcttcttcgaaacaacggcgacacgttaaaattgacagcttgaagggtaagaaacttggtttgtatttttcggcatcctggtgtggtccatgtcaaacatttacgccaactttggtggatgtgtacaatgaggttgcaaaaaaaggtgac

SEQ ID NO: 178987 - DNA, 264 bp, Glycine max
caaacctaacgcagcatcgctattctcttcattccatggctttgcccaaccagcaaaccgtggattaccctagtttcaaactcgttatcgtcggcgatggtggcacaggaaagacaacctttgtgaaaaggcatctcaccggagaattcgagacgaaatatgagccaaccatcggtgtggaggttcacccattggattttttcacaaactgtggaaagattcgattttactgctgggatactgctggacaggagaaatttggtg

SEQ ID NO: 178988 - DNA, 263 bp, Glycine max
tgacaacccgatttaagaagaaccgcaagacgcgcggccacgtcagcgccggccacggccgtattggaaagcaccgcaagccccccggcggccggggaaatgccggcggcatgcaccaccacaggatcctcttcgacaagtaccacccggggttcttcgggaaggtagggatgaggtactttcataagctccgcaacaaattctactcccccatcgtcaacatcggaaagctatggtctctgataccccagacgcgaaggaca

SEQ ID NO: 178989 - DNA, 268 bp, Glycine max
cgacgccttcagcaaccatgtcgaggagaaaggttagggagccaaaggaggaaaatgtcactcttggtccagccgttagagacggtgaacatgttttcggcgtggctcgcatctttgcctccttcaacgacaccttcatcatgtcactgatttgtctgggagggaaacccttgttcgcatcactggtgggatgaaagttaaagctgacagagatgaatcatctccatatgctgctatgcttgcagcacaggatgttgctgccagatgt

SEQ ID NO: 178990 - DNA, 268 bp, Glycine max
ccaagaaggagaccctcattgaccttacagttatagaagactattactggcaagacggagaccctcattgaccttacagttatagaaatcttgtcaaggcacgcatctgatgagttctaccttgggcagagagatggtggtgactactggacttctgatgccggtccattagaggcatttaagaggtttggcaagaagcttgaagagattgacaagaagcttatagagaagaacaaagatgagacattgagaaaccgctatgggccag

SEQ ID NO: 178991 - DNA, 270 bp, Glycine max
atttggtagcctttaaaaagttatttagtatttcacttgaccaactcaaccactgtagatatcactcacgagtcacaaagtggggatatcataagacagcaagaaagaaaatgggagtggagaagcagttgttgaggcctggcaccggtcccaagccaattcccggtcagaacgtcaccgttcactgcactggtttcgggaagaccggtgacctttctcagaaattctggagcaccaaggatcctggccaggaccctttcactttcaaaa

SEQ ID NO: 178992 - DNA, 273 bp, Glycine max
ctccttctgcgaaatcacttcctcttccaaggaagaagctcttacctttttggagagccacaatttcgacctagacgctgccgtttcgactttcctcgacaacgccaacaaccccctcatccctctcaacgacgacctcgccattcccaaccccaacgccgtttcccctccctcagattctcactctccggacttcaacccttctcgctcgccgtctccgtctccttcgcccacccgcaccccctacgagctccgatcccgtaggtctctcgg

SEQ ID NO: 178993 - DNA, 271 bp, Glycine max
gaaaggctgaagaacacatagagagagagagagaagtgcagaaaaaatgagactgttcgatccatggcctgttttcttcaagagagaatggaagcggaattggcccttcttggttggattcgccatcaccggaactctcatcacaaactttcccttggtctctctgaggaggaagccaaaaagtcgaaattcgtccaggcacacaagaggtgactttagaatggaagatttgcagtggctttgcacattgtattagatgtgtgaagagagc

SEQ ID NO: 178994 - DNA, 270 bp, Glycine max
tcaatttctaattagggtttcgcttagagtaaccaataaccatgggagtcttcacctttgtcgtccgcaaatccggcagcgaatggagcgccaagcaacattccggcgacatcgaggcctccgccgattccaccttcgatctccaacggaagctcgtgcaagccgctctcgccgttgattcctccggtggagttcagtcctctttctctcccgtgtctcctacctccgctgtgttccaggtgatagtgggtggtgcagtattcgttggag

SEQ ID NO: 178995 - DNA, 265 bp, Glycine max
tcgagctcttctgcggcgtagacctgggacactccaacgtttggaattctcacccaaaaaactacggtcctggttctcgcacttgccgagtgtgtgggaatccacatggattgatcaggaagtatggccttatgtgccgcaggcagtgcttccgtagcaatgccaaggaaattggcttcatcaagtatcgctaaaagagctgttgtcacctacggaccaatattatgttctggcactaggatgttttgaagatgttatgtttgaa

SEQ ID NO: 178996 - DNA, 178 bp, Glycine max
cgaaatgtcgggatcggaggacgagggaggagaagagtacctcttcaagatcgtcataatcggagactctgcggtgggcaaatccaaccttctctcccgctacgcccggaacgagttcaacatgcactccaaggccacataggtgtcgagttccagactcagtgcttggaaatcgact

SEQ ID NO: 178997 - DNA, 268 bp, Glycine max
cttccctcaccatggccgagtcctgcctcctctcttctccctcctcactcttccacaccaaaaccaaaccatctctctttacaaccccctccaaacccctcacactccaattttcatgcctcaactcctccgtctctctctccctcgccgcaccaactcaccgttctccccttgtaactttcgtggcccaaacttccgattgggctcaacaagaagaagaacagagcctcgctgaaaccgaagcgggcctggaaagttgggagcccaa

SEQ ID NO: 178998 - DNA, 266 bp, Glycine max
ccggagggaatttataagctcatgacatacataagggacaactacaataatccaccagtgtacattaccgaaaatggcgttgcggaatcaaagaacgactcacttgcaatcaatgaagcccgaaaggatggtattcgattagataccatgatggccatctcaaatccctgcttcatgcgatcaaagatagagttaatgtgaagggctactatatatggtcattttcagatagctttgaatgggatgctggttacacagctcgattt

SEQ ID NO: 178999 - DNA, 278 bp, Glycine max
ctcaaattgaagtgattagattctctaccaagtcaattgagagggagataaactcagtcaatgacaaccctttgattgatgtctcaaggaacaaggcccttcatggtggtaacttccaaggaacacctattggagtgtccatggataacacccgtttggctcttgcatcaattggcaagctcatgtttgctcaattctctgagcttgtcaatgactattacaacaatgggttgccctcaaatctcactgccagcagaaaccccagcttggattatgga

SEQ ID NO: 179000 - DNA, 292 bp, Glycine max
tgtgataggagaattgaagaagggtttgaatccaccatcactgacaaatctggtatttgtgacgccttacatgaccacagctgtcaaaacaggcattgtcgttggcattatatcgcttgcggaaggaatagcagtgggaagaagctttgcaatgtatacaaattacaacattgatggcaacaaagagatgatagctattgggaccatgaacgtagttggttctttcacctcttgctacctcacaactggaccattttcgcgttcagctgtgaactataacgctgatgcaaga

SEQ ID NO: 179001 - DNA, 290 bp, Glycine max
catttttggacaaggcgtttatcaatgctgcaatgagtattgaccctgagtggaagatgataaaaagagatgaaggacgaattgagaagtggattctgaggagagcctttgatgatgaagagcatccttatctgccaaagcacattttatacaggcagaaagaacaattcagtgatggagttggctatagttggattgatggccttaaggcccatgctgcaaaacatgtgactgaaaaaatgatgcttaatgctggtaacatttacccccacaacaccccaaaaccaagg

SEQ ID NO: 179002 - DNA, 289 bp, Glycine max
caagaatggcacttcgttgcttggtgatgtccctttctgttctcttcactcttggtcttgcgagagaaagccatgccagagacgaagatttttggcatgctgtttggccaaacactcccattccaagttcattgcgagatcttctaaagcctggccctgcaagtgttgaaatcgatgatcaccctatgcaaattgaagaaacacagtacccgaaaaccttcttctataaagaagaccttcatccaggcaaaacaatgaaagtacaattcagcaagcctcccttcaacaa

SEQ ID NO: 179003 - DNA, 284 bp, Glycine max
gagataactagaaacagtgtgatgaaaatgaaggccttgttttcttcgttgctacaattttggtagcatggcaatgccatgcgtacgatatgttccctctccgaatgaacactggctatggtgcccgtactccggaggtgaaatgcgcaagttggaggcttgctgtggaagcacacaacatctttggctttgagaccattcctgaagagtgcgttgaagcaacaaaggaatacatccatggcgaacaatatagatcagactccaaaacagttaaccacaagctt

SEQ ID NO: 179004 - DNA, 276 bp, Glycine max
tctccatttccattttctctctcacttttcaagatcgtaagctatgggaaagtcttacccaactgtgagtgctgattaccagaaggccgttgagaaggcgaagaagaagctcagaggcttcatcgctgagaagagatgcgctcctctaatgctccgtttggcatggcactctgctggaacctttgacaagggcacgaagaccggtggacccttcggaaccatcaagcaccctgccgaactggctcacagcgctaacaacggtcttgacatcgctgt

SEQ ID NO: 179005 - DNA, 284 bp, Glycine max
tgcaatcagaggaagagaagagacactgaggtcgttggcgagaatgggaagaaagaaggggtatgttgagttcgaggagtcgccgccggacgattttgatccggcgaatccgtacaaggacccggtggcgatgctggagatgagggagcacatcgtgagagagaagtggatccaaatcgagaaggccaagatcattagggagaagctccgctggtgctaccgcatcgaaggcgtcaaccacttccagaagtgccgccacctcgtcaaccagtatctcgatccac

SEQ ID NO: 179006 - DNA, 227 bp, Glycine max
ttgaaacattccccggttcaagcacgttgaagactacaacaggtattccattctcttcacaatatgccagcgccatcatgtccatggaggtgacgcccctagaaacaacttccctaaaggaaatgtgatcgagtgttatattatcattacggggatggcagtcaaagacgccattcacattagtacctttcagaaccgcatcagcattaagctcagctagatcgcga

SEQ ID NO: 179007 - DNA, 274 bp, Glycine max
agcaagaacactgttccaatacggaatctaagccaaagcaaaccaaacatcttgaatcatgggttcaacaggtgagactcagattacccccacccacgtatctgatgaagaagcaaaccttttcgccatgcaactagccagtccttctgtccttccaatgatcctcaaatcagcacttgagcttgatctgttggaaatcatagccaaggctggccctggtgttcatctttcccccactgacatttctcctcagctcccaacacagaaccctgat

SEQ ID NO: 179008 - DNA, 222 bp, Glycine max
ccgtgttttcagctccggtaacctctccttctccgccgccgttgctatctccgccgtgaccttccatccctcaacgccccacagatcttcaatttgattgcttgggtcaacaatttctgtcattctcaatcatggcaactagacttcagtttgaaaataattgtgaagttggagtcttctctaaactcaccaatgcttactgtttggttgcgattggaggtt

SEQ ID NO: 179009 - DNA, 285 bp, Glycine max
ctagaaacagtgtgatgaaaatgaaggtccttgttttcttcgttgctacaattttcgtagcatggcaatgccatgcgtacgatatgttccctctccgaatgaacactggctatggtgcccgtactccggaggtgaaatgcgcaagttggaggcttgctgtggcaagcacacaacatctttggctttgagaccattcctgaagagtgcgttgaagcaacaaaggaatacatccatggcgaacaatatagatcagactccaaaacagttaaccaacaacttactttt

SEQ ID NO: 179010 - DNA, 280 bp, Glycine max
gttgatcgagataactagaaacagtgtgatgaaaatgaaggtccttgttttcttcgttgctacaattttggtagcatggcaatgccatgcgtacgatatgttccctctccgaatgaacactggctatggtgcccgtactccggaggtgaaatgcgcaagttggaggcttgctgtggaagcacacaacatctttggctttgagaccattcctgaagagtgcgttgaagcaacaaaggaatacatccatggcgaacaatatagatcagactccaaacagtta

SEQ ID NO: 179011 - DNA, 276 bp, Glycine max
tgaagctgctgaaattctggattatattgaactcttcaaagtcttcctaagactaagctgttggatttgttccaaagcaaatatgtgccctctgtagttattggggtcggcttaatggcatgtcaacaatctgttggaattaatggcataggattctacacagctgagatttctgtagcagctggactttcttcaggaaaagctggtaccatagcatatgcttgtatacagattccatttacattattgggagccatttgatgaacaagtcggaag

SEQ ID NO: 179012 - DNA, 284 bp, Glycine max
tgggagggtccgaagaagcacaacgttggacgaagtgattctcgttctgttcttctactcacaagagcaaccatcacaacatcagaatcagaaacagcaatggccaacactaacttggacgatgttccctctctggatctcatgactgagactcttcgtcgcttcaagtgctcttccaaacctgacaagcgtcttattctcattggcccacctggatctgggaaaggcacccagtcaccaatcataaaagatgagtactgcttatgccacttagctctggtgat

SEQ ID NO: 179013 - DNA, 286 bp, Glycine max
ctttgccccttttgttgccctaatttcaaccatgcctcgccgtagctccggtggaagatctgcccgtcctgctcctcgggcagctcctcgtcctgctccagttcaccatgctcctcctccagcccctgctcagagtggtggtggatctatgcttggtggcattggttcaaccatagctcaaggtatggcttttggcaccggaagtgcagtggcacacagggctgtggatgcagtcatgggtcctcgtaccattcaacatgaaacagttgttacagaggtgctgctg

SEQ ID NO: 179014 - DNA, 283 bp, Glycine max
caattatatataatctcctgctgactcgtctttttctttggaataatgatatactgtcaaaaaccatatataatctcctgctgacacatctttttcttttcttttctttatatcattttccttattagtttctttgtttactgcagtgacgagcttaggaaaattgttacttctgacctgagaaagttgttgggagcagagggggaaccaacatttgttaaccatttctattggagtaaaggctttcctttgtatggacgtaactatgggtcagttcttaagc

SEQ ID NO: 179015 - DNA, 282 bp, Glycine max
ctcacacacaccactttatatacgcacacgagagtcggaagcactactctcttcgccgcttgctctctctctctcgctctttcagctttgactttggtggaaactaaagactagtcaaaatggtgaagttcacagctgaagagctgcgtcgcattatggactataagcataatatccgtaatatgtctgtcattgctcatgttgatcacggaaaatcaaccctgactgattctcttgtggctgctgctggtattattgctcaagaagttgcaagtgatgccg

SEQ ID NO: 179016 - DNA, 281 bp, Glycine max
acccactcctttctctgtctccatcgtttcgcattgcacaagcactctctctttcccttaccctttttcaggtttcaacgctccaactatccatggcaaaccgctggctcagacccgaggtgtatccactgttcgctgcggttggtgctgctgttgggatctgtggattccaactggttcgtaatatctgcatcaaccctgaagtcagggtgaacaaggagggaaggaaggcaggagttttggagaactttgctgagggagagaagtatgccgacacttcc

SEQ ID NO: 179017 - DNA, 281 bp, Glycine max
cttcctctaccgctttcttcctcctcattaaggcgcaactctctctctctctttctttttctttgttaggtttggtgacacttagttagaaagagcgtgcgaagagggtggggagaagatttagtgttgtggccatggcggagtctgagaagagtactgtgcttgttacgggagccggtggtcgcacaggacaaatagtttacaaaaacttaacagagaggccaaaccaatatgtggctagaggtctggttagaacagatgacagcaaacagacattggtg

SEQ ID NO: 179018 - DNA, 279 bp, Glycine max
tgatactcctgatatcagaaaaagaaaaaagaaaaaaatgtctctagtgactgcagagatcaaagccaaagcagaggtgtatcatggagatgaactctgccaagagaagtcaaagttgctgctaaaggaggtagggctacctaatgggcttttgccattgaaggacattgaggaatgtgggtatgagagggatagtgggtttgtgtggctgaagcagaagaagagcacaaaccacaagtttgagaagattgggaagctggtttcctatgctctgagatc

SEQ ID NO: 179019 - DNA, 277 bp, Glycine max
attgataatcagtttaaggtctttaagctcatctttcaagcgattgataaggaaaatgacagtgctattatcaaatggacaattgaatatgagaggattggtgaggaagttgatcctccatatggctacattgaatacgtccacaaatgcactaaagatattgatgctcatcttctcaaggcataactccaaataaacaatataattaacaagaaataatggactttgccttattatctttataatcgagaaggatatgcttgctaagtcttcgatt

SEQ ID NO: 179020 - DNA, 274 bp, Glycine max
gtggagaaaacggacatgagggcaaagagaatggcacgtaaggcaggagcattggtgatatttgttgttgatgcaagtggaagcatggcattgaacaggatgcagaatgcaaaaggtgcagcacttaagcttctggctgaaagttatacaagcagggatcaggtatctataattccattccgtggagatgcagctgaagttctcctgccaccttctagatcaatttcaatggcaaggaaacgtcttgaaaggcttccatgtggtggaggtcccc

SEQ ID NO: 179021 - DNA, 277 bp, Glycine max
ggaaaatttattgctgtccgtgaaccaacattcgatatcttggcttggagaatatgacaagaatgttgatggttactgatgtacaagatatcattaaaagacatcaagctcagattattacctcattgaaggatcctgacatcagtattcggaggcgtgctctagatttgctttatggcatgtgtgatgtttcaaatgcaaaggatatagttgaagaactactgcagtatctcagcacagcggagtttgcaatgcgtgaggacttgtcactaaagca

SEQ ID NO: 179022 - DNA, 282 bp, Glycine max
gactgagaggaagagagagggagattctttgtttgctaccttctctcggaaaaatggttacgttcaggtttcaccagtaccaggtggttgggagggctcttcccacggaagcagatcagcaccccaagatctaccgaatgaagctctgggccaccaacgaggttcgcgccaagtccaagttctggtattttctgaggaaactgaaaaaggtgaagaagagcaatggccaagtgcttgccatcaacgagatttttgagaagaacccaaccaaaataagaacta

SEQ ID NO: 179023 - DNA, 109 bp, Glycine max
ggacattgaacatagcatgtcttctttccaagaacaggatccatcatgacacacatggcttctttgagggctttgctattattgcaatagtgatcacaatccacacaac

SEQ ID NO: 179024 - DNA, 237 bp, Glycine max
ctttgcctctgacccagtttaggtatggcttcgaaacgcatcctgaaggagctcaaggatttgcagaaggatcctcctacgtcatgcagcgcaggtcctgtggctgaagacatgtttcactggcaagccacaatcatgggacctgctgatagcccatatgcaggtggtgttttcttagtttcaattcattttcctcctgactactccttcaagacaccagaggttgcttttcggact

SEQ ID NO: 179025 - DNA, 279 bp, Glycine max
gcttcttgttgttggaaagaaaccctagcaagcggaacaatggcagacgttgaggtcgatgtggcggctgcagcagcagcagggcagccgaagaagagaacgttcaagaagttcagtttcaggggcgtggatctcgatgcgcttctggacatgtccaccgatgaactcgtgaagatgttcagtgctcgcgcacgtagaaggttccagagaggcctcaccagaaagcccatggccttgatcaagaagcttcgcaaagcgaaaagagaagctccccaggtg

SEQ ID NO: 179026 - DNA, 277 bp, Glycine max
ctgctgttcctgcgcgtgaacaagctcagccaaagccatggttacgcataccaatgttatccccaacggacacttccgtaagcactggcagaactatgtgaagacctggttcaatcagccagcacggaagacaagaagacggttggctcgtcagaagaaagctgtgaagattttccccagacctacagctggacctcttagacccattgtacatggtcaaactttgacatacaacatgaaagtgagagctggaaggggattttcccttgagaactca

SEQ ID NO: 179027 - DNA, 273 bp, Glycine max
gagaggctgaatcaggaggaaagctcggggaattggattcatatgagattgaaggtggcgaaacaaaagctgaaattcttcagaatctggctgagttccagttttcttgtgtgatgtacaatgccgtgttggagaatgcctgtagtgagcaaggagcaagaatgtctgcaatggacagctctagcaggaatgctggggatatgcttgatcgtctcacgctcacctataacagaactcgtcaagcatcaatcaccactgaattgatagagttat

SEQ ID NO: 179028 - DNA, 274 bp, Glycine max
cagcagatcaatctctctctctctctcaaccataatagtcatgggtttgaaggaggattttgagcagtatgctgagaaagcaaagactttgccaccgactcaatcaaacgaagacttgcttatcctttatggattgtacaaacaggccaccgttggacctgtcaacaccagccgtcctggaatgttcaacatgagggacagagctaaatgggatgcatggaaggctgttgaagggaaatccaaggacgaagcaatgggtgattacacattaagg

SEQ ID NO: 179029 - DNA, 268 bp, Glycine max
tcgagctaacacaagttgtactgagtccacggtctggaagctagatgcctttgatgattcaactggacagtggtttgtgaccactggtggtgtgttgggaaaccctggcaaggataccatcgacaactggttcaagattgaggagtatgatgatgattacaagctcgtgttttgccccacagtgtgcaacttctgcaagcctttgtgtaggaatgttggggtgtttagggatagtaatgggaaccagcgcgtggctctcatgatgagc

SEQ ID NO: 179030 - DNA, 276 bp, Glycine max
aaagtaggatacaaccctgacaagatccttttgttcctatctctggttttgagggagacaacatgattgagaggtccacaaaccttgactggtacaagggtccaactctgcttgatgcacttgaccagattagtgagcccaagaggccctctgacaagcccctcaggcttccccttcaggatgtgtacaagattggaggtattggaactgtgccagtgggacgtgttgagaccggtgtcttgaagcctggaatggtggtgacttttgaccaactgg

SEQ ID NO: 179031 - DNA, 277 bp, Glycine max
gtcttcctctgtcaccaatggcgatgattctctcactggccacatcatatctacaactcttggaggcaaaaactggggaacccaaacagactattagttacatggctgaacgggttgtaggaactggatcatttggaattgttttccaggcaaaatgtttggaaactggggaagcagtggccattaaaaaggttttacaagacagaagatacaagaatcgtgaactacagttaatgcgtgttttggatcatccaaatgtcatctctctgaagattgt

SEQ ID NO: 179032 - DNA, 279 bp, Glycine max
  unsure (1)..(279): unsure at all n locations
ctcgagccgttgtgctctgctcgtgctctagggttatcatatctccatttccatttcctctctctcagtttccaagaatcttaagctatgggaaagtcttacccaaccgtgagcgctgattaccagaaggccgttgagaaggcgaagaagaagctcagaggcttcatcgctgagaagagatgcgctcctctaatgctccgtttggcatggcactctgctggaacttacgacgtgagctcgaagaccggtggtcncttcggaaccataaagcacctccga

SEQ ID NO: 179033 - DNA, 278 bp, Glycine max
gttgtgaaacaggctgcaatctgacttgatggctttgatgatgagtggagattctgggatatctgcgtttcctgaggatcacaacatattcttctggaagggaacaataacaggaagcaaagatactgtgtttgaaggcacagagtataagctatcactctccttccccaatgactaccctttcaagcctccaaaagtcaagtttgaaacaacctgcttccaccccaattttgatgtgcatggcaacatatgcttggacatactccaggataatggtc

SEQ ID NO: 179034 - DNA, 274 bp, Glycine max
gtgacgagcatcatggcctcgagagcagtgctattgttggctatgtgtgtgcttccggccatggttgtggccattcgcccagcaaagaaccctttttgcgtgaagggtcgcgtctactgtgacccttgccgtgctggttttgagacctcagcaaccacctacattgccggtgctgagattatgttgcaatgcaagagcagggttagcaacgaggttgtgtacaccaagaaggggtacactgactcaaatggagcatacacaatgtacgtgacga

SEQ ID NO: 179035 - DNA, 273 bp, Glycine max
ggagatggctctgggaagaggcgtgcagtggttctactactttgcttcttgctgcttcactctcagatggctcgtgctgccacctacacagttggagattctgggggttggacctttaacactgttgcctggcccaaaggaaagctctttcgggctggtgacacacttgctttcaattatagccctgggactcacaatgtggtggccgtgaacaaggctggatatgatagctgcaagactccaagaggagccaaagtgtataagtcaggacgg

SEQ ID NO: 179036 - DNA, 274 bp, Glycine max
cgaatatcttgttgtttggagcgatccgagaaaaactctgtaaacatgttggtttaccaggacctccttacaggtgatgagcttctctctgactccttccgttacaaggaaattgagaatggaatgctgtgggaagttgaggggaagtgggttgttcaaggagcagttgatgtagacattggtgcaaacccttctgctgagggtggaggagaagatgagggagttgatgatgcagctgttaaggttgttgacattgttgacacattagacttca

SEQ ID NO: 179037 - DNA, 274 bp, Glycine max
gaggaaacaagccagcaagctcagagagcaagttgccaaacagcaacaggctgtaataaagcagttcagtagtagtggttatgagagttcagatgttgtggtcatcgatgaggtcgaaatgcagagacatcaccagctggaaaagttgtatagggccacacgttcagggaaggacttccagaaggaaattgttaaagcagcagaaacatttacagctataggttataagcatattgaaacaggaacaaaactttctgaggattgctgtaatatg

SEQ ID NO: 179038 - DNA, 269 bp, Glycine max
atctgtaatttgtgtctgctcctcgctcttctccgccacttctgaatctattgaatcaacaatcatgtcggacgaagagcaccatttcgagtccaaggccgacgccggagcctccaaaacctaccctcagcaagccggtaccatccgcaagaacggctacatcgtcatcaaaggccgcccctgcaaggttgtggaagtttcgacttccaaaactggaaagcacggtcacgctaagtgtcactttgttggaattgatattttcatgccaa

SEQ ID NO: 179039 - DNA, 277 bp, Glycine max
ctcttgctttgcttcctcttctatttgctttcttgttagctgccactacggaatcaagaaaagatccaggggaatattggaaaatgatcatgaaagatcaggaaatgccagtaggacttcaaggtcttgtttcatttcaatctgaaaataaccctaagactcaagagcagcttggtaaaggttccaaaaaccattgtgaagagtctctagttacaaatacacaagttaacagtgacttcgaacccataccaagtgttaccaaatatgatgtttggaa

SEQ ID NO: 179040 - DNA, 273 bp, Glycine max
ctctgtctctctctctctctctcgatcaatcatggctttgcccaatcagcaaaccgtcgattaccctagtttcaaactcgtcatcgtcggtgacggtggtacaggaaagacaacgttcgtgaaaaggcatcttaccggtgaatttgagaagaaatacgaaccgaccattggagtggaggttcacccattggatttcttcacaaactgtggaaagattcgcttctactgttgggatactgccggacaagagaagtttggtggcctcaggatgga

SEQ ID NO: 179041 - DNA, 273 bp, Glycine max
gtgactcaacagaaggtaaagctacgacaagatagaagaggagcttgttacaggcttatctcgtgtatcttgggaaaaagtagatgttagcttccgcaatagcaagcatagattttcttctcatactatcattcaggtcaaagaccaaatcacacaaatagaaggggcggctgttatacagcatatgattgatcattttcttctctagaagctttttgcctctaaagtatgctccctgcttgggaatataagcttctcattggatgaaacaat

SEQ ID NO: 179042 - DNA, 236 bp, Glycine max
gcataaatttgagagaaaatctgcaaacatgttggtttatcaggacctccttacaggcgatgagcttctctcggactgcttccgttacaatgaaattgagaatggaatgctgtgggaagttgaggggaagtgggttgttaagggagtcgttgatgttgacattggtgcaaacccttctgctgagggtggagaagatgagggagtcgatgacgcagctgttaaggttgttgacattg

SEQ ID NO: 179043 - DNA, 265 bp, Glycine max
ggacatccgaatgaaacataggaggtgactttgccggcagaggaagttcctccggagcttccggagcctgcactcggaatcaattttgctagggatggcatgaaccgcagggactggctttctctggttgctgtgcacagtgattcgtggttgctctctgtggccttctatcttggagctcgtcttaaccgcaacgaaaggaaacgtttatttagcttgatcaatgatcttcctactgtttttgaagttgtgactgataggaacc

SEQ ID NO: 179044 - DNA, 272 bp, Glycine max
gcgagacgagccgtttctattaatgaaggacaagtggctataacactacttgcattcagttagactttgatagtttgattagctctaataaggttaaggaccagagagagaaagagaaataagaagaaaaacacaagatgggttattggaagtctaaggttcttcccaagatcaagaaggttttcgagaagaatagcaccaagaaagctgctgctgctgaggccaccaagtcctttgatgagtcaaaggaggaatacaacaaacctttgaag

SEQ ID NO: 179045 - DNA, 275 bp, Glycine max
gtaaaacagagacgcaaaatgaagacgatcttgtcgtctgagaccatgaatattcccgacggcgtgagcatcaaggttcacgctaaggttatcgaggttgagggccctcgtggaaaactcgtgcgagacttccaccatctgaacttggacttccaacttattaccgacgatggcggtaaaaggaagctcaagattgattcttggtttggttctcgtaaaacctccgccgccatccgcaccgccctcagccacgttgagaatttgatcccggcgtc

SEQ ID NO: 179046 - DNA, 272 bp, Glycine max
cctcgagccgattcggctcgaggagaaattgagtttctgagataaccacttttctctttgattgcatcaatggcaaccgcgaggaccgtgaaggatgtttcgcctcacgatttcgtgaaggcttacgcctcccatctcaagcgttccggcaagatggagcttcctgagtggactgatattgtaaaaacagcaaaatttaaggaattggctccatatgatcctgactggtattatgttagggctgcctcaatggcaagaaagatttatttgaa

SEQ ID NO: 179047 - DNA, 276 bp, Glycine max
ctctaaaagagatctttttctgtctttgaagaaagaagggtctttgcttgattttggagatgtctctgctctcagatctcatcaaccttaacctctccgataccaccgagaaggtgatcgcagagtacatatggatcggtggatcaggaatggacctgaggagcaaagcaaggactctcccaggaccagttagcgacccttcagagcttcccaagtggaactatgatggttccagcacaggtcaagctcctggtgaagacagtgcagtgatttata

SEQ ID NO: 179048 - DNA, 279 bp, Glycine max
gaaccatgccaaacccatttctctttctgacttggtctctactcttcaaattccaccagctaacgctgcctttgtgcagcggttcatgcgcttcttggcacacaatggaatctttgagatccatgagcgccaagaagatcatgaactaacatatgctctaacccctgcatcaaagcttcttgtcaatagtagtactcattgtctatctccaatggttctagcgtttaccgatccacttcggaacgttaaataccatcacttgggggcatggcttcgtgg

SEQ ID NO: 179049 - DNA, 263 bp, Glycine max
tccgttagcgccgctgccctagaccaccgcaagcgacgtcgcacaccgccttcatccgttagggcaaacatgcgtcgaggccgtggcggtggctacgatcgtcacatcactattttctcccctgaaggacgtctctttcaagtggcgtatgctttcaaggctgtgaaggctgcaggaatcacctcgattggtgtccgcggcaaggcttcaatttgtgtcgttactcagaagacggttccggataagcttttggacaacacaag

SEQ ID NO: 179050 - DNA, 274 bp, Glycine max
tgagataactagaaacagtgtgatgaaaatgaaggtccttgttttcttcgttgctacaattttcgtagcatggcaatgccatgcgtacgatatgttccctctccgaatgaacactggctatggtgcccgtactccggaggtgaaatgcgcaagttggaggcttgctgtggaagcacacaacatctttggctttgagaccattcctgaagagtgcgttgaagcaacaaaggaatacatccatggcgaacaatatagatcagactccaaaacagtt

SEQ ID NO: 179051 - DNA, 274 bp, Glycine max
caaaaggccatataattttcttttatttgaaataatgtccgggatcatccacaagattgaggagaccctccatgtgggcgggcacaagacagaggagcacaaaggcgaacaccatggtgagcacaaaggtgaacacaaaggcgaacaccatggtgagcacaaaggtgaacacaaaggcgaacaacaccatggggcgcaccaggcgggacttgtggataagatcaaggacaagatccatggtgatggccatgacacgggtgagaaaacgaagaag

SEQ ID NO: 179052 - DNA, 273 bp, Glycine max
gcagcagagggagtagcggcattaaaaatgcagatcttcgtgaaaactctgacagggaagactataaccctcgaggtcgagagcagcgacaccatcgacaatgtcaaggccaagattcaagacaaggaaggcattcctccggatcagcagcgtttgattttcgccggaaagcagcttgaagatggaaggaccctggccgattacaacatccagaaggaatcaacccttcatctcgtcctcaggcttcgtggtggcatcattgagccttccctc

SEQ ID NO: 179053 - DNA, 275 bp, Glycine max
cggtcctcaccgcatgcctctcgcgctgccgcaccattgcgctgcagcccgacaacgacgcggcggttcgcctcctctgcatagtcaacgctcgctccaagtttgaccctcctctgcctagcggttactacggcaacgcttttgccttccccgttgctgtcaccactgcggggccgctgtgcgataaccctttgggctacgctctcgcgttggtgcggcacgcccaagcggatgtgcactgaggaatacatgcactcggtggctgatttcatggt

SEQ ID NO: 179054 - DNA, 268 bp, Glycine max
aatggctcccaagggtttactctttttggctgtgttatgcttctcagcactgtcactgagtcgttgtcttgcggaggataatggacttgttatgaacttctacaaggcatcatgccctcaggctgaagacatcatcaaagaacaagtcaagcttctctacaagcgccacaagaacactgctttctcctggctcagaaacatcttccatgactgtgctgttcagagttgtgatgcttcactgttgctggactccacaagaaggagcttg

SEQ ID NO: 179055 - DNA, 272 bp, Glycine max
tttcattgcagagtgttattttgagtatcagcatcaatggctccaattgcagtgggaaacgtgattccagacggcattttggcttacttggatgaagaaaacaaaccccaaactgtctccattcactctctcgccaccggcaagaaagtcatcatctttggggttcccggtgccttcactcctacttgcagcttgaagcacgttcctggcttcattgagagagcagcagagctgaaagggcagggtgtggacgaaataatctgtatcagtgt

SEQ ID NO: 179056 - DNA, 260 bp, Glycine max
gcatttctatttctaactaattattgtgcttattattattgttgagaaagcaacgcatggcaaagttaataaaattctttgagttgaacacaggggccaagattccttctgttgggttaggcacttggcaagctgagcctggtgttgtcgccaaagctgtcaccacagccattctggttggctacaggcatattgattgtgctcaagcgtataacaatcaagcagagattggttctgctcttcggaagctttttgatgat

SEQ ID NO: 179057 - DNA, 269 bp, Glycine max
cgcttacatgttccaagatcaggcggtgcaggcagctgagctggaacgcactttcattgccattaagcctgatggcgtgcagagaggcctgatttctgagattatatctcgttttgagcggaaagggtacaagcttgtgggaattaaagtagtgattcctaaaaaggaatttgcccaaaggcactatcacgacctgaaagacagacccttcttcgatgggctgtgtgattttctaagctctggccctgttattgcaatggtgtgggaag

SEQ ID NO: 179058 - DNA, 280 bp, Glycine max
tgcgtctctctctgaattgacaagcttaaagacaaagtcttaaatggctggtccaaggattgcccatgctaccttgaaaggtccgagtgtggttaaggcgataataattggaataacacttggcttagctgctggtagcgtgtggaagatgcaccactggaatgaacagcggaaaaccaggaccttctacgatttactggaacagggtgagatcagtgttgttgcagcggcacagtgaaaatgttcttgttttgttgcctatgctctccatttataggct

SEQ ID NO: 179059 - DNA, 272 bp, Glycine max
cagagggtggtgcattgatgggaagctcgatgaagctcaaaggctcgctggtgaaatgtatcgtggcggatttgaccttggtgtaggggcttacaatgccatgcttgattgcgtgtgcaagctttgtcgcgagacggatccgtttcagcttcattcggcggcggcgaaagtgctggtggcgatggagtaccgcggcgttccaaggaatacggagacattcaatgtgttgataacgaatttgtgtaaaattaggaagactgaggatgctttgg

SEQ ID NO: 179060 - DNA, 270 bp, Glycine max
cggctcgagcggctcgaggggcaactatgcttgaccccatggctgtcttcgctctgctctttgggagtgcattgtttgaggactacatagggcatctagctgtggcatcaatggcttcctctgagctagctgatggaactgaggatcctgataaactcaatgagaagctaaaggctgtccaaaaagaaagagaagaaaagctagcaaaaattttgagggattatcttggtcaatatgtccggggtgacaaaaaaggattcttccaacgcg

SEQ ID NO: 179061 - DNA, 268 bp, Glycine max
ggagctcaaggacctacagaaagaccctccaacctcttgcagtgccggtcccgtagcagaagatatgtttcattggcaagcaactataatgggtccccctgatagcccttatgctgggggtgtttttctagttactattcattttcctccggattatccattcaagccacccaaggttgcatttaggactaaagttttccacccaaatatcaacagcaatggtagtatttgtcttgatatcttaaaggcgcagtggcgcccagcattg

SEQ ID NO: 179062 - DNA, 267 bp, Glycine max
tgtcagactaaattatttccttgaagttggttctcttcatgggtaagacgttttcatggagttttcgttgcatttgagcaattcaaccttgtaaaaataaataggctttccataaaccaaatgttacttttaaatgcccaaagcttatcaagcctcttttcttgaatggggattggcactctttattgaggttttgacatgagacattttatatcttctgatttgatttgatggatattttctgcaatattcccttaatattttctg

SEQ ID NO: 179063 - DNA, 253 bp, Glycine max
gcaccgtggcggaattttcatgtagtggcctagcttgagatctgacaagaaagagcgagcatggacggtgctgattctcccataaatcttgaagagcaagtttgcaattggttttccaggaaggacatacccaatcatgaactgtgctataatgtcatatccaggttgctgcaaggtgaccacaaaaaaaaaaaaaaagtgttaaaatgttaaccctctattgcttcccattttgcatcaaaataataggggg

SEQ ID NO: 179064 - DNA, 266 bp, Glycine max
gttcctgcaacgcactgaattcgatcaatcaatccatcttcaattgctttgtttcgatcggcggcaaatggccgatcagttatcgaagggcgcggaattcgagaaaaaggctgcgaagaagctcagcggttggggcttgtttggctccaagtatgaagatgccgccgatctcttcgataaagccgccaattgcttcaagctcgccaaatcatgggacaaggctggcgcgacatacctgaagttggcaagttgtcatttgacgttgg

SEQ ID NO: 179065 - DNA, 222 bp, Glycine max
ttgatcgagataactagaaacagtgtgatgaaaatgaaggtccttgttttcttcgttgctacaattttcgtagcatggcaatgccatgcgtacgatatgttccctctccgaatgaacactggctatggtgcccgtactccggcggtgaaatgcgcaagttggaggcttgctgtggaagcacacaacatctttggctttgagaccattcctgaagagtgcgtt

SEQ ID NO: 179066 - DNA, 261 bp, Glycine max
ctaaggcttcagtgtagtctgtaatcatgtcaggcaagtatatcatttctgctattcttggctcatttggcgttgcatgggtttgtgattattctgtttcagacaaaaagctatttggcggttctacccctggaactattacaaacaatgcgtgggcagaagagactgacaaaaaattgcaggcatggcctcgtactgccggtccaccagtggtcatgaatcccataagtcgccaaaatttcattgtcaagtctcgcgctg

SEQ ID NO: 179067 - DNA, 253 bp, Glycine max
gcccggcaccgccctggccgggttgtcgtcttcatcggcgatcgcgcagaaaacatgggcactcgcgcacaacatcatcccgatggccactccgggcggcgccgctacctcctccaccgctaccaccacgaccaacgccgacgactcgatcttctactacgacgcggcggggcagcacgcgttcccgcgcgacacgccctgggccaacgacccccactacttcacgcgcgtgacgatctccgcactcgcgctc

SEQ ID NO: 179068 - DNA, 270 bp, Glycine max
cgacatcaccattcatccgatgcgttcgagaggcgcgaccgcggtgctatctcgtgccagcaggattcggtcgaagctgcaaacggcgctggaagccaccgttttggcggtggacgacgtgtcgtaccagcacgcgggccacgccgccgtgacgggtagttccgacaaagaaacccacttcaacctcaacatcgtctcccccaagttcgagggccagagccttgtcaaacgacaccgtctcatctacgacctcctcgccgacgagctcca

SEQ ID NO: 179069 - DNA, 264 bp, Glycine max
ttctaaaaagaattaaggcgaagagagagcaaatgtttgacgtactgaatatttattttactgtgacattgcagttgaacctgaatggttctggagctggagcttcagctcccagttcagccttctttgggaccagcttgacgaaggttattgcctcaagggtccccaacagcaaggtttccggtggcagcttcaagattgttgctgtagaagcgcagaacgcgattgccgcgacccagcagaccgacaaggacagatggcagg

SEQ ID NO: 179070 - DNA, 265 bp, Glycine max
gcttgtgctgccttcgtttgcgtttttatcacagaggcattaacatatatatagcaagcctggcagtcacactctacgaccttagctcttcctctgggttgacgaaacttgatgagtaccttctcccacgcagttacatcaccgggtaccaagctacaaaggatgatcttactgtttatgcagctttgccaactgctccatcagatgaatatggcaatgtttccaggtggtacaagcacattgatgctttgttgagaatctctgg

SEQ ID NO: 179071 - DNA, 261 bp, Glycine max
gtgagctataagctagtttatcgtgaggcgcatatgaagttgtttgtcttctttgttgctgcagtagttttggtagcatggccatgccatggcgcaggctaccaaaggttccctctccgaatgacaactggctatggtgcgcgttcttcggaggtaaaatgcgcaagttttaggcttgctgtggaagcacacaacatccgagcctttaaaaccattcctgacgagtgcgttgaaccaacaaaggactacattaatggcgaa

SEQ ID NO: 179072 - DNA, 261 bp, Glycine max
gcaattggcttgatgggaattcgtgcatgttaaaattcatatatagttgcaatggctcgattttcattggatgcgatatcagacactggtgcctttgtgcgatctgcttccacattcagaaattggatttcgcgggacctgaattcgcaatttccaccagaatcagggcggtatcatctctatgtatcatatgcttgtccttgggcttccaggtgccttgcttacttgaatattaaaggacttaacaaagctatcagtttc

SEQ ID NO: 179073 - DNA, 255 bp, Glycine max
tacgtgaggcgctagagaatgatgatgaagtctgctatgtgtgcagtggtggttgtcgcacttcttcttctggcggcggtggggcccatggctgaggctgtgacatgcaccccaacagagttgagtccgtgtcttccagcaatcacttccggtgctaaaccttccaatgcttgttgcacgacgctgaagcagcaaaaaccatgcttatgtggctacctcaaaaacgctagcttgacgcagtatgttaactctcct

SEQ ID NO: 179074 - DNA, 262 bp, Glycine max
ctggccgaccacatctaagttataatttggacatacccactcagcgggttgggacatatgatactcagttggtggcgcatttcttccaatccctggtgaacacgtctggtctgacacttcacattcagcagcttgctgggaaaaattctcatcatattattgcggcaaccttcaaagcttttgctcgggctcttcgacaagcaacagcgtatgatccacgtcgccgtggaactataccaagttcgaacggggttctgtcccg

SEQ ID NO: 179075 - DNA, 263 bp, Glycine max
gtaagcagcggctaccctaatcctctcctcttcctctctactaatttcagctatggccgacgaagctgtggttgttccagatcccacccagatcgatgtcaagctctttaaccgctggcgcttcgacgatattgagattactgacatttctctggctgattatatcggcgtggcgacatccaagcacgccacgtatgtgcctcacaccgccggcaggtactcggtgaagcggttcaggccggcgcaatgccccattgttgaga

SEQ ID NO: 179076 - DNA, 254 bp, Glycine max
cgaatttcattgcagagtgttattttgagtatcagcatcaatggctccaattgcagtgggcaacgtgattccagacggcattttggcttacttggatgacgaaaacaaaccccaaactgtctccattcactctctcgccaccggcaagaaagtcatcatctttggggttcccggtgccttcactcctacttgcagcttgaagcacgttcctggcttcattgagcgagcagaagagctgacagggccgggtgtgg

SEQ ID NO: 179077 - DNA, 252 bp, Glycine max
tgagtgcgttgggttttctctttggttttcctgagctgtgttttattctctttatctctctctctgccctctcatcttcgagctccgatggcgcgcctgtggcgcgcggcgaccggcatgacggaaaacgccaccgattacgacggcgtcgcgttctggtccaaccccgagcgcaccggctggctcaccaagccgggcgcgtacatcaagacctggcgccgccgctggttcgtcctcaagcaaggcaagctc

SEQ ID NO: 179078 - DNA, 268 bp, Glycine max
cacacactaaaccaaagtacgaggtatagtgttctaagagtgcgccacttgtgcgccatggcttccaaggctgcacttctcttgtgtctcaatgtactctttttcactgtggttagttccacatatgtgccatgtaatccaccccccaaaactcccaaacacccacctgtcccaaagccaccatccccaaagctagcaagctgccccaaagacactattaagttcggtgtgtgtgctgatgtgttaggtttgattaatgtgcacttgg

SEQ ID NO: 179079 - DNA, 263 bp, Glycine max
ctgcgtctagtcagaaccctaatccgccgaaggcagttcaagcgagtgacagccaccagccatgggtcgtatgcacagccgcggtaagggtatatcctcttctgctttgccctacaaaaggacacctcctagctggctcacgatctcttcgcaagatgtcgaagaaaatatctgcacagtttgcgcagaaaggtttgaccccgtctcagattggtgtcattctcagagattctcacggtattgctcaggtcaatagcgtcact

SEQ ID NO: 179080 - DNA, 256 bp, Glycine max
  unsure (1)..(256): unsure at all n locations
caacaaagtataagactttgctttgatttgcttcgccttgcttgttgttgtgtcaaccatggcgtcgtttgggtctctgaacatccaccattttcgcccaagaagagagaaaacagcagtatnagtcgcacattcgaggcctcaatgcatacgaccgtcacaaaaaattcatcgacgactacgttaaattttatggaaacgcaagaccttcaaacctaaagttgcctattaaaacagatcaagatacactaagaga

SEQ ID NO: 179081 - DNA, 253 bp, Glycine max
gggaacagagaaggagacagagaatggacgccattgattctgtgttcgatccgttgagagaattcgcaaaggacagcgtgaggctcgtgaagcgctgccacaaacccgatcgcaaagaattctccaaggttgccgtgcgtaccgcaattggtttcgttgtgatgggattcgtgggtttcttcgtgcagcttattttcattccaattaacaacatcatcgtcggatctggttaggatgacgggtactacaatcg

SEQ ID NO: 179082 - DNA, 241 bp, Glycine max
ggagaccgggtgtgagcctggcgcgcaaagaggccgctgtaagggctggcgcaactaagctctcagaaaggcaaccaactggtacagcagctcagggtgacaaggactacaaagaaccacccccagcacctctgcctgagcctggtgagctaaagtcatggtccttctacagagctggaattgctgagcctgtggccactctcctgctcctctacattaccatcttaactgtcatgggtgt

SEQ ID NO: 179083 - DNA, 259 bp, Glycine max
caacggtgatagctaagacggttggctttgcgatgattgatgcatttgctgagtcacaggggattcctatggacactgtccattccaaagccatttctggaaaaggttttgttggtgaagttcctgtttttcttgcaaagcctcaaacttacatgaatctcagtggtgaatcaacaggaccactggctgcttattataagctacctcttaatcaggtgcttgtgttccatgatgacatgaacttgccttgtggggtgct

SEQ ID NO: 179084 - DNA, 258 bp, Glycine max
gaagagactggctcccaagggtttaatctttttggctgtgttatgcttctcagcactgtcactgagtcgttgtcttgcggcggctaatggacttgttctgaacttctacaaggcatcatgccctcaggctgaagacatcatcaaagaacaagtcaagcttctctacaagcgccacaagaacactgctttctcctggctcagaaacatcttccatgactgtgctgttcagagttgtgatgcttcactgttgctggactc

SEQ ID NO: 179085 - DNA, 260 bp, Glycine max
ggcgaatctagcacacttctccaagagagccctaagacgcgcacacgcgctcgcaaggcaccacgtgcagccgcagctgctggcagcggaacgcgcttttgcgacggaggcggcgaaatcgatatccccgtcggcggatcgcgtgaagtgggactaccgagggcagaggaagataatcccgttaggacagtggctccccaaagtggccgtggatgcttacgtagcacccaacgtggtcctcgccggccaagtcaccgtct

SEQ ID NO: 179086 - DNA, 262 bp, Glycine max
gttgaaaagaaaccctagcaagtggagcaatggcagacgttgaagtcgatgtggcggcagccgcagcagcagggctgccgaagaagagaacgttcaagaagttcagttttcgaggcgtggatctcgatgcacttctcgacatgtccaccgatgaactcgtcaagatgttcagtgcccgcgctcgtagaaggttccagagaggcctcaccagaaagcccatggccttgatcaagaagctccgtaaagcgaaaagggaagctcc

SEQ ID NO: 179087 - DNA, 281 bp, Glycine max
caaagcctccaccaatgtcgctgctgctgccgccgccgaaacctcaccggagctccggtaactcccctggcgacagcattccagactggatctccgaatcaatcaacggcggctccctccgccgcgtcgacctcaactccggcaccaacggctgggcgtcgccgccaggctccgtgttctccctccgctccgaaagttactttcagaaccgccagaactctcccgccggcgactacctcctctcgccggcgggcatggactggctcaaatccgccgcgaaa

SEQ ID NO: 179088 - DNA, 288 bp, Glycine max
gcacgagattgacttttctcccctcataaaaaaaacctaccaatggctcccgcaaaggcagagaagaagcccgcggagaagaagccggcagagaaggccccagcggagaagaagccgaaggcggagaagaagatatcgaaggaaggaggaagcgagaagaagaagaagagaacaaagaagagcgttgagacctacaagatctacatcttcaaggtgttgaagcaagtgcaccccgacatcgggatctccagcaaggctatggggatcatgaacagtttcataaacgac

SEQ ID NO: 179089 - DNA, 177 bp, Glycine max
aagaggccctctgacaagcccctcaggcttccccttcaggatgtgtacaagattggaggtattggaactgtgccagtgggacgtgttgagaccggtgtcttgaagcctggaatggtggtgacttttgcaccaactggactgacaactgaagtcaagtctgtggagatgcaccatgaa

SEQ ID NO: 179090 - DNA, 269 bp, Glycine max
tttggaaacaacgggctagaatccgaggagggtattagcctactgatcagcagaaagctgctgaagctgatgaatggagatgttcgctatctaagggaagcaggcaaatcagcttttatcctctctgctgaacttgcagcagcccataatttgaaaggttagatcttatcggaaaaagaataacagatgatgcaaccagcaaaacacaatctgttttgtacatcataaagagaacggagctagaaattaattgcatccatgtaactcta

SEQ ID NO: 179091 - DNA, 253 bp, Glycine max
attatcatcatttgttcattccgcttctaccgagttgtcaccacccaccggactcagtgaatcaccataatgggaaactgcagctcctccgattcgactcaggttgccacggcgaagtctgtgctgcaagatgggaggctgcaggagttctcgtacccggttaaggtttcgttcctcttgcagaagtatcccgcgtgcttcatatgcaactccgacgaaatggaattcggcgacgtcgtttcggccatcgacg

SEQ ID NO: 179092 - DNA, 260 bp, Glycine max
gtgaaaagtgaaaagtgaaaatggacttggaagcagtgaagaggtacttagagaaaggaggagaaacagcatcggcggtggatgggttgcctccgaggtttctggaaccgttaataatgaacgctcttaaggtcgatctcatcgaaactggtcgcgttgtctgctccatgaagatacctccgcgtttactcaatgctgggaattcgttacacggtggcgccatcgctgctctggtcgacgtggtggggtccgctgcgatt

SEQ ID NO: 179093 - DNA, 263 bp, Glycine max
gtcaaggaaaactaagttcttcagtcttgacttgagtgctttgagttcatggatccaatccaacacaagttcgtcaacgttggtgctctcaagctccacgtcgcagaaaccggaaccggtccaaacgccgtcgtattcctgcacggcttcccggagatatggtactcgtggcggcaccagatgatagctctcgccggtgccggattcagagcggtttccttcgattacagaggttacggtctctccgacccgccacccgaacc

SEQ ID NO: 179094 - DNA, 263 bp, Glycine max
aaaaaagttgtgctgtgccgcctcttccgtaggcagcagcaatggcctcaaatcccaaaactttgacctttgaggaggtagctaagcacaacaacaaaaaggattgctggattactatcaatggaaaggtgtatgatatcacaccatttttggatgagcatccaggaggtgatgaagttttgctgacgtcaacagggaaggatgccaccattgattttgaagatgtgggccacagtgattctgctatagagatgatggaaaaa

SEQ ID NO: 179095 - DNA, 260 bp, Glycine max
ctcgagccgcacaagccaagtgaaagtgagaaaaaataaaaatcaaagagcataatgtcaggcgctcattcacaagattggggagacccttcatgtgggagggcacaagaaggaggaggagcataagggtgagcaccatgctggagaatacaaaggggagcaccatggtgaacacagtagtgagtacaaaggagagcatcatggtgaacacaaagctggagagtaccatggtgagcacaagccagagcacaaagacgggt

SEQ ID NO: 179096 - DNA, 274 bp, Glycine max
cagagaagaacagagagagatccatccatcaattccaatggccgatcagctcaccgacgaacagatctccgagttcaaggaagccttcagcctcttcgacaaggacggggatggttgtattaccaccaaggaacttgggaccgtgatgcggtcacttggccagaacccaactgaggcagagctgcaggacatgataaatgaggttgatgctgatgggaatggtaccattgatttcccagaattcctgaatctcatggctcgcaagatgaaagac

SEQ ID NO: 179097 - DNA, 273 bp, Glycine max
cagcgtcgcagtcgcaaccctaatcagaacaagcgcagttgcaagcgagtgacagccaccagccatgggtcgtatgcacagccgcggttccgggtatatcctcttctgctttgccctacaaaaggacacctcctacctggctcaagatctcttcgcaagatgtcgaagaaaatatctgcaagtttgcgaagaaaggtttgaccccgtctcagattggtgtcattctcagagattctcacggtattgctcaggtcaatagcgtcactcacagca

SEQ ID NO: 179098 - DNA, 270 bp, Glycine max
acctgcctctgttaaagtttgtatttttctgagtgggtgggttgattgagagtgctgtgcaagctttggaactttttcccaacctgctacttcaatggccactgaagaggttaacaaacctcaatcacttcctccataccctgagatgatagtgaaagcacttgaagcactgaatgagccaaatggatcgaacaagtcagcaatatcaaagtacatagaaaccacctacggtgagttgccagacgcaaccgttttggggagtcaccttaa

SEQ ID NO: 179099 - DNA, 264 bp, Glycine max
ctcttttgtagggcattgcatttctgaatgatcctaggaggctcaatgttgctttgacacgagcaagatatggcattgttattttgggaaaccctaaagttttgagcaaacagcctctatggaatagtttattgactcactacaaggtagttcttgtgttttgagattttactgtcggtggtattttttttggtttaaccagaggtatctgaggcttcttatttggcacccgactaatcctctcccattttggggtaagtggta

SEQ ID NO: 179100 - DNA, 266 bp, Glycine max
cgaagagagaaaaaccatggcaataacactcaacaatggcttcaagatgcctatcattggattgggcgtgtggcgcatggaaggaaacgaaatcagggacctaattctcaattccatcaaaattggttatcgccattttgattgtgctgctgactacaaaaacgaagcagaagttggagatgcgcttaaggaggcttttgatagtggccttgtgaagagagaggatctcttcattaccaccaagctttggaattctcgatcaggcc

SEQ ID NO: 179101 - DNA, 264 bp, Glycine max
atttgcttcttcgagtttcacagccaagtcgtaaaacggtttcaagggatggaaaacatgcagagcttctggcaattgggtgatgaactccgtgggcactcaaaagcatcggaggatcacaagtggttaatggttgcctcgaaactggccgaacagacaagattgaagggggagcgtgtgaacaaccttgatctttcaaagggacccattgaaacaaggtcaagggataaatttgggttccaggaagagaacaaatttgattct

SEQ ID NO: 179102 - DNA, 259 bp, Glycine max
gaggaaatgcaacttacttgctgatataaacttcagacagagcgagttgttgtaaagctagccttgttgcagccatggccacccacgcggctctagcttctacaaggatccccactaacaccaagttcccatccaaggcttcacactctttcccaacccaatgcgcctcaaagagacttgaggtgacagaattctctgggctaagatccacttcatgtgtgacatatgctaacgatgctagagaatcttccttttttga

SEQ ID NO: 179103 - DNA, 260 bp, Glycine max
ctcaatcgaagtttgagaagaagtttgggcaatcatctgttttcatagcttcaacactcttggaagatgggggtgttccaaaagcagcaagttccgcaacactcttgaaagaggccatccatgtaattagttgtggttatgaagataagacagaatgggggaaagaggttgggtggatatatggctcagttacagaagatattttaacaggtttcaagatgcattgtcatggttggagatctgtgtactgcatgccaaaa

SEQ ID NO: 179104 - DNA, 266 bp, Glycine max
ctttgttcactcttcttctcttgcggctagggttttagcgcagttcttctagatttaaggaagatgggtaaggaaaaggttcacatcagtattgtggtcattggccatgtcgactctgggaaatccactaccactggtcacctgatttacaagcttggaggcattgacaagcgtgttattgagaggtttgagaaggaagctgctgagatgaacaagaggtctttcaagtatgcctgggtgctggacaaacttaaggctgagcgtga

SEQ ID NO: 179105 - DNA, 267 bp, Glycine max
cctcgagccgaatcggctcgaggtgaaaatggcggtacccttgctctccaagaggatcgtgaacaagcgcgtcaagaagtttatacgcccccagagtgatcgcaagatctccgtcaagccaagctggcgcagacccaagggtattgattctcgtgtcaggagaaagttcaaaggatgcactttgatgcccaacattggttatggctcagacaagaaaacccgccattatctaccaaatggtttcaagaaatttgtcgtgcacaatgt

SEQ ID NO: 179106 - DNA, 262 bp, Glycine max
gccaagtgaaagtgagaaaaaataaaaatcaaagagcataatgtcagggatcattcacaagattggggagaccttcatgtgggagggcacaagaaggaggaggagcataagggtgagcaccatgctggagaatacaaaggggagcaccatggtgaacacagtagtgagtacaaaggagagcatcatggtgaacacaaagctggagagtaccatggtgagcacaagccacagcacaaagaggggttcctagacaaagtcaagg

SEQ ID NO: 179107 - DNA, 258 bp, Glycine max
gtttgttgtgagctataagctagtttatcgtgaggagaatatgaagttgtttgttttctttgttgctgcagtagttttggtagcatggccatgccatggcgcaggctaccaaaggttccctctccgaatgaaaactggctatggtgagcgttcttcggaggtaaaatgcgcaagttttaggcttgctgtggaagcacacaacatccgagcctttaaaaccattcctgaagagtgcgttgaaccaacaaaggactacat

SEQ ID NO: 179108 - DNA, 254 bp, Glycine max
gttgtgatggatcagttctactggatgacacgcacaacttcactggcgagaaaacagccctacctaatctgaattcaataagaggtttggaagtggttgatgagattaaggcagcggttgacaaagcttgcaaccgtcctgctgtatcatgtgcagatatcttagctatagctgctcgtgattctgtggccatattagggggtccacacctatggtacggcgtgttactaggcagaagagacgcgagaacagca

SEQ ID NO: 179109 - DNA, 258 bp, Glycine max
agtttccacactgcataccttaggtcttccgaattcgaagttaatttgcaagatggctaaggaaaaggctcagatcaacattgtggtggttggtcatgtggaccctgaggaggcaaccaccattaacgagctgaagaagcctgttgtggagaaagaagctccagggcatgccatatgagggcatgcacgtacggcctcggaggggaaccagaaaattatgttaacaaaataatctggaaccctaatgtatcagtgtca

SEQ ID NO: 179110 - DNA, 263 bp, Glycine max
aaaattggaacctgcctctgttaaagtttgtatttttctgagtgggtgggttgattgagagtgctgtgcaagcattggaactttttcccaacctgctacttcaatggccactgaagaggttaacaaacctcaatcacttcctccataccctgagatgatagtgaaagcacttgaagcactgaatgagccaaatggatcgaacaagtcagcaatatcaaagtacatagaaaccacctacggtgagttgccagacgcaaccgttt

SEQ ID NO: 179111 - DNA, 271 bp, Glycine max
ctataagctagtttatcgtgaggagaatatgaagttgtttgttttctttgttgctgcagtagttttggtagcatggccatgccatggcgcaggctaccaaaggttccctctccgaatgaaaactggctatggtgagcgttcttcggaggtaaaatgcgcaagttttaggcttgctgtggaagcacacaacatccgagcctttaaaaccattcctgaagagaccgttgaaccaacaaaggactacattaatggcgaacaatttagatcagac

SEQ ID NO: 179112 - DNA, 268 bp, Glycine max
atcacctccacctccagtttacatatatgcttccccacctccacctatctacaagtaagttcgaattgcggaacaccattcacgataaatcatgttctagtttttatcgaggaataaaggcaagctctatttggagtcaagtgaaacatctatcttcctgtccaagttctttgaataaaagtctgaatgtgtcatctctgcactacaatatttgtgattctgaccaagttggttctatttgtttgatggccatcttgcacgtcctgat

SEQ ID NO: 179113 - DNA, 266 bp, Glycine max
gtttctttcttcaacgtttccatcatacacagatcccaatcctctctcaagccctaatttcccctcatttccatggccacagaagctccactgtcgcggtggaacccgctcccgaacctgcctccgccgatcctcccccggaggagaaggaggagaccaaacctgaagccaaggctaagaaaaccaaggagcccaaacctaaaaaggtttccagacctcgcaaccctcccactcatccttcctacgaagagatggttaaagatgca

SEQ ID NO: 179114 - DNA, 266 bp, Glycine max
gagaaactgagagaaattcgcaaaccctaatttcggaaagatcggcgatggctgcctccaaggatcgcgagaacttcgtctacatcgccaagctcgccgaacaggccgagcgatacgaagagatggtggaatcaatgaaagaagtttgcggatcccgacgttgaactgactgtggaggagcggaatttactttctgttgggtacaagaatgtgattggtgctcggagagcatcgtggaggatcctgtcttccattgagcaaaagga

SEQ ID NO: 179115 - DNA, 257 bp, Glycine max
cattctcccatttcctctcagaaccctcgatcactcccacgcgctcctatatcctctccttcaccgtcgctctctccaacgatcacaacaacatcgtcatcccatggcaaacgccgcatctggtatggcagtccatgatgactgcaagttaaggttttcggaggtgaagacaaagaggacacaccgtttcatagtttttaagattgaggagcagcagaagcaggtcattgtggagaagcttggtgagccagcccaag

SEQ ID NO: 179116 - DNA, 253 bp, Glycine max
  unsure (1)..(253): unsure at all n locations
gacggttcaaaaggaagatttgggcttgagtctaagtttgagcttccctctcctctcctcttctccttccagccacaaccctcagaaaccctcttggaacgaccctattttcacttcttcaggtgaagctggatcattcctccgcggaatcgatgtgaaccgtttaccttctgtggttgattgcgaagaggaagcaggtgtttcatctccaaacagcacggtttctagcgtcagtggaaagcgcacangaggg

SEQ ID NO: 179117 - DNA, 258 bp, Glycine max
gagtgagagagtgagtgagatagagagagacgcttcgcaaatctcaatcgaatctcagaaaaatgagagacatcatcagcattcacataggtcaggccgggatccaggtcggaaactcctgctgggaactctactgcctcgaacatggcatccagcccgacggcatgatgccttctgactccaccttcggtgtagcccacgacgccttcaacaccttcttcagcgaaaccggatctggcaagcactcccccgtgctgt

SEQ ID NO: 179118 - DNA, 269 bp, Glycine max
aagaaatttaagtgaggagctagagaatgatgatgaagtctgctatgtgtgcagtggtggttgtagcacttcttcttctggcggaggtggggcccatggctgaggctgtgacatgcaccccaacagagttgagtccgtgtcttccagcaatcacttccggtgctaaaccttccaatgcttgttgcacgaagctgaagcagcaaaaaccatgcttatgtggctacctcaaaaacgctagcttgaagcagtatgttaactctcctaatgcc

SEQ ID NO: 179119 - DNA, 267 bp, Glycine max
gtttggcatggcactctgctggaacttacgacgtgagctcgaagaccggtggtcccttcggaaacataaagcacgcctccggaatgcgctcacggcgctaacaacggtcttgacatcgctgttaggcttttggagccactcaaagcggagtttcctattttgagctacgccgatttctaccagttggcttccgttgttgccgttgaggtcaccggtggacctgaagttcccttccatcctggaagagaggacaaacctgagccacca

SEQ ID NO: 179120 - DNA, 262 bp, Glycine max
gcttgctactgagtttccacactgcataccttaggtcttccgaattcgaagttaatttgccagatggctaaggaaaaggctcagatcaacattgtggtggttggtcatgtggaccctgaggaggcaaccaccattaacgagctgaagaagcctgttgtggagaaagaagctccagggcatgccatatgagggcatgcacgtacggcctcggaggggaaccagaaaattatgttaacaaaataatctggaaccctaatgtatc

SEQ ID NO: 179121 - DNA, 243 bp, Glycine max
cgcggtggcagacaccgtggttatggtggtggtggtgaccgtggttactctcgtggtggtgacggtggtgatggaggctggagaaactagggcttgatgtcgttgattagggtttatgattatgctccagtaattttagttgtgtttgagtttgagtaaccttatggttttgtgtcaccgtggttcctgtttttgaccaatatatctggttggttatagtcggattaatgaaatgataatcag

SEQ ID NO: 179122 - DNA, 262 bp, Glycine max
gttcttatgtatggagtaagaagtattcattcaaggcatccccatatcctggacagaactctttgcaacgtgttatcatatttggtcacatgggaaaggctgagcgtgatggttcaaatgaatatgctgattatcaaccgggttctctaaacaccacagaccaactcgtcaaggatttagaaaattatgacattgttttccacataggagacatgccttatgcaaatggatacatctcacaatgggaccaattcacagctcc

SEQ ID NO: 179123 - DNA, 260 bp, Glycine max
cgggtgcagaagcaaatggcggcgagaagcaattgaaatttctgatctacggtcgcagcggttggattggtggtctactgggtaagctctgcgaagagcgcgggatccaatatgagtacggcaccggcagattggagaaccgctcgtcgttggaggcggacatagcggctgtgaagcccagccacgtgttcaacgccgcgggtgtcacgggtagacccaatgtggactggtgcgaatctcacaaagttgaaaccatccga

SEQ ID NO: 179124 - DNA, 251 bp, Glycine max
tagagccctttggacacaccctctaaaccaatctatcaagtcctgaatctggtgagcaaatatggagtttgttggcaaacatccatccatggttcttgaagaagcatggagataaaggcgtgtgagacggtcctcaccactcacactcctccacttaaaacagtttgttttggcttagctttggcttctctaatcaacaagggatgtgttctaacattctctcttgagtggcagaagcagatatgcattct

SEQ ID NO: 179125 - DNA, 254 bp, Glycine max
attctaaagaaatataactaatattctttagaataatcaaaaagaatattaaattcaaataaattttagatagaaaaaagacttaaaaaggaggatttgaaatgcgagatctaaaaacatatctttccgtggcaacagtagtaagtactctatggttcggggctttggcgggtctcttgatagagatcaatcgtttttttccagatgcattgatattcccttttttttcattctagttattgacacggaaaggg

SEQ ID NO: 179126 - DNA, 253 bp, Glycine max
cgattctcttcctctttctctgttctgaaaccactcccgcctcgtcgtcaccatgccgcaaggggattacatagagcgtcacagaagagactatggctaccgtctcgatcacttcgagcggaagcgcaagacagaggcgcgtcaagttcacaaacgctctgcaattgcccagaaggctctgggtattaagggcaaaatgattgccaagaaaaattatgctgaaaaggcacagatgaagaagactttggctatg

SEQ ID NO: 179127 - DNA, 251 bp, Glycine max
caaatatggcatactctcaacttcaaaaggtggaactaatgtgcacatcaaggcttctgctgatcagttccataatgttttatgcaacaggacacaccatattgccaacattttccctggaaaagtacagtctgttgaaattcataaaggtgaatggggcactgagggatccgtcatctcctggaattatttacatgagggcaaagtttgtgtggctaaggagatggttgaaggcatagacatgaaaaaca

SEQ ID NO: 179128 - DNA, 235 bp, Glycine max
ccacgccgtcgtcaagatcgtcgccgccgacctcgagtggtggttccatggtccgccctcacaccagtttttgatgcgcatgctcaccggcgactccgctgccgacaactccttccgcttccttccgcagtccatcgccgccttcggctccaccgtcatcgtcgagggttgcgacaccgcccgcaacattgcctgggtccacgcctgcaccgtcacggatgggataattactcag

SEQ ID NO: 179129 - DNA, 251 bp, Glycine max
agtgaatatgctgatgtggccaaaggttgggcttcagttcagagtattcctagaactgtggagcttgataggaagactggcagcaacttacttcagtggcctgttgctgacatcgagagtttgagattgagaagtgatgaatttaaaaatttgaaggctaaaccagggtcagtggtgtccgtagatattgacacagccacgcagttggacattgttgccgagtttgagatagacagggaaccttgacaaaa

SEQ ID NO: 179130 - DNA, 258 bp, Glycine max
cagcagtcgttacagagactccataacccgaaaatgcctttcaagaggtacgttgagattggaagggttgctcagatcaactatggcaaagagtatgggaggctcgtggttattgtcgatgtcattgaccagaatagggctcttgttgatgctcctgacatggtgaggtccaagtgaacttcaagaggctatcactcactgacatcaagatcgatattaagaggatccccaagaagaaggatctcattcaagccatgg

SEQ ID NO: 179131 - DNA, 258 bp, Glycine max
gagacagggagacaagacagagcagtacaggttactaccaatggctaccaaggtttatattgtttattattctacatatggacatgttgagaagctagctagagagatagaaaaaggggctgcttcggtggatggagtagaagcaaaactgtggcaggtacctgaaaccttgcctgaagaggtccttgcaaagttgggagcacctccaaagagtgatgctccaattattactcccaatgagcttcctgaggctgatgg

SEQ ID NO: 179132 - DNA, 252 bp, Glycine max
gtgtgcagaagagcgtcgcagtcgcaaccctaatcagaagaagcgcagttcaagcgagtgacagccaccagccatgggtcgtatgcacagccgcggtaagggtatatcctcttctgctttgccctacaaaaggacacctcctagctggctcaagatctcttcgcaagatgtcgaagaaaatatctgcacgtttgcgaagaaaggtttgaccccgtctcagattggtgtcattctcagagttctcacggtatt

SEQ ID NO: 179133 - DNA, 249 bp, Glycine max
cagaaaacccccaaccccaacctcaaccttaacctctcctcactttcttttcaaccagaactatgattaagctttttaaagtaaaggaaaaacagagagaactggcagaaaatgcgagtggcggaccacccgttaagaagcaaagtgccggcgagttgcgtcttcacaaagatataagcgagctgaatctaccaaaatcatgtaccatgcaattccccaatggcaaagatgacctgatgaactttgaag

SEQ ID NO: 179134 - DNA, 254 bp, Glycine max
gggtatgagtctccactaccctggcctgaaagcaaattgaagatattgtacaagaatgttgcacacccgaaactagctgcatacgtaaaaaggcataattggttgatggagtctggagagtatcttacttttccccaaaaccaatctgagttcaagggagggattcttcactatcttgagtccattgaagagatggtaccagacattgaatggggtaaaaatattcgtgttgtcctggacattggatgtacaga

SEQ ID NO: 179135 - DNA, 274 bp, Glycine max
cctgttgctgcctcaggtggtggtggtgctgctgctgccgccccagctgctgaggagaaaaagaaggaggaacctgaagaagagagtgatgatgatatgggatttggcttgttcgattagggacattctcaatatgatttggttaaattttgtggttctttacctttaagtttactttatggatattgtaggttttatttttgtgctggttatttatatctgtataagacttgattttgtagttttatgaacttcggaatgtgggtttatgtcc

SEQ ID NO: 179136 - DNA, 272 bp, Glycine max
ctttattcttagctttcctttccagttcatacttcatcctattattactttccctctttgcattccaaatggccactgttgaggttgcacagcaaacaccaacaactgtgacagagaatgaaacaacgactgaggtaaccaagattgaggaaactaccccagaacagccagccaccgaggttactgccccagaaacagtcaacgaagaagcaaaagaggagcagcagttgagactaatgaggcaacagaagttacagaggaagggaaggctg

SEQ ID NO: 179137 - DNA, 263 bp, Glycine max
gcgactgcgcttcagcacaatgggtgcctacaagtatgtttcggagctatggcgcaagaaggcgtctgatgttatgagattcttgcagcgggtgaggtgctgggagtatcgccagcaaccttctattgtccgtttgacaaggtctactcgcccagataaggctcgtcgcttgggtttcaaggctaagcagggttacgtgatttaccgtgttcgcgtacgaaggggtggccgtaagagaccagttccaaagggtattgtttatg

SEQ ID NO: 179138 - DNA, 265 bp, Glycine max
cacaaatcaaagccatggccacctccaacttctctattgttctctccgtctccctagccttctttttggtgctacttaccaaggcacactcgaccgataccgtttctttcaccttcaacaagttcaacccagtccaaccaaacattatgctccaaaaagatgctagtatttcatcctctggggtgttacaactcaccaaagttggcagcaacggcgtccccacctcgggatctctcggtcgtgccctttacgctgccccaatcca

SEQ ID NO: 179139 - DNA, 271 bp, Glycine max
ctgatatagtgaatagaaatggctaaaaacgagttgaggcttttgggtgcttggttcagtccatatgccctgagggtgcagattgcccttaacctcaagggtctagattatgaggttgttgaagagaccttgaatcccaaaagtgatctgcttcttaagtccaaccctgtgcacaagaaaatcccagttctactccatggagataaagtcatatgtgaatctgcaatcatagtagagtacatagatcaggtttggtccaaaatgctctctc

SEQ ID NO: 179140 - DNA, 255 bp, Glycine max
ctagaatatgctctcacacattatggctccatgaagcacacgtccggatacgattcaatagaaagtctgaccctactggtagtggtagcacacgttctgtagctggtctaacttcgtaggtcgccgaaagatacctacaggagcattactccaaggaaggacatgcttcttcatgtttccttgtggtggatgcccgtacacggatttgtcgtgggtatgcttctgtaacaatggtctctgctgaagatgcggacg

SEQ ID NO: 179141 - DNA, 259 bp, Glycine max
ttttaagcttgctactgagtttcacactgcataccttaggtcttccgaattcgaagttaatttgcaagatggctaaggaaaaggctcagatcaacattgtggtggttggtcatgtggaccctgaggaggcaaccaccattaacgagctgaagaagcctgttgtggagaaagaagctccagggcatgccatatgagggcatgcacgtacggcctcggaggggaaccagaaaattatgttaacaaaataatctggaaccct

SEQ ID NO: 179142 - DNA, 275 bp, Glycine max
gtttgttgatccatctcttgtttcttgctttctttcttcaccatgtcacttgctgggaaaatcaccactgaaatcggggttcatgcaaccgctacaaagtggttcaacctcttcgcaacacaactccatcatgttcaaaacctaactgatagagtgcatggaaccaagctgcatcaaggtgaagactggcatcacaacgagacagtcaagcactggacttataccatagatggtaaggttacaacatgtctggagagtattgaatccattgatga

SEQ ID NO: 179143 - DNA, 164 bp, Glycine max
cttccgggttcacgtttcaccatcactttttgcgcttctctcactcactcactcttcttcttcctcttcgtgtggttttctttctcgaactcgaacgaagatgcgtgagattcttcacatccagggagggcaatgcgggaaccagatcggagccaagttctggg

SEQ ID NO: 179144 - DNA, 273 bp, Glycine max
gtagcaaccacagaggaagagaacaaaccagctgagacagtggaagccccagtagaggttcctgttgagaaaactgaagcttagacttatggacagtgtgagtgagaaaaacaagtttaaaaatggtcctagttgtggggatcattaggtctaccattttgcatgtcatgttgaaaagcttttttttttatttatttctttagtttactttattattaatatattattattatatgatggttaagtctttggtcgtattatggagggtatacc

SEQ ID NO: 179145 - DNA, 207 bp, Glycine max
agagtttgttgtgagctataagctagtttatcgtgaggagaatatgaagttgtttgttctctttgttgctgcagtagtttcggtagcatagccatgccatggcgcaggctaccaaaggttccctctccgaatgaaaactggctatggtgagcgttcttcggaggtaaaatgcgccagtcttagggctgctgtggaagcacacaacat

SEQ ID NO: 179146 - DNA, 244 bp, Glycine max
ctataattagggtcacgagggtttcatcctgcggcatcagacatgggaggaggcaatgggcaaaaggcaaagatggctcgcgagaagaacatcgagaagcagaaggccgcctcaaagggaagccagctggattcaaacaagaaagcaatgtcgatccagtgcaaggtgtgcatgcaaacatttatgtgcaccacatcggaagtgaagtgtagggagcatgctgaagccaaacaccctaaatctg

SEQ ID NO: 179147 - DNA, 256 bp, Glycine max
cgaataactggagggatgaatcaccatatcaattgctggattcaactctgctagaatcttatgttccaaacgaagtgtaaaagtgtatgcagattggtttattgtgtgtgcaagaaaatccagatgacaggccaacaatgggaacaattgtttcatatcttagcaatccttcatttgaaatgccattccctctagaaccagcattttttatgcatggcagaatgagaagacattcagctgaacatgaatcatcttc

SEQ ID NO: 179148 - DNA, 240 bp, Glycine max
tctgtttttaccactttctgggtctttacttcttcaggtcaaggtcaccaattcatggaaagtctgaacctacaaatcctggtgacacactttatgtaactggtctatcttcgagggtcaccgaaagagacctagaggagcatttctccaaggaacgcaaggtttcttcatgttatcttgtggtggagccccgtacacggatttctcgtggttttgcttttggtagcatggaatctgctg

SEQ ID NO: 179149 - DNA, 264 bp, Glycine max
ctacattcctcgacaagcttagcttcaccgtcagttgcaggaaaaatggtttcgctgaaactgcagaagcggctcgcagccagcgtcctcaagtgtggcagaggaaaggtttggcttgaccccaatgaagtcaacgaaatctccatggctaattcccgccaaaacataaggaagctggttaaggatgggtttattatcaggaagcccaccaagattcactctcgctcacgtgcccgccgaatgaaggaagccaagaggaaagga

SEQ ID NO: 179150 - DNA, 274 bp, Glycine max
ctgagtagcacactactctgaactcgccaggattttacgtgatcagtacccgacatatcaaattccagaaaagtctgcagacgataagccttatgtaccaacatttcaggtttccaaagaaaaagcaaagaccttggggattgaatttattcctttggaagtgagtcttagagagacagtggaaactttgcaagaaaagaactttgccaacttttagtctctgatatatctacttgatcaggagtcaacacgttgagactctcaacggtgtttc

SEQ ID NO: 179151 - DNA, 232 bp, Glycine max
ctaaagccttcaatcatatagcattctaagaaatgaagagccctaccattttcattctctttctactttctgccttctacacctcactcctaccttcagccaccgctcaagtcctggttgacatggaaggtaatgatcttcaaaatggtgggaaatattatgtgttgccagtaatagagtcatcatatggtggaatagagtatacgcaactggaaagcaagaatgcctctca

SEQ ID NO: 179152 - DNA, 196 bp, Glycine max
cgcaagtgagcgtaggttggaagcagagagatggaaggttgcgacccgaatacgaagtcgacgctgacacagatccctctgctgacgacgaaggcgggtccacgagacggagcggcatggacgcagaggcttaaggcagagtacaaagctctgataacgtacacgcagatgaacaagtccgacgacaaagagtggc

SEQ ID NO: 179153 - DNA, 250 bp, Glycine max
aacactcttctctgcagcttttgcctacaactcccttcaccatggctgaacaaaccgagaaagcttttctgaagcaaccaaaagtgtttctcagcacaaagaagactgggaagggaaagagacctggaaaaggtgggaaccgcttttggaagtccattgggcttggatttaagactcccagggaagccatcgaaggaacctatattgacaagcagtgccccttcactggcaatgtttccatcgtggccgt

SEQ ID NO: 179154 - DNA, 252 bp, Glycine max
caggcagcctcgaaacctcgtccaattcttgtgcggtttatcatgggggatagtcagtattcgttttctctcaccacatttagcccttctggaaagcttgttcagattgagcatgctttgacagccgttggctctggagaaacgtctttgggaatacaagctgcaaatggagttgtcattgctaccgagaagaaattgccatctatattggctgatgacacatcatggcatgggtcccgatttcgagtttgg

SEQ ID NO: 179155 - DNA, 253 bp, Glycine max
ttttggcagcaaggatggcgtcgagaccagaggtagttgcgccgcctgagcttttctacgacgatgccgaagctcgcaagtacacctcttcttcccgtattgttcaaattcaggcgacgctgtcagagagagctctcgaactacttgctttggctgatgacagcgttcctaaattactccttgatatcggttgtggatcgggacttagcggtgagacactctccgagaatggacaccattggattgggcttga

SEQ ID NO: 179156 - DNA, 271 bp, Glycine max
cggctcgagttctagtttcccgcagtcatgggcaatgtcaagatcggaatcaacggatttggaagaattggccgtttggtggccagggtggctctgcagagagacgatgttgaactcgttgccgttaacgatcctttcattaccaccgattacatgacatacatgttccaatactcacagtgttcacgggcactggaagcatcacgatgtcaccgttaaggatgagaagacccttctcttcggtgacaagccagtcactgtttttggacac

SEQ ID NO: 179157 - DNA, 267 bp, Glycine max
gagtagcggcattaaaaatgcagatcttcgtgaatactctgacagggaagactataaccctcgaggtcgagagcagcgacaccatcgacaatgtcaaggccaagattcaagacaaggaaggcattcctccggatcagcagcgtttgattttcgccggaaagcagcttgaagatggaaggacccaggccgattacaacatccagaaggaatcaacccttcatctcgtcctcaggcttcgtggtggcatcatgagcctccctcatggtt

SEQ ID NO: 179158 - DNA, 207 bp, Glycine max
ctttgttgtgagctataagctagtttatcgtgaggagaatatgaagtcgtatgtgttctttgttgctgcagtaggtttggtagcatggccatgacatggtgcagggtaccaaagggtccctctccgagtgacaactggctatagagagcgttcatcggaggtaaattccccaatgctcaggcttgctctggaacgacacaatatccg

SEQ ID NO: 179159 - DNA, 259 bp, Glycine max
ttctgattcctttcttcagaattccaagttttcatttcgttagggacaaaagattgtgagatagagtatggctggataatgcgaaggtcctgctatcggaatcgatttgggaacgacgtactcttgcgtcggcgtgtggcaacagatcgtgttgaaatcatagccaacgatcagggtaatagaactaccccatcctacgtggctttcaccgaaacagaacggttgatcggcgatcggcgaagaacaggtcgctatgaac

SEQ ID NO: 179160 - DNA, 261 bp, Glycine max
gttgcaggaaaaatggtttcgctgaaactgcagaagcggctcgccgcgagcgtgctcaagtgtggcagaggaaaggtttggcttgaccccaatgaagtcaacgaaatctccatggccaattctcgccaaaacataaggaagctggttaaggatgggtttatcatcaggaagcccaccaagattcactctcgctcacgtgctcgtcgaatgaaggaagccaagaggaaaggacgtcactctggatacggtaagcgtaagggt

SEQ ID NO: 179161 - DNA, 257 bp, Glycine max
ctaagacggcgtcttcataaacgcctttcttctccgtttccgtttcctcgttcgaattcgctttttgatctgcgaaaatgagagagtgcatctcgactccacattggtcaggctgctatccaggtcggaaatgcttgctgggagctctactgcctcgagcacggcatcgggctcgatgggcaaatgccaagtgacaagacagttggcggtggtgatgatgctttcaatactttcttcagcgagactggtgctggaaa

SEQ ID NO: 179162 - DNA, 272 bp, Glycine max
ctattaactatgaagcctaccctactattatccctttccttcctgcctctctttgctttcctggctctttcagaagatgtcgaacaagttgtggacataagtggcaaccccattttcccaggtggcacatattacattatgccatcaacttggggcgctgccggtggtggattgaaactaggccggacaggaaactcaaactgcccagttactgttttgcaagattactcagaaatcttccgtggcacaccagtcacattcagcatacctgg

SEQ ID NO: 179163 - DNA, 211 bp, Glycine max
cgttcgtcaccatgactttcaagcgcaggaatggaggtcgcaacaaacacggccgcggccacgtcaagttcattcgatgctcgtactgcggcaaatgctgccctaaggacaaggctatcaagaggtttctggtgacgaacattgttgaacaggctgaagtcagagatctgcaggagggttgtgtctacgaacaatacacgcttccgaagct

SEQ ID NO: 179164 - DNA, 257 bp, Glycine max
gagatatgggatgccatcagaagcataaggatagtcctcaatcaaaagacgaactccatggggagcagatgggtccttaacagcaactcctctctttacaagatcattaggtaatgcttgatcagtgaaaacccagtccttgtaaatgacagcggacatttccatagagtacctaccccacaagaatgttttctctataataccatctgcattgaccagggctttccgggcaagtgaattaatattcatggtgtcac

SEQ ID NO: 179165 - DNA, 259 bp, Glycine max
atttgagggtctctgccatgtgatcaaggatgtgttgggtgacaaggtggagaaagttgtggtgtctgatcgtgttgtggattctccttgctgtctcgtgactggtgaatatgggtggacagccaacatggaaaggattatgaaagcacaggcattgagggacagcagcatggctggatacatgtcgagcaagaagaccatggagattaaccctgagaaccccatcatggatgaactgaggaagcgagctgatgctgac

SEQ ID NO: 179166 - DNA, 259 bp, Glycine max
tgatgataaaatggcggaataccttgcttcactgaatcatgaagaaacaagactagcagtttcctgtgaaagatccttccttgaaaagttggaagggtcttgccgcactcctattgcaggctatgctagcagaaatgaggatggcaattgcttgtttagaggattagttgcatcccctgatggaatccgtgtgcttgaaacttccagaattggcccatatgcgttcgcagatatgataaagatgggtaaggatgctgga

SEQ ID NO: 179167 - DNA, 240 bp, Glycine max
ttcagtgagagatcgttgttcacttgatcttatcataatcgacagcgtcaattgatgaacatgctgatcagacacatcgccgtcggaaagtctgaagaagtgactcatcccgacacgttgaaggaggctttggctgagttcatctcaaccttcatcttcgtgttcgccggattaggctcctgcatcgcctacaacaagctcatcgacaacggcgctgactatcctgccggcctcatctcc

SEQ ID NO: 179168 - DNA, 246 bp, Glycine max
gtttgttgtgagctataagctagtttatcgtgaggagaatatgaagttgtttgtcttctttgttgctgcagtagttttggtagcatggccatgccatggcgcaggctaccaaaggttccctctccgaatgaaaactggctatggtgagcgttcttcggaggtaaaatgcgtcagttttaggcttgctgtggaagcacacaacatccgagcctttaaaaccattcctgaagagtgcgttgaaccaac

SEQ ID NO: 179169 - DNA, 267 bp, Glycine max
tgcctatcctacctgatgcagggaggaacaccttcaacactttgctgcagcggagtcaagaacattcttggctctgctgtcaccaccgttgacaaaccaactgtgtgcaactgtctcaaggcggatgctgctaggtacaacatcaatgaccagtatcctcaggcactccctggtttctgcaaggtcaacgtcccttacaagatcagccgctccactaactgtgcaagcatcaagttctgaacaagccatggacagatttgctcattt

SEQ ID NO: 179170 - DNA, 281 bp, Glycine max
cctcaaacgtagtatacgagttcttcacagcacagagccttccagcgttattatttttatattatctatgtacatagaacatgggagttctccggtacatttgagtacttgtctgatctaatgggcagtggccatcatcaccataagaagaagaagaagcagcttccaaaccgtggagctaaatgtgagaatggattgtgatggttgtgagcttaaggtataaaacgctctctcttcactaagtggggtgaaatctgtggagatacaccgctaacagcaga

SEQ ID NO: 179171 - DNA, 278 bp, Glycine max
cggtttttgagtgcggtgcggcgatcctagcactctcttctgcagctttcgccgacagcttcattcaccatggctgagcaaaccgagaaggcttttttgaaacaaccaaaagtgtttctcagctcgaagaaaactgggaagggaaagagacccggaaagggtgggaaccgcttttggaaatccattgggcttggatttaagactcccagggaagccatcgaaggaacctacattgacaagaagtgccccttcactggcaatgtttccatccgtggccg

SEQ ID NO: 179172 - DNA, 275 bp, Glycine max
ctcttctttttactctctttctgtctctctctacgctttctcgttcgacatccctcaagggatccactaactgaaggagaaatggggttgacattcaccaagcttttcagccggcttttcgccaagaaggaaatgcgaattctgatggtgggtctcgatgcagctggtaagaccaccatcctgtacaagctcaaacttggagagatcgttaccacaattcccaccattgggttcaatgtggagactgtggaatacaagaacattagtttcactgt

SEQ ID NO: 179173 - DNA, 272 bp, Glycine max
gagaaaagataaaaaaaacaacagtggtacgtgatgccaccgaagttcgatccctcgcaggtggtggacgtgttcgtccgagtcaccggcggcgaggtcggcgcggcgagttctctcgccccgaagatcggtcccttgggactctccccaaagaagatcggagaggatattgcgaaggaaaccgcgaaggactggaagggccaccgcgtgacggtgaagctaaccgtgcagaaccggcaggcgaaagtgacggtggtgccatccgccgccgc

SEQ ID NO: 179174 - DNA, 265 bp, Glycine max
ctcttcttctcttgcggcttgggttttagcgcagttcttctagatttaaggaagatgagtaaggaaaaggttcaactcagtattgtggttattggccatgttgactctggcaatgtcactaccactggccacctgatctacaagcttggaggcattgacaagcgtgttattgagagatttgagaaggaagctgctgagatgaacaagaggtctttcaagtatgcctgggtgcttgataagcttaaggctgagcgtgaaagaggaa

SEQ ID NO: 179175 - DNA, 263 bp, Glycine max
caggttggagtgagcgaagaatacgtattctagcgattcatggggtggaccgttggagataaacgccacggactcggcgacggaggacgagcggagcggaacctgcaggacgttgacagggcagcgctgtcgcgtcccttggatgagacgcagcagagctggctccttggccccggcgagcagaagaagaagaagtacgtcgatctcggctgcatcatcgtcagccgcaagatcttcaagtggaccctcggtacaatcctctt

SEQ ID NO: 179176 - DNA, 258 bp, Glycine max
gtgatctgaaggatttatacataaactcagccgtgcaagttgatgtttctggaaaccgcaaggctgttgttattcatgtcccttacagattaaggaaaggtttccgtaagattcatgttaggcttgtcagggagcttgagaagaagtttagtggcaaggatgtaatcttggttgccacccggaggattttgaggccaccgaagaagggttctgctgctcagcgtcctcgcagccgcactcttactgctgttcatgaag

SEQ ID NO: 179177 - DNA, 257 bp, Glycine max
ctacgtctgggtagctgcagggaatcagccagatcttgagaagaacgtgggtgttggagggtacggttatccagctttagtggcccttaaccttaagacagctgtttatgctcctctcaagagtgcttttgaacttgaccagattatagaatttgtgaaagaagctggacgtggaggcaaagggaatttgcccctgcaaggcactccaaccattgtaaagacagaaccatgggatggccaagatggagaaataattg

SEQ ID NO: 179178 - DNA, 264 bp, Glycine max
gggttcttgaggaagaagaaaaaaaggtgaaatatagagtgaagaagaagaaatagagggttttggtgtttgaatcgtgaaaatgttcagaaaccagtacgacacggacgtgacgacatggagcccggcggggaggctgttccaggtggagtacgcgatggaggcggtgaagcagggctcggcggcgatagggctccgatccaagacccacgtggtcctcgcatgcgtcaacaaggctaactccgaactctcatcgcaccagaa

SEQ ID NO: 179179 - DNA, 261 bp, Glycine max
cacaaaagcccaaccctctctctcgctgctggtctcccccatttggcattcgcagatcgaatacgagtaatttcactgaatcttattgaagatgtttctcacaagaactgagtatgaccgacgagtcaacaccttttactctgaaggtcgtttatttcaggttgaatatgcaatctatgccatcaagctgggatcaactgcgattggattgatgacgaaagatggtgttgtacttgcagttgaaaagcgcatcacttcacc

SEQ ID NO: 179180 - DNA, 258 bp, Glycine max
tccttcaatcatatagcattctaagaaatgaagagccctaccattttcattctctttctactttctgccatctacacctcactcctaccttcagccaccgctcaagtcgtggttgacatggaaggtaatgatcttcaaaatggtgggaaatattatgtgttgccagtaatagagtcatcatatggtggaataagagtagccgcaactggaaaagaaagatgccctctcactgttgtacaatctgccgatccgtatgat

SEQ ID NO: 179181 - DNA, 262 bp, Glycine max
gttgagaactaagaaggagaagcaaatggcttcctcaatgatctcttccccagctgttaccactgtcaaccgtgccggtgccggcatggttgctccattcactggcctcaagtccatggctggcttccccaccaggaagaccaacaatgacattacctccattgctagcaacggtggaagagtgcaatgcatgcaactgtggccaccagttggccagaataagtttgagactctttcctacctgccagaccttgatgatgca

SEQ ID NO: 179182 - DNA, 260 bp, Glycine max
gttcactccattgttcgcgaagtggtgaggaacgtttccaagaaagatccccgcatgcttgccagtctcattagacttcactttcatgactgttttgttcaaggatgtgacgcatcagttttgttgaacaacactgccaccatagagagtgagcaacaagctctgccaaacaacaactctctaagaggtttggatgttgtgaacgacatcaagacagcagttgaacaggcttgccccggcgtggtttcttgtgctgatat

SEQ ID NO: 179183 - DNA, 258 bp, Glycine max
ctcacctcaacacagcagaagcaacaatgaagaagaagatgatggcaagcacggccatctccctcgtcatcgccgcgctcttcctcttctcctccgtccactctttctacctccctggtgtcgctcctcgcgatttccaaattggtgacccccactttgtcaaagtgaacaagttatcatctaccaagactcaacttccatatgactactacaacatgaagtattgcaaacccaaaacgatattgaacaatgcagaaa

SEQ ID NO: 179184 - DNA, 259 bp, Glycine max
caatccgtgccttgaacctatctaccatcatcaattggtacgcttggtatgataatgacgaggttggtggctggagtcaagtttatgaggggcttacattggttacagtaagaggggcagggcacgaggttccacttcataaaccccgccaaggttttatccttttcaagacattcttggaggacaagaacatgccattgccaattgatagaagccttagtggcccaactgataaatcactgaacaagaacattcggtt

SEQ ID NO: 179185 - DNA, 256 bp, Glycine max
gataactagaaacagtgtgatgaaaatgaaggtccttgttttcttcgttgctacaattttcgtagcatggcaatgccatgcgtacgatatgttccctctccgaatgaacactggctatggtgcccgtactccggaggtgaaatgcgcaagttggaggcttgctgtggaagcacacaacatctttggctttgagaccattcctgaagagtgcgttgaagcaacaaaggaatacatccatggcgaacaatatagatca

SEQ ID NO: 179186 - DNA, 261 bp, Glycine max
aagccaccgtaccgtgttgcctctctgcaatctacagccaaaatgcctttcaagaggtacgttgagatcgggagggttgcccaaaccaactacggcaaggaatatggcaggctcgtcgtcattgtcgacgtcattgatcagaacagagctcttgtcgatgcccctgatatggtgaggtcccaagtcaatttcaaaaggctttccctaaccgatattaagattgacattaagagggtccctaagaagaaagatcttgtcaaa

SEQ ID NO: 179187 - DNA, 264 bp, Glycine max
catcgctccgcaccagtttcaccgcacgaatatcttgttgtttggagcgatccgagaaaaactctgtaaacatgttggtttaccaggacctccttacaggtgatgagcttctctctgactccttccgttacaaggaaattgagaatggaatgctgtgggaagttgaggggaagtgggttgttaaaggagcagttgatgtagacattggtgcaaacccttctgctgagggtggaggagaagatgagggagttgatgatgcagctg

SEQ ID NO: 179188 - DNA, 259 bp, Glycine max
cggagggatatggaatggtggtgggggagctggagaaaacaacttttttattgcctcatttttctttgaagttgccgatgaggctggttttgttgatccaaacgcccccaatgccaaagttcgtcctgtggattttgagaatgcagcaaaggttgcctgtaacacagaattaaaggatctcaaatccattttccctcgtgttaaggatggagacgttccttatatatgcttagatcttgtatacgaatatacattgctc

SEQ ID NO: 179189 - DNA, 257 bp, Glycine max
gagtgagagacggcaaagacggaggagaggtcgcatacgcaaaaatggtgaagtttctgaaaccaaacaaggccgtcattgtccttcagggacgctacgccggcaagaaagccgtgatcgttcgaaccttcgacgaaggaactcgcgagcgcacctacggccactgtttggtggcggggataaagaagtaccctgcgaaggtgatcaagaaggactcggcgaagaagacggcgaagaagtcgcgcgtgaaggcgttc

SEQ ID NO: 179190 - DNA, 253 bp, Glycine max
aaaacatttgtcagatttcaaggatgaccccgacctctatgttttccccaacttgaagtacgtggggattgaattgtggcaggtgaaatctggtactttgtttgacaatgtcttaattactgatgatcctgagtatgctaagcagctggttgaagaaacatggggcaaccacaaggatgctgagaaggcagcatttgaggaggccgacaagaagacggaagacgaggaatcaaaggatgacccagttgactct

SEQ ID NO: 179191 - DNA, 258 bp, Glycine max
caggaatttaatgaaaccttatatgatgaatgggttaacaagggcgacgcaccggcattgccagagactcttaaaaattacaacaagctgttgtctcttggcttcaagattgtattcttgtcaggaagatatcttgacaaaatggccgtaacagaagcaaacctaaagaaggctggcttccacacatgggagcagttaattctcaaggatccacatcttatcactccaaatgcactttcatacaaatcagcaatgaga

SEQ ID NO: 179192 - DNA, 241 bp, Glycine max
  unsure (1)..(241): unsure at all n locations
ctttcctaatcccatgtactacattgagtagtaccttcacctctctcaacaatctagctagagtttgactctatctatatgctataaggtatgctgatatgcactattcatataggagcattagctatgtttgttaatgtcactttatgttatgtgggtaagtcacctaagacactccacgtanntacttgttgtctcttacgcggctttaataaatcttctgcccttgttccatatttag

SEQ ID NO: 179193 - DNA, 266 bp, Glycine max
caacaatcatgtcggacgaagagcaccatttcgagtccaaggccgacgccggagcctccaaaacctaccctcagcaagccggtaccatccgcaagaacggctacatcgtcatcaaaggccgcccctgcaaggttgtggaagtttcgacttccaaaactggaaagcacggtcacgctaagtgtcactttgttggaattgatcttttcactgccaagaaacttgaggatattgtgccctcttctcacaactgtgatgttcctcatgtg

SEQ ID NO: 179194 - DNA, 266 bp, Glycine max
ctggtttcggattggagggattgacgctgcgtctcttcctcttctctttcgatccacccctcattcctactctcccaatccaaccacctcagcctcacactcacatatacacatatctgaacgcgtatcgtccctcctatggcttcaaagcgcatcctcaaggagctcaaggacttgcagaaagacccaccaacttcttgcagcgctggtccagtagctgaggacatgttccattggcaagcaacaataatgggtcctgctgatag

SEQ ID NO: 179195 - DNA, 259 bp, Glycine max
cttgaggctagggttaccggattcttgcgttttaatatctgcaattcagaagcatggggcactccaatgtgtggaattctcaccctaagaactacggacctggttctcgcacttgccgtgtgtgtgggaatcctcatggattgatcaggaaatatgggcttatgtgttgcaggcagtgcttccgaagcaatgacaaggaaattggcttcatcaagtatcggtgaaagattagttttccacctgccccacccggtttgga

SEQ ID NO: 179196 - DNA, 247 bp, Glycine max
cctttgttgtttcttgtggttttggagtctgcagcaatgtggggttcgatggtcggggaagcgcgtagggcagcgtgcaactggaactgggtttcgctccgaagcatgggtggcggtcccagaacctttctcggcggagtgaacaagtggaagtagaaccgcatgcacgaaaagctctacagagactggcagaacagaatcataccacgagagaagcagctctagccagctccgattcggtcccaca

SEQ ID NO: 179197 - DNA, 255 bp, Glycine max
ctacattcctcgacaagcttaacttcaccgtcagttgcaggaaaaatggtttcgctgaaactgcagaagcggctcgcagccagcgtcctcaagtgtggcagaggaaaggtttggcttgaccccaatgaagtcaacgaaatctccatggctaatactcgccaaaacataaggaagctggttaaggatgggattattatcaggaagcccaccaagattcactctcgctcacgtgcacgccgaatgaaggaagccaag

SEQ ID NO: 179198 - DNA, 256 bp, Glycine max
ctttgttgttgtaactcgttcttcttcttttgttgttctgtgtttgtgtttgtattttctctcacctgaaaatgtcttgctgcggtggtaactgtggttgcggaagctcctgcaagtgcggcaacggctgcagacgctgcaagatgtacccagacttgagctacactgactcaaccaccaccgaaacattcgtgcaacggagtggcacctgttaacgctcaatttgcatggtcctgaaatggaggtgccccctgag

SEQ ID NO: 179199 - DNA, 254 bp, Glycine max
cttgaggctagggttaccggattcttgcgttttaatatctgcaattcagaagcatggggcactccaatgtgtggaattctcaccctaagaactacggacctggttctcgcacttgccgtgtgtgtgggaatcctcatggattgatcaggaaatatgggcttatgtgttgcaggcagtgcttccgaagcaatgccaaggaaattggcttcatcaagtatcggtgaaagattagttttccactgcccaaccggttt

SEQ ID NO: 179200 - DNA, 254 bp, Glycine max
atccttgttttcttcgttgctacaattttagtagcatggcaatgccatgcgtacgatatgttccctctccgaatgaacactggctatggtgcccgtactccggaggtgaaatactcaagttggaggcttgctgtggaagcactcaacatctttggctttgagagcattcctgaagagtgcgttgaagcaacaaaggaatacatccatggcgaacaatatagatcagactccaaaacagttaaccaacaagctta

SEQ ID NO: 179201 - DNA, 264 bp, Glycine max
gtactcaccctcattaccaacacgaaagcatagccaaaaccttttttcgaagtctctgattttcctaatggctccggcaaaggcagagaagaagccggcggagaagaagccagcggcggagaaggcaccggcggagaagaagccgaagggctagaagaagatctcgaaggaaggagggagcgagaagaagaagaagcgcacgaagaagagcgtggagacctacaagatctacatcttcaaggtcctcaagcaggttcaccccga

SEQ ID NO: 179202 - DNA, 195 bp, Glycine max
ctataagctagtttatcgtgaggagaatatgaagttgtttgttttctttgttgctgcagtagttttggtagcatggccatgccatggcgcaggctaccaaaggttccctctccgaatgaaaactggctatggtgagcgttcttcggaggtaaaatgcgcaagttttaggcttgctgtggaagcacacaacatccg

SEQ ID NO: 179203 - DNA, 256 bp, Glycine max
cagaagagcgtcgcagttgtaaccctaatcagaagaagcgcagcttcaagcgagtgacagccaccagccatgggtcgtatgcacagccgcggtaagggtatatcctcttctgctttgccctacaaaaggacacctcctagctggctcaagatctcttcgcaagatgtcgaagaaaatatctgcaagtttccgaagaaaggtttgaccccgtctcagattggtgtcattctcagagattctcacggtattgctcagg

SEQ ID NO: 179204 - DNA, 249 bp, Glycine max
  unsure (1)..(249): unsure at all n locations
aattgctgccttgttctctgcagcaagtagaactctggacttcttctatggttggtattatgatccggttttctatggtgactatccggagagtatgaaatcttcagtaggatctnggctcccaaaattcacaaaagctgaatctgaaggtctaaaaaattccatagattttcttggtgtgaattactacaccacttattatgcggaacatgctgaacctgtcagtgccaaccgaaccttctacacaga

SEQ ID NO: 179205 - DNA, 227 bp, Glycine max
atcaagccagagcacaaagaggggttcctagacaaagttaaggacaagatccatggtgagggcggtgacgccgagggcgagcagaagaagaaggactaggacaatatgctacatggtcatgaaaattgctcatgcaagagtaccagcagttacagtgattgaacttctggatcatctatatcattaaacagtttatggggccatagtactcgtcggctgtggcttaa

SEQ ID NO: 179206 - DNA, 251 bp, Glycine max
atcgcagactcaacactctctccagacacttccttcattacaatggcttctcacgacggcatctccgctgcttcttcagattccgttttcaatcacctcgttcgtgctcccgaagatcctatcctcggggtaactgttgcttataacaaagatccaagtccagttaagctcaacttgggagttggtgcttaccgaactgaggaaggaaaacctcttgttttgaatgtagtgaggcgagttgagcagcaact

SEQ ID NO: 179207 - DNA, 251 bp, Glycine max
taacacacttaaaacgaccaataatggcgtttgctcacgacttggagttcgaatcgtcttcttcccctctggtgttctcagtacggaggagtgaaccggagctggtggctccggcgaaggccagtccccgcgaaattaaggtcctatctgagatagattctcaggcgggtcttcgtacccaaattccaatcatacagttctaacgtaacgagccatacttggcaggcaaggacccagttcaagccaatcga

SEQ ID NO: 179208 - DNA, 263 bp, Glycine max
  unsure (1)..(263): unsure at all n locations
caaaagtaaacactgcaatagcaagagttttcaaatggcagagggaaaaggtagagtttgtgtcacgggaggcactgggttccttggttcatggatcatcaagagactccttgaagatggatatgctgttgataccactattagatctgacccaggacgcaagagcgatgttagcttcctcacaaacctacctgacgcatcagcanagctggaaattttcaatgctgatctcagcgaaccaaagagttttggtccagcagttg

SEQ ID NO: 179209 - DNA, 254 bp, Glycine max
aagttatagaaaaggtgcatctgtaattaggatgctgcaaaaccatcattggtgccgaatgctttcagaggtcgctggcttcatatataaaaagacatgcttgctcaaatgctaagactgaggatctatgggctgcacttgaggaacgatctggtgaacctgtgaacaagttaatggcctcatggacaaagcagaagggatatcctgatgtatctgttaaagtcaatgatcagaaattggagtttaatcagtcg

SEQ ID NO: 179210 - DNA, 179 bp, Glycine max
ttcataaacgcctttcttctccgtttccgtttcctcgttcgaattcgctttttgatctgcgaaaatgagagagtgcatctcgatccacattggtcacgctggtatccaggtcggaaatgcttgctgggagctctagtgcctcgagcacggcatcgggcccgatgggcaaatcccaagtg

SEQ ID NO: 179211 - DNA, 251 bp, Glycine max
cataactagaaacagtgtgatgaaaatgaaggtccttgttttcttcgttgctacaattttggtagcatggcaatgccatgcgtacgatatgttccctctccgaatgaacactggctatggtgcccgtactccggaggtgaaatgcgcaagttggaggcttgctgtggaagcacacaacatctttggctttgagaccattcctgaagcatgcgttgaagcaacaaaggactacatccatggcgaacaatata

SEQ ID NO: 179212 - DNA, 251 bp, Glycine max
ctttgattctctgttctctgttttgttctgtttcgcgtattgtcttcatacaggaacttgaacaatgaagaatgcaaagggcaagggagcagcaagggcctcaaaagaatcactgaagcccgttgatgaccgaaacgttggaaagcggaaggcttccggtaagcctgggagaagtagtgcaccaaagaaggagaagaaggccaagaaagaccccaacaagcctacaagaccacccagtgctttctttgtgt

SEQ ID NO: 179213 - DNA, 258 bp, Glycine max
agaccagatgtcttccgaattcgaagttaatttgcaagatggctaaggacaaggctcagatcaacattgtggtggttggtcatgtggacactgaggaggcaaccaccattaacgagctgaagaagcctgttgtggagaaagaagctccagggcatgccatatgagggcatgcacgtacggcctcggaggggaaccagaaaattatgttaacaaaataatctggaaccctaatgtatcagtgtcatcatcagtgtgtag

SEQ ID NO: 179214 - DNA, 269 bp, Glycine max
tagaaacagtgtgatgaaaatgaaggtccttgttttcttcgttgctacaattttcgtagcatggcaatgccatgcggtacgatatgttccctctccgaatgaacactggctatggtgcccgtactccggaggtgaaatgcgcaagttggaggcttgctgtggacagcacacaacatctttggctttgagaccattcctgaagagtgcgttgaagcaacaaaggaatacatccatggcgaacaatatagatcagactccaaaacagttaa

SEQ ID NO: 179215 - DNA, 266 bp, Glycine max
caggaatgctggcatttggagaatagctgctatcaatgaagctggagggtggaaagacagaacaacagtggagatatggaccttgctgttcgtgctagtcttaggggatggaaatttttgtaccttggagacctccaggccaaaagtgagcttcctagtactttgagagccttcagattccagcagcacagatggtcttgtggtcctgctaatttgttccgcaaaatggtgatggagattgtgaggaacaagaaagttaagttttg

SEQ ID NO: 179216 - DNA, 268 bp, Glycine max
ctataagctagtttatcgtgaggagaatatgaagttgtttgtcttctttgttgctgcagtagttctcgtagcatggccatgccatggcgcaggctaccaaaggttccctctccgaatgacaactggctatggtgagcgttcttcggaggtaaaatgcgcaagttttaggcttgctgtggaagcacacaacatccgagcctttaaaaccattcctgaagagtgcgttgaaccaacaaaggactacattaatggcgaacaatttagatca

SEQ ID NO: 179217 - DNA, 271 bp, Glycine max
cagcaatgaaagcaataagtccctccttcctctgccttataattcttgtgacccttttacgctggtagcattgaaagtgtcacagcaaacgtgaagccaagccattatgctgcacccttcaataggagtgtttttccttctggttttctatttggaataggctctgcagcttaccagatagaaggagcagcagctatagatggcagaggaccaagtatatgggacacctatactaaacagcaaccagggaagatttgggatcatagtgatg

SEQ ID NO: 179218 - DNA, 271 bp, Glycine max
cttgctactgagtttccacactgcataccttacgtcttccgaattcgaagttaatttgcaagatggctaaggaaaaggctcagatcaacattgtcgtggttggtcatgtggaccctgaggaggcaaccaccattaacgagctgaagaagcctgttgtggagaaagaagctccagggcatgccatatgagggcatgcacgtacggcctcggaggggaaccagaaaattatgttaacaaaataatctggaacgctaatgtatcagtgtcatca

SEQ ID NO: 179219 - DNA, 272 bp, Glycine max
  unsure (1)..(272): unsure at all n locations
ggagtcgcctcgtgtttccgtttccgtttcaatttcctctcacaggctttaacattancagctcgagataagacatggaccggatgaaaggcccatggagtccggaggaggacgaggctctgcagaagctggtggagaaacacgggcccaggaactggtctctgatcagcaagtccatcccgggccggtccggcaagtcctgcaggctccggtggtgcaaccagctgtccccccaggtggagcaccgggccttcacggccgaagaggacgac

SEQ ID NO: 179220 - DNA, 280 bp, Glycine max
ttgcaaagaaaatacacattacattactaagtctttgttcatttgagtagtagtgatggctagcctcaaggttgcatgtgtggttgctgtgatgtgcatggttgtggtggccatgagtgctgcacccatggcacaggccgcaatcacgtgcgggcaggtcgccggcgacatgtctccgtgcttcagttatcttcgaagcggcggaaaaccgtcgcaggcctgctgcaacggagtgaagtccctcagcagcgcggcgaagaccaccgcggaccgccagggg

SEQ ID NO: 179221 - DNA, 268 bp, Glycine max
atttgatcagaagtacaaagctcttcaaaacccaaacatcagctccactgaccacccctactgctctgctctgcaatggccgacgaggaacctgttgatcagaagagatatcttgaagagtcttgcaaaccaaaatgtgtaaaaccattactggaataccaggcgtgcattaaaaggatacatggtgatgattctgggcagaaacactgcactggacaatattttgattattggtcttgtattgacaaatgtgttgcaccgaagctat

SEQ ID NO: 179222 - DNA, 264 bp, Glycine max
ctcagtgaaagagaatccgaggcgaagagaagagaaaaattaagatggaggggaaggagcaggatgtgtcgctgggagcgaacaagttcccggagagacagccgattgggacggcggcgcagagccaagacgacggcaaggactaccaggagccggcgccggcgccactggttgacccgacggagtttacgtcatggtccttttacagagcagggatagcagagtttgtggccacttttctgtttctatacatcactgtcttaa

SEQ ID NO: 179223 - DNA, 265 bp, Glycine max
  unsure (1)..(265): unsure at all n locations
gccttcaaatcacacactctcttcaatttctagggttttgctattgctttgcctccgttccccctttctcagcaaaaaaacgctttttctcttctccttcgtatctattctttgcgtttggtttttggttgattgaaggcattcacagcgtaattcgttgctgnatttcaatcgatttatctaaccaggactgagtgagctaatggagtctaaaggtgggaaatagaagtctagtagtagtagtagtaaatcaattttttacgaa

SEQ ID NO: 179224 - DNA, 265 bp, Glycine max
catggtctacccggagccttggtgtatgccacgactttttacggctggtatagctgaattctatgagggatattacgcaaataagggtgtaaatatcattaaaggaactgttgctgttggattcacttctaattctgatggagaggtaaaagaagtcaaactaaaggatggcagggtcctggaagctgatattgttgttgttggtgttggaggaaggcctcaaacagtcttagtcaaagggcaggttgaagaggagaagggtgga

SEQ ID NO: 179225 - DNA, 265 bp, Glycine max
tgcagcagtgcagggaagttggtgtgtgtcaccggtgctgccggttatattgcttcatggattgtcaagttcctacttgaacgtggttacactgtcagggccactgttcgaaacccaaatgatcacacgaaggtagaacatttgctaaaacttgaaggtgcaaaggagagactgcacctttttaaggcagatcttttgggtgaaaattcttttgactccattgttgagggctgtgatggcgtctttcatactgcttctcctttta

SEQ ID NO: 179226 - DNA, 263 bp, Glycine max
ggcactgtggcagaagtcctaggagtgttgaacagagatgctaaatgaagacgatcttgacgtctgagaccatgaatattcccgacggcgtgcagcatcaaggttcacgctaaggttatcgaggttgatggccctcgtggaaaactcgtgcgagacttccagcatctgaacttggacttccaacttattaccgacgatggcggtacaaggtagctcaagattgattcttcgtttggttctcgtacaacctccgccgccatccg

SEQ ID NO: 179227 - DNA, 273 bp, Glycine max
attgaattgacaatgaggcctgctcttgctttgcttcctcttctatttgctttcttgttagctgccactacggaatcaagaaaagatccatgggaatattggaaaatgatcatgaaagatcaggaaatgccagaaggacttcaaggtcttgtttcatttcaatctgaaaataaccctaagactcaagagcagcttggtaaaggttccaaaaaccattgtgaagagtctctagttacaaatacacaagttaacagtgacttcgaacccatacca

SEQ ID NO: 179228 - DNA, 274 bp, Glycine max
cctggctggtgctttggaggatgttgttaaggcatctcagcttgagatcatcgagctgaagcatactgtgggtgaattaagggcagagttgagcttacttaagcagcatgtagaagctcaggccaaggagcttgaccatagaatgcatcgggtagaggaacttgaagagaaggagagagtggcaaatgaaaatattgagggactaatgatggacattgctgccgctgaagaagaaattaacagatggaaagtcgcagcagagcaagaagctgct

SEQ ID NO: 179229 - DNA, 275 bp, Glycine max
gtccgctgcgactctctttccttccctctttttccgaatctgaatcgaaatggcttcggagactgagacgtttgcttttcaggccgagatcaaccagctcctcagtctaatcatcaacaccttctacagcaacaaggagatctttcttcgtgagctcatcagcaatgcctctgatgctttggacaagattcgatttgagagtcttacagacaagagcaagcttgatgctcagccagagttgttcattcacattattcctgacaagaccaacaaca

SEQ ID NO: 179230 - DNA, 278 bp, Glycine max
gtggagctcaattagcatatggttctaacccatatcagccaggccaaataactgggccaccggggtctgttgtgacatcagttgggaccattcaatccaccggtcaacctgctggagctcagcttggacagcatcaacttgcttatcagcatattcatcagcaacaacagcaccagcttcagcaacagctacaacaattttggtcaagccagtaccaagacattgagaaggttactgattttaagaaccacagtcttcccctggcaaggatcaagaag

SEQ ID NO: 179231 - DNA, 280 bp, Glycine max
aatgaaatgaaaaaaggtcgttggagtctactcctgatcccattagaataaaaaggtgttggaatagagggaagaacgtggaaagtggttgacgaagaagacgaagaagaagaatggagaagtcagggaagagagtgttgcttacctccaacggcgacgacatttctcaaggcattgccttccatttggtgaagcaagggtgcaggttggttttgctgggagatcagaattccctgcggagcatcgcgaacaaaatcatggattccctctccctcgcaga

SEQ ID NO: 179232 - DNA, 265 bp, Glycine max
ctctgctcgtgcctctagggttatcatatctccatttccatttcctctctctcagtttccaagaatcttaagctactgggaaagtcttacccaaccgtgagcgctgattaccagaaggccgttgagaaggcgaagaagaagctcagaggcttcatcgctgagaagagatgcgctcctctaatgctccgtttggcatggcactctgctggaacttacgacgtgagctcgaagaccggtggtcccttcggaaccataaagcacccct

SEQ ID NO: 179233 - DNA, 262 bp, Glycine max
tgaaccttccactgtggtgactctgcgatgggtgcctacaagtatgtttcagagctatggcgccagaacgagtctgatgtcatgcgcttcttgcagcgggtgaggtgctgggagtataggcagcaaccttccattgttcgtttgacaaggtctacccgccctgacaaggctcgtcgcttgggcttcaaggctaagcagggctatgtgatttaccgtgttcgtgttaggaggggtggccgaaagagaccagttcccaaaggta

SEQ ID NO: 179234 - DNA, 264 bp, Glycine max
aagaaactagacaagagagtttctgatcaccaaacagatgatgagttccttgaattgataaacagtatttgacagaattccggcatccaaatattgttgagcttattgggtactgtgcagagcatggtcaaaggcttctgatttatgagtattgcagtaatgggtcgctgcaggatgcactccattcacatgatgaattcaaaacaagactgtcatggaatgctcgcattcggatagcactcggggcagctagatccttagagt

SEQ ID NO: 179235 - DNA, 263 bp, Glycine max
gttgtctgggggtcaaaaaactgttgtcgcccttacacttatctttgccatacagcgatgtgatcctgctcccttttatctatttgatgagatcgatgcagcgcctggatccacagtacagaactgctgttggaaatatgattcgtcgcttggctgacatagcaaacactcaatttatcacaacaacattccgcccggagctagtgaaagttgctgataagatatacggagtaacacataaaaacagggtcagccgtgttaat

SEQ ID NO: 179236 - DNA, 260 bp, Glycine max
gtttgttgatccatctcttgtttcttgctttctttcttcaccatgtcacttgctgggaaaatcaccactgaaatcggggttcatgcaaccgctacaaagtggttcaacctcttcgcaacacaactccatcatgttcaaaacctaactgatagagtgcatggaaccaagctgcatcaaggtgaagactggcatcacaacgagacagtcaagcactggacttataccatagatggtaaggttacaacatgtctggagagtat

SEQ ID NO: 179237 - DNA, 265 bp, Glycine max
ttaagcttgctactgagtttccacactgcataccttatgtcttccgaattcgaagttaatttgcaagatggctaaggaaaaggctcagatcaacattgtcgtggttggtcatgtggaccctgaggaggcaaccaccattaacgagctgaagaagcctgttgtggagaaagaagctccagggcatgccatatgagggcatgcacgtacggcctcggaggggaaccagaaaattatgttaacaaaataatctggaaccctaatgtat

SEQ ID NO: 179238 - DNA, 258 bp, Glycine max
cgttggtataaattattacacctcaaatttcgtggaatatgctccaccaaccaccactaacaagacctatttccatgatatgctagccaaactttcttcgaccaggaatggtgtacccattggcacaccgactcctctgagctggctctttatctatccggagggaatttataagctcatgacatacataagggacaactacaataatccaccagtgtacattaccgaaaatggcgttgcggaatcaaagaatgactc

SEQ ID NO: 179239 - DNA, 258 bp, Glycine max
gctagacataataagatgaaaatgaaagtgcttgttttgtttgttgctacagttttggtagcatatgaatgccatggctcagactaccagaagttccctctccaaatgacaactgggtttggtgggcaatacagcaatgaggtggcatgtgccagttggaggcttggcgtggaagcaaacaacgtagtcaagtggcaaactcttcctgcagcttgcggagagtacatagctgactacgttctaggagaccaatataga

SEQ ID NO: 179240 - DNA, 256 bp, Glycine max
agtttgttgtgagctataagctagtttatcgtgaggagaatatgaagttgtttgtcttctttgttgctgcagtagttttggtagcatggccatgccatggcgcaggctaccaaaggttccctctccgaatgaaaactggctatggtgagcgttcttcggaggtaaaatgcgcaagttttaggcttgctgtggaagcacacaacatccgagactttaaaaccattcctgaagagtgcgttgaaccaacaaaggacta

SEQ ID NO: 179241 - DNA, 258 bp, Glycine max
cacacatagtagctattatactctctagagtaattgcggaatctgctagaattttctaataatggcgaaagaccgtgagcaagtcacagagcaacgtgaatactccgcgaaggactaccatgaccctcctccggcaccgttgatcgacccagatgagctcacaaagtggtccttgtacagagccgccatagctgagttcatagcaacactcctttttctttacatcaccgtgttgaccattattggctacaagagaca

SEQ ID NO: 179242 - DNA, 250 bp, Glycine max
gtcgtcgctgtttgtgtgtgtatcaggtgcagctaccaacgatggtgaaaggtcgtcaaggagagcgcgtcagactctacgtgaagggtacaatccttggatacaaaaggtccaagtccaaccagtacccaaacacatccctgatccaaattgagggagtgaacaccaaagaagaagtaggatggtatgctggcaagacaatggcctatatctacaaggctaaggtgaaaaagggtggaacccattaccg

SEQ ID NO: 179243 - DNA, 262 bp, Glycine max
tgctgtttcagccagagttagcattgaggcaggatcaacatttgggtgggagaaaattgttggagcaaaaggacaagcaataggcattgatcgttttggagctagtgctccagctggaagaatatacaaagaatttggtatcactaaggaagctgttgttgctgcagctaaagagcttatctagaacttttgattttttttgccttctggtgttggttgagagcattccatgtcatgaataagaaaaaggttaaatatcctt

SEQ ID NO: 179244 - DNA, 264 bp, Glycine max
catttactgccaatgggtgggtgcaatcatatggatcccgctgtgtcaaacctcccatcatctatggtgatgtgagccgtcccaagcccatgacagttttctggtcttcaactgctcaaagtttgaccaaacgaccaatgaagggaatgcttactggccctgttactattctgaactggtcctttgttagagatgaccaaccaagatttgaaacatgttaccagattgctttggctatcaaggatgaggttgaggatcttgaga

SEQ ID NO: 179245 - DNA, 245 bp, Glycine max
gtttgttgtgagctataagctagtttatcgtgaggagaatatgaagttgtttgttttctttgttgctgcagtagttttggtagcatagccatgccatggcgcaggctatcaaaggttccctctccgaatgaaaactgggtatggtgagcgttcttcggaggtaaaatgcgcaagttttaggcttgctgtggaagcacacaacatccgagcccttaaaaccattcctgaagagtgcgttgaaccaa

SEQ ID NO: 179246 - DNA, 257 bp, Glycine max
catgccattccgtgctctccttgatgttggtcttattaggactacaaccggtaaccgtgtgtttggtgcccttaagggagctctggatggggggttggatattcctcacagtgacaagaggtttgctgggtttgataaggagaagaaggagcttgatgcagaggttcatcggaaatatgtttttggtggacatgttgctgcctatatgaagatcttggcggaagatgaaccagagaaataccagtcacacttcagtg

SEQ ID NO: 179247 - DNA, 255 bp, Glycine max
ctgacatagagaagaagaagagagagtgatggagtgcgtattcggattggtgggtaatgggtttgcgatcgtggtggctgattcatcggcggtgcacagcatcctcgtccacaagtccaacgaggacaagatcatgctcctcgattcccacaaactcattgccgctagcggcgagcccggagacagggttcagttcacagagtacattcagaagaacgtcgccttgtatcagttccgtaacggcatccctcttac

SEQ ID NO: 179248 - DNA, 252 bp, Glycine max
gaataatcgagacacagatcatagtgatcattttttaatttctcagatttatccgacgtcgctgcagatccaccaaccgttatggctgccttcagcggtgatgaaacggcaccgtttttcggcttccttggcgccgcagctgccctcgtcttctcctgtatgggagctgcctatggcacagcgaagagtggcgtgggcgtggcttccatgggtgtaatgagacctgagctggtgatgaagtcgattgttcct

SEQ ID NO: 179249 - DNA, 253 bp, Glycine max
atacactctgctcgtagggtttctccacctagagggaaatggctcccaaaccgcctagtacgggtctgtttgttggactgaacaagggtcacgtcgtcaccaagaaggaattgcctccacgcccctcagatcgtaatgggaaaacaagcaagacggtgcactttgtgaggcacctcataagagaggtagccggttttgcaccctatgaaaagcgtataactgagttgctgaaggttgggaaggataagagggc

SEQ ID NO: 179250 - DNA, 254 bp, Glycine max
catatctccatttccatttcctctctctcagtttccaagaatcttaagctatgggaaagtcttacccaaccgtgaaggctgattaccagaaggccgttgagaaggcgaagaagaagctcagaggcttcatcgctgagaagagatgcgctcctctaatgctccgtttggcatggcactctgctggaacttacgacgtgagctcgaagaccggtggtcccctcggaaccataaagcacccctccgaactcgctcac

SEQ ID NO: 179251 - DNA, 254 bp, Glycine max
gcaaaaggccatataatttttttttatttgaaataatgtccgggatcatccacaagattgaggagaccctccatgtgggagggcacaagaaagaggagcacaaaggagaacaccatggtgagcacaaaggtgaacacaaaggagaacaccatggtgagcacaaaggtgaacacaaaggagaacaacaccatggggagcacaaggagggacttgtggataagatcaaggacaagatccatggtgatggccatgac

SEQ ID NO: 179252 - DNA, 254 bp, Glycine max
ttcggtttttctggaaatttttcttctctcagccatctctctctctctctgcgtccatggagttttgggcgtgtgaggtgaaaagtggagaatctctcaaggttgatccgggagatgacaagattatccacctttcaaatgcatgcctgggggatgtcactaaggataaagaaggtctaccagtagccctgtatgtcaagtttggtaaccaaaagcttgtacttggaacgctttcttctgaagcttttcctcag

SEQ ID NO: 179253 - DNA, 252 bp, Glycine max
gtttctctctctagcttggacgagtgaattagattcatcatcaagatgtcgtctctgatagcagaagatgtgaagagcagatcagaggtgtaccacggggacgaaatgtgccaagtgaagtccaaggagcttctcaaggaaatcgccctccccaacggccttcttcccctcaaggacatggaggagtgcggctacgacagacaaaccggcttcgtctggctcaaacaaaagaagagttacacccacaagttc

SEQ ID NO: 179254 - DNA, 260 bp, Glycine max
gttcatgaatatgtctccttgtattacccaacagatgcagcagttcaacaagatactgaactacaagcatggtggaaggaagctgtggagaagggtcatggtgacttaaaagaaaagccttggtggcctaaaatgcagacaactgaagatctcattcaatcatgctctattatcgtttggacagcttcggctctccatgctgctgttaattttggacaatatccttatgggggcttaatcctgaaccgtccaactctagc

SEQ ID NO: 179255 - DNA, 276 bp, Glycine max
taattgcaagactggcacttcgttgcttggtgatgtccctttctgttctcttcactcttggtcttgcgagagaaagccatgccagagacgaagatttttggcatgctgtttggccaaacactcccattccaagttcattgcgagatcttctaaagcctggccctgcaagtgttgaaatcgatgatcaccctatgcaaattgaagaaacacagtacccgaaaaccttcttctataaagaagaccttcatccaggcaaaacaatgaaagtacaattca

SEQ ID NO: 179256 - DNA, 263 bp, Glycine max
ggccattccgtgctctccttgatgttggtcttattaggactacaaccggtaaccgtgtgtttggtgcccttaagggagctctggatggggggttggatattcctcacagtgacaagaggtttgctgggtttgataaggagaagaaggagcttgatgcagaggttcatcggaaatatgtttttggtggacatgttgctgcctatatgaagatcttggcggaagatgaaccagagaaataccagtcacacttcagtgaatacatc

SEQ ID NO: 179257 - DNA, 258 bp, Glycine max
  unsure (1)..(258): unsure at all n locations
cgttttgtttatttgatcttaacaactagcaaagatgtttggaatcatcggaggaaacaagggtcacaagatagaggggaacttggtgattatgcgaaacaatgtgttccatatcaacagcattaccagtgttaatggtgtcatcggaaccggcattaatcttcattggaggagtcgtcgacaccgttactgctttggcgtcccacatctccatccagctacctcantcccaccaaggctgattcacatgggaaagga

SEQ ID NO: 179258 - DNA, 238 bp, Glycine max
gtttcagactgcatacctgatgtactcctgcttttcacgtctctgtctaaggggtgccctgagatcagattgaacaatggtgaaggctgtggcgttcttagcagcagtgagggtgtcactggaactattcacttcgttcaggagggaagtggtccaaccaccgtaactggatctcttgctggtcttaagcctggtctccatggtttccatgtccaatgcttggggggacactaccaat

SEQ ID NO: 179259 - DNA, 252 bp, Glycine max
ctctcctctcgttttcgtcgctagattaggtcttcctacccaaaacaaacattcaatttctgtttcagttcgcggagatcaatatcttatctaggtccatcgtcgatagaagatacgcaataccaaaggcaatgtttttgtcggattggttttatgggattctagcgtcgctcgggctgtggcagaaggaggccaagatcttattcttgggcctcgataacgctggcaaaactaccttgcttcacatgctca

SEQ ID NO: 179260 - DNA, 252 bp, Glycine max
gatatctgtaatttgtgtctgctcactcgctcttctccgccacttctgaatctattgaatcaacaatcctgtcggacgaagagcaccatttcgagtccaaggccgacgccggagcctccaaaacctaccctcagcaagccggtaccatccgcaagaacggctacatcgtcatcaaaggccgcccctgcaaggttgtggaagtttctacttccaaaactggaaagcacggtcacgctaagtgtcactttgttg

SEQ ID NO: 179261 - DNA, 249 bp, Glycine max
gtgagaaacatggcttccttaagctccttagtgctgctccttgcagctctaattctatcccctcaagttcttgcatactatgaggtattcccagtgtgaaagcctcccactgagaaaccaccagtttataagcccccagttgtgaagcctcctgtttacaagcctccagttgagaagcctccagtttacaagcctccagtagagaagccaccagtgtacaagccaccagttgagaatcgtccagtgtac

SEQ ID NO: 179262 - DNA, 250 bp, Glycine max
aggccatataatttttttttatttgaaataatgtccgggatcatccacaagattgaggagaccctccatgtgggagggcacaagaaagaggagcacaaaggagaacaccatggtgagcacaaaggtgaacacaaaggagaacaccatggtgagcacaaaggtgaacacaaaggagaacaacaccatggggagcacaaggagggacttgtggataagatcaaggacaagatccatggtgatggccatgaca

SEQ ID NO: 179263 - DNA, 257 bp, Glycine max
agtgaatgcatggcagagatgaccaagtacgtggttaatgaaccatctgttgggcttttcttatccaacatcatgctcaaaatgaagtacccaatatcatcaaagttaaaaaaaatgttgttaagaagtctcatgaaacaactttgcacacagaagatttggaggactctttcacgatgcttcaatcaatgaaagagtgtggatttcccatagctgataagatgatcagagattaaaaaatctctgataactatgga

SEQ ID NO: 179264 - DNA, 258 bp, Glycine max
gtgactgacttttcgagaaaggaaaaaaaaagagtttccggcattattccatcatgaacgctcttcccattcttctcttcttcctcttcgtttcggcattagtttatgcgaagaaaactggcgatgtgacggagttgcaaattggcgtgaagcataaaccagcatcatgtgaagttctggcacacaaaggtgacagagtcaaagtacactatcggggaaaactcactgatggaactgttttcgattctagctttgaaa

SEQ ID NO: 179265 - DNA, 262 bp, Glycine max
aacaaatcaaagccatggccacctccaacttctctattgttctctccgtctccctagccttctttttggtgctacttaccaaggcacactcgaccgataccgtttctttcaccttcaacaagttcaacccagtccaaccaaacattatgctccaaaaagatgctagtatttcatcctctggggtgttacaactcaccaaagttggcagcaacggcgtgcccacctcgggatctctcggtcgtgccctttacgctgccccaat

SEQ ID NO: 179266 - DNA, 262 bp, Glycine max
attctcaactgcgcggtgagtgagtgagagacggaaagtgcaaagtcaccgtcttctcttctcagagcttggctttgcttatcgattctctctcctctcatctttctcattcaaggtttgtaaaagatggccgatgctgaggatattcaaccccttgtttgtgacaatggaactggaatggtcaaggctggatttgctggtgatgatgctcccagggctgtctttcccagtattgttggccgacctcgacacactggtgtta

SEQ ID NO: 179267 - DNA, 264 bp, Glycine max
ctgtagtgtttgacattgtaatcacatttgggttggtttacactgtgtatgcaactgcagcagacccaaagaaggggtcattgggtatcattgcacccattgctattgggttcgttgtgggtgccaacatcttagcagcaggcccattcagtggcggttcaatgaacccagctcgctcattcggcccagctgtggtcagtggagacttcgctgctaactggatctattgggttggcccattgattggaggaggtttggctggct

SEQ ID NO: 179268 - DNA, 266 bp, Glycine max
attctccctttcctctccgaaccctcgatcactctcacgcgctcctatattcgctcctccaccgtcgctctctcgaacaaccacaacaccatcttcatcacatggcaaacgcagcatctggtatggcagtccatgatgactgcaagttgaggtttttggagctgaaggcaaaaaggacacaccgtttcatagtttttaagattgaggagcagcagaagcaggtcattgtggagaagcttggtgagcctgcccagggctatgaagat

SEQ ID NO: 179269 - DNA, 243 bp, Glycine max
cttcgattctctctttctctttcttcagaaaaattaaacccattcaaagaaagaaagaaagagcgatcatttccaatcacaatggcagatcaactcaccgatgaacagatctcggagttcaaggaagccttcagtttgttcgataaggatggcgatggttgcatcacaacaaaggagcttgggactgttatgcgttcgttgggtcagaatccaacagaggctgagctccaagacatgatcaat

SEQ ID NO: 179270 - DNA, 239 bp, Glycine max
aagagacccaacccctctcttttcttttcttcagttcggtggaaggagccgtagcagcagcggaagctctagcttgggcagcgaatcacaatggcgagaggattgaagaagcatttgaagaggcttaatgccccaaagcattggatgcttgacaaactgggtggtgcatttgctcctaagccctcatctggaccacacaaatccagggaatgcctgccactcatactcattttgcgaaa

SEQ ID NO: 179271 - DNA, 240 bp, Glycine max
cagcagagaagcactcatcattcttcgtttgtctaagatccgccttctctgaattgtaaaaatgtcgctcggagaaactgcttgttcatacgcagctctcatccttcatgaagatggaatcagtgtaactgccgacaagatcagcaccttgttggaaactgcaaaggttcaagtagatacctattggccaaccttatttgctaaacttgctgagaagaaaaatcttggcgatttgatagc

SEQ ID NO: 179272 - DNA, 239 bp, Glycine max
gcctggccctgcaagtgttgaaatcgatgatcaccctatgcaaattgaagaaacacagtacccgaaaaccttcttctataaagaagaccttcatccaggcaaaacaatgaaagtacaattcagcaagcctccctttcaacaaccatggggtgttggtacatggttaaaggaaattaaagacactactaaagaaggatatagttttgaagagctatgcatcaagaacgaagccattgagg

SEQ ID NO: 179273 - DNA, 241 bp, Glycine max
ttttgctcctgtcacatctcctaacactgatggcatcaacccagattcttgcacaaatgtaagaattgaagattgctatatagtttctggtgatgactgtgtggctgtaaagagtggatgggatgagtacggcataaaatttgggtggcccaccaaacagctaatgataagaaggctaacatgcatttcaccatacagtgcaaccattgccttgggaagtgagatgtcaggtggaatccaa

SEQ ID NO: 179274 - DNA, 244 bp, Glycine max
gctatgcttcttggcaagagttagatcggacgaggattgcgtgtacacggtgtacgttcggacgggttcgatcatcaagggaggcaccgattcagtaattggtctgaagctatacgacaagtccggctacggcatatacatcaccaacctcgaggcatggggcgggttaatggatccgggtcacaactactacgagcggggcaacctcgacatattcagtggtagaggcccttgcttggaagca

SEQ ID NO: 179275 - DNA, 246 bp, Glycine max
agaagaggttcaaatttcccgagaacagtgtcgagctttatgctgagaaggtcaacaacagaggcctctgtgccattgctcaggccgagtcgcttcgctacaagcttctcggtggcctcgctgttcgcagggcttgctatggtgttttaagatttgtgatggaaagtggggccaaaggatgcgaggtcattgttagtggaaaactgagagctcagagagccaagtccatgaaattcaaggatggat

SEQ ID NO: 179276 - DNA, 250 bp, Glycine max
acctcgagcgctcgagcggctcaggcgtgaacaagcctcaggtatgccaaagccatggttaagcataacaatgttatccccacacggacacttccgtaagcactggcagaactatgtgaagacctggttcaatcagccagcacggaagacaagaagacggttggctcgtcagaagaaagctgtgaagattttccccagacctacagctggacctcttagacccattgtacatggtcaaactttgaaatac

SEQ ID NO: 179277 - DNA, 263 bp, Glycine max
ccgttcgctctttctttctcccctacacaaaacatggctttgcccaatcagcaaaccgtcgattaccccagcttcaagcttgtcatcgtcggcgacggtggcacaggaaagacaaccttcgtgaagaggcatctcactggtgaattcgagaagaaatatgaaccgaccattggtgtggaggttcatccgttggattttttcacgaactgtggaaagattcgcttctattgttgggatactgctgggcaagagaagtttggtgg

SEQ ID NO: 179278 - DNA, 264 bp, Glycine max
cccagatcttgtagcaatggcgagcgctcccactccacgcgaagagttcgtgtacatggcgaagtgcgcggagcaggccgagcgctacgaggagatggtggagttcatggagaaggtctccgcctccgccgagagcgaggagctgaccgtggaggagcgtaacctcctctccgtcgcctacaagaacgtgatcggcgctcgccgcgcctcctggcgcatcatctcctcaatcgagcagaaggaggagagccgcggcaacgagga

SEQ ID NO: 179279 - DNA, 240 bp, Glycine max
ttgatggaactgtacaagagcctcgaaagggaatcagaagtggtcatgtacctggtagcaaatgcatcccttttgcacagttgttagatagttcacagacattgttaccagcagatgagttgaagaagcgatttgaacaagaaggcatctctctggaaaccccagctgtgacttcatgtggaacaggcgtaactgcttgcattcttgcattgggtcttcatcgtcttagaaagtctgatg

SEQ ID NO: 179280 - DNA, 242 bp, Glycine max
gagttgaagtccaccatctcgaagaatacccgtgccattcttataaacactcctcacaaccctactggcaagatgttcactcgtgaggagctcaattgcattgcatctctttgcattgagaatgatgttctggttttcactgatgaagtttatgacaagttggcttttgatatggagcacatatcgatggcttctttgcctggaatgttcgaaaggacagtgacattgaactccttggggaa

SEQ ID NO: 179281 - DNA, 245 bp, Glycine max
tctcattcttcaccagctcagcacgcagaggagcagaagcctaagccttcaacatggcgagagggttgaagaaacacttgaagaggctcaatgctccaaaacactggatgcttgacaagcttggtggggcctttgcaccgaagccatcatctggaccccacaagtccagggagtgtcttcctttgatcctcatcctacggaacaggctaaagtatgctctaacatatagagaagttattgccatc

SEQ ID NO: 179282 - DNA, 249 bp, Glycine max
agaaagtgagaggagagagaaagtagcagatcctccatggcctccaccaaggaacgtgactacttcgtctacgtcgccaagctcgccgaacaagccgaacgctatgaagaaatggtggaagcaatgaagaatgtggcgaactaaacgtggaattgacggtagaggagcggaaccttctgtcggttgggtacaagaacgtggtgggtgctcgtagggcttcgtggaggattctttcctcgattgaacaga

SEQ ID NO: 179283 - DNA, 252 bp, Glycine max
cagggtctcttccattcacaaccttaaatctttctttcttgtaaactttattgattgattctgagaatagaactaagagggtatagacatggctagcgcaattgcagcttcttttttggttctgcttctggctttccccactgtatttggagctgaccatgaagttggtgacactagtggatgggccctcggagttaattacaacacctgggcctctgggaaaactttcacagttggtgacactttggtgtt

SEQ ID NO: 179284 - DNA, 255 bp, Glycine max
agagtttgttgtgagctataagctagtttatcgtgaggagaatatgaagttgtttgttttctttgttgctgcagtagttttggtagcatggccatgccatggcgcaggctaccaaaggttccctctccgaatgaaaactggctatggtgagcgttcttcggaggtaaaatgcgcaagttttaggcttgctgtggaagcacacaacatccgagcctttaaaaccattcctgaagagtgcgttgatccaacaaagga

SEQ ID NO: 179285 - DNA, 265 bp, Glycine max
actccttcttctccgcttcctcttcgatcatcgcttcagaatgccgccgaagttcgacccctcccagatcgtcgacgtcttcgtacgcgtcaccggcggtgaggtcggcgcggcgagttccctcgtcccgaagatcggtcccctcggtctctcccccaagaagatcggagaagatatcgccaaggaaaccgccaaggactggaagggcctccgcgtcaccgtcaagctcaccgtgcagaaccgtcaggccaaggtcacggtggtc

SEQ ID NO: 179286 - DNA, 267 bp, Glycine max
gtaagttttcattcaatggccagcgctcagctctcagcaatatcttcgtcgatctctacggcgtcgtttgaagggcttcgaccttcggctgttcagtttgcttccgcgggcagaattagaattggcaatctctcccaaaggtctttccggggcttggttgtcaaagccgccaccgttgttgcccccaaatacaccgcgattaagcctctgggagacagagtgctgataaaaattaaggaagcagaggagaaaactgagggtgggatt

SEQ ID NO: 179287 - DNA, 254 bp, Glycine max
aaaacaattaccatcgtgctgatgggcaaaactgtggcaactttcttactgatcggccatctaccaaggttcatgctgccccaggtggcggatcttccttgaattacctctttggtggtcctccagggaactaattcatcattgtgattcaaacctaccatgtgatgtatcatgtgtaaaatagatagctgcattgttttagtccagtggactttgtttcttgtgcaattgaacctcttgacaatgttggtgtg

SEQ ID NO: 179288 - DNA, 243 bp, Glycine max
ctttcttcttcttcttctcttcttcttcaagattgcgacgacgatccaagtgatagacactcgtttcgatggaacttgtagctgaatccgagcgaactctgtacccatacgtgactggatcctctgtagtcgctatcaaatacaaagatgggattctaatggccgctgacatgggaggttcgtatggatctaccctgcggtataagagtgttgagcgtatcaagcctattggaaagcattctc

SEQ ID NO: 179289 - DNA, 237 bp, Glycine max
ttttcttcttactctagactcttccttttctcttctctgtctaaggggtgccctgagatcacattgaacaatggtgaaggctgtggccgttcttggcagcagtgagggtgtcactggaactattcacttcgttcaggagggaagtggtccaaccaccgtaactggatctcttgctggtcttaagcctggtctccatggtttccatgtccatgccttgggggacactaccaatggttg

SEQ ID NO: 179290 - DNA, 232 bp, Glycine max
tcgagcgcaccggtttgttcctgttctcgttcaaaagaaaactgacacaagtgaggctaggtgcataaacagcaatggcagaaaaaccccaaccggttcgggttctctactgcggcgtgtgcagtttgccccccgaatactgcgaattcggatccgatttcgagaaatgcaaaccctggttgatccaaaacgtccctgacctataccctgatcttctcaaagaagagaagga

SEQ ID NO: 179291 - DNA, 239 bp, Glycine max
aatccccttcctgagccagtgcagtctgttttggaggaaggaattgatctatataaacttcacactaagagacatggaagattagagtctaccaaaggatcctacgcaaaagaatggataaaatgggaaaaacagttacgggatattctttgtggaaatgctgagtattttaattctattcaggttccatttgagtttgctgtcaagcaagtgttggaacaattgagaagcattgctaa

SEQ ID NO: 179292 - DNA, 244 bp, Glycine max
tcaaaatattgtgtccacagtcaatttggactgtaagttggacctcaaaacaattgcacttcaagctcgtaatgcagagtacaatcccaagcgttttgctgctgtcattatgaggataagagatcccaaaacaactgcacttatttttgcttctggcaagatggtttgtactggagctaagagtgaacaacagtctaaattggcagcaaggaagtatgctcgtattatccaaaagcttggcttc

SEQ ID NO: 179293 - DNA, 246 bp, Glycine max
cttcttgttcctctcgcccagaatccgagatcaaccctgacccctaaggccaggggtttttctcggcttcttcagattcctgaaatggcgtctgtttcagctttagccaagtacaagctcgtcttcttgggtgaccaatccgtgggcaaaaccagcatcatcactcgcttcatgtacgataaattcgataacacctatcaggctacaattggtattgattttctatcaaaaactatgtatctcgaa

SEQ ID NO: 179294 - DNA, 249 bp, Glycine max
ggatttgggattgggaaggcgagggattgcgctgcgtctcttcctcttctctttcgattcatccctcattcataatcttccaatccaacaacctcatcctcacactcacacatacacacatctgaacgcgtatcgtccctcccatggcttcaaagcgcatcctcaaggagctcaaggacttgcagaaagacccaccaacttcttgcagcgctggtccagtagctgaggacatgttccattggcaagcaa

SEQ ID NO: 179295 - DNA, 252 bp, Glycine max
aaacacatttgttgctcagaggaagaaccttaagctgattgatgttgatgtccccgttgttggtgggcatgccgggattaccattcttcctctgttgtcaaagacaagaccctcagcgagtttcactgatgaagaaattgaggagttgactgtcaggattcaaaatgctggaactgaagttgttgaagcaaaggcaggtgcagggtctgctaccttgtcaatggcgtatgcagcagctagatttgttgaatc

SEQ ID NO: 179296 - DNA, 256 bp, Glycine max
gcaagatctgcaaaccatggcttccaggaaattcgacaaccctcactccggcgacggcgccagtccaggcaaaatcttcatcggagggttagccaaagacaccaccctagagacgttcgtgaagtactttgagaagtacggggagataacggactccgttataatgaaagaccgtcacacgggtcggccaaggggattcggcttcatcacctacgccgatccctccgtcgttgaccaagtcattcaggagaaccac

SEQ ID NO: 179297 - DNA, 261 bp, Glycine max
cagatatcatacacaactatggccaacccatgccactctcaaacctcattgcttcactaccaatccacccatccaaaacttgcttcgtccatcgcttgatgcgaatcatgatccattctggcttcttctctcaacaaaagcatgacttggagaatgagctagaagccaagtatgtgctaaccgatgcatctgtactattgcttaagaaccatccgatgagtgtgacacctttcttgcatgccatgcttgatccagttttga

SEQ ID NO: 179298 - DNA, 241 bp, Glycine max
ctggttcaattggaagcggagggaacacaagcacgggtgtggagtggcacgtgcgacctccaaaccctaagaatcccatcgtcttcttcgatgtcaccatcggtaacattcccgccggtcgaatcaagatggaactcttcgccgatattgcccccaaaactgccgagaatttcaggcagttctgcactggggaatacaggaaagcacgactgcctgttggttacaagggttgtcatttcat

SEQ ID NO: 179299 - DNA, 232 bp, Glycine max
tgttgatcgagataactagaaacagtgtgatgaaaatgaaggtccttgttttcttcgttgctacaattttcgtagcatggcaatgccatgcgtacgatatgttccctctccgaatgaacactggctatggtgcccgtactccggaggtgaaatgcgcaagttggaggcttgctgtggaagcacacaacatctttggctttgagaccattcctgaagagtgcgttgaagcaac

SEQ ID NO: 179300 - DNA, 235 bp, Glycine max
atactagtaatattattcttcgaatccattttattattcataatgggtattttcacatttgaggatgaaaccacctcccctgtggctcctgctaccctttacaaagctctagttacagatgccgacaacgtcatcccaaaggctgtcgaagccttcaggagtgttgaaaaccttgaggggaacggtggccctggaaccatcaagaagatcactttcgttgaggatggagaaagca

SEQ ID NO: 179301 - DNA, 242 bp, Glycine max
atcgagataactagaaacagtgtgatgaaaatgaaggtccttgttttcttcgttgctacaattttcgtagcatggcaatgccatgcgtacgatatgttccctctccgaatgaacactggctatggtgcccgtactccggaggtgaaatgcgcaagttggaggcttgctgtggaagcacacaacatctttggctttgagaccattcctgaagagtgcgttgaagcaacaaaggaatacatcca

SEQ ID NO: 179302 - DNA, 246 bp, Glycine max
gccctttgaagatcactcaaaccaatctatctatctatctggtataggcatggagctttgttggcaaaaatctatccatggctcttaaaagaagcatggaggattgtgtgagacggttctcacccttcacactccacctcctaaagtttgcttatgctttagctattggcttctctaatcaataaccacaaaagggtatgacacatggaggaacatagttctctctatgagtggcatgaagcagag

SEQ ID NO: 179303 - DNA, 260 bp, Glycine max
gctgaagtattggagctggcggggaatgctagcaaggatctcaaggtcaagcgtattactccccggcatctacagctagcaatccgtggggacgaagagctggataccctgataaaaggaacaattgctggaggaggagtgattcctcacatccacaagtctcttatcaacaagtcttccaaggagtagattactggtgaatgatagcagcttgatggaaaatttctctactaattgtgtatttgttgcatgacacttga

SEQ ID NO: 179304 - DNA, 251 bp, Glycine max
cctcttaataccaattttctagggtttatacaattctcgatggcttcttcagatgttgagtaccgttgctttgtcggtgggctcgcttgggccactgacgaccaagctctcgagagagccttctctcagtacggcgaaatcgttgaaacgaagattatcaacgatcgtgagactggaagatccaggggttttggatttgtgaccttcgcctcggagcagtccatgaaagacgccatcgaagggatgaacgg

SEQ ID NO: 179305 - DNA, 235 bp, Glycine max
ctcactctctctttctctctgttttctggtaattcatcaattgattcaaaatgcagaggctcaaactgcaactagtgctattcctctcaatctcaacttgtcacactgttttctccttcactgatgggttgttgccaaatgggaacttcgagcagggcccaaagccatcacaattgaaggggtccgtagtgacaggccacgatgccataccgaattggacaatttcggggttcgt

SEQ ID NO: 179306 - DNA, 237 bp, Glycine max
gaaggaagaaggggtatgttgagttcgaggagtcgccgccggacgatttcgatccggcgcatccgtacaaggacccggtggcgatgctggagatgagggagcacatcgtgagggagaagtggatccaaatcgagaaggccaagatcattagggagaagctccgatggtgctaccgcatcgaaggcgtcaaccacctccagaagtgccgccacctcgtcaaccagtatctcgagtcca

SEQ ID NO: 179307 - DNA, 120 bp, Glycine max
cgcattgcttcgcctcacaacagcagctgcagcagcaatggctcccaaacgaggtggaaaggctccggctcttgccgctaagaagaagcctgagaaggtcacgaatccgttgttcgagaa

SEQ ID NO: 179308 - DNA, 244 bp, Glycine max
cggattcgtaactcttctagaagcttccaaaaacgctaacccccagcccgccatcttttgggcctcctcgagttccgtctatgggctcaatgacgaaagcccattctccgaactccaccgtacggaccagcctgcgagcctctacgcggcaactaaaaaagcaggcgaagatatcgcgcacacctataatcatatctatggactctccctcaccggattgcgcttcttcactgtttatgggccc

SEQ ID NO: 179309 - DNA, 247 bp, Glycine max
ctttcttgcgaaaccgagagagcgaaggggcaaacacaatttttattatcttcttttttattttttgtagagagagagagagagaaaatgttggggatcttcagcagttcagtggtgtcgccgccggatgagctggtggccgctggcagcagaacgccgtcgccgaagacgacggcggggaagctgctgaaccggttcgtggagagcaaggcgtcggcggtgtcgctgcaggtgggggaacacgtgc

SEQ ID NO: 179310 - DNA, 251 bp, Glycine max
gttgcatcaccgcaagtccacaacatggctgccactgccgctgcaggcatagcttccttgttttcttcttctattaacagtgtcaaatgtcttcgttcctccaagaactgctccattatagacccccttataaccacagtgccctcaaaccgtggcatgtttgtgtcacacttggtggaacctttgtccattgggggtgccattaattcgcacaagttgtgggggcctagaatttctgctgctgttgcaca

SEQ ID NO: 179311 - DNA, 253 bp, Glycine max
gctagggttaccggattcttgcgttttaatatctgcaattcagaagcatggggcactccaatgtgtggaattctcaccctaagaactacggacctggttctcgcacttgccgtgtgtgtgggaatcctcatggattgatcaggaaatatgggcttatgtgttgcaggcagtgcttccgaagcaatgccaaggaaattggcttcatcaagtatcggtgaaagattagttttccacctgccccacccggtttgga

SEQ ID NO: 179312 - DNA, 261 bp, Glycine max
cccctagattcagccacagttggaaaaaaaaaaaaagttgttcgagatggcacgtacgaagcaaactgctcgtaagtccacaggaggaaaggcacctaggaagcagctcgcaaccaaggctgcacgtaagtctgcaccaactactggtggtgtgaagaagccacatcgttatcgtcctggtaccgttgctcttcgtgagattaggaaataccagaagagtaccgagcttttgatcaggaagctccccttccagaggctggt

SEQ ID NO: 179313 - DNA, 262 bp, Glycine max
cggcggtccaaacactcttctctgcagcttttgcctacaactcccttcaccatggctgaacaaaccgagaaagcttttctgaagcaaccaaaagtgtttctcagcacaaagaagactgggaagggaaagagacctggaaaaggtgggaaccgcttttggaagtccattgggcttggatttaagactcccagggaagccatcgaaggaacctatattgacaagaagtgccccttcactggcaatgtttccatccgtggccgta

SEQ ID NO: 179314 - DNA, 236 bp, Glycine max
gtttgttgtgagctataagctagtttatcgtgaggagaatatgaagttgtttgtcttctttgttgctgcagtagttctcgtagcatggccatgccatggcgcaggctaccaaaggttccctctccgaatgaaaactggctatggtgagcgttcttcggaggtaaaatgcgcaagtcttaggcttgctgtggaagcacacaacatccgagcctttaaaaccattcctgaagagtgcg

SEQ ID NO: 179315 - DNA, 242 bp, Glycine max
cgttgcgcctttgatctctgtccccgctgcgtctctcgtaatcatgcctaagcaaatccacgagattaaggatttccttctcactgccagaaggaaggatgcgaggtcagtgaagatcaagaggagcagagatgtggttaagttcaaggtcagatgctccaagtacctctacacactttgtgtgtttgacccagagaaagctgataaattgaagcaatctcttcctccaggtttgagtgttc

SEQ ID NO: 179316 - DNA, 235 bp, Glycine max
cttcaacctcaccaaaggaactaagaatttcattgaggctagagaaagtggtgatcaatatgtcaaagaatccaaaagttttctttgatattctaattggaaagatgaaagctggacgagtagtgatggagttgtttgccgatgcaaccccaaaaacagctgaaaacttcagggctctctgcactggggaaaaggggattggacgatctgggaaacctttacactacaaaggttc

SEQ ID NO: 179317 - DNA, 234 bp, Glycine max
cagaaaccctagcaaaaatgccggctggtcacggtttgagatcccgcaccagagattccttctctcgtcccttcaggaagaagggtaccatcgccctcaccacatacctcataacctaccacgtcggcgattatgtcgacgtcaaggttaacggcgccgtccacaagggaatgcctcacaagttctaccatggccgcaccggtcgcgtctggactgtcaccaaacgtgctgttg

SEQ ID NO: 179318 - DNA, 240 bp, Glycine max
gttctgttctacttgctctcaagtttcatcttgggctgtaggctgtagcataccatgaccaccaaggatccaaaatccgtgtacgactttgttgtcaaggatgctaagggagatgatgtagatctctccttttacaagggaaaagtccttctgattgtcaatgttgcttctcaatgcggcttgaccaactccaattatacggagctgaatcaattgtatgacaagtataaagaccaaggc

SEQ ID NO: 179319 - DNA, 249 bp, Glycine max
cctaattctacagcagccctccgatttttaaggaggttgtgtgaattgctggtgagtgatttaaatggctcctactaaggtggacaatgccaaaagggctgatcccaaagctcaggccttgacgacagctaaggctgtcaaatcaagtggtcaagtgtttaggaagaaagctaaaaagatcaggacatcggttacatttcacaggccaaggaccttgaagaaggaaaggaaccctaagtaccctcgcat

SEQ ID NO: 179320 - DNA, 253 bp, Glycine max
cctacaatgtatgccacaggaccatatgctcctgaaatgcagctggtgtctcctccagtcttttcaaatttcactactgaaccatctactgcacctctcactcctccacctgagttggctcacttaacgactccctcttccccagatgtaccttttcctcattttctctcatcttcagtggatctcaaaaacagtgacaagggtaactacatcactgcaaatgatcttcaagctacatattcactctaccctg

SEQ ID NO: 179321 - DNA, 255 bp, Glycine max
atacccaacagcacttatcgttctcatgcaacaagggaaaatgaggcctattttctgtggaaattttgaatatgatgcccggcagtcagagctggagcggctttttagacgatatgggaaggttgatagggtggatatgaagtctggatttgcttttatctatatggaagacgagagagatgctgaggctgcaattcgtgctcttgatcgagtagaatttggtcggaagggacgcagactccgtgtggaatggac

SEQ ID NO: 179322 - DNA, 260 bp, Glycine max
agttgaaagacagaaaggaaggatgggagtgacaccgaaaattgctccttcgatgctctcttccgacttcgccaatttggcttccgaggctcagcgcatgctccacttcggcgccgattggctccacatggacatcatggatgggcattttgtccccaatttaactattggcgctccagttattgaaagtttgagaaagcacacaaagggatatttggattgtcaccttatggttacaaatcctcttgattatgttgagc

SEQ ID NO: 179323 - DNA, 147 bp, Glycine max
ctggtggcacctttgcaccaggtagatgttctaaatacgttgccaattgtagtgctggcgattcatccactgtaccctatatcgttggacactacgtattacttgctcatgaatctgctgccacattatacacgacaaaatatcagg

SEQ ID NO: 179324 - DNA, 135 bp, Glycine max
gcgcatcaaacgcaaccagaagcagccatggccactgcaagaactgtgaaggacgtttctcctcatgagttcgtcaaagcttactcttctcacctcaagcgatctggcaagatggagctgccagagtggactgat

SEQ ID NO: 179325 - DNA, 147 bp, Glycine max
attttgttgatcgagataactagaaacagtgtgatgaaaatgaaggtccttgtcttcttcgttgctacaatttccgtagcatggcaatgccatgcgtacgatatgttccctctccgaatgaacactggctatggtgcccgtactccg

SEQ ID NO: 179326 - DNA, 166 bp, Glycine max
caatagcactcgatctagagagcgtcctaatcgcaaccctaataagaagaaccacagcttcaagcgagtgacatccaccagccatgggtcgtatgcacagccgcggtaagggtatatcctcttctgctttgccctacaaaaggacaccccctagctggctcaagat

SEQ ID NO: 179327 - DNA, 133 bp, Glycine max
tataagtgagtttatcgtcaggtgaatatgaagttgcttgttttatttgttgatgcagtaattttggtagcatggtaatgccatggcgcagactagcaaaggttacgtctgcgaatgaaaactggatatggtg

SEQ ID NO: 179328 - DNA, 150 bp, Glycine max
cgctcctaggaagcagcttgcaaccaaggctgcacgtaagtctgcaccaactactggtggtgtgaagaagccccaccgttatcgtcctggtaccgttgctcttcgtgagattaggacataccagaagagtaccgagcttttgatccggaa

SEQ ID NO: 179329 - DNA, 149 bp, Glycine max
tcggctcgaggatcgagataactagaaacagtgccatgaaaatgaaggagcttgttttcttcgttgctacaattttcgtagcatggcaatgccatgcgtacgatatgttccctctccgaatgaacactggctatggtgcccgtactccg

SEQ ID NO: 179330 - DNA, 156 bp, Glycine max
tcgtggcgtgggagcacaagagtaaagtacctggaaagatgcatgcatgcggtcatgatgctcatgctgccatgcttcctggtgctgcaaagatcctcaaagagcatgaaaatgagatacgaaagacggaggtggaggggctaagaaaattttaga

SEQ ID NO: 179331 - DNA, 155 bp, Glycine max
gctggaattgcattgaataagaactttgtgaagcttgtctcttggtacgacaacgagtggggatacagctcacgtgtcattgatcttgcttgtattcgttgccaagaagtctctttaaggtgttacttcaaagtagtatgtcttcacattattag

SEQ ID NO: 179332 - DNA, 147 bp, Glycine max
tttaaggttaaggcgtagatcaatgttatgttggttgggcatgtggactttgaggaggtctccaacattaacgatctgcacaagcttgttgtggagacagaagctccagtgcatgccatatgagggcatggacgtacggcctcggag

SEQ ID NO: 179333 - DNA, 144 bp, Glycine max
ctgacgctttgtttttccatcttccgatgtcactcttgtctgtcagtctgtctttctatttgtcatttcaataagtactgtgcaagtaggttagagttgggtagaagggcatgttcatcgtgttaattactatgttatgtatgc

SEQ ID NO: 179334 - DNA, 167 bp, Glycine max
  unsure (1)..(167): unsure at all n locations
caacaagaagggtgagctacagtcaagtagtgtcatttacgcttctcttctctgcagcaacacgnctaaccctaaggccttcttcgacatgaccatcggcggtcaatctgctggccgcatcgtgatggagctctacgccgacgtcactccccgcaccgccgagaact

SEQ ID NO: 179335 - DNA, 150 bp, Glycine max
ctagagatcgtcgtatatagatctctgttaagtcgctttataacactcaacctaagatgcagaacgaggaaggacagatcaccgagctttacattcctaggaagtgctctgccacaaaccgattgattaccgctaaggaccatgcttcgg

SEQ ID NO: 179336 - DNA, 157 bp, Glycine max
cagtttgttgtgagctataagctagtttatcgtgaggagaatatgaagttgtttgttctctttgttgctgcagtagttttggtagcatggccatgccatggcgcaggctaccaaaggttccctctccgaatgacaactggctatggtgagcgttctt

SEQ ID NO: 179337 - DNA, 159 bp, Glycine max
tcttaactcaacttctgctacccactctcttcttccaagtccaaccacgcttttctctacagtcatgggccaggtcaagatcggaatcaacggatttggaagaattggccgcttggttgccagactcgctctgcaaagagacgatgtggagctcgttgc

SEQ ID NO: 179338 - DNA, 147 bp, Glycine max
ctggacgcatatcctaattttaactttgttggtcgcctcctaggccctagaggaaactctctaaagcgtgtagaagcaagtactgagtgtcgtgtcttgatcaggggccgtggtagcattaaggatccagctagggaggaaatgatg

SEQ ID NO: 179339 - DNA, 144 bp, Glycine max
cgttgcgacttaaggggaaacaatggtgtcgctgaaactgcagaaccggctggccgcaagcgtgatcaagtgtggcagaggaaaggtttggcttgacaccaatgaagtcaacgtcatctccatggctcattctcggcagaacat

SEQ ID NO: 179340 - DNA, 151 bp, Glycine max
ctcttgcctttcgggattagtttctatggcttatgaagtaatagagtaccgatgcttagtcggtgggcttgttctgggacagcgacaaccatgctctcgagaaagcattctctcattatggtgagatcgtcgaatcgaaggttatcatcga

SEQ ID NO: 179341 - DNA, 153 bp, Glycine max
gttgtgatggatcagttctactggatgacacgcacaacttcactggcgagaaaacagccctacctaatctgaattcaataagaggtttggaagtggttgatgagattaaggcagcggttgacaaagcttgcaaccgtcctgctgtatcatgtg

SEQ ID NO: 179342 - DNA, 152 bp, Glycine max
ttcagatcgagacatttttgatcgagataactagaaacagtgtgatcaaaatgtgggtccttgacttcttcgttgctacaattttggtagcatggcaatgccatgcgtacgatatgttccctctccgaatgaacactggctatggtgcccgt

SEQ ID NO: 179343 - DNA, 89 bp, Glycine max
attaattgcaagaatggcacttcgttgcttggtgatgtccctttctgtactcttcactcttggccttgcgagagaaagccatgccagag

SEQ ID NO: 179344 - DNA, 161 bp, Glycine max
acgggttctcaccacggctggtaccttaactacgtccaggtcacctccactgggccccacctttcctgcgctcaggatcagtacgaggtggagcagtggctcgctctcgacacttcgccttaccagctttgggccgttaggaaccactgccgctacagttt

SEQ ID NO: 179345 - DNA, 169 bp, Glycine max
gctccctgagagagctcgtcgcggcggttgcagaagaagattgcaagatgaagttcaacatcgcgaatcccaccactggatgccagaagaagctcgagatcgacgacgatctgaaactgcgagcattttgggacaagaggatctcacaggaggtcatcggagatgcact

SEQ ID NO: 179346 - DNA, 169 bp, Glycine max
cgtccatcccgtaaccatgtctcagactgttgtcctcaaagttggtatgtcatgtgaaggatgtgttggagcagtgaagagagttctaggaaaattggatggtgtggaatcatatgacattgatttgaaggaacaaaaggtggtagtgaaaggcaatgtccagccagac

SEQ ID NO: 179347 - DNA, 166 bp, Glycine max
ccagcagagagtgcggtaggctcttccgagacccgaagcagccatggggatcgatctcaaggccggaggtaagagcaaaaagaccaaaagaacagcacccaagtccaatgatatctatctcaagctcttggtcaagctttatcgcttccttgttcggagaactggc

SEQ ID NO: 179348 - DNA, 155 bp, Glycine max
ctctcctaggaagcagcttgcaatcaaggctgcacgtaagtctgcaccaactactggtggtgtgaagaagccccaccgttatcgtcctggtaccgttgctcttcgtgagattaggacataccagaagagtaccgagcttttgatccggaagctcc

SEQ ID NO: 179349 - DNA, 161 bp, Glycine max
gtatttccctacctctcccttcaagatgcagatcttcgtcaagaccctcaccggcaagaccatcacccttgaggtggaaagctctgacaccatcgacaacgtcaaggccaagatacaggacaactgaagaatcccgccggagcagcagcgtctcattttcc

SEQ ID NO: 179350 - DNA, 171 bp, Glycine max
tcttagaatagaatgggatctggaagtggaaaacacactggagagttcttcaggagaagggatgcatggaggaagcatccgatgctcaccaatcagctccgccacgccacccctggccttggcatcgccgtcgtcgccttcggtatctacctcgtcggcgaacaagtctac

SEQ ID NO: 179351 - DNA, 163 bp, Glycine max
tcttcatccttctctgttctcctagaacttgattacttgaacattccctatgacagatgacgtggttcttctggatttctggccaagtccatttgggatgagggtcaggattgcacttgctgaaaagggtatcgaatatgagtacaaagaagaggacttgagg

SEQ ID NO: 179352 - DNA, 164 bp, Glycine max
gttggaaagaaaccctagcaagcggaacaatggcagacgttgaggtcgatgtggcggctgcagcagcagcagggcagccgaagaagagaacgttcaagaagttcagtttcaggggcgtggatctcgatgcgcttctggacatgtccaccgatgaactcgtgaag

SEQ ID NO: 179353 - DNA, 162 bp, Glycine max
tgatcgagataactagaaacagtgtgatgaaaatgaaggtccttgttttcttcgttgctacaactttcgtagcatggcaatgccatgcgtacgatatgttccctctccgaatgaacactggctatggtgcccgtactccggaggtgaaatgcgcaagttgga

SEQ ID NO: 179354 - DNA, 162 bp, Glycine max
gtgagctataagctagtttatcgtgaggtgaatatgaagttgtttgtcttctttgttgctgcagtagttttggtagcatggccatgccatggcgcaggctaccaaaggttccctctccgaatgaaaactggctatggtgagcgttcttcggaggtaaaatgc

SEQ ID NO: 179355 - DNA, 163 bp, Glycine max
gtgaaacaacagctttcatggttccattggtggctggtgatggaaccaaaactcaggcacttgctatttgccactcaaatacttctggaatgaatcatcaaatgcttcatcaacttatgggagttacttcctggaactaaccctgtttgccatttccttggaa

SEQ ID NO: 179356 - DNA, 164 bp, Glycine max
atcacaggcgcatagcgtgatccattgacgaagatggtgcagcgtctcacctaccgcaagatgcacagctatgccaccaaatccaaccaacacagggtcgtcaaaacccctggtgggaagctcgtttatcagaccaccaagaagatggccagctggcccaagtg

SEQ ID NO: 179357 - DNA, 170 bp, Glycine max
ctagtttccacactgcataccttaggtcttccgaattcgaagttaatttgcaagatggctaaggaaaaggctcagatcaacattgtggtggttggtcatgtggaccctgaggaggcaaccaccattaacgagctgaagaagcctgttgtggagaaagaagctccagggca

SEQ ID NO: 179358 - DNA, 166 bp, Glycine max
ctacactaactaaagccgagcagcgagacacagaaaccctagcaacaatgccggctggtcacggtttgagatcccgcaccagacattccttctctcgtcccttcaggaagaagggtaccatcgccctcaccacatacctcataacctaccacgtcggcgattatgt

SEQ ID NO: 179359 - DNA, 155 bp, Glycine max
cttaactagaaacagtgtgatgaaaatgaaggtccttgttttcttcgttgctacaattttcgtagcatggcaatgccatgcgtacgatatgttccctgtccgaatgaacactgggtatggtgcacgtactccggatgtgagatgcgcaagttgga

SEQ ID NO: 179360 - DNA, 161 bp, Glycine max
ctgtttgtaagataaagataaaagaggcgcaagatgagtggtagggtttctgggaaggtgaagtggttcaacgatcagaaggggtttggattcataacccctgacgatggcagcgaggaactcttcgttcaccaatctcagatcaaatctgacggtttccg

SEQ ID NO: 179361 - DNA, 157 bp, Glycine max
gttataagctagtttatcgtgaagagaatatgaagttgtttgttttctttgttgctgcagtagttttggtagcatggccatgccatggcgcaggctaccaaaggttccctctccgaatgaaaactggctatggtgagcgttcttcggaggtaaaatg

SEQ ID NO: 179362 - DNA, 160 bp, Glycine max
cagagagtggtttcagtgagtgatcggtgttcacttgatccttcataagtcgtcatcatcatcatcatcatcaccgttgattgaagaagatgccgatcagaaacatcgccatcggaaggcctgaagaggctactcaccccgacacgttgaaggcggggtt

SEQ ID NO: 179363 - DNA, 164 bp, Glycine max
gtctcaaacctcttcgttccttcgattcattccacttcttccaaaatgggcatagactcagttcgcgttctcgtcactggagccgcatgaaaattggatatgctcttgtccctatgattgctaggggcatgatgctgggtcctgaccagaccgtgatcctccac

SEQ ID NO: 179364 - DNA, 169 bp, Glycine max
ctagataactagaaacagtgtgatgaaaatgaaggtccttgttttcttcgttgctacaattttcgtagcatggcaatgccatgcgtacgatatgttccctctccgaatgaacactggctatggtgcccgtactccggaggtgaaatgcgcaagttggaggcttgctgtg

SEQ ID NO: 179365 - DNA, 165 bp, Glycine max
ctcgaacaatttagatcagactctaaaacagttaaccaacaagctttcttttatgctagtgaacgcgaagtccatcacaacgacatatttatattcggcatagataacaccgtactctctaatatcccatactatgaaaaacatggatatggggtggaggaattt

SEQ ID NO: 179366 - DNA, 162 bp, Glycine max
ctcggagctgtctgtgcaaatttgcgttgttcttcgcggcacacctcactcactgaacggtaagtatggcggacaaggctgttacaatccgaacccgaaagttcatgaccaacaggcttctttccaggaagcagtttgtcgttgatgtccttcatccaggga

SEQ ID NO: 179367 - DNA, 159 bp, Glycine max
tatctatgtaggttgttaaggtgtatgtttctgtttttggagatgtaagacgtaaagaagtcgccattgccggcttgaaatctaaggctaaatatgttcgcagcgagttgggcaagcgtatcaagttgcgcttaactcctgagatacgctttcttgagg

SEQ ID NO: 179368 - DNA, 163 bp, Glycine max
gtttgttgatcgagataactagaaacagtgtgatgaaaatgaaggtccttgttttcttcgttgctacaattttggtagcatggcaatgccatgcgtacgatatgttccctctccgaatgaacactggctatggtgcccgtactccggaggtgaaatgcgcaag

SEQ ID NO: 179369 - DNA, 168 bp, Glycine max
atatataacaaataatttgtactttcatcaaaacaaaatcccgttgtatttttctcagatggctcgaacgaagcaaacggcccgcaagtccaccggcggcaaggcgccgcggaagcagctggcgactaaggcggctcgcaagtcggctccggcgaccggcggcgtgaa

SEQ ID NO: 179370 - DNA, 138 bp, Glycine max
atcagttgtgtatgcttaaggaatctggttccttcagtttcacatttatttaaaaccaggaactgtagttaagcaacaaaggggtcgttagatagagataatgttgggaattcctctggaagtacattgcttgtcact

SEQ ID NO: 179371 - DNA, 162 bp, Glycine max
gttagtgttcttccacccccgtaccgtctctgcctctctgcaatccacagccgaaaatgcctttcaagaggtacgttgagatcgggagggttgctcaaatcaactacggcaaggaatatggcaggctcgtcgtcatcgtcgacgtcattgaccagaacagag

SEQ ID NO: 179372 - DNA, 162 bp, Glycine max
ctgcaacctgacagcctccaaatccaatggcttcagagaagaaactttcgaacccaatgagggagatacaagtgcagaagctcgtcctcaatatctctgttggcgagagtggagatcgtctcaccagagccgccaaggtgttggaacaacttagtggccaaa

SEQ ID NO: 179373 - DNA, 288 bp, Glycine max
ccgtgtgtgtgttgcgagacacagagacaacgaccccagacgcctccactctttctttggcggcggcgtcgttttctctacgctttacccattcattcattcattctcaggttcggggcatttcattctgattcactatggccaatggtccagcaccgttctctgagattgggaaaagggcaaaagaccttttatacaaggattacaacttcgatcacaagtttagcctctcaattccaaactccactggattggggcttatagcaacaggattgaagaaggataaac

SEQ ID NO: 179374 - DNA, 288 bp, Glycine max
ccttccttcatacagatttagcagatgcagtaatagaagctctcccatcagcaacagcaatatatgcaccgaccagaacctctgaagatgttgatcatgacccagttagatattttatcaagatgttctttggttcaatcttggcattcatcttgttcttgtcacccaaaatgatcacggcattcaggaatcatgtcatttagaagaattaaatcctgcttgctgaattcaatctgcaagcatatagatgaagcctattgatagcaacaaagtatactttgatttttt

SEQ ID NO: 179375 - DNA, 284 bp, Glycine max
tccatctcataccttcctcaaaggtctcatgggtcgccagaacagaacaccaaccattgttgtagtctggtccattcttcttgcatccattttctctctgctgtgggtccgaatcgacccgtttacgacaagagtcactggtcctgatgttgagcagtgtggaatcaactgctagagaaataaaagctggcagattgaacaacagctttccactcacctgtgtcaaccaacaacataagcctgatggaatgttgtgtttgtcttccaattcttttgtttacaga

SEQ ID NO: 179376 - DNA, 284 bp, Glycine max
  unsure (1)..(284): unsure at all n locations
ctggtaagccnacagagtacagacatcatttaggaagcagaatcagatatttgaaggttagaacgaaaaagaatcatcgatggcagagacgaaagaaggttcaggttcggagatgtctctgaaggatcagggcaacgagtttttcaagtcaggaaagtatctcaaagctgctgcactctacactcaagccatcacgctagacccttctaaccctaccctctatagtaatcgtgctgcagcactactgcaattggataagcttactacagctctagatgatgcag

SEQ ID NO: 179377 - DNA, 284 bp, Glycine max
aagggtttctcttctctttctctgtctgcttcttcactttctctcgtttcaatcgaaaaaaatcatgggcagaaaattcttcgtcggtggcaactggaaatgcaattgggacactgaggaggtgaagaagattgttactactttaaatgaagctaaagtccctggagaagatgttgtagaagttgttgtgagccctccttttgtgttccttccttttgtaaaacgtttgctgcgccctgatttccatgtctcggcccaaaattgttgggttcgcaaaggtggtg

SEQ ID NO: 179378 - DNA, 282 bp, Glycine max
gtggcgacaatgcgactcctgctaggaagaggctgatgagagacttcaagaggctgcaacaagacccgcctgcagggatcagtggtgccccccaggataacaacataatgctgtggaatgctgtcatatttggtcctgatgatactccatgggatggaggcacgttcaagttgacactccaatttactgaggactatccaaataaaccaccgactgtacgatttgtgtctcgcatgtttcatccaaatatttatgctgatggaagtatttgtttggatatat

SEQ ID NO: 179379 - DNA, 283 bp, Glycine max
ctctgctcgtgctctagggttatcatatctccatttccatttcctctctctcagtttccaagaatcctaagctatgggaaagtcttacccaaccgtgagcgctgattaccagaaggccgttgagaaggcgaagaagaagcccagaggcttcatcgctgagaagagatgcgctcctctaatgctccgtttggcatggcactctgctggaacttacgacgtgagctcgaagaccggtggtcccttcggaaccataaagcacccctccgaactcgctcacggcgct

SEQ ID NO: 179380 - DNA, 280 bp, Glycine max
tgcaaaagagcgcgtagtcgcaaccctaatcagaagaagcgcagttcaagcgagtgacagccaccagccatgggtcgtatgcacagccgcggtaagggtatatcctcttctgctttgccctacaaaaggacacctcctagctggctcaagatctcttcgcaagatgtcgaagaaaatatctgcaagttcgcgaagaaaggtttgaccccgtctcagattggtgtcattctcagagattctcacggtattgctcaggtcaatagcgtcactggcagcaaaa

SEQ ID NO: 179381 - DNA, 273 bp, Glycine max
  unsure (1)..(273): unsure at all n locations
ccaaggttggtgtgctacagagactgagcttgaggatcggaagctccgaatagaggatgccaagaatgcaacttttgctgccattgaggaaggtattgtacctgggngccgcactgcactggttcatctcactactcatgtcgcagcaatcaaggacaagcttgaggatgcagatgagaggctaggagctgacattgtgcagtaggcactgatagctcctgcagcattgattgctcanaatgctggactagcaggtgacgttcgtgtggagaa

SEQ ID NO: 179382 - DNA, 286 bp, Glycine max
ctcgagccgctcagccgagaaaaccctaattcgctcgcagtcacccaagaggcgaatccttcccattgctcgagatgggtgaagaagtgaaggccgtggttccagagtctgttttgaagaagcagaagagagaggaggaatgggcgttggccaagaagcaagacctcgaggctgcgaagaagaagagagccgagagccgcaaactcatctacaacagagctaagcagtacgctaaggagtacgatcaccaggagaaggaattgattcggttgaaacgcgaggccaa

SEQ ID NO: 179383 - DNA, 296 bp, Glycine max
tcggtcgagttgcagatggatccactacccccaagtactctaaggctaggtatgatgaaatcgtgaaggaagtctcttcttacttgaagaaggttggttacaacccagacaagattccctttgttcccatctctggttttgagggtgacaacatgattgagaggtccaccaaccttgactggtcaaagggaccaactctccttgaggctcttgacgcaatcaatgagaccaagaggccctccgacaagcctctaaggcttccattgcaggatgtctacaagattggtggtattggt

SEQ ID NO: 179384 - DNA, 283 bp, Glycine max
cggcaaacagattggtgtttaccacgaccacttctacatttaccttcttgtccttgacattgatggtgttgccaactcttttgagacgacaagtttgaagactgtaagagtgacagatggaagttcgaagaggaaattctattggacaactgaggttgaaactgccaacactgaaaatgatgcaaagataatacttgggttgagccctggtgagctttcagtggtgaatcctaacaagaaaacctctgatggaaatgatgtgggataccgattgattccagca

SEQ ID NO: 179385 - DNA, 278 bp, Glycine max
ctggcgcactccctgaggcttctcttctcttctcttctctgtcgtgagtcaccatggtgagggttagtgtgctgaacgatgctctgaagagcatgtacaatgctgagaaaaggggaaagcgccaagtcatgattaggccatcctccaaagtcattatcaaattccctttggtgatgcaaaagcacggatacatcggagagtttgagtacgttgatgaccacagggctggtaaaatcgtggttgaattgaacggtagactgaacaagtgtggggttatt

SEQ ID NO: 179386 - DNA, 173 bp, Glycine max
  unsure (1)..(173): unsure at all n locations
cttcgttgaagtcaacgttctaaacaaacactcccatctcttctctggctcaatggaggtcctggatgttcatctcttggctatggagcaatgcaagaacttggaccttttcgagtaaacagtgatggtaaaacactccacagaaatatacanccctggaanacagttgcaaa

SEQ ID NO: 179387 - DNA, 156 bp, Glycine max
ctctaaggatattcggctcttgcatcgatgaagaacgtagcgaaatgcgatacttggtgtgaattgcagaatcccgtgaaccatcgagtctttgaacgcaagttgcgcccgaagccattaggtcgagggcacgcctgcctgggtgtcacacatcgt

SEQ ID NO: 179388 - DNA, 282 bp, Glycine max
caagggtttaactttctggctgtgttaatatgcgtttcagcactgtcactgagttcttctgttgcgggggaagggctaaatatcggccttgttatgaacttctacaaggaatcatgccctcaggctgaagacatcatcacagaacaagtcaagcttctctacaagcgccacaagaacactgctttgctctggctcaggaacatcttccatgactgtgctgttcagagttgtgatgcttcactgttgctggactccacaagaaggcgcttgcctgagaaggaa

SEQ ID NO: 179389 - DNA, 277 bp, Glycine max
cgcggagataggggtgagaatggagagcaaagaggaagatgtaagggttggagcaactaagttctcagaaaggcaaccaattggtacagcagctcagggtgacaaggactacaaagaaccacccccagcacctttgtttgagcctggtgagctaaagtcatggtccttctacagagctggacttgctgagtttgtggccactttcttgttcctctacattaccatcttaactgtcatgggtgtcaacaggtcaccctccaagtgtgcctctgttggc

SEQ ID NO: 179390 - DNA, 278 bp, Glycine max
ttcaggtactgctttcggatgcagatacagatcgctcgtacgattcaaaccgctcgtaagtcgacaggaggtaaggcttctaggaacgaagttgcaaccaaggctgcacgtaagtctgacccaactactggtggtgtgaagaagccccaccgttagcgttctggtaccgttgatcttcgtgagattatgaaattccagaagagtaccgagcttttgatccggaagctccccttccagaggctggttcgtgaaattgctcaggacttcaagactgatct

SEQ ID NO: 179391 - DNA, 273 bp, Glycine max
aacagtggatgaaaatgaaggtccttgttttcttcgttgctacaattttggtagcatggcaatgccatgcgtacgatatgttccctctccgaatgaacactggctatggtgcccgtactccggaggtgaaatgcgcaagttggaggcttgctgtggaagcacacaacatctttggctttgagaccattcctgaagagtgcgttgaagcaacaaaggaatacgtccatggcgaacaatatagatcagactccaaaacagttaaccaacaagctt

SEQ ID NO: 179392 - DNA, 276 bp, Glycine max
ccttgggattacctgaaagataaaagcaaagagttttctatattggtagatagagctgtggggggctccagcatcatagatgggcaattggagctaatggttcataggaggttacttcaggatgattcccgaggtgttgcagaggcactgaatgaaacagtttgcatccatgataagtgcaccgggttaactgtgctagggaagtactatttcagaattgatcctgtaggagagggtgccagatggcgtcgatcatttggtcaggagatatactca

SEQ ID NO: 179393 - DNA, 277 bp, Glycine max
caggtgtgaagtgaacacaatggagagaagggttggctatgaggtgctggtggctttggtgacccttttggttttctcatttgcttgtgccactgcttcatcatcaggaccaacaaaactccaccaccgtgtggagcaattcaggaggaatctgcttgctaatggccttggtagaactcctccaatggggtggaacagttggaatcatttcagctgtcaaattaacgaaaaaatgatcagagaaactgctgatgcccttgtttctactggtctgtcc

SEQ ID NO: 179394 - DNA, 274 bp, Glycine max
ctcattaatgcaagactggcacttcgttgcttggtgatgtcccttcctgttctcttcactcttggtcttgcgagagaaagccatgccagacacgaagatttatggcatgctggttggccatacattcccattccaagctcattgcgatatcttctaaagactggctctgtcagtgtcgacatcgatgactaggggctggatattgtagatttacactactcgaaaatctacttctataccgaagattccttccaggcaaaacaatgagagtaca

SEQ ID NO: 179395 - DNA, 282 bp, Glycine max
cttcgctactgttaagggctgcactataccagaatgtctcagggaagaggcagtgcatctttgcctattgtggtcactgtggtttcactactgtgccttttggaacgtgctaacgcagcaacttactccgttggaggacctgggggatggaccttcaacactaatgcttggcccaatggaaaaagattcagagctggtgatatcctaatcttcaactatgactcaacctcccacaatgtggttgctgtggacagaagtggatacaacagctgcaagacacca

SEQ ID NO: 179396 - DNA, 282 bp, Glycine max
agtgcactgaacccttccacggtggtgactgagtgatgacagacaacaagtaagtttcagagctacagcacaagaaacagtctgatttaatacgcttctatgagcgggtgaggtgctgggagtataggtcgcacacttccattgttcgcttgacaaagtcgacccgcactgacgaggctcgtcgcttgggattcaaggctaagcagggctatgtgatataccgtgttcgtgttaggagcggtgagcgaaagacgccagttcccaaaagtattgtttatggga

SEQ ID NO: 179397 - DNA, 280 bp, Glycine max
cagttgagaaggaatccatcattgtaatgctagcaactttggacttcagggatgtgtcttcacaaaggatgtcaacaaagcaataatgatcagtgatgcaatggaaacgggaacagttcagataaattctgccccagctcgtgggccagatcattttccctttcagggtataaaggacagtggcattggatctcaagggattaccaacagcataaacatgatgaccaaggtcaaaacgactgtgatcaacttacccagcccttcctatactatgggctag

SEQ ID NO: 179398 - DNA, 276 bp, Glycine max
gtagagtaaagaggggttcctagacaagatcaaggacaagatccacggcgaggagggtggcgccaccgccgagggcgagacgaagaagaagaagaaggagacgaagaagcatgaacatggcgatgacagcagctgcagcagtgacagtgattagattatctcccactgctgcatcacctatatatcgtataaggtgtatggcaccatagtagtgagggctgtgtctttcactatttttcctacttgtcatttatatttatgagcgagacaaatagt

SEQ ID NO: 179399 - DNA, 281 bp, Glycine max
ctagtttgtgtgagctataagctagtttatcgtgaggtcaatatcaagttgtttgtcttctttgttgctgcagtagttttcgtagcatggccatgccatggcgcaggctaccaaaggttccctctccgaatgacaactggctatggtgagcgttcttcggaggtaaaatgcgcaagttttaggcttgctgtggaagcacacaacatccgagttgctaaaaccattcctgaagagtgcgttgaaccaacaaactactacattaatggcgaacaatttagatc

SEQ ID NO: 179400 - DNA, 279 bp, Glycine max
ctggcatgtggcagaagtcctaggagtgtaaaaccgagacgcaaaatgaagacgatcttgtcgtctgagaccatgaatattcccgacggcgtgagcatcaaggttcacgctaaggttatcgaggttgagggccctcgtggaaaactcgtgcgagacttccaccatctgaacttggacttccaacttattaccgacgatggcggtaaaaggaagctcaagattgattcttggtttggttctcgtaaaacctccgccgccatccgcaccgccctcagccac

SEQ ID NO: 179401 - DNA, 278 bp, Glycine max
cggctgatctcattaattgcaagactggcacttcgttgcttggtgatgtccctttctgttctcttcactcttggtcttgcgagagaaagccatgccagagacgaagatttttggcatgctgtttggccaaacactcccattccaagttcattgcgagattttctaaagcctggccctgcaagtgttgaaatcgatgatcaccctatgtaaattgaagaaacacagtacccgaaaaccttcttctataaagaagaccttcattcaggcgtaacaatgaa

SEQ ID NO: 179402 - DNA, 278 bp, Glycine max
gctcggagacaaacctctgtggcaaggttcgttccgccactggagttggggtcatgctcaatgatggaaagagccggttctccattaatgggaagcccatttatcatttcatgggaacatccacttttagtcaatacactgttgttcatgacgttagtgtagctaagattgacccggtagctcccttggagaaagtttgccttcttggatgtggtgtttcaactggacttggagctgtctggaacactgcaaaagtggagtcagggtcaattgttgct

SEQ ID NO: 179403 - DNA, 273 bp, Glycine max
taacagctagctattagttcgattttgtagtaagtgaggtgccaatatggtgaagatagctcttggtactttggatgactcttttagcgctgcctctcttaaggcttatttcgcagagttccacgcaactctgattttcgtgttcgctggtgttggatcagccatcgcttacaacgagcttacaaaagatgcagccttggatccaacggggctggtggcagtagctgtggcacatgcatttgcactgtttgtaggtgtctccgtcgccgccaa

SEQ ID NO: 179404 - DNA, 248 bp, Glycine max
ctcagaacagaggaggaggcacccaagcccaagcccaagaatcctcttgatcttcttcctccaagcaagatgatcttggatgactggaaaagactctactcaaacaccaagaccaacttccgcgaggttgcaatcaaaggattttgggacatgtacgatccagagggatattctctgtggttctgtgattacaaatacaatgatgagaacacagtttcctttgttacgttaaacaaggttggtggatt

SEQ ID NO: 179405 - DNA, 275 bp, Glycine max
ctttgtgtgagctataagctagtttatcgtgaggtgaatatgaagttgtttgtcttctttgttgctgcagtagttttggtagcatggccatgccatggcgcaggctaccaaaggttccctctccgaatgacaactggctatggtgagcgttcttcggaggtaaaatgcgcaagttttaggcttgctgtggaagcacacaacatccgagccattaaaaccattcctgaagagtgcgttgaaccaacaacggactacattaatggcgaacaatttag

SEQ ID NO: 179406 - DNA, 276 bp, Glycine max
cgcaaactggagatgaatctcactctgctcttactgagtttgataggaccgagaaagacattaccccaataggtggtttccctcactatggtgttgttaaggatgattatatcatggtcaagggatgctgcgttggtcccaagaaaagggttattacattgcgccaatccctccttaagcagacttctcgtgttgctctggaggagatcaagctcaagtttatcgacacctcttcaaagtctgggcatggtcgcttccagaccacacaggagaagc

SEQ ID NO: 179407 - DNA, 279 bp, Glycine max
gttttcacctgaacaatcggagctacatagaccgacatgtggatccgtacggattgggacctattggctatgattggctccaaaaaaacaaaagaaaaatagaaaaaaactataaactctatctgacaaagtcatggactaagattttcaactttttgaagttggacatcaatgaggcagaggctaatgttgcggtcaagttaatgacagacaagctccgttccttcaaccaacactttgatgatatatgcaacgatcagtctacgtggcttgtctttg

SEQ ID NO: 179408 - DNA, 282 bp, Glycine max
tttggaacaacgggctagaatccgaggagggtattagcctactgatcagcagaaagctgctgaagctgatgaatggagatgttcgctatctaaggggcgcaggcaaatcagcttttatcctctctgctgaacttgcagcagcccataatttgaaaggttaaaagttttggctaaaagaataaaagatgatgcaaccagcaaaacacaatctgttttgtacatcataaagagaacggagctagccattaattgcatccaatgtaactctaatttgttcccacg

SEQ ID NO: 179409 - DNA, 280 bp, Glycine max
cggagcaaggacctacagaaagaccctccaacctcttgcagtgccggtcccgtagcagaagatatgtttcattggcaagcaactataatgggtccccctgatagcccttatgctgggggtgtttttctagttactattcattttcctccggattatccattcaagccacccaaggttgcatttaggactaaagttttccacccaaatatcaacagcaatggtagtatttgtcttgatatcttaaaggagcagtggagcccagcattgacaatctctaagg

SEQ ID NO: 179410 - DNA, 273 bp, Glycine max
ctaagcgcggtggaggcggtgcttgctacaactgtggtgaatcgggacatctggctagggattgcagtggaggcggtggtggggacaggtacggatgaggtggtggtggtggcagatatggaggcggcggtggcgggaggtacgttggtggtggaggcggcggcggcggcggaggaagctgctacagctgtggagagtctgggcattttgccagagattgcccatcaagtgctcgttgaatttactgttagggttgtttatgttttgcggatt

SEQ ID NO: 179411 - DNA, 278 bp, Glycine max
ctgccgacgccattgacgccattgaaaaccttcgggttctcatttacaagcagtgtttaccagttgtctcatgctcagacatccttgttatcgcagcacgtgaagctgttcgccaattaggaggccctgatcttgacgtgccactgggaagaaaagacggtctaggaccaaacgccaccgcgccggacaacctaccggcaccattcttccgaaccgacgatcttctcagaggattcggaaatagaggtttcgatgccaccgatgtggtcgctctctcc

SEQ ID NO: 179412 - DNA, 275 bp, Glycine max
ctctttgatgttgatctcttgggccactgggattgcagaagcccccaagactgatcctgagttttggaagtctttgttccctgttgctgttgcacatacaataggacatgtagcggcaacagttagtatgtcaaaagttgcggtatcgtttacacatattatcaagagtggtgacacctgcttctagtgttctggtttcaagataccttttgggtgagagcttccctgtgcctgtctatctgtctttaattccaatcattggtcgatgtgcactt

SEQ ID NO: 179413 - DNA, 277 bp, Glycine max
cctttctctgaagtgaggttgctcagaagcttgtccaacaagaacatcattgcactttacaatgtgtggagggatgagcagcgaaacactttgaatttcatcactgaggtttgcaccagtggaaatttgagggagtacaggaaaaagcacaggcatgtttccataaaggcactcaagaagtggtctaagcagattttgaaagggttgaattatttgcacttgcatgatccctgcatcatccacagagatctcaattccagcaatgtgtttgtcaatg

SEQ ID NO: 179414 - DNA, 273 bp, Glycine max
cataatagaaacagtgtgatgaaaatgaaggtccttgttttcttcgttgctacaattttcgtagcatggcaatgccatgcgtacgatatgttccctctccgaatgaacactggctatggtgcccgtactccggaggtgaaatgcgcaagttggaggcttgctgtggaagcacacaacatctttggctttgagaccattcctgaagagtgcgttgaagcaacaaaggaatacatccatggcgaacaatatagatcagactccaaaacagttaac

SEQ ID NO: 179415 - DNA, 275 bp, Glycine max
cagttatacaaccagcagcaaccgccggtcggagttccgccgccgcaaggttatccgccggaggggtacggaaaggagggatatccaccgccgggatacccgccagcgggatacccgccagctggatacccaccgccgggatatccgccacaacaaggctatcctccgccgccctacccggcgcaggggtatcctccgccctacgctcctcaatacgctcagcctctgccccgtcaacaaatttcaactggccctggttgtttggaaggctgttt

SEQ ID NO: 179416 - DNA, 277 bp, Glycine max
ctataactagtttatcgtgaggagaatatgaagttgtttgtcttctttgttgctgcagtagttttcgtagcatggccatgccatggcgcaggctaccaaaggttccctctccgaatgaaaactggctatggtgagcgttcttcggaggtaaaatgcgcaagttttaggcttgctgtggaagcacacaacatccgagcctttaaaaccattcctgaagagtgcgtcgaaccaacaaaggactacattaatggcgaacaatttagatcagactctaaaa

SEQ ID NO: 179417 - DNA, 277 bp, Glycine max
gccagtcttctggccttccggctctgcatcaaaaatttgatttgccagctccttttgtattacacactgactgtccacattactggcggtatcatcttccaggtgagacagaggaagaattttcaaccagattagccaataatttggagcagttgattctgaaagagggaccagagactattgctgcatttattgctgaacctgtaatgggggcaggaggtgtaatacctccaccatcaacttattttgagaaggtccaagccgttgtcaagaagta

SEQ ID NO: 179418 - DNA, 273 bp, Glycine max
gttggagaggcgaaactcgagagtgtaaggttttgcatttcatttgacgaagagtgagagagtcttatctgtcgtctctgatctctgatcgcatcttcattccgaaaatggctgtttcggctatcactggagcgaggctaactctagggatgtctctttcctcttccacgcgatcacgaatccccgcaatggccgtatctatcgaccccaagaccgataacaaactcactcttaccaagtccgaggaagctttcgctgcggccaaggagctga

SEQ ID NO: 179419 - DNA, 276 bp, Glycine max
gtttttcttttcctcattctctcattctcaacaccaccaaaatgggccttgtttcccaggatgccctcaaccaactccaagctctcatggatcaagtgctacttgaggaggagccactgcagagaacgtttcagaatgttcatcaaggatgtgtcgccgaaaccttaacgcggtttctaaaagcaagggagtggaatgctaccaaggcccataaaatgatagtcgattgtttaaagtggagagtacaaaatgagattgacaacatattatctaaac

SEQ ID NO: 179420 - DNA, 276 bp, Glycine max
ctaaaaggcacctgcaacactgtctctgtctctcctcctcctgttctcactcagcatcgccgtaaccgttagatcgagcgactacgactacgattgtgtgtacactgcatacgttagaaccggttcggtgttgaagggcggaacggactctaagatcgggctgaagctgtacgacaagtacggctactacatctacattaaaaacctcgaagcatggggcggcttgatgggcaagggctacgactacttcgagcgcggcaacctcgacatcttcag

SEQ ID NO: 179421 - DNA, 137 bp, Glycine max
aagagaaagaaaacagaggccctcagatgagtggtagggtttctgggcaggtgaagtggttcaacgatcagaaggggtttggattcataacccctgacgatggcagcgaggaactcttcgttcaccaatctcagatc

SEQ ID NO: 179422 - DNA, 265 bp, Glycine max
cgatactttgatcagatccacaacactccttcatccatgacgcttggctcttcaggatccagtgtcgtggttccaaggaacttcagattgctggaggagcttgagaagggagaaaaaggaatcggagatggaacagttagctatggaatggatgatggtgacgacatttacatgcgctcttggactggaaccattattggcccctataatactgtacatgaaggaagaatttatcaattgaagttgttttgtgataaagactacc

SEQ ID NO: 179423 - DNA, 264 bp, Glycine max
gagacatcaaatatagagatagaggctctttaggagtgacatattattgctctgtagtgttggacagcatgttggaaggtaaagctgtgatagaggatactgacatgccagataagatgcagatccaagcatggcatccgcttctgaagctttggatctctatgatgtttttgattgcacatccattgctgcccacataaaaaaggagtttgatacacagtatggttctggatggcagtgtgtggtgggatcaagttttgggtg

SEQ ID NO: 179424 - DNA, 261 bp, Glycine max
tggggaaatttgcgttgtttttcgcggtacagctcacacacactgaacggtaagtatggcggacaaggctgttacaatccgaacccgaaagttcatgaccaacaggcttctttccaggaagcagtttgtcgttgatgttcttcatccagggagggcaaatgtttccaaggctgaacttaaggagaagctagctaggatgtatgatgtgaaagaccctaatactgtatttgtcttcaaattccgaacacattttggaggtgg

SEQ ID NO: 179425 - DNA, 266 bp, Glycine max
cgcatagagagagagagagagagagagagagagagggggggctcttctacacagatttgtttgatttcaattcaagaccaaagaagaatctctcacaaatggcgtcaagaattgttcaacaacaacaagcagaggtgtcgcagtagtagggggaggaaaaccacagaagaagcacggtgttgctgatggaaggcaccgcaaagcattgggtgacattgggaatttggccaatgtaagaggcgttgttgatgccacaccaaatcgcc

SEQ ID NO: 179426 - DNA, 266 bp, Glycine max
ctcacaagctcacagagcaagaacactgttccaatacggaatctaaggcaaagcaaaccaaacatcttgaatcatgggttcaacaggtgagactcagattaccccaacccacgtatctgatgaagaagcacaccttttcgccatgcaactagccagtgcttctgtccttccaatgatcctcaaatcagcacttgagcttgatctgttggaaatcatagccaaggctggccctggtgttcatctttcccccactgacatttcttctc

SEQ ID NO: 179427 - DNA, 264 bp, Glycine max
caacactggagcaataaaggtggatgagtattcctgcacaagcataccctgcatatgggctgtgggtgatgtcacaaaccgaatgaatcttactccggtggccttgatggaagcatcgtactttgctaaaactgtatttggtgggcaaaaaatcaagccagactacaataatattccctatgcagtgttcagcattccgccactttctgtagttggtctcagtgaggagcaggcaatagagcaaaccaatggcgatctgttggt

SEQ ID NO: 179428 - DNA, 262 bp, Glycine max
attcaaattcagaagatgttacgccgcgttcgccaatgagaatcgcgagtacgtgatcgttggcggcggaaatgccgcgggatatgctgcgcgcactttcgttgagcatggcatggctgatggtcgtctcgtattgtaaccaaagagccgtatgcaccttacgagcgtcccgctctgacgaaagcgtatttgttcccgccggataagaaaccagcacgccttcctggttttcacacttgtgttggcatcggtggagagaggc

SEQ ID NO: 179429 - DNA, 265 bp, Glycine max
caccgcacgaatatcttgttgtttggagcgatccgagaaaaactctgtaaacatgttggtttaccaggacctccttacaggtgatgagcttctctctgactccttccgttacaaggaaattgagaatggaatgctgtgggaagttgaggggcagtgggttgttaaaggagcagttgatgtagacattggtgcaaacccttctgctgagggtggaggagaagatgagggagttgatgatgcagctgttaaggttgttgacattgtt

SEQ ID NO: 179430 - DNA, 273 bp, Glycine max
cagactaggagctgcccaaaattgctctgccactcttaacggcaaccacaagctcaccgatgctgttcttcctccaacgaaagactggagaaaagcaggtatagtgagttcagttaaagatcaaggcagctgcggatcatgctggcacattcagcacaactggggctttagaagcagcctatgcacaagcatttgggaagagtatctctctttctgagcagcagctagtggactgtgctggcctttcaacaactttggctgccatggtgggtt

SEQ ID NO: 179431 - DNA, 275 bp, Glycine max
aatttccattgcatgcaaagcaaatacgcattatattactagttttaatttgttttgtcgtttgcttctttctttgattaatgatgactagctttaaggttgcatgtgtggttgcgatgatgtgcatggttgtggcatgagtgttacacccatggcacaggccgcaatcacgtgcgggcaggtcgccggcgacgtgtctccgtgcctcagttatcttcgaagcggcggaaaaccgtcggacgcctgctgcaacggagtgaagtcgctcagcggcg

SEQ ID NO: 179432 - DNA, 275 bp, Glycine max
tgttctttccattgatttcttgcttctatatattacttgcttcttttcttgatcatgtcccttgctggtaaaatcagctctgaaattggtgttcaggcaaccgctgcaaagtggttcaacctcttcacaacacaacttcatcacgttcaaaatcttactgatagaattcatggcaccgagctgcatcatggtgaagactggcatcacaatgagtcggtcaagcactggacttataccatagatggcacggttacaacttgcacggcgagtattga

SEQ ID NO: 179433 - DNA, 270 bp, Glycine max
ctctaactttcacacgcagcggcttcttcttccgttttcctcaatcggtgtgaacaatggcgacgtacgctgcgatgaaacccaccaagccagggttggaggagtcccaggaacagatccataagataaggatcaccctttcttccaagcacgtcaaaaacctcgagaaggtttgtgcggacttggttcgtggtgcaaaggacaagcgcctcagggttaagggacctgttaggatgcccactaaggttcttcacatcactaccaggaagt

SEQ ID NO: 179434 - DNA, 268 bp, Glycine max
gcacactctctgctcctagggtttctccttcgagtgagggaaatggctcccaaaccgcctagtacgggtctgtttgttggactgaacaagggtcacgtcgtcaccaagaaggaattgcccccacgcccctcagatcgtaaggggaaaacaagcaagagggtgcactttgtgaggaccctcataagagaggttgctggttttgcaccctatgaaaagcgtataactgagttgctgaaggttgggaaggataagagggcactgaaggttg

SEQ ID NO: 179435 - DNA, 266 bp, Glycine max
tggggttccattatcgggtctgagttcaatggagagatttcacgaagtttgcaggtactgtcgaggagatgctatgcgtcagcctcagatctccccccacaccaggaaattggaatgccttctctctcacctacaatgacagagggtaacattgcaagatggttgaagacagaaggtgatagaatctctcctggtgaagtgctctgtgaagttgaaactgataaagccactgttgacatggaatgtatggaggaaggttttctggc

SEQ ID NO: 179436 - DNA, 254 bp, Glycine max
ctggttcagttctgtcgtgttgcaagttgcaactgaaccaatcatcaactttcttgtattccaaattatcttcaccattacaatcctcaaagtcaaaaagtgaagaccttaacataaaacaaaacacaatggtaatgtgggtatttgggtatggttctttgatctcgaaagctgggtttcactatgacgaacgtattgttggtttcatcaaaggctatcgacgagtcttctaccaaggctctactgaccacaga

SEQ ID NO: 179437 - DNA, 263 bp, Glycine max
tggagaagagaagctaaagaaagaaaggagatgggagtggagaagcagttgttgaggtctggcaccggtccgaagccaattcccggtcagaacgtaaccgttcactgcactggtttcgggaagaacggtgcctttctcagaaattctggagcacaaaggatcctggccagaacccattcactttcaaaatcggccaaggttctgttatcaaaggatgggatgaaggtgtgcttggcatgcacattggtgaagttgctcgtctc

SEQ ID NO: 179438 - DNA, 261 bp, Glycine max
ctgatctcaaaggatatgaaggcagataatacttgctgtgcaatatgtttgcaggatattgaagtaggcgaaattgcacgaagcttacctcgctgtcaccatacatttcacttgatatgtgtggacaaatggcttgtcaagaatgattcgtgtcctgtttgcagacagaatgtgcaacttgttccttgggcaatttgagattatcttaatgggcggatgcatatgtggaataattggttccttataatccaactgggatta

SEQ ID NO: 179439 - DNA, 268 bp, Glycine max
gtcgtcgctgtttgtgtgtgtatcaggtgcagctaccaacgatggtgaagggtcgtcaaggagagcgcgtcagactctacgtgaggggtacaatccttggatacaaaaggtccaagtccaaccagtacccaacacatccctgatccaaattgagggagtgaacaccaaagaagaagtaggatggtatgctggcaagaaaatggcctatatctacaaggctaaggtgaaaaaggatggaagccattaccgctgcatatggggcaaggtt

SEQ ID NO: 179440 - DNA, 273 bp, Glycine max
tctacgaccgattcggctcgaggtgagtttgttgatcgagataaattgaaacagtgtgatgacaatgaaggtccttgttttcttcgttgctacaattttggtagcatggcaatgccatgcgtacgatatgttcctctccgaatgaacactggctatggtgcccgtactccggaggtgaaatgcgcaagttggaggcttgctgtggaagcacacaacatctttggctttgagaccattcctgaagagtgcgttgaagcaacaaaggaatacatc

SEQ ID NO: 179441 - DNA, 277 bp, Glycine max
aattgcaagaatggcacttcgttgcttggtgatgtccctttctgttctcttcactcttggtcttgcgagagaaagccatgccagagacgaagatttttggcatgctgtttggccaaacactcccattccaagttcatgcgagatcttctaaagcctggccctgcaagtgttgacatcgatgatcaccctatgcaaattgaagaaacacagtacccgaaaaccttcttctataaagacgaccttcatccaggcaaaacaatgacagtacaattcagca

SEQ ID NO: 179442 - DNA, 264 bp, Glycine max
gcaagtgtgaacaccgaagttgacattccaggtgatgctgctgcgtgtcaagagaacaccaagaagaggggacatgctgattcaagctgccaggtgggatctaaagcttgccgtgagaagttgcggaggcagagactcaatgaaaggttctgtgacttgagctctgttttggagccagggagacctgtgagaacagataaaccagctatacttgatgatgctatcagagtcttgagtcaacttaaaactgaagctcaggagctc

SEQ ID NO: 179443 - DNA, 251 bp, Glycine max
gtttctatggcttctgcagaagtagagttccgatgctttgttggtgggcttgcttgggccaccgaccacgatgctctcgagaaagccttctctcaatttggcgaaatcgtcgaatgcgaagcgtcatcaacgatcgtgccactggaagatccaaagggtatggatttgtgaccttcgctacagatcaagcgatctcagacgcacttgatagcatacacggccagaacctcgacggtcgtaatataaccgtg

SEQ ID NO: 179444 - DNA, 264 bp, Glycine max
aacacaggcgcagagcgtgatccattgacgaagatggtgcagcgtctcacctaccgcaagacgcacagctatgccaccaaatccaaccaacacagggtcgtcaaaacccctggtgggaagctcgtttatcagaccaccaagaagagggccagccggcccaagtgccccgtcactggccagaggattcaggggattccacacttgaggcctgcagagtacaagagatcaaggttacccagaaaccgtaggactgtcaaccgtgca

SEQ ID NO: 179445 - DNA, 262 bp, Glycine max
gttctgttctttttcccacccaattcagttttctcaaatggctcgtacgaagcaaacggctcgcaagtccaccggcggcaaggcgccacgtaagcagctggccaccaaggcggctcgtaagtctgctcggctaccggcggcgtgaagaagccgcacagattccgtccgggaaccgtagcgctccgcgagatccggaagtaccagaagaggccggaacttctgatccggaagctcccgttccagcgattggtccgtgagatcg

SEQ ID NO: 179446 - DNA, 261 bp, Glycine max
cggctcgagatcgcgcatagtgtggtaccagcagcagagcttgtatacgtcgccgcttcagcgtagcaacatgatcattcccgagaagaaccgtaaagagatctgcaaatacctcttccaagagggagttgctttgcgaagaaggacttcaatctggcgaacacccggagattgatgtgccgaatctgcaggtgataaagctgatgcagagcttcaaatccagagagtacgtgagggaaacatttgcgtggatgcactatt

SEQ ID NO: 179447 - DNA, 266 bp, Glycine max
attttcttttccttcactttcccgagaaaaaaataacacttttcactttcttcactacgttctcacttcgatatggctcgtacgaagcaaaccgctcgcaagtccaccggtggcaaggcgccacgtaagcagctcgccaccaaggccgctcggaagtccgctccggcgaccggaggagtgaagaagccccaccgcttcaggccgggaaccgtggcgctgagggaaatcagacagtaccagaagagcaccgagcttctcatcaggaa

SEQ ID NO: 179448 - DNA, 277 bp, Glycine max
  unsure (1)..(277): unsure at all n locations
gcaagatgtcgaagagaggacgcggtggttcggcggggaacaagttccggatgtcgctgggtctgccggtggcggcgacggtgaactgcgccgacaatacgggggcgaagacactctacatcatatcggtgacaggatcaaagggcgtttgaaacgtctcncctcggcttgcgttggcgacatggtgatggccaccgtgaagaaggggaaacccgatctgaggcagaaggttttgccagctgtcattgttcgccagcgcaagccatggcgccgaaag

SEQ ID NO: 179449 - DNA, 272 bp, Glycine max
gtgatcggtgttcacttgatccttcataagtcgtcatcatcatcatcatcatcaccgttgattgaagaagatgccgatcagaaacatcgccatcggcacgcctgaagaggctactcaccccgacacgttgaaggcggggttggctgagttcatctccaccttgatcttcgtgttcgccggttcaggttccggcatcgcctacaacaagctcaccgacaacggcgccgccactcacgccggcctcatctccgcttccatcgcccatgctttcg

SEQ ID NO: 179450 - DNA, 261 bp, Glycine max
ggagtataggcagcaaccttccattgttcgcttgacaaggtcgacccgccctgacaaggctcgtcgcttgggcttcaaggctaagcagggctatgtgatataccgtgttcgtgttaggaggggtgccgaaagaggccagttcccaaaggtattgtttatgggacgcccacaaaccagggtgttacccaactgaaatttcagcgtagcaagaggtcagttgctgaggagcgagctggacggaagctgggtggacttagggtc

SEQ ID NO: 179451 - DNA, 247 bp, Glycine max
tccttctacactaactaaagcctagcagcgagagagagaaaccctagcaaaaatgccggctggtcacggtttgagatcccgcaccagagattccttctctcgtcccttcaggaagaagggtaccatcgccctcaccacatacctcataactaccagtcggcgatatgtcgacgtcaggttaacggcgccgtccaaagggaatgcctcacaattctaccatggctgcacggtcgcgtctggactgtca

SEQ ID NO: 179452 - DNA, 255 bp, Glycine max
tagaaacagtgtgatgaaaatgaaggtccttgttttcttcgttgctacaattttggtagcatggcaatgccatgcgtacgatatgttccctctccgaatgaacactggctatggtgcccgtactccggaggtgaaatgcgcaagttggaggcttgctgtggcagcacacaacatctttggctttgagaccattcctgaagagtgcgttgaagcaacaaaggaatacatccatggcgaacaatatagatcagactc

SEQ ID NO: 179453 - DNA, 260 bp, Glycine max
cgcggtggcgccaagaagcgcaagaagaagacctacaccaagcccaagaagatcaaacacaagcacaagaaggtcaagctcggcattctccagttctacaaggtcgacgattctggaaaagtgcagagctccgcaaggagtgccccaacgccgagtgtggtgccgggactttcatggccaatcacttcgaccgccactattgcggcaagtgtggcttgacctatgtctaccagaaggccgatgcttaaattcgttggaag

SEQ ID NO: 179454 - DNA, 263 bp, Glycine max
attcctcttcccattctagggttccaaatggacgctggcggaaagatcaagaagggcgccggaggaagaaagggcggcggccctaagaagaagccggtttcaaggtccgtcaaggccggtctccaattccccgtcggaagaattggccgttatttgaagaaaggaaggtacgcccagcgtgtcggtaccggtgctcccgtttacttggccgcagttctcgagtacctagctgctgaggtgcttgagttggctgggaatgctgc

SEQ ID NO: 179455 - DNA, 267 bp, Glycine max
gtgacatgttgtcttcgattccctggtcaactcaactcagatcttcgcaaactcgccgtgaatctcattcccttccctcgtctgcacttcttcatggtgggatttgccccactcacttcccgcggttcccacagtacagggctctcactgtccctgaattgacccaacacatgtgggatgctaagaacatgatgtgtgcagctgatcctcgccacggtcgttacttgacagcttctgcgatgttccgtggaaagatgagcacaaagg

SEQ ID NO: 179456 - DNA, 264 bp, Glycine max
cttagccgttgctctgcttcaacaatgcggaagcagaagaagcgccgcactatggtgaagtactccagagaacccgacaatcccaccaagtcctgcaaggccagaggcgctgactccagagttcattttaagaacactagggagactgcctttgccatcaggaagttgccccttgttaaagctaaacgatacttagaggatgttttggcccacaaacaggctattcctttccgacgcttttgtggtggtgttgggaggacggcc

SEQ ID NO: 179457 - DNA, 271 bp, Glycine max
gaggtcaattcgcaaattggagccaaaggatgtcattctcggccaatataaaacaagtggtggagccaaagttgatgcgtgcctaaatggtctgacacctacttattttgctgctgcactatacattgacaatcacgatgggatggcgtgccatttctgattaaaacaggcttggggctcatcaaacaccagtacaatcatcatcttttgtgtgaattttctttagatatgtactttttatgttctagattacatatttagattctttggc

SEQ ID NO: 179458 - DNA, 274 bp, Glycine max
actgcctctgttaaagtttgtatttttctgagtgggtgggttgattgagagtgctgtgcaagctttggaactttttcccaacctgctacttcaatggacactgaagaggttaacaaacctcaatcacttcgtcataccctgagatgatagtgaaagcacttgaagcactgaatgagccaaatggatcgaacaagtcagcaatatcacagtacatagaaaccatgctaggtgagttgccagacgcaaccgttttggggagtcaccttaacaagat

SEQ ID NO: 179459 - DNA, 264 bp, Glycine max
cttttctcagctgctgttcctgcgcgtgaacaagcctcaggtaagccaaagccatggttaagcataacaatgttatccccaacggacacttccgtaagcactggcagaactatgtgaagacctggttcaatcagccagcacggaagacaagaagacggttggctcgtcagacgaaagctgtgaagattttccccagacctacagctggacctcttagacccattgtacatggtcaaactttgacatacaacatgaaagtgagag

SEQ ID NO: 179460 - DNA, 130 bp, Glycine max
gttctaaagcactcatccacacattctccgtcgccacgacaacaatggctccaaagaaaggtgcgaaaggtggagttgtagcagcaaagaagaaggttcaggagaaggtaacgaaccctttgttcgagaa

SEQ ID NO: 179461 - DNA, 258 bp, Glycine max
cgcctctaacctcgcagttccttgatctctcctctcaagatgcagatattcgtgaaaactttgaccggcaagaccatcacccttgaggtggaatcctccgacaccattgacaacgtaaaagctacgattcacttcaaggaagggatcccacctgaccagcagagacttatctttgcgggtaaacaacttgaggatggtcgcacccttgccgattacaacatccaaaaggaatccaccctccatctcgtgcttcgcctc

SEQ ID NO: 179462 - DNA, 258 bp, Glycine max
cagatatcttgctagggttttaggaaaagacactgtctcgcgagtgaacacaggttacagcaatggctttctttggtagaattgggaatttattaagacagacagcaagcaggcaggttagttcgaattgcgatcatccccttcgttttttcaggctatacgcagtatgtcatctgctccaagcacaaagctgtttatcggaggtgtttcatattctactgacgagcaaagtttgagggaagctttttcaaaatatgg

SEQ ID NO: 179463 - DNA, 257 bp, Glycine max
cgaggagaagcagaaggagcaaaagcaatggcgccgaagaagccgagaatcacgacaaggaaccctgatttggttagggggattggcaagtattcgaggtcgcagatgtaccacaagacgggcatcgggccatcaaggccaaaaactgtggcgttttgccccgcacgatcccaagcccaagcccgaggcccggcccagaagcggccaagttctaccccgcggacgatgttaagaagcccctcgtcaacaagcacaag

SEQ ID NO: 179464 - DNA, 265 bp, Glycine max
attcattcaagattcagcacgtgcgttttggaagcagagaccgaaatacttcgagatggcccgtacaaagcaaactgctcgtaagtcaactggcggaaaagctcccaggaagcagcttgcaaccaaggctgcacgtaagtctgcaccaacaactggtggtgtgaagaagcctcatcgttatcgccctggaactgctgctcttcgtgagattaggaaataccagaagagcactgagctcctaatcaggaagcttcctttccagagg

SEQ ID NO: 179465 - DNA, 266 bp, Glycine max
ctcgtctttggttctggtttatagatctctgtgaagtcgctttataacactcaacctaagatgcagaacgaggaaggacagatcaccgagctttacattcctaggaagtgctctgccacaaaccgattgattaccgctaaggaccatgcttcggttcaggttaacattgggcatgtggatgagaatggcgtctacaatggccatttctccacttttgctctctgcggcttcatacgtgctcagggtgatgctgacagtgccctaga

SEQ ID NO: 179466 - DNA, 266 bp, Glycine max
attctctttgcgcagttccctacctctcctttcaagatgcagattttcgtcaagaccctcaccggaaagaccatcacccttgaggtggaaagctctgacaccatcgacaacgtcaaggccaagatccggacaaggcaggaattcccccggatcagcaacgtctcatcttcgccggaaagcagctcgaggacggccgtaccctcgccgaatacaacatccagaaggagtcaacccttcacctagtccttcgtctccgtggtggcatg

SEQ ID NO: 179467 - DNA, 262 bp, Glycine max
ctcgagctctgcgagatcttcattcgccgattttaaaagatgagtaagcttcagagtgatgctttgcgtgaagccatttcaggaatcatggccgattccaaggagaagaatcgcaaatttgtggagaccatcgaactccaaatcgggttgaaaaactacgatccacagaaggacaagcgtttcagtggctctgtcaagctgccccacatccctcgccccaagatgaaaatttgcatgcttggtgatgctcagcatgttgaag

SEQ ID NO: 179468 - DNA, 256 bp, Glycine max
cctcgagccgaatcggctcgaggatcgagataactagaaacagtgtgatgaaaatgaaggtccttgttttcttcgttgctacaattttggtagcatggcaatgccatgcgtacgatatgttcctctccgaatgaacactggctatggtgcccgtactccggaggtgaaatgcgcaagttggaggcttgctgtggcagcacacaacatctttggctttgagaccattcctgaagagtgcgttgaagcaacaaaggca

SEQ ID NO: 179469 - DNA, 259 bp, Glycine max
cttcaaacctaacgcagcatcgctattctcttcattccatggctttgcccaaccagcaaaccgtggattaccctagtttcaaactcgttatcgtcggcgatggtggcacaggaaagacaacctttgtgaaaaggcatctcaccggagaattcgagaagaaatatgagccaaccatcggtgtggaggttcacccattggattttttcacaaactgtggaaagattcgattttactgctgggatactgctggacaggagaa

SEQ ID NO: 179470 - DNA, 256 bp, Glycine max
  unsure (1)..(256): unsure at all n locations
ctccaccttgctttcttctccagcgtccgattctctcaccgatctcgcgccaaatacaaattcgtgtcaacccaacccagggttccggcgagcatggccgacggtccggctagcccaggcggcggcagcacgagagcggcgaccacagccctcgctctaacgtgcgcgagcaggacaggtacctccctatcgctaacataagccgcatcatgaagaaggcacttcctgccaacggtanaatcgcaaaggacgccaa

SEQ ID NO: 179471 - DNA, 260 bp, Glycine max
taaagtttgcccccttacacgttttttgtcttcttttttctcccatctttgtttcgagaagcatttgacgaagagaagagacagtgaatcgcggtttcaattcaacccacttcatctcaggtgtttgaagttgagataaaaatgagcggaacagagaaagcaggatcaggaaccaccaaaacccccgccgatttcctcaaatccattcgtgggaggccggttgtcgtcaagctcaattctggtgttgattacagaggtat

SEQ ID NO: 179472 - DNA, 265 bp, Glycine max
cattgatttcttgcttctatatattacttgcttcttttcttgatcatgtcccttgctggtaaaatcagctctgaaattggtgttcaggcaaccgctgcaaagtggttcaacctcttcacaacacaacttcatcacgttcaaaatcttactgatagaattcatggcaccgagctgcatcatggtgaagactggcatcacaatgagtcggtcaagcactggacttataccatagatggcaaggttacaacttgcaaggagagtattg

SEQ ID NO: 179473 - DNA, 270 bp, Glycine max
cttttctcagctgctgttcctgcgcgtgaacaagcctcaggtaagccaaagccatggttaagcataacaatgttatccccaacggacacttccgtaagcactggcagaactatgtgaagacctggttcaatcagccagcacggaagacaagaagacggttggctcgtcagaagaaagctgtgaagattttccccagacctacagctggacctcttagacccattgtacatggtcaaactttgaaatacaacatgaaagtgagagctggaa

SEQ ID NO: 179474 - DNA, 285 bp, Glycine max
catccttcgctgcccagccgtcaccaaccggtcggcagcgacgcagaggagatcagtggtagtgaatgcagccagcaaatctgttgaaggggaaaaggtcagttatgacaacaatggtagcaatgcaaggaggaacttgatgttcgccacggcggcggctgctgtttgctcttttgctgcagggatggcattggcagatgagcctaaaccaggaacctcagaagccaagaaaaagtatgccccggtttgtgtcaccaatcctacagctaggatttgtcgcaattg

SEQ ID NO: 179475 - DNA, 284 bp, Glycine max
cattgtttgtggcctttacttttctctgcagttcacaacgggtcatgcagatccaaatgctggaagaactttgaatcaggagggtggtgatcatcaaatacattgctctagagaaagaagtagaacagcttggaaaatcattcaagagtatttgatgccctttgtggagaaagaaaacataccacatctcaaaaaggtgtaggcttcaccctgacaatgacatatacagagatcaggagcaacataagtttcatacagatataaacgaatggcagtgtgggttc

SEQ ID NO: 179476 - DNA, 278 bp, Glycine max
ctagaattgttaatttctctgatcccattgtgaatttgtggggatctgaattgcggaggaagatgattcagcttctgttcacggtgatattttcggaggcttcgatgatagcgttgctgcacgttcaagacccctttgaggaagctcgtgataatgggcttggatcggttgaagcgaggtcgtggacccttgatggtgaagaccgttgcagggaccgttctcgtggtgttgttgtcgagtgtgtatagcatgttgaagattcagaagcgtgggatcca

SEQ ID NO: 179477 - DNA, 276 bp, Glycine max
gagagggagattctttgtttgctaccttctctcggaaaaatggttacgttcaggtttcaccagtaccaggtggttgggagggctcttcccacggaagcagatcagcaccccaagatctaccgaatgaagctctgggccaccaacgaggttcgcgccaagtccaagttctggtattttctgaggaaactgaaaaaggtgaagaagagcaatggccaagtgcttgccatcaacgagatttttgagaagaacccaaccaaaattaagaactatggtata

SEQ ID NO: 179478 - DNA, 277 bp, Glycine max
cagtctttcttggaactttgttactctcacacatgtctcgctccgtgcctttggtttcaaccatttttctcttgcttctgcttctggtggccactgagatgatggggccaacaatggtggcagaagcaagaacttgtgagtctcagagccaccgtttcaaggggccatgtttgagtgacaccaactgtggctctgtttgccgaaccgaacgtttcactggaggacactgccgtggcttccgtcgcagatgcttctgcaccaaacattgttaatttta

SEQ ID NO: 179479 - DNA, 267 bp, Glycine max
ctccactcttagctgccattggtttttcttcttccatttctcttcctttctaagcttttttcgattacccatttggagattctgtcctaatggctcttgctccttccaaagtttcctccttttccgggttttctcccaaacccagtgttggggatgctctgaaaaacccaacttgctctgtttctctgagctttgcgaatgtgaaactcggaagcagaaaccttagggtttgtgcctcaactgtgcctctctcaggggtgattttcg

SEQ ID NO: 179480 - DNA, 273 bp, Glycine max
cgtttatcgtgaggagaatatgaagttgtttgtcttctctgttgctgcagtagtcttcgtagcatggccatgccatggcgcaggctaccaaaggttccctctccgaatgaaaactggctatggtgagcgttcttcggaggtaaaatgcgcaagtcttaggcttgctgtggaagcacacaacatccgagcctttcaaaccattcctgaagagtgcgttgaaccaacaaaggactacattaatggcgaacaatttagatcagactctaaaacagt

SEQ ID NO: 179481 - DNA, 273 bp, Glycine max
gcaaaaagcctttcatagtgagatagccctagaaatgtttcgtgaatctttgtttgctctctttctactttctgccttctcctcctcactcctacctttaaccactgctcaagattacgttctcgacacggacggtcacgcggttgaaaatcacggtacatactatttgttgccagcgaaatcaggaagcggcggtggtggaatagaggtagccgcaactggcaaagaaagttgcgctctcactgtagtgcaatctctgaacgaggactccat

SEQ ID NO: 179482 - DNA, 280 bp, Glycine max
cgccgtcgtcgctgtttttgtgtgtcgctccttcgtaggtgcagctgcaatggtgaagggacgccaaggagaacgtgtcagactctacgtgaggggtacaatccttggatacaaaaggtccaagtcaaaccagtatccaaatacatccctgatccaaattgagggtgtgaatgccaaagaagaagtagcatggtatgctggcaagaaaatggcctatatctacaaggctaaggtgaagaagaatggaagccattaccgctgcatatggcgcaaggttaca

SEQ ID NO: 179483 - DNA, 273 bp, Glycine max
gaaatggaggaagcaaagggagttgtgaagcacgttttccttgcaaagttcaaggacgacgtctctccagagcggattgaggagctcatcaaggactatgccaatcttgtcaatctcatcccacccatgaagtcattccattggggcaaggatgtaagtgctgaaaacatgcatcaaggcttcactcatgtgtttgaatcaacctttgagagtacagaaggcattgcagagtatacagctcatcctgcccatgttgaatatgcaactttgttc

SEQ ID NO: 179484 - DNA, 274 bp, Glycine max
ccagatgaagatgatccacgttcttttcctctttgctcttgtctcgttcacttcccatgcttctgtcaatgatttctgtgtagcagacctaaaacgtccagatagcccttcaggctatcagtgcaagccacctaacacagtcacagtggatgactttgtgttctctggctttgtagctggaaacaccacaaacactttcaatgctgcattaacctccgcatttgttactgattttccaggtgtgaatggtcttggtgtatctgcggcacggtta

SEQ ID NO: 179485 - DNA, 268 bp, Glycine max
gttttgtagtaagtgaggtgaggtgccaaaatggtgaagataactcttggtactttcgatgactcttttggtgttgcctctcttaaggcttatttggcagagttccatgcaactctgatttccgtgttcgctggtgttggttcagccatcgcttacaacgagcttacaaaagatgcagccttggatccaacggggctggtggcagtagctgtggcccatgcatttgcactgtttgtaggtgtctccgtcgcagccaacatctcgggtg

SEQ ID NO: 179486 - DNA, 272 bp, Glycine max
gggagtcagagaaatcctaggtaagaagaaaagatgccggctggtcatggtttgagatcccgcaccagagattccttctctcgtcctttcaggaagaagggaaccatcgccctcaccacatacctgagaacctaccacgtcggcgactatgttgacgtcaaggttaacggtgccgttcacaagggaatgccccacaaattctaccatggccgcaccggacgcgtctggaatgtcaccaaacgtgctgttggcgtcgaagtcaacaagcaggt

SEQ ID NO: 179487 - DNA, 273 bp, Glycine max
caccgcacgaatatcttgttgtttggagcgatccgagacaaactctgtaaacatgtcggtttaccaggacctccttacaggtgatgagcttctctctgactccttccgttacaaggaaattgagaatggaatgctgtgggaagttgaggggaagtgggttgtacaaaggagcagttgatgtagacattggtgcaaacccttctgctgagggtggaggagaagatgagggagttgatgatgcagctgttaaggttgttgacattgttgacacat

SEQ ID NO: 179488 - DNA, 278 bp, Glycine max
cttaagcttgctactgagtttccacactgcataccttacgtcacccgaattcgaagttaatttgcaagatggctaaggaaaaggctcagatcaacattgtcgtggttggtcatgtggaccctgaggaggcaaccaccattaacgagctgaagaagcctgttgtggagaaagaagctccagggcatgccatatgagggcatgcacgtacggcctcggaggggaaccagaaaattatgttaacaaaataatctggaaccctaatgtatcagtgtcatcat

SEQ ID NO: 179489 - DNA, 276 bp, Glycine max
attcaatgctaaattattacagcaattagacaacttaaagacaaagctgggcttaaagactgctttggttgatgtttatggtatgatccaacgcgcggtcaccaaccctaaaaaatacggttttgtcgatggttcaaaaggatgtgttgggacggggacagtacgaatatggagattcatgcaaagggatggatacttgttcagatccagacaaatatgtattctgggatgctgttcatccaacgcaaaagatgtacaagataatagctgatgagg

SEQ ID NO: 179490 - DNA, 275 bp, Glycine max
ctcagccgcctcggctagggttcggaaacgaagaagggttctgctttcttttcgcgatgagggccaagtggaagaagaagcgtatgagcaggctgaagaggaagcgccgaaagatgagacagagatccaagtagtgcgttaaacctagtttgtttccgttgcttttacaattgcttatgttgtcaaataggacacccagttgttagtggcactggtctctcctttttgatgttttgatacattttgttggattttatttcgtcttatgttcttag

SEQ ID NO: 179491 - DNA, 268 bp, Glycine max
cggcgactgacacagtaattaaaggagctggaaagctgaagctggtgtttgttccagaaggccagggtgaggagactgaattcgaggtttttaacttcactggtgaagggggtgtttcattggctatgtacaatactgatgagtctattcgttcttttgctgaggcctctatggcaactgctttagagaaaaagtggccactttatcttagcaccaaaaatacaattctgaagaaatatgatggaagattcaaggacatatttcaaga

SEQ ID NO: 179492 - DNA, 265 bp, Glycine max
cagataactagaaacagtgtgatgaaaatgaaggtccttgttttcttcgttgctacaattttcgtagcatggcaatgccatgcgtacgatatgttccctctccgaatgaacactggctatggtgcccgtactccggaggtgaaatgcgcaagttggaggcttgctgtggaaccacacaacatctttggctttgagaccattcctgaagagtgcgttgaagcaacaaaggaatacatccatggcgaacaatatagatcagactcca

SEQ ID NO: 179493 - DNA, 267 bp, Glycine max
catcgagataactagaaacagtgtgatgaaaatgaaggtccttgtcttcttcgttgctacaattttcgtagcatggcaatgccatgcgtacgacatgttccctctccgaatgaacactggctatggtgcccgtactccggaggtgaaatgcgcaagtcggaggcttgctgtggaagcacacaacatctttgtctttgagaccattcccgaagagtgcgttgaagcaacacaggaatacatccatggcgaacaatatagatcagactc

SEQ ID NO: 179494 - DNA, 269 bp, Glycine max
cctcgaccgaatcggctcgaggctgcatactacgagcaaggtgcccgtttcgccaaatgacctactgttgtgagcatcaccaacggtccctctgctctggcagttaaggaagcagcctggggtctggctcgctatgctgcaattgctcaggacaatgggttggtcccaattgtggagccagagatcttgcttgatggggagcatggtattgatagaacttttgaagtagcccaaaaggtctgggcagaggttttcttctaccttgctga

SEQ ID NO: 179495 - DNA, 269 bp, Glycine max
acaaaggttcaaatgcaaggcgtctcagtgggtcgtgctgtcgatttgaccatgttggatggatatgatcaacttataaatgaattggaggagatgtttgacataaagggacaacttcaacaccggaataagtgggaaattgtcttcactgacgatgaaggtgacatgatgcttgttggagatgatccatggcctgaattctgtaatatggtgagaagaatcttcatttgttccagccaggatgtgaagaagatgagttgtggaagcaa

SEQ ID NO: 179496 - DNA, 274 bp, Glycine max
cgtgatttctattagcagcacaagtttgtcttctggtacactcgtcgaacacctggagttcgaaatcaaacatcatatgaggacaacataaagaaaattgttgaatttagtacggttgaaggattttgggtctgctactgccatcttgctcgtcctgcttctttacctagtccaacagatttgcaccttttcaaggaaggaatccgtcctctatgggaggtagatacttaaaagtagtagctgaagttgcattttcttgccgattgagaattta

SEQ ID NO: 179497 - DNA, 274 bp, Glycine max
ccgagtagcaacaatgtcgaagcgaggtcgcggaggatcggcgggaaacaagttccgcatgtcgctgggtctgccggtggcggcgacggtgaactgcgccgacaacaccggcgcgaagaacctctacatcatatcagtgaaggggatcaagggtaggctgaaccggttgccgtcaccttgcgtcggagacatggttatcgccaccgtcaagaagggaaagcccgatctccgtacgaaggtgctgcccgccgtcatcgtccgccagcgcaagcct

SEQ ID NO: 179498 - DNA, 273 bp, Glycine max
ccagaagacggagatgtatcagatctgtagcaggagaatatgcgtcggagcgttcgcgtttgtcctgcatttcctatcggcctcagcagacgacgtcgttgtgctctctgaagacaacttcgagaaggaagttggtcaggacagaggagctctcgttgagttctatgctccttggtgtggacactgcaaaaagcttgctccagaatatgaaaagcttggtagcagcttcaagaaagccaaatctgttttaatcggcaaggttgactgtgatga

SEQ ID NO: 179499 - DNA, 272 bp, Glycine max
cgctaaccaaccctgacactccttcttctccgcttcctcttcgatcatcgcttcagaatgccgccgaagttcgacccctcccagatcgtcgacgtcttcgtacgcgtcaccggcggtgaggtcggcgcggcgagttccctccccccgaagatcggtcccctcggtctctcccccaagaagatcggagaagatatcgccaaggaaaccgccaaggactggaagggcctccgcgtcaccgtcaagctcaccgtgcagaaccgtcaggccaaggt

SEQ ID NO: 179500 - DNA, 267 bp, Glycine max
catgtatcagatctggagcaggagaatagcgttgggagcgttcgcgtttgtcctgcttttcctatcggcctcagcagacgacgtcgttgtgctctctgaagataacttcgagaaggaagttggtcaggacagaggagctctcgttgagttctatgctccttggtgtggacactgcaaaaagcttgctccagaatatgaaaagcttggtagcagcttcaagaaagccaaatctgttttaatcggcaaggttgactgtgatgagcacaa

SEQ ID NO: 179501 - DNA, 265 bp, Glycine max
gcaagaatggcacttcgttgcttggtgatgtccctttctgttctcttcactcttggtcttgcgagagaaagccatgccagagacgaagatttttggcatgctgtttggccaaacactcccattccaagttcattgcgagatcttctaaagcctggccctgcaactgttgcaatcgatgatcaccctatgcaaattgaagaaacacagtacccgaaaaccttcttctataaagaagaccttcatccaggcaacacaatgaaagtac

SEQ ID NO: 179502 - DNA, 264 bp, Glycine max
cctttctcccctacacaaaacatggctttgcccaatcagcaaaccgtcgattaccccagcttcaagcttgtcatcgtcggcgacggtggcacaggaaagacaaccttcgtgaagaggcatctcactggtgaattcgagaagaaatatgaaccgaccattggtgtggaggttcatccgttggattttttcacgaactgtggaaagattcgcttctattgttgggatactgctgggcaagagaagtttggtggcctcagagatgga

SEQ ID NO: 179503 - DNA, 272 bp, Glycine max
cctagattcagccacagttggaaaaaaaaaaaaagttgtccgagatggcacgtacgaagcaaactgctcgtaagtccacaggaggaaaggcacctaggaagcagctcgcaaccaaggctgcacgtaagtctgcaccaactactggtggtgtcacgaagccacatcgttatcgtcctggcaccgttgctcttcgtgagattaggaaataccagaagagtaccgagcttttgatcaggaagctccccttccagaggctggttcgtgaaattgcc

SEQ ID NO: 179504 - DNA, 264 bp, Glycine max
ctctatactataggtctcgcccaatacctactctccgctcccaagagcacgcaccaccactattgcacttcttcctcgttctccctctttttcttcttcttcgctaaacccttttttctatctcactaacacaacaatgggagacgagaagaagggcaagcctgctgcttccggcgtgtggtccaccatcaagcctttcgtcaatggtggagcctccggcatgctcgccacctgcgtcattcaacccatcgatatgatcaaggt

SEQ ID NO: 179505 - DNA, 262 bp, Glycine max
cgaggaggatgatgatgagtaaagatggtgatacatgatgaagcgtaggtggatgcgggaaaagaaaattgttttgcatagttgttgggtttagaatttcataggatggttccctacccacatccttttctgataattagtttctgaatttttattttgtcctccctcagtaggtttagattagtgcacaatcgtaattagggtttaatatcatgatcctgtacttaaagtcaatgttatgatacgtttctattctattctc

SEQ ID NO: 179506 - DNA, 266 bp, Glycine max
cgagacaaagccatgccagacacgaagatttttggcatgctgtttggccaaacactcccattccaagttcattgcgagaccttctaaagcctggccctgcaagtgttgacatcgatgatcaccctatgcaaattgaagaaacacagtacccgaaaaccttcttctataaagaagaccttcatccaggcaaaacaatgaaagtacaattcagcaagcctccctttcaacaaccatggggtgttggtacatggttaaaggaaattaaa

SEQ ID NO: 179507 - DNA, 267 bp, Glycine max
cacgaatttcattgcagagtgttattttgagtatcagcatcaatggctccaattgcactgggaaacgtgattccagacggcattttggcttacttggatgaagaaaacaaaccccaaactgtctccattcactctctcgccaccggcaagaaagtcatcatctttggggttcccggtgccttcactcctacttgcagcttgaagcacgttcctggcttcattgagagagcagaagagctgaaagggaagggtgtggacgacataatc

SEQ ID NO: 179508 - DNA, 269 bp, Glycine max
ctcatggcggagattgaactgaaaactgcacctgctgattttcgtcttcctacaacaaatcaaaccagacattgtttcactcgctacatagagtttcacagatgcttggcagcaaagggtgacaactctggtgaatgtgagagatttgctaaatattaccgctccctttgcccgggtgaatgggttgaaaggtggaatgaacagagggagagtgggacttttccaggacctctttgaaatcatgtggcacttggatatccttctgaggc

SEQ ID NO: 179509 - DNA, 269 bp, Glycine max
cccgagcagcgagacacagaacccctagcaaaaatgccggctggtcacggtctgagatcccgcaccagagattccttctctcgtcccttcaggaagaagggtaccatcgccctcaccacatacctcacaacctaccacgtcggcgattatgtcgacgtcaaggttaacggcgccgtccacaagggaatgcctcacaagttctaccatggccgcaccggtcgcgtctggaatgtcaccaaacgtgctgttggggtcgaagtcaacaagca

SEQ ID NO: 179510 - DNA, 267 bp, Glycine max
tctgcttcactcttcacttcgcagcttcagatcttctccatcctctgaatcaagttttgactttatttgaagagtttctcaaatgcactttccttccaaaatgagccggccaatggaggaagatgctgcgggtaaaaatgaggaagaggagttcaacaccggaccactatctgtactcatgatgagtgttaaaaataatactcaggtactgataaattgtcggaacaacaaaaagcttctgggtcgtgtaagggcttttgacaggca

SEQ ID NO: 179511 - DNA, 266 bp, Glycine max
ctcagttgcaggaaaaatggtttcgctgaaactgcagaagcggctcgccgcgagcgtgctcaagtgtggcagaggaaaggtttggcttgaccccaatgaagtcaacgaaatctccatggccaattctcgccaaaacataaggaagctggttaaggatgggtttatcatcaggaagcccaccaagattcactctcgctcacgtgctcgtcgaatgaaggaagccaagaggaaaggacgtcactctggatacggtaagcgtaagggta

SEQ ID NO: 179512 - DNA, 265 bp, Glycine max
  unsure (1)..(265): unsure at all n locations
cgcggaaccatgatggctgcgtatttgcgtgtatccatgcccacttccccacagtcccccaccactacgaggacgagatgcagaaatctgaaaacttcttgctccgttaacagacccaaaattccaatgccccctctcaaccctaaagacccctttctctccaagctcgcttccgtcgctgcttcttcccctgaaacgctcctcaacactcccaaaaactccgacacccttccttatctcgacatcttcgactcncccaaactca

SEQ ID NO: 179513 - DNA, 257 bp, Glycine max
accgtaccgtgttgcctctctgcaatctacagccaaaatgcctttcaagaggtacgttgagatcgggagggttgcccaaatcaactacggcaaggaatatggcaggctcgtcgtcattgtcgacgtcattgatcagaacagagctcttgccgatgcccctgatatggtgaggtcccaagtcaatttcaaaaggctttccctaaccgatattaagattgacattaagagggtccctaagaagaaagatcttgtcaaag

SEQ ID NO: 179514 - DNA, 261 bp, Glycine max
gtctctcgtgtcattggaatgattcctggtatggggaaggttactcctgctcaaattcgagatgcagagaagaatttgcagaacatggaagctatgatagaagcaatgacccctgaggagagggaaaagccagaactgttggcagaatcccctgtcaggaggaaaagagttgctcaggattcagggaaaacagagcagcaggtaagccaacttgtagctcaacttttccaaatgcgtgttcgtatgaagaacctgatgggt

SEQ ID NO: 179515 - DNA, 262 bp, Glycine max
caccactcttaatttctctctgccttgctcatttacacacctctccaacctttcactttcagctttatttgaatccctctctctcctttccaaatggccagcgttgaggttgcacatcaaacaccaacaacagttccagaaaatgaaacaaccgaggtaatcaagacccaggaaacaaccccggaaccagtaccagccactgaggctcctgcaacagaacaagcagcagctgaggttcctgctcaagaagaacaacaagcaa

SEQ ID NO: 179516 - DNA, 262 bp, Glycine max
ccgcgttctatatattattgaattgacaatgaggcctgctcttgctttgcttcctcttctatttgctctctcgttagctgccactacagaatcaagaaaagatacaggggaatattggaaaatgatcatgaaagatcaggaaatgccagacggacttcaaggtcttgtttcatttcaatctgaaaataaccctaagactcaagagcagcttggtaaaggttccaaaaaccattgtgaagagtctctagttacaaatacacaa

SEQ ID NO: 179517 - DNA, 303 bp, Glycine max
caacagtttccatctctctcacaaaatgacaacaatatcaaattgctcccttctcttcctcttcctcttcctctccaccctccacatagcttccaccctctcaacccccaccaacttcatcaagtcctcctgcagcaccacccagtacccagccctctgcatccagtccctctccgtctacgcctccaccatccagcaagacccccacgagctcgtccagacagccctctccctctccctcaaccacaccgaggccaccaaaaccttcgtcgcaaaatgcaacaaattcagaggcctcaaacc

SEQ ID NO: 179518 - DNA, 290 bp, Glycine max
ggaagagagagggagattctttgtttgctaccttctctcggaaaaatggttacgttcaggtttcaccagtaccaggtggttgggagggctcttcccacggaagcagatcagcaccccaagatctaccgaatgaagctctgggccaccaacgaggttcgcgccaagtccaagttctggtattttctgaggaaactgaaaaaggtgaagaagagcaatggccaagtgcttgccacccccgagattttgagaagaacccaaccaaaattaagaactatggtatatggttgcgg

SEQ ID NO: 179519 - DNA, 287 bp, Glycine max
gtttgataaaatattgtacacataaatctagctccaattcctaatcacctggttaatttcttcacatagagctatcaagatccaacgttaacatgaagaatgttttagtaaggtcagctgcgcgagctctgcttggcggcggtgggcggagctactaccgccagctctcaacggcggcgatcgtggaacagagacaccagcacggtggcggcgcgtttggaagcttccacttgcggaggatgtccactcttccagaggtaaaggatcagcactcagaggagaaaaag

SEQ ID NO: 179520 - DNA, 290 bp, Glycine max
ggcagcacttggtgggaatcgtgatgtgacaggaagccagaacagcgttgagatcgatgctctagctcgctttgctgttgaagaacacaacaaaaaacagaatgcccttttggagtttgaaaaggtggtaactgcgaaacagcaagtggtttctggtaccttgtacaccatcactttggaggcaaaagatggtgggcaaaagaaggtttatgaagccaaagtttgggagaagtcatggttgaacttcaaggaggtgcaagagttcaagcttgttggagatgcacctgcat

SEQ ID NO: 179521 - DNA, 288 bp, Glycine max
caaaaccctagcagccggcgagaatggcagacgttgaggttgatgcggcggcagcggcaggggcagcgcagcgaagaagagaacgttcaagaaattcagcttcaggggcgtggatctggacgcgcttctggacatgtccaccgacgaactggtgaagatgttcagtgcgcgtgcacgtagaaggttccagagaggtctgacgaggaagcccatggccttgattaagaagctccgcaaagctaaaagggaagcaccagcaggtgagaagccagaaccagtgcgcaccca

SEQ ID NO: 179522 - DNA, 290 bp, Glycine max
gatcgagataactagaaacagtgtgatgaaaatgaaggtccttgtcttcttcgttgctacaattttcgtagcatggcaatgccatgcgtacgatatgttccctctccgaatgaacactggctatggtgcccgtactccggaggtgaaatgcgcaagttggaggcttgctgtggaagcacaccacatctttggctttgagaccattcctgaagagtgcgttgaagcaacacaggaatacatccatggcgaacaatatagatcagactccaaaacagttaaccaacaagctt

SEQ ID NO: 179523 - DNA, 288 bp, Glycine max
gagagagagagagagagagagaggtatcacagtgaaacgaagaagctctaactacgcacgcactcattcttgagatagctcaatattcattcgtccatggcactctcttctcgtctcttttccaaatccaaattgatctatggctgtcaaatacttctgcaaaaggagcatgctattccagttcgtcactttgctaaagagtctgcccctcctgcccttaagggagatcagatgctgaagaacatttttgtggaggtgaagaacaaatttgagactgccataggaata

SEQ ID NO: 179524 - DNA, 176 bp, Glycine max
gttgtcttgccttgtgtggagctttatccaatcactgtgtgtggtgtgtgcttaagttaaaaacttgccttccaattaatgtaacgagtgtctcctttctcatttccttttgccacagaattgtgagagtcagttgatatctttgtatgtgacttcaataaattttaataaaagaa

SEQ ID NO: 179525 - DNA, 290 bp, Glycine max
attgcaaatgacgaactgtcttcaactcatccaattaggcttggccttgcacttaacttctctgtactttactacgaaatccttaactctcccgatcgtgcctgcaaccttgcaaaacaggcttttgatgaagctattgctgaattggatacactgggagaggagtcatacaaggatagcactctgatcatgcaactccttcgtgataacctcaccctttggaactctgacatgcaggatgatggagcagatgaacataaagaagcagcaccgaaacaggatgaccagta

SEQ ID NO: 179526 - DNA, 299 bp, Glycine max
agcactcaccctcattaccaacacgaaagcatagccaaaaccttttttcgaagtctctgattttcctaatggctccggcaaaggcagagaagaagccggcggagaagaagccagcggcggagaaggcaccggcggagaagaagccgaagggccagaagaagatctcgaaggaaggagggagcgagaagaagaagaagcgcacgaagaagagcgtggagacctacaagatctacatcttcaaggtcctcaagcaggttcaccccgacattggtatttccagcaaggccatgggcatcatg

SEQ ID NO: 179527 - DNA, 275 bp, Glycine max
cttactggatccgcatgaaaaccgacaatagcatcaggtacaatactaagcgcaggcactggcgccgcaccaagcttggattttaaggtccatgccaacctccgactcgagatttttatcttggttttggttttctagaatgtcacgagcgatgtgggaaggttgtagctttggtcatgtggttacacagaatgatcactgtagagcgtttccataaccctattttattattctatttttttggctattaatgtgaaactgtgatggtagttttt

SEQ ID NO: 179528 - DNA, 286 bp, Glycine max
cgattttaagataagaaccattgagcttgatggcaaacggatcaagctccaaatttgggatactgcagggcaggagcggtttcggacaattacaactgcttactaccgtggtgctatgggcatattgctagtctatgatgttacagatgaagcatcatttaacaatatcaggaattggattcgcaatattgagcaacatgcttcagacaatgttaacaaaatactggtggggaacaaagctgatatggatgacagcaaaagggccgtgcctacgtccaagggccaa

SEQ ID NO: 179529 - DNA, 285 bp, Glycine max
ctcgagccggtctagattcagtagagatcgtgatggctcttgaggaagagtttgggttcacgattcctgataatgaggcagacaagatcaactccattaaacttgcagtggacttcattgcatctcatcctcaggcaaagtagtggaattcgtgtataatttttcttttgtttctcaacatctagtttagatgacgcatcgacatttttgcttccaaagtggaactttgttttctcatccctcagaagagtgttagctggggatgtgccagcttcatttggcggt

SEQ ID NO: 179530 - DNA, 285 bp, Glycine max
catacaaagcattgaattcaaaaactaagttcatttcttgtgctttgctttattcctcaaaaccaaacatgtcgaacacatgcggcaactgtgactgcgctgacaagactaactgcaccaagggaaacagctatggtgttatagtagagactgagaagagctacatcgagactgttgacatggatgttccagcagctgagcatgatgggaagtgcaagtgtggcactaactgcacttgcacggactgcacttgtggccattaaggaatatgtatgacaatgtaat

SEQ ID NO: 179531 - DNA, 287 bp, Glycine max
gacaaatttaagatatctggctgaactcccacaaaatgttgatttggtgactatgagacctctcattcatctctaatctcttggtgatgcccgccgtggtcaatgacatgaaggaaaatgcagcattagtgactttggttaaaccacaatttgaagctcgtagatctcaagtaggaaaaggaggaatagtgaaagatcctgctgttcatcaagaggtccttgagaagattataaagggagtagagaattttggtttctgttgtataggttggattgagtctcctctg

SEQ ID NO: 179532 - DNA, 292 bp, Glycine max
aaaggagtgatttggagtttggagcgactgaactaatcattaatttgcactcgctgtttcagcttcatcacccttcttttgcatcatttatatctcttgagaaatggcacaagaaacctttctattcacatctgaatctgtaaacgacggtcaccccgacatgctgtgcgaccagatctctgatgcagtacttgatgcgtgccttgaacaggaccctgacagcaaggttgcctgtgagacatgcaccaagaccaacatggtcatggtcttcggagagatcacaaccaaggcc

SEQ ID NO: 179533 - DNA, 298 bp, Glycine max
cccaattcccttcgtcgttttcgattaagagagcaatggcacgtaccaagcaaaccgctcgcaagtccaccggaggaaaggctccgaggaagcaattggcaaccaaagccgctcgcaagtcagccccggcgaccggcggagtgaagaagccccaccgcttcaggccaggaacggtggctctgagggagattcgaaagtaccagaagagcaccgaacttctgatccgaaaactcccattccagaggctcgtcagagaaatcgctcaggatttcataaccgatctccgctttcagagcag

SEQ ID NO: 179534 - DNA, 292 bp, Glycine max
cctcgagtcgattcggctcgagtgattggtgtgcatccatgtgaaactagtggcgatcggatccagctagagcctacaagctcacagttttggtttggtttgcttgattgaagatcaaggaaggaagatgttgggtgttataaggcacaagagtattcgccccgccttctccgcaatcagagacttctcttctgcagctaaagagattactgtcagggatgctctcaactccgcactcgatgaggaaatgtcagctgatcctaaagtcttcttgatgggtgaagaggttggg

SEQ ID NO: 179535 - DNA, 279 bp, Glycine max
ctcgcgtgtatgttggtaacttggattcacgagtcaccgagagagatctcgaagacgaattccgtgttttcggagttattcggagtgtttgggttgcacgtagaccagctggtcatgcttttattgactttgatgaccgcagagatgcacaggatgctatccgtgaattggatggcaagaatggttggagggttgagctttctcacaactctagaggtggaggtggtggtcgtggtggtcgctctggtggttctgatttgaaatgttacgagtgtggtg

SEQ ID NO: 179536 - DNA, 286 bp, Glycine max
tgagagagagagagagagagagagagagagaaatggcttcgcatgcaattgtgggcttcaagagctgactcttacctgaggatctctgtgtttcacagaggcttttctaatgttgttaaagatttgaagtatgctgattctcatgagtgggtgaaagttgatgaaaattctgcaagcgtcggtataactgatcatgcccaagatcatttaggtgatgtcgtatatgttgaattgccagaagtgggagcagctgtcacacaaggaggtagttttggtgcagttgaaa

SEQ ID NO: 179537 - DNA, 296 bp, Glycine max
ggttctagcacactcccctctcaggttattgtggataagattgagctataatggctgccaggagaccgggtttgattgctttgtttgatgttgatggaactcttacagctcccaggaaggtggtcacaccggagatgttgacattcatgcaagaactgcggaaggttgtaactgttggagttgttgggggttctgaccttataaagatatcagagcaacttggcagcacagttaccaatgactatgattatgtattttctgagaatggtcttgctgctcacaaggaaggaaagctc

SEQ ID NO: 179538 - DNA, 283 bp, Glycine max
aaaatgtggaagagaacgggttttgaagaagaagcagttcaattgatcaactcagatttcagggacctaagtctagctgctaatagactcgcccatcatgccatcaaacttggtggcattggctttggagcctcttttttcggattgtttgctgccattgctgctatttatctgttgattttggatcgtacaaactggaaaacaaatattctcacagcactactcattccatacattttcttcagcttgccttcattaattttcgacgtcttcaggggagagc

SEQ ID NO: 179539 - DNA, 258 bp, Glycine max
tccggtgatgggtatagggttgaggagaataacggctgcctcatgcttggctggcacactaggccactcatcgctacctccgcttggaagcttccctcctcgcagcgagtctagtggcttgactcagtgaatgtaaaactatagattaattggacttgttccagtgaactgagtcagtgaccgagtcagtgagccttccaggcagcaagaggataaataaatgatctcgcgaacaaaaaaaaacaaaaaggggggccg

SEQ ID NO: 179540 - DNA, 280 bp, Glycine max
cttttgcttcactctacgcagatcgcagcaaaccagagattgaaacccgacgatgcctcccgtcgctcctcgatccggcgatgccatattcgccaacgtcgaacgcgtcaatgcggactgtttactttgacgtatggcgcaattgtgcgtcaattgctcacggatctggaagaggttgaggaggttaacgagcagcttgatcaaatgggttacaatattggaatccgattgattgatgagtttttagctaagtctaatgtctcaagatgcaacgatttca

SEQ ID NO: 179541 - DNA, 278 bp, Glycine max
tcaagatcggaatcaacggatttggaagaattggccgtttggtagccagagtggctctgcagagagacgatgttgaactcgttgccgttaacgaccctttcatcaccaccgattacatgacatacatgtttaaatacgacagtgttcatggacactggaagcatcacgatgtcaccgttaaggacgagaagacccttctcttcggtgacaagccagtcactatttttggacacagaaaccctgaagagatcccatgggggtcaactggagctgacatc

SEQ ID NO: 179542 - DNA, 276 bp, Glycine max
caaaaatggcacctgcaacactgtctctgtctctcctcctcctgttctcactcagcatcgccgtaaccgttagatcgagcgactacgactacgattgtgtgtacactgcatacgttagaaccggttcggtgttgaagggcggaacggactctaagatcgggctgaagctgtacgacaagtacggctactacatctacattaaaaacctcgaagcatggggcggcttgatgggcaagggctacgactacttcgagcgcggcaacctcgacatcttca

SEQ ID NO: 179543 - DNA, 281 bp, Glycine max
ccctgagagagctcgtcgcggcggttgcagaagaagattgcaagatgaagttcaacatcgcgaatcccaccactggatgccagacgaagctcgagatcgacgacgatctgaaactgcgagcattttgggacaagaggatctcacaggaggtcatcggagatgcactcggtgaggaatttaagggctatgtcttcaaaattaccggaggttgtgacaaacaaggatttccaatgaagcagggagtgctgactcctggtcgtgttagacttttgcttcacagg

SEQ ID NO: 179544 - DNA, 272 bp, Glycine max
cggttagggttttctcaaattgcaagaacatgggtttcaacattcaaccctatgggattcagtccatgctcaaggaaggccataagcacctttctggcctcgatgaagcggttctcaagaacatcgacgcctgcaaacaactttccactatcactcgaactcccctcggtcccaatgggatgaataagatggttataaatcacttggacaagctttttgtcacgaacgatgctgggacgattgtgaatgaacttgaagttcagcatcctgct

SEQ ID NO: 179545 - DNA, 291 bp, Glycine max
gcttcttgttgttggaaagaaaccctagcaagcggaacaatggcagacgttgaggtcgatgtggcggctgcagcagcagcagggcagccgaagaagagaacgttcaagaagttcagtttcaggggcgtggatctcgatgcgcttctggacatgtccaccgatgaactcgtgaagatgttcagtgctcgcgcacgtagaaggttccagagaggcctcaccagaaagcccatggccttgatcaagaagcttcgtaaagcgagaagagaagctccaccaggtgagacaccagaa

SEQ ID NO: 179546 - DNA, 286 bp, Glycine max
agcaagtgtagatgggagaggaccaagcatatgggacacctagactagacagcatactgaaaagatttgggatcatagcaccggtgacatgggagctgatttttatcatcgatacaagggtgacataaaaatagcgaaagacattgggctggactctttcagattctctatctcatggtcaagaatattcccaaagggcaagggagcagttaacccccttggggttaaattctacaacaatgtcatcgatgagatcctagcaaatggtttaacaccttttgtcact

SEQ ID NO: 179547 - DNA, 282 bp, Glycine max
caaccatatctattcttacaagttacatccattgagaaacatgaaggtctcccccttagcattttcaatcctttttttgtccttcaccatagaactcttcattggcattgcttcagcagcacaagaaccagtgcttgacacctcaggccagaagctgagaacaggtgtcaagtactacattctaccagtcttcagaggcagaggtggaggcctaacagtttcaagcagtggcaacaacacatgccccctctttgtggtgcaagagaagcttgaagtctcaaa

SEQ ID NO: 179548 - DNA, 281 bp, Glycine max
cttggtttgtgagagagacagacgcacagagagaaaatggttccgcggtcaggaatctgcgcgaagagggtagttgtggacgcgcggcaccacatgctggggaggctggcatcgatcgtggcgaaggaacttctgaatgggcagaaggtggtggtggtgcgctgcgaggagatttgcctctccggtgggctcgtcaggcagaagatgaagtacttgcgtttcctccgcaagcgcatgaacaccaagccctctcacggccccatccatttccgtgcacccgg

SEQ ID NO: 179549 - DNA, 277 bp, Glycine max
atggctcccaagggtttaacctttctggctgtgttaatatgcgtttcagcactgatcctgagtccttctcttgcgggggaagggcaaaataatggccttgttatgaacttctacaaggaatcatgccctcaggctgaagacatcatcacagaacaagtcaagcttctctacaagcgccacaagaacactgctttctcctggctcaggaacatcttccatgactgtgctgttcagagttgtgatgcttcactgttgctggactccacaagaaggagct

SEQ ID NO: 179550 - DNA, 276 bp, Glycine max
gtttgttgtgagctataagctagtttatcgtgaggagaatatgaagttgtttgtattctttgttgctgcagtagttttagtagcatggccatgccatggcgcaggctaccaaaggttccctctccgaatgacaactggctatggtgagcgttcttcggaggtaaaatgcgcaagttttaggcttgctgtggaagcacacaacatccgagcctttaaaaccattcctgaagagtgcgttgaaccaaccaaggactacattaatggcgaacaacttag

SEQ ID NO: 179551 - DNA, 276 bp, Glycine max
ctgcagagagagagagagagagagaaccgacaagcaaacgaaaagtaaatcaatcaatcgttggaatctctcaacttatcgcttcttcctgatttgggggtttccgtttcaatggacgacggcgagctggatttctcgaaccatgaagtgttttcgagtccgaacatgggggagcttccgagcagcggttcaatggacagtttcttcgacgagcttctcaaggacacgcacgcgtgcacccacacccacacgtgcaaccctcccggccccgatttc

SEQ ID NO: 179552 - DNA, 277 bp, Glycine max
ctccactccgatgaagcccacgcagaatcagatacaaaaaagataatcaaaattttacttccaaacccaaccaaatcaaagaaatgaaggataaggagacattccctattgcgaaaaaggaagcctctgattcaggtttattcggaagaggaagctacaaattctgggcactagctgccatgctgctcttggcattctggtccatgttcaccggcacagtctctctccgctggtccggcaccctcaacactttctcccacgcgtcccttcacgacca

SEQ ID NO: 179553 - DNA, 279 bp, Glycine max
tcaggtcaggcggggctacccgcagagtttaagcatatcaataagcggaggaaaagaagacgatagcaacaaggagcgtgcgtgcgtgcgtatgctgctctctatattcagaaccaataagaaagggaaaaagaagcattggtccttaccttagccccttttccttcatttgtttgttggttgggagagcaagggttgactgtttcttctccatattggttgtgaactgatttgtcctttgtattttctaactgatcccttccaacttccaatttttat

SEQ ID NO: 179554 - DNA, 283 bp, Glycine max
gcacagaggggaagaagaagatggtgtccttgaagcttcagaagcccctcgccgctagcgtcctaaagtgcggcaagggcaaggtctggcttgatccaaatgaagtcaatgacatctccatggccaattctcgagaaaacataaggaacttggttaaggatgggtttattatcaggaagccgactaagattcactctcgctcccgtgctcgtcgaatgaaggaggccaagagaaaggggcgtcactctggttatggtaagcgtaagggtacaagggaggcaag

SEQ ID NO: 179555 - DNA, 279 bp, Glycine max
gcagcgctgagtcgagggcgttcagtgttcagcacagtttacacacgagtacccatttgctcttctcaatttctcagagagaaaatcatggtggacgcagcagaacgtaggtacttggaggatgacgattcatcactcatgaaaactattaagggggcaacaactggtttagttgctggcactatctgggggaccgtagttgccacctggtatgatgtccctcgtgtagagagaaatgttgctcttccagggctgattaggactttcaagatgatgggc

SEQ ID NO: 179556 - DNA, 273 bp, Glycine max
agagcgtcgcagtcgcaaccctaatcagaagaagcgcagttcaagcgagtgacagccagcagccatgggtcgtatgcacagccgcggtaagggtatatcctcttctgctttgccctacaaaaggacacctcctagctggctcaagatctcttcgcaagatgtcgaagaaaatatttgcaagtttgcgaagaaaggtttgaccccgtctcagattggtgtcattctcagagattctcacggtattgctcaggtcaatagccgtcctggcagcaa

SEQ ID NO: 179557 - DNA, 273 bp, Glycine max
agcttttgcttctttgtgaacatggagatgaggaaatcatgtggcttcttcttcttgctcctcctccttgtctttgcttcccaggtggtggtgcagacggagggaagagtgtgtgagtcacaaagccacgggttccatggtttgtgtaatagagaccacaactgtgctttggtctgcaggaacgaaggtttctccggtggcaggtgcaaaggcttccgccgccgctgcttttgcaccaggatttgttgagatctcatcaaacactactcttgc

SEQ ID NO: 179558 - DNA, 276 bp, Glycine max
tcgtaattggctacatagagttccagaggaacgcagagctggacccagcaaagaggctgtacgcaggtggcagttacttcgacccactgggcctggcctcagatccagagaagaaagccacccttcaattggcggagatcaagcacgcccgtctcgccatggtgggcttcttgggctttgcagtccaagctgccgccactggcaagggcccgctcaacaactgggccacccacttgagtgacccactccacacaaccatcattgccaccttctcat

SEQ ID NO: 179559 - DNA, 270 bp, Glycine max
aataagacactgtcaccgttccgttccgttttcctctgtttttttgttcttgctttcaaatccccgcttcgtggaaatcccgaaccagaaaccatgcttctccgaaccgctgctgcttctgcttcgtccctctccctcttcagcccgaacgccgaacctccccgttcggttcccgctcgtggattggtggttcgcgcagcaccaggatccacgaagcaccgcgccctgaccggagtgatttttgaaccgttcgaagaggtgaagaaggag

SEQ ID NO: 179560 - DNA, 272 bp, Glycine max
ctagttcacagcttcagttcgtttttgttgatcctgtgaacttatacgtgacggggtggttctgttggatacatgggccagcatgtttgggatgagggttaggattgcattagctgaaaagggtgttgagtatgaatacaaggaagaaaatctcaggaacaagagtcctttgcttttgcaaatgaacccaattcacaagaaaattccagttctgatccataatggcaaaccaatttgtgaatctgcaattatagtgcagtacattgatgagg

SEQ ID NO: 179561 - DNA, 277 bp, Glycine max
caaaccctcagagatgaagagaagtcctatcttgtaccctgctcttctttctactttgtgccttcacctcatatctaccttcagccaccgctgatgatgatcatgtgtacgacactgacggcgataagcttcaatacggtgtcaattatttcgtgttgccagtgataagaggaaatggcggtggaatacaagtagcaaacgcaggaaacgatacttgccctctgactgtggtgcaatctggcaacgagctctctgaggggttaccgataaagattgc

SEQ ID NO: 179562 - DNA, 273 bp, Glycine max
tgctctgcttcaacattgcggaagcagaagaagcgccgcagctatggtgaagtactccagagaacccgagaatcccaccaagtcctgcaaggccagaggcgctgacctcagagttcattttaagaacactagggagactgcctttgccatcaggaagttgccccttgttaaagctaaacgatacttagaggatgttttggcccacaaacaggctattcctttccgacgcttttgtggtggtgttgggaggacggcccaagtctagcacagaca

SEQ ID NO: 179563 - DNA, 271 bp, Glycine max
tgctggatttgatgatgagaaatcactacttatgtcacaaatgagcctcgagaaaaggtttggtcagtctgctgtctttgttgcctctacactcatggagaatcgtggcgttcctcagtctgcaactccagaaactcttcttaaggaagctattcatgttatcagttgtggttacgaggataaatcagaatggggaagtgagataggatggatctatggttctgtcacgaagatattcttactggattccagatgcatgcccgaggttgga

SEQ ID NO: 179564 - DNA, 270 bp, Glycine max
cttaataccaattttctagggtttatacaattctcgatggcttcttcagatgttgagtaccgttgctttgtcggtgggctcgcttgggccactgacgaccaagctctcgagagagccttctctcagtacggcgaaatcgttgaaacgaagattatcaacgatcgtgagactggcagatccaggggttttggatttgtgaccttcgcctcggagcagtccatgaaacgccatcgaagggatgaacggccaaaaccttgacggccgtaacat

SEQ ID NO: 179565 - DNA, 260 bp, Glycine max
cggctcgagcggctcgagggaggagcaggaggcatcaccgttaccaaacatggtgaaagggcgccaaggagagcgtgttagactttacgtcaggggttcaatacttggatacaagaggtctaagtcaaatcaatacccaaacacctcattaatccagattgagaatgtaaacactaaggaagaagttgcgtggtactgtgggaagcgtatggcttacattacaaagccaaggtaaagaaggacggaagccactatcgctg

SEQ ID NO: 179566 - DNA, 265 bp, Glycine max
cgatgcttcatcccctcacaaacccaaacgcaaacgagcttctctcactctcatgctcttctatattccaccacaatgcactcacacacctccgtttctctcaaccccagaacaacaaaaattgctcctcgacgcctaagtcgtcgtttcgggtccgtgagatgctcttacgcttacgtagataacgccaaacttaaggttgtcggcatcggtggtggcgcaacaatgccgttaatcgcatgatcggtagtggtttgcagggtgt

SEQ ID NO: 179567 - DNA, 258 bp, Glycine max
cacgtttggacggacgcactccattccatcatcacttaataagcttgctagcatgttctcgcagcctttaatgtttaaatttcagaccgtgttcgcttctttggcactcactatgttgtcttgtatgcctacattttatgccttcaatttgcattcacaatgaaactcaatttactttaaaaaaaaaaaaaaaaaaaaaaaagaaaaaaaaaaaaaaaaaaaaaaaaaaaaaaaaaaaaaaaaaaaaaaaaggggggg

SEQ ID NO: 179568 - DNA, 264 bp, Glycine max
cttaaacactcgtcccaagaggcgcagagccaaaagcagaaagaacaaagaagaaattgagaaccaaagaatgactcacattgctgtggaacgcaatagaagaaagcagatgaatgagtatctttctgttcttcgctctcttatgccagactcttatatccaaaggggtgatcaagcttctataattggaggtgctattaactttgtcaaagagcttgacagaggatgcattttcttggtgctcagaaagaaggagaggggaaa

SEQ ID NO: 179569 - DNA, 262 bp, Glycine max
cacggacgcagagccttcgatccagaaaccatgactaagagaacgaagaaggcaggcattgtcggaaaatatggtacccgatatggtgctagtttgcggaagcagattaagaagatggaagttagtcagcatagcaaattcttttgtgaattttgtgggaagtatgctgtgaagaggaaggctgtgggaatatggggatgcaaggattgtggtaaaggaaagctggcggtgcctacactttgaatactgcaagtgctgtcac

SEQ ID NO: 179570 - DNA, 261 bp, Glycine max
cggatctaaggcttcagtgtagtctgtaatcatgtcaggcaagtatatcatttctgctattcttggatcatttggagttgcatgggtttgtgattattatgtttcagacaaaaagctatttggaggttctacccctggaactattacaaacaatgagtgggcagaagagactgacaaaaaattgcaggcatggcctcgtactgccggtccaccagtgtcatgaatcccataagtcgccaaaatttcattgtcaagtctcgc

SEQ ID NO: 179571 - DNA, 265 bp, Glycine max
cgctgcatctcaacgaaacagagcgagctagagagagagagagagagaaagagaagagagagaagcagcgattcatcacaatgggtaacgttcacggatctctcgcacgtgcgggtaaagtgagaggacaaactcccaaagtggcgaacaagacaagaagaaaaagccacgcggacgcgctcacaagagaatgcaatacaaccgccgattcgtcaccgcgtggtgggattcggaaagaagcgtggaccaaactcctcggagaagt

SEQ ID NO: 179572 - DNA, 185 bp, Glycine max
gtctttcttggaactttgttactctcacacatgtctcgctccgtgcctttggtttcaaccatttttgtcttgcttctgcttctggtggccactgagatgatggggccaacaatggtggcagaagcaagaacttgtgagtctcagagccaccgtttcaaggggccatgtttgagtgacaccaactg

SEQ ID NO: 179573 - DNA, 206 bp, Glycine max
gtcggttgtgagctataagctagtttatcgtgaggagaatatgaagttgtttgtcttcgttgttgctgcagtagttttggtagcatggccatgccatggcgcaggctaccaaaggttccctctccgaatgaaaactggctatggtgagcgttcttcggaggtaaaatgcgcaagttttaggcttgctgtggaagcacacaacataa

SEQ ID NO: 179574 - DNA, 262 bp, Glycine max
gatcgagataactagaaacagtgtgatgaaaatgaaggtccttgttttcttcgttgctacacttttcgtagcatggcaatgccatgcgctacgatatgttccctctccgaatgaacactggctatggtgcccgtactccggaggtgaaatgcgcaagttggaggcttgctgtggaagcacacaacatctttggctttgagaccattcctcaagagtgttgaagcaacaaaggaatacatccatggcgaacaatatagatcag

SEQ ID NO: 179575 - DNA, 262 bp, Glycine max
gtccctttctgttctcttcactcttggtcttgcgagagaaagccatgccagagacgaagatttttggcatgctgtttggccaaacactcccattccaagttcattgcgagctcttctaaagcctggccctgcaagtgttgaaatcgatgatcaccctatgcaaattgaagaaacacagtacccgaaaaccttcttctataaagaagaccttcataccgcaaaacaatgaaagtacaattcagcaagcctccctttcaacaac

SEQ ID NO: 179576 - DNA, 257 bp, Glycine max
cgacttacaagcgcaggcttgtaggtcgcaacaaacacggccgcggtcacgtcaagttcattcgatgctccaactgcggcaaatgctgccctaaggacaaggctatcaagaggtttctggtgaggaacattgttgaacaggctgcagtcagagatgtgcaggaggcttgtgtctacgaacaatacacgcttccgaagctgtatgtgaagatgcagattgtgtttcctgtgctatccactctcatgttgtgagggttc

SEQ ID NO: 179577 - DNA, 259 bp, Glycine max
gttgtttgcctggtggatgacacgccaataagggtgcacacgaacctggaacacaagggcattcccttcccgaaggaccaagccatgggcgtgtacagctctatctggaacgcggacgattgggccacgcagggtggtcgtgtgaagacatattggagccacgcacccttcgttgccacctacaaggacttccaaatcgacgcgtgcgcgtgcccgtgccggtgacgtcagcagattagtgctaagcactgtagcagca

SEQ ID NO: 179578 - DNA, 254 bp, Glycine max
aagataaactttacttcattgattatgaatatgcatcgtacaactacagaggctatgatataggagaccactttgcagaatatgctggctttgaatgtgactacgacttgtacccaaatatgaatgaacaatatcatttcctcaggcattacttgaaacctgacagaccccaagaggtgtctgagaaagatcttgaaactttgtatgttgaggcaaatacattcccttgcttctcacatttctgggcatgtggg

SEQ ID NO: 179579 - DNA, 266 bp, Glycine max
acacatggcttccttaagctccttagtgctgctccttgcagctctaattctatcccctcaagttcttgcaaactatgagaatcccccagtgtacaagcctcccactgagaaaccaccagtttataagcccccagttgagaagcctcctgtttacaaacctccagttgagaagcctccagtttataagcctccagtagagaagccaccagtgtacaagcccccttgagaaacctccagtgtacaagccgccagttgaaaagccacca

SEQ ID NO: 179580 - DNA, 262 bp, Glycine max
tcgccattggaggcaacatcactctcatcactggtttcttatactggattgcccaattgttgggttctatagtcgcaagcctcctcctcaatttgatcaccgctaagagcattccaagccactcgccggctaatggtgtgaacgatttgcaagctgtagtgtttgagattgttatcacatttgggttggtttacactgtgtatgcaactgcagtagacaaagaaggggtcattgggtatcattgcacccattgctattgggt

SEQ ID NO: 179581 - DNA, 259 bp, Glycine max
tacgctattccgattaatcaatcatagatagatccattattcatagttaaacataataactgttgtgttacatctcgtgaattgttacaactgcttaaccattttctattgcagatggcttcgtcggttctctccgcagcttcgcactctgtctcaccctcatgttctctgtccaccacgcacaagggacagcccatgattagagacaacactttggattccacagaggacccaattcaatctctagttcaaggtctag

SEQ ID NO: 179582 - DNA, 256 bp, Glycine max
gacaaatttaagatatcttgctgaactcccacaaaatgttgatttggtgactttagacctctcattcatctctattctcttggtgatgcctgccgtggtcaatgccatgaaggaaaatgcagcattagtgactttggttaaaccacaatttgaagctcgtagatctcaagtaggaaaaggaggaatagtgaaagatcctgctgttcatcaagagccttgagaagattataaagggagtagagaattttggtttctg

SEQ ID NO: 179583 - DNA, 258 bp, Glycine max
ctcgagcgttacgttgtttctgtagatggagaagggtagaaccgtggtggtgtctgcttcgcagtttgcatgcaccgatgatgtctcaactaatatcgccaccgccgagaggctaattagagctgcacataaacagggtgcgaacatcattctgattcaggagctctttgaaggttattacttctgtcaggcacaaagagtggatttctttcaagagctaagccacataaggaccatcccacaatcctcagaatgcag

SEQ ID NO: 179584 - DNA, 193 bp, Glycine max
tataagctagtttatcgtgaggagaatatgaagttgtctgtcttctctgttgctgcagtagttctcgtagcatggccatgccatggcgcaggctaccaaaggttccctctccgaatgatcaactggctatggtgagcgttcttcggaggtaaaatgcgcaagttctaggcttgctgtggaagcacacaacata

SEQ ID NO: 179585 - DNA, 258 bp, Glycine max
gcttcggctagggttcagaaacgaaaaagggttcggtgttctgttcgcgatgagagccaagtggaagaagaagcgtatgaggaggttgaagaggaagcgccgaaagatgagacagagatccaagtagtgcgttaaacctagtttgtttctgttgcttttacaattgcttatgttgtcgaatgggacacccagttgttagtggcactggtttctctttttgatgtttgatacattttgttggattcaagtagtttatgt

SEQ ID NO: 179586 - DNA, 262 bp, Glycine max
gataacacaacaacactctctcttctcgctcttggcttttcgctcttcactcactctcattcattcatttccaccgttcatggatcccctaaacgtgtggggtaacacgcccttggcgacggtggatcccgagatccatgacctcatcgagaaggagaagcgccgtcaatgccgcggaatcgagctcatcgcctccgagaacttcacctccttcgccgtatcgaggtcctcggcagcgctctcacgaacaaatactccgagg

SEQ ID NO: 179587 - DNA, 202 bp, Glycine max
ctttggcacacaacactagctacagtaagctacacttatttgaggttggagaaatatggctaaagatgttgaggttcaagagcaaggaggagagtactctgcaaaagactaccatgaccctcctccagcacccttgttcgacccagaggagctcacacagtggtccttttatagagccctaatcgctgagttcatagcaacc

SEQ ID NO: 179588 - DNA, 267 bp, Glycine max
gtgaaacatctatcttcctgtctaagttctttgaataaaagtctgaatgtgtcatctctatgctacaatgtttatgattcagatcaggttgattctatttgtttgatggccatcttgcacgtcctgatcttattgtgttcaagtgacggacaaatccaaacaggaaagagagatttgaaatgtaaatgccaagtaaatgtgaaaagtacagtccatttttatgatctctttaatttatttgttcatagattaatatggtcgtgtatg

SEQ ID NO: 179589 - DNA, 257 bp, Glycine max
gttaattctcaaggatccacatcttatcactccaaatgcactttcatacaaatcagcaatgagagagaatctgttgaggcagggatacagaattgttggaatcattggagaccaatggagcgatctgcttggagaccacagaggcgaaagcaggacctttaagcttcctaatcccatgtactacattgagtagtaccttcacctctctcaacaatctgctagagtttgctcctatctatatgtaatcgcgtatgctg

SEQ ID NO: 179590 - DNA, 257 bp, Glycine max
acacattataactcctgtttctttattaattctctctttcaaatatatggcagaagatgcttcaattattccaacacacacaaaagcctggtactactctgaacatggtagtccaggtgatgttctcaaattagatcctaattgagccttaccccaacaactcaaagatgaccaagtgctcatcaaggtcatcgctgcatccattaatcccgttattacaagaggatgcacggcgagttcaaggacactgaccctca

SEQ ID NO: 179591 - DNA, 232 bp, Glycine max
ccagactgagaggaagagagagggagattctttgtttgctaccttctctcggaaaaatggttacgttcaggtttcaccagtaccaggtggttgggagggctcttcccacggaagcagatcagcaccccaagatctaccgaatgaagctctgggccaccaacgaggttcgcgccatctccaagttctggtattttctgaggaaactgaaaaaggtagaagagcaatggccaag

SEQ ID NO: 179592 - DNA, 255 bp, Glycine max
cctcgagcgattcggtcgacgacaatggcccccaaatgagcacgaagagaaagttcgacgctgatggagtgttcttcgctgaactgaacgaggttctgacaagggagttagccgaggacggatactccggcgtggaagttagggttacgccgatgcgcaccgaaatcatcatcagagccaccagaacccaagccgttctcggtgagaaggaaggagaatcagggaacttacctcggtggttcagaagaggttcaa

SEQ ID NO: 179593 - DNA, 256 bp, Glycine max
gcagcagcagagagtgcggtaggctcatccgagaccggaagcagcaatggggatcgatctcaaggccggaggtaaaagcaaaaaaaccaaaagaacagcacccaagtccaatgatatctatcttaagctcttggtcaagctttatcgcttccttgttcggagaactggcagcaaattcaatgccgttatactcaagagattgttcatgagcagttaacaagcccccattgtctttgtcaaggttgattaagtatac

SEQ ID NO: 179594 - DNA, 260 bp, Glycine max
tacaaattctctgtgttgtgttttgtacttgtgttcattgtgttgttgttgtaggacatttaagtgaagagagcatgatgatgaagtctgctatgtgtgcattggtgcttgtcgcgatggttgtggttgaagtggggcccattgctgaggctgcggtgacttgtaacccaacacagttgactccttgtcttccggcaattaattcaggttctgcacttcgagtgctcgttgccagaagctgaatgagcaaaagccatgct

SEQ ID NO: 179595 - DNA, 260 bp, Glycine max
ttggagacgaagctctaaagccgattctccttttgaactggttgcctcactcactggccacactacagcagtggcccgtctggcggttggatgcaagatgctgtactccgggtccatggaccagagcataaaggtctgggacatggatacattacagtgtacaatgacactaaatgatcatactgacgtagtcacatcccatatctgttgggatcatatctgttgtcaagttcatctgaccgcactttttaggtctcggc

SEQ ID NO: 179596 - DNA, 256 bp, Glycine max
ttgaggatgccgaagaataatggaaatggaggtaagaacaggaataggggaaagaacgaggcggacgacgagaagcgagagctggtgttcaaggaggacgggcaggagtacgcgcatgtgctccggatgcttggtaacgggcggtgcgaggcgatgtgcatcgacgggacgaagaggctctgccacatccgcgggaatatgcacaagaaggttggatcgccgccggggacatcatcctggttggactcagggacta

SEQ ID NO: 179597 - DNA, 257 bp, Glycine max
agcaccaacagcatcggcggcgacagtcactctccgacaacaacacttccgcggcgaaaaatgtctctggtggcgaacgaggatttccagcacattctgcgtgtgctgaacaccaacgtggatgggaagcagaagataatgttcgctatgacctccatcaagggtattggaaggagattcgccaacatcgcttgcaagaaggccgatgttgcatgaacaaaagggctggtgagttgagtgctgcagagttggatagt

SEQ ID NO: 179598 - DNA, 256 bp, Glycine max
gagtgatttcagtgagtgatcggtgttcacttgatctcatcataatcgtcagcgtcaattgaagaagatgccgatcagaaacatcgccgtcggaaggcctgaagaggcgactcaccccgacacgttgaaggcggctttggctgagttcatctcaaccttcatcttcgtgttcgccggctcaggctccggcatcgcctacaacaagctcacgacaacggcgctgccacccctgccggcctcatctccgcctccatcg

SEQ ID NO: 179599 - DNA, 251 bp, Glycine max
gtcgctccgcaccagtttcaccgcacgaatatcttgttgtttggagcgatccgagaaaaactctgtaaacatgttggtttaccaggacctccttagaggtgatgagcttctctctgactccttccgttacaaggaaattgagaatggaatgctgtgggaagttgaggggaagtgggttgttaaaggagcagttgatgtagacattggtgaacccttctgctgagggtggaggagaagatgagggagttgat

SEQ ID NO: 179600 - DNA, 255 bp, Glycine max
ggcgtttggtgatctccgacgggaatccattcctgtttaagcttcagaaagttggttcatcttcttctgcatgaagcacctccgtgtagtttctcctagtgagagacgtgtgcaagatgatgcttgataaataaatgatttggttgtaactaccgaaggattagataaaactaatcaaagcttatatatgctacgttttcggttgcttacaaaaaaaaaaaaaaaaaaaaaaagaaaaaaaaacaaaaagggggg

SEQ ID NO: 179601 - DNA, 254 bp, Glycine max
caccgatgttgctgtcctcttggacaatgaagccatttatgacatctgcagacgctctctcgacattgagcgtcccacctacaccaacctcaaccgccttgtttctcaggtgatttcatctttgactgcttccttgaggtttgatggtgccctgaatgtggatgtgactgaattccagaccaacttggtcccataccctagaatccattcatgctttcctcctatgcaccagttatctctgctgagaaggccta

SEQ ID NO: 179602 - DNA, 145 bp, Glycine max
cggggctaccgctgagtttaagcatatcaataagcggaggaaaagaaactaacaaggattcccttagtaacaccgagcgaaccgggaaaagcccaccatgaaaatcggtcgccctcggcgtccgaattgtagtctggagacgcgt

SEQ ID NO: 179603 - DNA, 211 bp, Glycine max
agagtttgttgtgagctataagctagtttatcgtgaggagaatatgaagttgtttgttctctttgttgctgcagtagttttggtagcatggccatgccatggcgcaggctaccaaaggttccctctccgaatgacaactggctatggtgagcgttcttcggaggtaaaatgcgcaagttttaggcttgctgtggaagcacacaacatccga

SEQ ID NO: 179604 - DNA, 271 bp, Glycine max
cttgttccctcgttaaccctaatcatcaactcaagcagtgaacgaatctgtggacggacgagaactcctcggtgatggaggccttcatgtcgtcctccgatctctcctcaatctggccctcgccggccccgcgcaatccacggcggtcttcaatcaggacaccctccagcatcgcctgcaggccttgatcgaaggcgcccgagagacctggacctacgccatcttctggcagtcctcttatgactattctggctccactctcctcggctgg

SEQ ID NO: 179605 - DNA, 270 bp, Glycine max
gagataactagaaacagtgtgatgaaaatgaaggtccttgttttcttcgttgctacaattttcgtagcatggcaatgccatgcgtacgatatgttccctctccgaatgaacactggctatggtgcccgtactccggaggtgaaatgcgcaagttggaggcttgctgtggcagcacacaacatctttggctttgagaccattcctgaagagtgcgttgaagcaacaaaggaatacatccatggcgaacaatatagatcagactccaaaaca

SEQ ID NO: 179606 - DNA, 267 bp, Glycine max
gggaatcttcttccatggcctccaagcggattctgaaggagcttaaggacctccagaaagaccctccaacctcttgcagcgccggtcctgtagcggaagatatgtttcattggcaagcgactataatgggtccccctgatcgcccttatgctgggggtgtttttctagttactattcattttcctccggattatccattcaagccacccaaggttgcatttaggactaaagttttccacccaaatatcaacagcaatggtagtattt

SEQ ID NO: 179607 - DNA, 266 bp, Glycine max
caggaacccaaactcttccgaatggatattagttcaaacataagatatggatgtacgcgagatgtaaagcaggaggatattgaatgggctgcaaagcaggcctatgcccacaactttatctcagcacttcccaatggttatgaaacacttgttgatgatgatctgttaagtggaggacaaaagcagcgaattgctattgctagggcccttcttagggacccaaaaatattgatccttgatgaagccactagtgcactagatgctga

SEQ ID NO: 179608 - DNA, 168 bp, Glycine max
tctgttcaaatggcttatgcagtctcagagacagatgctgcgaaggctccacgagcaccggacggagtggaatcatacataacggagatgttccttaggggaaagaaatattacctctatgtacacagttacttgcgatacggtatgctagcagctcgtgcagaggct

SEQ ID NO: 179609 - DNA, 264 bp, Glycine max
cccatctcttgtttcttgctttctttcttcaccatgtcacttgctgggaaaatcaccactgaaatcggggttcatgcaaccgctacaaagtggttcaacctcttcgcaacacaactccatcatgttcaaaacctaactgatagagtgcatggaaccaagctgcatcaaggtgaagactggcatcacaacgagacagtcaagcactggacttataccatagatggtaaggttacaacatgtctggagagtattgaatccattgat

SEQ ID NO: 179610 - DNA, 264 bp, Glycine max
gcgctccacccgaagtggtggcgcgtatggctgcggctaagcaagagtttgaggcacggcaaagatcttcagttggttcaagggaaacttcaaaagaccctgaacttgaccaattcatggaagcatactatgacatgcttgtgaagtatagagaggaattaacaaggcctattcaagaggctatggatttcatgcgaaggatagaaactcagctaaatatcgcttccagtggacccgtgcggatcttctcggatgataaatgtg

SEQ ID NO: 179611 - DNA, 263 bp, Glycine max
taggaactctaagtctccctcccccctctctctttctctcgctctctctctcactatatcaatattaatatgaacctctctcaattcaattccagatagactttgttggcatttgagttttgttgaattgaaccaaaaaaaaaaatgggaaggcaaccttgctgtgacaaagtggggttgaagaaggggccatggactgcagaggaggataagaaactcatcaatttcatcctcactaatggtcaatcttgctggagagctct

SEQ ID NO: 179612 - DNA, 228 bp, Glycine max
ctatctcggagttgagttgagaaggaaaggctgaagaacacatagagagagagagagaagtgcagaaaaaatgagactgttcgatccatggcctgttttcttcaagagagaatggaagcggaattggcccttcttggttggattcgccatcaccggaactctcatcaccaaactttcccttggtctctctgaggaggaagccaaacagtcgaaattcgtcaaggcaca

SEQ ID NO: 179613 - DNA, 269 bp, Glycine max
gctcaaccttctgtgccttcttcctcctgtgtgcaatcttggccgtccacgtggcacaatcctcatcctccaccctcgacctggacgccttcttcctccctctcaagtccggctgtcgcggatccgtcgccgagtgcagcctcctcgccggcgacgacgcgagtttctgatggagtcggagagcaaccggcgcattctagcagcaaggagctacataagctacggtgcgctgaggaggaacactgtcccttgctcccgacgtggtgctt

SEQ ID NO: 179614 - DNA, 266 bp, Glycine max
ggcggtgtggaagctgtggccacaatacaggcaattaggacagggtgggttcatcccaatatcaacctagaaaacccagataacggagtggatgctaaagtgcttgttggctcaaagaaagagagactggatgtcaaggcagccttgtcgaattcatttggttttgggggtcacaattcttcaatcatatttgcaccatactagtgaaacagatttcagagcagtactttcttattattataagttactgagtacccagacaatgt

SEQ ID NO: 179615 - DNA, 260 bp, Glycine max
gaaaactggctatggtgagcgttcttcggaggtaaaatgcgcaagttttaggcttgctgtggaagcacacaacatccgagcctttaaaaccattcctgaagagtgcgttgaaccaacaaaggactacattaatggcgaacaatttagatcagactctaaaacagttaaccaacaagctttcttttatgctagtgaacgcgaagtccatcacaacgacatctctatattcggcatagataacaccgtactctctaatatcc

SEQ ID NO: 179616 - DNA, 269 bp, Glycine max
gcatcacctccttttacactctcgaattcgcattctcttcactcattttccaatccatggccaagggagagaaaaaacctgcagagaagaagcccgcggcggagaaggctccggcggagaaaacaaaagccgagaagaagatcccgaaggacgcagcctccggcgagaagaagaagaagaggacgaagaagagcgtggagacgtacaagatctacatcttcaaggtgctgacgcaggttcaccctgacatcgggatctccagcaaggcc

SEQ ID NO: 179617 - DNA, 264 bp, Glycine max
tgggacccgaatacgaatcgacgctgacacagatccctctgctggggacgaaggctggtccacgagacggggcggcatggacgcagaggctgaaggaagagtacaaggctctgatagcgtacacgcaaatgaacaagtccaacgacaacgattggttccgcatctccgccgccaatccggaaggcactcgctggaccggtaaatgctggtacgtctacaacctcctcaagtacgaattcgacctccaattcgatgtccccgtca

SEQ ID NO: 179618 - DNA, 191 bp, Glycine max
gcctctagggttatcatttctccatttccattttctctctcacttttcaagaatcgtaagctatgggaaagtcttacccaactgtgagtgctgattaccagaaggccgttgagaaggcgaagaagaagctcagaggcttcatcgctgagaagagatgcgctcctctaatgctccgtttggcatggcactct

SEQ ID NO: 179619 - DNA, 271 bp, Glycine max
gtcacttacagagcagaggaagaatggcagatggatcatcaacaccagcaacaccttctgccaaagtttcagccatcttcatataccctattaaatcatgccgtgcaatttctgtttctcgtgctcctctcactcctactggatttcgatgggatagacaatggatggtggtgaattcccaagggaggatgtacactcaaagagttgaaccaaggcttgccttggttgaggttgaattgccatctgaggcatttcttgaaaactgggaact

SEQ ID NO: 179620 - DNA, 275 bp, Glycine max
ctacaactagtaacaaagatccaacaagcagatcaatctctctctctgtctcccaatcaaaacagacatgggtttgaaggaggattttgagcagtatgctgagaaagcaaagactttgccaccgactcaatcaaacgaagacttgcttatcctttatggattgtacaagcaggccaccgttggacctgtcaacaccagccgtccgggaatgttcaacatgagggacagagctaaatgggatgcatggaaggctgttgaagggaatccaaggccga

SEQ ID NO: 179621 - DNA, 269 bp, Glycine max
gagagtggtttcagtgagtgatcggtgttcacttgatccttcataagtcgtcatcatcatcatcatcatcaccgttgattgaagaagatgccgatcagaaacatcgccatcggaaggcctgaagaggctactcaccccgacacgttgaaggcggggttggctgagttcatctccaccttgatcttcgtgttcgccggttcaggttccggcatcgcctacaacaagctcaccgacaacggcgccgccactcccgccggcctcatctccgc

SEQ ID NO: 179622 - DNA, 263 bp, Glycine max
aacactcttctctgcagcttttgcctacaactcccttcaccatggctgaacaaaccgagaaagcttttctgaagcaaccaaaagtgtttctcagcacaaagaagactgggaagggaaagagacctggaaaaggtgggaaccgcttttggaagtccattgggcttggatttaagactcccagggaagccatcgaaggaacctatattgacaagcagtgccccttcactggcaatgtttccatccgtggccgtatcttggctgga

SEQ ID NO: 179623 - DNA, 264 bp, Glycine max
tggtcagaggctaacttctccactagttttctgtgtagagagctctttggacaacaccctctaaaccaatctatcaagtcctgattaatctggtgagcatggagctttgttggctcacaaccatccatggttcttgaagaagcttggagagaaaggggtgtgagaggagagggtgctcactcctcacactccctcacttaaaacagtttgttttggcttagctttggcttctctgatcaacaagggatgtgttctaacattctt

SEQ ID NO: 179624 - DNA, 248 bp, Glycine max
cttcttcgtctcaaacctcttcgttccttcgattcattccatctcttccaaaatggccaaagacccagttcgcgttctcgtcactggagccgcagggcaaattggatatgctcttgtccctatgattgctaggggagtgatgctgggtcctgaccagcccgtgatcctccacatgcttgacattgctccagcagcagagtccctgaatggggttaacatggaattggtggaggctggattcccccttc

SEQ ID NO: 179625 - DNA, 260 bp, Glycine max
gaagaatgatgatgacctctggtgaagctgtcaagtacaagagttccttggacgcattcacacagatcctcaagaatgagggcgccaagtccttgttcaagggtgccggtgctaacatcctccgtgccgttgctggtgctggtgtgcttgctggttacgacaagttgcaggttcttgtgttcggcaagaagtatggttctggtggtgcttaatttcagtgctgagtcagtgtgattattattgttttttagatggcgctg

SEQ ID NO: 179626 - DNA, 270 bp, Glycine max
gttgatcgagataactagaaacagtgtgatgaaaatgaaggtccttgttctcttcgttgctaaaattttcgtagcatggcaatgccatgcgtacgatatgttccctctccgaatgaacactggctatggtgcccgtactccggaggtgaaatgcgcaagttggaggcttgctgtggaagcacaccacatctttggctttgaagaccattcctgcagagtgctttgaagcaacaaaggaatacatccatggcgaacaatatagatcagact

SEQ ID NO: 179627 - DNA, 264 bp, Glycine max
aatttatctgtggacactgcctatcagaccaacattgttgcttaattagtccatgcatcttgagcaccatgagaatgagattgtgtataaaataaattatcatgtgctgtgtgttgtgcaagtactaccttctctagctagattgctagagctagaatttcaacctacctatgtgtactgataagatctgcttccctacttaaagagagcatcatcctgtgatcagtgtgcttcgtattctctctctctatatatatatggtaa

SEQ ID NO: 179628 - DNA, 262 bp, Glycine max
cagcaacagctacctcctccattcttcatttccattaccaaaaagaagacaccagactctctataaccataaccatgttaatggcaacaacatcccctcacaccggcctcttccaaaaccgtaccaaaccttcttttcctttcactttggagaaatcagagctggagggtgagttatcaaggaggctgctaaggagaagatggtgcagctcaagggacataggtcagtgggaggtcatgagggcttctatttacaatgccat

SEQ ID NO: 179629 - DNA, 222 bp, Glycine max
agcaattgacacaactctatggtcgattgactggggcattgctgagcttgtgaaccacccagagatccagcaaaagttaagggatgagattgacagagttcttggagcagggcaacaagtgactgagccagacatccaaaagctcccatacctccaagcagtggtcaaggaaactcttcgtcttagaatggcaatccctctccttgtaccacacatgaacct

SEQ ID NO: 179630 - DNA, 263 bp, Glycine max
atgccatcaagtcctgggtgcatgaatatgtctcattctactacaagtcagatgcagcaattcaacaagatcccgagctccaagcttggtggaaagaacttgtccaagtgggtcatggtgatttgaaagataagccatggtggcaaaagatgcaaactcgtgaagagttgattgaagcctcggctaccctcgtatggatcgcttcagcccttcatgcagctgttaactttggacagtatccatatggaggtttaatcctaaac

SEQ ID NO: 179631 - DNA, 269 bp, Glycine max
caagttcctaccatagtgctaggcaagtgagtgagagacagagatcacatagcagaatggcttctactcaatgtttcttgcaccaccatgctcttaccacccctgccagatccccatcacaacgcatcatggttagcaccaagcctaaccagcttgtttgcacggcacagaagcaagaggatattgatgtcagcccaatctctcgccggttagctctaaccgtgctcattggtgctgctgctgttggctccaagttcaacctgctgatg

SEQ ID NO: 179632 - DNA, 270 bp, Glycine max
gtttgttccatctcttgcttcttgcttctattacttgcttctttcttcaccatgtcacttgctgggaaaatcaccactgaaattggggttcatgcaaccgctgcaaagtggttcaacctctttgcaacacaacttcatcatgttcaaaaccttactgatagagtacatggcaccaagctgcatcaaggtgaagactggcatcacaacgagacagtcaaacactggacttataccatagatggtaaggctacaacatgtctggagagtatt

SEQ ID NO: 179633 - DNA, 265 bp, Glycine max
caaaatttcttccgcattcgacttctttgatatcagtataatacttgttgtgtggagcaacagaaaataatgggtttttgcatagcaggtattgttaggcggacttcgttttatacaacccaagcagcctccaagagggtggacgtaccaaaaggctatgctgcagtctatgttggagataagatgagacggttcacaattccagtatcatacttgaacgaaccttcatttcaagaattactcggtcaagcagaagaagaattcg

SEQ ID NO: 179634 - DNA, 262 bp, Glycine max
actctccgagcttcactctcttcgcctctgccaaagggagtaaactggggttctcctcctttctgggtcgtgttctctttgcctcccttttcatcctcactgcatggcagatgtttaatgaatttgatgccaatggtggacccatctcgaaagagttgattcccaaactcactgtggtgaagaaaaatttgtcctctaaattgggggtagcactaccagatattgatgcccggcaattcattgctactatcatatttcttaa

SEQ ID NO: 179635 - DNA, 262 bp, Glycine max
gagaaacatggcttccttaagctccttagtgctgctccttgcagctctaattctatcccctcaagttcttgcaaactatgagaatcccccagtgtacaagcctcccactgagaaaccaccagtttataagcccccagttgagaagcctcctgtttacaaacctccagttgaaaagcctccagtttataagcctccagtagagaagccaccagtgtacaagcccccagttgagaaacctccagtgtacaagcccccagttgag

SEQ ID NO: 179636 - DNA, 261 bp, Glycine max
ctgctaaatccctagtaagccgccatggtgaagtactcaagggagcctgacaatccaaccaagtcttgcaaggctagaggcgccgaccttagggttcattttaagaacactagggaaactgcctttgcaatcaggaagttgcccttggttaaagctaaaaggtacttggaagatgttcttgcgcacaagcaggccattccgttcagacgtttctgtcgtggtgttggcaggacagctcaagcaaacaatagacactctaat

SEQ ID NO: 179637 - DNA, 263 bp, Glycine max
cgttgatcgagataactagaaacagtgtgatgaaaatgaaggtccttgttctcttcgttgctaacattttcgtagcatggcaatgccatgcgtacgatatgttccctctccgaatgaacactggctatggtgcccgtactccggaggtgaaatgcgcaagttggaggcttgctgtggaagcacacaccatctttggctttgagaccattcctgcagagtgcgttgaagcaacaaaggaatacatgcatgggcgaacaatatag

SEQ ID NO: 179638 - DNA, 278 bp, Glycine max
ctttccattgatttcttgcttctatatattacttgcttcttctcttgatcatgtcccttgctggtaaaatcagctctgaaattggtgttcaggcaaccgctgcaaagtggttcaacctcttcacaacacaacttcatcacgttcaaaatcttactgatagaattcatggaaccgagctgcatcatggtgaagactggcatcacaatgagtcggtcaagcactggacttataccatagatggcaaggttacaacttgcaaggagagtattgaatccgtt

SEQ ID NO: 179639 - DNA, 278 bp, Glycine max
gattttcgtctttctagacttgggatgaccgaaatatcccacatttcgacagccccacaaggaacccccggctacgttgatccacagtaccatcaagactttcacctctctgacaagagcgacgtgtatagcttgggtgttgttcttgttgagatcataacgggacagaaagtggtggacttttcacgcccacataacgaagtgaacctggcttctcttgctgcggataggatcgggaaagggcttttaaatgagattatagacccattccttgaagc

SEQ ID NO: 179640 - DNA, 273 bp, Glycine max
caaaaccctacccccatccaattccaattcaccctcaatcatgggttctgaaggttccactgtcgtcgttcctaggaacttcagattattggaagagcttgagagaggtgagaagggaattggagatggaactgttagctatggaatggatgatgctgatgatatctacatgcagtcctggactgggactattattggcccccctggtactgttcatgaagggcgtatataccagctgaaattattttgtggcaaggattatccagacaatcc

SEQ ID NO: 179641 - DNA, 276 bp, Glycine max
cccttcttgtccattcatatatatcacaatttcaactgcaaattttgaacaaaacttaattaagaaatccttctccggagccatggcagatctcaagtccacattcttgaacgtctattctgttctcaaatctgaactcctccacgaccctgcttttgagttctccgatgatgctcgtaattgggtcgaccggatgctggactacaatgtgccgggaggaaagttgaaccggggactgtcagtaattgatagctacagattgttaaaagaaggaca

SEQ ID NO: 179642 - DNA, 280 bp, Glycine max
ctcgagccgctcgagccgagaaaaccctaattcgctcgcagtcacccaagaggcgaatccttaccattgcacgagatgggtgaagaagtgaaggccgtggttccagagtctgttttgaagaagcagaagagagaggaggaatgggcgttggccaagaagcaagacctcgaggctgcgaagaagaagagagccgagagccgcaaactcatctacaacagagctaagcagtacgctaaggagtacgatcaccaggagaaggaattgattcggttgaaacgcg

SEQ ID NO: 179643 - DNA, 278 bp, Glycine max
ctcagaaagatgaaggtggtcgctgcgtatctgctcgccgtcctcggtggcaacaacaccccctccaccgatgacatcaaggaaatcctcgtctccgttggaatagaggcagatgaagataggattgaatcgttcttgtctgaagttaagggtaaggatatagttgagctaattgctgccggtaaggaaaagctggcctcggtgccttctggtggcggtggtgccgttgccgtcgccgctgctcctggtggaggtggcggtggtgctgctccggctgc

SEQ ID NO: 179644 - DNA, 189 bp, Glycine max
ctcattaattgcaagactggcacttcgttgcttggcgatgtccctttctgttctcttcactcttggtcttgcgagagaaagccatgccagatacgaagatttttggcatgctgtttggccaaacactcccattccaagttcattgcgagcccttctaaagcctggccctgcaattgttgaaatcgatga

SEQ ID NO: 179645 - DNA, 276 bp, Glycine max
gagaattaaggtttgtagtgcagcaggaagaagcaataatggcgccgaagataacacgtaaggctagcagcaaccccgaattgataaggggaatcggaaagtactcgaggtctcaaatgtaccacaagacgggcatttgggctatcaaggccaaaaaccgtggcgttttacctcgccacggccctaaacccaaacctgaaactcccgctgaaaaaccacccaaattttaccctgctgacgatgtcaagaaaccgcttgtcaacaagcacaaaccca

SEQ ID NO: 179646 - DNA, 277 bp, Glycine max
ccgcgcaccggattcgaaccctcgttgtggttaggtcttcttcacctttcgaattttggaatccatgggtcagggaactccgggcggcatgaaccggcagggcgaccggaagccggacggcggcgacaagaaggagaagaagttcgagccgtcggctccgccggcgcgcgtggggcggaaacagcggaagcagaaaggtccggaggcggcggcgcggttgccgacagtgactccggtgacgaactgcaaactgcggcttctgaagctggagcggatc

SEQ ID NO: 179647 - DNA, 274 bp, Glycine max
caatcgatgaactccctaagcaaattgatgatacacagtacccaaaaacattcctctataaagaagaccttcatccaggcaaaacaatgaaagtacaattcaccaagcgtccctatgcacaaccttatggtgtatatacatggttaacggatattaaagacacctctaaagaaggatatagttttgaagagatatgcatcaagatagaagcgttttctggagaagagtagttttgtgctaaatccttgggaacagtaattggttttgccatttc

SEQ ID NO: 179648 - DNA, 276 bp, Glycine max
aagaaaacagtgttaaaagcgaggcagacgaagagtgaaactgtggaagcagttgcagaccgagctagttagctagcaagcaagcacagagatggaggcaaagcgaggccatgccctcatgtgcttggcacgtgtttcactcttcctctgcgctctaaccctatccgctgctcacggaagcaccacggttcaagacatcgcgagacagttgaaactcggggacaacgagcttctgcgcacggagaagaagttcaaggttttcatggagaattacgg

SEQ ID NO: 179649 - DNA, 275 bp, Glycine max
gcctcggaggagggaatcgcagcgaagtccactatgccgaaccaaattcacgagattaaggacttcctcctcactgctaggaggaaggatgcacgctctgtgaaaatcaagcggacaaggatgtggtgaagttcaaggtccgttgctccaagtacctttacaccctctgtgtgtttgattctgagaaggctgataagttgaagcaatcacttcctccaggtttaagcgtgcaggatgtgtgattcttactgctgtatgaagatcaggtttttctc

SEQ ID NO: 179650 - DNA, 277 bp, Glycine max
tccatctcttgcttcttgcttctattacttgcttctttcttcaccatgtcacttgctgggaaaatcaccactgaaattggggttcatgcaaccgctgcaaagtggttcaacctctttgcaacacaacttcatcatgttcaaaaccttactgatagagtacatggaaccaagctgcatcaaggtgaagactggcatcacaacgagacagtcaaacactggacttataccatagatggtaaggctacaacatgtctggagagtattgaatccattgatg

SEQ ID NO: 179651 - DNA, 276 bp, Glycine max
aacgtctgtctcaagggtggactcgtcacccccatgggcggtggcgtcagttccctcaatgttcagcttcggaaggagcttcacctctatgcttctcttgttaattgtttcaacctccctggccttcccacgcgccatgataatgttgatattgttgtcatcagggagaacaccgaaggcgagtactccggcctcgaacacgaggtcgttcccggcgttgttgaaagccttaaggtaataacaaagttttgttcagagcgaattgctaaatatgca

SEQ ID NO: 179652 - DNA, 277 bp, Glycine max
gcaaagaaaatacacattacattactaagtctttgttcatttgagtagtagtgatggctagcctcaaggttgcatgtgtggttgctgtgatgtgcatggttgtggtggccatgagtgctgcacccatggcacaggccgcaatcacgtgcgggcaggtcgccggcgacatgtctccgtgcttcagttatcttcgaagcggcggaaaaccgtcgcaggcctgctgcaacggagtgaagtccctcagcagcgcggcgaagaccaccgcggaccgccaggg

SEQ ID NO: 179653 - DNA, 275 bp, Glycine max
tatagcccaagccctatacaaccaaaccctaacacacacccatttgattcagtttccatggctagcctcaaggttgcatttttccgctgcagtgctctgcatggttggggtgagtgcacccatggcacatgcagctatcacgtgcgggcaggtgacgaatagcctgatcaattgcatcggttacctccagaacggaggaacgccgccgtcgggatgctgcaacggagtgaagagcctcaatgccgccgccaagaccaccgccgaccgccagacgg

SEQ ID NO: 179654 - DNA, 272 bp, Glycine max
tccatccactccctcgcacaggcatcaggtgagtttgttgtgattcgaatggagggaagtggaggtggctgtggcagttgcggtggttcaccttctgcacctgtgaagcaatacttgcaggaattctcgaagctttctcagtactatctggatcaatccactccccatgccctctacagatggattcggactttcgtgattgcatccatctacgttctgcgtgttgtctatgtgcaggggttttacattgtctcctacggcctcggaatcta

SEQ ID NO: 179655 - DNA, 274 bp, Glycine max
taagctatggaagagtgttacaagttgggaatagcaaagtccattggcatatgcaattatggtatcaaaaaactcactaaactcttggaaatagccaccattcctcctgcagtcaatcaggaggaaatgaacccatcttggcagcaagggaaactcagggagttctgcaagcagaaaggaattcatgttagtgcttggtcagctcttggcgcttataagatattttggggctctggagctgtcatggagaatccaatcctccaagacatagcaa

SEQ ID NO: 179656 - DNA, 202 bp, Glycine max
caattagggtttttgtgatctgcagctacgatgggtaagggaacggggagtttcggtaagaggaggaacaagacccacaccctctgtgtgaggtgtggccgccgcagcttccacctccagaagagtcgttgctctgcgtgcgcttaccccgctgcgcgcaccaggaaatataactggagcgtgaaggccattaggagaaaga

SEQ ID NO: 179657 - DNA, 254 bp, Glycine max
caggtgctatattagttgttgtgaagaatgacttggcgaagttgcaactcacttcccctgtgttgactagcaagggcgagaagattgcacttagtcgtcgtgttgagaagcattggcgtcttattgggtggggacaaatccaagctggaatcactctggatgtccctcccgtccctcaactgagctgaaccatgataagagacagatcacaagaattaccagcagctataaaaaccttagacgattttagatgt

SEQ ID NO: 179658 - DNA, 275 bp, Glycine max
ctattctcagcagcttcggctagggttcagaaacgaaaaagggttcggtgttctgttcgcgatgagagccaagtggaagaagaagcgtatgaggaggttgaagaggaagcgccgaaagatgagacagagatccaagtagtgcgttaaacctagtttgtttctgttgcttttacaattgcttatgttgtcgaatgggacacccagttgttagtggcactggtttctcctttttgatgtttgatacattttgttggattcaagtagtttatgttcgt

SEQ ID NO: 179659 - DNA, 274 bp, Glycine max
tcttgacaaaatggccgtaacagaagcaaacctaaagaaggctggcttccacacatgggagcagtcaattctcaaggatccacatcttatcactccaaatgcactttcatacaaatcagcaatgagagagaatctgttgaggcagggatacagaattgttggaatcattggagaccaatggagcgatctgcttggagaccacagaggcgaaagcaggacctttaagcttcctaatcccatgtactacattgagtagtaccttcacctctctcaa

SEQ ID NO: 179660 - DNA, 271 bp, Glycine max
ctctgctcttatcactaaataattatctattgtatcaataattcccgtattgttggaatatatggcacccgatatggtctcagtttaatgaagcaaatcaagaagatggaagttagtcagcacagtacatccttttgtgagttctgtggaaagtacgctgttaagatgaaggccgtgggtatttggggctgcaaagattgtggaaaagtgaaggctggaggtgcttacacattgaatactgcgagtgctgtcactggccggagcaccattc

SEQ ID NO: 179661 - DNA, 271 bp, Glycine max
tgagtttgttgtgagctataagctagtttatcgtgaggagaatatgaagtcgtttgtcttctttgttgctgcagtagttttggtagcatggccatgccatggcgcaggctaccaaaggttccctctccgaatgaaaactggctatggtgagcgttcttcggaggtaaaatgcgcaagtcttaggcttgctgtggaagcacacaacatccgagtcactaaaaccattcctgaagagtgcgttgaaccaacaccggactacattaatggcgaa

SEQ ID NO: 179662 - DNA, 259 bp, Glycine max
ctgatcctggctagtcgctgccgtgggccaatctcacatttctggaggataggtaattgggtgttgagagtggattgtcatgcttccaagtatttcaacctatgatcaagaagacatcgatattgggtaatactgagggagttgattatagtgctatagcatgcgtcaagtctgcttaagtaataactcatcttaatagctatatggctgcacgatctcgtgatagcgatatgtccgtcattgcagagtattaaatcat

SEQ ID NO: 179663 - DNA, 276 bp, Glycine max
cttcagagaaaatggcggtacctctgctctcgaagaagatcgtgaagaagagggtgaagaagttcaagaggcctcagagtgacaggaaattttccgtcaagacaaactggcgtagaccaaagggtatagattcccgtgttaggagaaagttcaagggatgcactttgatgccaaacatcggttatggttctgacaagaagacccgccactatctccctaatggttttaagaaatttgttgttcacaatgtgaaggacttggaactgctcatgatgc

SEQ ID NO: 179664 - DNA, 250 bp, Glycine max
cgtcattttggattagctacatggacttctgcaccttcagttcctttcctttgcaaaactgtcaaaggaacatttggatatttggctcctgagtatttccaacatgggaaagtatcagacaagactgatgtatatgcttttggagtggttttgttggaactcattactggccggaagccgattgaggcaacaagaccttcaggagatgagaacttggtcttatgggctaaaccttttctacaaaaaggga

SEQ ID NO: 179665 - DNA, 275 bp, Glycine max
cccacccagtttatcactctcctccaccacctcctaccaacaagccttacatctatgcgtcacctccacctccttaccactattagctagcatagctctatggatatgaagaatatgtgcaacgaataaaagaaagcgatagaaaaggaagaagaagcgcttcgcgatgcacgaaagagaagaattggaagcaaagtttcggcgttttgtcttttataaaaaaaatgttaaatcattataattttctatgatagggattggtttcttgtcttttt

SEQ ID NO: 179666 - DNA, 274 bp, Glycine max
  unsure (1)..(274): unsure at all n locations
cgcgcccaagagagagagagagagagaggcgcgaaaatgagcggacgcnaggggaagaagaagggagcgagctttgtgatcgattgcgcgaaccggtggaggataaaattatggacattgcttctctggagaagttccttcaggagaggattaaggttggcggcaaggccggtgcactcggcgattccattactgtcactagggacaagagcaagatcaccgtcacctccgacagcaacttctctaaacggtatctgaaatatttgaccaagaa

SEQ ID NO: 179667 - DNA, 273 bp, Glycine max
  unsure (1)..(273): unsure at all n locations
gaaaaatttacacaatattttaagacgcacataaacttcctctgtcactacccactcctctctctgtctccgcctttcgcattgcaagccctctctttctttgcttttccttccccctttcagtttcttcaacgctgcaactatccatggcaaacttctggctcatctccgatgtgtanccactgttcgctgcggttggcgccgctgttgggatctgtggattccaattggttcgtaatatctgcatcaaccctgaagtcagggtgaacaagg

SEQ ID NO: 179668 - DNA, 234 bp, Glycine max
tatatctgtcagaagaacatgcacaacaggccgtaacagaagcaaacttaaagaaggcgggctaccacacatgggaaaaattaattctcaaggatccacaagatccttccactccaaatgcagtttcatacaaaacagcagcgagagagaaactgataaggcagggatacaacattgttgggatcattggagaccaatggagcgatctcctcggagggccacagagggcgaaag

SEQ ID NO: 179669 - DNA, 269 bp, Glycine max
attcctctctcattctcactataaacactaaacccttcccatcctaattaaggtgaaaatgaaggcatcacccattgcttggttcactttggtggttgtgtttcttgtggctgaagttcaagtttcaatggcagtcacatgcagcccagtgcagctgagtgcatgtgtaagtgcaataacctcttcaacccctccatcaaacctatgctgctccaagatcaaagaacagataccatgcctctgccaatacctcaagaaccccaatctca

SEQ ID NO: 179670 - DNA, 271 bp, Glycine max
tattagtttgttccatttcttgcttcttaatttcttgatcatgtcacttgctggtaaaatcagcattgaaattggggtgcatgcaagcgctgcaaagtggttcaacctctttgcaacgcaactccatcatgttcaaaaccttaccgaaagagtgcatgataccaagctacatcatggtgatgactggcatcacaacgaatcgatcaaacactggacttgtaccatagatggtaaggttacaacatatcacgagagtattgaatccgttgat

SEQ ID NO: 179671 - DNA, 271 bp, Glycine max
ctgcaatctaatgggagccacattgttgatgggaactggagggccctagggaagcttcttatatactgttcaggatgcacaaaaggtggcttgttcaatagcattcagattcctggtcactttgtttatcagacacgattttctagaacatcaggaaagagctttcttttgccacaatgcaggactgatgttttgtatgtatgtgatccttgtgagcatcttgaccaaggtgaggaaggagatgtaggattcttccgtggcatttttaagt

SEQ ID NO: 179672 - DNA, 272 bp, Glycine max
gaggtcgagtttcacagcagcaatggtgtacgtcaaggctcagaaatcaaaagcctacttcaagagatatcaagtcaagttcaagagaagaagagagggaaaaaccgattaccgtgccaggattcggttgattaatcaggacaagaacaaatataacactccgaaataccgatttgttgttcgctttagcaacaaggacattgttgcacaaataatatctgctagcattgctggcgatattgttcttgctgcagcatatgcacatgagctgc

SEQ ID NO: 179673 - DNA, 232 bp, Glycine max
gtaactctttattttattttctttctttctttctccgatcgcatagctcgctcgcaaccaccatgccttcccgaagaagaactctcttgaaggtcatcattctcggtgacagtggggtggggaagacatctttgatgaaccaatatgtgaataagaagtttagtaatcagtacaaggcaaccattggagcggattttttaaccaaagaagtgcaattcaaagatagggtttt

SEQ ID NO: 179674 - DNA, 269 bp, Glycine max
attccattgttgttatattgcattgtagccggagaagaagagaagagatagcggcgaagaaagaaagatgacggaggcatatataaggaagaagcccgggatggcgagcgtgaaggacatgccggttctccaggacggtccaccaccaggcgggttcgctccggtccggttcgcccggcgcatccccaacaagggccccagcgccgttgccatcttcctcactgctttcggcgctttctcttggggcatgtaccaggtcggccatggca

SEQ ID NO: 179675 - DNA, 274 bp, Glycine max
acttgggatgcgccactggacaccccagttttgtgatgtcctgctccttcaccaaccaggtcattgctcagcttgagttgtggaaggagaagagtaccggcaagtacgagaagaaggtttacgttttgcccaagcaccttgatgagaaggtggctgcacttcacctgggcaaacttggcgctaagctgacccagcttagcaagtcccaggctgattacatcagtgtgcctgttgatggtccatacaagcctgctcactacaggtactaagtgat

SEQ ID NO: 179676 - DNA, 273 bp, Glycine max
catgagtttacatctatacaaggttctcttagtaatgaagccagagacaaagttgtcaaggagttcaaagatggtttgactcaagttcttatatcaacagatattcttgctcgtggctttgatcagcaacaggttaatttggtcatcaattataatcttccaaataaacacagtttacgggatgaaccagattatgaagtgtatctgcacagggttggcagagctgggcgttttgggcgcaagggggctgtatttaacctgatatgtgatgaa

SEQ ID NO: 179677 - DNA, 272 bp, Glycine max
attcgttcacctcctcaacctctgcagcgccttcgatccagaaaacatgactaagagaacaaagaaggctggcattgttggaaaatacggtacccgttatggcgccagtctgcgtaagcagattaagaagatggaagttagtcaacacagcaagtttttctgtgaattttgtggaaagtatgctgtgaagaggaaagctgtgggaatatggggatgcaaggactgtggtaaagtgaaagctggcggtgcttacactttgaataccgcaagtg

SEQ ID NO: 179678 - DNA, 267 bp, Glycine max
  unsure (1)..(267): unsure at all n locations
gatggcattgggtgttcctgctcttctcctgatatacgtggctaacgattctggcattgttgncagcatcttggtcgtgctctgggtcctcaattttaggggtggcttggcttgggattctgtcganaaggttttatcttcaatcttcatccagttcttattgtcattggcttactagtccttgggggtgaagctattataagctacaaagcattacccctgaagaaggaagtgaagaaattgatacaccttgttttccatgccatc

SEQ ID NO: 179679 - DNA, 268 bp, Glycine max
ctgatatagtgaatagaaatggctaaaaacgagttgaggcttttgggtgttgtgttcagtccatatgccctgagggtgcagattgcccttaacctcaagggtctagattatgaggttgttgaagagaccttgaatcccaaaagtgatctgcttcttaagtccaaccctgtgcacaagaaaatcccagttctactccatggagataaagtgatatgtgaatctgcaatcatagtagagtacatagatgaggtttggtccaacaatgctc

SEQ ID NO: 179680 - DNA, 268 bp, Glycine max
cttagtcccaattttctagggttttattcattttccgatggcttctccagatgttgagtaccgttgctttgtcggtgggctcgcttgggtcactgacgaccatgccctcgagagagccttctctcagtacggcgaaatcgttgaaacgaagattatcaacgatcgtgagactggcagatccaggggttttggatttgtgaccttcgcctcggagcagtccatgaaagacgcgatcggagcgatgaattgacagaacttggacggccgt

SEQ ID NO: 179681 - DNA, 271 bp, Glycine max
gagaccggaagcagcaatggggatcgatctcaagaccggaggtaaaagcaaaaaaaccaaaagaacagcacccaagtccaatgatatctatcttaagctcttggtcaagctttatcgcttccttgttcggagaactggcagcaaattcaatgccgttatactcaagagattgttcatgagcaaggttaacaagcccccattgtctttgtcaaggttgattaagtataccaaggggaaggaagataagattgctgtggtggtgggcaatata

SEQ ID NO: 179682 - DNA, 272 bp, Glycine max
gtctgcttcttccgattccggcacgcccccatcaccatggtgaacgttccgaaaacaaagaagacatactgcaagagtaaggcgtgcaggaagcacaccctgcacaaggttacccaatacaagaagggtaaagatagcattgctgcccaaggaaaacgccgttacgatcgcaaacaatctggttatggcggacaaactaagcccgtcttccacaagaaggctaagaccaccaagaagattgttctgaggttgcaatgccagggttgcaagca

SEQ ID NO: 179683 - DNA, 253 bp, Glycine max
tctcgctcttgcaattagtcctcttcctacaatccgcacctaaactctagggttctgacatggacactggtggaaagatcaagaagggcgccggaggaagaaagggcggcgggccaaagaagaagccggtttcaaggtccgtcaaggccggtctccaattccccgtcggaagaattggccgttatttgaagaaaggaaggtacgcccagcgtgtcggtaccggtgctcccgtttacttggccgaatttctcga

SEQ ID NO: 179684 - DNA, 199 bp, Glycine max
gtgagctataagctagtttatcgtgaggagaatatgaagttgtttgtcttctttgttgctgcagtagttttggtagcatggccatgccatggcgcaggctaccaaaggttccctctccgaatgaaaactggctatggtgagcgtacttcggaggtaaaatgcgcaagttttaggcttgctgtggaagcacacaacatcc

SEQ ID NO: 179685 - DNA, 273 bp, Glycine max
gactaatcgaaccgtctagtagctggttccctccgaagtttccctcaggatagctggagcccgcgggcgagttctatcgggtaaagccaatgattagaggcatcgggggcgcaacgccctcgacctattctcaaactttaaataggtaggacggtgcggctgctctgttgagccgcgccatggaatcgagagctccaagtgggccatttttggtaagcagaactggcgatgcgggatgaaccggaagctgggttacggtgcccaactgcgcgc

SEQ ID NO: 179686 - DNA, 272 bp, Glycine max
tagcagccacacctcccgcagcagccatggttctcaaaactgaactatgccgattcagtggtgccaagatctacccaggaaagggcatcagatttgtacgttgtgattcttaggtttttctgtttgctaactcaaaatgtaagatgtatttccacaatcgcctgaagccttcaaagctcacctggactgcaatgtacagaaagcaacacaaaaaggacattgctcaagaagctgtgaggaacaggagacgtgctgccaaaaagccttactct

SEQ ID NO: 179687 - DNA, 282 bp, Glycine max
cctggatgcagagtttggaattgtgaacggaaccatgacaaccacgcattcctacactggagaccagaggcttttggatgcttcacaccgtgacttgagaagagccagggctgcagcacttaacattgtcccaaccagcacaggagctgccaaggccgtgtctctagtgttgccacagctgaagggcaagctcaatggaatagcgctccgtgtgcctacacccaatgtttcagttgttgaccttgttgtgaatgttgagaagaagggtcttactgctgaaga

SEQ ID NO: 179688 - DNA, 281 bp, Glycine max
ccctctttcaccgcagtgttagggtttctgtagcctccaaccagaaagagatggaaatggctcccaaacatcctagtacggctttgtttgttggattgaacaagggtcacgttgtcaccaagaaggagttgcctccacgcccttcagatcgtaaggggaaaacaagcaagcgagtgcactttgtgaggaacctcattcgagaggttgccggctttgcaccttatgaaaagcgaataactgagttgctcaaggttggaaaagataagagggcactgaaagtt

SEQ ID NO: 179689 - DNA, 208 bp, Glycine max
cttgcattcagttagactttgatagtttgattagctctaataaggttaaggaccagagagagaaagagaaataagaagaaaaacacaagatgggttattggaagtctaaggttcttcccaagatcaagaaggttttcgagaagaatagcaccaagaaagctgctgctgctgaggccaccaagtcctttgatgagtcaaaggaggaata

SEQ ID NO: 179690 - DNA, 274 bp, Glycine max
cagataactagaaacagtgtgatgaaaatgaaggtccttgttttcttcgttgctacaattttcgtagcatggcaatgccatgcgtacgatatgttccctctccgaatgaacactggctatggtgcccgtactccggaggtgaaatgcgcaagttggaggcatgatgtggaagcacacaacatctttggctttgagaccattcctgaagagtgcgttgaagcaacaaaggaatacatccatggcgaacaatatagatcagactccagaacagtta

SEQ ID NO: 179691 - DNA, 174 bp, Glycine max
agctagtttatcgtgaggagaatatgaagttgtttgttttctttgttgctgcagtagttttggtagcatggccatgccatggcgcaggctaccaaaggttccctctccgaatgaaaactggctatggtgagcgttcttcggaggtaaaatgcgcaagttttaggcttgctgtgg

SEQ ID NO: 179692 - DNA, 287 bp, Glycine max
cgcctcgaatccacacagttctactcttcacctctaaaccctctctctctctctctctcgatctatcatggctacgcccaatcagcaaaccgtggattaccctagtttcaaactcgtcatcgtcggtgacggcggtacaggaaagacaacgttcgtgaaaaggcatcttaccggtgaattcgagaaaaaatacgaaccgaccattggagtggaggttcacccattggatttcttcacaaactgcggaaagattcgcttctactgttgggatactgctggacaagaga

SEQ ID NO: 179693 - DNA, 288 bp, Glycine max
aacgaaaccctcttcatcttgttctatctgtgacgagcatcatggcctcaagagcagtgttattgttggctatgtgtgtgcttccggcgatggttgtggccattcgcccagcaaagaaccctttttgcgtgaagggtcgtgtctactgtgacccttgccgtgctggttttgagacctcagctaccacctacattgctggtgctgagattatgttgcaatgcaagagcagggttagcaacgaggttgtgtacacgaagaaggggtacaccgactcaaccggagcataca

SEQ ID NO: 179694 - DNA, 224 bp, Glycine max
agcaccaacagcatcggcggcgacagtcactctccgacaacaacacttccgcggcgaaaaatgtctctggtggcgaacgaggatttccagcacattctgcgtgtgctgaacaccaacgtggatgggaagcagaagataatgttcgctatgacctccatcaagggtattggaaggagattcgccaacatttctaaaaggccccccttgttgagaaaaagaggggg

SEQ ID NO: 179695 - DNA, 284 bp, Glycine max
cagtattgtgaaatgttgaaagcagacgagtggcctgtttgtgcatttatttctcaagattgtcgtccagcaaatccatcggaagaagcgcacaatgttcaaacatcgtatgaagtgtgggagaagacattagagatgattggccttccctcagatgctgtggaaaggcttttagatggggaagaagttaaatgccgttatggacaagaacagtaatctaatatacaatatctcccttaatctgtaagggcacttccattatttatagctagtaatgagcattt

SEQ ID NO: 179696 - DNA, 275 bp, Glycine max
cgttttgccacttcgaaaccaaattttcttccttcgttggcatctgtgatctcttctcctcataatgagcagatcagggcaaccaccggatttgaagaagtacatggacaagaagcttcagatcaagctgaatgcaaatcgcatggttgttggtactctccgtggcttcgaccagtttatgaatttagttgttgacaacaccgtggaagtgaatggcaatgagagaaatgacatagggatggtggtaatcagatgaaatagtgtggtcactgttg

SEQ ID NO: 179697 - DNA, 199 bp, Glycine max
agagctaaggttgggaagtaccatctgtaggtttgtggaacaacaccttatatgataagaggctcacgaggaattgaagaagccttattgaaacacttgggagtgaatcgcaatgaagtaacaccagatggtttgttttctgttggagaaatggaatgcatgggatgctgtgtgaatgctcctatgattacagtggctg

SEQ ID NO: 179698 - DNA, 125 bp, Glycine max
cagataactagaaacagtgtgatgaaaatgaaggtccttgtgttcttcgttgctacaattttcgtagcatggcaatgccatgctcacgatatgttccctctccgaatgaacactggctatggtgc

SEQ ID NO: 179699 - DNA, 272 bp, Glycine max
cgctctctaagaaacatggctgaagagggtcaggttgtcggcgtccacaccgttgatgcgtggaaccagcaactgcagaatggaaaagactcccaaaaattgattgtcgtggattttactgcttcctggtgtggtccatgccgttttattgccccagttctggcacagattgctaggcatactcctcaagtgatcttcctcaaggtggatgtggatgaagtgaggcctgttgctggggaatatcccattggggacagccaaccttcctcttc

SEQ ID NO: 179700 - DNA, 276 bp, Glycine max
atccagatgaactttcatacgaggaattactggcattgagtgaagtagttggaactgagagcagaggtctttcaactgatactattgcctgtttaccttcagtcaactacaagactgggagtggtcaacaggggaggcatgattcgtgtgtcatttgccgggtggactatgaggatggtgagtccttgacagttctttcctgcaaacatctgtaccatcctgagtgcattaacaattggttgaaaataaacaagggttgcccagtttgtagtactg

SEQ ID NO: 179701 - DNA, 271 bp, Glycine max
aaaaagttctgttctttttcccacccaattcagttttctcaaatggctcgtacgaagcaaacggctcgcaagtccaccggcggcaaggcgccacgtaagcagctggccaccaaggcggctcgtaagtctgctccggctaccggcggcgtgaagaagccgcacagattccgtccgggaaccgtatcgctccgcgagatcctgaagtaccacaacagtacggaacttctgatccggaagctcccgttccagcgattggtccgtgagatcgcgc

SEQ ID NO: 179702 - DNA, 277 bp, Glycine max
gttctctctctctgtgtatattcaaatccatactatcactttcgcatcggtacttctcttttcattgtagcgcagacacaaatcagtaccatacgaatcccgacactacgtgaattaagcatgttgggcagataggttacggttttgtatcttgcaaagtttgtagacaaaggcgttcaagttaagcttactggtggcagacaagtgacagggactctgaaagggtatgatcagttgcttaaccttgtcctagatgaagctgtagagtttttaagag

SEQ ID NO: 179703 - DNA, 279 bp, Glycine max
ccaggatgcaactggcaacgatatcccaagtaaaacctttgatgtacaaggttatcctagcgtgtacttcaggtcagcaagtggaaagttatcacaatacaacggcggtaggaccaaggaagacatcatagaattcatcgtaaagaacccggataaacctgctcagcaagaacaaggaaaagatgagcaagaacaaggaaaagatgagctttgaaaggagcttttcgtctcataggatatatagacacaaagttacatgtgggttgcacaccttttgta

SEQ ID NO: 179704 - DNA, 279 bp, Glycine max
cggttttccaattcacagagcaacacaacgaaccaacaatggcgcagctcgagccgcagtcgcagccgcagcacgggcaagcagcgctggagcaggtgcagtgcttcggtcgcaagaagaccgccgtggccgtgacctactgcaagcgcgggcgcggtctcatcaagatcaacggctgccccattgagctcgtggagccggagatcctccgcttcaaggccttcgagcctatcctcctgttgggtaagagccgcttcgccggcgtcgacatgcgcatcc

SEQ ID NO: 179705 - DNA, 281 bp, Glycine max
aaggcttaacctctctcattccccattacctcacctccttcaatcactgctaaattctagggttccgaaatggacgctggcggaaagatcaagaagggcgccggacgtagaaagggcggcggcccacagaagaagccggtttcaaggtccgtcaaagccggtctccagttccccgtcggaagaattggccgttatatgaagaaaggaaggtacgctcatcgtgtcggtaccggtgctcccgtatacttggctgaagttctcgagtacctagctgccgaggt

SEQ ID NO: 179706 - DNA, 264 bp, Glycine max
aaccttcgtcttggccctcgattttgccctaaagtactctcagtcacaacagacaccgtcgtcgtcgtcgtcgtcatcaatggcaccgaagcagaccaaggctgagaagaagatcgcttacgatgcgaactgtgcgacctaatggaggagtacggccagatcctcgttgtgaactccgataacgtgggatcgaaccagctccagaacattcgcaagggtctccgtggcgactccgtcgtcctcatggggaagacaccatgatga

SEQ ID NO: 179707 - DNA, 279 bp, Glycine max
caaaaatggcacctgcaacactgtctctgtctctcctcctcctgttctcactcagcatcgccgtaaccgttagatcgagcgactacgactacgattgtgtgtacactgcatacgttagaaccggttcggtgttgaagggcggaacggactctaagatcgggctgaagctgtacgacaagtacggctactacatctacattaaaaacctcgaagcatggggcggcttgatgggcaagggctacgactacttcgagcgcggcaacctcgacatcttcagcg

SEQ ID NO: 179708 - DNA, 276 bp, Glycine max
cgagaagagaagctaaagaaacaaaggagatgggagtggagaagcagttgttgaggtctggcaccggtccgaagccaattcccggtcagaacgtaaccgttcactgcactggtttcgggaagaacggtgacctttctcagaaattctggagcacaaaggatcctggccagaacccattcactttcaaaatcggccaaggttctgttatcaaaggatgggatgaaggtgtgcttggcatgcaaattggtgaacttgctcgtcatcggtgctctccgg

SEQ ID NO: 179709 - DNA, 221 bp, Glycine max
  unsure (1)..(221): unsure at all n locations
ctataagctagtttatcgtgaggagaatatgaagttgtgtgtattctttgttgctgcagtagttttggtagcatggacatgccatggcgcaggctaccaaaggttccctctccgaatgaaaactggctatggtgagcgctcttcggaggtaaaatgcgcaagttttaggcttgctgtggaagcacacaacatacgatccaccaaaangattcctgaagagt

SEQ ID NO: 179710 - DNA, 270 bp, Glycine max
  unsure (1)..(270): unsure at all n locations
caaggaatcaacccttcatctcgtcctcaggcttcgtggtggncccattgagccttccctcatggctttggctcgcaaatacaaccaggacaagatgatttgccgcaagtgctatgcccgtctgcatcctagggctgtgaactgccgcaagaaaaagtgcggtcatagtaaccagttgaggcctaagaagaagatcaagtgaattctgggtgatattgtcggtctcacctgcgtgttgttgcgattggaacagggactggtttgatattt

SEQ ID NO: 179711 - DNA, 277 bp, Glycine max
ctataagctagtttatcgtgaggagaatatgaagttgtttgttttctttgttgctgcagtagttttggtagcatggccatgccatggcgcaggctaccaaaggttccctctccgaatgaaaactggctatggtgagcgttcttcggaggtaaaatgcgcaagttttaggcttgctgtggaagcacacaacatccgaccctttaaaaccattcctgaagagtgcgttgaaccaacaaaggactacattaatggcgaacaatttagatcagactctaaa

SEQ ID NO: 179712 - DNA, 277 bp, Glycine max
attgggttctactcctttctctcttcgtttccgatcgatccaattttcttcccatggctacgatcggacacaacaatctcaatgccaaattggttcttctcggggacatgggtgctgggaaatccagcctcgttttgcgctttgtcaagggtcaatttctcgaatttcaggaatcaacaataggggcagcgttcttttcacagacgctggcagtaaatgacgcgaccgtaaagtttgagatatgggacacagcaggacaagagaggtaccatagctt

SEQ ID NO: 179713 - DNA, 274 bp, Glycine max
cccgaggaacaagcttgatcattatcagatcctgaaataccccctcaccactgagtctgccatgaagaagattgaggacaacaacactttggttttcattgtcgacctgcgtgccgacaagaagaagatcaaggatgcggtgaagaaaatgtatgacatccaggccaaaaaagtgaacaccttgatcaggcctgatggcaccaagaaggcatatgtcaggttgacacctgattacgatgcattggatgtggcaaacaagttgggtgttcgcggg

SEQ ID NO: 179714 - DNA, 285 bp, Glycine max
agttgaacggcgaggtagaacgacgacccccttctgcgttttcaccttcaatctcaatcatggccaaagctgaaggtggcaaggaaccaataaatgaacaagcagtagcaaatatgtatgctgcaatgaggtctgagctcaaccaaatttactccaaaataactgaactggagatggaagttagtgagcacacattggttaccaatgccattcaaccacttgaccaatctagacgatgctatcgtatgattggaggggtgcttgtggagagaaccatcaaagagg

SEQ ID NO: 179715 - DNA, 195 bp, Glycine max
cgcagtttcttcgtttctctctctctctctctcttcagaagagcagatagacataacccattcagattaagagagagcaatcaattccaatcacaatggcaaatgcgactcaccgatgaacagatctctgagttcaaggaggccttcagtttgcgcgataaggatggagatggttgcatagggaaaaaggatttg

SEQ ID NO: 179716 - DNA, 275 bp, Glycine max
ctcatgcttattctccctcgagcgacagataaacacatttttagttgcaactaatgggaactggttaaggttaaacaaggatgcaaatggaagcatcctagagagaaatcctacagatgagagtgtgttaagtggcccaagcagtggagagggtgcccagtgtgcaaatattgtcggaaatcttgggtatactcacctcagtgatggtgatcttctgcgagcaggcgtcaaatctggttctgaaaatggcacgatgattcagattatgattaaag

SEQ ID NO: 179717 - DNA, 128 bp, Glycine max
tcctggtggaggtgctgttaatgcagcattatcagtttatttagagtaccttgctacaactttaggatctcgggaacacttggctatagcagaatttcctcgagtctctgtcaattattccacaggtg

SEQ ID NO: 179718 - DNA, 276 bp, Glycine max
atgaaaaacaagaaattccctacgaatatggaaaaggacgactagaggaccgatcatcacttgtggctgatattcagaatgtgaagccaacacacatttttaatgcagcaggagtaactggcagacccaatgttgattggtgtgaatctcacaagacagaaaccattcgcaccaacgttgctgggactttaacattggctgatgtcagcagagagcatggaatcttgatgataaattatgctactgggtgcatatttgagtatgacaaagctcatc

SEQ ID NO: 179719 - DNA, 276 bp, Glycine max
cgatggagaaagtgaaggtgcttcggcgactcctcgagacaccaggggttcaccaggggccagcctgtttcgacgctctgggtgcgaactcatagaatccgctggcttcccctactgcatcaccagtggcttctccatcgccgcttccaggttggctctgcccgacaccggcttcatctcctacggcgaaatgctggagcagggccaactcatcacccaagccgtttccattcccgtcattggcgacgccgacaacggctacggcaatgccatgaa

SEQ ID NO: 179720 - DNA, 276 bp, Glycine max
cggcgactgacacagtaattaaaggagctggaaagctgaagctggtgtttgttccagaaggccagggtgaggagactgaattcgaggtttttaacttcactggtgaagggggtgtttcattggctatgtacaatactgatgagtctattcgttcttttgctgaggcctctatggcaactgctttagagaaaaagtggccactttatcttagcaccaaaaatacaattctgaagaaatatgatggaagattcaaggacatatttcaagaagtttatg

SEQ ID NO: 179721 - DNA, 269 bp, Glycine max
cgtgattttggattagctacatggacttctgcaccttcagttcctttcctttgcaaaactgtcaaaggaacatttggatatttggcccctgagtatttccaacatgggaaagtatcagacaagactgatgtatatgcttttggagtggttttgttggaactcattactggccgaaccccgattggggaaaaaggacttccgggagttgacactttggccttatgggctaaaccttttctacaaaaagggaaaggagcaattgaagagtt

SEQ ID NO: 179722 - DNA, 273 bp, Glycine max
ccagagcttgtatacgtcgcgcttcaggtacaacatgatcattcccgagaagaaccgtaaagagatctgcaaatacctcttccaagagggagtttgctttgcgaagaaggacttcaatctggcgaagacccggagattgatgtgccgaatctgcaggtgataaagctgatgcagagcttcaaatccagagagtacgtgagggaaacatttgcgtggatgcactattactggttcctcaccaacgatggaattgagttccttaggacttacctc

SEQ ID NO: 179723 - DNA, 285 bp, Glycine max
aaacaaccttctttctttttctgtgagcctttctttcaggttattaacttgatcagtgtgcagtgtccaaatcataagggtagttgcaaattgcaatggctaagcatgatgttgagggtggttccttctctgcaaaggactaccatgatcctcctccagcaccgttgattgatgctgaggaactcacacagtggtccttctacagggctttgattgctgagttcattgccacaatgctcttcctttacatcacagtgctcactgtgattggttacaagagccaga

SEQ ID NO: 179724 - DNA, 200 bp, Glycine max
ggaaaagaaggaagaaccagctgaagagtctgacgatgacatgggtttcagtctgtttgactaaattaagtaatacttttgttgagtttgctttgttagaattgatgaagttgtttgtctttcattttaggtgctattttagttgctgtcttttcaattcatgttacattgcaactagtttttaaatcccatagttaatt

SEQ ID NO: 179725 - DNA, 272 bp, Glycine max
acgcagccgaccagcatcccaaaaccctagctcgcgttctgctttcgtcttttacatcaggatggcgtctcaggtgaagcacgcacttgttgtcaaagttacgggtcgtactggatccagaggacaagtaacccaggttaggtgaaatttttggatgatcagaaccgtcacatcatgaggaatgtgaaaggacctgtgcgacacggagacattctcaccctactcgagtctgaaagggaagcaagaagattgcgctagatggtttcttttgg

SEQ ID NO: 179726 - DNA, 272 bp, Glycine max
ctctttcttcctcttcctcagtagtgcgattttcgattctcttctctgcaactatgcctaaccctaaggtcttcttcgacatgaccatcggcggtcaacctgccggccgcatcgtgatggagctctacgccgacgtgactcgagcaccgccgagaacttccgcgcgctctgcaccggcgagaagggcgccgggcggagcggcaagcccctccactccaaaggctcgtccttccaccgcgtgatcccgaacttcatgtgccagggcggcgact

SEQ ID NO: 179727 - DNA, 271 bp, Glycine max
cagattagtattccttgtaggccacctagctttcctctcttcttactatccctgtgttcatgtgaaggttaattgaaacataaagacacactcacacaccctgggttcctaaatttcattttgcagtaacaacaaaaaataagatgagttgcaacgggtgccgcgttcttcgaaagggatgcagcgagtcctgtatgttgcgcccttgtttgcagtggatcgaaaccgcccaagctcaaggccacgccactgtcttcgtcgccaaattctt

SEQ ID NO: 179728 - DNA, 269 bp, Glycine max
gcaaaattaagcacaaaagcccaaccctctctctcgctgctggtctcccccatttggcattcgcagatcgaatacgagtaatttcactgaatcttattgaagatgtttctcacaagaactgagtatgaccgaggagtcaaaccttttctcctgatggccgtttatttcaggttgaatatgcaatcgatgccatcaagctgggatcaactgcgattggattgaagacgaaagagggtgttgtccttgcagttgaaaagcgcatcacttca

SEQ ID NO: 179729 - DNA, 268 bp, Glycine max
cacttgtctccgaattagttatcttgagaaacattattcccattgctatatattatggctagcatgaaggttacatgggtggttgtgatcatgtgcatggccgtggtgggtgcaccgatgatggcgcaagccatgacatcaatgatgtgacggtgaacatggcacagtgcctatcctacctgatgcagggaggaacaccttcaacactttgctgcagcggagtcaagaacattcttggctctgctgtcaccaccgttgacaaacaaac

SEQ ID NO: 179730 - DNA, 271 bp, Glycine max
cggagatttcgggacgaaaggcctcaaaacgcttcgtcgtttgtggttactgagtcctgagtgatcttgacatccgacctttgccatgacaggtgcgcttgcttggcaggtcaaaatatgttaataacaaaagttttattgtttagggagagatcgcacgggagttgcccggggtctctctctcgtgtggtgtgtggtgtttgctgtgctctccttttcgttatgccttttattattacctatctgtcgctccactccgtattacgactct

SEQ ID NO: 179731 - DNA, 267 bp, Glycine max
ctttgtcgtgagctataagctagtttatcgtgaggcgaatatgaagttgtttgtcttctttgttgctgcagtagttttggtagcatggccatgccatggcgcaggctaccaaaggttccctctccgaatgaaaactggcttggtgagcgtatcttcggaggtaaaatgcgcaagtcttaggcttgctgtggaagcacacaacatccgagcctgcaaaaccatccctgaagagtgcgttgaacccacaaaggactacattaatggcga

SEQ ID NO: 179732 - DNA, 273 bp, Glycine max
cagtttgttgtgagctataagctagtttatcgtgaggagaatatgaagttgtttgtcttctttgttgctgcagtagttttcggtagcatggccatgccatggcgcaggctaccaaaggttccctctccgaatgaaaactggtatggtgagcgttcttcggaggtaaaatgcgcaagttttaggcttgctgtggaagcacacaacatccgagtgcgctaaaaccattcctgaagagtgcgttgaaccaaccaaggactacattaatggcgaact

SEQ ID NO: 179733 - DNA, 272 bp, Glycine max
cttcccttctccaacatgccaaacgacagcgttctgagtcttttcctcttcgttaccctcttcacatgccttctctctgctaattcccacgatgaccatattttcctaccgagtcaactccatgacgatgactcagtgagtgcactgctaccgacccaaaccttaactacaagccggtgatcggaatcctgacccaccccggcgacggtgcctctggccggctcagcaacgccaccggggtttcttacatcgccgcctcctacgttaaattc

SEQ ID NO: 179734 - DNA, 277 bp, Glycine max
cagaagagcgtcgcagttgtaaccctaatcagaagaagcgcagttcaagcgagtgacagccaccagccatgggtcgtatgcacagccgcggtaagggtatatcctcttctgctttgccctacaaaaggacacctcctagctggtcaagatctcttcgcaagatgtcgaagaaaatatctgcaagtttgcgaagaaaggtttgaccccgtctcagattggtgtcattctcagagattctcacggtattgctcaggtcaatagcgtcactggcagcaaa

SEQ ID NO: 179735 - DNA, 276 bp, Glycine max
ctacaagctgaagtatccagcaccaggggatctacacttagcaaagagggtgaaggagctactcttaggatcagggtttagccatgtggatgaagataagaaacgtgggcttgaccatggtgcatgggtgccactcttgttgagtacccagaggcagacatcccagtgtgtcaactctctatttcatcaaacaaaggtggtacctatcactacaacatgggaaaggctttggctcctcttaaggatgagggtgttcttatcgttgggtctgggagt

SEQ ID NO: 179736 - DNA, 268 bp, Glycine max
cctggctttatgaccccaactgcactttataccaagacactgaaacctggagatattatggtttttccacaaggacagttgcattttcaggttaattctggaaacggaaaagccactgcttttctggcattcagtagtgaaaccctggagcacaactacttgaccttctgttatttggcaacaccttgccttctgacttggttgcacagactaccttccttgatgttgcacaagtcaagaaggttaaggctcgttttggtggcagagg

SEQ ID NO: 179737 - DNA, 271 bp, Glycine max
cacaaatcaaagccatggccacctccaacttctctattgttctctccgtctccctagccttctttttggtgctacttaccaaggcacactcgaccgataccgtttctttcaccttcaacaagttcaacccagtccaaccaacattatgctccaaaaagatgctagtatttcatcctctggggtgttacaactcaccaaagttggcagcaacggcgtgcccacctcgggatctctcggtcgtgccctttacgctgccccaatccagatttgg

SEQ ID NO: 179738 - DNA, 268 bp, Glycine max
gtgaatgtatcacttgggaacctattgacaccctccttctcgccgctggtacattgctcagagaattctaatgtgtttgcttctgtttaaaccttggactttgctggagtgcaaatttggacccagtgctctatgcgttccttgcagtggtcccatcatctgggatagacattaggccctttatacctccacagcagctgagccccgtgactacaatagaattctctgagcaatgtaccagctgcgagaaggaagctgtgaatgtatc

SEQ ID NO: 179739 - DNA, 274 bp, Glycine max
cgacaattagggtttgtagtgtagcaggaacaagcagcaatggcgccgaaggtaacacgcaaggctagcagaaaccccgaattgataaggggaattggaaagtactcgaggtcgcagatgtaccacaagacgggcatttgggtatcaaggccaaaaatggtggcgttttacctcgccacgaccctaaacccaaacctgaaacacccgctgaaaaaccacccaaattttaccctgctgatgatatcaagaagccccttgtcaacaagcacaaacc

SEQ ID NO: 179740 - DNA, 276 bp, Glycine max
cagaatttgggtacaattaaatcgtcaaacttgtgtactgagataattgaatattcaagtccaactgaaactgctgtgtgcaatctggcatcaattgcactaccacgatatgtaagagaaaagggtgtaccaatggagtcccaccatccaagcttgttggaagcacatgctctggaaatcggtattttgactttgataaactagcagagattactgcactggtcacaacaaacctgaacaaagtaattgatgttaattactacccagttgaaaatg

SEQ ID NO: 179741 - DNA, 278 bp, Glycine max
cggtggtggaaaggtttcgttcaaagtcacactcacctccgatccaaagttacccttcatcgtgtttagcgttccagacgcggcaccttttactgccgttctcaaattcgccgccgaagaattcaaagtcccgccccagaccaggctatcatcaccaacggtagcttttagcctttgggatcacaaaagcttggccacacccgcaatgtttttggattaagaaaatactttttatcatcgatttatcgttggtctcatggtgttggcataaatcccca

SEQ ID NO: 179742 - DNA, 269 bp, Glycine max
gctataagctagtttatcgtgaggcgaatatgaagttgtttgtcttctttgttgctgcagtagttttggtagcatggccatgccatggcgcaggctaccaaaggttccctctccgaatgacaactggctatggtgagcgtcttcggaggtaaaatgcgcaagtcttaggcttgctgtggaagcacacaacatccgagtctgcaaaaccattcctgaagagtccgttgaaccaacaaaggactacattaatggcgaacaatttagatcag

SEQ ID NO: 179743 - DNA, 268 bp, Glycine max
cagtttgttgtgagctataagctagtttatcgtgaggcgaatatgaagttgtttgttctctttgttgctgcagtagttttggtagcatggccatgccatggcgcaggctaccaaaggttccctctccgaatgaaaactgctatggtgagcgttcttcggaggtaaaatgcgcaagtcttaggcttgctgtggaagcacccaacatccgattcttcaaaaccattcctgaagagtgcgttgaaccaacacaggactacactaatggcga

SEQ ID NO: 179744 - DNA, 266 bp, Glycine max
cgttcatcgagtacaaagttgatgtgatctttgctggccatgtccatgcttatgaaagatcatatcgctactctaatgttgactacaacataacaggcggtaacaggtatccattacctaacaaatcagcacctgttacataacagtcggagatggtggaaatcaagaaggtcttgcttcaaggtttttggatccacagccagaatattctgcttttcgagaagcaagctacggacattccacactggagataaaacataggaccc

SEQ ID NO: 179745 - DNA, 263 bp, Glycine max
gctactcgcactcttcaggtggagggaagaactgtgaaagctcaaatattggatactgccggacaggaacgatacagagcaattacgagtgcctactaccggggtgcccttggagctcttcttgtctacgatgccataaaccaaccacattcgaaaatgttagccgatggctcaaggagctaagggatcacgccgatgctaacattgtcatcatgttgatcgggaactagactgatctcaagcatctcagagctgttgccacc

SEQ ID NO: 179746 - DNA, 268 bp, Glycine max
cagagagagggagtcagagaaaccctaggtaagaagaaaagatgccggctggtcatggtttgagatcccgcaccagaggctccttctctcgtcctttcaggaagaagggaaccatcgccctcaccacatacctgagaactaccacgtcggcgactatgttgacgtcaaggttaacggtgccgttcacaagggaatgccccacaaattctaccatggccgcaccggacgcgtctggaatgtcaccaaacgtgctgttggcgtcgaagtc

SEQ ID NO: 179747 - DNA, 270 bp, Glycine max
cgctctgcttcaacattgcggaagcagaagaagcgccgcagctatgcgtgaagtactccagagaacccgacaatcccaccaagtcctgcaaggccagaggcgctgacctcagagttcattttaagaacactagggagactcctttgccatcaggaagttgccccttgttaaagctaaacgatacttagaggatgttttggcccacaaacaggctattcctttccgacgcttttgtggtggtgttgggaggacggcccaggctaagaacag

SEQ ID NO: 179748 - DNA, 269 bp, Glycine max
ctcagtctctaatatttttctcactgtcttgtctctccagagaactgtatagacagatatggcagctgcaacatctggtgctgtgttaaatgggtttggatcttccttcttgagtggaggaaacaggagccaaacccttcggccactgctattggaggcaaagttggtgctgctgctgttactgttagtcctagaagactcattgtggtagctgctgctgcaccaaagaagtcatggctccctggtgtcataggtggtggcaacctcgt

SEQ ID NO: 179749 - DNA, 269 bp, Glycine max
ctcccatagcagcgatgggaatcgatcttaaggctgggggtaagagcaaaaagaccacaagaacagcacccaaatccaatgacatctacctcaaattacttgtcaagctttatcggttccttgttcgaaggactggcacaatttcaatgctgttatactcaagcgcttgttcatgagcaaggttaacaagcctccaatttctttgtcaaggttaattaagtatacaaaggggaaggaggataaaattgctgtaatagtggggactgtaa

SEQ ID NO: 179750 - DNA, 267 bp, Glycine max
ctctgctcgtgcctctagggttatcatatctccatttccatttcctctctctcagtttccaagaatcttaagctatgggacagtcttacccaaccgtgagccctgattaccagaaggccgttgagaaggcagggaagagctcagaggcttcatcgctgagaagagatgcgctcctctaatgctccgtttggcatggcactctgctggaacttacgacgtgagctcgaagaccggtggtcccttcggaaccataaagcacgcctccga

SEQ ID NO: 179751 - DNA, 266 bp, Glycine max
ctttaaagatgcagagtctgcaacagaaggcttccgaatggagcggtgtttccatagacgacgctttcggcatcgacgacaccaatctcttccagaaactcggcctccaaaccttcattaacctctccaccaatttcacaacagggtttacgatgacgaggaagactggtttcgttcaatattcgcgaattctgagaaggagaatgccattcaaaaccaatacgagttcttcgtgcagcgaatgggtggtcctcctctcttttctc

SEQ ID NO: 179752 - DNA, 266 bp, Glycine max
caactccatccgcaatgggaatcgatttgaaggcaggaggtaagtccaagacgaccaagcgaaccgcccccaaatccgatgatatctacctcaagcttctcgtcaagctgtaccgttttcttgttcggaggactggggtaacttcaatgctgttgtcctcaagcgccttttcatgagcaaggtcaacaagcccccgctatccctctctagattgatccgttacacgaagggaaaggaggataagatagctgtggttgttggtgccg

SEQ ID NO: 179753 - DNA, 265 bp, Glycine max
cgaagaggttcaaatttcccgagaacagtgtcgagctttatgctgagaaggtcaacaacagaggcctctgtgccattgctcaggccgagtcgcttcgctacaagcttctcggtggcctcgctgttcgcagggcttgcttggtgttttaagattcgtgatggaaagtggggccaaaggatgcgaggtcattgttagtggaaaactgagagctcagagagccaagtccatgatattcaaggatggatacatgatttcttctggacaa

SEQ ID NO: 179754 - DNA, 268 bp, Glycine max
ttaacctttctcattccccatctcctcaccttattcagcccctgctaatttctagggttccgaaatggacgctggcggaaagatcaagaagggcgccggaggaagaaagggcggcggccctaagaagaagccggtttaaggtccgtcaaagccggactccaattccccgtcggaagaattggccgttatttgaagaaaggaaggtacgcccagcgtgtcggtaccggtgctcccgtttacttggccgcagttctcgagtacctagctg

SEQ ID NO: 179755 - DNA, 217 bp, Glycine max
cgaataaacttggatatgcatgtcggtgatgtcttgtgtgtgttaaattatatatgtggaagtcgtcaacgtgatacatatgaatattaatgaatgtcttatgatcgattttgctaagtaaaaaaaaaaaaaaaaaaaaaaaaaaaaaaaaaaaaaaaaaaaaaaaaaaaaataaaaaaagagggaggatgcccgatcaaagcgggtgtaggtctgg

SEQ ID NO: 179756 - DNA, 270 bp, Glycine max
ctaacccaaaaccctagcggcgcctgctttcttcgttcgtcttttgcatcagccatcaggatggagtctcaggtgaagcatgctcttgttgtcaaagttatgggtcgtactggatccagaggacaggtgactcaggttaagtgaagtttttggatgatcagaaccgtcatatcatgaggactgttaaaggaccagtgagagaaggagacattctcaccctactcgagtctgaaagggaagcaagaaggttgcgctagacggtattttttt

SEQ ID NO: 179757 - DNA, 271 bp, Glycine max
cacctcaaacccatttccttgatatcttagttatctaattacctcaattaatcccttaattgcaagcatcatggctgaggagaaacaccaccaccacttccaccaccacaagggcgatgatgtgcctggcgaggttgatataagaaggaggagaagcaccacaagcatcttgagcaccttggggaacttggtgctgcggctgccggtgcttatgccttgcatgagaagcatgaggccaagaaagacccagagcatgctcacaggcacaagg

SEQ ID NO: 179758 - DNA, 267 bp, Glycine max
ccagagaagagaagagagtttcaagaatggggagcgaagaggagaagggtgaattctacttgcgatactacgtgggccacaagggcaagttcgggcacgagtttctggagttcgagttcagacccgatggcaagctcgctacgcgaacaactccaactacaaaaacgacaccatcatccgcaaggaggtttacctccaccctgccgttttgcgtgagtgccgccgtatcatcgccgagagcgaaatcatgaaggaagacgacaacaa

SEQ ID NO: 179759 - DNA, 259 bp, Glycine max
attaggggaagttgagatgtgaagctgttgagcttttgggtgagtccatttggtaaaagggttgagtgggctttgaaactgaagggaatagagtatgagtatattgaagaagatatcttcaacaagagcaattcccttctcagttgaacccggttcacaagaaggttccggttcttgttcatgcccacaaaccgattgcagtgtcattcgtcatcgttgaatacattgatgaaacatggaagcagtatccactgttacc

SEQ ID NO: 179760 - DNA, 264 bp, Glycine max
cgaagaaggggtatgttgagttcgaggagtcgccgccggacgatttcgatccggcgcatccgtacaaggacccggtggcgatgctggagatgagggagcacatcgtgagggagaagtggatccaaatcgagaagccaagatcattagggagaagctccgatggtgctaccgcatcgaaggcgtcaaccacctccagaagtgccgccacctcgtcaaccagtatctcgagtccacccgcggcatcggttggggcaaggacggtcg

SEQ ID NO: 179761 - DNA, 259 bp, Glycine max
cattctccaatgcggtatgttgatgttgggattcctgccaataataaggggaagcatagcattggttgtctcttctggctattagctaggatggtactgcagatgcggggtactattcgtccaggtcacaagtggatgtaatggtggacttattcttctatagagaacctgaagaggccaagcaacaagaggaagatgaagcaccacctgcccaagattatgccatttcagacttcaatgccgctggcattggcagctt

SEQ ID NO: 179762 - DNA, 261 bp, Glycine max
cttcaagaccggcgccgagcgtaaggcggctgccgagagcactctctctgcatacaaagccgcacaggacattgcgaatgccgaactgcctcctactcatccaattaggcttggccttgctcttaacttttctgattttactacgaaatccttaattctccggatcgtgcctgcaaccttgcaaaacaggcttttgatgaagctattgctgaattggatacactgggagaggagtcatacaaggatagcactttgatcatg

SEQ ID NO: 179763 - DNA, 261 bp, Glycine max
cccttcagtggggggtttggttcatccttgattgccatggatcagagaacatatgaactcataggccctgattaccctggtaatagagctgaagatgttaaaaaccctggcttgggttggatgatgggtttcatgttgttgtcagtttccttggactttttagtcttgtgccacttcgtaaggttatggtcttgatgtataagcttacatatcccagtgggacagctacagcaatgctaatcaacagtttccatacaaaaa

SEQ ID NO: 179764 - DNA, 263 bp, Glycine max
cctgagttgagtttacatagccacaacgtggtgaagttttatttatattatttccaactgaattgcttgatagtttgttttccaactatgttgtatctttgctgatcatgctttgtgcttgatacaaaattgtccagctcatggtgcctttttaattttcacattttgataagatttccttcagcgtcatggatacatgttatgttacaccaggagttgaaatttttacatttattgttaacttgttgagtttaatgttgatc

SEQ ID NO: 179765 - DNA, 266 bp, Glycine max
cagagttgctgcttcttccgccactcagcacttcgctccctctgtgcttcaccaaccatggccgaaatcgaagctaccgttccagatccctctcaaatcgacgtcaaacttttcaaccgctggagcttcgacgacgtgaggttactgatatgtctctggctgattacattggagtgtccccgtcaaagcatgctacatatgttcctcacactgctggtaggtactcagtgaagaggttcaggaaggcgcagtgccccattgtcgag

SEQ ID NO: 179766 - DNA, 268 bp, Glycine max
cagagattcactgaaacagagcgcagaagaaaatacataaactaatccagaaaatgagcagcggcgctggaaaggtggtgtgtgtcaccggcgcttccggttacattgcttcctggatagtcaaattcctcctcaatgcggctacaccgttaaggccaccgttcgcgacacaagtgatccgaaaaacataaaccacttggttggcctcgacggtgctaaggagacgctgcacctctacaaggcgaatcttcttgaagaaggttccttt

SEQ ID NO: 179767 - DNA, 271 bp, Glycine max
cgatgatccacgttcttttcctctttgctcttgtctcgttcacttcccatgcttctgtcaatgatttctgtgtagcagacctaaaaggtccagatagcccttcaggctatcagtgcaagccacctaacacagtcacagggatgactttgtgttctctggctttgtagctggaaacaccacaaacactttcaatgctgcattaacctccgcatttgttactgattttccaggtgtgaatggtcttggtgtatctgtggcacggttagacata

SEQ ID NO: 179768 - DNA, 276 bp, Glycine max
cagcatatattccattctctctgtgtatctccctacctctcccttcccgatgcagaccctcgtcaagaccctcaccggcaagaccatcacccttgaggtggaaagctctgacaccatcgacaacgtcaaggccaagatccagacaaggaatgaatccccccggactagcaacgtctcattttcgccggaaagcaactcgaggacggccgtacccttgctgactacaacattcagaaggagtatactcttcacctcgtcctccgtctacgtggtggt

SEQ ID NO: 179769 - DNA, 268 bp, Glycine max
ctatccttgcccgaagcaccaaaaacatcacattgacgccctcagtgctcatgggattggtactttcgatgttgtggtagtgaacctgtacccattttacgataaagtcacatcagctggaggcgttgaatttgagatggaatctgaaaatattgacatcggtggtcccgccatgattagagctgctgcaaagaaccacaaggatgttttggtagtggttgatacagaagactaccctgcccttctggaatttcttaaaagaaaccag

SEQ ID NO: 179770 - DNA, 188 bp, Glycine max
cgcgatgctaacgggaagtgcgttggtgcaaagttgataacagcaacactgtcaggcattggttatggattgactgacaacggtatctttcttgggtaccctattgttggatttagcaaccggatgcaggcatcaggacatgctgtgaacaatccatcatttcgactatccaaagttctagatcgcga

SEQ ID NO: 179771 - DNA, 265 bp, Glycine max
ccagaagaaaaaaacacagcgtcctagatttcctcttctctgcttcggaagacagagaaaacaaacaaaacaatggcgttcgcttctttcctcggcagagtcctcttcgcttctgtcttcatactctctgcttacaacaatttaatgaatatggagttgatgggggacctgctacaaaagcactcagacctaagtttgatgcctttacacatcgggtgcattctcaagtgggctttcaaattccagagattaatctgaaattttt

SEQ ID NO: 179772 - DNA, 263 bp, Glycine max
aagttctctctgcttctctctcttagactcacaaccctattgcgtgctttacaatcgaccccgattatggacaacagtcacctccctcgaagaatcatcaaggaaacgcagcgtttgctcagtgagccaacacctgaattagtgcgtccccttcggaagacaatatgcggtatttcaatgtgatgatccttggcccaactcagtcgccttatgaagggggagttttcaagttggaactatgtttgccagacgaatatccaatg

SEQ ID NO: 179773 - DNA, 261 bp, Glycine max
cgaataatgaggaggttttgcagaagttgggacaagccatgggtcttgccaattcgggagatgcaggtgcctctgctgaaaattctggggcagatgagaccgaagatttgggaaatgaagatgaatcaattgttatcatactgctagtgttggtgatgtggagggcttgaaaaatgcactagcctctggtgctgacaaggatgaagaagattcagagggaagaactgctttgcattttgcctgtggatatggcgaggtaaa

SEQ ID NO: 179774 - DNA, 266 bp, Glycine max
cccagacacagtggagaagatcacattcgaatgcaaattggctgctggcgccaacggagggtctgctgggaagctaactgtcaaataccaaaccaaaggagatgctcagcccaacccagacgacctcaaaattggcaagtcaagtctgatgctcttttcaaggccgttgaggcctaccttttggccaatcctcattacaactgatccaattcgatcttcagtattcagtgatctgcaaagaccttgttttatattatatacaagag

SEQ ID NO: 179775 - DNA, 265 bp, Glycine max
cagggttttcgctgaccggtgcgcagtcgagcctccagaagacgaatcgaaaatgccgtcgcacaagacattcagaatcaagaagaagttggcgaagaagatgaggcagaacaggcccattccctactggatccgatgaggaccgataacaccatcaggtacaacgcgaagcccgtcactggcgtcgcaccaagcttggattctgaggtgtatgctctgcctaggttcaatttatccaattaattagtgttttattttcttgagg

SEQ ID NO: 179776 - DNA, 266 bp, Glycine max
ccaggtttgaattcaaaggatggtagcaaagaagagaatgatttgagcggtttaagcagcaaggtgtcctcttcagctatgcttctaacacctcagagtgaggatgagatattgcaggccagcaatttgaagaactcacattcaatgagctaagaactgctacaaggaactttcgtccggatagtatggtgggtgaaggcgggtttcgttctgtgtttaaggggtggattgatgagcacacacttgcccctactaaaccagggaca

SEQ ID NO: 179777 - DNA, 263 bp, Glycine max
cttctcttgcggctagggttttagcgcacgtcttctagatttaaggcagatgggtaaggcaaaggttcacatcagtattgtggtcattggccatgtcgactctgggaaatccactaccactggtcacctgatttaaagcttggaggcattgacaagcgtgttattgagaggtttgagaaggaagctgctgagatgaacaagaggtctttcaagtatgcctgggtgctggacaaacttaaggctgagcgtgaaagaggaatcac

SEQ ID NO: 179778 - DNA, 265 bp, Glycine max
ctgaggtagaacccttccactgtggtgactctgcgacgggtgcctacaagtatgtttcagagctatggcgcaagacgcagtctgatgtcatgcgcttcttgcagcgggtgaggtgctgggagtataggcagcaacctccattgttcgtttgacaaggtctacccgccctgacaaggctcgtcgcttgggcttcaaggctaagcagggctatgtgatttaccgtgttcgcgttaggaggggtggccgaaagagaccagttcccaaa

SEQ ID NO: 179779 - DNA, 272 bp, Glycine max
cccagacacagtggagaagatcacattcgaatgcaaattggctgctggcgccaacggagggtctgctgggaagctaactgtcaaataccaaaccaaaggagatgctcagcccaacccagacgacctcaaaattggcaaatcaagtctgatgctcttttcaaggccgttgaggcctaccttttggccaatcctcattacaactgatccaattcgatcttcagtattcagtgatctgcaaagaccttgttttatattatatacaagagtcttct

SEQ ID NO: 179780 - DNA, 228 bp, Glycine max
actatgctccacaagcccacacacacacaaattctcaaacccaaatcccaagtctcagaaaaccctaattcgcagtgaaaatgagagaactcttgcacatccagggagggcaatgcggtaaccagatcagagcgaagttctgggaggtgatatgcgcgcgcacggcatcgaccacaccggaacgtacagctgcgactcggagctccaattggagcgcatcaatgttta

SEQ ID NO: 179781 - DNA, 267 bp, Glycine max
cagataactagaaacagtgtgatgaaaatgaaggtccttgttttcttcgttgctacaattttcgtagcatggcaatgccatgcgtacgatatgttccctctccgaatgaacactggctatggtgcccgtactccggagtgaaatgcgcaagttggaggcttgctgtggaagcacacaacatctttggctttgagaccattcctgcagagtgcgttgaagcaacaaaggaatacatccatggcgaacaatatagatcagactccaaaa

SEQ ID NO: 179782 - DNA, 265 bp, Glycine max
cgcaacaaaaagaaagaatcccaggcgaggagaaagatggaggggaaggagcaggatgtgtcgttgggagcgaacaagttccccgagagacagccgattgggacggcggcgcagagccaagacgacggcaaggactccaggagccggcgccggcgccgctggttgacccgacggagtttacgtcatggtcgttttacagagcagggatagcagagcttgtggccacttttctgtttctctacatcaccgtcttaaccgttatggg

SEQ ID NO: 179783 - DNA, 262 bp, Glycine max
gtgaggtagaacccttccactgtggtgactctgcgatgggtgcctacaagtatgtctcagagctatggcgcaagacgcagtctgatgtcatgcgcttcttgcagcgggtgacgtgctgggagtataggcagcaacttccattgttcgtttgacaaggtctacccgccctgacaaggctcgtcgcttgggcttcaaggctaagcagggctatgtgatttaccgtgttcgtgttaggaggggtggccgaaagagaccagttccc

SEQ ID NO: 179784 - DNA, 263 bp, Glycine max
ctccgagatcaaccctgacccctaaggccaggggtttttctcggcttcttcagattcctgaaatggcgtctgtttcagctttagccaagtacaagctcgtcttcactgggtgaccaatccgtgggcaaaaccagcacatcactcgcttcatgtacgataaattcgataacacctatcaggctacaattggtattgattttctatcaaaaactatgtatctcgaagatcgaactgttcgactgcagttgtgggatacagctggc

SEQ ID NO: 179785 - DNA, 262 bp, Glycine max
caaagcataaagtatggcttcgacggcagcgtaccttgctcggcgcgcggccagaaggagagggttcggatcctctaccgccgcgccctcaaagacactctcaactgggccgtacatcgccacctcttctacgagacgcttcaaacctccgcgaaaggttcgaggagaacagacacgtggaagaccctgataccattgacaggctcataacggatgctgaagcttcctacaacaagtggcgccatcccgatccctatattgt

SEQ ID NO: 179786 - DNA, 205 bp, Glycine max
cagatagaaggagcagcagctatagatggcagaggaccaagtatatcggacacctatactaaacagcaaccacggaagatttgggatcatagtgatggaagtctagcaattgatttttatcaccggtacaagagcacataaagatggtgaaagaagttgggttggattcatacagattttccatctcatggtccagaatattccc

SEQ ID NO: 179787 - DNA, 262 bp, Glycine max
cagagagtggtttcagtgagtgatcggtgttcacttgatccttcataagtcgtcatcatcatcatcatcatcaccgttgattgaagaagatgccgatcagaaacatcgccatcggaaggcctgaagaggctactcccccgacacgttgaaggcggggttggctgagttcatctccaccttgatcttcgtgttcgccggttcaggttccggcatcgcctacaacaagctcaccgacaacggcgccgccactcccgccggcctc

SEQ ID NO: 179788 - DNA, 258 bp, Glycine max
gatcgagataactagaaacagtgtgatgaaaatgcaggtccttgttttcttcgttgctacaattttcgtagcatggcaatgccatgcgtacgatatgttccctctccgaatgaacactggctatggtgcccgtctccggaggtgaaatgcgcaagttggaggcttgctgtggaagcacacaacatctttggctttgagaccattcctgaagcgtgcgttgaagcaacaaaggaatacatccatggcgaacaatataga

SEQ ID NO: 179789 - DNA, 259 bp, Glycine max
cttcaacctctcatcattaggcattcagcaagcaagacaaaaaaatgggcaaaatcatgcttgttttgggtagcctcattggattatgctgtttcacaatcactacctatgccttctcaccttctggatggaccatgcccatgccactttttatgggggtagtgatgcttcaggaactatggggggagcttgtgggtatgggaatctgtatgccactgggtatggaactagaactgcagctttaagcactgccttattt

SEQ ID NO: 179790 - DNA, 260 bp, Glycine max
ctttcttctctctcaacaacttcaccttcctcctcctcgatcatgtctcacttcaacggcaagtaccatgatgagcttatcgccaatgctgcgtacattggcactcctggaaagggtactcttgctgctgatgagcaacagggacaattggcaagcgtttggccagcatcagtgtagagaaccttgaatccaacaggcgagctcttagggagctgcttttcactgctcctggtgttcttcaatatctcagtggtgtcatc

SEQ ID NO: 179791 - DNA, 260 bp, Glycine max
aagaaggctggcattgttggaaaatacggtacccgttatggtgccagtctgcgcaagagattaagaagatggaagttagtcagcacagccaatttttctgtgaattttgtgggaagtatgctgtgaagaggaaactgtaggaatatggggatgcaaggactgtggtaaagtgaaagcaggcggtgcttatactttgaataccgcaagtgctgtgacggtacggagcaccatcaggaggttgagggagcaaactgagagtt

SEQ ID NO: 179792 - DNA, 255 bp, Glycine max
cccagaactaggacaggttattcaacttcaaggtgatcagaggaagaatgtttctaccttcctagtccaggctggtatcgtgaagaaggatcatatcaagattcatggtttctgagcggttggagtcttaagttcaaattttacctgcctgactatgtgttaggcataatatataatctgagtcgtgtggatgtgattgtggtatttctaatgtgttcttatgttttaccatgtgatgtgggattatggatttca

SEQ ID NO: 179793 - DNA, 249 bp, Glycine max
  unsure (1)..(249): unsure at all n locations
gccgtagcagcagcggaagctctagcttgggcagcgaatcacaatggcgagaggattgaagaagcatttgaagaggcttaatgccccaaagcattggatgcttgacaaactgggtggtgcatttgctcctaagcctcatctggaccacacaaatccagggagtgnctgccactcatactcattttgcgaaaccggctgaagtatgctctgacataccgtgaagtcattgctattctgatgcagcgacat

SEQ ID NO: 179794 - DNA, 261 bp, Glycine max
gtttgttgtgagctataagctagtttatcgtgaggcgaatatgaagttgtttgttttctttgttgctgcagtagttttggtagcatggccatgccatggcgcaggctaccaaaggttccctctccgaatgaaaatggctatggtgagcgttcttcggaggtaaaatgcgcaagttttaggcttgctgtggaagcacacaacatccgagccattaaaaccattcctgaagagtgcgttgaacccacaaaggactacattaat

SEQ ID NO: 179795 - DNA, 267 bp, Glycine max
ctagctgcaaagctttttgtgttctgcaactgaaagtgaaggaaacgaagcagaaaccaaatcatgtgttctctactttggagttccattgcattgtgtgtaacctttcctactccttgagcttggcgttgtgcaccctcaccctcacaccataggatccctcgcttgccgggtcaaccccatgttcagtttcatcagttttcaggttatgtaaccgttgatgacaaaaaccagcgtgcactttttttctactttgctgaagccgaa

SEQ ID NO: 179796 - DNA, 263 bp, Glycine max
ctcgagccgctcttagtcccaattttctagggttttattcattttccgatggcttctgcagacgttgagtaccgttgctttgtcggtgggctcgcttgggccactgacgaccatgccctcgagagagccttctgcagtacggcgaaatcgttgaaacgaagattatcaacgatcgtgagactggcagatccaggggttctggatttgtgaccttcgcctcggtgccgtccatgaaagatgcgaccggagcgatgaatggacag

SEQ ID NO: 179797 - DNA, 258 bp, Glycine max
caaggagatggctctgggaagaggcagtgcagtggttctactactttgcttcttgctgcttcactctcagatggctcgtgctgccacctacacagttggagattctgggggttggacctttaacactgttgctggcccaaaggaaagctctttcgggctggtgacacacttgctttcaattatagccctgggactcacaatgtggtggccgtgaacaaggctggatatgatagctgcaagactccaagaggagccaaa

SEQ ID NO: 179798 - DNA, 256 bp, Glycine max
cgttggtaggatcatcatctctttgagttgccattgaagaagaagctcagatcggaaaaattcacctctccaatcccaatcccatcgttgcaaatgatccgattcattctgttgcagaacaggcagggcaaacccgtcttgccaaatactacgttcctctcgaggactccgagaagcacaaggtcgaatacgaggttcatcggctcgtcgtaaacagagaccctaaatacacaaatttcgtcgagtttcgtacgca

SEQ ID NO: 179799 - DNA, 257 bp, Glycine max
ccgaaggactttaggttgggatttgggaattagggttattcgcgtggcgaagatgattgacgtggttttgaacgatcgattggggaagaaggtgcgcgtgaagtgcaacaccgatgataccatcggcgaccgcagaagcttgtcgcggctcagactggcacaagagccgacaagatccgcatccagaagtggtacaccatctacaaggatcacatcactctcaaggattacgagatccatgacggcatgggtctcga

SEQ ID NO: 179800 - DNA, 262 bp, Glycine max
ctactcctcgcaacgtggaacagacctcttccacaacacacttgaaatgacgacatgggtctcttcctcgaagaggctgagaaggtgaaggctgccatggggtccctccgtgacatcctcggccgcctccagcagccaacgaggagagcaagtccttgcacaagcccgaggccctcaaggtgctccgggcacggatcaatgcggacattgtcgctgtgctcaagacggcccgggcgatccgggcccagctagaggagatgga

SEQ ID NO: 179801 - DNA, 264 bp, Glycine max
ctccttcttcatagcttcacacgtggagtggactgaatagttccaccagtgccgctgcatcaatgaacgaccagctctccaaccccacctccatcttcggcctccgcctatgggtggttctcggcgtctgcgttgcgccgccatcgtcctcatcctcttcctcatctccgtctggttagccttcaagcgctcccaaaccaaccccgtttccatccccgacgtctccaaggagatccaagatatcaggctcgaccacgcgcccaa

SEQ ID NO: 179802 - DNA, 263 bp, Glycine max
ccagatgcagatattcgtgaaacccctaaccgggaagaccatcacccttgacgtggagtcaagcgacaccattgacaatgtcaaagccaagattcaggacaaagaagggattcctccggatcagcagaggttgacttcgccggtaaacagctggaagatggccgtaccctcgctgattataacatccaaaaagagtcaacattgcatcttgttttaaggcttcgtggtggtattattgagccatctttgatggcactggcgag

SEQ ID NO: 179803 - DNA, 261 bp, Glycine max
catggtgggatttgctcctttgacatctcgtggctctcagcaatacagagccttgagtgttccagagctcacccagcaaatgtgggattccaagaacatgatgtgtgctgctgaccctcgacacggccgctactcactgcctcagccatgtttagaggaacgatgagcaccaaggaggtcgatgaacaaatgatcaatgtgcagaacaagaactcctcatactttgtggaatggattccccacaatgtgaaatccacagtc

SEQ ID NO: 179804 - DNA, 259 bp, Glycine max
ctcgagccgctcgagccgaggaaacgttgtggtgtgatgcgagacagagatggccggtacctaccataacgcccagcggcacgtgctacagctggtgatgtcgtgccggaaaatcaccgcccaggtcacaaaaccaccacatcctccatcatagccatggcttcatcatcggagcaggaattcgtggctcactaccgcgctcagcttaatcgcttccccagatcgcaccgcttctgggacgctaaagtggcctctcgcg

SEQ ID NO: 179805 - DNA, 260 bp, Glycine max
cagatagaaggagcagcagctatagatggcagaggaccaagtatatgggacacctatactaaacagcaaccagggaagatttgggatcatagtgatggaagtctagcaattgatttttatcaccggtacaagacgacataaagatggtgacagaagtcgggttggattcatacagattttccatctcatggtccagaatattccccaagggcaagggagcagttaacaccttgggggtcaagttctacaacgatctcatt

SEQ ID NO: 179806 - DNA, 256 bp, Glycine max
ccaataagagctcaaggccttcatgatcaaatcaaggtttcaacatctattgacatgaccctaataggaaactctttccctccatcgcaaggttccttcaggggtgatgtgagatcatacctagatcccatattgggtacttggtatatgcaaatgcaccattactagtcaatgtgtacccttattttagttacactggtaacccccgtgacatatcacttccctatgctcttttcacagcaccaaatgttgtggt

SEQ ID NO: 179807 - DNA, 257 bp, Glycine max
cgcactgtggcagaagtcctaggagtgtaaaacagagacgcaaaatgaagacgatcttgtcgtctgagaccatgaatattcccgacggcgtgagcatcaaggttcacgctaaggttatcgaggttgagggcctcgtggaaaactcgtgcgagacttccaccatctgaacttggacttccaacttattaccgacgatcgcggtaaaaggaagctcaagattgattcttggtttggttctcgtaaaacctccgccgcca

SEQ ID NO: 179808 - DNA, 260 bp, Glycine max
ccaatgagttattacaaccagcagcaaccgccggtcggagttccgccgccgcaaggttatccgccggaggggtacggaaaggagggatatccaccgccgggatacccgccagcgggatacccgccagccggatcccaccgccgggatatccgccacaacaaggctatcctccgccgccctacccggcgcaggggtatcctccgccctacgctcctcaatacgctcagcctccgccccgtcaacaaaattcaactggccct

SEQ ID NO: 179809 - DNA, 260 bp, Glycine max
cagaaatataagaggtcattgagttaccaatcaaacatcctgagctgtttgacagtcttggaattgcacaaccacagggtgtcctgctctatgggccacctggtacaggaaaaacattgttggctagggcagtgctcatcatactgactgtacattcatcagggtgtctggttctgaattagttcagaaatacattggagaaggttctagaatggtcagggaactttttgttatggccagggaacatgctccatcaatta

SEQ ID NO: 179810 - DNA, 259 bp, Glycine max
gtttgttgtgagctataagctagtttatcgtgaggcgaatatgaagttgtttgtcttctttgttgctgcagtagttttggtagcatggccatgccatggcgcaggctaccaaaggttccctctccgaatgcaactggctatggtgagcgttcttcggaggtaaaatgcgcaagttttaggcttgctgtggaagcacacaacatccgagtccttaaaaccattcctgaagagtgcgttgaaccaacccaggactacatta

SEQ ID NO: 179811 - DNA, 257 bp, Glycine max
caatctcatctcattcatttcaatggcaactcaaggtcaagtcattacctgcaaagctgcggtggcctgggaacccaacaagcccttaactgtccaagacgctcaggtggctccgcctcaggccggcgaggccgtgtccaaatcctcttcaccgctctctgccacaccgatgcttacatctagggcggcaaggatcccgaaggtctcttcccctgtattcttggccatgaagctgcagggattgtggagagtgttgg

SEQ ID NO: 179812 - DNA, 257 bp, Glycine max
ctacaaccttagctcttcctctgggttgaagaaacttgatgagtaacttctcccacgcagttacatcaccgggtaccaagctacaaaggatgatcttactgtttatgcagctttgccaactgctccatcaatgaatatggaaatgtttccaggtggtacaagcacattgatgctttgttgagaatctctggtgttactggcgagggatctggtgttattgttgagggatctctagttgcagagcctgttgcaactcc

SEQ ID NO: 179813 - DNA, 256 bp, Glycine max
ctttagccgaggtcaggaggagcactagctaagttcacaatttcaacatggctaggggactaaagaagcatttgaaaaggctcaatgctcctaagcattggatgcttgacaaactgggtggtgcatttgccctaaaccctcatctggaccacacaaatcgagggagtgcctccccctcattcttattctgcgaaaccggctgaagtatgctctgacataccgtgaagtcattgctattctgatgcagcgccatgtt

SEQ ID NO: 179814 - DNA, 254 bp, Glycine max
ccctcattgaccttacagttatagacatcttgtcaaggcacgcatctgatgagttctaccttgggcagagagatggtggtgactactggacttctgatgccggtccattagaggcatttaagaggtttgaaagaagcttgaagagattgacaagaagcttatagagaagaacaaagatgagacattgagaaaccgctatgggccagctaaaatgccttacactctgctctatccttctagtgaggagggattga

SEQ ID NO: 179815 - DNA, 256 bp, Glycine max
gctcgtgcctctagggttatcatatctccatttccatttcctctctctcagtttccaagaatcttaagctatgggaaagtcttacccaaccgtgagcgctgattaccagaaggccgttgagaaggcgaagagaagctcagaggcttcatcgctgagaagagatgcgctcctctaatgctccgttttggcatggcactctgctggaacttacgacgtgagctcgaagaccggtggtcccttcggaaccataaagcac

SEQ ID NO: 179816 - DNA, 257 bp, Glycine max
cggttttccaattcacagagcaacacaacgaaccaacaatggcgcacctcagccgcagtcgcagccgcagcacgggcaagcagcgctggagcaggtgcagtgcttcggtcgcaagaagaccgccgtggccggacctactgcaagcgcgggcgcggtctcatcaagatcaacggctgccccattgagctcgtggagccggagatcctccgcttcaaggccttcgagcctatcctcctgttgggtaagagccgcttcgc

SEQ ID NO: 179817 - DNA, 262 bp, Glycine max
ctagtttatcgtgaggcgaatatgaagttgtttgtcttctttgttgctgcagtagtcttggtagcatggccatgccatggcgcaggctaccaaaggttccctctccgaatgaaaactggctatggtgagcgtcttcggaggtaaaatgcgcaagttttaggcttgctgtggaagcacacaacatccgagactttaaaaccattcctgacgagtgcgttgaaccaacaaaggactacattaatggcgaacaatttagatcaga

SEQ ID NO: 179818 - DNA, 260 bp, Glycine max
ctgactttcaagcgcaggaatggaggtcgcaacaaacacggccgcggccacgtcaagttcattcgatgctccaactgcggcaaatgctgccctaaggacaaggctatcaagaggtttctggtgaggaacattttgaacaggctgcagtcagagatgtgcaggaggcttgtgtctacgaacaatacacgcttccgaagctgtatgtgaagatgcagtattgtgtttcctgtgctatccactctcatgttgtgagggttcga

SEQ ID NO: 179819 - DNA, 257 bp, Glycine max
gtccaggtgatcttaataaatggtaccgtcacatttcaaaaggtgcttggcctttttcaactggagatcatggatggccaatttctgactgcacagctgaaggactgacagctgttctattactatccaaattgcaccagaaatagttggtgagccaatagacgtgaagcgattatatgattctgtaaatgtcattctctcactacagaatgaagatggtggttttgcaacatatgagcctaaacgatcttataatt

SEQ ID NO: 179820 - DNA, 258 bp, Glycine max
cttcaactctgcttcccctggcaaccttcttcttagttctctccgcctcttatctccagattgctggggcgaaagcacaaccgttgactagtctcaagcttaactctccgatccttcaggagtctattgctaagagatcaatgaaaatcctgaggcaggatgggaggctgctataaatcctcatttctccaattatacagttgaacaatttaagcgccttcttggagtcaaaccaacgcctaagaaggaactgagaag

SEQ ID NO: 179821 - DNA, 254 bp, Glycine max
cgtttcttcagtttggtataaccttagccgaggtcacgaggagcactagctagtttcacaatttccaaatggctaggggattgaagaagcatctcaagaggctcaatgctcctaagcattggatgcttacaaactgggtggtgcatttgcgcccacaccctcatctggaccacacaaatctagggagtgccttcccctcatactcatcctacgaaaccggctaaagtatgctctgacttaccgtgaagtcatcg

SEQ ID NO: 179822 - DNA, 253 bp, Glycine max
ctgcaatctaatgggagccacattgttgatgggaactggagggccctagggaagcttcttatatactgttcaggatgcacaaaaggtggcttgttcaatagcattcagattcctggtcactttgtttacagacacgattttctagaacatcaggaaagagctttcttttgccacaatgcaggactgatgttttgtatgtatgtgatccttgtgagcatcttgaccaaggtgaggcaggagatgtaggattctt

SEQ ID NO: 179823 - DNA, 253 bp, Glycine max
tccacgtgccggaattgtcatatcactggcatccatttatgatttggagaagcacaaatctcgtagagtgttatacaaaggttacatttctgagctgtttgtgccataccaagacccaacagatgattttactataagactttctttgatgctggagagtttgggtttggtctctccacggtctcattggtgcccaaccgtgattgcccatcgaatgctcagttcctagatacatatgttcacgctgctgatg

SEQ ID NO: 179824 - DNA, 256 bp, Glycine max
ccaagccaagtgaaagtcagacacaataaaaatcaaagagcataatgtcagggatcattcacaagattggcgagacccttcatgtgggagggcacaagaaggaggaggagcataagggtgagcaccatgcggagaatacaaaggggagcaccatggtgaacacagtagtgagtacaaaggagagcatcatggtgaacacaaagctggagagtaccatggtgagcacaagccagagcacccagaggggttcctagac

SEQ ID NO: 179825 - DNA, 293 bp, Glycine max
tggacgcatatcctaattttaactttgttggtcgcctcctaagccctaaaagaaactctctaaagcgtgtaagaagcagttattaattgccgggtctggatcaggggccgaggtaccattaaggatcagctagggaggaaatgatgagaggaaaacctgggtatgagcatctgttggaacctctcaacattctagttgaggcagaattaccagttgaaatagtagatgctcgcctgatgcaggcacgtgaaatacttgaagatttgctcaaaccggtggatgaatctcaggat

SEQ ID NO: 179826 - DNA, 207 bp, Glycine max
acatagtgctgctccttgcaactctaattctatcgccttaaggtcttggaaagtatgagaaaaacccaatggaaaaggcttccaattgggaacccacaagtttataagcccccagttgaaaagcctcctgtttacaagccaccagttgaaaagcccccaatttagaagcctccagtagagaagccaccagtgtacaagcaaccagtt

SEQ ID NO: 179827 - DNA, 210 bp, Glycine max
tggctcgagggttcacgtttcacaatcactttttgcgactctctcactcactcagtcttcctgctactcctggggttggtttccttcttcgaactcgaacgaggatgcgtgagattcttcacatccagggagggcaatgcgggaaccagatcggagccaagttctgggaggtggtgtgcgcggagcacgggatcgattcaacggggaggt

SEQ ID NO: 179828 - DNA, 281 bp, Glycine max
gctttgactttggtggaaactaaagactagtcaaaatggtgaagttcacagctgaagagctggggtggaataatggattataagcataatatccgtaatatgtctgtcattgctcatgttgatcacggaaaatcaaccctgactgattctcttgtggctgctgctggtattattgctcaagaagttgcaggtgatgtccgtatgactgatacccgtgcagctgaagctgagcgtggtattacaatcaagtctacgggtatctcactctactatgaaatgac

SEQ ID NO: 179829 - DNA, 276 bp, Glycine max
actcgagccgaatcggctcgaggtgaagagcgaagagaatggctcccaagggtttaatctttactggtacagttatccttctcagtactgtcactgagtcgttgtcttgcgcaggataatggacttgttattaacttctacaaggaatcatgccctcaggctcaagacatcatcaaagaacaagtcaagcttctctacaagcgccacaagaacactgctctctcctggctcagaaacatcttccatgactgtgatgttccgagttgtgatgcttca

SEQ ID NO: 179830 - DNA, 280 bp, Glycine max
gcagcggaaaatacctctttgctggagtggttgatggaaggaacatctggggcaattacctttgttgtttccctcactaccttgcagggtcttgaagggcattgtgggcaaagataagcttgttgtgtccacctcctcctcccttcttcacactgctgttgatctagttaacgagaccaagttggatgatgagatcaagtcatggctagcttttgctgcccaaaaaaattgttgaagttaacgcattggctaaagcattgtctggccacaaggatgaggc

SEQ ID NO: 179831 - DNA, 285 bp, Glycine max
cggtcgagaaggcccattgaaacaaggtcaagggataaatttgggttccaggaagagaacaaatttgaatcccctaaacttaagcatgttgaacctggactctaaatttactgagaatgtgagcaaaagctcgcttcgaaatggtgtttatggtatgaatgcagtgtatcagaaaaacaatgcaaacttggtgagtaatgtgatcagtaacaagtacaatggtaatattcttcataacaaagagatcaacaacaacaccaacaatgaaagcaacaacacaaatgc

SEQ ID NO: 179832 - DNA, 276 bp, Glycine max
agaagaagaaacttaatcgatcatcacttcacttcactaatacatcatggcagacgagaaccaagacaaagtatgagagctctgaggttgaggtccaggatcgtggtgtttttgactttctcggtaagaaaaaggatgaagaagacaagcctcatcctcaggaggaggtcatcgccaccgagtttcaaaaagtcactgtctcagaccaaggagagaacaagcacagcctcttagaaaagcttcaccgatctgacagcagctctagctcttcaagtg

SEQ ID NO: 179833 - DNA, 252 bp, Glycine max
ggactgggccagttcagctgccatacactttgctccatcgttcaagtgaggaagggttgactttccaaaggaattcccaacagtatctctatctaattaaaaagagtttgtggtttccttatctatgttgtacttctgaataacatagactttatgcatgtctatgcgtaattattgcctgaacttctgcactattgtatttggatgctctcggttttcatataataaagtgtgttctcactttcactttgt

SEQ ID NO: 179834 - DNA, 272 bp, Glycine max
gccatggctgctctgcaatacttggaatcgctgcgcaacgcgcatcctcgagctctccgaatggtaacaattcgctggcggatctataccagaacaagctctggcaccagcttaccctcaagcttgagcagttcgtggctctcgccgtcttccaggccggtgatgcattaatacaattatatcacaatttcatcacagactttgagcccaaaatcaaccttctcaagcttgcgcatttcgctgttatagtttctcggcagtatgctgagaaa

SEQ ID NO: 179835 - DNA, 269 bp, Glycine max
gagataactagaaacagtgtgatgaaaatgaaggtccttgttttcttcgttgctacaattttgggtagcatggcaatgccatgcgtacgatatgttccctctccgaatgaacactggctatggtgcccgtactccggaggtgaaatgcgcaagttggaggcttgctgtggaagcacaccacatctttggctttgagaccattcctgacgagtgcgttgaagcaacaaaggaatacatccatggcgaacaatatagatcagactccaaaa

SEQ ID NO: 179836 - DNA, 270 bp, Glycine max
agaatatcgtgtagataaaggagcagctccaaagatgttgaactgtcttatgtacaagctgtcttattatcggtttggggagctgacaacagaatatggcaaaccacctgggtatgatcgtgctagaggtgttgaaattggaaataaagacataaagcttgagtacttggaagaggctttcactacacagaattggatagttcgtatttataaagtgaaaccacctaaaaacagatggtaactctaaaaaaacagccccaaaaaacaaag

SEQ ID NO: 179837 - DNA, 295 bp, Glycine max
cgttgtcgttcagttctgaacggaaaagcaccgtcgcaccttccctgagggttctcctgtctgtcgcgaattaacaatgttaagggtaaccgtgctgaacgatgctctgaagagcatgtacaatgctgagaaaaggggaaagcgccaagtcatgattcggccatcctccaaagtcattatcaaattccttttggtgatgcagaagcacggatacattggagagtttgagtatgttgatgaccacagggctggtaaaatcgtggttgaattgaacggtagactgaacaagtgtggg

SEQ ID NO: 179838 - DNA, 290 bp, Glycine max
caccatgagtaacatgacttccttaagctccttagtgctggtccttgcaggtctaattccaatccctcaaagtcctggcggactaggagaagcccccggtgtacaagcctcccattgagaagccaccactttacaagcccccaattgagcaacctcctgtttataaacctccagttgagaaaccccccatttataagcccccagtagagaagccaccagtgtacaagcctcctgtagagaaacccccagtttacaagcccccagttgaaaaaccaccagtgtacaagcca

SEQ ID NO: 179839 - DNA, 284 bp, Glycine max
caaaggtatcatgctcatcaatatactaatggcaccgtatgtgatctcacaaataagccacgagagaaccgaggtgaggttggaatgccctgaaccgagagcaatgattagttcaatcacagagatttccacttgcaagtatgcacttacagtgcaatgtccgcagctatgcaagcacccattatttcaagaggagagaccagtatggcataccatcgactgtaatgtgcttccaaaagatcacgtggatgccaaagtgagacgacccaacgaaaatacggaga

SEQ ID NO: 179840 - DNA, 279 bp, Glycine max
cagaaatgtaacctttgtataacactctgagctgtttgtgccataccaagacccaacagattgattttaataataggacttcctttgatgctggagagtttgggtttggtctctccacggtctcattggtgcccaaccgtgattgcccatcgaatgctcagttcctagatacatatgttcacgctgctgatcgtactccgttactcatcaagaacgcaatctgtgtctttgaacaatatggcagcatcatgtggcgtcacaccgaaacaggcattccca

SEQ ID NO: 179841 - DNA, 271 bp, Glycine max
ctcagtgaaacactagctagggtattgggagctctcgttgtttcggagttagggaccttacgcaagccagggccactgctacgaatgccgccgcccccccaccacgccagctctcccagaaggaagctgacatccagatgatgttggccgccgacgcacacctcggcaccaagaactgcgacttccaaatggaacgttacatcttcaagcgccgcaacgacgggatttacattattaaccttgggaagacgtgggagaagcttcagctagc

SEQ ID NO: 179842 - DNA, 292 bp, Glycine max
gccgattttaaaagatgagtaagcttcagagtgatgctttgcgtgaaagcatttcaggaatcatgggcgaatcccaaggggaggattcgcaaatttgtggagaccatcgaactccaaatcgggttgaaaaactacgatccacagaaggacaagcgtttcagtggctcctgtcaagctgccccacatccctcgccccaagatgaaaatttgcatgcttggtgatgctcagcatgttgaagaggcggagaagataggactggactggatggatgtggaagccctgaagaagcta

SEQ ID NO: 179843 - DNA, 209 bp, Glycine max
ggccgttcagcaggagaatctcaagctcgcggacgcgctcgtcaagcacgtgggcataattcggggtttccaaagccggggccatgaggaaggttgcttcctacttcgcccaagccctggcgcgtagaatctacggaatcttccccgaagaaaccctcgattcctccttctccgacgttctccacatgcacttctacacatcttgccct

SEQ ID NO: 179844 - DNA, 282 bp, Glycine max
gcaagaatggcacttcgttgcttggtgatgtcctttctgttctacctcatcttggtcttgcgagaaaaaagcaatgccagagacgaagatttttggcatgctgtttggccaaacactcccattccaagttcattgcgagatcttctaaagcctggccctgcaagtgttgaactcgatgatcaccctatgcaaattgaagaaacacagtacccgaaaaccttcttctataaagaagaccttcatccaggcaaaacaatgaaagttcaattcagcaagcctccc

SEQ ID NO: 179845 - DNA, 277 bp, Glycine max
ggctgatggtctcaatgcggaggcaagggttggtgtgcctggtgaacatcagcgtatccttcgtgaacctcaaggtattccggcttctcaagcactggctgaaggctggagaacctgatcccttttacaaccctgtcaatgattatgtgattctacctactgcttttgaaatggagaggcataaagagaagggtgtagaagtagcatcccttaaagaggaatgggaaattatttctaaagtccaagatgaccaaagctgcacagcagataaagtgtg

SEQ ID NO: 179846 - DNA, 270 bp, Glycine max
atccagctctgaaccctgaccacgtccctcacattctgaagaagtggcctgatgccaattccagacccaaaggcggtgcagtacgtgagacacgaccgtggcactcccatgattctagacaacaactactacagaaacatattagacagcaagggtctcttgatagtggatcaccaactagccaatgacaagaggaccaagccttatgtgaagacaatggccaagagccaagactatttcttcaaggacttctctagagccattaccttg

SEQ ID NO: 179847 - DNA, 266 bp, Glycine max
atatgaattacatagaatgcatcaatgtagactacaaatcaactagaaaggagtcattttatgaccttcagcttgatgttaaaggttgtcgtgatgtttatgcttcctttgataagtatgtcgaagttgaaagtcttgagggggataacaaatatcatgctgaacagtatggtttgcaggatgctaagaaaggtgtcctatttattgattttcctcctgtccttcaactccagctaaaaagatttgaatatgattttatgcgggat

SEQ ID NO: 179848 - DNA, 208 bp, Glycine max
cgagttacagccgcaccttgattcagagcagagcgaccttgaagagctatggctgtcggaaaggattaggagatttccaaagggaaagaagggtggcaggagaaaagcgttgatccctttgcaaagaaggactggtacgatatcaaggccccttcggtcttcaaggtcaagatggttggcaaaaccctcgtctctcgtacccagggaa

SEQ ID NO: 179849 - DNA, 211 bp, Glycine max
cggttacaccgagcagccacacctcccgcagcagccatggttctcaaaactgaactatgccgattcagtggttgccagaatttaccaaggaaagggcatcagattggttcgtggtgattcttaggttttcctgtttgcaaactcaaaatgtaagagctatttccacaatcgcctgaagccttcaaagctcacctggactgcaatgtacaga

SEQ ID NO: 179850 - DNA, 280 bp, Glycine max
atttcacccaaatataaatagcaatggaagcatttgccatgacatattgaaggagccatggaagcctggggctaataatttcaaaggtgtagctctcaattagttccctgttgacggaccctaatcctgacgatcctttggtccctgaaattgcccacatgtacaagacagacaggaacaagtacgagtcaactgccagaagctggacccagaaatatgccatgggttaagtgaccttgtggtatgtttgagggagagcctttctactctcagtgtttag

SEQ ID NO: 179851 - DNA, 278 bp, Glycine max
gtgaaaatggcgcagtgtgtgaccaacacattcgtgcaaggaaaaccctttcttccaattggaggaagttccaattaaaaatgttcggagagcggttcagtgcggtgtgtggtgcaagaagaaggagatacacccgcaattctacgaggaatcgaaggtgtactgcaacggggagctggtgctgacgacaggtgggacccagagcgaatacgtggtggacgtgtggtcggggaaccaccccttctacctcggaagccggtcggcgtctatggtcagcg

SEQ ID NO: 179852 - DNA, 267 bp, Glycine max
aaaaagaccagcggttgacgatgaaacagaagtgtcttgttgttctggtctttgttgttcccttggcctgtgcggttggttgggatgagggtatacccggcggatggaaccccatcaagaacattaacgatcctcacgtgacggagatcgcgaatttcgccgtgacggaatacgataagcaatccggtgagaagctaaagttggtgaaggttatcaaaggcgaccttcaggtagtagcaggcctcaactaccgcctcagcctcaccg

SEQ ID NO: 179853 - DNA, 264 bp, Glycine max
ctggcgcagtaccctgaggcttctcttctcttctcttctctgtcgtgagtcaccatggtgagggttaatgtgctgaacgatgctctgaagagcatgtacaatgctgagaaaaggggaaagcgccaagtcatgattaggccatcctccaaagtcattatcaaattccttttggtgatgcaaaagcacggatacatcggagagtttgagtatgttgatgaccacagggctggtaaaatcgtggttgaattgaacggtagactgaac

SEQ ID NO: 179854 - DNA, 264 bp, Glycine max
agctagtttatcgtgaggagaatatgaagttgtttgtcttctttgttgctgcagccgttttggtagcatggccatgccatggcgcaggctaccaaaggttccctctccgaatgaaaactggctatggtgagcgttcttcggaggtaaaatgcgcaagttttaggcttgctgtggaagcacacaacatccgagcctttaaaaccattcctgaacagtgcgttgaaccaacaaaggactacattaatggcgaacaatttagatcag

SEQ ID NO: 179855 - DNA, 289 bp, Glycine max
gtttcttcctttctctgctctttgccttctctgacacatttggtgccttgtaaaacgtgttttggcaaggacgttgtaatgccgaagaacgttgaggttgctgagcgtggctccttctctgggaaggactaccaggaccctccaccagcaccactcattgatgctgaggagctcacaaagtggtccttttacagggctctcattgctgaattcattgccactttgctcttcctctacattactgtgctcacagtcatagggtacaagcaccagactgacctcaaggaaa

SEQ ID NO: 179856 - DNA, 273 bp, Glycine max
aaggaatcagtgctgaggtcattaatttgcgttcaatccggccgcttgatcgatccacaatccaatgcttctcccaggaaaaccagaaggctggtgacagttgaagaagggtttcctcagcatggcgttggcgctgaaatctgcacatctgtcattgaagaaagttttggttatcttgatgcacccgttgagagaattgctggggctgatgttcccatgccttatgcagcaaatctggaaagaatggctgtcccacaggttgaagatattgtt

SEQ ID NO: 179857 - DNA, 270 bp, Glycine max
gtgaaacctagctagccacaatgcagatattcgtgaaaaccctaacggggaagacgataaacctaaaaggaagagtcttcggacacgatcgacaatgtgaaggcgaagatccaggacaaggagggcatcccgccggatcagcagcgcctgatcttcgccggaaagcagctggaggacgggcgcacccttgccgactacaacatccagaaggagtccaccctccacctcgtcctccgcctccgcggcggcgccaagaagcgcaagaagaag

SEQ ID NO: 179858 - DNA, 262 bp, Glycine max
tgtatattgatatatctaggtgtgggtggtacgtaattaattagccatggacaaggcacgaattggggttttccttcaggtggctcattctcctttcttctcagatggtggtacaaacagagggaaggcactgtgagtcaaagagccatcggtttaaagggatgtgcctcagtaagcacaactgcgcttcggtttgccatcttgaaggcttcacgggtggcaagtgtcgtggatttcgtagacgctgtttctgcaccaggca

SEQ ID NO: 179859 - DNA, 265 bp, Glycine max
agagtttgttgtgagctataagctagtttatcgtgaggagaatatgaagttgtttgtcttcctctgttgctgcagtagttttggtagcatggccatgccatggcgcaggctaccaaaggttccctctccgaatgaaaactggctatcgtgagcgttcttcggaggtaaaatgcgcaagttttaggcttgctgtggaagcacacaacatccgcgcctttaaaaccattcctgaagagtgcgttgaaccaacaaaggcatacattaa

SEQ ID NO: 179860 - DNA, 262 bp, Glycine max
acaaccgtactgcacaactccaccactgtgcaatggccgacgaggaacctgttgatcagaagagctatcttgaagagtcttgcaaaccaaaatgtgtaaaaccattactagaataccaggcgtgcattaaaaggatacatggtgatgaatctgggcagaaacactgcactggacaatattttgattattggtcttgtattgacaaatgtgttgcaccgaagctattcaccaaactgaagtaaatcgggaaggatttgatggc

SEQ ID NO: 179861 - DNA, 263 bp, Glycine max
gaaaaaagcgatcatagtttcacttcggccttatccagtttagggtttcggttctctaccctatctttcacgtatcgaaaccttaaatttacgatcaggtctgagcaatctggttggtagaacctttggtcttagtgagtcaagttttatgtctgaattagacgatcaaattcctactgccttcgatcctcttgctgatgcaaatgctgatgactcgggtgctgggtcaaaggagtatgtgcatattcgtgtacagcagcgaa

SEQ ID NO: 179862 - DNA, 280 bp, Glycine max
agagtttgttgtgagctataagctagtttatcgtgaggagaatatgaagttgtttggtttccttggttgttgaataagttttggaagcatggccatgccatggcgcaggctaccaaaggttccctctccgaatgaaaactggctatggtgagcgttcttcggaggtaaaatgcgcaagttttaggcttgctgtggaagcacacaacatccgagcctttaaaaccattcctgaagagtgcgttgaaccaacaaaggactacattaatggcgaacaatttag

SEQ ID NO: 179863 - DNA, 278 bp, Glycine max
tgttgatcgagataactagaaacagtgtgatgaaaatgaaggtccttgttttcttcgttggtaacattttcggtagaatggcaatgccatgcgtacgatatgttccctctccgaatgaacactggctatggtgcccgtactccggaggtgaaatgcgcaagttggaggcttgctgtggaagcacacaacatctttgcctttgagaccattcctgaagagtgcgttcaagcaacaaaggaatacatccatggcgaacaatatagatcagactccaaaac

SEQ ID NO: 179864 - DNA, 274 bp, Glycine max
gctcaaccctagtaagccgcaatggtgaagtactcaagggagcctgacaatccaactaagtcctgcaaaggctaaaggcgccgaccttagggttcattttaagaacacaagggaaactgcctttgcaatcaggaagttgcccttggtcaaggctaaaaggtacttggaagatgttcttgcccacaagcaggcaattccattcagacgtttttgtcgaggtgttggaaggacagcccaggctaagaatagacactctaatggccaaggacggtgg

SEQ ID NO: 179865 - DNA, 195 bp, Glycine max
gccatggctgctctgcaatacttggaatcgctgcgcaacgcgcatcctgaggtctccgattggcaaaaattcgctgccggatctataccagaacaagctctggcaccagcttaccctcaagcttgagcagttcgtggctctcgccgtcttccaggccggtgatgcatcaatacaattatatcacaatttcatcac

SEQ ID NO: 179866 - DNA, 270 bp, Glycine max
cgcctcggctagggttcggaaacgaagaagggttctgttttcttttcgcgatgaggggcaagttgaaagaggaagcgtatgaggaggctgaagaggaagcgccgaaagatgagacagagatccaagtagtgcgttaaacctagtttgtttccgttgcttttacaattgcttatgttgtcaaataggacacccagttgttagtggcactggtctctcctttttgatgttttgatacattttgttggattttatttcgtcttatgttcttag

SEQ ID NO: 179867 - DNA, 267 bp, Glycine max
cagaactgaagcggaacccttcttctgcgccagttccagtgtcccactgtgtgcagagtgcaatgattagaaatctagctacctagttagggttaggggttctgcgtttctgcgaagatgactaagttcaggaaattgggtcgacccaccggtcaccgaatgtccatgctccgaaccatggtcacgcagttggtgaagcacgagcgcatcgaaactactgttgccaaggcgaaagagatcagaagactcgcggataatatggtgcag

SEQ ID NO: 179868 - DNA, 266 bp, Glycine max
ctcactcgccgtcgtagggtttctcctttcgtttaccaacaacaacaatggttgcagcccaagaaaaccaagaagacccatgagagcatcaacaacaggctcgctcttgtcatgaagagtggaaaattcaccctcggttacaagacggttctcaaatcacttaggagctccaaagggaaattgattatcattgctaacaactgcccccctttgaggaaatcagagattgaatactatgctatgttggccaaggttggagttcatca

SEQ ID NO: 179869 - DNA, 266 bp, Glycine max
cacagaagcagaaggaggagaagcagaaagaggagacgaagcaatggcgccgaagaaagcccgaaaccactccgaggaaccctgatttggtccaggggaattggcaaatattcgaggtcgcagatgtaccacaagaggggcatctgggccatcaaggccaaaaacggcggtgttttgcccctccacgatcccaagcccaaacccgaggccccggcccagaagccgcccaagttctacccggccgatgacgtgaagaagcccctcgt

SEQ ID NO: 179870 - DNA, 263 bp, Glycine max
  unsure (1)..(263): unsure at all n locations
aagaaggcgtcttcataaacgcctttcttctccgtttccgtttcctcgttcgatttnngtttttcgatctgcgaaaatgagagagtgcatctcgatccacattggtcaggctgctatccaggtcggaaatgcttgctgggagctctactgcctcgagcacggcatcgggcccgatgggcaaatgccaagtgacaagacagttggcggtggtgatgatgctttcaatactttcttcagcgagactggtgctggaaagcacgtgc

SEQ ID NO: 179871 - DNA, 264 bp, Glycine max
tgttgatccatctcttgtttcttgctttctttcttcaccatgtcacttgctgggaaaatcacccatgaaatcggggttcatgcaaccgctacaaagtggttcaacctcttcgcaacacaactccatcatgttcaaaacctaactgatagagtgcatggaaccaagctgcatcaaggtgaagactggcatcacaacgagacagtcaagcactggacttataccatagatggtaaggttacaacatgtctggagagtattgaatcc

SEQ ID NO: 179872 - DNA, 261 bp, Glycine max
gtttggaaaatctgtcccgcagacactatctacacctttcatactcgggacctcagatctatgtgccatgcaacaggactgttctggcgatttacatgcagttgggtctctcctctacgataaagcaggggttgaatccaatttaagtgaaagagaaacagttttggaggtttgtgagactattgtaaagcgaggcgggagcttagctggtgcaggaatagtggggattctacaaaaaatggaagaggaccagagaggtct

SEQ ID NO: 179873 - DNA, 280 bp, Glycine max
attcctcttcccattctagggttcccaaatggacgctggcggaaagatcaagaagggcgccggaggaagaaagggcggcggccctaagaagaagccggtttcaaggtccgtcaacgccggtctccaattccccgtcggaagaattggccgttatttgaagaaaggaaggtacgcccagcgtgtcggtaccggtgctcccgtttacttggccgcagttctcgagtacctagctgctgaggtgcctgagttggctgggaatgctgcacgtgacaacaagaag

SEQ ID NO: 179874 - DNA, 277 bp, Glycine max
cgtcaagcatggacttggatgttaccatttcagaaacggagataggtatgctggagagtactttggagataaaatacatggctttggtgtctaccactttgccaatggccactattacgaaggttcatggcacgaaggtcgtaggcaaggttatggcatgtatatgtttcgaaatggtgatggaagatgtggtgaatgggatgctggcaacctcaaactctctctaccaccacaaaatgatgctatcattcgcacagttcaggctgctaggaaaaca

SEQ ID NO: 179875 - DNA, 276 bp, Glycine max
ccactgaatcatcccctttcaagaaaattcagattcaaagggatgacactacatttgacgcatatgtggttggaaaagaggatgctcctggaattgttgtgattcaggagtggtgcggtgtggattacgaaattaagaaccatgccgtgaagatttctcagcttggtagtgggtttaaagctcttattccagatttatacagaggaaaggttggtctggatgttgctgaagctcagcatttgatggatggtcttgattggcaaggtgctgtgaagg

SEQ ID NO: 179876 - DNA, 237 bp, Glycine max
gtgtgttagtatagtgtccaaaggcacgcagcgagtttatgctcggcgggatcatcacgagattgcaaaatgaggttcgacattgcaaatcccagcacttggttccataagaagctggaaatcgattacgacctgaagcttcgggcattgtgggacaagaggatctcccaggatgtccttggtgacgccctgggtgaggagtttaaaggatatgttttcagaatcactggtgggtgt

SEQ ID NO: 179877 - DNA, 176 bp, Glycine max
aattaataacaagctagctattagttcgattttgtagtaagtgaggtgccaatatggtgaagatagctcttggtactttggatgactcttttagcgctgcctctcttaaggcttatttcgcagagttccacgcaactatgattcccgtgttcgctggtgttggatcagccatcgct

SEQ ID NO: 179878 - DNA, 271 bp, Glycine max
cttcaatttataagaatggcactttctcctattcgttcttcttcactctcttcatcagctattgttgcattggctgtgttactgcttcttacagggacctcttcagctaacctctcaaagaacttctattccaagacatgtcccaacgttttcaacactgtaaaatctgcagttaaatctgctgttgtcagagaacctcgcattggggcatctattgttcgtctcttcttccatgactgctttgttcaaggctgtgatgggtcaatactac

SEQ ID NO: 179879 - DNA, 271 bp, Glycine max
ctttgcagattgattacatccttggaaataacccaaggaaaatgagttatgtcgtacgttttggtaatcattacccaaaacacgtccaccatagaggagcatctgtaccgaagaacacagatcaagtatagctgtaaaggtggatggaaatggagggacacttctaagccaaacccaaatacaattgttggtgccatggttgccggtcctgacaagcatgatggcttccatgatgttcgtacaaactacaattacacagagccaacacttg

SEQ ID NO: 179880 - DNA, 265 bp, Glycine max
gcacgacactgagcatcagcaatggcaagcgcaagtgttggtaaagaactgacgctgtattcgtattggaggagctcttgttcccaccgagtccgaatcgctatcaacctcaaagggcttaaatacgaatacaagcccgtcaatctgctcaagggagaacaatctcgccctgagtttctccagctcaatcctgttggttgtgtccccgttctagtggatgaccacgttgttctctatgactctttcgccattactatgtatttgg

SEQ ID NO: 179881 - DNA, 265 bp, Glycine max
gcactcttcgttcttcgactgtctacgatctgctttctctgaattgtgaaaatgtcgctcggagaaactgcttgttcatacgcagctctcatccttcatgaagatggaattagtgtaactgctgacaagatcagcaccttgttgaaaactgcaaaggttccagtagactcttattggccaaccttgtttgctaaacttgctgagaagaaaaatcttggcgatttgatagcaaatgcggcaggcggtggtgcaccagttgctgttg

SEQ ID NO: 179882 - DNA, 284 bp, Glycine max
cttcaagattcaggtactgcgtttcggaagcagacacagatggctcgtacgaagcaaaccgctcgtaagtccacaggaggaaaggctcctaggaagcagcttgcaaccaaggctgcacgtaagtctgcaccaactactggtggtgtgaagaagccccaccgttatcgtactggtaccgttgctcttcgtgagattaggaaataccagaagagtaccgagcttttgatccggaagctccccttccagaggctggttcgtgaaattgctcaggacttcaagactga

SEQ ID NO: 179883 - DNA, 277 bp, Glycine max
cctcgagccgaatcggctcaggctaagccttataaataataagaccaaaaaaaaaaaaacaccaaacaacgagagagacaccatgggttcaatttcagaatccgaaagtgtttgcgttacaggagcctctggtttcatcgggtcatggcttgtcatgagactcatcgaccgtggctacacggtccgacccactgtacgcgatccagctaacatgaagaaggtgaagcatttggtggagcttccaggtgcaaagaccaatttgtctctgtggaaggct

SEQ ID NO: 179884 - DNA, 279 bp, Glycine max
cattctcccatttcctctcagaaccctcgatcactcccacgcgctcctatatcctctccttcaccgtcgctctctccaacgatcacaacaacatcgtcatcccatggcaaacgccgcatctggtatggcagtccatgatgactgcaagttaaggtttttggagctgaagacaaagaggacacaccgtttcatagtttttaagattgaggagcagcagaagcaggtcattgtggagaagcttggtgagccagcccaaggctatgaagatttcactgccag

SEQ ID NO: 179885 - DNA, 269 bp, Glycine max
atcggcgcggcacccacacacacagttcgtcggaatgggaagggtgattcgcgctcagcgtaagggttctgggtcggtgttcaagtctcacactcaccaccgcaagggtccggcgaggttccgcagcctcggcttcggcgagcgcaacggctacctcaagggcgtcgtcaccgacatcatccacgaccccggtcgcggcgcccctctcgccaaggtggcattccgccaccccttccgctacaagaagcaaacggagctcttcgtcgccg

SEQ ID NO: 179886 - DNA, 268 bp, Glycine max
tttacaccgagcagccacacctcccgcagcagccatggttctcaaaactgaactatgccgattcagtggtgccaagatctacccaggaaagggcatcagatttgttcgttgtgattcttaggttttcctgtttgcaaactcaaaatgtaagaggtatttccacaatcgcctgaagccttcaaagctcacctggactgcaatgtacagaaagcaacacaaaaaggacattgctcaagaagctgtgatgaagaggagacgtgctgccaaa

SEQ ID NO: 179887 - DNA, 265 bp, Glycine max
caagagatattgttcatggtacccatgtatgttatactactcaagagatattgttaattacatatgcaatgatgaagatataaaagctgtatcgtttgttggtccaattacagctggaatatatgccacagcttctgctagagggaaacgagttcagtcaaatgcaggtggcacaaatcatgtacttgtaatgcccgatgctggcttggatgcgactttagatgcccttgttcctgctggctttggtgctgcaggagagaggtgc

SEQ ID NO: 179888 - DNA, 264 bp, Glycine max
cagagaagcaagcggctcttgccgtcactccctctgatgctgatgctcctaccatatttgacaagatcatcaataaggagattccttctactgtggtttatgaggatgacaaggtgcttgccttcagggacataactcctcaagctcctacacatattcttatcattcctaaattcaaagacgggttaagtggtctatccaaggctgaggagaggcactttgagattcttggccgccttctgtacactgccaagctggttgcga

SEQ ID NO: 179889 - DNA, 90 bp, Glycine max
aacatggcttccttaagctcgttagtgctgctccttgcagctctaattctatgccctcaagttcttgcaaactatgagaatctcccagtg

SEQ ID NO: 179890 - DNA, 280 bp, Glycine max
cttcccttctccaacatgccaaacgacagcgttctcagtcttttcttcttcgttaccctcttcacatgccttctctctgctaattcccacgatgaccatattttcctaccgagtcaactccatgacgatgactcagtgagttgcactgctaccgacccaaaccttaactacaagccggtgatcggaatcctgacccaccccggcgacggtgcctctggccggctcagcaacgccaccggggtttcttacatcgccgcctcctacgttaaattcgtggagt

SEQ ID NO: 179891 - DNA, 276 bp, Glycine max
tgagcagcttctcttctttgccacccttgtgtggaggcacttatttggcagcaaaaatggtgggaattcaccctcaatgaagaagccttacattcctgactacaaactagcctttgagcacttttgtgtgcatgctgcaagcaagaccattcttgatgagcttcaaaggaacttggaactgagtgacaagaacatcgaagcgtctagaatgacgctgcatcgctttggcaacacctctagcagcagcatttggtatgagttggcttacatggaagc

SEQ ID NO: 179892 - DNA, 274 bp, Glycine max
tcctcggcggcgcaggggagagaggattgacgattgaggggaagttcataaagttcacaggcataggagtatacttggaggataaggcggtgccatcactcgccgctaagtggaagggcaaaacttcagaggagttagttcacaccctccacttctacagggatatcatttcagggccgtttgaaaagctaattagagggtcgaagattctgccattggctggcgctgaatactcaaagaaggtgatggaaaactgcgtggcacacatgaagtc

SEQ ID NO: 179893 - DNA, 270 bp, Glycine max
tgatcgagataactagaaacagtgtgatgaaaatgaaggtccttgttttcttcgttgctacaactttggtagcatggcaatgccatgcgtacgatatgttccctctccgaatgaacactggctatggtgcccgtactccggaggtgaaatgcgcaagttggaggcttgctgtggaagcacacaacatctttggctttgagaccattcctgaagagtgcgttgaagcaacaaaggaatacatccatggcgaacaatatagatcagactcca

SEQ ID NO: 179894 - DNA, 248 bp, Glycine max
agtttaccgtatgtcattatagtttccaaaggcacgcagcgagtttaggcgcggcgggatcatcacgagattgcaaaatgaagttcaacattgcaaatcccaccactgggtgccagaagaagctggaaatcgatgacgacctgaagcttcgggcattttgggacaagaggatctcccaggaggtccttggtgacgccctgggtgaggagtttaaaggatatgtctacgaaatcactggtgggtgtgac

SEQ ID NO: 179895 - DNA, 271 bp, Glycine max
agctgctgttcttgcgcgtgaacaagcctcaggtaagccaaaaccatggttaagcataacaatgttatcccaaacggacacttccgtaagcactggcagaactatgtgaagacttggttcaatcagccagcacggaagacaaggagacgattggctcgtcagaagaaagctgtgaagatattccccagacctacggctggacctctcaggcccattgtacatggtcaaactttgaaatacaacatgaaagtgagaggtggaaggggatttt

SEQ ID NO: 179896 - DNA, 266 bp, Glycine max
ccaaagcaatggctacttcaaagttgaaaacccagaatgtggttgtatctctctccctaaccttaaccttggtactggtgctactgaccagcaaggcaaactcagcggaaactgtttctttcagctggaacaagttcgtgccgaagcaaccaaacatgatcctccaaggagacgctattgtgacctcctcgggaaagttacaactcaataaggttgacgaaaacggcaccccaaaaccctcgtctcttggtcgcgccctctactcc

SEQ ID NO: 179897 - DNA, 269 bp, Glycine max
cagactaggagctgcccaaaattgctctgccactcttaacggcaaccacaagctcaccgatgctgttcttcctccaacgaaagactggagaaaagaaggtatagtgagttcagttaaagatcaaggcagctgcggatcatgctggacattcagcacaactggggctttagaagcagcctatgcacaagcatttgggaagagtatctctctttctgagcagcagctagtggactgtgctggccctttcaacaactttggctgccatggtg

SEQ ID NO: 179898 - DNA, 265 bp, Glycine max
  unsure (1)..(265): unsure at all n locations
agggtttacagagaagcgaagaggcgcacgngagcagtaactcgtggaattgctagcaatggcgaggatcaaggtttacgagctgaggcagaagacgaaggctgatctgttgaatcagctgaaggacctcaaggccgagcttgccttgcttcgtgttgctaaggtcaccggcggtgcacctaacaagctctctaagatcaaggtggtgaggttgaacattgcccaggttttgacggtgatttctcagaagcagaaggccgcgttg

SEQ ID NO: 179899 - DNA, 264 bp, Glycine max
gggtttcttcggctgcgtgctgatgctcttgttttctcacagtcacacaacagcagtgggaacaatcacagatggagtgaacaacatcaacatctctgattcttacaagaagaatcgcattcaggtctccaacaccaaaaatcctctcttcttctacgtcaatctcgccaagaggtatatgcagcagcataatgaggttgagctctcagcactaggaatggctattgctacagtggttactgttgctgaaatcttgaaaaacaa

SEQ ID NO: 179900 - DNA, 262 bp, Glycine max
cggctcgagtggagacaaagcagtgatgtgtcataggctaaatttcagaactgcagtattttactgccatgaagtccgtgaaacaacagctttcatggttccattggtggctggtgatggaaccaaaactcaggcacttgctatttgccactcaaatacttctggaatgaatcatcaaatgcttcatcaacttatgggagttgatcctggaactaaccctgtttgccatttccttggaagcaaggccattttatgggtacca

SEQ ID NO: 179901 - DNA, 222 bp, Glycine max
cggctcgaggcttccttaagctccttagtgctgctccttgcagctctaattctatcccctcaagctcttgcaaactatgagaagtacccagtgtacaagcctcccactgagaaaccaccagtttataagccaccagttgagaagcctcctgtttacaagcctccagttgaaaagcctccagtttataagcctccagttgggaagccaccagtgtacgagccc

SEQ ID NO: 179902 - DNA, 271 bp, Glycine max
ctggttttctcttcctcgttcgtttcatttcgtttcgttgaagagcaacttttctctctctgtctctgtacaattctcccttttcttccctcgtagatcgaaagggaatattcttccatggcctccaagcggattctgaaggagctcaaggacctacagaaagaccctccaacctcttgcagtgccggtcccgtagcagaagatatgtttcattggcaagcaactataatgggtcgccctgatagcccttatgctgggggtgtttttctag

SEQ ID NO: 179903 - DNA, 263 bp, Glycine max
gttccaatacggaatctaaggcaaagcaaaccaaacatcttgaatcatgggttcaacaggtgagactcagattaccccaacccacgtatctgatgaagaagcaaaccttttcgccatgcaactagccagtgcttctgtccttccaatgatcctcaaatcagcacttgagcttgatctgttggaaatcatagccaaggctggccctggtgttcatctttcccccactgacatttcttctcagctcccaacacagaaccctgatg

SEQ ID NO: 179904 - DNA, 259 bp, Glycine max
cagaaaacagcatcgaacccgtcgtagcagaaaaacttgtcaccatggtttcttccgacaaggatccacgagaggatgtccttcaagcctggtacatggatgatagtgatgaagatcaaagactcccccaccacaaagatccttttgagtttgtctcgttggaccaacttgctgaacttggagtccttagctggaaactatatgctgataaccatgaaaatgatccagagctgaagaagattcgtgaagagcgtggtta

SEQ ID NO: 179905 - DNA, 263 bp, Glycine max
aaactttgaagggacacctttgtttcccagtgatcctgccaagaaagagttcggtgagcaattgatatcccatgttgatacattcagcaaagacctgttcgtttcattgaatcgggatgctgtacagcaagccagtcccgcttttgaatacttggagaatgctcttggtaaatttgatgatgggccattcttgcttggccaattcagtttggtggatattgcttatattccatttgttgaaagattccaaattgtctttgctg

SEQ ID NO: 179906 - DNA, 263 bp, Glycine max
ctccatccaacatcgaaacaaggtcgttttgtgttccgccgaagacccggacgttgtagcaggctagcagctatggatttggcatccaatctcggtggcaagattgacaaagccgaagttctctctgccgttcagaagtatgagaagtatcatgtttgctatggaggtcaagaggaagagaggaaagctaattataccgatatggttaataaatactacgatcttgttaccagcttttatgagtttggctggggggaatcttt

SEQ ID NO: 179907 - DNA, 260 bp, Glycine max
cttgacagacaatggcggtgcctctgctctcaaagaagatcgtgaagaagagggtaaagaagttcaagaggcctcagagtgacaggaaaatttccgtcaagactaactggcgcagaccaaagggtatcgattctcgtgttaggagaaagttcaagggatgcactttgatgccaaacattggttatggttcagacaagaagacccgccactatctccctaatggtttcaagaaatttgttgttcacaatgtgaaggatttg

SEQ ID NO: 179908 - DNA, 268 bp, Glycine max
cacgccgtcgtcgctgtttttgtgtgtcgctatcgcgtaggtgcagctgcaatggtgaagggacgccaaggagaacgtgtcagactctacgtgaggggtacaatccttggatacaaaaggtccaagtcaaaccagtatccaagtacatccctgatccaaattgagggtgtgaatgccaaagaagaagtagcatggtatgctggcaagaaaatggcctatatctacaaggctaaggtgaagaagaatggaagccattaccgctgcatat

SEQ ID NO: 179909 - DNA, 263 bp, Glycine max
ctgagtttccacactgcataccttaggtcttccgaattcgaagttaatttgcaagatggctaaggaaaaggctcagatcaacattgtggtggttggtcatgtggaccctgaggaggcaaccaccattaacgagctgaagaagcctgttgtggagaaagaagctccagggcatgccatatgagggcatgcacgtacggcctcggaggggaaccagaaaattatgttaacaaaataatctggaaccctaatgtatcagtgtcatc

SEQ ID NO: 179910 - DNA, 262 bp, Glycine max
gtgaagagagaagaagatggcgtcgagcggagcgatgccgttttggagggcagcggggatgacatacatcacatactcaaacatatgcgcgaatctggtcaggaattgcctcaaggaaccctacaaggctgaagccatctctcgtgagaacgtccattttgctctctccaaatgggtcgacgccaagcctgaaaaacctactattcgttcagacaccccagagcagtgatccggaatagttggaagctataaatgcataaat

SEQ ID NO: 179911 - DNA, 261 bp, Glycine max
cggctcgagcaagctagctaggttgaaaatagtttggttttgtagtaagtgaggtgaggtgccacaatggtgaagataactcttggtactttcgatgactcttttggtgttgcctctcttaaggcttatttggcagagttccatgcaactctgattttcgtgttcgctggtgttggttcagccatcgcttacaacgagcttacaaaagatgcagccttggatccaacggggctggtggcagtagctgtggcccatgcattt

SEQ ID NO: 179912 - DNA, 262 bp, Glycine max
gctccttctctcatcactcatctatggctacctttccctcccctccttcaccatcttcttcttcttcaattccgtctccaagatctagaatgttttactatgctggaagtgaagaccactatgaggagcctcacttcctccaagcttgttttctttgcagaaaaccactaggccaaaatcgtgacatcttcatgtacagagggaacacaccattttgtagcaaagagtgcagacaggagcaaatagagattgatgaggcaaa

SEQ ID NO: 179913 - DNA, 263 bp, Glycine max
ctttcatcattcatcgcctttcaccacgcacgcagatcctttattacctataatccttccttcgctctctccaaatttcgactctttcgatcagatccgcgacacccaccccaccaaaaccttgcgcaacccatccatgacgcttggctcaggaggatccagtgtcgttgttcctaggaacttcagattgctggaggagcttgaacgtggtgaaaaaggaattggagatggcacagttagctatggaatggatgatggtgatg

SEQ ID NO: 179914 - DNA, 277 bp, Glycine max
gtgagtttgttgatcgagataactagaaacagtgtgatgaaaatgaaggtccttgttttcttcgttgctacaatcttggtagcatggcaatgccatgcgtacgatatgttccctctccgaatgaacactggctatggtgcccgtactccggaggtgaaatgcgcaagttggaggcttgctgtggaagcacacaacatctttggccttgagaccattcctgaagagtgcgttcaagcaacaaaggaatacatccatggcgaacaatatagatcagact

SEQ ID NO: 179915 - DNA, 275 bp, Glycine max
gcaagaatggcacttcgttgcttggtgatgtccctttctgttctcttcactcttggtcttgcgagagaaagccatgccagacacgaagatttttggcatgctgtttggccaaacactcccattccaagttcattgcgagatcttctaaagcctggccctgcaagtgtacgaaatcgatgatcaccctatgcaaattgaagaaacacagtacccgaaaaccttcttctataaagaagaccttcatccaggcaaaacaatgaaagtacaattcagcc

SEQ ID NO: 179916 - DNA, 265 bp, Glycine max
gtttgttgttgtaactcgttcttcttcttttgttgttctgtgtttgtgtttgtcttttctctcacctgaaaatgtcttgctgcggtggtaactgtggttgcggaagctcctgcaagtgcggcaacggctgcggaggctgcaagatgtacccagacttgagctacactgagtcaaccaccaccgagaccttggtcatgggagtggcacctgttaaggctcaatttgagggtgctgaaatgggtgtgccgctgagaacgatggctgc

SEQ ID NO: 179917 - DNA, 268 bp, Glycine max
aaatcttaaaaatattcagtgaagatcaacctcaatggcatctcttggcgtgcgaccagttcttccccctccattaacttccatctccgacccacctcctcttttcgatggcaccaccaggttgtacatcagttattcttgcccctatgcacaacgtgtgtggatcgctaggaactacaaggggctacaagataagatcaatttggtccctattaaccttcaagacaggccagcttggtataaggagaaagtctaccctgaaaataag

SEQ ID NO: 179918 - DNA, 267 bp, Glycine max
cactaactaaagccgagcagcgagagagagaaaccctagcaaaaatgccggctggtcacggtttgagatcccgcaccagagattccttctctcgtcccttcaggaagaagggtaccatcgccctcaccacatacctcagaacctaccacgtcggcgattatgtcgacgtcaaggttaacggcgccgtccacaagggaatgcctcacaagttctaccatggccgcaccggtcgcgtctggaatgtcaccaaacgtgctgttggggtcg

SEQ ID NO: 179919 - DNA, 266 bp, Glycine max
ctccgctttcacttcttctctctcaccctccaactatgagttactacaaccacgcagcagccacccgtcggtgttcctcctccccaaggttacccaccgccggaatcttacggaaaggacgcgtaccctccgccagggtaccctccacagggaggataccctccgcaggcgtatccagcacaggggtaccctccaccctacgcgcctcctcagtacgctcagcctccgccgcaacaacaccagaattcatctggcccgggttgctt

SEQ ID NO: 179920 - DNA, 262 bp, Glycine max
tcgaaacgaggtcgttttgtgttccgccgaagcaccggaggttgtagcaggctagcagctatggatttggcatccaatctcggtggcaagattgacaaagccgaagttctctctgccgttcagaagtatgagaagtatcatgtttgctatggaggtcaagaggaagagaggaaagctaattataccgatatggttaataaatactacgatcttgttaccagcttttatgagtttggctggggggaatctttccattttgcac

SEQ ID NO: 179921 - DNA, 258 bp, Glycine max
gttctgagaaatgttgaatagttgaaaattcagtttgtcatttttatcttttatttttcctccttttttggtctttgttatatgtcactgtaaggtgaagcagttgttcttgcatggttcgcaagttaagcagttaggggcagctgtagtattagaaatggtatttttttttttggtttcgcttttctctgtggtagtgatgtctgtcgaagtataagtaaacgtttttttttctctggacattttgatgataaagaa

SEQ ID NO: 179922 - DNA, 260 bp, Glycine max
gcttctctccacgcccttcttgggtaatctgaagtgcagcggtggcggatggattgcactcgcggcatccatcagtagttcagaagttatctggacagtcttatttgttgtctaggcttgcccctactcactcaagaaactattccacaactggtagttacttcaatggaggcttgcagtcttcgggtttggttccagtcatggcacatgcaccggctgagaaaggagtgtctggatttttgttggatttcatgatggga

SEQ ID NO: 179923 - DNA, 251 bp, Glycine max
tgaagatgtcgactccggctaggaagagactgatgagggattttaaaagattgcaacaagatcctcctgctggcatcagtggggctccccaagacaataatattatgctttggaatgctgttatctttggcccagatgacaccccttgggatggaggtacgtttaagttgacacttcagtttacagaggattatcctaataaaccacctactgtgcgctttgtttctcgaatgtttcatcctaacatttat

SEQ ID NO: 179924 - DNA, 197 bp, Glycine max
cgaggtgtttcagcagctgtctcaaaaactgctgctgctcccattgaacgtgttaagcttttgatccagaaccaggatgagatgatcaaaactggtagactttctgcgccctacaagggtattggtgattgctttaagagaacaatggcagatgagcgtgttgtttctctatggagaggaaacactgcaaatgtcat

SEQ ID NO: 179925 - DNA, 230 bp, Glycine max
cttgggagcagaggtcgagtttcacagcagcaatggtgaacgtcacggctcagaaatcaaaagcctacttcaagacatatcaagtcaagttcaagagaagaagagagggaaaaaccgattaccgtgccaggattcggttgattaatcaggacaagaacaaatataacactccgaaataccgatttgttgttcgctttagcaacaaggacattgttgcacaaatactatct

SEQ ID NO: 179926 - DNA, 265 bp, Glycine max
cattgcaagactggcacttcgttgcttggtgatgtcctttctgttctcttcactcttggtcttgcgagagaaagccatgccagacacgaagatttttggcatgctgtttggccaaacactcccattccaagttcattgcgagaccttctaaagcctggccctgcaagtgttgacatcgatgatcaccctatgcaaattgaagacacacagtaccggaaacctctgtccaatacagcagccttcatccaggcaaaacaatgaacgt

SEQ ID NO: 179927 - DNA, 266 bp, Glycine max
ctttgttgtgagctataagctagtttatcgtgaggagaatatgaagttgtttgtcttctttgttgctgcagtagttctcgtagcatggccatgccatggcgcaggctaccaaaggttccctctccgaatgaaaactggctatggtgagcgttcttcggaggtaaaatgcgcaagtcttaggcttgctgtggaagcacacaacatccgagaccttaaaaccattcctgaagagtgcgttgaaccaacaaaggactacattaatggcg

SEQ ID NO: 179928 - DNA, 268 bp, Glycine max
ccaaagttgcagagaaaagctgaggtgaatcgtgtgcagaaccttgtggataaattagattctctaaaggcaaggaacgccaacccttttagcaacagtagcaatgctgtcaaagtaacaacccaatgggaaacctttgactctggaatggaaagcttggatgctccatccgataacccgtcttccacaaaagtaactcaagaatgggagcggtttgattagctcggaaaccgtttttggaacatctaagttataaatgttgtacaac

SEQ ID NO: 179929 - DNA, 269 bp, Glycine max
cgaatggctttcctttgaaggttgttggggacactaactcttttgactctacttcagagctaactgtgaatcaaagtttcgattactacactaaaaatgacagcagtaaggagtacaatggtccctatgacttaactatcaaagttactgaaaaaggtataccaaaaggaagatatggcacaggggagcttgtttacttgggttagcgatgatgtattcagaaagcctacatttgcccgttttctttcacttttagataattacaatcc

SEQ ID NO: 179930 - DNA, 274 bp, Glycine max
agcaactgcgattttggatcggaacctcttctgcggcgtacaacgcggacactccaacgtttggaattctcacccaaaaaactacggtcctggttctcgcacttgccgagtgtgtgggaatccacatggactcatcaggaagtatggccttatgtgctgcaggcagtgcttccgtagcaatgccaaggaaattcgcttcatcaagtatcgctaaaagagctgttgtcacctacggaccaatattatgttctggcactaggatgttactgaagat

SEQ ID NO: 179931 - DNA, 242 bp, Glycine max
ctcggcgcggcacccacacacacagttcgttcggaatgggaagggtgattcgcgctcagcgtaagggtgctgggtctctgttcaagtctcacactcaccaccgcaagggtccggcgaggttccgcagcctcgacttcggcgagcgcaacggctacctcaagggcgtcgtcacggacatcatccaggaccccggtcgcggcgcccctctcgccaaggtggcattccgccaccccttcggctac

SEQ ID NO: 179932 - DNA, 144 bp, Glycine max
gctcgtgcctctagggttatcatatctccatttccatttcctctctctcagtttccaagaatcttaagctatgggaaagtcttacccaaccgtgagcgctgattaccagaaggccgttgagaaggcgaagaagaagctcagagg

SEQ ID NO: 179933 - DNA, 269 bp, Glycine max
cggtaacaaccctgacactccttcttctccgcttcgtcttcgatcatcgcttcagaatgccgccgaagttcgacccctcccagatcgtcgacgtcttcgtacgcgtcaccggcggtgaggtcggcgcggcgagttccctccccccgaagatcggtcccctcggtctctcccccaagaagatcggagaagatatcgccaaggaaaccgccaaggactggaagggcctccgcgtcaccgtcaagctcaccgtgcagaaccgtcaggccaag

SEQ ID NO: 179934 - DNA, 204 bp, Glycine max
aggggcaactcatctttgtcttcaattttcattggaccaacagctattcagattacagagttggctgctcaacccctgggaaataataagattgtcttggattcagatgatgccttgtttggtggcttcagtaggctcaatcacgctgctgagtacttcatcacaaagatggtatgatgaccgacctcgatcctttcttatcta

SEQ ID NO: 179935 - DNA, 118 bp, Glycine max
tccgcgactaccgctccaagatcgaggccgagctctccaacatctgcgacggaatcctcaaactcctcgacacgcgcctcgtcccctccgccgcctccggcgactccaaggtcttcta

SEQ ID NO: 179936 - DNA, 201 bp, Glycine max
acgctttgtgatctgcaagctacgatgggtaagggaacggggagtttcggtaagagaagcaacaagacccacaccctctgtgtgacgtgtggccgccgcagtttccacctccagaagagtacatacgccgcgtgcgctttccccgctgcgcgcaccaggaaatataactggagcgtgaatgccattaggagaaagaccacc

SEQ ID NO: 179937 - DNA, 145 bp, Glycine max
ctcacttcaagggcaagtaccatgatgagctcattcgccaatgctgcttacattggcactcctggaaagggtattcttgctgctgatgagtcaacagggacaattggcaagcgtttggccagcatcagtgtagagaatgttgaat

SEQ ID NO: 179938 - DNA, 124 bp, Glycine max
atcgagataactagaaacagtgtgatgaaaatgaaggtccttcttttcttcgttgctacaattttcgtagcatggcaatgccatgcgtacgatatgttccctctccgaatgaacactggctatg

SEQ ID NO: 179939 - DNA, 263 bp, Glycine max
cattcctcaatttttttggccccagtttggaaatatgatggtggaaaagactcagtgttgcaagtgagcaaagagaactatgtgaattgcagcatctcaaaccccataaaggagtacaatgatgataccacaaaggttcagcttgagcatccagggccattctacttcatcagtggtgcaaagggtcactgtgagaagggtcagaagcttgttgtggtggttttgactcaaagagaggaacaaggttcactggttttgctgca

SEQ ID NO: 179940 - DNA, 267 bp, Glycine max
ctcgcattgaaaagcagcaccatcaccaccccctcgtcttccccccttctttcatagatatgcgtctctgcgacatgttcaccaccacctccttgttcacatcatcatcatcatcatcatcatcatcttcttcttcttcaatcagttgactcttcgttcctccctctattgatctgatggagcccatggacatcgttgggaaggccaaggaagacgcttctcttcctaaagcgacaatgacgtcaattattaaagagatgttgcccc

SEQ ID NO: 179941 - DNA, 181 bp, Glycine max
cgcgagacacagagagagaatggcagcacttggtggcaatcgtgatgtggcatgctgtcagatcagccatgatatcgatggtttagctcgctttgctgttgaagaacatagcacttgacagaatgcccttttggcgtttgaaaaggtagtaagtgcaacacagctagtggtttctggtacc

SEQ ID NO: 179942 - DNA, 254 bp, Glycine max
cggccaacaatggcgtccttcgatgaagctcctcacggaaacaccaagaacggcgagaatatcttcactaccaagtgcgctcactgcaacaccgtcagcaaaggtgccggcgtcaaacaactacccagatctgaatggtttgtatgacggacagctcaggtggaactcccggatatgccgactctactgctgacacatacatgaccgtagttcgtgaagaaaataggctctcgtgactacttgatcaaggccaa

SEQ ID NO: 179943 - DNA, 255 bp, Glycine max
caggcttcttttttttgtgtgtcatatggtattggaaaggatactgtataatgggatatccaattaattattatctgttgcaatctttcttgtgttacttccacagtcccacaacacatagggtcctaactcataagtgcccccattttaaaattttgggtcagcatctggtggtcctataggaactagaaatgtcattgtagcaacattattctcttggaaagaacatttttcattacagctataatggcgcat

SEQ ID NO: 179944 - DNA, 265 bp, Glycine max
cggttttccaattcacagagcaacacaacgaaccaacaatggcgcagctcagccgcagtcgcagccgcagcacgggcaagcagcgctggagcaggtgcagtgcttcggtcgcaagaagaccgccgtggccgtgacctactgcaagcgcgggcgcggtctcatcaagatcaacggctgccccattgagctcgtggagccggagatcgttgcattcaaggccttcgagcatatcctcctgttgggtaagagccgcttcgccggcgtc

SEQ ID NO: 179945 - DNA, 262 bp, Glycine max
aacggagttctctcgtcaggtcaccatctagactgtaatcatcgctgatggagcacagcatcgatcagttgttcagaagctagctggacagtcttacctggtgtccaggcttagccccaactttaactctaggaattattctgcaactggttcttacctcaatggcggaatgcactcgcctgggttggctgttgtgtcacctgtatctccagttactgtgcatgctccagcagagaaaggagtgagtggatttctagtggat

SEQ ID NO: 179946 - DNA, 198 bp, Glycine max
tccattctctgtctgtctctctctctctcgatcaatcatggctttgcccaatcagcaaaccgtcgattagcctagtatcaaactcgtcatcgtctgtgacatgtgtacagtaaaaacaacgttcgtgaaaaggatcttaccgtagtattttagaatgtatacgaaccgaccattggagtggaggttcacccattggat

SEQ ID NO: 179947 - DNA, 236 bp, Glycine max
  unsure (1)..(236): unsure at all n locations
cgccatggctgctctgcaatacttggaatcgctgcgcaacgcgcatcctgagctctccgattggtccaattcgctggcggatctataccagaacaagctctggcaccagcttaccctcaagcttgagcagttcgtggctctcgccgtcttccaggccggtgatgcattaatacaattatatcacaatttcatcacagactttgaacccaaaatcgaccttccnaagttgcgcattt

SEQ ID NO: 179948 - DNA, 264 bp, Glycine max
caaaaatggcggtgcctcttctctcgaagaagatcgtgaagaagaggctcaagaagttcaagaggcctcaaagtgacaggaagatttctgtgaagacaaactggcgcagaccaaagggtatcgattcccgtgttaggagaaagttcaagggatgcactttgatgccgaacattggttatgcttcagacaagaagacccgccactatctcccgaatggtttcaagaaatttgttgtacacaatgtgaaggatttgaaactgctca

SEQ ID NO: 179949 - DNA, 163 bp, Glycine max
cgcaagatgtcgaagagaggacgcggtggttcggcggggaacaagttccggatgtcgctgggtctgccggtggcggcgacggtgaactgcgccgacaatacgggggcgaagaacctctacatcatatcggtgaaagggatcaaagggcgtttgaaccgtctcc

SEQ ID NO: 179950 - DNA, 264 bp, Glycine max
aagaggcagtgcagtggttctactactttgcttcttgctgcttcactctcagatggctcgtgctgccacctacacagttggagattctgggggttggacctttaacactgttgcctggcccaaaggaaagctctttcgggctggtgacacacttgctttcaattatagccctgggactcacaatgtggtggccgtgaacaaggctggatatgatagctgcaagactccaagaggagccaaagtgtataagtcagggacggatca

SEQ ID NO: 179951 - DNA, 93 bp, Glycine max
cgagataactagaaacagtgtgatgaaaatgaaggtccttgttttcttcgttgctacaattttcgtagcatggcaatgccatgcgtacgatat

SEQ ID NO: 179952 - DNA, 278 bp, Glycine max
cggcaatcggctcgagcgcgttctatatgttattgaattgacaatgaggcctgctcttggtttgcttcctcttctatttgccttcttgttagctgccactacagaatcaagaaaagatacaggggaatattggaaaatgatcatgaaagatcaggaaatgccagaaggacttcaaggtcttgtttcatttcaatctgaagataaccctaagactcaagagcagcttggtaaaggttccaaaaaccattgtgaagagtctctagttacaaatacacaag

SEQ ID NO: 179953 - DNA, 264 bp, Glycine max
ctcgaagtccatcccaaggacacatttgtgttcagtatagatggcaccgtactctctaatattccatactacaaaaaacatggatatggggtggagaaatttaactcgaccttgtatgatgaatgggttaacaagggcaatgcaccggcactgcccgagactcttaagaattacaacaagctggtgtctcttggctcaaggattatattcttgtcaggaagaacactggacaaacaggccgtaacagaagcaaacttaaagaag

SEQ ID NO: 179954 - DNA, 258 bp, Glycine max
ctcttctttcattcaagctttgtgagtgattcttagaaatcgatctctagctacaatgaacgattgggctcctcctctcatagctgcggctttgttttggctcttgagcccgggaatgatctttcagttgccggggaagaatgcaccctttcagtttatgaacatgaagaccactgttgcatccatgtttgtgcacactgttatttatggtctgtttctgatgttgttcttcgttgttcttagtatccatctttatat

SEQ ID NO: 179955 - DNA, 262 bp, Glycine max
accagtttcactgcataaatttgagagacaactctgcaaacatgttggtttatcaggacctccttacaggtgatgagcttctctcggactccttccgttacaatgaaattgagaatggaatgctgtgggaagttgaggggaagtgggttgttaagggagcagttgatgttgacattggtgcaaacccttctgctgagggtggagaagatgagggagtcgatgacgcagctgttaaggttgttgacattgttgatacattcag

SEQ ID NO: 179956 - DNA, 90 bp, Glycine max
ctcattaattgcaagaatggcacttcgttgcttggagatgtccctttctgttctcttcactcttggtcttgcgagacaaagccatgccag

SEQ ID NO: 179957 - DNA, 271 bp, Glycine max
cttgggaggaggcactgtggcagaagtcctaggagtgtaaaacagacacgcaaaatgaagacgatcttgtcgtctgagaccatgaatattcccgacggcgtgagcatcaaggttcacgctaagggtatcgaggttgaggggcctcgtggaaaactcgtgcgagacttccaccatctgaaacttggacttccaacttattaccgacgatggcggtaaaaggaagctcaagattgattcttggtttggttctcgtaaaacctccgccgccatc

SEQ ID NO: 179958 - DNA, 199 bp, Glycine max
cctcgagccgaatcggctcgaggcggttccgcacgaagttcagccatcgcgcagaaggagaagataccacaagttcgcggagaaagcacggtgcaagattcagaagcgcgacgaggatttgattcacgaaatttgcaacgaagttggcgttgatagaaggttctcaaggtttggatgcataacaacaaaaacacctttg

SEQ ID NO: 179959 - DNA, 211 bp, Glycine max
caagatatctgcacatgagaccacatgggggtccacactactggtaccaagtattgttgggcagaagagatgcaagaactgcaagcaaagctgctgcaaactccaatcttcctcctccaacattcagcttctcacagcttgtttccaacttgaaatctcacggcttaaacgtgaggcaccttgtggccctctctggaggccacaccatagg

SEQ ID NO: 179960 - DNA, 153 bp, Glycine max
ctccattctctctgtgtatttccctacctctcccttcaagatgcagatcttcgtcaagaccctcaccggcaagaccatcacccttgaggtggaaagctctgacaccatcgacaacgtcaaggccaagatccaggacaaggaatgaatcccccc

SEQ ID NO: 179961 - DNA, 266 bp, Glycine max
cgacatccgaatgacacatgggaggtgactttgccggcagaggaagttcctccggagcttccggagcctgcactcggaatcaattttgctagggatggcatgaatccgcaggactggctttctctggttgctgtgcacagtgattcgtggttgctctcagtggacttctatcttggagctcgtcttaaccgcaacgaaaggaaacgtttatttagcttgatcaatgatctttctactgtctctgaagttgtgactgacaggaagcc

SEQ ID NO: 179962 - DNA, 226 bp, Glycine max
caacacaacaaaaaaagacaacacagagagaagcgtcttaataaacgctcttctctgaaaaacctgatttcttctcttcttctcttctctttcgtttcgatcttcgatctctgaaaatgagagagtgcatttcaatccacatcggtcaggccggtattcaggtcggaaacgcctgctgggagctctactgcctcgaacacggcattcagcctgatgggcagatgcc

SEQ ID NO: 179963 - DNA, 280 bp, Glycine max
cctcgagccgaatcggctcgagaattgccttaaggaacgttcgagaccacagaggtttctctagtcttcttctgtggagagattgttttctcttgttcattcatctcacttccaattaaggaacaagctttccaccaatttgaatcaccaatggctcgctctttctccaacctcaaggatctctctgctcttgtcgccgacggattctccaacactctcaccaggcgtgggtacgcagtagcgacacaaagcgcaacaagaggaggagcagcctccatca

SEQ ID NO: 179964 - DNA, 276 bp, Glycine max
gagcggaaatcgttcctatcatcacttctcaaatctcgaaccctctcgttcgtgccgatcactaggtcacacttcatcaatggcgggtagaggcaaaaccctaggatccagcgccgctaagaaggccacctcaaggagcagcaaagccggcctccaattccccgtcggtcgtatcgccaggttcctcaaggccggaaagtacgccgagcgcgtcggcgccggagcccccgtctacctcgccgccgttctcgaatatctcgctgctgaggttttgga

SEQ ID NO: 179965 - DNA, 176 bp, Glycine max
agaatggctcccaagggtttaacctttctggctgtgttaatatgcgtttcagcactgtcactgagtccttctgttgccggggaagggcaaaataatggccttgttatgaacttctacaaggaatcatgccctcaggctgaagacatcatcacagaacaagtcaagcttctctacaa

SEQ ID NO: 179966 - DNA, 274 bp, Glycine max
caaagatgaaccagaacccgcaatcaagtgatggaaggaacgatgacgattctgctatatctgatttcctcgcttccttaatggattatactcccactatacccgatgaattggtggagcattacttggccaagagcggttttcaatgtcccgatgttcgattgactaggttggtagctgttgccactcagaagtttgtcgctgaagttgcaggagatgcacttcagcactgcaaagcaagacaagcaacaattccaaaagacaaaagagacaa

SEQ ID NO: 179967 - DNA, 272 bp, Glycine max
ctcgttcttcttcttttgttgttctgtgtttgtgtttgttttttctctcacctgaaaatgtcttgctgcggtggtaactgtggttgcggaagctcctgcaagtgcggcaacggctgcggaggctgcaagatgtacccagacttgagctacactgagtcaaccaccaccgagaccttggtcatgggagtggcacctgttaaggctcaatttgagggtgctgaaatgggtgtgcccgctgagaacgatggctgcaaatgtggaccaactgctcc

SEQ ID NO: 179968 - DNA, 245 bp, Glycine max
cttcacagaagcgtaaaaacaaaaggcttgactagagaaagagagagagagagcttcgaatcgaaactcagaagtagaaagaaacacaaatcacaatcgctatggctaggtacgaccgagcaatcaccgtgttctcccctgacggccatctcttccaggtcgagtacgccctcgaagccgtccgcaagggcaacgccgccgtcggcgtccgcggcaccgacaatgttgtcctcggcgtcgagaag

SEQ ID NO: 179969 - DNA, 221 bp, Glycine max
gtctagcggttcgatgatttgtatcgtaagtctgtggcatttgagaagcagtatggggacagggaagggattgaggatgctattgttgggaagagaaggtttcagtatgaggatgaagtgaagaagaatccgttgaattatgattcctggttcgattacataaggttggaagaaagtgtgggggataaggagagattcagggaggttatgagagggaatag

SEQ ID NO: 179970 - DNA, 255 bp, Glycine max
cgacaagcctctaaggcttccattgcaggatgtctacaagatttatggtattggtactgtgccagtgggacgtgtagagactggggttgtgaagcctggtatggtggtgacttttggtcccactgggctgacaactgaggttaagtctgttgagatgcaccatgaggctctcacagaggctcttccaggtgacaatgttggatttaatgtgaagaatgttgcagtcaaggatctcaaacgtggttttgttgcatc

SEQ ID NO: 179971 - DNA, 265 bp, Glycine max
cgagcagccacacctcccgcagcagccatggttctcaaaactgaactatgccgattcagtggtgccaagatctacccaggaaagggcatcagatttgtccgtcgtgattctcaggttttcctgtttgcaaactcaaaatgtaagaggtatttccacaatcgcctgaagccttcaaagctcacctggactgcaatgtacagaaagcaacacaaaaaggacattgctcaagaagctgtgaggaagaggagacgtgctgccaaaaagc

SEQ ID NO: 179972 - DNA, 274 bp, Glycine max
agactaaccaaaaggagagtgcaataactcgttgtacattcctagtgtgtgggagacacatggctaacatgtgtgtcttggtgttggttcttgctctggctgtggccacaagtgccagaaacgttcccaaccccaaggatgctggtcttaaggaccagaagaacttcatcagctatggtggagttggtggttattccgggattgggaacaatggactgccttttggaggagctggtgccggaataggtggtggttttggcggacctggtggact

SEQ ID NO: 179973 - DNA, 275 bp, Glycine max
ctgcgactaagagttgctgcttcttccgccactcagcacttcgctccctctgtgcttcaccaaccatggccgaaatcgaagctaccgttccagatccctctcaaatcgacgtcaaacttttcaaccgctggagcttcgacgacgttgaggttactgatatgtctctggctgattacattggagtgtccccgtcaaagcatgctacatatgttcctcacactgctggtaggtactcagtgaagaggttcaggaaggcgcagtgccccattgttgag

SEQ ID NO: 179974 - DNA, 273 bp, Glycine max
gtcgaagcgaggtcgcggaggatcggcagggaacaagttccgcatgtcactgggtctcccggtggcggcgacggtgaactgcgccgacaacaccggcgcgaagaatctctacatcatatcagtgaaggggatcaagggaaggctgaaccggttgccgtcagcttgcgtgggtgacattgtcatggccaccgtcaagaagggacatcctagtcctcggaaaaagggtgctccccgccgtcatcgtccgtcagggcaaccgtggcgccgaaagga

SEQ ID NO: 179975 - DNA, 280 bp, Glycine max
gagctataagctagtttatcgtgaggagaatatgaagttgtttgtcttctttgttgctgcagtagttttggtagcatggccatgccatggcgcaggctaccaaaggttccctctccgaatgaaaactggctatggtgagcgttcttcggaggtaaaatgcgcaagttttaggcttgctgtggaagcacactccatccgagacattaaaaccattcctgaagagtgcgttgaaccaacaagggactacattaatggcgaacaatttagatcagactctaaa

SEQ ID NO: 179976 - DNA, 226 bp, Glycine max
tgaagatgtttccgctgctctgcgttctgtctctttgctacctcgtctattatcaccatcactcattccaagactgttccacccattcttgacgatactaatttcaaccgaaccagtttcccgcaaggctttgttttcgggacagcgtcagtgcataccagtatgaaggtgctgcaagggaaggtggaaaatgaccgagtatatgggatactttcactcataatta

SEQ ID NO: 179977 - DNA, 228 bp, Glycine max
tcgagcgtaaacaaacagcacattcaagaagaaggctcctaaagcaattaaggagataaggaagtttgctcagaaagcgatggggacgaatgatgtgagagtggatgtgaagctgaacaaggctgtgtggagccaggggattcggagcgtcccgaggaggattagggttcgcattgcccgaaagaggaacgacgatgaggatgcaaaggaagagctatattcccttgt

SEQ ID NO: 179978 - DNA, 275 bp, Glycine max
caaattagttcattctctttgcgcagttccctacctctcctttcaagatgcagatcttcgtcaagaccctcaccggaaagaccatcacccttgaggtggaaagctctgacaccatcgacaacgtcaaggccaagatccaggacaaggaaggaattcccccggatcagcaacacccaatcttcgccggaaagcagctcgaggacggccgtaccctcgccgactacaacatccagaaggagtcaacccttcaccttgtccttcgtctcgtggtggca

SEQ ID NO: 179979 - DNA, 277 bp, Glycine max
ctaatctccatctaatagtgttaatttgtctttctctatctctatcggtcatgggtgcttttgcttttgatgaggaaaactcctccaccgtggctccggcaacactctacaaagctctgacaaaagatgctgacactatcatcccaaagattattggggccatccaaactattgaaatcgttgaaggaaatggaggacccggaaccgtcaagaagataacagctagtgaaggtgaccaaaccagtttcgtgctgcaaaaagtggatgcaattgacga

SEQ ID NO: 179980 - DNA, 261 bp, Glycine max
ctttgacaatgagacatcagtgcctccttctggtctccctggtgttggtctcctacgctgcccggtcggaatcagcgctgggcggctggagccccatcaaggacgtaaacgacagccacgtggcggagatcgccaactacgcgctgagcgagtacgacaagcgttctggggccaagctcacccttgtcaaggtcgtcaagggcgagactcaggtcgtttccggcaccaactaccgtctcgtcctcaaagccaaggatggat

SEQ ID NO: 179981 - DNA, 222 bp, Glycine max
aagagagaaaaaccatggcaataacactcaacaatggcttcaagatgcctatcattggattgggcgtgtggcgcatggaaggaaacgaaatcagggacctaattctcaattccatcaaaattggttatcgccattttgattgtgctgctgactacaaaaacgaagcagaagttggagatgcgcttaaggaggcttttaatagtggccttgtgaaaagagagg

SEQ ID NO: 179982 - DNA, 270 bp, Glycine max
gtcgagctgagaataccagttgctccagtagccggcactaaacaacatggcggacaaggcagtctgcatccgaaccaggaagtttatgacaaacaggcttctctccagaaagcagttcgtcgttgatgtccttcatccagggagggctaatgtttccaaggctgaactgaaggagaagctgggaagaatgtatgacgtgaaagacaccaacactgtatttgtcttcaagttccgaactcattttggtggtggcaagtccactgggtttgg

SEQ ID NO: 179983 - DNA, 271 bp, Glycine max
cctaattcacacccaaagagaaccaacaaaaaaaacaacagtggtacgtgatgccaccgaagttcgatccctcgcaggtggtggacgtgttcgtccgagtcaccggcggcgaagtagatccggagagttctctcgccccgaagatcggtcccttgggactctccccaaagaagatcggagaggatattgcgaaggaaaccgcgaaggactggaagggcctccgcgtgacggtgaagctaaccgtgcagaaccggcaggcgaaagtaacggt

SEQ ID NO: 179984 - DNA, 235 bp, Glycine max
aaaccttctgaggttaaagcaaaaaacaaagagagagagagagagaaaatgatgaagccatcgatgctcagatctctccactccgccgccacccgcggcgcctctcatctcttccgccgtgggtacgcctccgagccggtgccggagcgcaaggtagccgttctcggcgccgccggcgggtatcgggcagcctctctcccttctcatgaagctaaatcccttcgtttcgagcctc

SEQ ID NO: 179985 - DNA, 266 bp, Glycine max
gctagaagcaataagatgaaaatgaaagtgcttgttttgtttgttgctacagttttggtagcatatgaatgccatggctcagactaccagaagttccctctccaaatgaaaactgggtttggtgggcaatacagcaatgaggtggcatgtgccagttggaggcttggcgtggaagcaaacaacgtagtcaagtggcaaactgttcctgcagcttgcggagagtacatagctgactacgttctaggagaccaatatagatcagattc

SEQ ID NO: 179986 - DNA, 197 bp, Glycine max
gagctataagctagtttatcgtgaggagaatatgaagttgtttgttttctttgttgctgcagtagttttggtaccatggccatgccatggcgcaggctaccaaaggttccctctccgaatgaaaactggctatggtgagcgttcttcggaggtaaaatgcgcaagacttaggcttgctgtggaagcacacaacataa

SEQ ID NO: 179987 - DNA, 201 bp, Glycine max
agaagggtaaggtaaccctagagtggtgaatcgaatctgcaaagatggaagctgtttctcgaagacgaggtggaggcattttcgaaagcctctacaaggtcgttatgcgtcgcaattctgtctacgttaccttcgtcatcgctggcgccttcctcggagaacgggctgtagattatggagtccacaagctctgggaggcta

SEQ ID NO: 179988 - DNA, 272 bp, Glycine max
caattttcaccaaaacctaatactcccacaccaatcttcgatcatggacgccgattcacaacctcaacaactcgaagagagaacagaggagcaagaactgaagtacctggaattcgtgcaattcgcgaccatacaggctctgatgcgctgcgccatcctctactcatacgccaaggagcgcgcgggtcctctgaagcccggtgtcgacaccgtggaggaggccgtgaagaccgtcgtggctccggtctacgataggttccaccttgtccccg

SEQ ID NO: 179989 - DNA, 274 bp, Glycine max
cggagctccatgcaggtctgagcgtcttgctaaatataaccagctcttgagaattgaggaggagcttggtgctgaagcagtgtacgccggagctaacttccgtacccccgttgaaccctactaaagttttcaagtggaaaaaacctggagatccacacgagtttgagcattgagatttgggtgcgcggtttttggtgtgatatataagttgatagttggcacattagtcttggtatgataaagaccttgccaataatttgagttctgattcaca

SEQ ID NO: 179990 - DNA, 278 bp, Glycine max
gctcgtgcctctagggttatcatatctccattaccatttcctctctctcactttccaagaatcttaagctataggaacagtcttatccaaccgtgagcgctgagtaccagaaggccgttgagaatgcgaagaagaagctcagaggcttcatcgctgagaagagatgcgctcctctaatgctccgtttggactggcagtctcctggaacttaggacgtgagctcgaagaccggtggtcccttcgacaccataaggcgaccctctgaactcgctcacggg

SEQ ID NO: 179991 - DNA, 262 bp, Glycine max
tcgagcttcagaaatttgccatcgttgagagaagcgtgagagccttagtcgttcaagatgacagctaagtggaagaagaagcgcatgaggaggttgaagaggaagcgccgaaagatgagacaaagatctaagtaggtgcttgagcaggagttgagatgagctttccatctgctaccagcctcatgacattttaggctgttatggctctaatgatcttgaggcctagtcgtaaggggagctccatcctggactaagttggctt

SEQ ID NO: 179992 - DNA, 268 bp, Glycine max
cttcagcagaaggaacatcccaaattcaaaagaaaggctgaagatctttttgtagagcacactttgtcccttaccgaggccttgtgtggcttccaatttgtgctgactcacttggatagccgtcagcttcttattaaatcaaatcccggggaagttgtgaagcctgattcatacaaggctataaatgatgagggaatgcccatgtatcagaggcaatcatgaaggggaaactttacattcacttcactgtggagtttccagattctct

SEQ ID NO: 179993 - DNA, 271 bp, Glycine max
  unsure (1)..(271): unsure at all n locations
gttcttgggttttcaactggcgtggccacaaatggagtgagcgatgagagacagacagattcaatngaagagtgttcagaatggttgaaagcacatggggccagcataattactgataacaacggagatatgctgctagatacaaaagtttcatcatctaatctgtttgtgccagagccagaggatgctgttgcccacggagatgccaatcttgctgttgatgactttttagcaagagcgcctttatagccaactttattgtttttgaagc

SEQ ID NO: 179994 - DNA, 275 bp, Glycine max
tttcagtgagtgatcggtgttcacttgatccttcataagtcgtcatcatcatcatcatcatcaccgttgattgaagaagatgccgatcagaaacatcgccatcggaaggcctgaagaggctactcaccccgacacgttgaaggcgcggttggctgagttcatctccaccttgatcttcgtgttcgccggttcaagttccggcatcgcctacaacaagctcaccgacaacggcgccgcgactcccgccggcctcatctccgcttccatcgcccatg

SEQ ID NO: 179995 - DNA, 287 bp, Glycine max
cggacgtccggtccaatacgcttctcttctctgcagcaactatgcctaaccctaaggtcttcttcgacatgaccatcggcggtcaatctgctggccgcatcgtgatggagctctacgccgacgtcactccccgcaccgccgagaacttccgcgcgctttgcaccggcgagaagggcgtagggcggagcggcaagcccctccactacaagggctcgtccttccaccgcgtgatcccgagtttcatgtgtcagggtggcgacttcaccgccggaaacggaaccggcggc

SEQ ID NO: 179996 - DNA, 189 bp, Glycine max
caccactcttaatttctctctgccttgctcatttacacacctctccaacctttcactttcagctttatttgaatccctctctctcctttccaaatggccagcgttgaggttgcacatcaaacaccaacaacagttccagacaatgaaacacccgaggtaatcaagacccaggaaacaacccgggaacca

SEQ ID NO: 179997 - DNA, 250 bp, Glycine max
ctcattaattgcaagaatggcccttcgctgcttggtgatgtccctttctgttctcttacatcttggtcttgcgagagaaagccatgccagagacgaagatttttggcatgctgtttggccaaacactcccattccaagttcattgcgagatcttctaaagcctggccctgcaagtgttgaaatcgatgatcaccctatgcaaattgaagaaacacagtacccgaaaaccttcttctataaagaagacctt

SEQ ID NO: 179998 - DNA, 252 bp, Glycine max
tccagctacagcctacaacctacagatcaaggaaggaagatgttgggtgttataaggcacaagagtattcgtcccgccttctccgcaatcagacacttctcttctgcagctaaagagattactgtcagggatgctctcaactccgcactcgatgaagaaatgtcagctgatcctaaagtcttcttgatgggtgaagaggttggggactatcagggtgcatacaagatatccagggggctgctcgaaaatatg

SEQ ID NO: 179999 - DNA, 236 bp, Glycine max
cgagtctgttgatcgagataactagaaacagtgtgatgaaaatgaaggtccttgttttcttcgttgctacaatttccgtagcatggcaatgccatgcgtacgatatgttccctctccgaatgaacactggctatggtgcccgtactccggaggtgaaatgcgcaagttggaggcttgctgtggaagcacacaacatctttggctttgacaccattcctgaagagtgcgttgaagca

SEQ ID NO: 180000 - DNA, 275 bp, Glycine max
cctcgagccgaatcggctcgagattcttcatccatagacatggccaccgtcacttctgcagccgtctgctattccctcattcactggcctcaaggcaagcgcaggcaaagtgagtgccgcagttaaagtctcagctccccaagccacaaggttgggcatcaaggcttcgctgaaagactttggagcccctgttgtggccactgccgcgagtgcagtgctggctagcaacgccatggccattcaagtgttgctgggtggtgatgacgggtctctgg

SEQ ID NO: 180001 - DNA, 267 bp, Glycine max
aattgtttgagtatgatgaagtacttaacagccaaagagatcgagtttatacagagagaagacgagcccttgaatctgacaatcttcagtcacttcttattgaatatgctgaattgacaatggatgacattttagaagcaaacattggttctgatgctccaaaagacagctgggatcttgaaaaactaactgcaaaaattcagcaatattgctacttgttgaatgatctatcccctgatttgctggggaacacatgttcagattacg

SEQ ID NO: 180002 - DNA, 269 bp, Glycine max
caccgcaggtttagagacaatttaacaattagggttgcttctcctttgccgacccacggctcccaaagctgatagttcaaagaaggctgatccaaaggcacaggccttgacaactgccaaggcagttaagtccggtgctaactttaagaagaagaccaagaagatccgaacatctgttaccttccatcgaccaaggactttgaaaaaggataggaaccccaaatatccacgcattagtgctccacccaggaacaagcttgatcactatc

SEQ ID NO: 180003 - DNA, 277 bp, Glycine max
cttctcctaagctctagcacttaactagcaatattaattagcatttgctagagagactaggagtataaacataccccagtttaagatggcttcaaaaacttgttcctcccttgcccttttcctcacactcaacctcattttcttctcacttgtttctgcatgcggttatacaccatgccctggtccaaacccaaagccaaggcccaaccccaaccctaaccctaaccctagcccaaagtggctcctgcccccgtgatgcactcaaactaggtgtatg

SEQ ID NO: 180004 - DNA, 185 bp, Glycine max
cgcaacataaagaaagaatcccaggcgaggagaaagatggaggggaaggagcaggatgtgtcgttgggagcgaacaagttccccgagagacagccgattgggacggcggcgcagagccaagacgacggcaaggactaccaggagccggcgccggcgccgctggttgacccgacggagtttacgtc

SEQ ID NO: 180005 - DNA, 119 bp, Glycine max
tgctattggaggcaaaacgaaatgcaaaggaccaaatgtacatgaagatgacattaaatcagttactggttgagctagatggattcaagcaaaatgagggcataattgtgattggcgct

SEQ ID NO: 180006 - DNA, 190 bp, Glycine max
caccaacaggaactttaagttggcctctaggcttctgggattggattcaaagcttgagacaagtttactgattccattcagggaaatcaaggttgaatgtaccatacctaaagatgatggcaccttgcaatcttatgtagggttcagggttcaacatgatattgccaatggcccattaaaggggggctta

SEQ ID NO: 180007 - DNA, 261 bp, Glycine max
cggctcgagatcttggaaatcccggagaatctaccatgcttgaacttgccaaggtggttcaagcaacaatagaccctgatgctaggatagagcacaggcccaacacagaggatgacccgcacaagagaaagcttgatataagtagggctaaggatcaacttggctgggaacccaaggttgacctgcgcaagggcctccccctaatggtttctgacttccggcaacgcatttttggtgaccagaaggaaaaggcatccgtag

SEQ ID NO: 180008 - DNA, 203 bp, Glycine max
cactgagaggaagagggagtgagagagagtgttcttcacttgctaccttctcccagaaatggttacgttcaggtttcaccagtaccaggtggtcgggagggctctcccaacggaagcagatcagcatccgaagatctaccgaatgaagctctgggccaccaacgaggttcgcgccaagtctaagttctggtattttttgagga

SEQ ID NO: 180009 - DNA, 147 bp, Glycine max
tcaaaacactcataacacaaagcacaaagcaaagctcatccttgagttaaaaaatggcagcagcttcttccatggctctctcatccccatccttggctggcaaggccgtgaagctgggcccatcagccccagaagtgggaagggtga

SEQ ID NO: 180010 - DNA, 118 bp, Glycine max
ggcgaaacaggacctttaagcttcctaatcccatgtactacattgagtagtaccttcacctctctcaacaatctagctagagtttgctcctatctatatgtaataaggtatgctgata

SEQ ID NO: 180011 - DNA, 177 bp, Glycine max
ctacagtgctggttcgagtctgtttccgttgcaccgttgcaaaaccattcacctggtgaggcacgcgcaggggcttcacaatgtggagggtgacaaaaactacaaagcctacatgaaccccgattacttcgatgctcatctcactcccttgggatggcaacaggttgacaatttgcg

SEQ ID NO: 180012 - DNA, 184 bp, Glycine max
cattaaattaaaacaaaaaatgtgcgctgccatatccgaagtggaacaagaagagttgctcgaaaaattggaggtgttcaagatcaaaggcagggacaagcatggccgcaagatccttcgcattatcgccaaattcttcccagcacggttggtgagtgttgaggttctgaaaaactacctgggg

SEQ ID NO: 180013 - DNA, 262 bp, Glycine max
caagaatttggagctcaaaaacttccatcttctttacaagtcttatttgacactctcaagtttgaacacaaaaaacaatgggttttcgcttatctggaatcaggaagacatcattttctgcaaacaaatttgcatcttcaaaagtcatggatgtgccgaagggcaaccttgcagtctatgttggagacaaaatgaggcggtttgtgattccagtatcatacttgaaccaaccattattccaggacttgttaagccaagctga

SEQ ID NO: 180014 - DNA, 235 bp, Glycine max
ggtaagccaatcaaattggacattaataaaggaatggagagggcagaacaaattggaggaggcaaagctgtggccacagtcctagccattggcacagcaaatccacccaatttcatccttcaggaggattatcctgacttctactttcgggtcaccaatagcgaccatttgcaccgcttgaagcaaaagttcaagcgcatttgcgagacttcaaagatagaaaacgacactagtc

SEQ ID NO: 180015 - DNA, 120 bp, Glycine max
ggcaaaacaatgaaagtacaattcaccaagcgtccctatgcacaaccttatggtgtatatacatggttaacggatattaaagacacctctaaagaaggatatagttttgaagagatatgc

SEQ ID NO: 180016 - DNA, 166 bp, Glycine max
gctgttgttgctgctcatcctccgtaacctccgagctctgcaccgaagaacgaagccatggggaagacacatggaatgggatctgctcgcaagctcaagtcccaccgcaggaggcaaaggtgggctgacaagtcatacaagaactcacatcttgggaaatgaatgg

SEQ ID NO: 180017 - DNA, 199 bp, Glycine max
cttcagtctttcttggaactttgttactctcacacatgtctcgctccgtgcctttggtttcaaccatttttctcttgcttctgcttctggtggccactgagatgatggggccaacaatggtggcagaagcaagaacttgtgagtctcagagccaccgtttcaaggggccatgtttgagtgacaccaactgtggctctgt

SEQ ID NO: 180018 - DNA, 227 bp, Glycine max
gggttagtgtgttgaatgatgctctgaagagcatgtacaacgccgagacgcgcgggaagcgcaggtcatgattaggccatcctccaaggtcatcataaaattcctattggtcatgcagaagcacgggtacattggtgagttcgagtatgttgatgaccacagggctgggaaaatcgtggttgaattgaatgggcggctgaataagtgtggggttattagccctcgct

SEQ ID NO: 180019 - DNA, 249 bp, Glycine max
gggaaaaattaattctcaaggatccacaagatccttccactccaaatgcagtttcatacaaaacagcagcgagagagaaactgataaggcagggatacaacattgttgggatcattggagaccaatggagcgatctcctcggaggccacagaggcgaaagcaggacctttaagcttcctaatcccctgtactacattcagtagttccttcacctctcaacaatctagcttgctcctatctatctatatg

SEQ ID NO: 180020 - DNA, 116 bp, Glycine max
ggattttactgcttcctggtgtggtccatgccgttttattgccccagttctggcagagattgctaggcatactcctcaagtgatcttcctcaaggtggatgtggatgaagtcacgc

SEQ ID NO: 180021 - DNA, 117 bp, Glycine max
gttccctctccgaatgaacactggctatggtgcccgtagtccggaggtgaaatgcgcaagttggaggcttgctgtggaagcacacaacatctttggctttgagactattcctgaaga

SEQ ID NO: 180022 - DNA, 113 bp, Glycine max
gttacttcaaagtagcttgtcttcacattattaccgtatgtttatgtttagctgcgatttagtgtcttgctcgagcaaaaaatgagaggtctgaataaatcggtttctgaaac

SEQ ID NO: 180023 - DNA, 118 bp, Glycine max
ggatttcaggagcacttgctcttcctgccgcagcttacatgttccaagatcaggaggcgcgcgcagtgcagctggagcgcactttcattgccattaagcctgatggagtgcagagagg

SEQ ID NO: 180024 - DNA, 181 bp, Glycine max
gcttccagaaggacatattgaacttggtctatatctgtgagtgcaatggccttcctgaggtggccaattactggaaacaggtcatcaaggtgaatgactaccaaaaaatgcggtttgtgaaccgcgtggtgtcgtcaatgttcaacacagtctcagggaagaagattgctattttgggatt

SEQ ID NO: 180025 - DNA, 161 bp, Glycine max
agctgctacagttacagcataacttctattctatatttctttctactcgcaagcaaatcagaagaagagaatggcagcagcagaggggctaaacagagagcagtacgtgtacttggcgacctgtcggagcaggcggacggtacgaggagatggtggagtca

SEQ ID NO: 180026 - DNA, 259 bp, Glycine max
agcaaatatggaatctgaagcactgatatggggtgacaaactcatactgaagggattgtcattccgtggttttcatggagcactaccggaagaaaggaagctaggccagaagttcgtggtagatgttgatgcatggatggatctgaaagcagctggcaaatctgatcacttatcagatacaattagttacacagatatatatgatatagctaaggaaattcttgaagggtcacctcaaaaccttctggagtcagtggca

SEQ ID NO: 180027 - DNA, 202 bp, Glycine max
gttacattgcaatgttttcatgctttcttaccgaggttatggagcaagtgacggctatccttctcaacatggaataactaaggatgctccggctgcattggatcatctttcccaaaggtctgatattgacacatctagaatagttgtgtttggacgatcacttgggggtgcagttggagctgtactaacaaaaaataaaccc

SEQ ID NO: 180028 - DNA, 148 bp, Glycine max
tcgagataactagaaacagtgtgatgaaaatgaaggtccttgttttcttcgttgctacaattttcgtagcatggcaatgccatgcgtacgatatgttccctctccgaatgaacactggctatggtgcccgtactccggaggtgaaatg

SEQ ID NO: 180029 - DNA, 167 bp, Glycine max
cgcagtaatgggtgctctggatcacatatcggaactctttgactgctccagtggcagttccaagcacaagaagcgccgcaattgcagacggtggaggtcaaagtgaagatggactgcgaaggatgcgagacgaaagtgaggaaggcggtggaggggatgaaaggcgt

SEQ ID NO: 180030 - DNA, 249 bp, Glycine max
cccttattgatctttcagtgatagagatattgtcaaggcatgcttctgatgagatataccttggagagagggagactccaaattggactactgataagaaggcattagaagctttcaaaaggtttggaagcaaactgactggaattgaaggaaaaatcaatgcaaggaacagtgatccaagtctgagaaaccggactgggccagttcagctgccatacactttgctccatcgttcaagtgaggaagggt

SEQ ID NO: 180031 - DNA, 224 bp, Glycine max
gtgcagtgggcgttggggaaggctggtgaggatcgcgtccacgtggtggtgtcggaggagcttggatggttgttcgtcgggatttacgacggtttcaacggcggcgacgcgccggagtttctgatggggaacctctcccgcgccgttcataacgagcttcagggtttgttctgggaacttgaagaagaagaacagccgttaccgcaagacagcaatccagtggt

SEQ ID NO: 180032 - DNA, 288 bp, Glycine max
caattttgtaggatttggagtttgtacaatttcacccaaccggtatactctggagcaggttgccttatcacagaatgatctcgtggtgaaggtggaattcttaggaatagtgagggtgagcgatttatggaacgatatgcccctactgcaaaggatcttgcatcaagagatgtagtttcaagagcaatgacgatggagattcgggaaggtcgtggtgtaggacccctgacagatcacatctatctccacttgaatcacttgcccccagatgtgctcaaagagagactt

SEQ ID NO: 180033 - DNA, 285 bp, Glycine max
ctgagtttccacactgcataccttaggtcttccgaattcgaagttaatttgcaagatggctaaggaaaaggctcagatcaacattgtggtggttggtcatgtggaccctgaggaggcaaccaccattaacgagctgaagaagcctgttgtggagaaagaagctccagggcatgccatatgagggcatgcacgtacggcctcggaggggaaccagaaaattatgttaacaaaataatctggaaccctaatgtatcagtgtcatcatcagtgtgtagtttaagctag

SEQ ID NO: 180034 - DNA, 282 bp, Glycine max
ctcgctacttgttaagggctgcactataccagaatgtctcagggaagaggcagtgcatctttgcctattgtggtcactgtggtttcactactgtgccttttggaacgtgctaacgcagcaacttactccgttggaggacctgggggatggaccttcaacactaatgcttggcccaatggaaaaagattcagagctggtgatatcctaatcttcaactatgactcaacgacccacaatgtggttgctgtggacagtcgtggatacaacagctgcaagacacca

SEQ ID NO: 180035 - DNA, 281 bp, Glycine max
ctataagctagtttatcgtgaggagaatatgaagttgtttgttttctttgttgctgcagtagttttggtagcatggccatgccatggcgcaggctaccaaaggttccctctccgaatgaaaactggctatggtgagcgttcttcggaggtaaaatgcgcaagttttaggcttgctgtggaagcacacaacatccgagcctttaaaaccattcctgaagcgtgcgttgaaccaacaaaggactacattaatggcgaacaatttagatcagactctaaaacag

SEQ ID NO: 180036 - DNA, 281 bp, Glycine max
gaagaacttgaacgctccgacgcggacatacgtgcgcgacgcgaaggcaatggctgcgactcctgcggacgtgaaggagtaccctaactactacgtgttcgtgatcgacatgccaggcctgaaatccggggacattaaggtgcaggtggaggatgataacgtgcttctgataagcggcgagaggaagagggaggaggataaagagaaagaaggggctaagtatttgaggatggagagaagggttggcaagttcatgaggaagttcacgcttcccgagaatg

SEQ ID NO: 180037 - DNA, 276 bp, Glycine max
cctttgttcactcttcttctcttgcggctagggttttagcgcagttcttctagatttaaggaagatgggtaaggaaaaggttcacatcagtattgtggtcattggccatgtcgactctgggaaatccactaccactggtcacctgatttacaagcttggaggcattgacaagcgtgttattgagaggtttgagaaggaagctgctgagatgaacaagaggtctttcaagtatgcctgggtgctggacaaacttaaggctgagcgtgaaagaggaat

SEQ ID NO: 180038 - DNA, 282 bp, Glycine max
agccgatgccaaacttgctgtgaataagaagggcgccgccaccaagactaggaaacccgccggaaaggggaaggcagcgaaagatcctaacaagccaaagaggcctccaagtgctttcttcgttttcatggaggaattcaggaaggtgttcaacaaggaacatcccgacaacaaagcagtgtctgctgtgggcaaagctgctggagcaaaatggaagacgatgtctgatgctgaaaaagcaccttatgtggcaaagtctgagaaaaggaaagtggagtacga

SEQ ID NO: 180039 - DNA, 282 bp, Glycine max
gctataagctagtttatcgtgaggagaatatgaagttgtttgtactccttgttgctgcagtagttttggtagcatggccatgccatggcgcaggctaccaaaggttccctctccgaatgaacactggctatggtgagcgttcttcggaggtaaaatgcgcaagttttaggcttgctgtggaagcacacaacatccgagcctttaaaaccattcctgaagcgtgcgttgaaccaacaaaggactacattaatggcgaacaatttagatcagactcctaaaaca

SEQ ID NO: 180040 - DNA, 283 bp, Glycine max
tgaagaaccaacaagaggggtattgagattgagattcaagtaatggggaagagcaaggttcttgtggtggggggaactgggtacatagggaggaggatagtgagggcaagcctggcactgggccatgagacctatgtggttcagaggccagagttgagcctccagatagagaagctgcagaggctcctctccttcaagaagcaaggtgctcatctcattgaggcctctttcaatgatcacaagagccttgttgatgctgtgaagcaggttgatgttgtcatca

SEQ ID NO: 180041 - DNA, 282 bp, Glycine max
cacaaatcaaagccatggccacctccaacttctctattgttctctccgtctccctagccttctttttggtgctacttaccaaggcacactcgaccgataccgtttctttcaccttcaacaagttcaacccagtccaaccaaacattatgctccaaaaagatgctagtatttcatcctctggggtgttacaactcaccaaagttggcagcaacggcgtgcccacctcgggatctctcggtcgtgccctttacgctgccccaatccagatttgggacagcgaaa

SEQ ID NO: 180042 - DNA, 271 bp, Glycine max
tctaagcagcggctaccctaatcctctcctcttcctctctactaatttcagctatggccgacgaagctgtggttgttccagatcccacccagatcgatgtcaagctctttaaccgctggagcttcgacgatattgagattactgacatttctctggctgattatatcggagtggcgacatccaagcacgccacgtatgtgcctcacaccgccggcaggtactcggtgaagcggttcaggaaggcgcaatgccccattgttgagaggctgac

SEQ ID NO: 180043 - DNA, 285 bp, Glycine max
ccgccacttctgaatctattgaatcaacaatcatgtcggacgaagagcaccatttcgagtccaaggccgacgccggagcctccaaaacctaccctcagcaagccggtaccatccgcaagaacggctacatcgtcatcaaaggccgcccctgcaaggttgtggaagtttcgacttccaaaactggaaagcacggtcacgctaagtgtcactttgttggaattgatattttcactgccaagacacttgaggatattgtgccctcttctcacaactgtgatgttcctc

SEQ ID NO: 180044 - DNA, 282 bp, Glycine max
gagagagggagattctttgtttgctaccttctctcggaaaaatggttacgttcaggtttcaccagtaccaggtggttgggagggctcttcccacggaagcagatcagcaccccaagatctaccgaatgaagctctgggccaccaacgaggttcgcgccaagtccaagttctggtattttctgaggaaactgaaaaaggtgaagaagagcaatggccaagtgcttgccatcaacgagatttttgagaagaacccaaccaaaattaagaactatggtctatggt

SEQ ID NO: 180045 - DNA, 278 bp, Glycine max
ccaaagctaaggagatcgtgtcgtccaattccgtcgtcgttttcagcaaaacctattgccctttctgcgtcgatgtgaagaagctcttcggtgacctcggtgccaattacaaggccatcgaactcgacactgaatccgatggaaaagagctccaagcagcattagttgagtggacggaccagcgaaccgtgcctaatgtgtttattggtggaaaccacattggtggctgtgactcaacaactgccctgcacactcaggggaagcgggttcctctgctg

SEQ ID NO: 180046 - DNA, 274 bp, Glycine max
gtgaaacaacagctttcatggttccattggtggctggtgatggaaccaaaactcaggcacttgctatttgccactcaaatacttctggaatgaatcatcaaatgcttcatcaacttatgggagtagatcctggaactaaccctgtttgccatttccttggaagcaaggccattttatgggtacccaatttatctgtggacactgcctatcagaccaacattgttgcttaattagtccatgcatcttgagcaccatgagaatgagattgtgtata

SEQ ID NO: 180047 - DNA, 278 bp, Glycine max
cgcacgaatatcttgttgtttggagcgatccgagaaaaactctgtaaacatgttggtttaccaggacctccttacaggtgatgagcttctctctgactccttccgttacaaggaaattgagaatggaatgctgtgggaagttgaggggaagtgggttgttcaaggagcagttgatgtagacattggtgcaaacccttctgctgagggtggaggagaagatgagggagttgatgatgcagctgttaaggttgttgacattgttgacacattcagacttc

SEQ ID NO: 180048 - DNA, 274 bp, Glycine max
tgtcagactaaattatttccttgcagttggttctcttcatgggtaagaagttttcatggagttttcgttgcatttgagcaattcaaccttgtaaaaataaataggctttccataaaccaaatgttacttttaaatgcccaaagcttatcaagcctcttttcttgaatggggattggcactctttattgaggttttgacatgagacattttatatcttctgatttgatttgatggatattttctgcaatattcccttaatattttctggtttgat

SEQ ID NO: 180049 - DNA, 278 bp, Glycine max
cggctcgacctcgaccgaatcggctcgagtcatcctacaaggacttcagtgtggatggttgccagtgaccagacccataccctgcctgtgtctcaaccacaaccaaaaattggtgggatcagtatgatgcttggcacctttctgatgatcagaaaaaggattatgcttgggttcagaggaaccttgttatctatgactactgccaggattctgcacgttatccaactaccccagaggagtgttcattgagtccatgggattaatatgtctaggggaaa

SEQ ID NO: 180050 - DNA, 284 bp, Glycine max
ctcttaataccaattttctagggtttatacaattctcgatggcatcttcagatgttgagtaccgttgctttgtcggtgggctcgcttgggccactgacgaccaagctctcgagagagccttctctcagtacggcgaaatcgttgaaacgaagattatcaacgatcgtgagactggaagatccaggggttttggatttgtgaccttcgcctcggagcagtccatgacagacgccatcgaagggctgaacggccaaaaccttgacggccgtaaaaatcatgttaac

SEQ ID NO: 180051 - DNA, 283 bp, Glycine max
cgatgatcctgttcaaactgcaacaatgcgtgctgaacttcatagacgtggtatagcacaaatgaggatcaacaatcggtcacttcaagacatgtatatatttggagatcctttgcgtgttcctattattattgttgaacgcttggacaacatgtaccgttctgccagtgtgaagtcatatttccttcctttggaggacaaagctagacatatgctggaaaatggatctagagccataataccgttggctaggaatagcccacaacaaaatgagcatgttttg

SEQ ID NO: 180052 - DNA, 280 bp, Glycine max
cttaaaccctagcccctcttctcttcattcttcactcaggaaacaattctaatggccttctgtaataaggttggaaacgtcttgaggcagggtgctgctcgcagcacacaagcacctgtttcatccatgcttaattacattcgctgcatgtcttcaagcaagctttttattggaggcctttcatatggagttgacgatcagtctcttaaggatgcattttctggctttggagatgtggttgattgaaatcttctaactgacagagactctggaagatcaa

SEQ ID NO: 180053 - DNA, 278 bp, Glycine max
cggcactgcagcgtggacggaatcggagtgcagccatatcagcagcagcagaagtccttgaagtgctgctctagtttgaggcacaatgagattggagaaatgctggttttgctcttcaaccatataccctggacatggaatccagtttgttcgtaatgatgcaaagattttccggttttgtagatctaaatgccacaagaactttaaaatgaagagaaatcctcgtaaggtaaaatggaccaaggcatatcgtcgcgtgcatggaaaggatatgacac

SEQ ID NO: 180054 - DNA, 276 bp, Glycine max
ggaaaatgtgcctacaaatagctccctgaaagcacatccacgctttcaagccgagaacttagacaagaacaagaatatatatgaacgaattgaaggccttgctacgaagcatcaggccactcctgcccagttggcattagcatgggtacttcagcaaggcgaggatggtgtacctatccctggaacaactaagattaagaacctggatcagaacataggtgccttagcagtgaaactgtcagacaaagacctgtgagaactttctgaggcggttcc

SEQ ID NO: 180055 - DNA, 285 bp, Glycine max
agtggtttcagtgagtgatcggtgttcacttgatccttcataagtcgtcatcatcatcatcatcatcaccgttgattgaagaagatgccgatcagaaacatcgccatcggaaggcctgaagaggctactcaccccgacacgttgaaggcggggttggctgagttcatctccaccttgatcttcgtgttcgccggttcaggttccggcatcgcctacaacaagctcaccgacaacggcgccgccactcccgccggcctcatctccgcttccatcgcccatgctttc

SEQ ID NO: 180056 - DNA, 256 bp, Glycine max
cacaggcacgctgagcatggaacacagaaccctagaactcaacctggcttcagcaaaggatctcaaagacttgaatatattctcaaagatggatgtatatgctgtgctttcactctccggcgatcaaaagaccaagactcccgtccacagaaacggcggcatcaaaccaacatggaattttccggtcaagttcacttttgatgaatcggtggcgcggcagaaccgtttgggccctcgaatcaagatccgctccgag

SEQ ID NO: 180057 - DNA, 284 bp, Glycine max
ggctagataagcttccagtcattgtatggatgatagctcaggctgctgtaggagatctctcagtaggtttgtatgcttgggcacggaatctcctagccatagttattggcaaaagtggtaacccccaatccagggatttggttttgcagctagtggaaaaaattttgtctacccccaaagcccgacctgttttagtaaacagtgctgtgagaacaggggaacgattaattccttcttccgcgtttgaaattttggtccgggttactttccctccatcttcaact

SEQ ID NO: 180058 - DNA, 277 bp, Glycine max
gggagaattaggtttttagggtttacaccgagcagccacacctcccgcagcagccatggttctcaaaactgaactatgccgattcagtggtgccaagatctacccaggaaagggcatcagatttgttcgtcgtgattcttaggtttttctgtttgctaactcataatgtaagatgtattttcacaatcgcctgaagccttcaaagctcacctggactgcaatgtacagagagcaacacaaaaagggtattgctcaagaagctgtgaagaagaggaga

SEQ ID NO: 180059 - DNA, 258 bp, Glycine max
tgataatgaagaccattatgcaaaactacttcgagctcaaacccacatatttgatcaaactttcggattcataaactctatgtcccttaaatgtgcaattgatttgtgcatacctgatgtaatacacaagtatcgccaacccatgcgcctctctcaactcattgcttcacttccaattcacccttctaaggcttgcttcattttccgcttgatgcaaattttgactcattccggtttcttctctcaacacaataatgc

SEQ ID NO: 180060 - DNA, 278 bp, Glycine max
ccctagttagcctctttttgtctcccctgcaatcaacggcaccccccacaaaaatgacaggagagacagtgaacccaaaagcttaccctttggccgatgcgcaactcgcaataacaatcttggatcttgtgcaacaagctgccaactacaagcaactaaaaaagggtgctaatgaagcgactaagacactgaacagaggcatttctgagttcgttgtgatggccgcagacactgagcctcttgagattcttctccatcttcctctccttgctgaggat

SEQ ID NO: 180061 - DNA, 281 bp, Glycine max
aaaggttccaaaaaccattgtgaagagtctctagttacaaatacacaagttaacagtgacttcgaacccataccaagtgttaccaaatatgatgatttggaattcaagtcaagcattatcaagaacgatgattttgaatcgagaccaagtgttactaagtatgatgattttgaactcaagtcaagcgttaccaagaacaatgattttgaaccgagaccaagtgctaccaaatatgatgattttgaactcaggtcaagcgttaccgagaatgatgattttga

SEQ ID NO: 180062 - DNA, 279 bp, Glycine max
gcagggattaattatgaagtaggtaatatgattgctgaagcattgagcagagttggtagaaagggtgtcgtgacccttgaggagggaaagagtgctgataacagtctgtatgttgttgaggggatgcaattcgaccgtggttatattcctccatacttcgttactgacagtgagaaaatggctgttgagtatgagaactgtaagttgctgttagttgacaaaaagataaccaatgcacgggatcttatcaacatactggaggatgctattagaagtgga

SEQ ID NO: 180063 - DNA, 276 bp, Glycine max
gaaagattactaaatggtgtcataaggcagaagttgaagatcattcctgagaatgttacgtatgcagtgcagtccttggatgctttcgaaagtctagtacctgattttatgaagccaagaattagtgaggttgatgagctgctggctcttggggtcaacgtgactgtgtacagtgggcaagtggatctcatttgtgcaaccaaggggactgaagcttggcttaaaaaactcgagtggacagggcttcaaaatttcttggagaaagacagaaccccc

SEQ ID NO: 180064 - DNA, 276 bp, Glycine max
ctcgagcccttttatttgcatcttcaatatacaagactgaaactttcaaagctcttttgagacattgttattgcaatgactgacatagatcgctcctctgataatgtttcttctgattctattgagaaatcaagccaagtttctgatgttgaattttctgaagctgaggaaatccttattgccatggtgtataatctggttggagaaaggtggtctttgattgctggaagaattcctggaagaactgcagaagaaatagagaaatattggacttca

SEQ ID NO: 180065 - DNA, 275 bp, Glycine max
ctcttttgctttaccaaattccattttccaattcaaaaccctaactccgttcgaagcaccaaatcgtgatggcaccaaaggcagagaagaagccagcagagaagaagcctgtggaggagaagaaatcgacggtgggagacaaggctccggcggagaagaagccaaaggccggaaagaagcttccgaaggagggaggcgccggcggagaaggtaagaagaagaagagaaacaagaagagcgtggagacatacaagatctacatcttcaaggttctg

SEQ ID NO: 180066 - DNA, 273 bp, Glycine max
tcctgatatgatatcacaacttgagagtgctggtctatcttttgttggcaaagatgaaactgggaagcgcatggagatagttgaatgtcccagtcatcctttcttcattggtgctcagtttcatcctgagttcaagtccagaccagggaaaccttctccattattcttaggattaatatcagcagcatgtgagaggacaattgtgcctgccagcaatggctatagcaagttaacaaatgggatacactcaccattgttgaaagcagcagcagc

SEQ ID NO: 180067 - DNA, 274 bp, Glycine max
gcctgaaccatcttttgagattctgactaatcctgcaagggtggttcctgcacagtcgcagtgtattaaatttttgcaggatagcagatatgttccggttaagttggcaccatcaggatttgtgcttctcagagacttgcatcctactgagccagaagtgcttgctctaactgacacgccctcatctaccagttctgctgctggtgggtcagcaacaggattgcagagttcttcatcagccatggctgtggatgaggaacctcaacctcctcaa

SEQ ID NO: 180068 - DNA, 277 bp, Glycine max
tgaaaaacatggatatggggtggaggaatttaatgaaaccttatatgatgaatgggttaacaagggcgacgcaccggcattgccagagactcttaaaaattacaacaagctgttgtctcttggcttcaagattgtattcttgtcaggaagatatcttgacaaaatggccgtaacagaagcaaacctaaagaaggctggcttccacacatgggagcagttaattctcaaggatccacatcttatcactccaaatgcactttcatacaaatcagcaatg

SEQ ID NO: 180069 - DNA, 281 bp, Glycine max
cgaagacaaacctctgttctcaactgtgtttctttacctctcacctactttcagaccataccaggctgagaagatgcagcagacaccgcctatgattcctatgatgccttcgttcccacctacgaacataaccaccgagcagattcaaaaataccttgatgagaacaagaagctgattctggcaatattggacaatcaaaatcttggaaaacttgcagaatgtgcccagtaccaagctcagcttcaaaagaatttgatgtatttagctgcaattgctgatg

SEQ ID NO: 180070 - DNA, 273 bp, Glycine max
tgcatctgggagtgggagagaaagatgccgaagaggacaacgcacacatactcaagcgaggatgcagctccggacggtcctcactccgatctctttgtatattactgcaaacattgcggatcccatgtcctcataacagatacccacttgcagaaaatggctaaaagggaaaccgacaaagcttatgtactggacaagagcaaacatctggccagattgaacatgaaggaaggcgggaaagtagtgttaaaacgaggggacgggaaaatggag

SEQ ID NO: 180071 - DNA, 280 bp, Glycine max
cactctgcttcccctggcaaccttcttcttagttctctccgcttcttatctccagattgctggggcgaaagcacaaccgttgactagtctcaagcttaactctccgatccttcaggagtctattgctaaagagatcaatgaaaatcctgaggcaggatgggaggctgctataaatcctcatttctccaattatacagttgaacaatttaagcgccctcttggagtcaaaccaacgcctaagacggaactgagaagtacacctgctatatctcacccaaag

SEQ ID NO: 180072 - DNA, 259 bp, Glycine max
ctctcctttaccatcattctagatatcgcagaactttgcagctctcttaggtttttaaaaaacaccacgcaaacagcaagatggccacttccgacagtaacatgctactaaattatgttccagtttatgtgatgctcccactcggagttgtcaatgttgacaatgtttttgaagacccagatggccttaaagaacagctcttgcagcttcgagctgcgggtgttgacggggttatggttgatgtgtggtgggggatcat

SEQ ID NO: 180073 - DNA, 270 bp, Glycine max
cgggtttggatcctgaggctaataggttgttcaatgagggcatggtgtgcactgctagggttgtgtccaaggctgtgatcactggctacaaagatgggttcaaccagattaagtccttggtgcatgttggaggtggcattcgagggtctctttcggagattgttagggcttatcctcatatcaatgccatcaactttgacttgcctcatgtggttgccactgctcctaagttcgatgggatcacccatgttggaggtgacatgttcgtgt

SEQ ID NO: 180074 - DNA, 250 bp, Glycine max
cgttctttgtctcgcaatcttcactattttcaccgagcatttgcattccacattgaatatggctcaggctacacaatctaatgctgagttattggagtggcctaagaaagataagcgccgcttcctgcatgttgtgtatcgtgttggtgatcttgatcgcaccattaagttttatactgaatgttttgggatgaagcttttgaggaaaagagatattccagaagagaaatatgccaatgcttttcttgga

SEQ ID NO: 180075 - DNA, 275 bp, Glycine max
cttacacatctctccaacctttcactttcgtttctcagttttattcgaatccctctctcaatctcctttccaaatggccagcgttgaggttgcacagcaaacaccaacaacagttccagaaaatgaaacaaccgaggtaagcaagacccaggaaacaaccccagtcactgaggctcctgcaacagaacaaccagcagctgaggttcctgcaacagaacaaccagccgctgaggctcctgccccagaatcaaccaccgaagcaccaaaggaagaaa

SEQ ID NO: 180076 - DNA, 270 bp, Glycine max
cagaagcgaagaagaagccacagagaactagtctcctactctcacccgcaagaaaaaatggcatctcacatcgttggatacacccgtatgggtcccaagagagcgcccaagttcgctctcgagtctttctgggatggcaagagcagcgccgaggatttgcagaaggtctcttctgatctcagggcatccatctggtcgcagatggctgatgctgggatcaagtacatcctcagcaacactttctctcactatgaccaggttctcgacgcc

SEQ ID NO: 180077 - DNA, 277 bp, Glycine max
ctagactcttctttttctctaagctcaaccggtgccctgagatcactttgagcaatggtgaaggctgtggcagttcttggcagcagcgagggtgtcactggaactatttccttcactcaggagggaaatggtccaaccaccgtaactggatctcttgctggtcttaagcctggtctccatggcttccatgtccatgccttgggggacactaccaatggttgcctgtcaactggagcgcatttcaatcctaataacaacgagcacggtgcccctgagg

SEQ ID NO: 180078 - DNA, 270 bp, Glycine max
ctcgctctgtttctgtctctgtgtttgcggctgaggattccgaacgagcgaccttcttcgtttctcgcaaagtttaagtcatcatgggtaaggaaaagactcacatcaacattgtcgtcattggacatgtcgactctgggaagtcaactaccactggtcatttgatctacaagcttggaggtattgacaagcgtgtgattgagaggttcgagaaggaggctgctgagatgaacaagaggtcattcaagtatgcctgggtgcttgacaagc

SEQ ID NO: 180079 - DNA, 264 bp, Glycine max
cgagataactagaaacagtgtgatgaaaatgaaggtccttgtcttcttcgatgctacaattttcgtagcatggcaatgccatgcgtacgatatgttccctctccgaatgaacactggctatggtgcacgtactccggacgcgaaatgcgcaagttggaggcttgctgtggaagcacacaccatcttcggcttgcagaccattcctgaagactgcgttgcaagcaacaaaggaatacatccatggcgaacaatatcgatcagact

SEQ ID NO: 180080 - DNA, 232 bp, Glycine max
cagtgatcggtgttcacttgatccttcataagtcgtcatcatcatcatcatcatcaccgttgattgaagaagatgccgatcagaaacatcgccatcggaaggcctgaagaggctactcaccccgacacgttgaaggcggggttggctgagttcatctccacctggatcttcgtgtacgccggttcaggttccggcatcgcctacaataagctcaccgacaatggcgccgcca

SEQ ID NO: 180081 - DNA, 238 bp, Glycine max
cctctctaaacttgtacctgaatattcttactccctgtgatgaagagggtatttgcaaacatgcctttgagttgatttttagatttcatgaagtcatctctctatggcacaaggataatgtgactgtcgcccaagttaagcaatattgcgaaatggagactcatggagatacgctgcacaagttggttttccacagctagattactgcaactaaggacgttctgcagcgtcaagctag

SEQ ID NO: 180082 - DNA, 273 bp, Glycine max
cactctcaactctgcttcttttcaatcagttacattttctttggtattccaatggccactgttgaggttgtgtcagcaaaggtttccctcccagaggacacaaaagatgcatcattgaaggctgatgataagaagaacacagaataagttgttgagacttcaacaccaacaccagaaaatgtcgtcactgagcaaacaaaggaggaaagtactgaaggcccacaacctggtagttcagaagaaaagccctcggttgaagttgtgtctggaact

SEQ ID NO: 180083 - DNA, 219 bp, Glycine max
ttcggctcgagctcattaattgctagactggcacttcgttgcttggtgatgtctctttctgttgtcttcactcttggtcttgcgagagaaagccatgccagagaagaagatttttcgcatgctgtatggctaaatactctcattccatgttcattgcgagaccttctatagcctggctctgtcagtgatgacatcgatgttcaccctatgctacttgct

SEQ ID NO: 180084 - DNA, 273 bp, Glycine max
tggcaagaagaagtttgagactctttcctacctgccagaccttgatgatgcacaattggcaaaggaagtagaataccttcttaggaagggatggattccttgcttggaattcgagttggagcacggtttcgtgtaccgtgagcacaacaggtcaccaggatactacgatggacgctactggaccatgtggaagctgcctatgtttggttgcactgatgcttcccaggtgttgaaggagcttcaagaggctaagactgcataccccaacggctt

SEQ ID NO: 180085 - DNA, 272 bp, Glycine max
agcgacattaagatggtgaaagaagttgggttggattcatacagattttccatctcatggtccagattattccccaagggcaagggagcagttaacaccttgggggtcaagttctacaacgatctcattaatgagattatagcaaatggcttaaagccatttgtcacgctgtttcattgggacctcccacaagctcttgaagatgaatatgggggatttctcaaacctgaaatagtggaggacttccgtaactatgctgacttttgcttcaa

SEQ ID NO: 180086 - DNA, 280 bp, Glycine max
ttcggctcgagtcgagataactagaaacagtgtgatgaaaatgaaggtccttgttttcttcgttgctacaattttggtagcatggcaatgccatgcgtacgatatgttccctctccgaatgaacactggctatggtgcccgtactccggaggtgaaatgcgcaagttggaggcttgctgtggaagcacacaacatctttggctttgagaccattcctgaagagtgcgttgaagcaacaaaggaatacatccatggcgaacaatatagatcagactccaaa

SEQ ID NO: 180087 - DNA, 250 bp, Glycine max
ctgataagcaatcctgtgaactccactgttcctattgctgctgaagttttcaagaaggcaggaacgtatgatgagaagagattgtctggtgttaccacccttgatgttgttagggcaaaaactttctatgctgggaaagccaatgttccagttgctggtgttaatgtacctgttgtgggtggccatgcaggcattactatccggacattattttctctcgccacacaaagagccaatcttgatgatgacg

SEQ ID NO: 180088 - DNA, 158 bp, Glycine max
aaaaccctagctcgcgttctgctttcgtcttttacatcaggatggagtctcaggtgaagcacgcacttgttgtcaaagttatgggtcgtactggatccagaggacaagtaacccaggttagagtgaaatttttggatgatcagaaccgtcacatcatg

SEQ ID NO: 180089 - DNA, 247 bp, Glycine max
gttctttctctcgcaatcttcactacattcaccgagcatttgcattcacattgaatatggctgagactacacaatctaatgctgagttgttggagtggcctaagacagataagcgccgcttcctgcatgttgtgtatcgtgttttatactgaatgttttgggatgaagcttttgaggagaagagttattccagaggagaaatatgccaatgcttttcttggattgggcctgaaacaatcccatttgg

SEQ ID NO: 180090 - DNA, 253 bp, Glycine max
cctccctctcctcttcctcaacatcttcattcaaacaatttcagcccaagtagcaccagcaccagcgggccccaccaacatcacccaagttcttgagaaagcaggccaattcacaaccttcatcaaacttctcaaggcctcacaaatagctgatagaatcaattcgcagctcaacaactcaaacccaggcctaaccggatttgcacccactgataatgcattctcaagcctcaaagcagggacactaaactcc

SEQ ID NO: 180091 - DNA, 231 bp, Glycine max
ttcttttcctctttgctcttgtctcgttcacttcccatgcttctgtcaatgatttctgtgtagcagacctaaaaggtccagatagcccttcaggctatcagtgcaagccacctaacacagtcacagtggatgactttgtgttctctggctttgtagctggaaacacaacaaaaatttcactgctgcattaacttcgcaattgtaatggttttcccagtgtgaaaggtcttg

SEQ ID NO: 180092 - DNA, 159 bp, Glycine max
gttaagcttttgatccagaaccaggatgagatgatcaaaactggtaggctttctgagccctacaaaggtattggtgattgtttcaagagaacaatggcagatgagggtgctatttctctatggagaggaaacactgctaatgttatccgttattcccca

SEQ ID NO: 180093 - DNA, 265 bp, Glycine max
aaagagctgcagattgagatggattaattatctgaggccagacctcaagagacgtggatttactgaaatggaagaggatcaaattatacagctacattcatgtctaggtaacaggtggtctaagattgcttcacattttcctgggaagacagacaatgaaatcaagaaccattggaacactaaaatcaagaagaggttgaagctcctaggtttggaccctttaaccctgaagccatctgagcaaaaggaaaagtctgttgatgac

SEQ ID NO: 180094 - DNA, 273 bp, Glycine max
ccaaattccaattcccaattcccaattcgaaacccttattcctttcaaagaaccaaattgagtgatcgtgatggcaccaaaggcagagaagaagccagcggagaagaagcccgcggaggagaagaagtcgacggtgggagacaaggctccggcggagaagaagccaaaggccggaaagaagcttccgaaggagggaggcgccggcggagaagggaagaagaagacgaccccaagaagagcgtggagacatacaagatctacatcttcaaggtt

SEQ ID NO: 180095 - DNA, 269 bp, Glycine max
agaatattgagaaggccttggttgaagccttccaacccttgggaatctccgattacaattctatcttctggattgcacaccctggtggacccgcaattttggaccaagttgaggctaagttaggcctgaagcctgaaaaaatggaagctactagacatgtgctcagcgagtatggtaacatgtcaagtgcatgcgtgctattcatcttggatcaaatgaggacagaatcaatagaaaatggacttggcacaaccggtgaaggtcttgac

SEQ ID NO: 180096 - DNA, 272 bp, Glycine max
cgcacagtttgttttcattgggtgctgatcggaacaaacagggaatagaagagaggtgaagatgggtttcataatggaatttgcggagaacttggtattaaagttgatggaagatccgaaggaaagggatcggaggttcagggagcacgtttatagagtgaaggacaggtgcgagaagacgaaggagatgtggagctaccctatgcgaccctatgggttttggacattcgaacgccacaattctcagcttgcttgggatgcacagattagcc

SEQ ID NO: 180097 - DNA, 141 bp, Glycine max
caaattagttcattctctttgcgcagttccctacctctcctttcaagatgcagcttctcgtcaagatcctcaccggaaagaccatcacccttgaggtagaaagctcttacaccatcgacaacgtcaatgctaagatctcag

SEQ ID NO: 180098 - DNA, 159 bp, Glycine max
ggttacgccgtcgtcgctgtttgtgtgtgtatcaggtgcagctaccaacgatggtgaagggtcgtcaaggagagcgcgtcagactctacgtgaggggtacaatccttggatacaaaaggtccaagtccaaccagtagcccaaacaatccctgatccaaa

SEQ ID NO: 180099 - DNA, 183 bp, Glycine max
tggctggtaaaatcgtggttgaattgaacggtagactgaacaagtgtggggttattagtcatcgtattgatgtcggcgtcaaagatcttgcaggctggactgctaggcgtctcacctcaagatagtctggagatagtgtattgactagctctgctcggcatcatggatcactgagagctacga

SEQ ID NO: 180100 - DNA, 262 bp, Glycine max
aagagagtgagtgagtagggtttcaaattccaatcggaagaaatcggaatcggaagacatggtctgtggcggcggcgatcacggccatggacacggacacggtgatttcaggaacaaggtctggagtatgagcggtggcccttactgtcgcccaaagcactggtagcgcgacaccgccattgtcatgttcggcgttgtcctcatctgcatccccatcgctatgaaatccgctgaactcgaggaacgaccacatcaccctgtt

SEQ ID NO: 180101 - DNA, 268 bp, Glycine max
tggaagctgtggagaagggtcatggtgacttaaaagaaaagccttggtggcctacaatgcagacaactgaagatctcattcaatcatgctctattatcgtttggacagcttcggctctccatgctgctgttaattttggacaatatccttatgggggcttaatcctgaaccgtccaactctagccagaaggtttatcccagctgaaggaaccccagagtatgatgagatggtgaagaatcctcaccaggcttatctgagaacaatcac

SEQ ID NO: 180102 - DNA, 269 bp, Glycine max
  unsure (1)..(269): unsure at all n locations
gtggcaaaccccccaaaaagcacaagcctggtaaaacaccaaagacacccaaaacacccgttgttaagccaccagtcaccatccctcncattaatgttcctcccgttgttcttccaccaatagtgaagcccccaggtattctccctccaattccaattattaacccaccaaccacaccagggaagggagggaacactccatgcccaccaccaaagtctcctgcgcaggctacgtgccccattgacacgctcaaacttggtgcctgtgtg

SEQ ID NO: 180103 - DNA, 166 bp, Glycine max
ccgattgctagaatggaatttcgatgctcagtcatctctcttaccatactctgctctcttgctcttgcaggagagagccatgtccatggatcgctagctgaggacagattactcggaagctatttggcacgacactcacatgcaccatggactgcgagatcctcta

SEQ ID NO: 180104 - DNA, 264 bp, Glycine max
gctgtgtctggggaaatttgccttgtttttcgcggtacagctcacacacactgaacggttagtatgtcggacaaggctgttacaatccgaacccgaaagtttatgaccaacaggcttctttccaggaagcagtttgtcgttgatgttctacatccaaggagggcttatgtttccaatgctgaacttaaggacgagctagctatgatgtataatgtcagaggccctaatactgtattagctctcgaattcctgatacattttgga

SEQ ID NO: 180105 - DNA, 261 bp, Glycine max
ctcttcttctcttgcggtctggtttagcgagttcttatagatttaaggaagatgggtactgataaggttcacatcagtattgtggtcattgtgtatatcgactctggtatatcgactattaatggacacatgatttacaagcttgtaagaattgacaagcgtgatattgacatgttagatatggaagttgctgtgatgaataggaggtatttaaagtatgcatgagtgctggataaactttaggttgaacgttaaagaggt

SEQ ID NO: 180106 - DNA, 265 bp, Glycine max
cttgcttcttgcttctattacttgcttctaccttcaccatgtcactcgctgggaaaatcaccactgaaattggggttcatgcaaccgctgcaaagtggttcaacctctattcaacacaacttcatcatgttcaaaaccttactgatagagtacatggaaccaagctgcatcaaggtgaagactggcatcacaacgagacagtcaaacactggacttataccatagatggtaaggctacaacatgtctggagagtattgcatccat

SEQ ID NO: 180107 - DNA, 261 bp, Glycine max
attagaagacaatggcgggtggtggaaaggtttcgttcaaagtcacactcacctccgatccaaagttacccttcaaagtgtttagcgttccagacgcggcaccttttactgccgttctcaaattcgccgccgaagaattcaaagtcccgccccagaccagcgctatcatcaccaacgatggtgttggcataaatccccagcagagcgcaggcaatgtcttccttaagcatggttcagaactgcgcctgattccgcgtgata

SEQ ID NO: 180108 - DNA, 265 bp, Glycine max
tggaggagcaccaaagggtcctcaactgagagacattgatcgtggagcagatattgtggtagccactcctggtcgcttgaatgatattcttgagatgagaagaattagtcttaatcaggtttcttacctggtgctagatgaggcagacaggatgctggatatgggttttgaacctcaaattaggaaaattgtgaatgaggtgcccaatcgcaggcaaactctaatgtttactgcaacatggccaaaggaggttaggaaaattgca

SEQ ID NO: 180109 - DNA, 263 bp, Glycine max
  unsure (1)..(263): unsure at all n locations
cgcgtcgcttcgcaccagtttcaatgtacgaatatgtttgctgntatggagcgatccgtgaaaaactctgcaaacaggttggtttatcaggacctcgttacaggtgatgacgttctctcggactccttgcgttacaaggaaattctgnatggaatgctgtgggaagttgaggggaagtgggtttgtaaaggagcagttgatgtagacattggtgtcaacacttctgctgagggtggaggagaagatgagggagttgatgatgc

SEQ ID NO: 180110 - DNA, 184 bp, Glycine max
gtttgttaccttcatgaagaggtttatcaagaatttgactcccaagctcgatgcagagaaacaagagttgtttaagaagcacattgagggagcaactaaatacctgctctctaagattaaggatttccagttttttgttggggagagcatgaatgatgatgcttgcttggtctttgcataatac

SEQ ID NO: 180111 - DNA, 238 bp, Glycine max
attcaacactcatatccttatcctgtttctttcaatggaagtcatttctgcttctagcttgaatcccaacgctccgatgttcgtggcactcgcctatcggacggtggaggatttctccgaccagtggtgggacctcgttcactcctccccctggttccgcgactactggctccgcgagtgcttccaagatgcccagttccaaaacgacgacgctttcgacttcgactttgacctagat

SEQ ID NO: 180112 - DNA, 263 bp, Glycine max
gttcaaacacatggctcagcaaagaatttgcctacatcctgcacttcaagactcagaccagggctgtgctttttccctcaaaatgtcgtgtcccaaatcagtaccccaatcttctttgtaaatgcagcctatgactcattccagatcaaaaacattttggcaccaggtggtgctgatccccgtgggcaatggcgtgaatgcaagcttgatatcaaaaactgctcacctaatcaactcagtgtagtggaaggcatcaggacaga

SEQ ID NO: 180113 - DNA, 268 bp, Glycine max
ccttgccgagttaagagcaaggccaagcctaattggatgagtaggagccagttcggcattcgcaatgtcctgtgcggctttgtatgcagagagagtgctctcggcagcctccttacgctcggcgccggtcttgaactcggcaaggtatctgtggtaatctcccttcatcttgaggtagaagaccttggaatcgccggaggaagcggatgcaatgaggcgagagtcgaggagcttgaggataccgtcgcagatgttggagagctcggac

SEQ ID NO: 180114 - DNA, 267 bp, Glycine max
ctttccacttgtctccgaattagttatcttgagaaacattattcccattgctatatattatggctagcatgaaggttacatgggtggttgtgatcatgtgcatggccgtggtgggtgcaccgatgatggcgcaagcatgacatgcaatgatgtgacggtgaacatggcacagtgcctatcctacctgatgcagggaggaacaccttcaacactttgctgcagcggagtcaagaacattcttggctctgctgtcaccaccgttgacaa

SEQ ID NO: 180115 - DNA, 256 bp, Glycine max
tctgaaaccaaacaaagccgtcatcgtccttcagggacgctacgccggcaaaaaagccgtgatagtgcgaaccttcgatgaaggcacgcgcgagcggccctacgggcactgcttggtggcagggataaagaagtaccctgcgaaggtgatcaagaaggattcggccaagaagacggccaagaagtcgcgtgtgaaggcgttcgtgaaactcgtgaactgccagcacctcatgcccacgcgctacacgctcgatgtc

SEQ ID NO: 180116 - DNA, 262 bp, Glycine max
aaattttcttccttcgttggcatctgtgatctcttctcctcacaatgagcagatcagggtcaccaccggatttgaagaagtacatggacaagaagcttcagatcaagctgaatgcaaatcgcatggttgttggtactctccgtggcttcgaccagtttatgaatttagttgttgacaacactgtggaagtgaatggcaatgagaaaaatgacatagggatggtggtaatcagaggaaatagtgtggtcactgttgaggcgct

SEQ ID NO: 180117 - DNA, 242 bp, Glycine max
ggaatgctagagattctcatgtgccggttttggctccacttccaattggctttgctgtgttcatggttcacttggcaaccatcccagtaacaggcactggcattaaccctgctaggagtctaggagctgctgtcatgtacaaccaacagaaggcctgggatgaccattggatcttttgggttggagcatttattggagcagccattgcagccttctaccaccaattcatcttgataccaggt

SEQ ID NO: 180118 - DNA, 219 bp, Glycine max
catcgatcaattaatttccaatggccgatcagctcaccgacgaacagatctctgagttcaaggaagcctttagcctcttcgacaaggacggcgatggttgtattaccaccaaggaacttgggactgtgatgcggtcgcttgggcagaacccaactgaagctgaactgcaggacatgataaatgaggttgatgctgattggaatggtaccattgatttcc

SEQ ID NO: 180119 - DNA, 262 bp, Glycine max
gcagagacctagcttgttacagtcctcttcaacacaaagctggctgagtccacaaggtagctcatctggtattattgttaaaaagacggtcagagtagatattcctgtggacgcatatcctaattttaactttgttggtcgcctcctaggccctagaggaaattctctaaagcgtgtagaagcaagtaccgagtgtcgtgtcttgatcaggggccgaggtagcattaaggatccagctagggaggaaatgatgagagggaaa

SEQ ID NO: 180120 - DNA, 269 bp, Glycine max
cagccactccgcacctcgcagcctctgtgccctcaacaaccatggctgaaatcgaaactaccgttccagatcccacccaaatcgacgtcaaactcttcaatcgctggagcttcgaggatgttgaggttaatgatatgtctctggctgattacattggagtgtccccatcaaagcatgctacatatgttcctcacactgctggtaggtactcagtgaagacgttcaggaaagcgcagtgccccattgttgagaggctcaccaactctctg

SEQ ID NO: 180121 - DNA, 264 bp, Glycine max
gtttttcaagagaacagctctagagacatcagactaccttaaagatgattgtctgtctgtgaattgtagtgttggtgttgtgaggtcacacacggaaggtccgaaaatctataccatagcaatacctccttctagcattggtcagaaatttggacaactgctggaaagtggtaaaggcagtgatgtaaattttgaagttaatggtgatatttttgctgcacataaattggtactagcagctcgttcacctgttttcagagcaca

SEQ ID NO: 180122 - DNA, 267 bp, Glycine max
catatctccatttccatttcctctctctcagtttccaagaatcttaagctatgggaaagtcttacccaaccgtgagcgctgattaccagaaggccgttgagaaggcgaagaagaagctcagaggcttcatcgctgagaagagatgcgctcctctaatgctccgtttggcatggcactctggtggaaattacgacgtgagctctaagaccggtgcgtccttcggaaccataaagcaccctccgaactcgctcacggcgcttaaaacgg

SEQ ID NO: 180123 - DNA, 268 bp, Glycine max
gaacgctgctgccgaaacccttccggaaccctaaggtaagtgagtaatcagtggttgagaatggtggacaaggcgaagggtagaaaggaggaggtggttacacgtgagtacaccattaacctccacaagcgcctccatggctgcacatttaagaagaaagctcctaaagctattaaggagataaggaaatttgcccaaaaggccatggggaccaatgtcgtgagggtggatgtgaagttgaacaagtttgtctggagccagggaatca

SEQ ID NO: 180124 - DNA, 268 bp, Glycine max
gagcgagcgagcgagcagtttcaaagagaggatttgggattgggaaggcgagggattgcgctgcgtctcttcctcttctctttcgattcatccctcattcataatcttccaatccaacaacctcagcctcacactcacacatacacacatctgaacgcgtatcgtccctcccatggcttcaaagcgcatcctcaaggagctcaaggacttgcagacagacccaccaacttcttgcagcgctggtccagtagctgaggacatgttccat

SEQ ID NO: 180125 - DNA, 266 bp, Glycine max
gatcgagataactagaaacagtgtgatgaaaatgaaggtccttgttttcttcgttgctacaattttcgtagcatggcaatgccatgcgtacgatatgttccctctccgaatgaacactggctatggtgcccgtactccggaggtgaaatgcgcaagttggaggcttgctgtggaagcacacaacatctttggctttgagaccattcctgaagagtgcgttgaagcaacaaaggaatacatccatggcgaacaatatagatcagact

SEQ ID NO: 180126 - DNA, 256 bp, Glycine max
ctctttcttcctcttcctcagtagtgcgattttcgattctcttctctgcaactatgcctaaccctaaggtcttcttcgacatgaccatcggcggtcaacctgccggccgcatcgtgatggagctctacgccgacgtgactccgagcaccgccgagaacttccgtgcgctctgcaccggcgagaacggcgcgggcgcgacggcaaacccctccactacaaaggctcgtccttccaccgggtgatcccgaaattcatg

SEQ ID NO: 180127 - DNA, 270 bp, Glycine max
ctttcctttccagttcatacttcatcctattattactttccctctctgcattccaaatggccactgttgaggttgcacagcaaacaccaacaactgtgacagagaatgaaacaacgactgaggtaaccaagattgaggaaactaccccagaacagccagccaccgaggttactgccccagaaacagtcaacgaagaagcaaaagaggaagcagcagttgagactaatgaggcaacagaagttacagaggaagggaaggctgagacaacag

SEQ ID NO: 180128 - DNA, 272 bp, Glycine max
gttctctgaaattttaattgacttttctcccctcataaaaaaaacctaccaatggctcccgcaaaggcagagaagaataccgcggagaagaagccggcagagaaggccccagcggagaagaagccgaagggcaagaagaagatatcgaaggaaggaggaagcgagaagaagaagaagagaacaaagaagagcgttgagacctacaagatctacatcttcaaggtgttgcagcaagtgcacccgacatcgggatctccagcaaggctatgggg

SEQ ID NO: 180129 - DNA, 264 bp, Glycine max
cgaacacacactttgattgagaatggggcgtgttcgcacaaagacagtgaatccgcctcgcggcaagtgatcgagaggtactactctcgcatgacgctggacttccacacgaacaagaaggttctggaagaggtggccatcattccctccaagacgctccgcaacaagatcgcgggattctccacccacctcatgaagcggatccagaagggtcacgtacgtggaatctccctcaagctgcaggaggaggagcgcgaggccgca

SEQ ID NO: 180130 - DNA, 267 bp, Glycine max
gcacctttaaacgccgaaggttcatccaatctccgaaggccttcaccggattgcaaccatgtcgaggagaaaggttagagagccaaaggaggaaaacgtgactctgggcccagctgttagagatggtgaacatgtttctggagtcgctcgcatctttgcctccttcaatgacacctttattcatgtcactgatctgtctgggagggaaacacttgtctccatcactggcgggatgaaggttaaagctgacagagatgaatcatctcc

SEQ ID NO: 180131 - DNA, 268 bp, Glycine max
tatcactctcaactctgcttcttttcaatcagttacattttctttggtattccaatggccactgttgaggttgtgtcagcaaaggtttccctcccagaggacacaaaagaggcatcattgaaggctgatgagaagaagaacacagaagaagttgttgagactccaacaccaacaccagaaaatgtcgtcactgagcaaacaaaggaggaaagtactgaggcaccacaacctgcagcttcagaagacaagccctcggttgaagttgtgt

SEQ ID NO: 180132 - DNA, 260 bp, Glycine max
ctggctctctaagaaacatggctgaagagggtcaggttgtcggcgtccacaccgttgatgcgtggaaccagcaactgcagaatggaaaagactcccaaaaattgattgtggtggattttactgcttcctggtgtggtccatgccgttttattgccccagttctggcagagattgctaggcatactcctcaagtgatcttcctcaaggtggatgtggatgaagtgaggcctgttgctgaggaatattccattgaggccatg

SEQ ID NO: 180133 - DNA, 268 bp, Glycine max
cctacctctttttcttctctctcaacaacttcaccttcttcctcctcgatcatgtctcacttcaagggcaagtaccatgatgagcttatcgccaatgctgcgtacattggcactcctggaaagggtattcttgctgctgatgagtcaacagggacaattggcaagcgtttggccagcatcagtgtagagaacattgaatccaacaggcgagctcttagggagctgcttttcactgctcctggtgttcttcaatatctcagtggtgtca

SEQ ID NO: 180134 - DNA, 264 bp, Glycine max
ctcagatgaatttggtagattggtttaaggcaatggtagcatctcgtcgcagtgaggagctagttgatcctttaattgagattcctccccctccaagatctttgaagagagttttattgatttgtctgcgctgtatagacatggatgtcgtaaagcgaccaaagatgggtcaaattattcatatgcttgagacagatgatttcccctttcgttctgtaagtactacacttcatccctccttctcagtttctcacaaatacattt

SEQ ID NO: 180135 - DNA, 266 bp, Glycine max
gaagaaacaaaaccgaacctctctaaactctccaacgtcgccacccgattcatcgcatttcgcaggctgcaatggcgacgttcgaactgtaccgcaggtcgacgattggaatgtgcctgacggagacgctggacgagatggttcagaacggcactctaagccccgagctcgcgattcaggttctggtccaattcgataagtccatgactgaggttctggaaacgccagtttcagagtaaggtctcccatcaggggacatctccata

SEQ ID NO: 180136 - DNA, 272 bp, Glycine max
ctgactatcccttcaagccaccaaaggttgcttttcggactaaggtgttccacccaaacatcaacagcaatggcagtatatgtcttgacattctcaaggaacaatggagcccagctctaaccatttccaaggtccttttgtcaatttgctcattgttgacggatcccaaccctgatgatccacttgtacctgagattgcacacatgtacaagaccgacacggccaagtatgaggctacagcccgcagctggacccagaagtatgccatggga

SEQ ID NO: 180137 - DNA, 263 bp, Glycine max
aggaatcggtggctgagattcgtcgtaaagtggaccccaccaccagcgtcgtgcttgggaaggaagtgttctccctttgcgttaagcctggttttgatgcggcttttgccatggggtttgtgcttgtcctagatcagatcaacggtgaggattacgttgatgatcgtgcctacacggagcctgcggtgcaccccgccacagaagattagaaaggaatagagtggatttccagatttttcttcaatcacactgggatgatgggt

SEQ ID NO: 180138 - DNA, 239 bp, Glycine max
cttcacttctccaacatgccaaacgacagcgttctgagtcttttcttcttcgttaccctcttcacatgccttctctctgctaattcccacgatgaccatattttcctaccgagtcaactccatgacgatgactcagtgagttgcactgctaccgacccaaaccttaactacaagccggtgatcggaatcctgacccaccccggcgacggtgcctctggccggctcagcaagccaccggg

SEQ ID NO: 180139 - DNA, 269 bp, Glycine max
tggcgaacaatttagatcagactctaaaacagttaaacaacaagctttcttttatgctagtgaacgcgaagtccaacacaacgacatatttatattcggcatagataacaccgtactctctaatatcccatactatgaaaaacatggatatggggtggaggaatttaatgaaaccttatatgatgaatgggttaacaagggcgacgcaccggcattgccagagactcttgaaaattccaacaagctgttgtcccttggcttcaggattg

SEQ ID NO: 180140 - DNA, 260 bp, Glycine max
gtggactttgttttcttttaggcctttatgcaatgcacatacaacaggaacagatatactatgggcaggtttgccaatggttactctgcctcttgagaaaatggctactagggttgctgggtcactctgtcttgccactggactaggggaggagatgattgttagcagcatggaagagtatgaagatagagcagtctcattggctctgaatcggccggagcttcacgctcttactaataagcttaaagctgtacgcatga

SEQ ID NO: 180141 - DNA, 264 bp, Glycine max
caaaattgcgaagaaccctaattgattgattgattgattgattcccatggcgtcccgaagaggtggagtctcactcccagaaagaccaagcaacaactcaggctccgtcctggcgaagatctcgcgctcctccatcgtcacccgcggcaaggaagccgccgtccacgccgcattcgtcgccaagaagctcctccgcagcaccggcaaggccgcgtggatcgccggcaccaccttctcgtcctcgtcgtcctctgatcgtcgaga

SEQ ID NO: 180142 - DNA, 267 bp, Glycine max
cagagtagtgagtagtgagagggcgaacgactgaatgccccagatcgttacgagcgtttcgtcgtccctgaaggcaccaaaaaggtttcttatgagagggacacgaagatcatcaatgcggcgtccttcaccatcgagagacaggagcacactatcggcaacatcctccgcatgcagctgtacagagaccccaatgtcttgtttgccggatacaagcttcctcatcctcttcaataccaaattattgtcaggatacacaccactagt

SEQ ID NO: 180143 - DNA, 269 bp, Glycine max
cgacaagtcataatcgtggatcacgttcttcgacccgaaggcaacgaactcttcacagacgttggcatcgcattcgacatgatgcttctcgctcacaacgccggtggcaaagagatgaccgaagagaactggaagtggctgttcaaggaaaccggtttcgcgcgtcacaacatcatcaagatcaacgctctcccttccatcatttgagcgtttccattctgaagaggatgccactaccaaaactggatgtgggttttatgttgcatggg

SEQ ID NO: 180144 - DNA, 270 bp, Glycine max
caacaatcgatattctttggaccatatttcctagtgtcatactaatgttcattgctataccatcgtttgctttgttatactcaatggatgatattgtagtggatccagccattactatcaaagctattggacatcaatggtattggacttatgagtattcagactataacaactctgatgaacaatcacttgcttttgatagttatatgattccagaagatgatctagaattagggcaattacgtttactagaagtggacaatagagtgg

SEQ ID NO: 180145 - DNA, 263 bp, Glycine max
cggctcgagattgtttgttgttgtaactcgttcttcttcttttgttgttctgtgtttgtgtttgctttttctctcacctgaaaatgtcttgctgcggtggtaactgtggttgcggaagctcctgcaagtgcggcaacggctgcggaggctgcaagatgtacccagacttgagctacactgagtcaaccaccaccgagaccttggtcatgggagtggcacctgttaaggctcaatttgagggtgctgaaatgggtgtgcccgct

SEQ ID NO: 180146 - DNA, 263 bp, Glycine max
gatcgagataactagaaacagtgtgatgaaaatgaaggtccttgttttcttcgttgctacaattttcgtagcatggcaatgccatgcgtacgatatgttccctctccgaatgaacactggctatggtgcccgtactccggaggtgaaatgcgcaagttggaggcttgctgtggaagcacacaacatctttggctttgagaccattcctgaagagtgcgttgaagcaacaaaggaatacatccatggcgaacaatatagatcag

SEQ ID NO: 180147 - DNA, 235 bp, Glycine max
gagacatcagtgcctccttctggtctccctggtgttggtctcctacgctgcccggtcggaatcagcgctgggcggctggagccccatcaaggacgtaaacgacagccacgtggcggagatcgccaactacgcgctgagcgagtacgacaagcgttctggggccaagctcacccctgtcaaggtcgtcaagggcgagactcaggtcgtttccggcaccaactaccgtctcgtcctc

SEQ ID NO: 180148 - DNA, 168 bp, Glycine max
cggcaacggatatctcggctcttgcatcgatgaagaacgtagcgaaatgcgatacttggtgtgaattgcagaatcccgtgaaccatcgagtctttgaacgcaagttgcgcccgaagccattaggccgagggcacgcctgcctgggtgtcacacatcgtttcaaaagaa

SEQ ID NO: 180149 - DNA, 101 bp, Glycine max
agagtttgttgtgagctataagctagtttatcgtgaggagaatatgaagttgtttgtcttctttgttgctgcagtacttttggtagcatggccatgccatg

SEQ ID NO: 180150 - DNA, 262 bp, Glycine max
ggaaagatgagtagttcatcaaggccggtgccgaggagagagagtccatggggagtcaccggagagaatcatcctgaacccacagctcaccgctgcaatgaccgtgtcgaggacattattcaggcttgatttgagggatacccattcaagactgttccgggagctttcaagctcttctggcagtgcatgtgttccaaacccggtgaggaaccaacagccgcatttacttatctggatttggagcctctaaagagagaaacgg

SEQ ID NO: 180151 - DNA, 248 bp, Glycine max
tggagatactgttgggggtcttttaaatgctacatttggaaatgcaacagagctgatcatctccatatatgcactgacaagtggaattacacgcgttgtccagctctctttgctgggttcaattttgtccagatatgttactggtgcttgggtgtgcattcttatgtggtgggattgttaatcacgagaagtagcaagtgtttaactagtgcagcaactgggagctcaatgtacctggctagaacact

SEQ ID NO: 180152 - DNA, 250 bp, Glycine max
cttcttcgttccttccccaactcaatcttcgccttcgtccacaacaactcctccttcacgatcgctgccaacgttactttccatttgtaaccttcatgctcgagacaaaaattgcgaacgcagcatctggtattgccgtccatgctgagtgcaagctacagtttctggagatcaacgcgaacaggacgtaccggtatatcgttttcaggattgaggagaaatcgcagcaagttattgtggagaagccggg

SEQ ID NO: 180153 - DNA, 224 bp, Glycine max
gcctcggctatggttcggaaacgaagaagggttctgtcatcatatccctatgaggggcgagtggaagaagaagcgtatgaggagcgctgaagacgaagcgccgaaagatgagacagagatccaagtagtgcgttcaacctagtttgtttccgttgcttttagaattgcctatgttgtcaaataggacacccagttcttagtgggactgggctctgcttgttgat

SEQ ID NO: 180154 - DNA, 246 bp, Glycine max
ctttcttggaactttgttactctcacacatgtctcgctccgtgcctatggtttcaaccattttcctcttgcttctgcttctggtggccactgagatgatggggccaacaatggtggcagaagcaagaacttgtgagtctcagagccaccgtttcaaggggccatgtttgagtgacaccaactgtggctctgtttgccgaaccgaacgtttcactggaggacactgccgtggcttccgtcgcagatg

SEQ ID NO: 180155 - DNA, 266 bp, Glycine max
  unsure (1)..(266): unsure at all n locations
gtgaaagacaatccgaggcgaagagaagagaaaaattaagatggaggggaaggagcaggatgtctcgctgggagcgaacaagttcccggagagacagccgattgggacggcggcgcagagccaagacgacggcaaggactaccaggagccggcgccggcgccactggttgacccgacggagtttacgtcatggtccttttacagagcagggatagcagagtttgtggccacttttctcgntctatacatcactgtcttaaccgtca

SEQ ID NO: 180156 - DNA, 271 bp, Glycine max
tggtatctctctgtatattcaaatacacagtatactatcacattcgcttcggtacttctctcttcattgtcgcagacacaaagcagcactaaaggaagcccttcactacgccgattaagcatgtcaggcagaaaagaaacggttttggaccttgcaaagtttgtagacaaaggcgttcaagttaagcttactggtggaagacaagtgacagggactctgaaagggtatgatcaattgcttaaccttggtctagatgaagctgtagagtttt

SEQ ID NO: 180157 - DNA, 273 bp, Glycine max
gtgcaaaagagcgtcgtagtcgcaaccctaatcagaagaagcgcagttcaagcgagtgacagccaccagccatgggtcgtatgcacagccgcggtaagggtatatcctcttctgctttgccctacaaaaggacacctcctagctggctcaagatctcttcgcaagatgtcgaagaaaatatctgcaagtttgcgaagaaaggtttgaccccgtctcagattggtgtcattctcagagattctcacggtattgctcaggtcaatagcgtcactg

SEQ ID NO: 180158 - DNA, 270 bp, Glycine max
gaggaattatgtgctgcatagcccactcaggaccaaattcttcagcaaggcgtttcaagttgttagcagctgcttcacgaattgaatgaaccttatcctgtaaccactgcatgcaaagagcaccaagcttgtcatcgaaaaaactaaccccaattgacttgccaataagggtatatattctataattgcaagccggaccctccaatgcctatcctcagcaagctcaacaatggctggtaacaaagactgagataacagatcaattcctat

SEQ ID NO: 180159 - DNA, 268 bp, Glycine max
cctccgaactccgaagcccttcagcaaccatgtcgaggagaaaggttagggagccaaaggacgaaaatgtcactcttggtccagccgttagagacggtgaacatgttttcggcgtggctcgcatctttgcctccttcaacgacacctcatccatgtcactgatttgtctgggagggaaacccttgttcgcatcactggtgggatgaaagttaaagctgacagagatgaatcatctccatatgctgctatgcttgcagcacaggatgtt

SEQ ID NO: 180160 - DNA, 265 bp, Glycine max
ccgtctctccaacctttcactttcgtttctcagttttattcgaatccctctctcaatctcctttccaaatggccagcgttgaggttgcacagcaaacaccaacaacagttccagaaaatgagacaaccgaggtaagcaagacccaggaacaaccccagtcactgaggctcctgcaacagaacaaccagcagctgacgttgctgcaacagaagaaccagccgctgaggctcctgccccataatcaacaccgcagcaccaaaggcag

SEQ ID NO: 180161 - DNA, 268 bp, Glycine max
gtgcaaatagagtggtctttgtggactcgtgacattgaagaagagatagtccctctctgcagggaacttggtattggaattgtaccatatagtcctcttggtcgtggcttttttggcggcaaaggagttgtggaaaatgtgcctaaaatagctccctgaaagcacatccacgctttcaagccgagaacttagacaagaacaagaatatatatgaacgaattgaaggccttgctaagaagcatcaggccactcctgcccagttggcatt

SEQ ID NO: 180162 - DNA, 267 bp, Glycine max
cgttctttgtctcgcaatcttcactattttcaccgagcatttgcattccacattgaatatggctcaggctacacaatctaatgctgagttattggagtggcctaagaaagataagcgccgcttcctgcatgttgtgtatcgtgttgtgatcttgatcgcaccattaagttttatactgaatgttttgggatgaagcttttgaggaaaagagatattccagaagagaaatatgccaatgcttttcttggatttggccctgaacaatcc

SEQ ID NO: 180163 - DNA, 270 bp, Glycine max
cgtttcctagccgaaaccctagctagctctttcttaatccataatctctcttctcttcttctctttacatctgcaaaacaaaaatgtctcacttcggacgttcgggtcccccagacatttccgacacttactctcttctcgttctaacatcaccttccgtaccaccgccgacgacctattccctctcttcgacaagtacgggaaggtcgtcgacatcttcatccccaaggatcgaagaactggtgagtcaaggggttttgcattcgtgcg

SEQ ID NO: 180164 - DNA, 267 bp, Glycine max
ctcattaattgcaagaatggcacttcgttgcttggtgatgtccctttctgttctcttcactcttggtcttgcgagagaaagccatgccagagacgaagatttttggcatgctgtttggccaaacactcccattccaagttcattggagatcttctaaagcctggccctgcaagtgttgaaatcgatgatcaccctatgcaaattgaagaaacacagtacccgaaaaccttcttctataaagaagaccttcatccaggcaaaacaatg

SEQ ID NO: 180165 - DNA, 269 bp, Glycine max
cctgctcgcgtgtcgattctccaccactattcccttcaccccaatcacactttccggtagctgctgctattagtgcagcagcactgtccgctggatgcaacaacggctgtacttggtcttctacttttatatttgggcaaggctgagctagggacaaaatatccagggcaatacaatatggttccaaatttttgagtcatggggaacctggtactgctcataatgtccacataacaaccagcttggcacgcaaagtcttccgtctcttt

SEQ ID NO: 180166 - DNA, 268 bp, Glycine max
gtttaacgaacctcgtgtggtggctgctcttggctatgataatggtttctttgcccctggaagatgctcaaacgaatatgggaattgtactgctggcaactcaggcactgagccttacattgttgcccacaatttgatattgtccatgcagcagctgttcaaagataccgagcgaagtaccaagaaaagcaaaagggaaggattgggatcctcttggattttgtttggtatgagcctcttacaagatcaaaggctgacaattttgcag

SEQ ID NO: 180167 - DNA, 270 bp, Glycine max
caaatcaaagccatggccacctccaacttctctattgttctctccgtctccctagccttctttttggtgctacttaccaaggcacactcgaccgataccgtttctttcaccttcaacaagttcaacccagtccaaccaaacattagctccaaaaagatgctagtatttcatcctctggggtgttacaactcaccaaagttggcagcaacggcgtgcccacctcgggatctctcggtcgtgccctttacgctgccccaatccagatttggg

SEQ ID NO: 180168 - DNA, 271 bp, Glycine max
ctttctctctctctctctctcacccagatcttgtagcaatggcgagcgctcccactccacgcgaagagttcgtgtacatggcgaagctggcggagcaggccgagcgctacgaggagatggtggagttcatggagaaggtctccgccccgccgagagcgaggagctgaccgtggaggagcgtaacctcctctccgtcgcctacaagaacgtgatcggcgctcgccgcgcctcctggcgcatcatctcctcaatcgagcagaaggaggagagc

SEQ ID NO: 180169 - DNA, 266 bp, Glycine max
cgcagagctgcatccatgccacaccagtttttcagttataaactccctgaatcctcacaagggacgacggataagcgttgctgttccacccaagtttccaaacttccggagggaagcatctctgcaggggaatttggaggctatagagtcccaacttcggtgcctgtgcgtgtagcatacgagcttcttctagctggtcatcgatatttggatgtaaggaccccggaagagttcgatgctggacacgctcctggcgcaattaacat

SEQ ID NO: 180170 - DNA, 269 bp, Glycine max
gagaaagaagggggagctatagccataaggagaaaaactttcaaagaagtgaaagcaaaaaagagttgttcttttcctttctgctgataagctgtgtgagtgagttcattgacaagcctgaaatgacaactatgctgacaaatgagatggtctgagtttgaacctcaaggagactgagctttgcctcggtttgcctggcgggggctctgaagtggaaactccaagggccactgggaagagagggttctctgagaccgttgatctgaagc

SEQ ID NO: 180171 - DNA, 267 bp, Glycine max
cgcttgatgatgcagtccacacagcaatattgactctgaaggaagggtttgagggacagatctcaggaaaaaacattgaaattggcataattggagctgataaaaagttcagggtattgacaccagctgaaattgacgactatttgctgaagtagaataatctgcaatgaagaactcttgtgttcctgaagttgtttgtttcacagttgggtttaattggtagcttaattattgacattgtgatggcaatagtgaatttgcgagcta

SEQ ID NO: 180172 - DNA, 269 bp, Glycine max
caagatgtcgaagagaggacgcggtggttcggcggggaacaagttccggatgtcgctgggtctgccggtggcggcgacggtgaactgcgccgacaatacgggggcgaagaacctctacatcatatcggtgaaagggatcaaaggggtttgaaccgtctcccctcggcttgcgttggcgacatggtgatggccaccgtgaagaaggggaaacccgatctgaggaagaaggttttgccagctgtcattgttcgccagcgcaagccatggcg

SEQ ID NO: 180173 - DNA, 237 bp, Glycine max
ctgctcgaggttcatttagaagtgaataatcttcctacaaattcttctacttgctaaatgaagaactaattgaatgtattttatactgcaagatattaaatgtacttacattttcatttagttcttttattgggcaaaaaaaaaaaaaaaaaaaaaaaaaaaaactcaaaaaaaaaaaaaaaaaaaaaaaaaaaaaaaaaaaaaaaaaaaaaaaaacacaaaaaaaaaaaaagaaaa

SEQ ID NO: 180174 - DNA, 224 bp, Glycine max
cacgcgtacgttcggacttcggcccgagctagatgtcgaagagaggacgcggtggttcggcggggaacaagttccggatgtcgctgggtctgccggtggcggcgacggtgaactgcgccgacaatacgggggcgaagaacctctacatcatatcggtgaaagggatcaaagggcgttgaaccgtctcccctcggtttgcgttggcacattggtaatggccactg

SEQ ID NO: 180175 - DNA, 268 bp, Glycine max
tgtggccgttcagtgacaccgagtgtaaagaagaggagagaaaccgagaaagaagaagaaaactagggttttgcaattgctgcaatggcgcatcaaggagaaccggcgaactgcggtggggtgagctcgaggaggacgacggcgagatctggacttcctcctgccgccgcggcaggtgataggccccgacgagaacgggataaagaaggtgatcgagtacaagttcgacgaggacgggaacaaggtgaagatcaccaccaccacgcgc

SEQ ID NO: 180176 - DNA, 267 bp, Glycine max
gtcttcaaaaaccctaatgtgctcttccttgagcatccagcagcaacaaacaagaggggtttgccttgtgccgtttgtgctgttttcgggacgaagaagaagatggtgtcaggttctggaatctgcgcaaagcgggtggtggtgacgcgcgccaccacatgctgggtcgtctagcctccatcgtggcgaaggagcttctgaacggccagaaagtggtggtcgttcgctgtgaagagatttgcatctcgggcgggctggtgaggcaga

SEQ ID NO: 180177 - DNA, 265 bp, Glycine max
catttttctgtcactacccactcctttctctgtctccatcgtttcgcattgcacaagcactctctctttcccttaccctttttcaggtttcaacgctccaactatccatggcaaaccgctggctcagacccgaggtgtatccatgttcgctgcggttggtgctgctgttgggatctgtggattccaactggttcgtaatatctgcatcaaccctgaagtcagggtgaacaaggagggaaggaaggcaggagttttggagaacttt

SEQ ID NO: 180178 - DNA, 263 bp, Glycine max
cgggtttggatcctgagtataataggttgttcaatgagggcatggtgtgcactgctagggttgtgtccaaggctgtgatcactggctacaaagatgggttcaaccagattaagtccttggttgatgttggaggtggcattgagggtctctttcggagattgttagggcttatcctcatatcaatgccatcaactttgacttgcctcatgtggttgccactgctcctaagttcgatgggatcacccatgttggaggtgacatgt

SEQ ID NO: 180179 - DNA, 264 bp, Glycine max
ttctgaataaactaaggcagaaacatgcgctcccttctggtgaggggggaccatatggggtggacatagccactggtggaattgctgactcgtttgctaactttgtctgggagcctgcaattgtgaagatcaatgctataaagctgcaacagaggctgcttgccttatcttaagtgtggatgaaacaattaaaaatcccaagtctgagagtgcacaaggagatgctgctgcaagtgccatgggcagacgtcgtggaggtgcatt

SEQ ID NO: 180180 - DNA, 259 bp, Glycine max
ctagaaggatctgatgagatctttggagggtatttgtacttccacaaggcacccaacaaggaggagttccacagagaaacatgccgcaagatcaaagcacttcaccaatatgactgcttgcgagccaatcaatcaacatttcttggggtctagaagcccgtgtaccatttttggacaaggcgtttatcaatgctgcaatgagtattgaccctgagtggaagatgataacaagagatgaaggacgaattgagaagtggat

SEQ ID NO: 180181 - DNA, 157 bp, Glycine max
gtgagagacatggcttccttaagctccttagtgctgctccttgcagctctaattctatcccctcaagttcttgcaaactatgagagtcccccagtgtacaagcctcccactgagaaaccaccagtttataagccgccagacggaagcctcctgttta

SEQ ID NO: 180182 - DNA, 203 bp, Glycine max
ctattgcagtgggagatgtcattccagacggcattttggcttacttggatgaagataacaaaccccaaactgtctctattcactctctcgccgccggcaagaaagtcatcatctttggggttcccggtgccttcactcctacatgagcttgaagcacgtgcctggcttcattgagagagcagaagagctgaaaggaaagggta

SEQ ID NO: 180183 - DNA, 272 bp, Glycine max
tgcgggttgtttgttgttccaattcaggcgtgagtgttttccctagttgtcttagattccctccactgatcgcaatttcaacaacaccctcttcgatccgctttctaaattctccacccctccgttccactgcttcgtcgcaacacttacaataatggcttcgaagaattctcaacaagacacgcgcttagcgagaatcgcctctgcaatccgagtcatccccgactttcctaagccaggaattttgtttcaggacataaccacgctgcttc

SEQ ID NO: 180184 - DNA, 264 bp, Glycine max
gtgaaagtgagataaaataaaaatcaaagagcataatgtcagggatcattcacaagattggggagaccttcatgtgggagggcacaagaaggaggaggagcataagggtgagcaccatgctggagaatacaaaggggagcacatggtgaacacagtagtgagtacaaaggagagcatcatggtgaacacaaagctggagagtaccatggtgagcacacgccagagcacaaagaggggttcctagacaaagtcaaggacaagatc

SEQ ID NO: 180185 - DNA, 264 bp, Glycine max
gtagaacttaagggatggggatactcaaacagtgacgtgcgtggatatcttagtgctctatccattttgcaggattactacccagagagattggggaagttgtttattgtgaacgcaccatacatctttatgaaagtgtggaaattgtttacccattcattgacaacaaaaccaagaaaaagatagtatttgtggagaaaaataaggtgaaatcaacactgctagaagagatggaggaaagtcaggtcccagagatattcggtg

SEQ ID NO: 180186 - DNA, 260 bp, Glycine max
gggagctggatggaattcaagtagagttgcaagcaactgatcctactgagatgggtcttgatgtgttcaaaagccgtgccaactaaaatgattatataaaatagtaggctttctggtgggagcagcacccctgaagccttagtactcatatggaaaatatcctagtttgtgggatggtcaacttgggtagttatggtcccaaactctcaattttccaagttgtggcataaaattctattgcaccttttgacaagctttgc

SEQ ID NO: 180187 - DNA, 264 bp, Glycine max
ctagaaaagaccatcaaagtttcacttcagccttatccggtttagggtttcggtttttgacccaacctttgacgtatcgaaaccttaagtttcggatcaggtctgagcaatctggttggtagaacctttggtcttagagagtaagttttatgtctgaattagacgatcaaattcctactgccttcgatccttttgctgatgcaaatgctgatgactcgggtgctgggtcaaaggagtatgtgcatattcgcgtacagcagcgaa

SEQ ID NO: 180188 - DNA, 263 bp, Glycine max
tgaccttcggtttggtgtacacagtctacgccactgccgttgaccccaagaagggcaatttgggaattattgctcccatcgccattggtttcattgttggcgctaacattttgttgggtggggccttctccggagcagccagaaccctgctgtgacatttgggcctgctgtcgtgagctggacctggaccaaccactggatctactgggccggccctctcatcggaggtggaattgctgggcttatctacgaggttgtcttca

SEQ ID NO: 180189 - DNA, 264 bp, Glycine max
ctgtttgttgtgagctataagctagtttatcgtgaggtgaatatgaagttgtttgttctctttgttgctgcagtagttttggtagcatggccatgccatggcgcaggctaccaaaggttccctctccgaatgaacactggtatggtgagcgttcttcggaggtaaaatgcgcaagttttaggcttgctgtggaagcacacaacatccgaacctttaaaaccattcctgaagagtgcgttgaaccaacaacggactacattaatg

SEQ ID NO: 180190 - DNA, 261 bp, Glycine max
ctaaattctctgtctctctctctctctctcgatcaatcatggctttccccaatcagcacaccgtcgattaccctagtttcaaactcgtcatcgtcggtgacggtggtacaggaaagacaacgttcgtgaaaaggcatcttacggtgaatttgagcagagatacgaaccgaccattggagtggaggttcacccattggatttcttcacaaactgtggaaagattcgcttctactgttgggatactgccggacaagagaagtt

SEQ ID NO: 180191 - DNA, 275 bp, Glycine max
ctccttcgtgctcaatgaatttcgagtccaaggcagacgccggtgcctccaaaacctaccctcagcaagccggtaccattcgcaagaacggctacatcgtcatcaaaggacgcacctgcaaggttgtggaagtctcgacttccaaaactggaaagcacggtcacgccaagtgccactttgttggaattgatattttcactgccaagatacttgaggatattgtgccctcttcccaccaatgtgatgttcctcatgtgaatcgtactgattaccag

SEQ ID NO: 180192 - DNA, 254 bp, Glycine max
cttcctcttaagcttgctactgagtttccacactgcataccttacgtcttccgaattcgaagttaatttgcaagatggctaaggcaaaggctcagatcaacattgttgtggttggtcatgtggaccctgaggaggcaaccccattaacgagctgaagaagcctgttgtggagaaagaagctccaggtgctgccatatgagggcatgcacgtacggcctcggaggggaacccgaaaattatgttaacaaaataat

SEQ ID NO: 180193 - DNA, 261 bp, Glycine max
ctctctgcattattctcttcccttttctatctccctctgcaaaaacgaagtaaatgggtcggcttaatctcctacttgtgtggtcactctctttaacacttttccttaattatctacacccaacctctgcccagctcagccaaaccactatgctaacatatgccccaaccttgaaagcatcgttagacaagccgttactaataagttccaacaaacctttgtcaccgtcccagccacccttcgcctattctttcacgattg

SEQ ID NO: 180194 - DNA, 263 bp, Glycine max
tgcagagtactacagaattattaatggcctgaatttcgaagataaacttcatccaggtggtccatttgacacattggggcatgcaaatgatccagaccaagctgcactgctaaaggtgaaggagattaaaaatggaagcttgctatgtttgccatgcatggtttctacttccaagcttatgtcactggagaaggtcctgttgagaaccttgcacaaacatctcagtgacccttttggcaacaacttgctcactgacatttctg

SEQ ID NO: 180195 - DNA, 233 bp, Glycine max
gttgatatagaaaggtaggataaaccagtggccaaggaatatatggcgttttctatggttttcattgttagcaacattatgctgcttttcagttcagcatttgccaaaactgctagtcctccctctctgagcccaactccacaccagccccggcacccgactacgtgaacctcaccgatttgccagttgttgcgggtccatttcaaaccttccttggataccttgagtccacc

SEQ ID NO: 180196 - DNA, 279 bp, Glycine max
ttcggctcgagcacaaatctgactgtttgcacttcacttcgtttcattctctcaaacaccaaacccaagtgcttatgtgttccttcaaaacatggttcaatttgttcatcattttccttgcctcggctgcaacacccatcttctcattaacagatccccaaatcaactctccacaaactttctagaaattgccaagaaacctgaagtatttgattggatggtgaaaatcagaaggaagattcatgagaatccagaattgggttatgaggaatttgagac

SEQ ID NO: 180197 - DNA, 262 bp, Glycine max
ctttgcgcagttccctacctctcctttcaagatgcagatcttcgtcacagaccctcaccggaaagaccatcacccttgacgtggacagctctgacaccatcgacaacgtcaaggccacgatccaggacaaggaacgaattccccggatcagcaacgtctcatcttcgccggaaagcagctctaggacggccgtaccctcgtcgactacaacatccagtacgggttaaccctgcaccttgtgcttcatctacgtggtggtatg

SEQ ID NO: 180198 - DNA, 260 bp, Glycine max
cttccacggcagtgtttctctttctctccctctctatcttcaatttcgagaagtagctccagtattatatggcgtccttcagagcattctggaacagtccagttggtcccaaaacaactcacttttggggacctattgcaactggggatttgtagcagctggattggctgacctgaacaaacctccagaaatgatctctggcaacatgacaggagcaatgtgtgtctattcagcattgttcatgagatttgcatggatgg

SEQ ID NO: 180199 - DNA, 255 bp, Glycine max
gtggctttgaaaatactatagtattaactgtttgaaaaatcatcaatctgatggcaacacggaagtatatcagtcctttaacagcgagttgatgattatgcatcatcagtaaaaaaaaaaaaaaaaaaaaaaaaaaaaaaaaaaaaaaaaaaaaaaaaaaaaaaaaaaaaaaaaaaaaaaaaagagaaaaaaagaaaaacggaaaaaaaaagaaaaggaaaggagaagaagagagggacagaacgaaaggggaaa

SEQ ID NO: 180200 - DNA, 260 bp, Glycine max
ggcttgttcagtctttcttggaactttgttactctcacacatgtctcgctccgtgcctttggtttcaaccatttttgtcttgcttctgcttctggtggccactgagatgatggggccaacaatggtggcagaagcaagacttgtgagtctcagagccaccgtttcaaggggccatgtttgagtgacaccaactgtggctctgtttgccgaaccgaacgtttcactggaggacactgccgtggcttccgtcgcagatgctt

SEQ ID NO: 180201 - DNA, 261 bp, Glycine max
ctctaccctactattatccctttccttcctgcctctctttgctttcctggctctttcagaagatgttgaacaagttgtggacataagtggcaaccccattttcccaggtggcacatattacattatgccatcaacttgggcgctgccggtggtggattgaaactaggccggacaggaaactcaaactgcccagttactgttttgcaagattactcagaaatcttccgtggcacaccagtcaaattcagcatacctgggata

SEQ ID NO: 180202 - DNA, 262 bp, Glycine max
ctgcaaaaaccattctccttcggtgctcttgaaaacatgggaaaacagagcacagaattctctgccctcaactgcatcgacctctccaaccctgacatcaaccaatccgtcaatttactcaaacaggcatgtttggattcggttttttctacgttgtcaatcatggaataagccaggaattcatggaagaggtttttgcacagagcaagaaattcttctctcttcctcacaaggagaagatgaagattctcaggaatgaaaa

SEQ ID NO: 180203 - DNA, 262 bp, Glycine max
gtgaagtactcaagggagcctgacaatccaactaagtcttgcaaggctagaggcgccgaccttagggttcattttaagaacacaagggaaactgcctttgcaatcaggaagttgcccttggtcaaggctaaaaggtactggaagatgttcttgcccacaagcaggcaattccattcagacgtttttgtcgaggtgttggaaggacagcccaggctaagaatagacactctaatggccaaggacggtggcctgtcaagtcagc

SEQ ID NO: 180204 - DNA, 274 bp, Glycine max
ggaagacagctcatgaatcttcttcttcttggtgccatttcactccccactgctggaatgcttattccctacacctacttctttgtccctccaggttcaggttcttcagctggcggtactgttgccaaggatgccgttggaatgatgtaatctgccgagaattggctcaaggcacatggacctggtgaccgaacccttacacaaggattgaagggagatcctacctatcttgttgtggagaaagacagaacccttgcaacatttgccattaatg

SEQ ID NO: 180205 - DNA, 275 bp, Glycine max
gtcactcactgcagatctcaattgcatcgctgtccatggctaccatcgttagcatcaaggcccgccagatccttcgacagtcgtggcaatccaactgtcgaggtggatttgacttgctccgatggtacttttgccagagctgcgttccaagtggtgcatccactgggatttatgaggcccttgaattgagagatggaggatctgactaccttggaaagggtgtatcaacggctgttgacaatgtgaacaccgtcattggccctgctttgcattgg

SEQ ID NO: 180206 - DNA, 270 bp, Glycine max
caggcagttatccattcacatttcacagttagcacttagcagactctgctgcagtgaggtgaggggaggtttgtttgttgtttcgtttttcctttcctttccgccagaatccgttgagaatggcgttgccggtagtcgtcgagcagagtacctcaaggaggtcgacaaggctcgccgcgatctccgcgcactcatcgctaacaggaactgcgctcctctcatgctccgattagcctggcacgatgccggaacttacgatgctaagaccaa

SEQ ID NO: 180207 - DNA, 271 bp, Glycine max
ctgtttagctccttcaccattggaaattgtgaatcccaaggcttcaaggatttcatgacatgcgcagcaagttgatggatcttttgaacagctccgactatgtcccgacctatgaagacagggctggcgactggatgcttgtcgtgatgtgccatgggagctgtttgttgaatcatgcaagcgtttacgtatcatgaacggaaaggacagctattggactggcaccaagagccgtggagaaatgcaagaacaggagctagactagtagtta

SEQ ID NO: 180208 - DNA, 268 bp, Glycine max
gtattcgataacacctatcaggctacaattggtattgattttctatcaaaaactatgtatcttgacgatcgaactgttcgactgcagttgtgggatacagctgggcaggaaagatttagaagtcttattccaagctacatagggactcatctgtagctgttcattgtatatgcatgttgcaagccggcagactttcttaaatactgctaagtggattcaagaggtgcgaccagaaagaggcagtgatgtcattcattgttcttgttgg

SEQ ID NO: 180209 - DNA, 265 bp, Glycine max
ctgtagcccaagccctatacaaccaaaccctaacacacacccatttgattcagtttccatggctagcctcaaggttgcatttttggctgcagtgctctgcatggttgtggtgagtgcacccatggcacatgcagctatcacggcgggcaggtgacgaatagcctgatcaattgcatcggttacctccagaacggaggaacgccgccgtcgggatgctgcaacggagtgaagagcctcaatgccgccgccaagaccaccgccgacc

SEQ ID NO: 180210 - DNA, 271 bp, Glycine max
cgcaacccttcagcaaccatgtcgaggagaaaggttagggagccaaaggaggaaaatgtcactcttggtccagccgttagagacggtgaacatgttttcggcgtggctcgcatctttgcctccttcaacgacaccttcatcatgtcactgatttgtctgggcgggaaacccttgttcgcatcactggtgggatgaaagttaaagctgacagagatgaatcatctccacatgctgctatgcttgcagcacaggatgttgctgacagatgtaa

SEQ ID NO: 180211 - DNA, 267 bp, Glycine max
gtccatttctcactcgccgtcgtctcttccgtctagggtttctcctcttcacaaaaatggttgccgcaaaaaaaactaagaagacccatgagagcatcaacaacaggctcgctctcgtcatgaagagtggcaaattcacctcggttaccagaccgttctcaaatctcttaggagctccaaagggaaattgcattatcattgctaacaactgcccccctttgaggaagtcagagattgaatactatgctatgttggcacaggttgggg

SEQ ID NO: 180212 - DNA, 132 bp, Glycine max
cgcgtcgccactgcaaattatgcttactcattgtggatgacctagtttctgttgatactcttattgaggaacatctcacagttgagcccatcaatgcatatgtccagagttctgacattgtggccttcaata

SEQ ID NO: 180213 - DNA, 275 bp, Glycine max
ctctagggaacaaaaaatgggatcctgcaaaccgacacatcggcattgacgtgaactcgatcaagtccgtcaaaacggcatcgtgggggttgtccaatggacaagtggcggagattctcgttacctataatgccgccacgagcctcttgttgcttctctgatccacacttcaaagaaaacaagttacatcctctctgacacagtgaacttgaagagtaatcttcccgaatgggcaagcgttgggttctctgccaccaccgggttgcatgaaggct

SEQ ID NO: 180214 - DNA, 272 bp, Glycine max
cggccaagtgaaagtgagagaaaataacaatcaaagagcataatgtcagggatcattcacaagattggggagacccttcatgtgggagggcacaagaaggaggaggagcataagggtgagcaccatgctggagaatacaaagggagcaccatggtgaacacagtagtgcgtacaaaggagagcatcatggtgaacgacaagctggagagtaccaaggttgagcaccgccagagcacaaagaggggttcctagacaaagtcttggacaagatc

SEQ ID NO: 180215 - DNA, 273 bp, Glycine max
cggccaaagtaagaggtatagtgttctaggagtgagcaacttgtgagcacatggcttccaaggctgcacttctcttgtgtctcaatgttctctttttcactgtggttagttccacatatgtgccatgtcatgcaccccccaaactcccaaacacccatctgtcccaaagccacgatccccaaagctcagcagctgccccacagacactattacgttcggtgtgtgtgctgctgtgttcggtttgattaatgtggcacttgggacgccaccaca

SEQ ID NO: 180216 - DNA, 263 bp, Glycine max
cggttgctactgagtttccacactgcataccttaggtcttccgaattcgaagttactttgcaccatggctaaggaaaaggctcagatcaacattgtggtggttggtcatgtggaccctgaggaggcaaccaccattaacgactgaagaagcctgttgtggagaaagaagctccagggcatgccatatgagggcatgcacgtacggcctcggaggggaaccagaacattatgttaacaaaataatctggaaccctatgtatcag

SEQ ID NO: 180217 - DNA, 242 bp, Glycine max
cggtggtttcagtgcgtgatcggtgttcacttgatccttcataagtcgtcatcatcatcatcatcatcaccgttgattgaagaagatgccgatcagaaacatcgccatcggaaggcctgaagaggctactcaccccgacacgtgaaggcggggttggctgagttcatctaccaccttgatcttcgtgttcgccggttcatgttccgagcatggctacaacaagctcaccgacaacggccgcg

SEQ ID NO: 180218 - DNA, 96 bp, Glycine max
ggatcttgcacgtcctgatcttattgtgttcaagtgacagacaaatcagaacagggaagagagatttgaactgtaaatgccacgtgacagtgaaaa

SEQ ID NO: 180219 - DNA, 166 bp, Glycine max
cggtctggtttatagatctttgcgaaggaggtttacagcgctcaaccaaagatgcagaacgaggaaggacacagcactgagctttacattcctaggaagtgctccgccacaaacagattgattaccgctgaggaccatgctcggttcagatcaacttggggcatgt

SEQ ID NO: 180220 - DNA, 273 bp, Glycine max
cgtgcgataagcaatagaattcagcgagagagagaaagagagtctcttgctctgtatctttgctttgatcattgccaatcttcaatttttctatatatccatcaatccgctgagtgcacagttctaatccttcgcctattgggtctactcctttctctcttcgtttccgctcgatccaattttcttcccatggctacgatcggacacaacaatctcaatgccaaattggttcttctcggggacatgggtgctgggaaatccagcctcgttttg

SEQ ID NO: 180221 - DNA, 271 bp, Glycine max
cggttcctttagcaaattccaattcccaatccaaaaccctaatttaggtcaaagaaccaattgtgatgggaccaaaggcagagaagaagccagcggagaagaagcccgcggaggagaagaagtcgacggtgggagacaaggtccggcggagaagaagccgacagcggcaaagaagcttcctaaggagggaggagccggcggagaaggggggaagaagaagaagaggaacacgaagagcgtggagacataccagatatacatattccaggtg

SEQ ID NO: 180222 - DNA, 250 bp, Glycine max
cggggtttttgtgatctgcaagctacgatgggtaagggaacggggagtttcggtaagagacggaacaagacccacaccctctgtgtgaggtgtggccgccgcagtttccacctccagaagagtcgttgcgccgcgtgcgtttccccgctgcgcgcaccaggaacatcataactggagcgtgaaggccattaggagaacgaccaccggaactggaacgctgacgtggttgcgtaacgtgccccgtagattt

SEQ ID NO: 180223 - DNA, 264 bp, Glycine max
cggtacgtttaagttgacacttcagtttacagaggattatcctaataaaccacctactgtgcgctttgtttctcgaatgtttcatcctaacatttatgcggatggcagtatatgcttggacattttacaaaaccagtgagcctcatatatgatgtcactgcaattctaacctcaacccagtcattgttgtgtgacccaaacccaatttcaccagcaaattctgaagctgctcggatgttcagcgaacacaagcgcgaatacaac

SEQ ID NO: 180224 - DNA, 192 bp, Glycine max
ctgaaggattcatgtgctcaagtcatctgtcaatcactcaaagaaattcaagattgctccattctactagcaagattgttccaaattctgaacttcagacatataactactgagatggtgaagacaccagaggtctcaaatggatggatcaagtcatccctacaatagccccttgtgatgcaccagaccatg

SEQ ID NO: 180225 - DNA, 169 bp, Glycine max
ggtgctgttcttgcgcgtgaacaagcctcaggtaagccaaaaccatggttaagcataacaatgttatctcaaacggacactcccgtaagcgctggcagaactatgtgaagacttggttcaatcagccagcacggaagcaaggagacgattggctcgtcagaagaaactg

SEQ ID NO: 180226 - DNA, 265 bp, Glycine max
cgtttgttgatcgagataactagaaacagtgtgatgaaaatgaaggtccttgttttcttcgttgctacaattttggtagcatggcaatgccatgcgtacgatatgttccctctccgaatgaacactggctatggtgccgtactccggaggtgaaatgcgcaagttggaggcttgctgtggaagcacacaacatctttcggtttgagaccattcctgaagagtgcgctgaagcaacacagaatacatcctggcgaacaatatagat

SEQ ID NO: 180227 - DNA, 261 bp, Glycine max
  unsure (1)..(261): unsure at all n locations
ctgagataggagaaggtgagaatcataagagagcaagatcgacaatgggagtggagaagcagttgttgaggcctggcaccggtcccaagccaattcccggtcagaacgtcaccgttcactgcactggtttcgggaagaacgtgacctttctcagaaattctggagcaccaaggatcctggccaggaccctttcactttcaaaatcggccaangttctgttatcaaaggatgggatgacggtgtgcttggcatgaaattggt

SEQ ID NO: 180228 - DNA, 273 bp, Glycine max
catcgcacttcgttgcttggtgatgtccctttctgttctcttcactcttggtcttgcgagagaaagccatgccagagacgaagatttttggcatgctgtttggccaaacactcccattccaagttcattgcgagatcttctaagcctggccctacgagtgatgacatcgatgatcaccctatgcaaattgaagaaacacagtacccgaaaaccttgttctataaagaagaccttcatccaggcataacaatgaacgtacaattcagcacgcct

SEQ ID NO: 180229 - DNA, 265 bp, Glycine max
gtcgagccgtgaagtgaaatctgcatgggagacaccagctgctgaagctgggaaagcagattgggaattggcattggtggagaatactagtaacttgtcaaggcaaaaggctgacttggcaggggggtttgatccacgttactgaatgggatgtatgatcaaggggctgtgaggcaacatgtgagcacaactcagctgagtggtgggagtgctagtagtgtggcactgcctggacccgggaagagcgccaccccggttctggctt

SEQ ID NO: 180230 - DNA, 264 bp, Glycine max
ctgaagagagaagaagatggcgtcgagcggacgctgccgttttggagggcagcggggatgacatacatcacatactcaaacatatgcgcgaatctggtcaggaattgcctcaaggaaccctacaaggctgaagccatcctcgtgagaaggtccattttgctctctccaaatgggtcgacgccaagcctgaaaaacctactattcgttcagacaccccagagcagtgatccggaatagttggacgctataaatgcataaatcttt

SEQ ID NO: 180231 - DNA, 228 bp, Glycine max
ggcgtcgctgctccgtaccagtttcactgcataaatttgagagagaactctgcaaacatgttggtttatcaggacctccttacaggtgatgagcttctctcggactccttccgttacaatgaaattgagaatggaatctgtgggaagttgaggggaagtgggttgttaagggagccgttgatgttgacattggtgcaaaccttctgctgagggtggagaagatgaggg

SEQ ID NO: 180232 - DNA, 258 bp, Glycine max
cgggagagagagagagagagagaggtctcacagtgctatcaagaagccctaactacgcacgcactcattcttgagaaagctgcaatattcattcgtccatggcactctcttctcgtctcttttccaaatccaaattgatcttggctgtcaaatacttctgccaacaggagcatgctattccagttcgtcactttgctaaagagtctgcccctcctgcccttaagggagatcagatgctgaagaactttttgtggaggt

SEQ ID NO: 180233 - DNA, 175 bp, Glycine max
tgcactttcactggaatcacaatcctgaaacaaaaacatcttagcatttaacatcctactagacaacatgaccaccacattggaaagaggtttctcggaagagcaagaagctctggtggtgaagtcatggaatgtcatgagaagaattcctggagagttgggtctcaagtttttc

SEQ ID NO: 180234 - DNA, 254 bp, Glycine max
cagcagcctcgggcagttggtgtgtgtcaccggtgctgccggttatattgcttcatggattctcaagttcctacttgaacgtggttacactgtcagggccactgttcgaaacccaaatgatcacacgaacgtagacatttgctaaaacttgaaggtgcaaaggagagactgcacctttttacggcagatcttttgggtgacaattcttttgactccattgttgagggctgtgatggcgtctttcatactgcttc

SEQ ID NO: 180235 - DNA, 255 bp, Glycine max
cctttcttcctcttcctcagtagtgcgattttcgattctcttctctacgactatgcctaaccctacggtcttcttcgacatgaccatcggcggtcaacctgccggccgcatcgtgctggagctctacgccgacgtactccgagcaccgccgacaacttccgcgcgctctgcaccggcgcccagggcgccgggcggagcggcaagcccccccactacaaacgctcgtccttcccaccgcgtgatcccgaacttcat

SEQ ID NO: 180236 - DNA, 258 bp, Glycine max
gggtcttcgagaaagagagacccttgggatttcgtcaccatgagtctcctcggtcttggaaacagaaaccggacgacatttcgtccaaaaaagagtgctccatctggaagtaagggtgctcaagttcaaaaacaatcgatgcgccgttgggtagtgggaacttgagggaggctgttaaactgcctcccggtgaagatattaatgaatggctagctgtaaacacgtggacttctttaatcaagtgaatatactgtttgg

SEQ ID NO: 180237 - DNA, 263 bp, Glycine max
gtccactcttaatttctctctgccttgctcatttacacacctctccaacctctcactttcagctttatttgaatccctctctctcctttccaaatggccagcgttgaggttgcacatcaaacaccaacaacagtccactgaatgaaacaaccgaggtaattcagacccaggaaacaaccccggaaccagtaccagccactgaggctcctgcaacagaacaagcagcagctgaggttcctgctcaagaagaacaacaagcaact

SEQ ID NO: 180238 - DNA, 265 bp, Glycine max
ctgatgtgaagtccaaagaaataggcaaggcccaagggttttacctatccgcaacccaaaggcccggtttggagttagagatagtcatggggatggctttgaccttcttagaaggcgaattcaacggtagcagttaagtgtattggggagaaacaacatcttcaatgaggtaagggagttgccaattattggtggcacgggtgagtttcgcttcgcacgtggctatatccttgctaggactgtcaaggtcgattaccataaaggg

SEQ ID NO: 180239 - DNA, 246 bp, Glycine max
gtgtttttggcggttaaggatgtcggggaaaggagcgaaggggttgctcacaggcaaaacctccgccgccaacaaagacaaggacaagaagaaacccatctcgcgttcttctcgtgccggccttcagttcccattggtcgtatccaccggcttttgaagtcaaggacaaccgctaatggtagagttggggccacagctgctgtctactctgctgctatcttggagtatctcactgctgaaatattg

SEQ ID NO: 180240 - DNA, 267 bp, Glycine max
ctgtctctctctagacttagattttgtgaatggctgaagtggaagagggacaggtcatcggcgtccacaccgttgatgagtggaagctgcaactccagaatgcaaaagactccaaaaaactgattgtggtggatttactgcttcctggtgtggtccatgccgttttatggccccagttcttgcagagattgcaaagaaacatcctgaactgatcttcctcaaagtggatgtggatgaagtgcaggctgttgctgaggaatattccat

SEQ ID NO: 180241 - DNA, 266 bp, Glycine max
cgttaagcttgctactgagtttccacactgcataccttcggtcttccggattcgaagttactttgcaagatggctaaggaaaaggctcagatcaacattgtggtggttggtcatgtggaccctgaggaggcaaccccattaacgagctgaagaagcctgttgtggagacagaagctccagggcatgccatatgagggcatgcacgtacggcctcggaggggaaccagaaaattcatgttaacaacataatctggaaccctaatgta

SEQ ID NO: 180242 - DNA, 266 bp, Glycine max
gggagaaagaaaaaaggggaatttcaatggcgtcaagggtttctctgaaggcgaaggggaagagttcaaagggatcgaaggctgcggaagatcgatccgcgagcgagtgcctgaaggagtggacgacatgcgcgagcgaaaagcgaaggtcatcactcactacggtttcatccctttggtcatcgtcatcggtatgaactctgaccccaagcccccactttcccagcttctcagccccgtctgatccacctcttcaattcttccac

SEQ ID NO: 180243 - DNA, 246 bp, Glycine max
gttgggccatgttgggtgttgcaggaatgctacttcctgaggttttcaccaagattggactcatcaatgcccctcaatggtatgatgctgggaaatcggagtactttgcttcatcgtcgaccctctttgtgatgagttcatcttgttccactacgtcgagatccggagatggcaggacatcaagaaccctggctctgtcaaccaagaccccatcttcaagcaatacagcttgccccacatgagtgt

SEQ ID NO: 180244 - DNA, 268 bp, Glycine max
cggccactctaaagaaaatggcggtgcctctactctcgaagaagatcgtgaagaagagggtgaagaagttcaagaggcctcagagtgacaggaaaatttctgtcaagacaaactggcgcagaccaaagggtatcgatcccgtgttaggagacagttcaagggatgcactttgatgccaaacattggttatggttcagacaagaagacccgccactatctccctaatggttttacagaaatttgttgttcacaatgtgaaggcacttgg

SEQ ID NO: 180245 - DNA, 290 bp, Glycine max
cgccgcgcccggcggtcggcgtggtcgctggcgcgaggcacgggctctctacggagagtatctcgcggttactcgtgccggcgtccgagtgcgagttcactctcaattcggtattggaggagctgcagaaggatccttgggcggtgccggcggatcagcgggctcgctcggtgcaccagcacggcactgagtattgcggcgagtttgttgggggcatgtgtccctggctctgctgcaagaataatggcatttattggaggaccagctactgaaggacctgctcctattgt

SEQ ID NO: 180246 - DNA, 281 bp, Glycine max
ctctttcaaaagggagaagaaaaggaaaggaaacaaaacgcacaaaggattattatagcaatggcagaacaaaaccaaaaccagacaactgaagctgcaaggcaccaagaggttggccacaagagccttctccagagtgatgctctttaccagtatattctggagaccagtgtctacccaagagaacctgaatccatgaaagaactgagagagttgacagcaaaacacccatggaacatcatgacaacctctgcagacgaagggcaattcttgaacatgct

SEQ ID NO: 180247 - DNA, 278 bp, Glycine max
ggcggcgtaaccctccaacaacaacacttcctcgtcagaaaatgtctctggtggcgaacgaggatttccagcacattctgcgtgtgctgaacaccaacgtggatgggaagcagaagataatgttcgcaatgacctccatcaagggtattgcaaggagattcgccaacatcgcttgcaagaaggctgatgttgacatgaacaaaagggctactgagttgactgctgctgagttggacagtgtgatgactgtggtggcgaacctaggcagttcaagatcc

SEQ ID NO: 180248 - DNA, 278 bp, Glycine max
aaaattacaacaagctgttgtctcttggcttcaagattgtattcttgtcaggaagatatcttgacaaaatggccgtaacagaagcaaacctaaagaaggctggcttccacacatgggagcagttaattctcaaggatccacatcttatcactccaaatgcactttcatacaaatcagcaatgagagagaatctgttgaggcagggatacagaattgttggaatcattggagaccaatggagcgatctgcttggagaccacagaggcgaaagcaggacc

SEQ ID NO: 180249 - DNA, 250 bp, Glycine max
  unsure (1)..(250): unsure at all n locations
tgagagtcgttcttgacagtagcaaagatggtccccttcgggcccaatggtcaaaagataaaggcgactatggtggttatgcagacgactgtgttgcatatcgacagcatcaccagtgttggagggatcgttgaccaaggcttaggcttcataggcagtgcagtcgatgacttaccttgnagcatcagatcccatccagtgctactgctacaaggctgatggcgggaaagaaactggaagagtcaattaa

SEQ ID NO: 180250 - DNA, 278 bp, Glycine max
ggggtttgaggaaactgagttaaggcttggactgcctggaaacggaggcactgaagaagtgctcatcaggaagaggggtttctctgagactgaaactggtcatgaagatgagtctgccaccactgtggatttgatgcttaatctttcttctaaggaggccgcaaccactgctgctgctgctgcagatccaactgataagcacaagactttgcctaaggagaagacccttctgccagcagatcctgctaagcctccagccaagacgcaggtggtgggtt

SEQ ID NO: 180251 - DNA, 283 bp, Glycine max
gagaattggtaatggatcttatctcaacatggtgtctcatccggatggctctaaccgtgcattcttctctaaccaaatgggaaaggtttttctggcaacacttccggatgagggatcaggaggaacattgaagcttgatgaatcaagtccttttgttgatctgactgatcaagtttattttgatactcaatttggaatgatgggcatggcatctcatccagattttgctaaaaatggacgattctttgcttcatttacatgtgataagtccaagtggtctgga

SEQ ID NO: 180252 - DNA, 284 bp, Glycine max
gagagagagagaaatggcttgcaggcaattgtgggcttcaagagctgcctcttacctgaggatctctgtgtttcacagaggcttttctaatgttattaaagatttcaagtatgttgattctcatgagtgggtgaaagttgatggaaattacgcaaccatcggcataactgatcatgcccaagatcatttgggtgatgctgtatatgttgaattgccagaagtgggagcagctgtgacacaaggaggtagttttggtgcagttgaaagtgtgaaggctactagtg

SEQ ID NO: 180253 - DNA, 237 bp, Glycine max
caacgtcgtctcccccacctccttatcactacgtgagccctccaccaccaaccaagtctccaccaccaccagtttacatttatgcttcccctccaccacccatctacaagtaagcttggaattaagaagcagcaacaataataagtcatgttctagtattcattgtggaataaatttccgttccatttggagcagagttaagcatataatttgttatacaagttctttgaataagag

SEQ ID NO: 180254 - DNA, 280 bp, Glycine max
attcattccccttatctttctctcttctctctccccgcccaaaccctaactccctaccctattccgctttctctcatccatcatgaaaggaggaaagtccaagaccgaatctaagagagccgatgccaaacttgctgtgaataagaagggcgccgccaccaagactaggaaacccgccggaaaggggaaggcagtggcgaggtttgttttcatacgtttttcatcattgtcttgtgggtttttatcatttttgcagttttcttattttgtgctgtttatt

SEQ ID NO: 180255 - DNA, 279 bp, Glycine max
cagctatgtttcagccgccaattttggagttccatccacagagctgattacatggcattgcgcttaggcttcattactaatcatggtcttcccacaacatacgacttccacaactatatgcttcgaagcatggatgaggaatttcgtgacatagttggtgttagtgtgcttctctgggtatatgccatctgctgtatttttctaaattttcacggaagcaacttttacttctggctgtccttcgttccagcaattttgatccttatcattggtactaaa

SEQ ID NO: 180256 - DNA, 279 bp, Glycine max
accgtttgtacccagagattgatccagctctgaaccctgaccacgtccctcacattctgaagaagtgccctgatgccattccagaccctaaggcggtgcagtacgtgagaaacgaccgtggcactcccatgattctagacaacaactactacagaaacatattagacagcaagggtctcttgatagtggatcaccaactagccaatgacaagaggaccaagccttatgtgaagaaaatggccaagagccaagactatttcttcaaggagttctctagag

SEQ ID NO: 180257 - DNA, 275 bp, Glycine max
cgctaagtgtcactttgttggaattgatattttcactgccaagaaacttgaggatattgtgccctcttctcacaactgtgatgttgctcatgtgaatcgtactgattaccagctcattgatattgctgaggatggatttttgagtctgcttactgaaaatggtaacactaaggatgacgtcaagcttcccactgatgagagtctgctcactcacatagaggatggatttgctgagggcaaggatcttgttgtgtctgtcatgtctgctatgggtg

SEQ ID NO: 180258 - DNA, 277 bp, Glycine max
atcaattcattgaagttcgtcctgggattgttgttaaagatgagagtggaaatatcagatgcacgcccatatactcaagaatagtttcattgtatgctgaacaaaatgagcttcaatttgctgttcctggaggcctaattggtgttgggacaacaatggatcccactttgacacgtgctgataggttggtaggtcaagttttgggagacgttggatcactacctgaggtttttgttgaacttgaggtaaactttttcctgcttcggcggctccttgg

SEQ ID NO: 180259 - DNA, 278 bp, Glycine max
ataagctagtttatcgtgaggagaatatgaagttgtatgtctctcactgttgctgcagtagttttggtagcatggccatgccatggcgcacgctaccaaaggttccctctccgaatgaaaactggctatggtgagcgttcttcggaggtaaaatgcgcaaattttaggcttactgtagcagcacacaacatccgagccgttaaaaccattcctgaagcgtgcgtagaaccagcaaagcgactacattaatggcgaacaatttagatcagactctaaaa

SEQ ID NO: 180260 - DNA, 285 bp, Glycine max
gcaaagcactagaaactaggaacagagaagcaatcagttgccaaactatttttctctctcctttttttgacttttctttctttctgcaactccaaaatgtcttccataggggcaaaaaatctagcactctcctcagcctttttgctccttttggtcggttttgcaacctcagacatcaaccaagacaaagcagaatgtaccgacaaacttcttggtctagctggttgtcttccctatgttggtggtgaagccaaagtccccgccatggattgttgctctggtatc

SEQ ID NO: 180261 - DNA, 283 bp, Glycine max
ctaagccttataaataataagagcaaaaaaaaaaaaccaaaacaacgagagagagaacatgggttcaagttcagcatccgaaagtgtttgcgttacaggagcctctggtttcatcgggtcatggcttgtcatgagactcatcgagcgtggctacacggtccgagccactgtacgcgatccagctaacatgaagaaggtgaagcatttggtggagcttccaggtgcaaagaccaaattgtctctgtggaaggctgatcttgctcaagagggaagctttgatgaa

SEQ ID NO: 180262 - DNA, 279 bp, Glycine max
gcaagaatggcacttcgttgcttggtgatgtccctttctgttctcttcactcttggtcttgcgagagaaagccatgccagagacgaagatttttggcatgctgtttggccaaacactcccattccaagttcattgcgagatcttctaaagcctggccctgcaagtgttgaaatcgatgatcaccctatgcaaattgaagaaacacagtacccgaaaaccttcttctataaagaagaccttcatccaggcaaaacaatgaaagtacaattcagcaagcct

SEQ ID NO: 180263 - DNA, 277 bp, Glycine max
gagaaactgataaggcagggatacaacattgttgggatcattggagaccaatggagcgatctcctcggaggccacagaggcgaaagcaggacctttaagcttcctaatcccctgtactacattcagtagttccttcacctctcaacaatctagcttgctcctatctatctatatgtaataagatgcgttcaaataggggcactagcttcactttatgttgtttcagctgtgtgtcaacaagtcatgtaagagacttcactatgttgttttctctttc

SEQ ID NO: 180264 - DNA, 278 bp, Glycine max
ctcacccaccctccatacacactctctctgagtcggtcgagttgaatcggtgtgagtcagtgaccgagtcgaaccatgtcggacgaagaacaccatttcgaatccaaggccgatgctggagcctccaagacctatcctcaacaagccggaaccatccgcaaaaacggttacatcgtcatcaagggtcgtccctgcaaggttgttgaagtttctacttccaagactggtaagcacggtcatgccaagtgtcactttgttgggattgatattttcactgc

SEQ ID NO: 180265 - DNA, 273 bp, Glycine max
aaaccttattgtgctgaatcctccaaatgggtggcgtttgtggacaatgaaatccaaaaggcatgtgtgggtattggtggtcctgaaggtcatcctggtcaacaaacatttagtggcacatttagcattcagaaatataaatttggatacaaacttgtgttctgtatcactggctcaggcacttgtttagatattggaaggtttgatgccaaaaatggtgagggaggaagacgtttgaatctcactgagcatgaggccttcgacattgttttc

SEQ ID NO: 180266 - DNA, 277 bp, Glycine max
cttgtcaaggcacgcatctgatgagttctaccttgggcagagagatggtggtgactactggacttctgatgccggtccattagaggcatttaagaggtttggaaagaagcttgaagagattgaaaagaagcttatagagaagaacaaagatgagacattgagaaaccgctatgggccagctaaaatgccttacactctgctctatccttctagtgaggagggattgactttcagaggaattcccaacagtatctctatctaaggaccctatggttgc

SEQ ID NO: 180267 - DNA, 263 bp, Glycine max
gtcccaaaaagttgatggtgtgcttggaaggacttatagattggattttgagaaccctgcaaaacctggtgtggctatgcctgttgttggtggagaagacaagtacagaactaactcattgctctctcctcattgtggttcttgtgtgttctcacagggaagttcaactgagaaagagaccactccccaacaagtgatggaatatggcacccttgattgcaccaagttttcatatgggttgggaattgtttgcaggaaatgag

SEQ ID NO: 180268 - DNA, 244 bp, Glycine max
agaagatggagatgtatcagatctggagcaggagaatagcgttgggagcgttcgcgtttgttctgcttttcctatcggcctcagcagacgacgtcgttgtgctctctgaagataacttcgagaaggaagttggtcaggacagaggagctctcgttgagttctatgctccttggtgtggacactgcaaaaagcttgctccagaatatgaaaagcttggtagcttcttcaagaccgcaacagctgt

SEQ ID NO: 180269 - DNA, 282 bp, Glycine max
gagagagagacggagatggagatggagaaaacgggcgcaggagtagtagtgttatcggcgaaggaggcattcgagaagcttgagaaggtcggagaagggacatacgggaaggtgtacagggcacgagagaaggccactgggaaaatcgttgctctcaagaagactcgtcttcacgaggaccaagacggtgttcctcccaccacacttcgcgaggtttccatcttgcgaatgctctctcgcgatccccatgtcgttagcttaatggatgtgaagcaaggccag

SEQ ID NO: 180270 - DNA, 277 bp, Glycine max
taagagatgaagagaactcctatcttgttccctctcttctttcttctttgtgccttcacctcatatctaccttcagccaccgctgatgatgatcatgtgtacgacactgacggcgataagcttcaatacggtgtcaattatttcgtgttgccagtgataagaggaaatggcggtggaatacaagtagcaaaagcaggaaacgaaacttgccctctgactgtggtgcaatctggcaacgagctctctgaggggttaccgataaagattgcatctcgat

SEQ ID NO: 180271 - DNA, 275 bp, Glycine max
ttcttctcttgcggctagggttttagcgcagcttcttctagatttaaggaatatgggtaaggaaaaggttcacatcagtattgtggtcattggccatgtcgactctgggaaatccactaccactggtcacctgatttacaagcttggaggcattgacaagcgtgttattgagaggtttgagaaggaagctgctgagatgaacaagaggtctttcaagtatgcctgggtgctggacaaacttaaggctgagcgtgaaagaggaatcaccattgata

SEQ ID NO: 180272 - DNA, 277 bp, Glycine max
cctaagctcactctttctaagtctcttctatcctctctccgccatggttctctccaaaaccgcctccgaatccgacgtctctgtccactcaaccttcgcttctcgctatgtcagaacttcgcttcccaggttcaagatggcggaggagtcgataccgaaggaggcagcataccagatcataaacgacgagttgatgttggatgggaacccaaggttgaatttggcatcatttgtgacgacttggatcggagcagagtgtgataaactcatcatggct

SEQ ID NO: 180273 - DNA, 274 bp, Glycine max
cgcgtcgctgctccgtaccagtttcactgcataaatttgagacaaaactctgcaaacatgttggtttatcaggacctccttacaggtgatgagcttctctcggactccttccgttacaatgaaattgagaatggaatgctgtgggaagttgaggggaagtgggttgttaagggagcagttgatgttgacattggtgcaaacccttctgctgagggtggagaagatgagggagtcgatgacgcagctgttaaggttgttgacattgtcgatacat

SEQ ID NO: 180274 - DNA, 275 bp, Glycine max
gtaggtggaagaagaagagaaaagagagagaagggtaaggtaaccctagagtggtgaatcgaatctgcaaagatggaagctgtttctcgaagaagaggtggaggcattttcgaaagcctctacaaggtcgttatgcgtcgcaactctgtctacgttaccttcgtcatcgctggcgccttcctcggagaacgggctgtagattatggagtccacaagctctgggaggctaataatgttgggaaacgatatgaagacattcctgtgctagggcaaag

SEQ ID NO: 180275 - DNA, 280 bp, Glycine max
gcggaatctgctagaattttctaataatggcgaaagacgttgagcaggtcacagagcaaggtgaatactccgcgaaggactaccatgaccctcctccggcaccgttgatcgacccagatgagctcacaaagtggtccttgtacagagccgccatagctgagttcatagcaacactcctttttctttacatcaccgtgttgaccattattggctacaagagacagagtgacaccaaaatccccggtaacaccgaatgtgacggcgttggcattttgggcat

SEQ ID NO: 180276 - DNA, 275 bp, Glycine max
cgcgtttcgcaatttccccaaatctcacgcctagaatttctatcgcaaaccctcactcccttcattaaggtcgcgcgcgaagggatttcgaagcttcggaaggaaaaaaaaaaagatgaaacctgttttctgcggaaacctggacttcgacgcgcgtcaatccgacgtggagaggctcttcagaagatacggcaaggttgatagagtcgacatgaaatccggattacttggaaatttggaatgtccatgctcttcttggatggatgtgcttctct

SEQ ID NO: 180277 - DNA, 275 bp, Glycine max
ccgagaggaaggccgcggagttgaccaaaattattgttggggttgttgaggcttgtcattcccttggggtcatgcatagagatctcaagcctgaaaactttctcttggtcaacaaagatgatgatttctctcttaaagcaattgactttggcctctctgtattcttcaaacccggtcaagttttcactgatgtagtcggcagcccatactatgttgctcctgaggttctcctcaagcattatgggcctgaagcagatgtgtggacagctggtgtc

SEQ ID NO: 180278 - DNA, 279 bp, Glycine max
cactcgagccgaatcggctcgagctgctcgtgcctctagggttatcacatctccatttccattacctctctctcagtttccaagcatcttaagctatgggaaagtcttacccaaccgtgagcgctgattaccagaaggccgttgagaaggcgaagaagaagctcagaggcttcatcgctgagaagagatgcgctcctctaatgctccgtttggcatggcactctgctggaacttacgacgtgagctcgaagaccggtggtcccttcggaaccataaagc

SEQ ID NO: 180279 - DNA, 274 bp, Glycine max
cagaaatagaggatggtgattttcttgtttgtcttgttattcacaatattgatggacctggattaagggactctgaaacccaacgatatcttgctcgactagctgcttgtgcacggattcgtgttgttgcctctattgaccatgttaatgctcctctgttttgggacaagaatatggctcatacacagttcaattggtgctggtatcacgttcctacttttgctccttacaaggtggaaggcatgttttatcctatgattcttgcacatggtag

SEQ ID NO: 180280 - DNA, 277 bp, Glycine max
ccaaagtgcttctctcctctgtctttttctctctcttgctatccttttcggctagttcgcactgctgcaagtgcaactccaagaagcgcagtgccaagccaccatgtttcaacattcaacagaagcctttttccttccacttttctctttggacttggttcttctgcttaccaggcagaaggagcagcaagtgtagatgggagaggaccaagcatatgggacacctacactagacagcatactgaaaagatttgggatcatagcaccggtgacatgg

SEQ ID NO: 180281 - DNA, 272 bp, Glycine max
gcagtaatggcttcaatgaataaccaaaaagaaattgagctctttgagggccaatctcttctgtacatgcagctatatgggcacctaagacctatgtgtcttaagtgggctgttcaactaggtattccagacataatacagacccatgccaaacccatttctctttctgacttggtctctactcttcaaattccaccagctaacgctgcctttgtgcagcggttcatgcgcttcttggcacacaatggaatctttgagatccatgagagcca

SEQ ID NO: 180282 - DNA, 274 bp, Glycine max
acacaacatccgagcctttaaaaccattcctgaagagtgcgttgaaccaacaaaggactacattaatggcgcacaatttagatcagactctaaaacagttaaccaacaagctttcttttatgctagtgaacgcgaagtccatcacaacgacatatttatattcggcatagataacaccgtactctctaatatcccatactatgaaaaacatggatatggggtggaggaatttaatgaaaccttatatgatgaatgggttaacaagggcgacgca

SEQ ID NO: 180283 - DNA, 274 bp, Glycine max
tgcagagtactacagaattattaatggcctgaatttcgaagacaaacttcatccaggtggtccatttgacccattggggcttgcaaatgatccagaccaagctgcactgctaaaggtgaaggaaattaaaaatggaagacttgctatgtttgccatgcttggtttctacttccaagcttatgtcactggagaaggtcctgttgagaaccttgcaaaacatctcagtgacccttttggcaacaacttgctcactgtcatttctggatctgctgag

SEQ ID NO: 180284 - DNA, 274 bp, Glycine max
  unsure (1)..(274): unsure at all n locations
caaaaccattgttcgcaatcaaaaagtgacagttaatattctctaaccaaccgaaattaatttccatacactaaacaatatccaaantgattaacggagaaaagaaaatggagaaagaaggtgttgggcttgaaatcactactgagcttcggttgggccttcccggtggggattaaccctgacaagaacgagaagatgaagaagagggtgttctcggagattaatcaaggtgatgaaaacagctcctccgaagaagatcgcaaaatccaaacca

SEQ ID NO: 180285 - DNA, 274 bp, Glycine max
gcacatttgatggagatccaagttaatggtgggacagttgaccagaaggtggactatgcatatagcttcttcgagaagcaaatcccagtggatgctgttttccaaaaagatgagatgatagatatcgttggagtgactaagggtaaaggttatgaaggtgtcgtaactcggtggggcgtcactcgccttcctcgaaagactcacaggggtctaaggaaggttgcttgtattggtgcctggcaccctgctcgtgtttctttcactgttgccaggg

SEQ ID NO: 180286 - DNA, 280 bp, Glycine max
gttctagatcgccgcggccgatctttgtttgttccatctcttgcttcttgcttctattacttgcttctttcttcaccatgtcacttgctgggaaaatcaccactgaaattggggttcatgcaaccgctgcaaagtggttcaacctctttgcaacacaacttcatcatgttcaaaaccttactgatagagtacatggaaccaagctgcatcaaggtgaagactggcatcacaacgagacagtcaaacactggacttataccatagatggtaaggctacaac

SEQ ID NO: 180287 - DNA, 280 bp, Glycine max
cttaagcttgctactgagtttccacactgcataccttagggtcttccgaattcgatcttaatttgcaagatggctaaggaaaaggctcagatcaacattgtggtggttggtcatgtggaccctgaggaggcaaccaccattaacgagctgaagaagcctgttgtggagaaagaagctccagggcatgccatatgagggcatgcacgtacggcctcggaggggaaccagaaaattatgttaacaaaataatctggaaccctaatgtatcagtgtcatcatc

SEQ ID NO: 180288 - DNA, 278 bp, Glycine max
cggccgtttgctccccaaggaaagaagcagagtgtttcttttgaaatcagctagaaaagatgtcaggtgaagaggtagctgttgcagctgaggcacctgctgcttcaattccaggtgagcccatggacatcatgactgctctacagcttgtgctgagaaaatctctggcctatggtggtcttgcacgaggtcttcatgaaggtgctaaggtgatcgagaagcatgctgcacagctctgcgttctagcagaagattgtgaccaacctgattatgtgaaa

SEQ ID NO: 180289 - DNA, 275 bp, Glycine max
aatctcacaactctcgtcgtcgccgcactgcaccgcaccgcaccgcacgtaagcacccactcagatgaagaagggagtccatccacagaagcaatggatatcctacgttacacaaacgggtaggttgatgcatgtgatgatgacaaagatacaccctgttgggaaggtttatcacttccgggctaagcgtcaaatggccgagagtttaggacagattgctaagttcagacgccgctttgggctagaaaatccagagggcaatgaaaaatgacagc

SEQ ID NO: 180290 - DNA, 276 bp, Glycine max
cacgaggaccagcctcaggaggacaaggatgtctcacaggaagttcgagcacccaacgcacggttcactgggattccttcccaggaagcgtgctgctcgtcacaggggaaaagtgaaggcattccccaaggatgacccatccaaggcacccaagctcactgcattcttgggttacaaggccggtatgactcacattgttagagaggtcgagaagccaggatcaaagcttcacaagaaggaaacttgtgagcctgttacaattattgagacccctcc

SEQ ID NO: 180291 - DNA, 275 bp, Glycine max
ctcgtgcctctagggctatcatatctccatttccatttcctctctctcagtttccaagaatcttaagctatgggaaagtcttacccaaccgtgagcgctgattaccagaaggccgttgagaaggcgaagaagaagctcagaggcttcatcgctgagaagagatgcgctcctctaatgctccgtttggcatggcactctgctggaacttacgacgtgagctcgaagaccggtggtcccttcggaaccataaagcacccctccgaactcgctcacgg

SEQ ID NO: 180292 - DNA, 275 bp, Glycine max
gagagaaagaaaaaaggggaatttcaatggcgtcaagggtttctctgaaggcgaaggggaagagttcaaagggatcgaaggctgcggaagatcgatccgcgagcgagtgcctgaaggagtggacgacatgggcgatgcgaaaagcgaaggtcatcactcactacggtttcatccctttggtcatcgtcatcggtatgaactctgaccccaagcccccactttcccagcttctcagccccgtctgatccacctcttcaattcttccaccatcaacg

SEQ ID NO: 180293 - DNA, 274 bp, Glycine max
atatgaagttgtttgtcttctttgttgctgcagtagttttggtagcatggccatgccatggcgcaggctaccaaaggttccctctccgaatgaaaactggctatggtgagcgttcttcggaggtaaaatgcgcaagttttaggcttgctgtggaagcacacaacatccgagcctttaaaaccattcctgaagagtgcgttgaaccaacaaaggactacattaatggcgaacaatttagatcagactctaaaacagttaaccaacaagctttctt

SEQ ID NO: 180294 - DNA, 274 bp, Glycine max
ctgagaactaacaaggagaagcaaatggcttcctcaatgatctcttccccagctgttaccactgtcaaccgtgccggtgccggcatggttgctccattcactggcctcaagtccatggctggcttccccaccaggaagaccaacaatacaattacctccattgctagcaacggtggaagagtgcaatgcatgcaggtgtggccaccagttggcccgaagaagtttgagactctttcctacctgccagaccttgatgatgcacaattggcaaagg

SEQ ID NO: 180295 - DNA, 277 bp, Glycine max
gttttctttcttcttcaacataacatgcactacgcaattgcctcatgaatcatcattagtcagggtttatcctctaacccaataaacatactatagcaatgagtgcgtccaggttcatcaagtgtgtcactgtgggtgacggtgccgttggcaagacttgcatgctcatctcctacaccagcaacacttttcctagggactaggtgccaactgtctttgacaatttcagtgcaaatgtcgttgtggatggcagcactgtgaatcttgggttgtggga

SEQ ID NO: 180296 - DNA, 240 bp, Glycine max
aaggggcagtagccgagattccgtgagttgcaaaaatgaagacgattctttccaccgagaccatgaacatcccggacggcgtgagcatcaaagttcatgccaaggtcatcgaagttgagggcccccgcggaaaattggtgcgagacttcaagcatttgaatctcgattttcagctcattactgacgaaaacggtaaaagaaagctgacaatcgacgcgtggtttggttctcggaaaacat

SEQ ID NO: 180297 - DNA, 252 bp, Glycine max
gtcagttgcaggaaaaatggtttcgctgaaactgcagaagcggctcgcagccagcgtcctcaagtgtggcagaggaaaggtttggcttgaccccaatgaagtcaacgaaatctccatggctaattctcgccaaaacataaggacgctggttaaggatgggtttattatcaggaagcccaccaagattcactctcgctcaacgtgccgccgaatgaaggaagcccagaggaaaggacgtcaatctggatatgg

SEQ ID NO: 180298 - DNA, 259 bp, Glycine max
gtttgttgtgagctataagctagtttatcgtgaggagaatatgaagttgtttgttctctttgttgctgcagtagttttggtagcatggccatgccatggcgcaggctaccaaaggttccctctccgaatgaaaactggctatggtgagcgctcttcggaggtaaaatgcgcaagttttaggcttgctgtggaagcacacaacatccgagcctttaaaaccattcctgaagagtgcgttgaaccaacaaaggactacatt

SEQ ID NO: 180299 - DNA, 258 bp, Glycine max
agaagctagtagtacttggatgggaagtgcgtccatgtcagctctgatcgcaacaaaaggcggaccccccgtgccgatccaggctcgaataccggtcttggcgagagggtaccgataactaacttccataagatccaactcctcccttatcaaacgactcgtctcgatttcctcaaacgccagctccggattcgcgtggatcttccgccgaatattcttcaaccactccgccgtctccgcgcgccgggccacgctcag

SEQ ID NO: 180300 - DNA, 255 bp, Glycine max
gaaagtcttccatagccccccaaaaatgaagagcaccatcttctttgctctctttctcttttgtgccttcaccacctcatacctaccttcagccatcgctgatttcgtgctcgataatgaaggtaaccctcttgaaaatggtggcacatattatatcttgtcagacataacagcatttggtggaataagagcagccccaacgggaaatgaaagatgccctctcactgtggtgcaatctcgcaatgagctcgacaa

SEQ ID NO: 180301 - DNA, 183 bp, Glycine max
gatccagcaaagctgaaagacatgaaaagagaggaggagattgcgaaggcaaagcaggccttggaaagaaagaagaagttagcagagaaagctgcagccaaagcagccatcagagcacaaaaggaagctgagaagaagcttaaggaccgtgagaagaaaccaaagaagaaatcaggtcgcgca

SEQ ID NO: 180302 - DNA, 159 bp, Glycine max
cctcgagccgaatcggctcgaggtttcctttcattttccctcactctctcgctccccaaacacccctctctctcctccaatacccgaccagctcaccgacgaccagatcgccgagttcaaggaggccttcagcctcttcgacaaggacggcgatggttg

SEQ ID NO: 180303 - DNA, 218 bp, Glycine max
cctcgagccgaatcggctcgaggcatcggaagacaccctagccactctcccggcgtcacgaaccagatcttcgtgaaaaccacaacgggtaaaacgatcacgttggaggtggagtcttcggacaccatcgacaacgtgaaggccaagatccaggacaaggaaggcatccctcgggaccagcagcgcctcatcttcgcggggaagcagttggaggacgg

SEQ ID NO: 180304 - DNA, 245 bp, Glycine max
ggaaagcacgtgcctcgtgcgattcttgtagatctcgagcctactgtgattgatgaagttaggactgggacataccgccaactatttcatcctgagcagctcattagcggaaaggaggatgctgcaaacaactttgcccgtggccactataccattggaaaggagattgtcgaactttgcatggatcgcatcagcaaagcttgctgacaactgcactggtctccaaggtttcctggtttccaatg

SEQ ID NO: 180305 - DNA, 255 bp, Glycine max
cgcgaaattagggttgatcgaggaagaagaagaagatgtcgtacctgttgcctcacttgcactctgggtgggcggttgatcaagcaatcctggcagaagaggagcgtctggtcgtgatccgtttcgggcacgactgggacgaaacctgaatgcagatggacgaggtgttggcgtcggtggcggagacgataaagaactttgcggtgatatacctggttgacataacggaggtgccggatttcaacaccatgtacg

SEQ ID NO: 180306 - DNA, 254 bp, Glycine max
atttaatgaaaccttatatgatgaatgggttaacaagggcgacgcaccggcattgccagagactcttaaaaattacaacaagctgttgtctcttggcttcaagattgtattcttgtcaggaagatatcttgacaaaatggccgtaacagaagcaaacctaaagaaggctggcttccacacatgggagcagttaattctcaaggatccacatcttatcactccaaatgcactttcatacaaatcagcaatgagag

SEQ ID NO: 180307 - DNA, 251 bp, Glycine max
ctcacttgcaatcaatgaagcccgaaaggatggtattcgaattagataccatgatggccatctcaaatccctgcttcatgcgatcaaagatagagttaatgtgaagggctactatatatggtcattttcagatagctttgaatgggatgctggttacacagctcgatttggcatcatatatgtggattacaagaacaatttgagtagataccctaagtcctctgcgttttggctgaaaaaattccttctca

SEQ ID NO: 180308 - DNA, 253 bp, Glycine max
gcagcacagaagagggaaaacggcaccgccgccgtagaagaaaacaaccatggtgcacgtctccttttacaggaactatgggaagacattcaagaagccgcgtcgtccgtacgagaaggagcgtctcgacgcggagttgaagctggttggtgagtacgggcttcggtgcaagagagagctgtggagggtgcagtacgcgctcagccgcatccgcaacaacgcgcggaacctcctcaccctcgacgagaagaac

SEQ ID NO: 180309 - DNA, 205 bp, Glycine max
cgcgaaattagggttgatcgaggaagaagaagaagatgtcgtacctgttgcctcacttgcactctgggtgggcggttgatcaagcaatcctggcagaagaggagcgtctggtcgtgatccgtttcgggcacgactgggacgaaacctgcatgcagatggacgaggtgttggcgtcggtggcggagacgataaagcaactttgcgg

SEQ ID NO: 180310 - DNA, 147 bp, Glycine max
cactcattaattgcaagaatggcacttcgttgcttggtgatgtccctttctgttctcttcactcttggtcttgcgagagaaagccatgccagagacgaagatttttggcatgctgtttggtcaaacactcccattccaagttcattg

SEQ ID NO: 180311 - DNA, 232 bp, Glycine max
tgttgaattaacatataattatggggttacctcgtatgacattggcgatggctttggacattttgcaattgcaactcaggacatttataaattggttgagcacatcagggccaagggtggaaacatcacaagggaacctggtccagttcaaggtggaactactgttatcgcctttgttaaggatcctgatggttatacttttggacttatccaaagacccacagtccatgac

SEQ ID NO: 180312 - DNA, 206 bp, Glycine max
tcggcagttagagacagagagagagagaaacaaaaccctaattggtgagtggcgaaaatggcgcaccggcggcggcagcagcagcaacaggagcagcagtaatcgagcaagtgcagtgcttcgggcggaagaagacagcggtggcagtgagctactgcaagcgtggtcgaggcctcatcaagatccatggctgccccatcgaactg

SEQ ID NO: 180313 - DNA, 185 bp, Glycine max
cgagcagccacacctcccgcagcagccatggttctcaaaactgaactatgccgattcagtggtgccaagatctacccaggaaagggcatcatatttgttcgttgtgattcttaggttttgccgtttgcaaactcagaatgtaagaggtatttccacaatcgcctgaagccttcacagctcacctg

SEQ ID NO: 180314 - DNA, 247 bp, Glycine max
atcattctcatattattgtcgccacttcgacctcaatcaccctcgcgccctcgctcttcccttcctggtggcgacaatgtcgactcctgctaggaagaggctgatgagagacttcaagaggctgcaacaagacccgcctgcagggatcagcggtgccccccaggataacaacataatgctgtggaatgctgtcatattgggtcctgatgatactccatgggatggaggcacgttcaagttgactctc

SEQ ID NO: 180315 - DNA, 130 bp, Glycine max
cgagataactagaaacagtgtgatgaaaatgaaggtccttgttctcttcgttgctacaattttcgtagcatggcaatgccatgcgtacgatatgttccctctccgtatgaacactggctatcgtgcccgt

SEQ ID NO: 180316 - DNA, 252 bp, Glycine max
aaaaattggagtccagtgaactgggaggaaaccttcaatacgtttccatcaaagctccatccaaacaccatagtgcacaactggttgggccctggtgtttgtccaaaggttgttgcaaaaggtttcaggtgcatttacagtaatcagggtgtctggtatcttgaccatctggatgtaccttgggatgaggtctacactactgagccactacagggaatacatatagcttctgaacaagagcttgtaattgga

SEQ ID NO: 180317 - DNA, 193 bp, Glycine max
gggaatagtgctgcaatggcttcaagtcaggaggaggtgacccttttgggagctactggaagcccatttgtgtgcagggttcatattgccctcaagttgaagggagttcaatacaaatatgtcgaagaaaatttgaggaacaagagtgaactgcttctcaaatccaacccagttcacagaaggattcagggtt

SEQ ID NO: 180318 - DNA, 238 bp, Glycine max
gagagagagagggagtcagagaaaccctaggtaagaagaaaagatgccggctggtcatggtttgagatcccgcaccagagattccttctctcgtcctttcaggaagaagggaaccatcgccctcaccacatacctgagaacctaccacgtcggcgactatgctgacgtcaaggttaacggtgccgttcacaagggaatgccccacaaattctaccatggccgaacgggacgcgtctgg

SEQ ID NO: 180319 - DNA, 216 bp, Glycine max
attttctcacttctcagcactcagcagcgatatcagttgaagaaacagaaacaaacaaaagaggcagaagatgttgtgggtggacaaatatcgtcccaaaaccctcgaccaggttatggtccacaccgacatcgctcgcaatctcaagaaattggtaacggaacaggattgcccccatttactcttctatggcccatctggctccggcaagaaaac

SEQ ID NO: 180320 - DNA, 181 bp, Glycine max
tttgagagttagaatggctgctgctattgaaatccccacaatagtgtttccaaactcctctgcccaacagaggatgccagtggttggaatgggatctgcccctgacttcacatgcaagacagacacaaaggaggctatcattgaggccgtgaaacagggttacagacacttcgacactgct

SEQ ID NO: 180321 - DNA, 255 bp, Glycine max
gttaggtcttccgaattcgaagttaatttgcaagatggctaaggaaaaggctcagatcaacattgtgcgtggttggtcatgtggaccctgaggaggcaaccaccattaacgagctgaagaagcctgttgtggagaaagaagctccagggcatgccatatgagggcatgcacgtacggcctcggacgggaaccagaaaattatgttaacaaaataatctggaaccctaatgtatcactgtcatcatcagtgtgtag

SEQ ID NO: 180322 - DNA, 252 bp, Glycine max
ctaagatccgccttctctgaattgtaaaaatgtcgctcggagaaactgcttgttcatacgcagctctcatccttcatgaagatggaatcagtgtaactgccgacaagatcagcaccttgttggaaactgcaaaggttcaagtagatacctattggccaaccttatttgctaaacttgctgagaagaaaaatcttggcgatttgatagccaatgcagcaggcggtggtgcaccagttgctgttgcagctgccc

SEQ ID NO: 180323 - DNA, 254 bp, Glycine max
attgagggagaagagaagttttgtgcaaaatccttgggaacagtaattggttttgccatttcaaagctgggaaagaacattcaagtactttcaagttcctttgtcaataagcaagaccaatacactgtggaaggagtgcagaatcttggagacaaagcagtgatgtgtcataggctaaatttcagaactgcagtattttactgccatgaagtccgtgaaacaacagctttcatggttccattggtggctggtga

SEQ ID NO: 180324 - DNA, 247 bp, Glycine max
cttctctgttctcctagaacttgattacttgaacattccctatgacagatgaggtggttcttctggatttctggccaagtccatttgggatgagggtcaggattgcacttgctgaaaagggtatcgaatatgagtacaaagagaggacttgaggaacaagagtcctcttctcttacaaatgaacccggttcacaagaagattccggttctcatccacaatggcaaacccatttccgaatccctcatt

SEQ ID NO: 180325 - DNA, 249 bp, Glycine max
  unsure (1)..(249): unsure at all n locations
gctcttccacccccgtaccgactttgnctctctgcaatccacagccgaaaatgcctttcaagaggtacgttgagatcgcgagggttgctcaaatcaactacggcaaggaatatggcaggctcgtcgtcatcgtcgacgtcattgaccagaacagagcacttgtcgatgcccctgatatggtgaggtcccaagtcaatttcaaaaggctttcccttaccgacatcaagattgacatcaagagggtcccta

SEQ ID NO: 180326 - DNA, 217 bp, Glycine max
ctcgagccggtgtgattgtctgttgttgtaactcgttcttcttcttttgttgttctgtgttcgtgtttgttctttctctcacctgaaaatgtcttgctgcggtggtaactgtggttgcggaagctcctgcaagtgcggcaacggctgcggaggctgcaagatgtacccagacttgagctacactgagtcaaccaccaccgagaccttggtcaatggg

SEQ ID NO: 180327 - DNA, 172 bp, Glycine max
ccgagaggaaggccgcggagttgaccaaaattattgttggggttgttgaggcttgccattcccttggggtcatgcatagagatctcaagcctgaaaactttctcttggtcaacaaagatgatgatttctctcttaaagcaattgactttggcctctctgtattcttcaaacc

SEQ ID NO: 180328 - DNA, 214 bp, Glycine max
accattctcttcactttaaagttacatagtttttcattgttttacttaatctacattggctgcttcaacaatgactctctcttcatcatcattggctggtcaagctatcaagcttgccccctccacccctgagcttggtgttggaagggttagcatgaggaaaacagccctcaagactgtttcctcaggaagcccatggtacggccagaccgtg

SEQ ID NO: 180329 - DNA, 254 bp, Glycine max
cagaaatctcgtgtggaacaaaagggtaaaagctcgtttgattcggatttccagtacgaacacaagccaagtgaaagtgagataaaatagaaatcaaagagcataatgtcagggatcattcacaagattggggagacccttcatgtgggagggcacaagaaggaggaggagcataagggtgagcaccatgctggagaatacaaaggggagcaccatggtgaacacagtagtgagtacaaaggcgagcatcatgg

SEQ ID NO: 180330 - DNA, 249 bp, Glycine max
ctataagctagtttatcgtgaggagaatatgaagttgtttgttctctttgttgctgcagtagttttggtagcatggccatgccatggcgcaggctaccaaaggttccctctccgaatgaacactggctatggtgagcgttcttcggaggtaaaatgcgcaagttttaggcttgctgtggaagcacacaacatccgagcctttaaaaccattcctgaagagtgccttgaaccaacaaaggactacattaa

SEQ ID NO: 180331 - DNA, 243 bp, Glycine max
ggggtttgaggaaactgagttaaggcttggactgcctggaaacggaggcactgaagaagtgctcatcaggaagaggggtttctctgagactgaaactggtcatgaagatgagtctgccaccactgtggatttgatgcttaatctttcttctaaggaggccgcaaccactgctgctgctgctgcagatccaactgataagcacaagactttgcctaaggagaagacccttctgccagcagatcc

SEQ ID NO: 180332 - DNA, 252 bp, Glycine max
  unsure (1)..(252): unsure at all n locations
ggacaggtttggcattgttgagggtttgatgaccactgttcattccatcactgctacccagaagactgttgatgggccatcagccaaggactggagaggtggaanagctgcttcatttaacatcattcctagcagcactggagctgccaaggctgttgggaaantccttcctgctttgaatggaanattgactggtatggcattcctgttcccaccgtggatgtctctgttgtngacctcacggtgangctg

SEQ ID NO: 180333 - DNA, 250 bp, Glycine max
tccgaagcatgatgcattgtgcgagcattgtctcggctccgtcctacgcgttcccttttctctctggctccgcttccactactccaactgccctctcgctcactaagcgcagttggaagccacctccgagcatggcaaaaggaccagtcagagccaccgtttctacagagacagagaccccggaggccaatcgtcccgaaacgtttctcagaggagtggacgaggccaagtcttccacttcggttcgggc

SEQ ID NO: 180334 - DNA, 235 bp, Glycine max
ccgagtagcaacaatgtcgaagcgaggtcgcggaggatcggcgggaaacaagttccgcatgtcgctgggtctgccggtggcggcgacggtgaactgcgccgacaacaccggcgcgaagaacctctacatcatatcagtgaaggggatcaagggtaggctgaaccggttgccgtcagcttgcgtcggagacatggttatggccaccgtcaagaagggaaagcccgatctccgtaag

SEQ ID NO: 180335 - DNA, 243 bp, Glycine max
ggcttgttcagtctttcttggaactttgttactctcacacatgtctcgctccgtgcctttggtttcaaccatttatctgctgcttctgcttctggtggccactgagatgatggggccagcaatggtggcagaagcaagaacttgtgagtctcagagccaccgtttcaaggggccatgtttgagtgacaccaactgtggctctgtttgccgaaccgaacgtgtcactggaggacactgccgtgg

SEQ ID NO: 180336 - DNA, 249 bp, Glycine max
cttttctcgcctccatcgcaggtttctacctatattgctgttcttcgcttcgattaggatcagtcaccatgtatcttcagttttacataaacgataacggtgacaaagtttacaccactaagaaagattcgccgctagggctacctacacaatctgctcatccagcccggttttcacctgatgataaatattcaaggcagagagttcttctgaagaagcgttttggattgttaccgacccagcagccac

SEQ ID NO: 180337 - DNA, 247 bp, Glycine max
ggctcgagaaacctcttcctcctcttcttccttttgcttcaaggtgtggtgttttgtgtttcacatttaaagcaacactgaaaagaaaggaaagtgaagttgagagtttgtttaggaagaacaagaaatgggggttggttcccaggatgccatcaagacgttccaggcattcattgaccaagttgaggagcctttgcgaacaacgtttcagaatgttcatcaagggtttgtcaccgaaactttaatg

SEQ ID NO: 180338 - DNA, 247 bp, Glycine max
ctcgagccggtttggtgagcgatagggatggcgaagttcaatgtggtgcagaagaaaagaagagctctaatagcagagaagaagagacagcttcacggagaccctttaaccggcaagctcaagatcaaggaccaacccctttccctatccggaaaacgcaaacgcaagctcttcaaaaaatggcgcggggaccaaaaggacgccttgcagaatggtttggtaaccatggaagatgttcaaatggcag

SEQ ID NO: 180339 - DNA, 195 bp, Glycine max
gaaaactctgcaaacatgttggtttatcaggacctccttacaggtgatgagcttctctcggactccttccgttacaatgaaattgagaatggaatgctgtgggaagttgaggggaagtgggttgttaagggagcagttgatgttgacattggtgcaaacccttctgctgagggtggagaagatgagggagtcgat

SEQ ID NO: 180340 - DNA, 260 bp, Glycine max
cttctcttatctcaatcacaatttctctctcttttctctcttctgaattattgtcatggctaagagctcattcaagatggaacacccacttgagaggaggcaggctgaagcatctcggataagggagaagtatcccgaaagaattccagtaattgttgaaagggcagagaagagtgatgttcctgaaattgataagaaaaagtatctggtccctgctgatttgactgttggccagtttgtgtatgtggtgcggaagagaa

SEQ ID NO: 180341 - DNA, 243 bp, Glycine max
ccaagtttcttcctttctctgctctttgccttctctgacacatttggtgccttgtagagcgtgttttgcccggaaggtggtatggcgaaggacgttgaggttgctgagcgtcgctccttctctgggcaggactaccaggaccctccctcagcacgactcattgatgctgaggagctcacaaagtggtccttttacagggctctcattgctgaattcactgccactttgctcttcctctacatt

SEQ ID NO: 180342 - DNA, 240 bp, Glycine max
gggcaggaaagcacgtgccccgtgcgatgtttgtagatcttgagcccactgtgattgatgctgttaggactgggacataccgccaactattccatcctgagcagctcattagtggacaggaggatgcagcaaacaactttggtaccggctcctataccattggaaaggagattgttgagctttgcttggaccgcatcagagagcttgctgaccactgcacaggtctccaaggttttctgg

SEQ ID NO: 180343 - DNA, 256 bp, Glycine max
caagaatgtgaatgatgaaagagagttcactgaaatgattaaggccatcaaagtgaggcacaacaatgtggtacccacaatggccatgggagttcagcaattgaagaaaggtatggatccaaagattgtttatgaagatcttgttgagattcatcagttccttgaccgcttctacatgtcaagaattggaatccgtatgcttatcgggcagcatgttgagttgcacaatcccaatcctcctccccacgtcgtgggt

SEQ ID NO: 180344 - DNA, 251 bp, Glycine max
  unsure (1)..(251): unsure at all n locations
aaccctagtaagccgcaatggtgaagtactcaagggagcctgacaatccaactaagtcttgcaagtctagaggcgccgaccttagggttcattttaagaacacaagggaaactgcctttgcaatcaggaagttgcccttggtcaaggctaaaaggtacttggaagatgttcttgcccacaagcaggcaatcccattcagacgtctatccaaangtgttggaaggacatcccaggctaagaatagacactct

SEQ ID NO: 180345 - DNA, 246 bp, Glycine max
gcgtgaaatcgtacggtgaagatttgccggaggatgcggtgagagtgacgcgaagtatcatgatcgtgaaaccacctggtggtaaccagagtccgagcggatccgctccggcttcccccgccggttctactcctccggtgtctcctttttcgggagctagagagtccttccgttttcggagaaggtcgacatcagatgcgtacgagaagacaggccagaacagaccaagctcttcttctcctttcg

SEQ ID NO: 180346 - DNA, 234 bp, Glycine max
ctggatgcccgggcattgagaaggcaggacgctttcagaggcgaaaggccatggggagataccgtctgtgatccatggatctccgatcgggaaaccgtatccaagctccgcggctagtctgcgctctttggacttttaaaacttagcgaactgaaacatcttagtagctaaaggaagggaaatcaaccgagaccccgttagtagcggcgagcgagagcggattggggtttgaag

SEQ ID NO: 180347 - DNA, 267 bp, Glycine max
gtagccattctcttcagtttaaagttacatagtctttcattgttttacttaatctacaatggctgctttcggaatggctctctcttcatcatcattggctggccaagctatcaagcttgccccctccacccctgagcttggtgttggaagggttagcatgaggaaaacagcctccaaaactgtttcctcaggaagcccatggtacggcccagaccgtgtcaagtacttgggcccattctcaggtgagcccccatcctatctcactgg

SEQ ID NO: 180348 - DNA, 264 bp, Glycine max
cactaactaaagccgagcagcgagagcgagaaaccctaggacgactgccggctgatcacggtttgagatcccgcaccagagataccttctctcgtcccttcaggaagaagggtaccatcgccctcaccacatacctcagaacctaccacgtcggcgattatgtcgacgtcaaggttaacgccgccgtccacaagggaatgcctcacaagttctaccatggccgcaccggtcgcgtctggaatgtcaccaaacgtgctgttgggg

SEQ ID NO: 180349 - DNA, 258 bp, Glycine max
cacaaatcacctccacctccagtttacatatatgcttccccacctccacctatctacaagtaagttcgaattgcggaagaccattcacgataaatcatgttctagtttttatcgaggaataaaggcaagctctatttggagtcaagtgaaacatctatcttcctgtccaagttctttgaataaaagtctgaatgtgtcatctctgcactacaatatttgtgattctgaccaagttggttctatttgtttgatggccat

SEQ ID NO: 180350 - DNA, 256 bp, Glycine max
ctcaaaaccctgccgtcagtcaccgtcttctctgccgccatgacgcttgtcaggtttctcatgaagctgaacaacgaaaccgtttcaatcgagctcacgaacggaacagctgttcatggcaccattacaggtgttgatatcagtatgaatacacatttgaacacagttaaactaactctgaaagggaaaaacccagttactttggctcatctcagtgtgagaggcaacaacattcgatattatatccttcctgaca

SEQ ID NO: 180351 - DNA, 252 bp, Glycine max
cttcttcgtgccaagggacaaaaagcacggaagcggaggaaggccaaaccgcacaactgaaaaagggttctggaaagccaccggttcagaccggaaaatagtgaccttatctgatccaaagcgcataattgggttaaggcagacactggttttctatcagggaagagctcctaggggatgcaagaccgattgggtcatgaatgagtaccgtttacctgacaattgcaaactacctaaggaaatcgtgttatg

SEQ ID NO: 180352 - DNA, 252 bp, Glycine max
gtaagagtaggaaatcgacaaaccctacgctgaaagaagaaaaaatgtccggcgtaaagagcgcactgaggcagttcaccttcggaaccggcaagaccgccggtcgcaactcggcggggcgcataacttccttccaccgcggcggcggagccaagcgcttgcaacgaaccgtcgatcacaaacggaatactgcttcttctctcggcgtcgtcgaaaggatcgagtacgaccctaaccgctcctccaaaatcg

SEQ ID NO: 180353 - DNA, 267 bp, Glycine max
tctctctataaatctttctagaaagttccctcactccctgaacctgatcgatctctttaccagttgctacactacaccgagatttgccctaaacccgtttgcgttgttgtttgcgaagaaatggcgactaagaggagcgtgggaacgttgaaggagggtgatttgaaagggaagagggtgttcgtgagggtcgatctgaacgtgcctttggatgacaaccttaacatcaccgatgacactagagtccgtgctgctgttcccaccatc

SEQ ID NO: 180354 - DNA, 260 bp, Glycine max
gcattatattactagttttaatttgttttgtcgtttgcttctttctttgaccaatgatgactagctttaaggttgcatgtgtggttgcgatgatgtgcatggttgtcgccatgagtgttacacccatggcacaggccgcaatcacgtgcgggcaggtcgccggcgacgtgtctccgtgcctcagttatcttcgaagcggcggaaaaccgtcggacgcctgctgccacggagtgaagtcgctcagcggcgcggcgaagacc

SEQ ID NO: 180355 - DNA, 257 bp, Glycine max
ggcttgttcagtctttcttggaactttgttactctcacacatgtctcgctccgtgcctttggtttcaaccatttttgtcttgcttctgcttctggtggccactgagatgatggggccaacaatggtggcagaagcaagaacttgtgagtctcagagccaccgtttcaaggggccatgtttgagtgacaccaactgtggctctgtttgccgaaccgaacgtttcactggaggacactgccgtggcttccgtcgcagat

SEQ ID NO: 180356 - DNA, 142 bp, Glycine max
ctcgagcgcttggagcttatacccaccgtgataaaaaaaatgctttgacttgatgtaaccaaaaaaaaaaaaaaaaaaaaaaaaaaaaaaaaaaaaaaagaaaaaaaaaaaaaaaaaaaaaaaaaaaagagaaagggggggg

SEQ ID NO: 180357 - DNA, 249 bp, Glycine max
cgggaattcaagcactttgtaattgttaagttcaaggaaggtgtggccgttgacgagctcacaaaagggatggaaaagttggtcacggagattggtgctgtcaagtcctttgaatggggacaagacattgaaagcctagatgtgttgagacaaggtttcactcatgcattcttgatgacattcaacaagaaagaagactttgttgcatttcagagccacccaaatcatgtcgagttctcgacaaagttt

SEQ ID NO: 180358 - DNA, 250 bp, Glycine max
gtgcgccatcgtagaagtgaagattcagtttgggatttttcgattcgctctcaatttgcagtgcgtgagtgcaccacatggatacttccgaattgcccaacctaaagaacatggattgtgatgtatcccgtttacataaactccaagaaaacgatggccgaaggaaggcgcattggcctcgccaaagcctgcgaaaatcctacttgcgccgaaatcggtgattgctgcagctatctgaagctcccttttg

SEQ ID NO: 180359 - DNA, 251 bp, Glycine max
ctaagattgagctataatggctgccaggagaccgggtttgattgctttgtttgatgttgatggaactcttacagctcccaggaaggtggtcacaccggagatgttgacattcatgcaagaactgcggaaggttgtaactgttggagttgttgggggttctgaccttataaagatatcagagcaacttggcagcacagttaccaatgactgtgattatgtattttctgagaatggtcttgtggctcacaagg

SEQ ID NO: 180360 - DNA, 253 bp, Glycine max
ctctaacaccacatttcaaaatgaagcattgcatctcaaaacattttctaagttgtttcgctttgtttctgttgctagtcgcaacaacctatgccactgttgtccctaccaccacccaaaagccaccaagaagctttgcaaaccaattcctcatcccccagaacgcggcacgtgcggtgctgaggctgcggccattggtgtgggactccaaattagcacactacgcgcaatggtatgccaaccagaggcgcaa

SEQ ID NO: 180361 - DNA, 249 bp, Glycine max
gtagcagcagctgagcttgtttccgtcgccgcttcacccaccgtagcaaccatgatcattcccgagaagaaccgtaaagagatctgcaaatacctcttccaagagggagtttgctttgcgaagaaggacttcaatctggcaaagcacccagagattgatgtgccgaatctgcaggtgataaatctgatgcagagcttcaaatccagagagtatgtgagggagacatttgcgtggatgcactattactgg

SEQ ID NO: 180362 - DNA, 247 bp, Glycine max
ctcgagataactagaaacagtgtgatgaaaatgaaggtccttgttttcttcgttgctacaattttcgtagcatggcaatgccatgcgtacgatatgttccctctccgaatgaacactggctatggtgcccgtactccggaggtgaaatgcgcaagtcggaggcttgctgtggaagcacacaacatctttggctttgagaccattcctgaagagtgcgttgaagcaacaaaggaatacatccatggcg

SEQ ID NO: 180363 - DNA, 255 bp, Glycine max
ggcagagtgagagacaagagaagagaagatgacaacacgcttcaagacgaacaggaagaagaggggccacgtcagcgctggccacggtcgaatcggaaagcacaggaagcaccctggaggacgcggtaacgccggaggcatgcaccaccacaggatcctcttcgacaaataccaccctgggttcttcggcaaggtaggcatgcgctattttcacaagcttcgcaacaacttctactctccgatcctcaacatcga

SEQ ID NO: 180364 - DNA, 230 bp, Glycine max
  unsure (1)..(230): unsure at all n locations
gaagtctagcttgggtagcgaatcacaatggcgagaggattaaagaagcatctgaagaggcttaatgccccaaagcattggatgcttgacaaactgggtggtgcatttgctcctaagccctcatctggaccacacaaatcgaggacccggctgncactcatactcattttgcgaaaccggctgaagtatgctctaacataccgtgaagtcattgctattctgatgcagcg

SEQ ID NO: 180365 - DNA, 134 bp, Glycine max
cgttgttctaaagcactcatccacacattctccgtcgccacgacaacaatggctccaaagaaaggtgcgaaaggtggagttgtagcagcaaagaagaaggttcaggagaaggtaacgaaccctttgttcgagaa

SEQ ID NO: 180366 - DNA, 257 bp, Glycine max
ctcgctgccgtcgtggtgaccgcccaagaaaacagaatagagagcgcaaacgagtcttcatcttcgactcaccatgaagctcgtcaggtttttaatgaagttgaacaatgaaaccgtgtcaattgagctcaagcatggcactattgttcatggcaccattacaggtgttgatatcagtatgaacacacatttgaaaacagttaaactaactctgaaagggaaaaatccagtgactctggatcatctcagtgtgaggg

SEQ ID NO: 180367 - DNA, 253 bp, Glycine max
catatctcatttgaatacattccttgtagtttatactgaaagatgggtttgaagatggcgttactgatcctaggcctttccctcatgctccttttggtctcctctgaggtggcatccacgaatacaaaagaggaggcaaatggagtggatgatgccaaatatcccggtggaagctatggagggggttacccaggtcatggcggtggcggttatcctggccatggcggtggcggttatcctggccatggcggtg

SEQ ID NO: 180368 - DNA, 247 bp, Glycine max
cttggtctggacaaagagttgaagaggcttgtatttgaaatcactgccaaccaggacccactggttagtaagggatcaaatttggttccattgattggtattgatgtttgggagcatgcgtactacttacagtacaagaatgtccgaccagactatcttaagaacatttggaaagttattaattggaaatatgccagtgaagtgtatgagaaagagagctcttagtctgaaggagctacttgatata

SEQ ID NO: 180369 - DNA, 254 bp, Glycine max
ctacaagatgccactcagattgttgcaaatttacagaggcagcaggttcagtccaagctcatcgcctctgattacttttatactaatttggatcttatggatgtcttggtatctggatatgaccacacagatatggctttacactacggtgcaatgttgagggagtgcataagccaccagattgttgcaaaatatgttctggactcacctcatatgaagaagttttttgactacattcagcttccaaattttga

SEQ ID NO: 180370 - DNA, 246 bp, Glycine max
caacaacacaaaattcattgcacagtgttattttcagtatcagcatcatggctcgaattgcagtgggagatgtcattccagacggcattttggcctacttggatgaagaaaacaaaccccaaactgtctctattcactctctcgccgccggcaagaaagtcatcatctttggggttcccggtgccttcactcccacatgcagcttgaagcacgtgcctggcttcattgagagagcagaagagctga

SEQ ID NO: 180371 - DNA, 240 bp, Glycine max
cgtctcttcctcctctctccgcatcgctgcgttttccgaatcgaaaggtacgtaagtcacaatggtggaggccaagggtaggaaagaggaggtcgtcactcgagagttcaccatcaacctccacaaacgcttgcatggctgcacattcaagaagaaggctcctacagcaattaaggagataaggaagtttgctcagaaagcgatggggacgaatgatgtgagagtggatgtgaagctgaa

SEQ ID NO: 180372 - DNA, 246 bp, Glycine max
ctaagctagtttatcgtgaggcgaatatgaagttgtttgtcttctctgttgctgcagtagttttggtagcatggccatgccatggcgcaggctaccaacggttccctctccgaatgaacactggctatggtgagcgttcttcggaggtaaaatgcgaacatcttaggcttgctgtggaagcacacaacatccgagcccttaaaaccattcctcaagagtgcgttgaaccaacaaaggactacatta

SEQ ID NO: 180373 - DNA, 248 bp, Glycine max
cagaagcagaaagacagaataagaggttgcagcaacaatggcagccatggctgcgcttcagagctcaatggtcggtctctccctctcctccaactctttcttaggccaacgcctttctcgcatcaccctcccctctcttcttccgggtacgtcaacagagaagcaatgtcctattgtcatgaggcttaaacgatgggaacggaaggagtgtaaaccatacagccttcctatcttgcacaaaatgcatg

SEQ ID NO: 180374 - DNA, 249 bp, Glycine max
  unsure (1)..(249): unsure at all n locations
caaagtaagacgtatagtgttctacgagtgagccacttgtgagacatggcttccaaggctgcacttctcttgtgtctccatgttctctttttcactgtggttagttccacatatgtgccatgtcatccannccccaaaactcccaaacacccacctgtcgcagagccaccatccccaaagctagcaagctgccccaaagacactattaagttcggtgtgtgtgctgatgtgttaggtttgattaatgtg

SEQ ID NO: 180375 - DNA, 276 bp, Glycine max
ctatgcccctgacacaaaaaggcttgcagatgggcttgccttctttctcgcaccaattgacactaagccacaaacacatgcaggttatcttggtcttttcaacgaaaacgagtctggtgatcaagtcgtcgctgttgagtttgacactttccggaactcttgggatccaccaaatccacacatcggaattaacgtcaattctatcagatccatcaaaacgacgtcttgggatttggccaacaataaagtagccaaggttctcattagctatgatgc

SEQ ID NO: 180376 - DNA, 268 bp, Glycine max
ctcatttcaatttgcatttgcatttcatttggcgttttgtttctatctggaagcttcacttcggcatccatggcgtcgttcgaagaagctcctcccggaaactccaagaacgtccagaagatcttcaagaccaagtgcgctcagtgccacaccgtggacaaaggtgccggtcacaaacaaggacccaatctgaatggtttgtttggaaggcaatctggcacaactcctggatattgctattctactgctaacaaaaacgatggctgtg

SEQ ID NO: 180377 - DNA, 265 bp, Glycine max
ctctaatcactctagctgttgcaaatttgctatcccctcaatggcttctgcagatgttgagttccgttgctttgttgctgggcttgcttgggtcaccggcaacgatgccctcgagaaagccttttcaatctacggcgacatcgttgaatcgaaggttatcaacgaccgtgagactggaaggtccagaggattcggatttgtgaccttcgcctcagagcattcattgaaagatgcgatcgccggaatgaacggccaggaccttgac

SEQ ID NO: 180378 - DNA, 258 bp, Glycine max
agaaaatgaaagtccttgttttctttgttgctatagttctagcagcatggcattgccatggctcagaccatgaccatgaccatggccacacctaccaaattttccctctgagaatgaaaactggccatggtggccactacattccggaggtatcatgccaaagttggaggcttggtgtggaagcacacaacgtcattgactggaaaaccgttcctcaagattgcgagggatatattgggaactacatgcttggcgaac

SEQ ID NO: 180379 - DNA, 113 bp, Glycine max
atcgagataagtagaaagagtgctgagaaaatgaaggtccttgtcatcttggccgctacagtattggtagcatggcaatgccatgcgtacgatatgttcccactccgaatgaa

SEQ ID NO: 180380 - DNA, 266 bp, Glycine max
tgaaaagtaaaggcgaaagactttaggtttggacttgggaattagggttgttcgcgtcacgaagatgatcgaggtggtgttgaacgatcgattggggaagaaggtgcacgtgaagtgcaacgacgatgacaccatcggcgatctgaagaagctggtggcggctcagacgggcacaagagccgacaagatccgcatccagaagtggtacaccatatacaaggatcacatcactctcaaggattacgagatccacgacggcatgggtc

SEQ ID NO: 180381 - DNA, 264 bp, Glycine max
gtttgttgtgagctataagctagtttatcgtgaggagaatgtgaagttgtttctcttctctgttgctgcagtagtattggtacactggccatgccatggcgcaggctaccaaaggttccctgtccgagtggacagtggctatggtgagcgttgttcggaggtaaaatgcgcaagtcttaggcttgctgtggaaggcacacgacatccgagcctttaaaagcattcctgaagagtgcgttgaaccaccaagggactacattagtg

SEQ ID NO: 180382 - DNA, 130 bp, Glycine max
ctttcacttttgctttgagatggcaaagtcgaagaatcacacagcacacaatcagtcctacaaggcccacaaaaacggcatcaagaaacccaagaggcatcgccacacttccaccaaagggatggatccc

SEQ ID NO: 180383 - DNA, 270 bp, Glycine max
ctcacacagaggatgcaattcgggttactcagtccacagcaaactttttcataagtgaagctaggaaatccacaaacacacctgatgctcaaaaagtgcgagataatctcatctacaattacaaacctacttttggtggaacggctgggaaaggatatgatcaagtgtatctctttgaataattctatctgtaggaggtgtccttgaatttgattttatgcacaataaattatgaactggggatgtagtttgaagaaataaaaatttgtg

SEQ ID NO: 180384 - DNA, 130 bp, Glycine max
cggctcgagcggctcgagcggctcgaggtcagcttcaagaaccacgttattcagtggttcgaggtccctgatggcgtacttggccgatattggaaagcagtggggctagccttcaactgtagtttcctcc

SEQ ID NO: 180385 - DNA, 265 bp, Glycine max
cagaagtcctccattctcacagctaggtggtgatgattagtgtatatatatacatacatggttgaagtgggtatttttcagatccctacgagcagtttggacccatttgcggacgcaaaacaaacagatgcaccaggggcgaaagaatatgttcatatccgcatacagcagaggcaccgggaagaagactctcaccacagtgcaaggtgtgaagaaagagttcagctacgagaagatcctcaaagacctcaagacagagttgtgc

SEQ ID NO: 180386 - DNA, 260 bp, Glycine max
atcgagataactagaaacagtgtgatgaaaatgaaggtccttgttttcttcgttgctacaattttcgtagcatggcaattccatgcgtacgatatgttccctctccgaatgaacactggctatggtgcccgtactccggaggtgaaatgcgcaagttggaggcttgctgtggaagcacacaacatctttggctttgagaccattcctgaagagcgcgttgaagcaacaaaggaatacatccatggcgaacaatatagatc

SEQ ID NO: 180387 - DNA, 150 bp, Glycine max
ggctcgaggttttgctgggcctcgattggaaaatggacagaactgtagctggtggatggtggatcttcgccaagatcatcagcttatgtgcaactactataccctgaggcaggacggttctaaggccttcccgagatgtacgaatgttca

SEQ ID NO: 180388 - DNA, 260 bp, Glycine max
atttatattcggtctagataacaccgtactctctaatatcccatactatgaaaaacatggatatggggtggaggaatttaatgaaaccttatatgatgaatgggttaacaagggcgacgcaccggcattgccagacactcttgaaaattgcaacaagctgttgtctcttggcttcaagattgtattcttgtcaggaagatatcttgacaaaatggccgtaacagaagcaaacctaaagaaggctggcttccacacatggg

SEQ ID NO: 180389 - DNA, 173 bp, Glycine max
ctgagtttccacactgcataccttatgtcttccgaattcgaagttaatttgcaagatggctaaggaaaaggctcagatcaacattgtggtggttggtcatgtggaccctgaggaggcaaccaccattaacgagctgaagaagcctgttgtggagaaagaagctccagggcatg

SEQ ID NO: 180390 - DNA, 216 bp, Glycine max
aatccagatctagtcttatttgttggagaagcactggttggtaatgacgctgttgatcagctttcaaagttcaatcagaaattagctgaccttgcaacatcacctaatccaagattgattgatgggatcttgctcacgaaatttgacaccatagatgataaggtgggagctgcactttcaatggtttacatatctggagctcctgtcatgtttgtg

SEQ ID NO: 180391 - DNA, 127 bp, Glycine max
gccagatttcaagatgaagttcaacattgcgaatcccaccactggttgtcagaagaagctggagatcgatgatgacctgaagctcacgagcattttgggacaagacgatctcacaagaggttgttgg

SEQ ID NO: 180392 - DNA, 269 bp, Glycine max
aacgtctgaattcgggtcgagtacagagagtggtttcagtgagtgatcggtgttcacttgctccttcataagtcgtcatcatcatcatcatcatcaccgttgattgaagaagatgccgatcagaaacatcgccatcggaaggcctgaagaggctactcaccccgacacgttgaaggcggggttggctgagttcatctccaccttgatcttcgtgttcgccggttcaggttccggcatcggctacaacaagctcaccgacaacggcgccg

SEQ ID NO: 180393 - DNA, 151 bp, Glycine max
gacaactttgatgaaccaatatgtgaataagaagtttagtaatcagtacaaggcaaccattggagcggattttttaaccaaagaagtgcaattcgaagataggcttttcaccttacagatttgggatacagctggccaagaaagattccaa

SEQ ID NO: 180394 - DNA, 264 bp, Glycine max
taggcaacaacaagttctggtactcttaaagcaagtcctttccttggccaaggcaagggtgccaatgccaatgctcttagggatgttgtctccatgggaactgggaagtacaccatgggcaatgatttgtggtatggaccagacagagtgaaatacttgggacccttctcagctcataccccttcatatttgacaggagaattccctggggattatggatgggacactgctggcttatctggtgacccagaagcatttgccaag

SEQ ID NO: 180395 - DNA, 113 bp, Glycine max
gttgttacagcgctgacccttcttaagaaacaccttttcaattatcaagggcatgtctcagctgctttggtgcttggtggggttgatatcactggacctcatttgcatactat

SEQ ID NO: 180396 - DNA, 226 bp, Glycine max
gtttgctgttagggacatgcgtcaaactgttgctgtgggagtcatcaagaacgttgagaagaaggatcctaccggagccaaggtcaccaaggctgcccagaagaagaagtgaatcgtgcgggctggttcatcaggggatgttggttacaataaatgttggtttcttttctgtactcttgtgtcttcttttctaggtagcttgtttttcggacaaagtttgaagtct

SEQ ID NO: 180397 - DNA, 253 bp, Glycine max
ctgcaatcaacggcaccccccacaaaaatgacaggagagacagtgaacccaaaagcttaccctttggccgatgcgcaactcgcaataacaatcttggatcttgtgcaacaagctgccaactacaagcaactaaaaaagggtgctaatgaagcgactaagacactgaacagaggcatttctgagttcgttgtgatggccgcagacactgagcctcttgagattcttctccatcttcctctccttgctgaggata

SEQ ID NO: 180398 - DNA, 183 bp, Glycine max
ccgattagcagaactgatgttattggcagtagaaggaggaggatcttctactgatcggcttcagggtatactaagggcctgagccttgtcctcttgggtcagaggaatgaggataaacccatgagagtagcgccgtggaatcagtatcagttggtagaccaagattctgacccgagctccagt

SEQ ID NO: 180399 - DNA, 275 bp, Glycine max
gctgaagtgtctgcttcttccgattccggcacgcccccatcaccatggtgaacgttccgaaaacaaagaagacatactgcaagagtaagctgtgcaggaagcacaccctgcacaaggttacccaatacaagaagggtaaagatagcattgctgcccaaggaaaacgccgttacgatcgcaaacaatctggttatggcggacaaactaagcccgtcttccacaagaaggctaagaccaccaagaagattgttctgaggttgcaatgccagggttgc

SEQ ID NO: 180400 - DNA, 170 bp, Glycine max
cgctgcggttagaagagattcaatctgactctgaatggaagctatcagaaagcaagcctccaaacttcgagaacaggtcgctcgtcaacaacaggctgtgcttaaacagtttggggctgggggatatggaggttcagataatatggttactgatgaggtagagcttcagc

SEQ ID NO: 180401 - DNA, 263 bp, Glycine max
gagagaatggctgcggccaacgttgttgagttcacagacttacccgtcaagaggccaagagaagacgaagaaggaatgcatggcgtctcaaacgacgccgtttcagcgctccccactgaccctcaataccctggcatctctgcggttattcccggttggttctccgaaatcagcccaatgtggcccggggaggcacattccttgaagatgtccaagattttgtttcaagggaagtctgactatcagaatgtcatggtcttcca

SEQ ID NO: 180402 - DNA, 267 bp, Glycine max
caccgcacgaatatcttgttgtttggagcgatccgagacaaactctgtaaacatgttggtttaccaggacctccttacaggtgatgagcttctctctgactccttccgttacaaggaaattgagaatggaatgctgtgggaagttgaggggaagtgggttgttaaaggagcagttgatgtagacattggtgcaaacccttctgctgagggtggaggagaagatgagggagttgatgatgcagctgttaaggttgttgacattgttga

SEQ ID NO: 180403 - DNA, 268 bp, Glycine max
tatagcccaagccctatacaaccaaaccctaacacacacccatttgattcagtttccatggctagcctcaaggttgcatttttggctgcagtgctctgcatggttgtggtgagtgcacccatggcacatgcagctatcacgtgcgggcaggtgacgaatagcctgatcaattgcatcggttacctccagaacggaggaacgccgccgtcgggatgctgcaacggagtgaagagcctcaatgccgccgccaagaccaccgccgaccgcc

SEQ ID NO: 180404 - DNA, 267 bp, Glycine max
catttgtactttcatcaaaacaaaatcccgttgtatttttctcagatggctcgaacgaagcaaacggcccgcaagtccaccggcggcaaggcgtcgcggaagcagctggcgactaaggcggctcgcaagtcggctccggcgaccggcggcgtgaagaagccgcacagattcaggccgggaaccgtggcgctgcgcgagatccggaagtatcagaagagcacggagctactcatccggaagcttccgttccagcgcttggtccgcgag

SEQ ID NO: 180405 - DNA, 268 bp, Glycine max
attacaatttcctgaattcatcttatgtgccagtcctaaaacaattggagtctgctaaccttcagagcttttacttcgagcacaagcttgaaaatgctacaaaggacacaaataatatgaagttcaggaaccccaaatatttgtcaatattgaaccatttgaggttctacttgccagaaatgtatccaaagctgcataaaattttgtttttggatgatgacatagtggttcagaaggacctaactgggctatggaagattgatatgga

SEQ ID NO: 180406 - DNA, 272 bp, Glycine max
tgtagaaagtgacagtggatgaacacaagagaaagaagaagaagaagcagaagaagaagaaaagcggtttgtgtgtgtcgaagtggataattccttccttcaattaatctccgatccgaaaccgtatggggattctatacgcactggtaggtcgcggatcggtggtgctggcggagttcagcggcaccaccaccaacgccagcgcaatcgcgcgtcaaattctcgagaaaacccccggcaacaacgacatgcacgtttcttactctcaggat

SEQ ID NO: 180407 - DNA, 270 bp, Glycine max
tctctctctctagacttagattttgtgaatggctgaagtggaagagggacaggtcatcggcgtccacaccgttgatgagtggaagctgcaactccagaatgcaaaagactccaaaaaactgattgtggtggattttactgcttcctggtgtggtccatgccgttttatggccccagttcttgcagagattgcaaagaaaactcctgaattgatcttcctcaaagtggatgtggatgaagtgaggcctgttgctgaggaatattccattga

SEQ ID NO: 180408 - DNA, 269 bp, Glycine max
tgtttgttaccttcatgaagaggtttatcaagaatttgactcccaagctcgatgcagagaaacaagagttgtttaagaagcacattgagggagcaactaaatacctgctctctaagattaaggatttccagttttttgttggggagagcatgaatgatgatgcttgcttggtctttgcatactacaaggatggtgctgctgatccaacattcttatactttgcatatgccttaaaggaggttaagtgctaagtgacataatgtaccaag

SEQ ID NO: 180409 - DNA, 168 bp, Glycine max
ctaattctatctgtaggaggtgtccttgaatttgattttatgcacaataaattatgaactggggatgtagtttgaagacataaaaatttgtgcacagtgatgtttgtaagatgcttaatttcagggcaatgctctgcttatcaatgtgttatatcttgttattgcccc

SEQ ID NO: 180410 - DNA, 266 bp, Glycine max
ctagagaagaagcttcttcttggttaccttgacagacagagagtggagcaaacgacaaatcagcgagttggaacattttgtgtttggtggagatgcctattcggagcttggtagaagtggagccaccaagcccactgagatacttgatcggcgccgccgttatgatgatcggagttgtgttaccagtcggttacatgatgttccgtaacaagcgcgtcccctcctcttcctcctactccaaacagacgtaggaacaaggttttgat

SEQ ID NO: 180411 - DNA, 265 bp, Glycine max
ctttgagcttaaaccctagccgctcttctcttcattcttcactttggaaacaatcataatggcgttctgtaataaggttggaaatgtcttgaggcagggtgctgctcgcagcacacatgcccctgttgcgtccatgcttaattacatccgctgcatgtcttcaagcaagcttttcattggaggcctttcatatggagttgatgaccagtctcttaaggatgcattttctggctttggagatgtggttgatgcaaacgttataact

SEQ ID NO: 180412 - DNA, 264 bp, Glycine max
cgagtttgttgtgagctataagctagtttatcgtgaggagaatatgaagttgtttgtcttctttgttgctgcagtagttttggtagcatggccatgccatggcgcaggctaccaaaggttccctctccgaatgacaactggctatggtgagcgttcttcggaggtaaaatgcgcaagttttaggcttgctgtggaagcacacaacatccgagcctttaaaaccattcctgaagagtgcgttgaaccaacaaaggactacattaa

SEQ ID NO: 180413 - DNA, 264 bp, Glycine max
ttccatttcaatgtcttcccattcgcacaaaggcacctccttctacggcgatgccgctccttatcgatccagagacgacgttaccactcgacccgtcgcatcctccgatcaactccaattgcacatcgatcccggcatcaacttcgatgacgaaatcaccggtcttcgtggccaagttaaaatattgataaatgttgctgaagagataggttcagaagtcaagtttcaaagagattttctggaacaagtgcaaatggtaatgat

SEQ ID NO: 180414 - DNA, 267 bp, Glycine max
caacaacgcttaacctctctcattccccatttcctcacctccttcaaccgctgctaaattctagggttccgaaatggacgctggcggaaagatcaagaagggcgccggaggtagaaagggcggcggcccaaagaagaagccggtttcaaggtccgtcaaagccggtctccaattccccgtcggaagaattggccgttatttgaagaaaggaaggtacgctcagcgtgtcggtaccggtgctcccgtatacttggctgcagttctcga

SEQ ID NO: 180415 - DNA, 252 bp, Glycine max
tggtggggagcatggtggtggatatggcggtggtgaaggaggtggagcaggtggagggtatggtgcaatggagaacatggtggtggttatggtggtggtcaaggaggaggaagtggaggagggtatggtgctggtggagatcatggtgctgctggctatggtggtggagctggaggtggagctggtggaggctatggtgcaagtgtcccctttcgcgtatcaagaataataagtatgctattaataacagga

SEQ ID NO: 180416 - DNA, 266 bp, Glycine max
ccgacgatgcctcccgtcgctcctcgatccggcgatgccatattcgccaacgtcgaacgcgtcaatgcggagctgtactatttgacgtatggcgcaattgtgcgtcaattgctcacggatctggaagaggttgaggaggttaacgagcagcttgatcaaatgggttacaatattggaatccgattgattgatgagtttttagctaagtctaatgtctcaagatgcaacgatttcagagagactactgatgtaattgcaaaggttgg

SEQ ID NO: 180417 - DNA, 262 bp, Glycine max
tctggaaaactgcctttaccattggatatggcttgccacttggggacttcttatttggatcggatggaaagcgcttccttaacatctcttttggtgcccctattaatgagttggtcattgacacactatttgtgaaggttgttttgccagagggttctaaagatatttcagtgtctgttccatttcctgtgaaacaatcggaggagacaaagctttcccacttggatattgttggtagacctgttgttgtgctggagaagaa

SEQ ID NO: 180418 - DNA, 262 bp, Glycine max
ctcagcgagcgaggttcgtgaagcaactgggtttggaaccactttcatgatggacaatgttttgaccgaggggtcagagctgagctcgaagcacgttgggagggctcaggggctgtttggcttggcctctttggaggaccgtggaatggtgatgctcattaacttggctttcagtgagggtgagtatgctggcagcactctcagcatgcttgggaggaaccctgttcaggacactgttagggaaatgcccattgttggaggc

SEQ ID NO: 180419 - DNA, 265 bp, Glycine max
caacaacgcttaacctctctcattccccatttcctcacctccttcaaccgctgctaaattctagggttccgaaatggacgctggcggaaagatcaagaagggcgccggaggtagaaagggcggcggcccaaagaagaagccggtttcaaggtccgtcaaagccggtctccaattccccgtcggaagaattggccgttatttgaagaaaggaaggtacgctcagcgtgtcggtaccggtgctcccgtatacttggctgcagttctc

SEQ ID NO: 180420 - DNA, 260 bp, Glycine max
ctggtactgtgctggtggggagcatggtggtggatatggcggtggtgaaggaggtggagcaggtggagggtatggtgcaagtggagaacatggtggtggttatggtggtggtcaaggaggaggaagtggaggagggtatggtgctggtggagatcatggtgctgctggctatggtggtggagctggaggtggagctggtggaggctatggtgcaagtgtcccctttcgcgtatcaagaataataagtatgctattaataa

SEQ ID NO: 180421 - DNA, 260 bp, Glycine max
ccgacgatgcctcccgtcgctcctcgatccggcgatgccatattcgccaacgtcgcacgcgtcaatgcggactgtttactttgacgtatggcgcaattgtgcgtcaattgctcacggatctggaagaggttgaggaggttaacgagcagcttgatcaaatgggttacaatattggaatccgattgattgatgagtttttagctaagtctaatgtctcaagatgcaacgatttcagagagactactgatgtaattgcaaag

SEQ ID NO: 180422 - DNA, 261 bp, Glycine max
tctggaaaactgcctttaccattggatatggcttgccacttggggacttcttatttggatcggatggaaagcgcttccttaacatctcttttggtgcccctattaatgagttggtcattgacacactatttgtgaaggttgttttgccagagggttctaaagatatttcagtgtctgttccatttcctgtgaaacaatcggaggagacaaagctttcccacttggatattgttggtagacctgttgttgtgctggagaaga

SEQ ID NO: 180423 - DNA, 262 bp, Glycine max
ctcagcgagcgaggttcgtgaagcaactgggtttggcaccactttcatgatggacaatgttttgaccgagggtccagagctgagctcgaagcacgttgggagggctcaggggctgtttggcttggcctctttggaggaccgtggaatggtgatgctcattaacttggctttcagtgagggtgagtatgctggcagcactctcagcatgcttgggaggacacctgttcaggacactgttagggaaatgcccattgttggaggc

SEQ ID NO: 180424 - DNA, 264 bp, Glycine max
cgcgtccttcttgtttcacaagtttccttggaagcggacgtattaccctctctccctttcttctattttctcattcctgcctctcttctcaacatggccgccaacagatggttgacacctgaggtatacccactcttcgcttcagttggtgtggctgttggaatctgcggtatgcaacttgttaggaatataaccaccaatcctgaagtcagggtgaccaaacagaacagaactgcaggaattcttgagaattttgcagaggga

SEQ ID NO: 180425 - DNA, 264 bp, Glycine max
tcaacctctgcagcgccttcgatccagataacatgactaacgagaacaaagaaggctggcattgttggaaaatacggtacccgctatggcgccagtctgcgtaagagagtaagaagatggaagttagtcaacacagcaagtttttctgtgaattttgtggaaagtatgctgtgaagaggaaagctgtgggaatatggggatgcaaggactgtggtaaagtgaaagctggcggtgcttacactttgaataccgcaagtgccgtga

SEQ ID NO: 180426 - DNA, 262 bp, Glycine max
cagaagagtgtcgcagttgtaaccctaatcagaagacgcgcagttcaagcgagtgacagccaccagccatgggtcgtatgcacagccgcggtaagggtatatcctcttctgctttgccctacaaaaggacacctcctagctggctcaagatctcttcgcaagatgtcgaagaaaatatctgcaagtttgcgaagaaaggtttgaccccgtctcagattggtgtcattctcagagattctcacggtattgctcaggtcaatag

SEQ ID NO: 180427 - DNA, 261 bp, Glycine max
cttaggagtgtgaagccctttggatggtcctatgcagtttcacaggtgttgactgagaaggctgtgcttgaatttggagaacagaatgggttggaagttgcaactgttattgctcctttcattgttggtcgttttgtttgtcccaagcttcctgactccattgagaaagctctgcttatggtgttgggcaaaaaggaagaaattggtgtcattcgttaccatatggtacatgtggatgatgtcgctagagcacatatcttc

SEQ ID NO: 180428 - DNA, 255 bp, Glycine max
cgggatacagaattgttggaatcattggagaccaatggagcgatctgcttggagaccacagaggcgaaagcaggacctttaagcttcctaatcccatgtactacattgagtagtaccttcacctctctcaacaatctagctagagtttgctcctatctatatgtaataaggtatgctgatatgcactattcaaataggagcattagctatgtttgttaatgtcactttatgttatgtgggtaagtcacctaagac

SEQ ID NO: 180429 - DNA, 261 bp, Glycine max
tttgtttgttccatctcttgcttcttgcttctattacttgcttctttcttcaccatgtcacttgctgggaaaatcaccactgaaattggggttcatgcaaccgctgcaaagtggttcaacctctttgcaacacaacttcatcatgttcaaaaccttactgatagagtacatggaaccaagctgcatcaaggtgaagactggcatcacaacgagacagtcaaacactggacttataccatagatggtaaggctacaacatgt

SEQ ID NO: 180430 - DNA, 260 bp, Glycine max
ctgagttctaccttgggcagagagatggtggtgactactggacttctgatgccggtccattagaggcatttaagaggtttggcaagaagcttgaagagattgaaaagaagcttatagagaagaacaaagatgagacattgagaaaccgctatgggccagctaaaatgccttacactctgctctatccttctagtgaggagggattgactttcagaggaattcccaacagtatctctatctaaggaccctatggttgctta

SEQ ID NO: 180431 - DNA, 261 bp, Glycine max
caattttcccatattattcacagaaaggctaaaagggccctataaaactaaacgctccccttctcgaagaggccgctcgctctctagggtttttctttttctcttctcactgcatcgcttcaggttcttctgaaaagatgtctcgcgtgtatgttggtaacttggattcacgagtcactgagagagatctcgaagacgaattccgcgttttcggagttattcggagtgtttgggttgcacgtagaccacctggttatgctt

SEQ ID NO: 180432 - DNA, 263 bp, Glycine max
ctactatatatggtcattttcagatagctttgaatgggatgctcgttacacagctcgatttggcatcatatatgtggattacaagaacaatttgagtagataccctaagtcctctgcgttttggctgaaaaaattccttctcaagtgatctaaatctattgttcctttggcatgcatgcccagtttttcttcttgtttgtttcctggatatcacagacatgcagtgtgtatcacttgctcttcgattcggatcaatgtaatca

SEQ ID NO: 180433 - DNA, 258 bp, Glycine max
ggggtaatgcatagagagtagatctgtcacggagcgtatagtcgccggcgacggcgagcggtgcactttaaccgcgattaacgatgattaaccttcgccgcagcggcgaaaacatccctgcgaaatcgaagcgattcaaacgccaattggtgaagttcgaggagctgccggagtacttcaaggacagcgagttcatattggactattaccgctccgaatggcccgtgaaggaagccttgtggagcatcttcgcgtggc

SEQ ID NO: 180434 - DNA, 258 bp, Glycine max
cccagagtctgagtcctctgagactttccttcagtccttcaccttctttctctctaggcgcaaaacctcgtactgtttgtggcggctaaggatgtcagggaaaggggcgaaggggttgatcacaggcaaaacctccgccgccaacaacaaagacaaggacaagaagaaacccatctcgcgttcttcacgtgccggccttcagttcccagttggccgtatccaccggcttttgaagtcaaggacaaccgccaacggtag

SEQ ID NO: 180435 - DNA, 259 bp, Glycine max
cacacattaacctttctcattccccatctcctcaccttattcagccactgctaatttctagggttccgaaatggacgctggcggaaagatcaagaagggcgccggaggaagaaagggcggcggccctaagaagaagccggtttcaaggtccgtcaaggccggtctccaattccccgtcggaagaattggccgttatttgaagaaaggaaggtacgcccagcgtgtcggtaccggtgctcccgtttacttggccgcagtt

SEQ ID NO: 180436 - DNA, 283 bp, Glycine max
gctcggacttcattcataccgttcgcaacacgatcactgttctgcgacgatggtggcacattcgagttcttggggaagggcatcgtcgcgatctcggcctacaccttctccgccatcgccatcgccgtcgctatcggcgtctccgtcctcggcgccgcctgggggatctacatcaccctaagcagcttaatcggcgctgcaatcagggcttctcgagtcacttccaaaaatctcattactgtaatcttctgtgaagctgttgctatatatggtgttattgtgg

SEQ ID NO: 180437 - DNA, 275 bp, Glycine max
tcgatgagaaagatagagagatagtgtgtgcagaagatgtggctattcggcagaaaaggggcttctgggttttcatcatcatccactgcagagcaagtcactgaaggaattgatggaactggtttcactgccattgtcacaggggcatccagtggtattggcactgagactacgcgtgttcttgctttgcgtggtgtccatgtgattatgggtgtgagaaatatgcttgctgctaaagatgtcaaagaaacaatactcaaggagattccctccgc

SEQ ID NO: 180438 - DNA, 277 bp, Glycine max
cagagagagaaaagcgtgaatcatgtcggacgaagagcatcacttcgattctcaggcggatgcgggagcgtccaagacgtatcctcagcaggctcgtatcattcgcaagaatggctacatcgtcatcaaatccaggccttgcaaggttgtagaggtctctacgtcaaagacaggcaagcatggacatgcaaagtgtcactttgttgcaattgatatttttaatgggaaaaagcttgaagatattgttccatcatcccacaactgtgatgttccacat

SEQ ID NO: 180439 - DNA, 278 bp, Glycine max
ataggcgaaggactttaggttgggatttgggaattagggttattcgcgtggcgaagatgattgacgtggttttgaacgatcgattggggaagaaggtgcgcgtgaagtgcaacgacgatgataccatcggcgacctgaagaagcttgtcgcggctcagactggcacaagagccgacaagatccgcatccagaagtggtacaccatctacaaggatcacatcactctcaaggattacgagatccatgacggcatgggtctcgaactctactacaactaa

SEQ ID NO: 180440 - DNA, 274 bp, Glycine max
ctttcttttgtacacagtacagtgtggaaagtattatttggaaaggtagctgattcactggagaaaggaactgaacatgaagatgagtacatgatcagtgaaaaggagctcctagtaaacaaattcatttctatcccaaaggacatgggaacgtttaactgtggagcatttgttgctggaatagtacggggcgttttggatggtgccgggtttccagctgttgtaacagctcattttgtcccatggaaggtcaacaacgaccacggacaacaat

SEQ ID NO: 180441 - DNA, 279 bp, Glycine max
  unsure (1)..(279): unsure at all n locations
catcagtttcagctgccatggcttccaactccgtccgagttttcgccgctcagatgacatccatctagtgactctctngccagtttggccacttgttctcgtctcatcaaagaagcagcatcacttggagccaaattgctttgctttccggaggccttttcttacgtgggtactaaggatggcgacagtgttcgtgttgctgaaccattggatggaccaattatgagccactactgctctttggccagagaatccagcatttggttgtcacttggaggc

SEQ ID NO: 180442 - DNA, 282 bp, Glycine max
ctagcaatgggcggtatactttctgcgcttcttggcggcgacgcggcggcggcggcgtcgttcgccggaagagttccagttcctacggcctcctccttccactcgtcgccgcgctggcagctctacttcaacgagatcaaagataccgataagctcgttgtgatagatttctcggcgtcgtggtgcggtccttgcaaattcatagagccagcgattcacgccatggccgacaagttcaacgacgttgacttcgtcaagatcgacgtcgacgaattacctgat

SEQ ID NO: 180443 - DNA, 274 bp, Glycine max
ggctcgttttgcatgctcagtttgggactctccaatctctacacacccctcaaaacggggtgcgttcaatctctcttacgatccaagttgggtattcgaacccagtcgtgcatcagaatggaagggagtaacaccaccgtgcccagcattgttgtctatgtcactgttcccaacaaagatgcaggtaagaagttggctgaaagcatcgtcaaagagaagcttgctgcttgtgtcaacagggtaccgggtattcaatcggtgtaccagtgggagg

SEQ ID NO: 180444 - DNA, 277 bp, Glycine max
tcttgcgactaagagttgctgcttcttccgccactcagcacttcgctccctctgtgcttcaccaaccatggccgaaatcgaagctacccgtcccagatccctctcaaatcgacgtcaaacttttcaaccgctggagcttcgacgacgttgaggttactgatatgtctctggctgattacattggagtgtccccgtcaaagcatgctacatatgttcctcacactgctggtaggtactcagtgaagaggttcaggaaggcgcagtgccccattgttga

SEQ ID NO: 180445 - DNA, 275 bp, Glycine max
  unsure (1)..(275): unsure at all n locations
ctttattgcaagactggcacttcgttgcttggtgatgtccctttctgttctcttcactcttggtcttgcgagagaaagccatgccagacacgaagatttttggcatgctgtttggccaaacactcccattccaagttcattgcgagatcttctaaagcctggccctgcaagtgttgcaatcgctgatcaccctatgcaaattgaagaaacacagtacccgaaaaccttcttctataaagaagaccttcatccaggcaaaacaatganagtacaat

SEQ ID NO: 180446 - DNA, 277 bp, Glycine max
atgctagttagaacaagatgttgcagctactctacactgcgattttctccgaaatgcttttgattctcagggttcgttttcaaaacccaactgagaaaactcgtcatcgtttccctcgatagtgtgaagcgcggtcgcggtcccgtggtggtttccaccgtgggcgccacattgatggtggttctcgcttcgagtctctacagcatggccaagatccagcaacgcaccctcgaggccggcatagtcaaccccaccgaccaagtcgtcatgtccaagc

SEQ ID NO: 180447 - DNA, 279 bp, Glycine max
ttactggtgaaggataaaattgaagcgcagaaccaagtgaaggctaaagaacaagaagagaaggaagtaatttgttcaccagattatgtatgctcagttgttgcctcttgctttgcccgcaccaccaatgcctggaatgggaggaggctttgcgcctccccctccaatgggtggattggggatgcctccaatgcctccttttggaatgccacccatgggcagctactgacatataagttctcggcaatgaactcaagtgtataccgagagcagcgtaca

SEQ ID NO: 180448 - DNA, 278 bp, Glycine max
cggtttgtagtgtagcaggaagaagcagcaatggcgccgaagataacacgtaaggttagcagaaaccctgaatttgatagggggattcggaaattactcgaggtcgcagatgtaccacaagacgggcatttgggctatcaaggccaaaaaccgtggcgttttacctcgccacgaccctaaacccaagcctgaagctcctgctgaaaaaccacccaaattttaccctgctgatgatatcaagaagccccttgtcaacaagcacaaaccgaaaccagcta

SEQ ID NO: 180449 - DNA, 282 bp, Glycine max
  unsure (1)..(282): unsure at all n locations
acgagttcctngaaaatttgctgaatgaccttgttgacattctnggagaagaggctcaggctgcaaaaactgatccggagacaattccaacctcctgaaaaggctgttaacgggcccaagaatggtcaagctaatggtgttcacaaagagcctttagtcacttgggtacacaaaaattttcaggcaatactcaccaatgagccaaggtgcttgccatgtgagacagtgacagctggagatgaacatttttggacttgggtcttgatatacagcaaacagttc

SEQ ID NO: 180450 - DNA, 272 bp, Glycine max
aagagagaagaaaagtcaaagacaatgtcagggctcattcacaagattgaggagacccttcatgtgggaaggcaaaagaaggaggaggagcacaagggtgagcagcaccatggtggagaatacaaaggggagcatcatggtgaacacagtactgaatacaaaggagagcatcatgttggtgagcacaagccggctcaccatggaggagaagagcacaaagaggggttcctagacaagatcaaggacaagatccacggcgaggagggtggcgc

SEQ ID NO: 180451 - DNA, 267 bp, Glycine max
  unsure (1)..(267): unsure at all n locations
gagaggtgccataaggctttctgcgctgtctgaagctggggttatttatgtcatgacccatgattcaataggacttggagaagatgggccagtccacaggctattgagcacttagcaagcttccgggcaatgccaaacattttgatgcttcgtcccgccgacggtaacgaaacagccggagcatacaaagtggccgtgctcaacaggaagagaccctccattcttgccgtatccaggcaaaaactgccccagcttcncggaacttcc

SEQ ID NO: 180452 - DNA, 270 bp, Glycine max
ctcaaaattggcaaagccaagtctgatgctcttttcaagaccgttgaggcttaccttttggcccatcctgattacaactgatcctcttcatcactattcagtcagcaacgaccttgctttatattatatacaagagttttcttgccttgtgtggagctttatccaatcactgtgtgtggtgtgtgcttaagttaaaaacttgccttccaattaatgtaacgagtgtttcctttctcatttccttttgccacagaattgtgagagtcagtt

SEQ ID NO: 180453 - DNA, 268 bp, Glycine max
gagagaatcgctgcggaaaacgttgttgagttcacagacttacccgtcaagaggccaatcgaaggagaagaaggaaccaatggcgtctccaacgacgccgtttcaacgctccccaatgaccctcaataccctggcatctctgcggttattcccggatggttctccgaaatcagcccaatgtggcccggggaggcacattccttgaagatggaaaagattttgtttcaagggaagtctgactatcagaatgtcatggtcttccacacaa

SEQ ID NO: 180454 - DNA, 271 bp, Glycine max
atttgctactgagtttccacactgcataccttaagtcttccgaattcgaagttaatttgcaagatcggtaagggaaaaggtccgaatcaacattgtggtggttggtcatgtggaccctgaggaggcaccaccattaacgagctgaagaagcctgttgtggagaaagaagctccagggcatgccatatgagggcatgcacgtacggcctcggaggggaaccagaaaattatgttaacaaaataatctggaaccctaatgtatcagtgtcatc

SEQ ID NO: 180455 - DNA, 267 bp, Glycine max
atcgttcgctcttcctctcccagacaaacacatgggattgcccaatcagcaaaccgtcgattaccccagcttcaagctcgtcatcgtcggtgacggtggcaaaggaaagacaaccttcgtgaaaaggcatctcactggtgaattcgagaagaaatatgaaccgaccattggtgtggaggttcatccgttggattttttcagtaactgcggaaagattcgattctattgttgggatactgctgggcaagagaagtttggcggcctcag

SEQ ID NO: 180456 - DNA, 266 bp, Glycine max
atttttctcttctcactgcatcgcttcaggttcttctgaaaagatgtctcgcgtgtatgttggtaacttggattcacgagtcactgagagagatctcgaagacgaattccgcgttttcggagttattcggagtgtttgggttgcacgtagaccacctggttatgcttttattgactttgatgaccgcagagacgcacaggatgctatccgtgaattggatggcaagaatggttggagggttgagctttctcacaactctagaggtg

SEQ ID NO: 180457 - DNA, 268 bp, Glycine max
  unsure (1)..(268): unsure at all n locations
ctaaactctgcaaacatgttggtttatcaggacctccttacatgtgatgagcttctctcggactccttccggtagaattgaaattgagaatggaatgctgtgggaagttgaggggaagtgggttgttaagggagcagttgatgttgacattggtgcaaacccttctgctgagggtggagaagatgagggagtcgatgacgcagctgttaaggttgacctncttgttgatacattcagacttcaggagcaacccgcttttgataagaaa

SEQ ID NO: 180458 - DNA, 273 bp, Glycine max
gcagaaggagcaaaagcaatggcgccgaagaagccgagaaccacgacaaggaaccctcatttggttaggggggatgggcagttattggagttcgcagatgtaccacaagacgggcatctgggccatcaaggccaaaaactctggcgttttgccccgccacgatcccaagcccaagcccgaggccccggcccagaagccgcccaagttctaccccgcggacgatgttaagaagcccctcgtcaacaagcacaagcccaaacccgcgaaactcag

SEQ ID NO: 180459 - DNA, 279 bp, Glycine max
cgaagatgcaaagtcaacaaacagtgaaagaagaagatgatgaaggtccacctccgggatggcaatctctccccggttaaccaacggcaacggcaagttcaatccggttgggctcaaatggtttgcggttcttgtcgtcgcctgctttcatatccacgaggtgccaaacatgtcaaatgttcatgctgtcagactgtcaacattgtattagaagctgatcaggttgggcaagttaggtgtggcagttgtgcggtattgctgatgtacccatatggtgct

SEQ ID NO: 180460 - DNA, 113 bp, Glycine max
atcgagataactagaaacagtgtgatgaaaatgaaggtccttgttttcttcgttgctacaattttggtagcatggcaatgccatgcgtaccgatatcttccctctccgaatga

SEQ ID NO: 180461 - DNA, 268 bp, Glycine max
gtacagtttcggaggagacaaaaatagtcgttcgagatggcccgtacgaagcaaactgctcgtaagttccacaggaggaaaggctctcaggaagcagcttgcaaccaaggctgcacgtaagtctgcaccaactactggtggtgtgaagaagccacatcgttaccgtccaggtaccgttgctcttcgtgagattaggaaatatcagaagagtaccgagcttttgatcatgaagctccccttccagaggctggttcgtgaaattgctcag

SEQ ID NO: 180462 - DNA, 269 bp, Glycine max
tgaatgggttaacaagggcaatgcaccggcactgctcgagactcttaagaattacaacaagctggtgtctctcggtttcaggattatatccttgtcaggaagaacactggacaaacaggccgtaacagaagcaaacttaaagaaggctggctaccacacatgggaaaaattgattctcaaggatccacaagatccttccactccaaatgcagtttcatacaaaacagcagcgagagagaaactgataaggcagggatacaacattgttg

SEQ ID NO: 180463 - DNA, 234 bp, Glycine max
atgttatgatgatgaagaaggtgatgaggatgaggatgaggatgatgatgaggaggaggaggaggaagaaaatccggaaaagaaagggaagagcaggagtaagagtggtggcagggtcaaacctggtaaggatcagccgactgagcgccctcctgaatgcaagcagcagtagtgtttggctgtgtacaaacagacctggatatgtttagtttcagagaagtaattagtgtagag

SEQ ID NO: 180464 - DNA, 268 bp, Glycine max
gttgagttacgtacatagcttaaaaacatagtgcttgtttagactaatatcttccatggctccgaaagataggatcctgggttttgggacccacaggagccattggaagacacatagtttgggcaagtgtaaaggcagggaatcccacttttatattggttaggtacacccctgcctctgttaacaagccaaggcttgtcactgctgctaatcctgaaaccagggaagagctcattcagagcttccaaaattctggagttactctaat

SEQ ID NO: 180465 - DNA, 158 bp, Glycine max
tcttctgagagtgtttggttgaaagtagcaaagatgtatcctttcgggcaacagggtcaacagattaagggggatattgcaggtaatgcagaggaatgtagtaggatatcaccaacatcaccagtgttggagggatcgttgaccaaggcttaggcttc

SEQ ID NO: 180466 - DNA, 269 bp, Glycine max
aagaaccatatcatgggttcagaaaattgtatagataagaagcactttgtgctggtgcatgggcgatgcatggagcatgttgttgtaataagctcaagcaacgcttggaatctgctggccacaaggtcacagtgcttgacgttgcagcttctggagccaacatgaagaaaattgaagatgttgacactttttcacagtatactgagcctttgttgtttctattggacacaattccctcaaatgaaaaggtagttctagttggtcacagc

SEQ ID NO: 180467 - DNA, 264 bp, Glycine max
ctcaagaagcaaaaacctcgaagatttagggtttcgcattgctacttcgcgttcgttcatctctctctcacgcctcaaggttttccaggacaagtttccaacctggattccttcccattttgtacagccttggataggagtaaacctttgcagatatgggacaaagaaggctgtcattcgggtaaagccctacattgcactatgccactgagaatgatgaggggtggaatcaaatccagtttaacctggctgatttcaccagga

SEQ ID NO: 180468 - DNA, 229 bp, Glycine max
gttctaggtttcactcccattaacagcaaccatggtgcagaggctcacttatcgcaagcggcatagttatgctaccaaatccaaccagcaccgggttgttaagacccctggagggaagttggtgtaacagaccactaagaagagagcaagtgggactaagtggcctgtgaatggcaagaggatccaagggatttcacaattgagacctgctgaatacaagaggtctaga

SEQ ID NO: 180469 - DNA, 280 bp, Glycine max
caacaatataaagaagggcgtggttttgttgtgagtactgagctgagaagagggagaagatgatcatccccgttcgttgttttacctgtggaaaggtaattggaaacaaatgggatacctatttggaccctctccaagcaaattacaagtgagggaattgcatggattccatgggacttggtccgtattggtgtaagcgcatgcctatgacccacgttgatctcactgagaagttgctcacatacaatacattggacaagtccgatctccattaagaaga

SEQ ID NO: 180470 - DNA, 274 bp, Glycine max
tcggtgctctggatcacatatcggaactctttgactgctccagtggcagttccaagcacaagaagcgcaagcacattgcagacggtggaggtgaaagtgaagatggactgcgcaggatccgagacgaaagtcaggtcaggcgtggaagggatggaaaggctgaaacaaggtgaattagaacctaaggccaacaaagtcactgttgtccgctaagttgaagcctcttaggtggtcgcccggatcgctcaacgtaacgggaagtaaacagaactct

SEQ ID NO: 180471 - DNA, 272 bp, Glycine max
aaagagctgactttggcattcctccttctcaccgcttctgtcaggagtctgttatctgcacaaggagttcacttctactttctacttttccaaggggtgaccttcctccttgtggggcttgatttgattggagagcagatgagctagttttcattcaaaaaatcataacagatgatgaataggaaacaacacctactgatttatcagccaagttgcattccaggaagaaaatggaccatggagcctagttaaaacccttccttccctccaaa

SEQ ID NO: 180472 - DNA, 277 bp, Glycine max
aagagaatggctcaagcaatggcatcaatggctggcttgcgtggttcctctcaggctgtgttggaaggtagccttcaggtgagtggctccacacgcttgaatgtggggagttgaagcagggtggcctcagtcacacgtgcagggttcacagttagagcaccaccaccacaagtgagttgtgaagtacaaagcagccgtacggcagtgctttcacttgttgctgctcgttttgccaatggctcttttgttcaagctgtgcttgctgatgccaaatcta

SEQ ID NO: 180473 - DNA, 238 bp, Glycine max
caaaaaccactaagatggcttcctttgtatccttcctagtgctgcttcttgcagcccttatcctcatgcctcaagggcttgctacttactaaaaaccaattaagaacgcaccagtgtacaaggctccattcgacaaggcaacagtgtacaaaccaacggtttataagccaaaaacaccgggttacgcggcggaaacaacgggttacaaaccaacattttaggaggcaccattccagga

SEQ ID NO: 180474 - DNA, 241 bp, Glycine max
agagtttgttgtgagctataagctagtttatcgtgaggagaatatgaagttgtttgtcttctttgttgctgcagtagttttggtagcatggccatgccatggcgcaggctaccaaaggttccctctccgaatgaaaactggctatggtgagcgttcttcggaggtaaaatgcgcaagttttaggcttgctgtggaagcacacaacatccgagctcttttacaccattcctgaagagtgcgt

SEQ ID NO: 180475 - DNA, 253 bp, Glycine max
tgaaaataagagatgcgtcgagcggacgatgccgttttggagggcagcggggatgacatacatcacatactcaaacatatgcgcgaatctggtcaggaattgcctcaaggtaccctacaaggctgaagccatctctcgtgagaaggtccattttgctctctccaaatgggtcgacgccaagccctgaaaacctaataatcggttcaacaacccagaacaattgatccggattatttggaagctataatgctta

SEQ ID NO: 180476 - DNA, 276 bp, Glycine max
  unsure (1)..(276): unsure at all n locations
tagcanaaagctgcgcaagatgagtggtagggtttctgggaaggtgaagtggttcaatgatcagaaggggtttggattcataagctctgacgatggcagccacgatctcttcgttcaccaatctcagatcaaatctgactctttccgaagcctcgccgaaggagagtccgttgagttcgccattgaatctgaatctgacggacgcgcgaaagctgttgatgttcatgggcccgaccgcgacagtgttcaaggaaccaggccacgccgttaatgttg

SEQ ID NO: 180477 - DNA, 162 bp, Glycine max
cgcgataagcttagcttcaccgtcagttgcaggaaaaatggtttcgctgaaactgcagaagcggctcgccgcgagcgtgctcaagtgtggcagaggaaaggtttggcttgacaccaatgaagtcaacgaaatctccatggccaattctcgccaaaacataag

SEQ ID NO: 180478 - DNA, 283 bp, Glycine max
atttacagtaacagtagtgatatttcggaaaaaatggcgatggctttcaagatggcgacgactggaatgtgggttacagatgagtgcaagaactcgttcatggatatgaaatggaagaaggagcacagatacattgttttcaagatcgacgaaggatcaaggctcgtcaccgttgataaactcggtgggcccaacggaggctatgatgatctcaacggcttcttggccaccgatgattgccgataagcggtttttgacttcgaattcggcaccggtgataact

SEQ ID NO: 180479 - DNA, 266 bp, Glycine max
tccacacacaacattctctttagtcacagccaaacaccatttcattaattcttgcagaatattgcttagttttgtcttatctgaatttggaaacagcttttgaatggctttttcaagagttgcactgctaatatggacggtcggggattttgggattgcctctgccgggaatttccaccaagattttgatatcacatggggagattgtcgggctaagatactcaacaatggagagcttctcactctgtcacttgacaaagcctctg

SEQ ID NO: 180480 - DNA, 236 bp, Glycine max
tggctttaggtgttcctgctcttccgttgacatacgtggcccacgttctggcagttgttgccagcgtcttggtcgtggtctgggtcgtcaatttcaggggtggcttggcttgggaatgtgattacaagtccctcatcttcaacattcatccagttcctaatggtaatggcctactagttcatgggggtgaagctattattagttaccaagcttttcccctaaagaagggagtgaag

SEQ ID NO: 180481 - DNA, 278 bp, Glycine max
aggtgctctcgggttgtgtctgtgaccgtgactgcgtacctgtgactgtgtagcgcccgtggtgatctggggtagggggaaccctacagtgggacccctcccccaatattccttctgtccagcccctcacttccactggagcaggtccagagccattcctcaaccccgtgaacttctccaggcaaggctgagagggttcgaagtggctgggaaggtttccaagccccctggcccttccccaaaaaatgggtgaataggcggattaactgggccaacct

SEQ ID NO: 180482 - DNA, 268 bp, Glycine max
ggtttacagagaagctaagaggcgcagccgtagcaaaagctcgtggaattgctagcaatggcgaggatcaaggtttacgagctgaggcagaagacgaaggctgatctgctgaatcaactgaaggacctgaaggcggagcttgccttgcttcgtgttgctaaggtcaccggtggtgcccctaacaagctttccaagataaaggtggtgaagttgaacattgcccaggttttgacggtgaattctcagaagcagaaagctgcgttgaagg

SEQ ID NO: 180483 - DNA, 278 bp, Glycine max
ccgtggtggtggtggatatggtggtcgtagtggcggtggcggtggcggtggtggatatcgtagccgtgacggtggttatggcggtggctatggtggtggtggtggtggtggttatggcggtggcagagaccgtggttactctcgtggtggtgatggtggtgatcgaagctggagaaactaaaggttgatgtcgtcaattaaggcgttagattatgccccggttttttaggtcgtgttggttcaaatccgagtttcttaatggtttcgggtaaccgcgg

SEQ ID NO: 180484 - DNA, 283 bp, Glycine max
tgattacattgggaagaaatatgctgtgctcttcttctacccgttggacttcacttttgtttgtcccacagaaatcactgctttcagtgaccggcatgcagagttcgaggcactaaatactgagatattgggtgtttcagttgacagtgtgttctcgcaccttgcatggactcaaacagataggaagtccagttggcttgggtgactgaattaatccttggattcctgaggtcaccaaatccaaatcgaattctaatggggtcctcattcctgatcagggaat

SEQ ID NO: 180485 - DNA, 281 bp, Glycine max
cttgtcaaggcacgcatctgatgagttctaccttgggcagagagatggtggtgactactggacttctgatgccggtccattagaggcatctaacatggatgtacagaagcttgaagagattgaaaagaagcttatagagaagaacaaagatgagacattgagaaaccgctatgggccagctaaaatgccttacactctgctctatccttctagtgacgacggattgactttcagaggaattcccaacagtatctctatctaaggaccctatggttgcttaa

SEQ ID NO: 180486 - DNA, 303 bp, Glycine max
  unsure (1)..(303): unsure at all n locations
tggaatcggtcgagactctctgattttgtaatttagttcgatcaaatagctcccagtactttaattgatttctgaatatcatcacttaatttgacggaaagatggtgagcggagctgagatccggcaaggacaaagggcagaagggccagtcagcaaccttggcattggaactgcaaaaccaccaaactgtgttgatcagagcacctatcctggataatacttcagaatcaccaacagtgagganatgaacgagctcaaagagaaattccagcgcatgtgtgacaagtctatgatcaagagga

SEQ ID NO: 180487 - DNA, 244 bp, Glycine max
cactcgcaagcaaaaagaaagaatcccacgcgaggagaaagatggaggggaaggagcaggatgtgtcgttgggagcgaacaagttccccgagagacagccgattgggacggcggcgcagagccaagacgacggcaaggaataacaagagccggcggcggcgccgctggttgacccgacggagtttacgtcatggtcgttttacagagcaaggataacagagtttgttggcaactttccggttct

SEQ ID NO: 180488 - DNA, 243 bp, Glycine max
tgaaaatgaattgttatatggtgagtcattccctgtttcggccgaagttcttgattccagtttttgccttcccataggaaaagcaaagattgagagggaaggaaaagatgtgactattacagcctattcaaaaatggttggctatgctctcaaggctgctgagacactggccaagggaggaatcagtgctgaaggcattaatttgcggtcaattcgggcggctgattggtccaccatccatgg

SEQ ID NO: 180489 - DNA, 248 bp, Glycine max
cctaatctgaaggctcccgccatctgcgatcggatttcatggctccaaagaaggacaaggctcgcccaccttcatccaagcctgccaagtctggcggtggcaagcagaagaagaagaagtggagcaagggtaagcaaaaggaaaaggtgaataacatggtgctcttcgatcaaggtacctatgacaagctcctctctgaggcaacccaatacaagctcattactccctccaatctctctgaccggttg

SEQ ID NO: 180490 - DNA, 269 bp, Glycine max
atacaagttcacagatgaagatgatccacgttcttttcctctttgctcttgtcatcttcacttcccatgcttctgtcgatgatttctgtgtagcagtcctaaaaggtccagatagcccttcaagctatcagtgcaagccacctaacacagtcacagtggatgactttgtggtctctggccttgtagctggacaacccacaaacactttccatggcggaattaacttcggcattggtaatggtttttcaaggggtaattggtcttgggga

SEQ ID NO: 180491 - DNA, 256 bp, Glycine max
atcgagataactagaaacagtgtgatgaaaatgaaggtccttgtcttcttcgttgctacaattttggtagcatggcaatgccatgcgtacgatatgttccctctccggatgaaaactgggtatggtggccggaatccggaagtggaatgcggaagttggaagcctgccgtggaagcacacaacatctttggctttgagaccattcctgaagagtgcgttgaagcaaccaagggattcattcattgcggaccatatt

SEQ ID NO: 180492 - DNA, 150 bp, Glycine max
caattttctagggtcttattcattttccggtggcttctgcagatgttgagtaccgttgctttgtcggtgggctcgcttgggacactgacgaccatgccctcgagagagccatctctcagtaaggaggaatcgttgaaacgcagattatca

SEQ ID NO: 180493 - DNA, 281 bp, Glycine max
gagataactagaaacagtgtgatgaaaatgaaggtccttgttttcttcgttgctacaattttcgtagcatggcaatgccatgcgtacgatatgttccctctccgaatgaacactggctatggtgcccgtactccggaggtgaaatgcgcaagttggaggcttgctgtggaagcacacaacatctttggctttgagaccattcctgaagagtgcggtgaagcaacaaagggattcatccatggcggacaattttggtccggattccaaaccggtaacccacc

SEQ ID NO: 180494 - DNA, 219 bp, Glycine max
cctgaccggagaattccctggtgactacggatgggacactgctggattatcagctgacccggaaaccttcgccaggaaccgggagctggaggtgattcacagcagatgggcaatgcttggtgcccttggctgcaccttcccagagatccttgagaagaatggtgtcaaattcggcgaagccgtgtggttcaaggccggtgcacagatcttctcagaagg

SEQ ID NO: 180495 - DNA, 275 bp, Glycine max
cagttttataggttttggtggctgaaaccctgttcgggaattcagtggctatggctgcaaatgaagatgctgtacaggaatttacaccaaagaagaagccaccttcagaggatgagaagaggaagaagaaaattgtgcctgggagtttaatgaaagctttgatgaagcctggtgggggtgatgctggaccttctgatggtgacaagattacctatcactgcacaatccggactttggatggagtacttgtggaatctaccagaccagattatgga

SEQ ID NO: 180496 - DNA, 272 bp, Glycine max
agttcaaaggtaaggtaggttaacactcttcttcatcgtcgtcgcaatgggacgtgtgatccgtgcgcacgtaagggagcaggctcggtcttcaagtcccacacgcaccaccgcagcggacctgcacgcttccggagactggacttcggggagagccacggctacctcaagggagtgggtcacgacgtcatccatgaccctggccccggcgcgacggtcgccaaggtcgccttacggcaccctttcagatccatgcagcagaacgagctctt

SEQ ID NO: 180497 - DNA, 297 bp, Glycine max
cacgaattatgctcgagcttgtcaacgcacgcatctgatgagttctaccttgggcagagagatggtggtgactactggacttctgatgccggtccattagaggcatttaagaggtttggaaagaagcttgaagagattgaaaagaagcttatagagaagaacaaagatgagacattgagaaaccgctatgggccagctaaaatgccttacactctgctctatccttctagtgaggagggattgactttcagaggaattcccaacagtatctctatctaaggaccctatggttgctta

SEQ ID NO: 180498 - DNA, 294 bp, Glycine max
tctgccgttcacaagggcatgcaccacaaattctaccatggccgcaccggacgcgtctggaatgtcaacaaacgtgcatgttggagtcgaactcaaaaggcaggttggcaacagcattataaggaagaggattcatgtgcgggtagagcatgttatgccttcaaggtgcactgaggagttccgcctcaggaagattaagaatgatcagctaaaggtcgaagccaaggtcaagggtgagaagatcagcaccaagagacagcctcagggtcccaaacccggtttcatggtggaggg

SEQ ID NO: 180499 - DNA, 264 bp, Glycine max
tccagccccatcatggcttcagagaagcaagcggctcttgccgtcactccctctgatgctgatgctcctaccatatttgacaagatcatcaataaggagattctttctactgtggttaatgaggatgacaaggtgcttgccttcagggacataactcctcaagttcctacacatattcttatcattcctaaattcaaagacgggttaagtggtctatccaaggctgaggagaggactttgagattttggccgcctctgtaactg

SEQ ID NO: 180500 - DNA, 269 bp, Glycine max
tgagagagagcagaggaaaaggggaagaaaaatgttgagtgcgacggcgatcggcgcgttattcggtttgggaacccagatgtactccaatgctctccggaaactcccctacatgcgccatccgtgggagcacgtggtcggaatggggttgggcgcggtgtttgtgaaccagcttctgaaatgggaggccaagtggagcaagacctcgacaagatgctcgaaaaggccaaggccgccaacgaaagacgttatatagatggagatgatga

SEQ ID NO: 180501 - DNA, 240 bp, Glycine max
gtttgttgtgagctataagctagtttatcgtgaggagaatatgaagttgtttgtcttctttgttgctgcagtagttttcgtagcatggccatgccatggcgcaggctaccaaaggttccttctccgaatgaaaactggctatggtgagcggtcttcggaggtaaaatgcgcaagttttaggcttgctgtggaagcacacaacatccgggcctttaaaacaattcctgcagaatgcgttga

SEQ ID NO: 180502 - DNA, 278 bp, Glycine max
ccaagatgaagatgattcactttcttttcctctttgctcttgtctcgttcacttcccatgcttctgtcaatgatttctgtgtagcagaccctaaaggtccagatagcccttcaggctatcagtgcaagccacctaacacagtcacagtggatgactttgtgttctctggatttgtagctggaaacaccacaaacactttcaatgctgcattaacctccgcatttgttactgattttccaggtgtgaatggtcttggtgtatctgcggcacggttagac

SEQ ID NO: 180503 - DNA, 287 bp, Glycine max
tattgacagttccatttgctacgcttgtagatatcaatggtatggtatctgtcaaaaggtaccccataggcaacgtttcagacacggttaaccatcccaaaggaagataccgtgaattttatcaatgtgactttgatattgacggtattcatggtctatctgaaattatgggtccagactttgaggttgttaggattttgactgaactacttgatgagctggacattggggaatatgagataaagttgaatcatagaaagttactggatggcatgatgcaaatatgt

SEQ ID NO: 180504 - DNA, 280 bp, Glycine max
cttctttttctctaagtctaaggggtgccctgagatcactttgagcaatggtgaaggctgtggcagttcttggcagcagcgagggtgtcaatgggataatttccttcattcaggagggaaatggtccaaccaccgtaactggatctcttgctggtcttaagcctggtctccatggcttccatgtccatgccttgggggacactaccaatggttgcctgtcaactggagcgcatttcaatcctaataacaacgagcacggtgcccctgaggacgagaatcg

SEQ ID NO: 180505 - DNA, 275 bp, Glycine max
cattgcatgggcctttggtggcatgatcttcatccttgtctactgcactgctgggatttcaggaggtcacattaacccagcagtgacatttgggctgtttttggctcgaaaggtgtctttgatccgagccatcatgtacatggtggctcagtgcttgggtgctatctgtggagttggtttagttaaggctttccaaaagtcttacttcaacaagtatggtggtggggctaattccctcgctgatgggtacagcacagtactggattgggtgctga

SEQ ID NO: 180506 - DNA, 276 bp, Glycine max
  unsure (1)..(276): unsure at all n locations
ctgctaagcaagctgtcaaaacaactcctgagctgacaaggtctcatagtaaagctgctagcatgttttctgggacccaagaaaagtgtgctacatgtggcaaaactgcttatcctttggaggaggtaacagtggaagggcaggcctatcacaaatcttgtttcaaatgttcactggaaggtgtcgcatnactccatccaactatgcagtcctggagggcgttttgtattgcaagcaccatttttcccagctttttaagggagaagggagctataa

SEQ ID NO: 180507 - DNA, 264 bp, Glycine max
ggaactttgttactctcacacatgtctcgctccgtgcctttggtttcaaccatttttctcttgcttctgcttctggtggccactgagatgatgggggcaacaatggtggcagaagcaagaacttgtgagtctcagagcaaccgtttcaaggggccatgtttgagtgacaccaaatgtggctctgtttgccgaaccgaacgtttcactggaggacactgcgtggcttccgtcggagatgcttctgcaccaaacattgttaatttt

SEQ ID NO: 180508 - DNA, 269 bp, Glycine max
ggcattgaaggctatcaaagaaggggggaaagttgtgacaatagcaccaccagcaactccacctgctatcccattctttctcacttcagatggtgctgtgttggaggaagttacaactcacttagaaagtgggaaggtgaagccagtattggatcctaagagtccctttccattttctcagattgtggaagcatattcatacttgaagacaaatagagccattgggaaagtagtcatacatcccatcccttgaacatatataactatgc

SEQ ID NO: 180509 - DNA, 273 bp, Glycine max
tgggatgccatcaagtcctgggtgcaagaatatgtctcattctactacaaatcagatgaggaactccaaaaagaccctgaactccaagcttggtggaaagaaattgtagaggtgggtcatggtgatttgaaagataggccatggtggaaaaagatgaaaactcgtgaagagttggttgaagcttccgctatcctcatatggattgattcagcccttcatgctgctgttaactttggacagtatccatatggaggtttaatcctaaacaggcca

SEQ ID NO: 180510 - DNA, 294 bp, Glycine max
acactagtaacaaagatccaacaagcagatcaatctctctctctgtctcccaatcacaaccagacatggcggttcgaacggaggatttttgaggcagtatgcttaagaaagcaaggactttgccaccgactcaatcaaacgaagacttgcttatcctttatggattgtacaagcaggccaccgttggacctgtcaacaccagccgtccgggaatgttcaacatgagggacagagctaaatgggatgcatggaaggctgttgaagggaaatccaaggacgaagcaatgagtgatt

SEQ ID NO: 180511 - DNA, 280 bp, Glycine max
gaagcagcagcaatagttgagcagcgcggaaatcgcatcgacgactgagacataaagatgggaagacaagccgtgaccaaattgctcgtctcggatcgcttcgcgcggccacggcctccgcctcttctccggcggcgtcgccggcggtcttcgtcgataagagcacgcgcgtgatctgccaaggcatcaccgggcaaaacggcaccttccacaccgagcaagccattgaatacggcaccaacatggttggtggtgtgactcataagaaaggtggcaccga

SEQ ID NO: 180512 - DNA, 271 bp, Glycine max
  unsure (1)..(271): unsure at all n locations
ccttctttcgcctactcctccctctctctaactttcacacgcagcgaggtatcgtcttcttcttccgtttctctgcatcggtgtgaacaatggctacatacgctgcgatgaaagccacaaaggccggggttggaggagtcccaggacaggatccacaagataaggatcaccctttcctccaagcaaatcnnnaacctcgagaaggtttgtgcggatttggttcgcggtgcaacggataagagactcagggtgaagggacctgttaggatgc

SEQ ID NO: 180513 - DNA, 285 bp, Glycine max
gttgtaaaaagtttgctgcgccctgatttccatgtttcggcacaaaactgttgggttcgcaaaggtggtgcttataccggtgaaggtaatggctgaaagccttgtaaatttgggaattccttgggttattattggtcactctgaacggaggcagcttttaaatgaatcaaacgagtttgtgggagataaagttgcccatgcacttcaacaaggtctaaaagttattgcatgcattggggagactctcgaacagcgtgaagctggtacaacaacggctgttgtttc

SEQ ID NO: 180514 - DNA, 283 bp, Glycine max
gaaagtcctaaagctattaaggagataaggaaatttgcccaaaaggccatggggaccaatgatgtgacggtggcagttgagtctgacaaagtttgtctggagcaagggaatcaggagtgttccaaggaggattagagtaagaattgctcgcaagagaaatgatgatgaagatgccaaggaagagctgtactctcttgttaccgttgttgagatccctaaggacgagctcaaagggttaggcactaaggttattgatgacgaggattgatttatatctgtttga

SEQ ID NO: 180515 - DNA, 267 bp, Glycine max
cttttgcttcactcgtcatcactacgcagatcgcagcaaaccagactaaactccgacgatgcctcccgtcgctcctctatccggtgatgccatattcgccaacgtcgaacgcgtcaaatgcggagtgtttactttgacgtatggcgcaattgtgcgtcaattgctcacggatctggaagaggctgaggaggttaacaagcagcttgatcaaatgggttacaatattggaatccgtttgattgatgagtttttagccaagtctaatgt

SEQ ID NO: 180516 - DNA, 277 bp, Glycine max
agatatcgagccgattcggatcgagcaaacatgttggtttatcaggacctacttagaggtgatgagcatctctcggactccttccgttacaatgacattgagaaaaggatgtgtgggaagttaggggaagtgggatgttaagggagcagttgatgttgaaattggtgaaaacccttctgatgagggtggagaagatgagggagtcgatgacgcagctgttaaggttgttgacattgttgatacattaagacttcaggagcaacccgattttgataag

SEQ ID NO: 180517 - DNA, 270 bp, Glycine max
cggctcgaggatggttcaagaggctgagaagtacaagtctgaggatgaagagcacaagaagaaggttgaggccaaaaacgctttggaaaactatgcatacaacatgaggaacaccgtgaaggatgaaaagattggtgagaaacttgacccggctgacaagaagaagattgaggatgcaattgagcaagcaatccagtggttagacagcaaccagcttgcagaagcagatgagtttgaggacaaaatgaaggaattggacagcatctgcaa

SEQ ID NO: 180518 - DNA, 314 bp, Glycine max
atttgcttcttcgagtttcacagccaagtcgtaaaagggtttcaagggatggaaaacatgcagagcttctggcaattgggtgatgaactccgtgggcactcaaaagcatcggaggatcacaagtggttaatggttgcctcgaaactggccgaacagacaagattgaagggggagcgtgtgaacaaccttgatctttcaaagggacccattgaaacaaggtcaagggataaatttgggttccaggaagagaacaaatttgattctcttaacttgagcatgttgaacctggactctaaatttctgagaatgtgagc

SEQ ID NO: 180519 - DNA, 308 bp, Glycine max
tcactccgagcctcaacagcagcaaagcaaattcgcagttggtaagagaaaatggccgacgatagcacagctacctgcatcgacatcctccttgccatcatccttccatctcttggtgtcttcctcaagtatggctgcaaggtagaattctggatctgtttggtgcttaccctttttggctacattcctggaattatctatgctgtctatgctatcaccaagtgatagatcatattcatcattttaattttgggtggacaatgaataatttgtcaaattaaaggacgacgctatgcatgttcctcatc

SEQ ID NO: 180520 - DNA, 301 bp, Glycine max
acgacgcagcagcggcctagggctttgacgtcgccgatcttgttgaaaaccaaaaggaggagcgagtccggtaaccggtcgaagtggtcgatttcggaggcatcgggctccgggaagatccggcacgctagatctgcgcgttgggaagacattctagagagagagagagagagagagaaattaattgacctggatcggatcgcaagggtttggaattgaggggtttttttcaggcagatctatgaaagggtgaagcataaacacggaaaaggagagaaagacaggagagagagagagaagt

SEQ ID NO: 180521 - DNA, 302 bp, Glycine max
cgcaggctttcatcttccttcaacaagcctttacgtcctctcttcaatgctggctcagtttactacaagtcctctttgcctgctgaagctgcgtacgacaatgagaaaagctgtgatacggaattgaatgctccacttgaggttgttgatcctgagattgctgatataattgagcttgaaaaagctagacaatggaagggactggaactgataccctccgagaatttcacttctgtctctgtaatgcaagctattggctctatcattactaacactcggaatgaggatatcccggtgcaaga

SEQ ID NO: 180522 - DNA, 298 bp, Glycine max
cggtgtgggtgtttgaatctggtgaaggatgtcaattgttccaatcaaccagggtgatgccaaccgctccaaccccttcgcttcgtggggtcaattcgtggattttcctctccctccttccatctccggcttcttccccggcttggaattcggattcggattcggatcatccgtgaacacacgtgtggactggagggagactcccagagcgcacgtgtggaagctggtgcttcccggcttctccaacgaggacgtgctggttgagctccaagacgagaggtgctccaagtcagcgtgg

SEQ ID NO: 180523 - DNA, 280 bp, Glycine max
cgagagatagcagaggaacacgggaagaacaatgttgagtgcgacggcgatcggcgcgctattgggtttgggaacccagatgtagtccaatgctatccgcaaactcccctacatgcgccatccgtgggatcacgtggtcggaatggggttgggcgcggtgtttgtgtcccagcttctgaaatgggaggcccaagtggagcaagacctcgacaagatgctctcaaaggccaaggccgccaacgaaagacgttatatagatggagatgatgattaatgcatg

SEQ ID NO: 180524 - DNA, 297 bp, Glycine max
gagcaacttccaacaccatagtgaaatggcttccaaggctgcacttctcttgtgtttcaatgttctcttcttcaccgtggttagctccacatatgtgccatgcaacccaccccccaaaactccaaaacacccacctgtcccaaagccaccttccccaaagcaagcaagttgccccaaagacactattaagtttggtgtgtgtgctgatgtgttaggtttgatcaatgtgcaacttgggaagccaccaaagaccccatgctgcaacctcattgagggtctgctgatcttgaagctgca

SEQ ID NO: 180525 - DNA, 193 bp, Glycine max
attgactttcagaggaattcccaacagtatctctatctaaggaccctatggttgcttaagtactgttcctggttttaaataaatgtgaaattgaaggaaccagattccttaatcagttgtgtatgcttaagtcatgtatttggagtggctgaatgtatttgtatttgtcattaataaagagagttgtgttagt

SEQ ID NO: 180526 - DNA, 298 bp, Glycine max
cgattatctcattgatcagggtctctaatctttgctttatgtcttgttatcgtgcatatttcattggcttctgtacaagtttttgcatcgacctggactggaatgctttgattgcagtgtaataatcttgttgtgagtatgaaaagtcacgggatctgcgtgtagtgaagaaagtgtttgatgcttgagaaatgatgactataatctctatctttgtacttttttagtggggtacctgtatacattacagtggttttaaaattttaatgctatgttataaggttggcatatttatcaa

SEQ ID NO: 180527 - DNA, 314 bp, Glycine max
  unsure (1)..(314): unsure at all n locations
ctgaaattttaattgacttttctcgcctcataaaaaaaacctaccaatggctcccgcaaaggcagagaagaagcccgcggagaagaagccggcagagaaggccccagcggagaagaagccgaaggnagaagaagatatcgaaggaaggaggaagcgagaagaagaagaagagaacaaagaagagcgttgagacctacaagatctacatcttcaaggtgttgaagcaagtgcaccccgacatcgggatctccagcaaggctatggggatcatgaacagtttcataaacgacatcttcggaagctcgcccaggagt

SEQ ID NO: 180528 - DNA, 316 bp, Glycine max
  unsure (1)..(316): unsure at all n locations
ctgaaattttaattgactttagtatgatcataaaaaaaatctagcaatggttcctgcaaaggtagagaagaagcttgcggagtagaagcaggaggaagaaggncccagcggagaagaagccgaagggggagaagaagatatcgaaggaaggaggaagcgagaagaagaagaagagaacaaagaagagcgttgagacctacaagatctacatcttcaaggtgttgaagcaagtgcaccccgacatcgggatctccagcaaggctatggggatcatgaacagtttcataaacgacatctcgagaagctcgcccaggag

SEQ ID NO: 180529 - DNA, 301 bp, Glycine max
ctccagtgacttgttattggactctatcattgattattcgtggggaatcagaaatggtgttagttttcaagaacttacgccctccggtgaaaatgttggcctatgtctggaaggccctgtgtgctgcaactgatagtaaagaagagacctgtactcatgcagaatgaataattgacagttatggcttatgtactggtgtctggtgtacccccatcattgaacgccaatcctgtgtgagagaaggattggattcaacatacatttggaaagtgaaatttttgcaaaccacactcttctcgag

SEQ ID NO: 180530 - DNA, 299 bp, Glycine max
aagcttgctactgagtttccacactgcataccttatgtcttccgaattcgaagttaatttgcaagatggctaaggaaaaggctcagatcaacattgtggtggttggtcatgtggaccctgaggaggcaaccaccattaacgagctgaagaagcctgttgtggagaaagaagctccagggcatgccatatgagggcatgcacgtacggcctcggaggggaaccagaaaattatgttaacaaaataatctggaaccctaatgtatcagtgtcatcatcagtgttagtttaagctagctttg

SEQ ID NO: 180531 - DNA, 271 bp, Glycine max
caaagtgcagaggctccgcaaggagtgccccaacgccgagtgtggtgccgggactttcatggccaatcacttcgaccgccactattgcggcaagtgtggcttgacctatgtctaccagaaggccgatgcttaaattcgttggaagtgaattctctgtggttctattttaattttagttatttaaaagttttggttaatgtttttgttcaattagtgttatgactgtttgggctttgattaaacctttatgaatactgtttcgctttggatt

SEQ ID NO: 180532 - DNA, 297 bp, Glycine max
cagcttgctactgagtttccacactgcataccttacgtcttccgaattcgaagttaatttgcaagatggctaaggaaaaggctcagatcaacattgtggtggttggtcatgtggaccctgaggaggcaaccaccattaacgagctgaagaagcctgttgtggagaaagaagctccagggcatgccatatgagggcatgcacgtacggcctcggaggggaaccagaaaattatgttaacaaaataatctggaaccctaatgtatcagtgtcatcatcagtgttagtttaagctagctt

SEQ ID NO: 180533 - DNA, 296 bp, Glycine max
ctctaacgaaagagcgagaaagcgaagacagccatggcgtcgtttctagcatcgtttctggatccgaagaagaactggttcgccgctcagcacatgaaatccctctccaaacgcctccgcaaatatgggctccgatacgacgatttgtacgatccttactacgatctggatgtgaaggaggcgctgaatcggcttccgaaagacgtggtggacgctcgccacgcgcgtcttaaacgcgccatcgatctttccatgaagcacgagtacctccctgacaatctgcatcaatgcaaaca

SEQ ID NO: 180534 - DNA, 297 bp, Glycine max
cgaattagttatcttgagaaacattattcccattgctatatattatgtctagcatgaaggttacatgggtggttgtgcatcatgtgcatggccgtggtgggtgcaccgatgatggcgcaagcatagacatgcaatgatgtgacggtgaacatggcacagtgcctatcctacctgatgcagggaggaacaccttcaacactttgctgcagcggagtcaagaacattcttggctctgctgtcaccaccgttgacaaacaaactgtgtgcaactgtctcaaggcgtgctgctaggtacaa

SEQ ID NO: 180535 - DNA, 282 bp, Glycine max
cagtcaaactttcatctttctcattcacttaacccaagcgtaaaaatggcagcattgaatatgtccactgtgagacttccaagagcttccttgtctggaacgacaccagctaggagatcttgtgctctcatcaagaatccatcatctttgaggtctgtgaagaacgtgtctaaagtatttggattgaaatcatcttcctttagagtgtcagcgatggcggtatataaagtgaagctgattggaccagaccgtgaagagaatgaatttgaagcccctgatgca

SEQ ID NO: 180536 - DNA, 296 bp, Glycine max
cgcaaagacgaagtgtctgcttcttccgattccggcacgcccccatcaccatggtgaacgttccgaaaacaaagaacacctactgcaagagtaaggcgtgcaggaagcacaccctgcacaaggttacccaatacaagaagggtaaagatagcattgctgcccaaggaaaacgccgttacgatcgcaaacaatctggttatggcggacaaactaagcccgtcttccacaagaaggctaagaccaccaagaagattgttctgaggttgcaatgccagggttgaagcatgtctaccaac

SEQ ID NO: 180537 - DNA, 279 bp, Glycine max
gaagcagcagaaatagttgagcagcgcgcaaatcgcatcgacgactccgacatcaagataggaagacaagccgtgacaaaattgctgtcctcgatagcatctcgacgacactccctccgaatcttctcggtcgagtcgcggaggtcttcatcgatcacagaacgcgacgtgatatgccaaggcatcaccggcaaaaacggcacctatccacaccgagcaagacattgaatacggcaccaacatggttggtggtgtgactcatcagaaaggtggcacaga

SEQ ID NO: 180538 - DNA, 297 bp, Glycine max
gacctcggcacaaactaacagagcattagcatttctccttcgtatcactgccgcgacccttctggttctggattccgacggtgccattgacaaccaccacctttactggtaagatgggagagctggccactgagaaacatgttcgatatatattatcagttgaaaagaggaaagataactttgaatctgtagtaatggagcatctgagaatgaatggggcatactggggattgaccactctggatcttctaggaaagcttcattctgtcgatgttgatgagttgtttcatggttgat

SEQ ID NO: 180539 - DNA, 288 bp, Glycine max
  unsure (1)..(288): unsure at all n locations
tgagacaaacagatagtgtgggagagagaagagcggaagagaaaatgacgaccaggttcaagaagaacaggaagaagagaggtcacgtcagcgccggacacggccgtatcggaaagcaccgcaagcatcccggaggtcgcggtaacgccggtggcatgcatcaccaccgtatcctcttcgacaagtaccatcctggtttcttcgggaaggtaggcatgcgctacttccacaaacttcgcaacacantctacaatccgatcatcaacatcgacaagctgtggtcctcct

SEQ ID NO: 180540 - DNA, 292 bp, Glycine max
  unsure (1)..(292): unsure at all n locations
cagcctcaccaancctaacgcgtgcagagcagagagagacgcagccatggggcgaatacccgcgaggtgttataggcacattaagaacaaaccataccccaactcacggttttgccgtggtgttcctgatcccaagatcaggctttacgatgttggtatgaagaagaagggtgttgatgagtttcctttctgtgtccatctggttagttgcgagaaggaaaacgtttctagtgaggccctggaagctgctcgtattgcttgcaacaagtaatgggccatttgctggaaagga

SEQ ID NO: 180541 - DNA, 294 bp, Glycine max
attttgcgaaaccggctgaagtatgctctgacataccgtgaagtcattgctattctgatgcagcgacctgtccttgttgatggcaaagtcaggacagacaagacatatcctgctggtttcatggatgttgtatcaatccctaaaacaaatgagaacttccgcctgctgtatgacaccaaaggccgattccgtcttcactcagtcatagatgacgaggctaagttcaagctttgcaaagttcgctcagtgcagtttgggcaaaaaggtatcccatactgaacacctacgatggtc

SEQ ID NO: 180542 - DNA, 286 bp, Glycine max
atccgatcctctgtcctctcgaagctttcatcgttcaacatattctcaccatctcagtcatgggactgctatcttgtattaggtctaccgtcctgagaaaatgttccaaaggaagctctggcatgtcaagattcctgtatacgaacaattttcaccgaaacttgatttcgtctcgtggcaatgaatcgtattatgggtattttaacacgagatcatacacttcactttatatgggaactcgaactgtgggtgggattacaagtgctagaatcaagtgccaaatgta

SEQ ID NO: 180543 - DNA, 297 bp, Glycine max
tggaagaagttaatgtcgtggaaactaaggatggaactgtctcagtagctgctgcgtttgctggtcaccaggaagccgtgcaggatagagaccacaaatttttaagcaaagctgttgaagaagcatataaaggggtagattgtaaagatggaggcccttttggtgccgttatagttcataatgatgaaatagttgctagttgtcacaatatggttctgtgtaacacagacccaactgctcatgctgaggtgacagcaataagagaggcttgcaagacgctaagcagatagaacttgc

SEQ ID NO: 180544 - DNA, 285 bp, Glycine max
  unsure (1)..(285): unsure at all n locations
ccggcaacaccaaaaccaccaccgcctctcctacctcccggagccatggccgccaccgactcctccgctgcttcgtcacgccagctttctccagagggagacggacatccaggtgatgctcgccgncgacgttcacctcggcaccaaaaactggggcttttagatggaangctacgtcttcaagcgccgcaccgatggtattttcataatttatcttggaaagacatgggagatagttcagcttgctgctaggattatagttcgcattgagaacccacaggatat

SEQ ID NO: 180545 - DNA, 287 bp, Glycine max
gctagattcgacgattcccgaagtgccttcctcctcctcctcctatcttccctctaatcggatccacgatcaaatccaaatccagttcaaagaagatgtcatacaagaacctggggcgatctggcctgaaggtgagccagctctcctacggcgcgtgggtgagcttcgggaaccagctggacgtgaaggaggcgaaggccctcctacagtgctgccgcgaccacggcgtcaacttcttcgacaacgccgaggtctacgccaacggccgcgccgaggaatcatgggcc

SEQ ID NO: 180546 - DNA, 291 bp, Glycine max
cttcacttttaagttaaatagtttttcattgtttcatttaatctacaatggctgcttcaacaatggctctctcttcatcatcattggctggccaagctatcaagcttgccccctccacccctcagcttggtgttggaagggttagcatgaggaaaacagcctccaagactgtttcttctggaagcccatggtacggcccagaccgtgtcaagtacttgggcccattctctggtgagcccccatcctacctcactggtgaattcccaggtgactatgttgggacactgctgg

SEQ ID NO: 180547 - DNA, 276 bp, Glycine max
  unsure (1)..(276): unsure at all n locations
ctctccctctctccttccccaagatgtcgagcgccgatcccgagcaccgagaagaggaggaggcacccgccgtcggcgacgacgaggacaccggagcacacgtcgctcccatcgtcaagctcgaggaggttgctgtcaccaccgccgaggaggacgaagatgcaatcctagatctcaaatcgaagctttaccggttcgacaaggatgnggaacagtggaaggagcgaggcgcgggcaccgtgaagttcctgaagcttaaggctacgggcaaggtta

SEQ ID NO: 180548 - DNA, 288 bp, Glycine max
cgtcggtgctggggtttttgagaggcaggatcaggatgcaattcttgctgctgttgaaaccattgcacaaaaagcaaatgttgtcagacctgactggaatggccttaatgtattgcttctccatgctgcccaggctgctgcgcttgaccttggacttgttccacaatctgagaaaagccttgagtctgcaaaatttgtatatttgatgggtgctgatgatgttaacttagacaagatcccagatgatgtatttgttgtttatcaggtcacacggtgacagagtgttat

SEQ ID NO: 180549 - DNA, 290 bp, Glycine max
cttgggacaagcatcttgaaacatgggtaaaagcttcaggtatccttggaggaccaaagaacacacctccaacagtaatatctcccaaacaatacaagaaaaggttcaggaaagcaatgaccacttactttctcatgcttccagatcagtggtctcccccttctattattcctagtcattctcagtctgattttggtgaagacagcacacaacctaggactccagctgaatgattctttgttttgtgtttctgtaaattttactttcaatttgggaattaactcccccaa

SEQ ID NO: 180550 - DNA, 285 bp, Glycine max
tctctctctctgctcaactgaataaagcagagaagaataagaaaatgggtgtgttcagtacagtgctgctgtgccttatgtccctaatgtggatggtggatgctcgaattccaggcgtatactctggcggcgcttggcaaaatgctcacgctacgttctacggaggatccgatgcttccggcaccatgggtggagcatgtgggtacgggaacctgtacagccaagggtacggagtgaacactgcagcgttgagcacggcactcttcacagcgggctgagctgcgg

SEQ ID NO: 180551 - DNA, 286 bp, Glycine max
ctgttgtggaaaagccaggagactcttttcctaatgctgctaagtggtacgatgccgtctcttctcaacttgctccaagcatccctgggcacgctcacggggtaagattcagtggcgctgctgctccagctgaagctgcacctgccaaagcggctgccactgctgaagaagatgatgatgatcttgatctctttggtgatgagacagaggaggataagaaggcagcagaggaaacggaggctgctaaaaagcctgccaagaaaaaagaagtggcaagtcttctgtc

SEQ ID NO: 180552 - DNA, 295 bp, Glycine max
tgagcagttcatcaaggccggtgccgcggagagagagtccatggcgagtcaccggagagaatcatcctgaacccaaagctcaccgctgcaatgaccgtgtcgaggacgttattcaggcttgctttgagggaaacccattcaagactgttccgggacctttcaagctcttctggcagtgcatgctttccaaacccggtgaggaaccaacagccccatttacttatctggatttggagcctctaaagagagaaacggaacctgtgaaacctgagtagtgttattttacttacaaatg

SEQ ID NO: 180553 - DNA, 294 bp, Glycine max
tcttccttggcctggtttatgtcaaaccaagaaactagctttgtcactattggtcaaagagttcttgctagaccactaaaggttcgattccactatggtcatccgagagtttttgatagaattttccattttacccgtggaggaatcagcaaggcttcttgtggcatcaatctgagcgaggatatatttgctggattcaactcaacactaagacgtgggaatgttactcatcatgaatatatccaagttggaaagggtagagatgtagggctcaatcaaatctctctttttgaa

SEQ ID NO: 180554 - DNA, 292 bp, Glycine max
tccgaggcgaagagaagagcaaaattaagatggaggggaaggagcaggatgtgtcgctgggagcgaacaagttcccggagagacagccgattgggacggcggcgcagagccaagacgacggcaaggactaccaggaaccggcgccggcgccactggttgacccgacggagtatacgtcatggtccttttacagagcacggatatcagagtttgtggccacttttctgtttctcatacatcactgtcttaaccgtcatgggagtcgccggggctaagtctaagtgcagtaccg

SEQ ID NO: 180555 - DNA, 286 bp, Glycine max
cgagaagctaagaggcgcagcgtagcaaaagctcgtggaattgctagcaatggcgaggatcaaggtttacgagctgaggcagaagacgaaggctgatctgctgaatcaactgaaggacctgaaggcggagcttgccttgcttcgtgttgctaaggtcaccggtggtgcccctaacaagctttccaagataaaggtggtgaggttgaacattgcccaggttttgacggtgatttctcagaagcagaaggctgcgttgacggatgcctacaagaataagaagtacttg

SEQ ID NO: 180556 - DNA, 285 bp, Glycine max
  unsure (1)..(285): unsure at all n locations
cgctcttctctctagagctgctgcgttgctaaaacgcaccggtttgttcctgttctcgttcaaaagaaanacgacacaagtgaggcttggtgcataaacagcaatggcagaaaaaccccaaccggttcgggttctctactgcggcgtgtgcagtttgccccccgaatactgcgaattcggatccgatttcgagaaatgcaaaccctggttgatccaaaacgtccctgacctataccctgatcttctcaaagaagagaaggaagctgataaagttgctgacaaact

SEQ ID NO: 180557 - DNA, 274 bp, Glycine max
caattttctagggtttatacaattttcgatggcttcttcagatgttgagtaccgttgctttgtcggtgggctcgctctgggccactgacgcccaagctctcgagagagccttctctcagtacggcgaaatcgttgaaacgaagattatcaatgatcgtgagactggacgatccaggggttttggatttgtgaccttcgcctcggagcagtccatgacagacgccatcgaagggatgaacggccaaaaccttgacggccgtaacatcactgttaa

SEQ ID NO: 180558 - DNA, 277 bp, Glycine max
agcacagaagagggaaaaccgcaccgccgccgtagaagaaaacaaccatggtgcacgtctccttttacaggaactatgggaagacattcaagaagccgcgtcgtccgtacgagaaggagcgtctcgacgcggagttgaagctggttggtgagtacgggcttcggtgcaagagagagctgtggagggtgcagtacgcgctcagccgcatccgcaacaacgcgcggaacctcctcaccctcgacgagaagaacccgcgccggatcttcgagggagaggc

SEQ ID NO: 180559 - DNA, 282 bp, Glycine max
ccctagctagccacaatgcagatattcgtgaaaaacctaacggggaagacgataaccctagaggtagagtcatcggacacaatcgacaatgtgaaggcgaagatccaggacaaggagggcatcccgccggaccagcagcgcctgatcttcgccggtaagcagctggaggacggccgcaccctcgccgactacaacatccagaaggagtccacgcttcacctcgtcctccgcctccgcggcggcgccaagaagcgcaagaagaagacctacaccaagcccaag

SEQ ID NO: 180560 - DNA, 293 bp, Glycine max
tgggacacacagcacaaccaacacctccacagcctctcctacctcccggagccatggccgccgccgactcctccgccgctccatcgcaccagttgtcgcagagggagacggacatccagatgatgctcgccgccgacgttcacctcggcaccaaaaactgcgactttcagatggaacgctacgtcttcacacgcagaaccgatggtatttacataattaaccttggcaagacatgggagaagctccagctcgctgctaggattattgttgccattgagaacccacaggatatc

SEQ ID NO: 180561 - DNA, 287 bp, Glycine max
ggcatagataacaccggactctctaatatcccatactatcacaaacatggatatggggtcgaggaatttaatgaaaccttatatgacgaatgggttaacaagggcgacgcaccggcattgccagagactcttaaaaattacaacaagctgttgtctcttggcttcaagattgtattcttgtcaggaagatatcttgacaaaatggccgtaacagaagcaaacctaaagaaggctggcttccacacatgggagcagtgccttctcaaggatccaatcttatcactcca

SEQ ID NO: 180562 - DNA, 289 bp, Glycine max
atctgatctgctgaaacacgccacactcttcttaccatgggcctcctcgatcacttgtgggatgacaccgtcgccggtcctcgcccggagaacggccttggcaagctccgaaagcagcacaccttcgctttccgatctgcctccggcaaggaatcagacagcggaagcgtgaaatcgtacggtgaagatttgccggaggatgcggtgagagtgacgcgaagtatcatgatcgtgaaaccacctggtggtaaccagagtccgagcggatccgctccggcttcccccgccg

SEQ ID NO: 180563 - DNA, 289 bp, Glycine max
agcgaagaagatattagggtttttgagtgcggtgcggcgatcctagcactctcttctgcagctttcgccgacagcttcattcaccatggcatgacaaaccgagaaggcttttttgaaacaaccaaaagtgtttctcagctcgaagaaaactgggaagggaaagagacccggaaagggtgggaaccgcttttggaaatccattgggcttggatttaagactcccagggaagccatcgaaggaacctacattgacaagaagtgccccttcactggcaatgtttccatccgt

SEQ ID NO: 180564 - DNA, 287 bp, Glycine max
gagagagagcagaggaaaaggggaagaaaaatgttgagtgcgacggcgatcggcgcgttattgggtttgggaacccagatgtactccaatgctctccgcaaactcccctacatgcgccatccgtgggagcacgtggtcggcatggggttgggcgcggtgtttgtgaaccagcttctgaaatgggaggcccaagtggagcaagacctcgacaagatgctcgaaaaggccaaggccgccaacgaaagacgttatatagatggagatgatgattaatgcatgtcttcatg

SEQ ID NO: 180565 - DNA, 286 bp, Glycine max
tccatctcttgtttcttgctttctttcttcaccatgtcacttgctgggaaaatcaccactgaaatcggggttcatgcaaccgctacaaagtggttcaacctcttcgcaacacaactccatcatgttcaaaacctaactgatagagtgcatggaaccaagctgcatcaaggtgaagactggcatcacaacgagacagtcaagcactggacttataccatagatggtaaggttacaacatgtctggagagtattgaatccattgatgaacagagcaaaacaatcacct

SEQ ID NO: 180566 - DNA, 283 bp, Glycine max
aaacaagtagttgagaactaagaagaaggaaatggcttcctcaatgatctcctccccagctgttaccaccgtcaaccgtgccggtgccggcatggttgctccattcaccggcctcaaatccatggctggcttccccacgaggaagaccaacaatgacattacctccattgctagcaacggtggaagagtacaatgcatgcaggtgtggccaccaattggcaagaacaagttcgagactctttcctacttgccagacctcgatgatgcccaattggcaaaggaa

SEQ ID NO: 180567 - DNA, 284 bp, Glycine max
caaccatatctattcttacaagttacatccattgagaaacatgaaggtctcccccttagcattttcaatcctttttttgtccttcaccatagaactcttcattggcattgcttcagcagcacaagaaccagtgcttgacacctcaggccagaagctgagaacaggtgtcaagtactacattctaccagtcttcagaggcagaggtggaggcctaacagtttcaagcagtggcaacaacacatgccccctctttgtggtgcaagagaagcttgaagtctcaaagg

SEQ ID NO: 180568 - DNA, 281 bp, Glycine max
cctagattcagccacagttggaaaaaaaaaaaaagttgttcgagatggcacgtacgaagcaaaatgctcgtaagtccacaggaggaaaggcccctaggaagcagctcgcaaccaaggctgcacgtaagtctgcaccaactactggtggtgtgaagaagccacatctctatcgtcctggtaccgttgctcttcgtgagattaggaaatacgtgtagagtaccgagcttttgatcaggaagctccccttccagaggctggttcgtgaaattgctcaggacttc

SEQ ID NO: 180569 - DNA, 281 bp, Glycine max
ggcgaatttaaatggcaatcccacttttttggttatgaagggaggtgtggcttgcctactaattttgatgctacttattgctatgctctgggttatggtgctggagccctccttcatagtgggaagactggattaatatcatcagttgccaatttatgtgctccggtagaagaatggactgttggtggaactgcactcacctcactgatggatgtggagaggaggcatggtaaattcaagcctgtgatcaagaaggcaatggtggaacttgaaggggcacc

SEQ ID NO: 180570 - DNA, 268 bp, Glycine max
  unsure (1)..(268): unsure at all n locations
tcagagccaccgagagcaaaaccctagttcatccatcaccagtcgaaatcaaaaatngtgaanttccttaagcccaacaaggctgtcatcgtcctgcagggccgctacgccgggcgcaaggcggtgatcgtgaggcccttcgacgagggaaccagggagcgcccctacggccactgcctcgtcgccggaatcaagaagtaccccagcaaggctctcaagaaggactccgccaagaagacggccaagaaatctagggttaaggcgttcg

SEQ ID NO: 180571 - DNA, 289 bp, Glycine max
aattgatgaactagtgtgacattagagaagaaccaatttaaaagaagagcagcggagctaaagagcgggagaggagagaggagaagagaagctaaagaaagaaaggagatgggagtggagaagcagttgttgaggtctggcaccggtccgaagccaattcccggtcagaacgtaaccgttcactgcactggtttcgggaagaacggtgacctttctcaggaattctggagcacaaaggatcctggccagaacccattcactttcaaaatcggccaaggttctgttatca

SEQ ID NO: 180572 - DNA, 287 bp, Glycine max
cacaaatcaaagccatggccacctccaacttctctattgttctctccgtctccctagccttctttttggtgctacttaccaaggcacactcgaccgataccgtttctttcaccttcaacaagttcaacccagtccaaccaaacattatgctccaaaaagatgctagtatttcatcctctggggtgttacaactcaccaaagttggcagcaacggcgtgcccacctcgggatctctcggtcgtgccctttacgctgccccaatccagatttgggacagcgaaaccggc

SEQ ID NO: 180573 - DNA, 282 bp, Glycine max
gtgagaatggagagcaaagaggaagatgtaagggttggagcaactaagttctcagaaaggcaaccaattggtacagcagctcagggtgacaaggactacaaagaaccacccccagcacctttgtttgagcctggtgagctaaagtcatggtccttctacagagctggaattgctgagtttgtggccactttcttgttcctctacattaccatcttaactgtcatgggtgtcaacaggtcaccctccaagtgtgcctctgttggcattcaaggcattgcttgg

SEQ ID NO: 180574 - DNA, 284 bp, Glycine max
tccagacagcagcagcaacaacaaacaaactctttctggattcagtttttgatgtgaaaatggcagtgactcttacatcaacactctttctggctttgctatttgctgcttcagcttttgctgctcttcagcctagagtacctgaagcttacctccaaaatgggaactttgaggagcagccaaaccctaaatacctgaagaaaacaaagctctttggtaaatacgctttgcctaaatgggagatcaatggtctggttgagtatgtctctgggggtccccaacct

SEQ ID NO: 180575 - DNA, 282 bp, Glycine max
aaagacttgcttccaagatggttctgctagagaagctctgggatgacgttgttgctggccctcaacctgagcgtggccttggcaagctcagaaaactcaccaccctcaaaactattgatgaaggagacagtagcaagctgcagaagacgttgtcgatgccgtcgacaccgacaaccccgatgactcccacgactccaacgacaccgggatccgcgcgtaaagctgacaacgtttggaggagcgtcttccatcctgggagcaatccgccacaaagaccatcgg

SEQ ID NO: 180576 - DNA, 240 bp, Glycine max
  unsure (1)..(240): unsure at all n locations
catcattaaccaaataaaaaacatcaaaattaaaagatccaagcatggggcaacacaaagactggancaagactgaggatggtgcttgtctgtctgcaatgctgcttagtactaatctagtgtaccctgcagtactgaatgctgctattgagctcaacttgtttgagatcattgctaaggcaacaccagctggttcttttatgtcatcccatgaaattgcttctaaggtccaacacaaca

SEQ ID NO: 180577 - DNA, 283 bp, Glycine max
gcgaaagagaagatggccaccgttccagggcagctcgtgtgggagatcgtgaagaaaaacgccgtctttttggtcaagcagttcggaagggggacccagagcgtcgaattcagcagagagagcaacaatctctacaacctcaattcgttcaagtactctggtttggcaaacaagaaaactgttacggtacagcctgagggtaaagatcaggctgtgttgttggctacaacaaagacaaagaagcaaaacaagcctgctgcattgcttcacaaatctgtgatga

SEQ ID NO: 180578 - DNA, 275 bp, Glycine max
gagataactagaaacagtgtgatgaaaatgaaggtccttgttttcttcgttgctacaattttcgtaccctggcaatgccatgcgtacgatatgttccctctccgaatgaacactggctatggtgcccgtactccggaggtgaaatgcgcaagttggaggcttgctgtggaagcacacaacatctttggctttgagaccattcctgaagagtgcgttgaagcaacaaaggaatacatccatggcgaacaatatagatcagactccaaaacagttaa

SEQ ID NO: 180579 - DNA, 255 bp, Glycine max
tgtcgcagcaattagggttcgcgatcgagctatacctagaccctgcgttggagaatcacgttctgaaagcatggaaagttcttacgagaagacaaatcagcacgcacctgatagccatggagtctcggccacacataaccctattctcggcgccatttctacaaccttcgaagctcgaatctctcctgaaaggcttcgcatcgaagcacgatcctctccctatcacctactcttccctcgccactttcccaaacg

SEQ ID NO: 180580 - DNA, 277 bp, Glycine max
cgtagaacacagaaaaagaaaagaaaagaacaaacaaacgatggggtggccattcagcagaataggagcttctgggttttcatcatattctactgccaaggaagttactcatggaatcgatggaagtggtctcactgctattgttacaggaatttgtgctgccccttttgcactatccaaggataacattgaacttcaatttgccataaattacatagttacaacaattggtgtgcatatggacaatcaaagcttgctaatattttgcatgccaatg

SEQ ID NO: 180581 - DNA, 274 bp, Glycine max
gcgcctctgcctgtaagagtgaaaaaaccttctcttttccttctctcaagtctcaagagatttcatcatggctccaaagaaggacaaggctccaccaccttcctccaagcccgccaaatctggcggtggcaagcagaagaagaagaagtggagcaagggaaagcaaaaggagaaggtgaataacatggtgctgtttgatcagggcacctatgataagctcctttctgaagctcccaaattcaagctcatcactccttccattctttctgatcgt

SEQ ID NO: 180582 - DNA, 275 bp, Glycine max
taagtattctcataagaacaaaggacagacaaagagagagatggagaactttcccgtgatcaacttggagaatctcaacggtgaggcgaggaaagctaccctgcaccagattgaagatgcttgccagaactggggattttttgagttggtgaatcatggaataccccttgaacttttggatacggtggaaaggttaacaaaagagcattataggaaatgcatggagaagaggttcaaggaggcagtgtcaagcaaagggttagaagatgaagtaa

SEQ ID NO: 180583 - DNA, 283 bp, Glycine max
ctcaaggagatggctctgggaagaggcagtgcagtggttctactactttgcttcttgctgcttcactctcagatggctcgtgctgccacctacacagttggagattctgggggttggacctttaacactgttgcctggcccaaaggaaagctctttcgggctggtgacacacttgctttcaattatagccctgggactcacaatgtggtggccgtgaacaaggctggatatgatagctgcaagactccaagaggagccaaagtgtataagtcagggacggatc

SEQ ID NO: 180584 - DNA, 280 bp, Glycine max
cgctttcgctcaccggtgtgcagtcgagcccccgaagaaaaagcgaaaatgccgtcgcacaagacattcagaatcaagaagaagttggcgaagaagatgaggcagaacaggcctatcccctactggatccgcatgaggaccgacaacaccatcaggtacaacgcgaagcccgtcactggcgtcgcaccaagcttggattctgaggtgcttgctttgcctcggttctgtttatccaattaattagtgttttattttcttgagccaaaaacaatgctttggg

SEQ ID NO: 180585 - DNA, 276 bp, Glycine max
ggattgtggctaaggctggggacactgttgaggtgcgtgatgggaaactactggtaaatggtgctgctgaagaacggcaatttgtagtagagcctctagcttatgagatggatccaatggttgtgccagaaggatatgtgtttgtaatgggagacaatcggaacaacagctttgattctcataactggtgatgaaggtttccagatacgttcatctattctaaattgacagtttctcccgtctttgcctgggaatgagctgttcggagattctctt

SEQ ID NO: 180586 - DNA, 279 bp, Glycine max
cgccaagtgaaagtgagacaaaataaaaatcaaagagcataatgtcagggctcattcaccagattggggagaccttcatgtgggagggcacaagaaggaggaggagcataagggtgagcaccatgctggagaatacaaaggggagcaccatggtgaacacagtagtgagtacaaaggagagcatcatggtgaacacaaagctggagagtaccatggtgagcacaagccagagcacaaagaggggttcctagacaaagtcaaggacaagatccatggtga

SEQ ID NO: 180587 - DNA, 287 bp, Glycine max
  unsure (1)..(287): unsure at all n locations
gaaagagatcgcagacacagagcagaatggcttctacccaatatcctcatgcaccancatgctcttaccacccctgccagtgccagatccccatcactacgcatcttggttagcaccaagcctaaccagcttgtttgcaaggcacagaaacaacaaacaccacaagaggatattgatgtcagcccaatctctcgccgtttagctctaactgtgctcattggtgctgctgctgttggctccaaagtccaacctgctgatgcagcctatggtgaagctgccaatgtgtt

SEQ ID NO: 180588 - DNA, 281 bp, Glycine max
ggggtactcttgagagtgttggtgatcaatcagagtatgttaatgccataaatttgatcctgaccattagcattcctgcacttggaagtcttctttcacctgtctactttcagttctttctggataagcttgcatcatctcttggtccacgcttttattctaacattttcaaatgcaagcaaatatcagaaactggagctcaacagatgctattagatacccaagctgtaaagacgattcttcttgaagttccttcccttggtagacagacatcaggtgct

SEQ ID NO: 180589 - DNA, 256 bp, Glycine max
atcaaattagttcattctctttgcgcagttccctacctctcctttcaagatgcagatcttcgtcaagagcctcaccggaaagaccatcacccttgaggtggaaagctctgacaccatcgacaacgtcaaggccaagatccaggacaaggaaggaattcccccggatcagcaacgtctcatcttcgccggaaagcagctcgaggacggccgtaccctcgccgactacaacatccagaaggagtcaaaccttcacctt

SEQ ID NO: 180590 - DNA, 272 bp, Glycine max
  unsure (1)..(272): unsure at all n locations
ccgttcgagctcattaattgcaagaatggcacttcgttngttggtgatgtcactttctgttctacctcatcttggtcttgcgagagaaagccatgccagagacgaagattttcggcatgctgtttggccaaacactcccattccaagttcattgcgagctcttctaaagcctggccctgcaagtgttgaaatcgctgatcatcctatggcaattgaagaccacacagtatccgaaaaccttcttctatacagatgacttcattcaggcaaac

SEQ ID NO: 180591 - DNA, 270 bp, Glycine max
gtcgttggctagtagacgcaaagaacggagtgctgtggtgcaaaataagaagcattggttcctctttctcagcgattgagcgagaaagcaaagacagtcatggcgtcgtttcttcaatggtttctggatccgaagaagaactggttcgccgctcagcacatgaaatccctctccagacggcttcgcaaatacgggctccgatatgacgatttgtacgatccttactacgatctagatgtgaaggaggcgctgaatcggcttccgaaagag

SEQ ID NO: 180592 - DNA, 270 bp, Glycine max
gttggtaaagaaagagaagaaaagagtggaatcgaagacgaagacgaagatggaggacgcatcagcatcaaagttcatcccacaccaaatcggaggggtccaaaacgacgtccttcgatttggtctccatggagtcaagagcgacatcgttggttcccaccctcttcaatcttcactccaatctacaacgagaatggatgaagcgatgaagaagcaatgcaaagttaacctgtacggaactgcttttcccctgaaggaggagcttgacag

SEQ ID NO: 180593 - DNA, 276 bp, Glycine max
ggttcttgtgtgtatcttgaactgtgaaagggatatccgctttgaacttttagctcggctttgcccaaattctaccggagccgatataaggagcgtttgcactgaagctggtatgtatgctattcgagccagaaggaagaccgtgacagagaaagacttccttgacgcagttaataaagtcatcaaaggataccagaagttcagtgcaactcccaagtatatggtttataactgagtaattctttcctctatttcccagaaactatattagcggtt

SEQ ID NO: 180594 - DNA, 279 bp, Glycine max
atggggtggaggaatttaatgaaaccttatatgatgaatgggttaacaagggcgacgcaccggcattgccagagactcttaaaaattacaacaagctgttgtctcttggcttcaagattgtattcttgtcaggaagatatcttgacaaaatggccgtaacagaagcaaacctaaagaaggctggcttccacacatgggagcagttaattctcaaggatccacatcttatcactccaaatgcactttcatacaaatcagcaatgagagagaatctgttga

SEQ ID NO: 180595 - DNA, 164 bp, Glycine max
gtcagagaaaccctaggtaagaagaaaagatgccggctggtcatggtttgagatcccgcaccagagattccttctctcgtcctttcaggaagaagggaaccatcgccctcaccacatacctgagaacctaccacgtcggcgactatgttgacgtcaaggttaac

SEQ ID NO: 180596 - DNA, 189 bp, Glycine max
acgtaagctcacgattcggattcagctcgagcttgatcttcaagcgcaggaatggaggtcgcaacaaacacggccgcggccacgtcaagttcattcgatgctccaactgcggcaaatgctgccctaaggacaaggctatcaagaggtttctggtgaggaacattgttgaacaggctgcagtcagagatg

SEQ ID NO: 180597 - DNA, 185 bp, Glycine max
gcgtagtacgtcggattcggctcacctcgagcgaatcggctcgagtttcttcctttgtcgtccatccactaaccatgtctcagcctgttgtcctcaaagtacgtatgtcatgtgaaggatgtgttggagcagtgaagagagttctaggaaaattggatggtgtggaatcatatgacattgatttg

SEQ ID NO: 180598 - DNA, 147 bp, Glycine max
cggctcgacggtctcgaggttcaaagctgaggccataactgctatcatgaatgactttaacgagcctggatcacttgctccaactggattgtttctcgctgccaccaaatacatggtcatccagggcgagcctggtgccgtcattcg

SEQ ID NO: 180599 - DNA, 157 bp, Glycine max
gtttcatagcagcaatggtgtacgtcaaggctcagaaatcaaaagcctacttcaagagatatcaagtcaagttcaagagaagaagagagggaaaaaccgattaccgtgccaggattcggttgattaatcaggacaagaacaaatataacactccgaa

SEQ ID NO: 180600 - DNA, 156 bp, Glycine max
ggcgaattcaaatggcaatcccacttttatggttatggagggaggtgtggcttgcctccttattttgatgctacttattgctatgctctgggttatggtgctggagccctccttcatagtgggaagactggattaatatcatcagttgccaattta

SEQ ID NO: 180601 - DNA, 158 bp, Glycine max
catctttctctcttctctctccacccaaaccctaactcccgaccctgttcccctctcgtatccgtcatgaaaggaggaaagtccaagaccgaatctaagagagccgatcccaaacttgctgtgaataagaagggagccgccaccaaggctaggaaacc

SEQ ID NO: 180602 - DNA, 163 bp, Glycine max
cggctcgaggtgatctgcaagctacgatgggtaagggaacggggagtttcggtaagagaaggaacaagacccacaccctctgtgtgaggtgtggccgccgcagtttccacctccagaagagtcattgcgccgcgtgcgctttccccgctgcgcgcaccaggaa

SEQ ID NO: 180603 - DNA, 155 bp, Glycine max
tatttccctacctctcccttcaagatgcagatcttcgtcaagaccctcaccggcaagaccatcacccttgaggtggaaagctctgacaccatcgacaacgtcaaggccaagatccaggacaaggaaggaatccccccggaccagcaacgtctcat

SEQ ID NO: 180604 - DNA, 154 bp, Glycine max
gcttttcgctcaccggtgtgcagtcgaggccccgaagaagaagcgaaaatgccgtagcacaagacattcagaatcaagaagaagttggcgaagaagatgaggcagaacaggcctatcccctactggatccgcatgaggaccgacaacaccatca

SEQ ID NO: 180605 - DNA, 152 bp, Glycine max
aggttgtcgctaaggctggggacactgttgaggtatgtgatgggacactactggtaaatggtgacgctgaacaacggcaatttgtagtagagcctctagcttatgacatggatccaatggttgtgccagaaggatatgcgtttgtaatggga

SEQ ID NO: 180606 - DNA, 153 bp, Glycine max
aacactcattaattgcaagaatggcacttcgttgcttggtgatgtccctttctgttctcttcactcttggtcttgcgagagaaagccatgccagagacgaagatttttggcatgctgtttggccaaacactcccattccaagttcattgcgag

SEQ ID NO: 180607 - DNA, 142 bp, Glycine max
ggccacatagtttcgctgcaactgcagcagcggctcgcagccagcgctctccagtgtggcagacgaaaggtttggcttgaccccaatgaagtcagcgaaatctccatggcaaattctcgccaaaacataaggaacctggcta

SEQ ID NO: 180608 - DNA, 162 bp, Glycine max
ggacaactgaggttgaaactgccaagactgaaaatgatgcaaagataatacttgggttgagccctggtgagctttcagtggtgaatcctaacaagaaaacctctgttggaaatgatgtgggataccgtttgattccagcaatcccagctcatcctcttctca

SEQ ID NO: 180609 - DNA, 148 bp, Glycine max
cttccacggaaagaccaacgcacacttctccttagtctccgattccaaccttcaaatcaatgcacgcttcattggacacaggcctgaaggaagaagccgtgactacacatggatccaagcccttggaatcctcttcaactccaaaagc

SEQ ID NO: 180610 - DNA, 139 bp, Glycine max
agtttgttgtgagctataagctagtttatcgtgaggagattatgaagttgtttgtcttctttgttgctgcagtagttttggtagcatggccatgccatggcgcaggctaccaaaggttcccactccgaatgaaaactgg

SEQ ID NO: 180611 - DNA, 150 bp, Glycine max
tagagttgttaccatttgctcccagtacagagcttaaccgagcttcacaaagatgaatcgggaaaagttgatgaagatggccggttcggttagaactgggggaaagggtaccatgagaagaaagaagaaggctgtccacaagacaacaac

SEQ ID NO: 180612 - DNA, 194 bp, Glycine max
ctaattctgcgtggtgagtgaaaatggcggtacccttgctctaccaagaggatcgtgaagaagcgcgtcaagaagtttatacgcccccagagtgatcgcaagatctccgtcaagccaagctggcgcagacccaagggtattgattctcgtgtcaggagaaagttcaaaggatgcacttgatgcccaacattggt

SEQ ID NO: 180613 - DNA, 148 bp, Glycine max
gatcgagataactatcaacagtgtgatgaaaatgaaggtccttgttttcttcgttgctacaattttcgtagtctggcaatgccatgcgtacgatatgttccctctccgaatgaacactggctatggtgcccgactccggaggtgaaat

SEQ ID NO: 180614 - DNA, 149 bp, Glycine max
cataaatcacatagctagtcctttaaagtaagagcggacccagaagcaaatggctcactttccagttgttgacatggggaagcttaacaccgaagagagacctgcagccatggagattataaaagatgcctgtggaactggggtttctt

SEQ ID NO: 180615 - DNA, 175 bp, Glycine max
aaggcttgtttctcaaaacattcacagtggccgcctaagcgctttcgccttcgccaggcttgagagcatgtgctgcttttatccttccttggatgtctgaggtcattatattatttctttgttgaccattttcgtctgtggttgattgatgctgtaagttatagttttttttctt

SEQ ID NO: 180616 - DNA, 169 bp, Glycine max
gaggggcatctggaacttcacaaatcctggggccgtgagccacaatgagattctcgagatgtacagggattacattgatccaagcttcaagtggactaacttcaatcttgaagagcaagccacggtgataattgctccacggagcaacaatgagtggatgcatccaaac

SEQ ID NO: 180617 - DNA, 183 bp, Glycine max
aactaatagggtcacgagggtttcatcctgcggcatcagacatgggaggaggcaatgggcaaaaggcaaagatggctcgcgagaagaacatcgagaagcagaaggccgcctcaaagggaagccagctggccaccaacaagaaagcaatgtcgatccagtgcaaggtgtcatgcaaacatttat

SEQ ID NO: 180618 - DNA, 183 bp, Glycine max
cgctagtgtgtctggggaaatttgcgttgtttttcgcggtacagctcacacacactgaacggtaagtatggcggacaaggctgttacaatccgaacccgaaagttcatgaccaacaggcctctttccaggaagcagtttgtcgttgatgttcttcatccagggagggcaatgtttccaaggct

SEQ ID NO: 180619 - DNA, 149 bp, Glycine max
gatcgagataactataaacagtgtgatgaaaatgaaggtccttgttttcttcgttgctacaattttcgtagcatggcaatgccatgcgtacgatatgttccctctccgaatgaacactggctatggtgcccgtatccggaggtgaaatg

SEQ ID NO: 180620 - DNA, 148 bp, Glycine max
gcaaaaggagcatgttgattatatagccagtacagggcaataatcatttgtgtatagcatgggtaaggacaccatcgctgacataataacctatataagaaatgctgacatccataaaaaaggaatggttcaatgccatttactaaca

SEQ ID NO: 180621 - DNA, 148 bp, Glycine max
gaaagaaactagaatggccactttagacgaacgcccttctgcgaaaaggtggcttcctcttgaagctaaccctgaagtcatgaaccagttcctttggggtcttggccttccactggacgaggcagactgctgtatgtgtttggcttag

SEQ ID NO: 180622 - DNA, 308 bp, Glycine max
cttcttcgtgccaagggacaaaaagcacggaagcggaggaaggccaaaccggacaactggaaaaagggtcttgaaaagcaaacggttcagaccggaaaatagtgaccttatctgatccaaagcgcataattgggttaaggaagacactggttttctatcagggaagagctcctaggggatgcaagaccgattgggtcatgaatgagtaccgtttacctgacaattgcaaactacctaaggaaatcgtgttatgcaagatatatcgaaaggcaacttcgttgaaagtgctggagcaaagggcagcacta

SEQ ID NO: 180623 - DNA, 306 bp, Glycine max
cttaggtcttccgaattcgaagttaatttgcaagatggctaaggaaaaggctcagatcaacattgatggtggttggccaggtggaccctgaggaggcaaccaccattaacgagctgaagaagcctgttgtggagaaagaagctccagggcatgccatatgagggcatgcacgtacggcctcggaggggaaccagaaaattatgttaacaaaataatctggaaccctaatgtatcagtgtcatcatcagtgtgtagtttaagctagctttgctatggttacgttctttgagatgagagtcttgatga

SEQ ID NO: 180624 - DNA, 299 bp, Glycine max
aataactagatacagtatgatgaaaatgaaggtcattgtcttcttcgttgatacaatttttcgtaacattggcatggccatccgaacgatatgttccctctccgaatgaacactggctatggtgcccgtactccggaggtgaaatgcgcaagttggaggcttgctgtggaagcacacaacatctttggctttgagaccattcctgaagagtgcgttgaagcaacaaaggaatacatccatggcgaacaatatagatcagactccaaaacagttaaccaacaagcttacttttatgccag

SEQ ID NO: 180625 - DNA, 299 bp, Glycine max
cttaagcttgctactgagtttccacactgcataccttacgtcttccgaattcgaagttaatttgcaagatgggtaaaggaaaaggctcagatcaacattgtggtggttggtcatgtggaccctgaggaggcaaccaccattaacgagctgaagaagcctgttgtggagaaagaagctccagggcatgccatatgagggcatgcacgtacgcgcctcggaggggaaccagaaaattatgttaacaaaataatctggaaccctaatgtatcagtgtcatcatcagtgtgtagtttaagcta

SEQ ID NO: 180626 - DNA, 294 bp, Glycine max
ctcgagccgacgcgtgaacaagcctcaggtaagtcaaaaccatggttaagcataacaatgctatccaaacggacacttccgtaaagaatgggagaactatgtgaagacttggttcaatcagccagcacggaagacaaggagacgattggctcgtcagaagaaagctgtgaagatattccccagacctacggctggacctctcaggcccattgtacatggtcaaactttgaaatacaacatgaaagtgagaggtggaaggggattttctcttgaagaactcaaggcagcagggat

SEQ ID NO: 180627 - DNA, 309 bp, Glycine max
cttccctcaaccacttctcagtgtcccgaaaatcttctctgcttcagaccagagcttctttcatagggactcatcctcaataagatgccaatgaggtgttcaaagatttgaaggaaaagtgggatgctcttgaaaacaagtccacagtacttttttatggtggtggggctttagttgctgtttggctatcgtcgattcttgtcgatcgccatcaactctgttcccttgcttccaaagattatggagttggtggggctagggtacactggatggtttgtctaccgataccttctgtttaagtctagcagg

SEQ ID NO: 180628 - DNA, 302 bp, Glycine max
atgaagttcaacatcgcgaatcccaccactggatgccagaagaagctcgagatcgacgacgatctgaaactgcgaggaattttgggacaagaggatctcacaggaggtcatcggagatgcactcggtgaggaatttaagggctatgtcttcaaaattaccggaggttgtgcacaaacaaggatttccaatgaagcagggagtgctgactcctggtcgtgttagacttttgcttcacaggggaactccttgcttccgtggatatggaaggcgtaatggagagcgtaggagaaagtctgttcgt

SEQ ID NO: 180629 - DNA, 297 bp, Glycine max
aagttattgtgagcaaagaaagatagtgagtgaagtaactgaagagaagaaaaaatgccgtgcctcaatcttcagaccaacgtgtccctcgaaggcgtcgacacctcttccatcctcgccgaagccacctcctccgtcgccagcataatcggcaaacccgaagcctatgtgatgattgtactgaaaggatcagtacccatagcttttggtgggaatgagcagccagcagcttatggagaattggtttccattggtggtcttaaccctagtgtaaacaaggaacttagtgctgcaatt

SEQ ID NO: 180630 - DNA, 291 bp, Glycine max
ccctcagccgaatcggctcacggctcgaggttcaaagctgagcaaataactgctatcatgcatgactttaacgagctggatcacttgctccaactggattgtttctcgctgccaccaaatacatggtcatccagggcgagcctggtgccgtcattcgaggcaagaagggtcctggtggtgttactgtgaagaagaccggtgcggccttgatcattggcatttatgacgaaccaatggctccgggtcagtgcaacatggtagtggaaaggcttggtgattatctcattgaac

SEQ ID NO: 180631 - DNA, 295 bp, Glycine max
tcgccatgagcgaatcggatcgagcggctcgaggttcaaagctgagcaaataactgctatcatcaatgacttaacggagctcgataatttgctcaaactggattgtttctcgctgccaccaaatacatggtcatccagggcgagcctggtgccgtcattcgaggcaagaagggtcctggtggtgttactgtgaagaagaccggtgcggccttgatcattggcatttatgacgaaccaatggctccgggtcagtgcaacatggtagtggaaaggcttggtgattatctcattgaac

SEQ ID NO: 180632 - DNA, 293 bp, Glycine max
ctaagatccgccttatctgaattgtaaaaatgtcgctcggagaaactgcttgttcatacgcagctctcatccttcatgaagatggaatcagtgtaactgccgacaagatcagcaccttgttggaaactgcaaaggttcaagtagatacctattggccaaccttatttgctaaacttgctgagaagaaaaatcttggcgatttgatagccaatgcagcaggcggtggtgcaccagttgctgttgcagctgcccctgttgctgcctcaggtggtggtggtgctgtgctgccgccc

SEQ ID NO: 180633 - DNA, 307 bp, Glycine max
cgtgagctataagcgcgtttatcgtgaggagcatatgaagttgtttgccctctttgttggctgcagtaagtttgcgatcaatgcccaggccatggcgcaggctaccaaaggtcacctctccgattgtcaactggctatggtgagcgttcttcggaggtaaaatgcgcaagtcttaggcttgctgtggaagcacacaacatccgagccattaaaaccattcctgaagagtgcgttgaaccaacaacggactacattaatggcgaacaatttagatcagactctaaaacagttaaccaacaagctttct

SEQ ID NO: 180634 - DNA, 302 bp, Glycine max
  unsure (1)..(302): unsure at all n locations
acgatttgcaagctgtagtgtttgacattgttatcacatttgggttggtttacactgtgtatgcaactgccataggacccaaagaagtgggtcattgcggtatcaatcgnacccattgctattgggttcgttgtgggtgccaacatcttagcagcaggcccattcagcggcggttcaatgaacccagctcgctcattcggcccagctgtggtcagtggagacttggctgctaactggatctactgggttggcccattgattggaggaggtttggctggcttgatttatggagacgtcttcat

SEQ ID NO: 180635 - DNA, 299 bp, Glycine max
agacaatgaaagtccttgtcttctttgttgctatagttctagcagcatggcattgccatggctcagaccatgaacaatgaccatggccacacctaccaaattttccctctgagaatgaaaactggccatggtggccactacattccggaggtatcatgccaaagttggaggcttggtgtggaagcacacaacgtcattgactggaaaaccgttcctcaagattgcgagggatatattgggaactacatgcttggcgaacaatatagatcagactccaaaatagttaaccaacaagctta

SEQ ID NO: 180636 - DNA, 286 bp, Glycine max
tgagtttccacactgcataccttcagagtcttccgaattcgaagttaatttgcaagatggctaaggaaaatgctcagatcaccattgtggtaggtggtcatgtggaccctgaggaggaaaccaccattaacgagctgaagaagcctgttgtggagaaagaagctccagggaatgccatatgagggcatgcacgtacggcctcggaggggaaccagaaaattatgttaacaaaataatctggaacccattgtataagtgtcatcatcagtgtggaagtttaagctag

SEQ ID NO: 180637 - DNA, 305 bp, Glycine max
ctcgagccatcagctacagttcttatgagatgttggcgggtcacgtgtggagaagtgtatgccaaagcagagcaacttcctgttgatcaagaaaccaaattgtacattgcaactgatggaaggtcaaggttgcaacctcctcccccaccgggttactttggcaatgtgatattcacaaccacacctatagctgtggcaggtgatctcatgtcaaaaccaacatggtatgctgcaagcagaatccacaatgcattgttacgaatggacaacgattatttaaggtcagctcttgactatctagagct

SEQ ID NO: 180638 - DNA, 300 bp, Glycine max
caagtgttaccaaatatgatgatttggaattcaagtcaagcattatcaagaacgatgatttctgaaatcgagaccaaagtgttaccaagcatgatgattctgaactcaagtcaagcgtcaccaagaacaatgattttgaaccgagaccaagtgttacaaagtatgataactttgaacccagaccaagtgttaccaaatatgatgattttgaactcaggtcaagcgttaccgagaatgatgattttgaaccgagaccaaatattagtaagtatgatgactttgaactcaggtcaagcgtta

SEQ ID NO: 180639 - DNA, 302 bp, Glycine max
gatagacacaaaattctcatcttcaagtcatggccatctttaaggcgctccttgcttcaatcctcatttctctgggtcatggtgaatctggtggaatcagatacaatgtatcaggtaatcaagaacacggtagagggatcaagtcctagcccttccccgccaacgatcgattgtgatgttgaatgtaatcggaggtgtcaattatcatcaagaccaaatttgtgcaagagagcatgtgggacgtgctgtcagcggtgcaattgtgtgccttcgggtacctatggtcattatgaagagtgttc

SEQ ID NO: 180640 - DNA, 286 bp, Glycine max
gtgattctcatagccaaaggagagacctatgaagaagttgtggggttggcgaaggcaatggttaacacgcgacgaaggtggagggtttggacgatgtggtggacatcgtgggaaccggaggggacggtgccaacacggtcaacatttcgaccggtgcttcgattctcaccgcggcttgcggtgacagagttgcaaagcaaaggagccgttccagtacatctgcgtgtgggactgccgatgtgttggaagctttgggagtcgtcatcgacttaggtccacagggggt

SEQ ID NO: 180641 - DNA, 291 bp, Glycine max
cgaggagacaaaagaggcattccgggttttcgacaaggatcagaatgggttcatctctgctgctgagctccgtcatgtggatgaccaacctcggggagaaactcacccgatgaagaggtcgatgagatgattcgtgaggctgatgttgatggagatggccaaataaactacgaggagttcgttaaggtgatgatggccaagtgagtgatcatcacattatggccacaagaacctaaatgaagaagtgttgattaacaggacatgaccaaaaacacagaggtacggggaagg

SEQ ID NO: 180642 - DNA, 288 bp, Glycine max
ccacactgaataccttaagaatttcgaagtcgaagttaatttgcaagatggctaaggaataggctcagatcaaaattgcggtggttgtgccagtggagccggaggaggcaaccaccattaacgagctgaagaagcctgtggtggagaaagaagttccagggcatgccatatgagggcatgaacgtacggcctcggaggggaaccagaaaattatgttaacaaaataatcgggaaccctaatgtatcagtgtcatcatcagtgggtagtttaagctagctttgctatgg

SEQ ID NO: 180643 - DNA, 301 bp, Glycine max
cggctcgatctcgagccgaatcggctcgaggagtttgttgtgagctataagctactttatcggtacgaaacctttgaagtggttggtttcctttgttgctgcagtagttttggtagcattgccatgccatggcgcaggctaccaaaggttccctctccgaatgacaactggctatggtgagcgttcttcggaggtaaaatgcgcaagtcttaggcttgctgtggaagcacacaacatccgagcccttaaaaccattcctgaagagtgcgttgaaccaacataggactacattaatggcgac

SEQ ID NO: 180644 - DNA, 258 bp, Glycine max
  unsure (1)..(258): unsure at all n locations
atccaagttcaaagatgaagatgatccacgttctgttcctctttgctcttgtcccggtcacttgccatgcttctgtcaatgatttctgtgtagaagacctaaaaggtccagatagcccttnaggctatcagtgcaagccacctaacacagtcacagtggacgactttgtgttctctggctttgtagctggacagcctccaaacactttcaatgctccattaacctcagcatttgttactgattttccaggtgtgaatg

SEQ ID NO: 180645 - DNA, 254 bp, Glycine max
attatcgttatcttgctgaatttaagtcaggcaatgagaagaaggaagctgctgatcagtctatgaaagcatatgagtctgctaccgctgcagcagaggctgatttacctcccacacatcctatccgactgggtctagctttaaatttctctgttttctattatgagatcttgaactcccctgaaagagcctgtcatcttgcgaagcaagcttttgatgaagctattaccgagcttgacaccttgaatgaggag

SEQ ID NO: 180646 - DNA, 248 bp, Glycine max
agaatggctcccaagggtttaacctttctggctgtgttaatatgcgtttcagcactgtcactgagtccttctgttgcgggggaagggcaaaataatggccttgttatgaacttctacaaggaatcatgccctcaggctgaagacatcatcacagaacaagtcaagcttctctacaagcgccacaagaacactgctttctcctggctcaggaacatcttccatgactgtgctgttcagagttgtgatgc

SEQ ID NO: 180647 - DNA, 248 bp, Glycine max
gaggttttgatgcaacgctgtcactgagaaaggatctctatctacgaaggagcggaataaaacccttctctctgtgattaagagaatggcttcagatcggaaacttcacacttttgaggaggtggcaaagcacaaccagaccaaggattgctggctcatcatttctggcaaggtgtatgatgtcacccctttcatggaggatcatcccggaggtgatgaggttttgttatctgcaacagggaaagatg

SEQ ID NO: 180648 - DNA, 251 bp, Glycine max
catggctctgttattcaaggatccgtcgaagatttcagcgtatcgagatagaaggttccccggaacgcaagacgagtttgagcacgcgcttgtgacctcaaccaccgtttacgtggggaacatgtctttttacacgacggaggagcaagtttacgagctcttctcgcgtactggggaaataaaaaagatcatcatgggcttggacaagaacaccaaaacgccctgcggcttctgtttcgttttatattatt

SEQ ID NO: 180649 - DNA, 251 bp, Glycine max
ctcactgatctccattcccattccatggcttccactgaatcatcacctttcaagaaaattcagattcaaagggattacactacatttgacgcatatgtggttggaaaagaggatgctcctggaattgttgtgattcaggagtggtggggtgtggattacgaaattaagaaccatgccgtgaagatttctcagcttggtagtgggtttaaagctcttatcccagatttatacagaggaaaggttggtctgga

SEQ ID NO: 180650 - DNA, 234 bp, Glycine max
cagatcgagataactaaaaacagtgtgatgaaaatgaaggtacttgatatcatcgttgcaacaattttggtagcatggcaatgccatgcgtacgatatgtaccctcaccgaatgaacacaggctatggtgaaagtactcctaatgagaaatgcgaaagtaggaggcttgctgaggaagcacacaacatctttggatttgagacaattcctgaagagtgcgttgaagcaataaag

SEQ ID NO: 180651 - DNA, 252 bp, Glycine max
ctccgttttctttctttcttcttcttcttctcttcctcttcaagactgcgacgacgatccaagtgatatacactcgatgcgatggaacttgtagctgaatccgagcgaactctgtacccatacgtgactggatcctctgtagtcgctatcaaatacaaagatgggattctaatggccgctgacatgggaggttcgtatggatctaccctgcggtataagagtgttgagcgtatcaagcctattggaaagcat

SEQ ID NO: 180652 - DNA, 251 bp, Glycine max
ctttgaggaggaccttgatgcaatgcttccaaagtgtgatgtaattgttatcaatatgcctcttactgaacagacaagaggattgtttgacaaaaacagaattgctaagtgcaagaaaggtgtggtgattgttaacaatgctcgaggggcaattatggacacccaagcaattgctgatgcttgctctagtggccacgttgcaggctatggtggtgatgtttggcccatacaaccagctccaaaggaccatc

SEQ ID NO: 180653 - DNA, 251 bp, Glycine max
gtttaacgaacctcgtgtggtggctgctcttggctatgataatggtttctttgcccctggaagatgctcaacagaatatgggaattgtactgctggcaactcaggcactgagccttacattgttgcccacaatttgatattgtcgcatgcagcagctgttcaaagataccgagcgaagtaccaagaaaagcaaaagggaaggattgggatcctcttgtattttgtttggtatgagcctcttacaagatcaa

SEQ ID NO: 180654 - DNA, 249 bp, Glycine max
gaattagggttttccaattcacagagcaacacaacgaaccaattatggcgcacctcagccgcagtcgcagccgcagcacgggcaagcagcgctggagcaggtgcagtgcttcggtcgcaagaagaccgccgtggccgtgacctactgcaagcgcgggcgcggtctcatcaagatcaacggctgccccattgagctcgtggagccggagatcctccgcttcaaggccttcgagcctatcccctgttgggt

SEQ ID NO: 180655 - DNA, 250 bp, Glycine max
gcgaccaggaaacgtgtacccattggcacaccgactcctctgagctggctctttatctatccggagggactttataagctcatgacatacataagggacaactacaataatccaccggtgtacattaccgaaaatggcgttgcggaatcaaagaatgactcacttgcaatcaatgaagcccgaaaggatggtattcgaattagataccacgatggccatctcagatccctgcttcatgcgatcaaagata

SEQ ID NO: 180656 - DNA, 211 bp, Glycine max
ggagtcctcaaagatctatgcttaactcttactctgcatgatatttcactcttccgccaatcccattctctactagtggctactgtggcaaacaccccaaaaagcacaagcctggtaaaacaccaaagacacccaaaacacccgttgttaagccaccagtcaccatccctcccattaatgttcctcccgttgttcttccacacatcgtgcg

SEQ ID NO: 180657 - DNA, 242 bp, Glycine max
  unsure (1)..(242): unsure at all n locations
cagcgaatttacttcgttgttcactatctttctactccatactttcacctcatacctaccttcagncancgctgctattgtgtacgatacggatggtaatattcttcaacaagggtcgcacatattttgtgttggcagctacaagaggaaacggcggtggaatagaatttgccgcaactggaaacgacacttgctctctaactgtcgtgcaatctcccagtggcgactctattgggtttcca

SEQ ID NO: 180658 - DNA, 242 bp, Glycine max
tagggtacttgctgcccgtcgacgaatggatgggatcatcactactgtggcattaatgctagacagcgggttaccttgcttcagcaggggtgacccgattggcaatcttcggaagagatttcatccggagatgagtgagcgtgaagcagccaatttcatgacacatgtttgtaaagatgcttataataagtggaccactgctggctatgacttgatacagtatctgcagcaaggcatcgaga

SEQ ID NO: 180659 - DNA, 266 bp, Glycine max
ggtatgctgatatgcactattcaaataggagcattagctatgtttgttaatgtcactttatgttatgtgggtaagtcacctaagacactccacgtacctacttgttgtctcttacgcggctttaataaatcttctgcccttgttccatatttaaaaaaaaaaaaacaagaagaatagaaaacggaataaagagggagagacatcttaatctagcacatgaggggagacccaattcgggcaggggagattggggtgtttaatgtcga

SEQ ID NO: 180660 - DNA, 266 bp, Glycine max
caggcagaaagcaagctcatcctagagttttaaaaatggcagcagcctcctccatggctctctcttccccatccttggctggcaaggccgtgaagctgggcccatcagcccccgaagtcgggagggtcagcatgaggaagaccgtcaccaagcaggcctcctccggaagcccatggtacggcccagaccgcgtcaagtacttgggcccattctctggcgagcccccgtcctacctcactggcgagttcccaggtgactacggctgg

SEQ ID NO: 180661 - DNA, 262 bp, Glycine max
ggaaggaggaaagatgaacacagacatcactgcatcgacgaagccagagtacccagtcattgatcgcaaccctcctttcaccaaagtcgtcggcaacttcaacaccctcgactatctccgattcgtcacaatcaccggcgtttccgtcaccgtcggctacctctccgggattaagcctggaattaggggtccttcgatggtgacagggggtttgatcggtgtgatgggtgggttcatgtatgcttaccagaactccgctggg

SEQ ID NO: 180662 - DNA, 178 bp, Glycine max
tccgcaaccttgaggacgaaacccgatgattgacgatttggtatggtagtttgctcaaatcatgtgttatttccaattgtaagaggcagtctagcatcgcagggttacaccgtcccgagtgttcttatatttgactgtttgattcattcatatcacatttatttcctttcttggtgct

SEQ ID NO: 180663 - DNA, 215 bp, Glycine max
cggtcagttgccggcacaatggtttcgctgaaactgcagacgcggctcgcagccagcgtcctcaagtgtggcagaggaacggtttggcttgaccccactgcagtcaacgaaatctccatggctaattctcgccaaaacatacggacgctggttaaggctgggtttattatcaggacgcccaccaagattcactctcgctcacgtgcccgccgaat

SEQ ID NO: 180664 - DNA, 259 bp, Glycine max
taactatgccagtatcattttcatggccctcttcatctctatagctgcaactggcatcctggaaatgcagtggggaggtgtcggtatacacgactggtggaggaatgagcagttctgggtcattggtggtgcctcctcacatctctttgctctctttcagggtttgctcaaagttctggcaggagtcaacacaaacttcacagtcacatccaaagcagcagatgatggagagtttgctgaactctacatcttcaagtgg

SEQ ID NO: 180665 - DNA, 261 bp, Glycine max
gaaaatcattccaatacacatggcttccgaaaggcaagcgttaatgcttattctcttaacaacattcttcttcaccataaagccttcacaggccagtactactggtggcataacaatctactggggccaaaacattgacgacggcaccttgacttccacatgcgacactggacacttcgagattgtcaacctagctttcctcaatgcgtttggttgcggcataactccatcatggaacttcgctggccactgtggggactg

SEQ ID NO: 180666 - DNA, 265 bp, Glycine max
ggaaaagacgctgtaactgtagaaatgaggtttatcacaagcaaattgggcctgggatgtttcaacagatgacagagcaggtctgtgagcaatgtcccaacgtcaaatatgtaagggaggggtatttcatcactgttgatattgagaaaggcatgcaagatgggcaggaggtgctattttatgaggacggtgaacccataattgatggagaatctggagatttaaggtttcgtatccgtactgcacctcatgacgtcttcagaag

SEQ ID NO: 180667 - DNA, 259 bp, Glycine max
tcaaaattcaactcaaacactcttcccaaaaccctagattccctccaaacagaaaactacaataccaaccctcaccaatttctactccatcaaagatttatcccaacacactaccaaaaacgattactaaatcctcattaatggaaagatatacgacgtaacacaatatttagataatcatcccaatagagataatataatcctaaccgcaaccgggaaagacacaacagaagaatttaaagatactaaccacaacaaa

SEQ ID NO: 180668 - DNA, 258 bp, Glycine max
tccattccttatggctgggaaatacgctgagcgtgttggtgctggtgctcctgtgtacctctctgcagtgctcgagtatctcgctgctgaggttttggaattggctgggaatgctgctagggataacaagaagaatcgtattgttcctaggcacattcagcttgctgtgaggaacgatgaggagctgagcaagcttttaggatctgttaccattgccaatggaggtgtcttgccgaatattcatcagactctgcttcc

SEQ ID NO: 180669 - DNA, 261 bp, Glycine max
gcaaaatggaagaccatgtctgatgctgaaaaagcacctaccgtggcaaagtctgagaaaaggaaagtggagtacgagaagaacatgagagcctataacaagaaacaggcggaaggtcctactggtggggatgaagaagaatctgagaagtctgtatctgaggtgaatgatgaagatgatgatgaggaaggcagtggcgaggaagaggatgacgattagagaatggactgataattgcatttatgtaggttctgatgattt

SEQ ID NO: 180670 - DNA, 257 bp, Glycine max
ctaagcttgctactgagtttccacactgcataccttaggtcttccgaattcgaagttaatttgcacgatggctaaggaaaaggctcagatcaacattgtggtggttggtcatgtggaccctgaggaggcaaccaccattaacgagctgaagaagcctgttgtggagaaagaagctccagggcatgccatatgagggcatgcacgtacggcctcggcggggaaccagaaaattatgttaacaaaataatctggaaccc

SEQ ID NO: 180671 - DNA, 258 bp, Glycine max
tgttgatcgagataactagaaacagtgtgatgaaaatgaaggtccttgttttcttcgttgctacacttttcgtagcatggcaatgccatgcgtacgatatgttccctctccgaatgaacactggctatggtgcccgtactccggaggtgaaatgcgcaagttggaggcttgctgtggaagcacacaaactctttggctttgagaccattcctgaagcgtgcgttgaagcaacaaaggcatacatccatggcgaacaat

SEQ ID NO: 180672 - DNA, 246 bp, Glycine max
acggctcgagcaatcaataatcaagttacccacagaccaaccaagggtagagaaactgacccacttgcattttttctaccacgacatcttagtgggcaagaacatcacggtggtgaaaatcatcgagccatcagcgagcgaggttcgtgaagcaactgggtttggaaccactttcatgatggacaatgttttgaccgagggtccagagctgagctcgaagcacgttgggagggctcaggggctgtt

SEQ ID NO: 180673 - DNA, 285 bp, Glycine max
caaaattcaactcaaacatccctaacacatacataacagaatcagaaacagagacacaccataaaacaaaaacctacaaaatattataaagcaattaagaacaaaccataccccaaatcacatttctaccataatattcctaatcccaaaatcaaaatttataatattaatataaagcagacgaatattaataaatttcctttctatatccatctaattaattaaaagacggcaaatatttcaaataaaaccctaaaaactactcgcattacttacaacaaatac

SEQ ID NO: 180674 - DNA, 263 bp, Glycine max
ctcagattgcaattgcctcttctcttctcccagaatcggtcactaatccgatatcatgaagctcgatacgactagtctcgaatcgtttcccacactgattgcacctacaaacgacgtcgccggagaactctccgccgctccgttctttgaccttccgaattccaatgacttcgatgggttcttgaaagacgctattcagatggtgaagcccgcgaagggtactacaactcttgcttttatatttaaagagggtgttatggtag

SEQ ID NO: 180675 - DNA, 253 bp, Glycine max
tggttggataggtgagagtgttgattccatcaaatctcttcagatccgccaggtcctcacccaggctgttagcctcggcatgattgttacctctgcactgataatatggacggcattgatgtgcattactggcagtgaatctcctagttgttgttgtactttctggaagcatggaacccggtttcaagcggggagacatcttattcttgcacatgagtaaagacccattcgggcaggggacattgtcgtgttt

SEQ ID NO: 180676 - DNA, 256 bp, Glycine max
gtctcttcaatgaggctatggcaagtgattcccgaatagtagacttggcactcaaaaattgcacttcagtttttgaggggctagattccatggtggatgttggtggtggaactggaaccacggccagaattatctgtgacgcatttcctaagttgaaatgtgttgtgcttgaccttcctcctgttgtagagaacttgacagggaccaataatttgagttttgttggtggtgacatgttcaactctatccctcaagc

SEQ ID NO: 180677 - DNA, 256 bp, Glycine max
ctagaaaagaagcaccaagcgaagcagcgaagtgtctttcgattccttcgtgcgtgcgattctcctgatatccaaggtgaagcaccgacaccggacctatctccggcgaatccccagtccccactttcttccttcgaaatgaatcccgagtatgattatctgttcaagctccttcttattggagactctggtgttggtaaatcatgccttcttctgagattttctgatgattcgtacatcgaaagctacataagca

SEQ ID NO: 180678 - DNA, 251 bp, Glycine max
cgcctgtcatgcaatggctggaagaaagcaggattatgcagggagagattcaacagttgaaagacaagctagctatatcagagagaacagctagggcagagtcacaattgaaggataaactgaagttgaggcttagaacactagaggaaggcttaaagcatttctccagttatccaatcactttgaatgtgtcttatgcatctccaaaagcagaaaagtctaacatactagcttccctaacaaccaatggt

SEQ ID NO: 180679 - DNA, 254 bp, Glycine max
cggtttacgcaaccttgaggacgaaacccgatgattgacgatttggtatggtagtttgctcaaataatgtgttatttccaattgtaagaggcagtctagcatcgcagggttacaccgtcccgagtgttcttatatttgactgtttgattcattcatatcacatttatttcctttcttggtgctggtttggcttttgatctagtctcatgtgtagctataatcatgtgtttcagtcatcctcagtttgtttattg

SEQ ID NO: 180680 - DNA, 255 bp, Glycine max
caaaaagacagaatcccaggcgaggagaacgatggcggggaaggagcaggatgtgtcgttgggagcgaacaagttccccgagagacagccgattgggacggcggcgcagagccaagacgacggcaaggactaccaggagccggcgccggcgccgctggttgacccgacggagtttacgtcatggtcgttttacagagcagggatagcagagtttgtggccacttttctgtttctctacatcaccgtcttaaccgt

SEQ ID NO: 180681 - DNA, 259 bp, Glycine max
atcgagataactagaaacagtatgatgaaaatgaagatccttattttcttcattactacaattttagtagcatgacaataccatgcgtacgatatattccctctccgaatgaacactggctatgatgcccgtactccggagatgaaatgcgcaaattggagacttactatggaagcacacaacatctttagctttgagaccattcctgaagaatacgttgaagcaacaacggaatacatccatggcgaacaatatagat

SEQ ID NO: 180682 - DNA, 260 bp, Glycine max
catctcttgtttcttgctttctttcttcaccatgtcacttgctgggaaaatcaccactgaaatcggggttcatgcaaccgctacaaagtggttcaacctcttcgcaacacaactccatcatgttcaaaacctaactgatagagtgcatggaaccaagctgcatcaaggtgaagactggcatcacaacgagacagtcaagcactggacttataccatagatggtaaggttacaacatgtctggagagtattgaatccattg

SEQ ID NO: 180683 - DNA, 253 bp, Glycine max
ggcaattgcagagccagtcttagttaattactagtattctgtgtataatctctctctaccttgggtcatagctggtttttttcttgcttgaccagggagaattagtccacttaatatgtttctcaagtgcatcgctgtaatctactacttttaattataaaaatatggatttattattgtaaaaaaaaaaaaaaaaaaaaaaaaaaaaaaaagaaaaaactaaaaaaaaaaaaaaaaaagaagagaaagaaaa

SEQ ID NO: 180684 - DNA, 251 bp, Glycine max
actacttcaagggaaaccttctaatagagacaaaaacaatggtgactgcaggattgaaatgggcaccagagatgtgaccaacagagtaaaccagtaccatcacaaccagtccccaaacaattgatatcccaagatgtattacaacgttattattgttcttattcaccaccactgaagcacaccctgcaaatatcaagaaatatgttcccaccacctcagctaccaactgtatccatcaacaaacaaaatca

SEQ ID NO: 180685 - DNA, 252 bp, Glycine max
gaaaaagagctgcaatccgatttgcagatctcaagaggcaaagatattggttcccgttaatggttggtattggcttacttgttcttcagcaattatctggtatcaatggacattttgttctattcaactaccatctctgcaaatgcaggaatttcatccagcgaaggcctaccagttggacttggagccgttcaggtcatcgcaactggcattcccacatggttggtggatctacgtcgccggaggtgcttc

SEQ ID NO: 180686 - DNA, 235 bp, Glycine max
gctattccgcattcagtacttgccaaaagtgcgatgagatccccacctgttatgagcatctctgactgtgaactctttggtggcagccgtcttgaccgcctttcccagtgcatgtgcccttgaacatggttcatgcagcttcattgatacacgatgatcttccctgcatggatgactccccctcaagccgtggtcagccttcaaaccataccatctatggtgttgacatggcaat

SEQ ID NO: 180687 - DNA, 256 bp, Glycine max
ggagtcctgaattttgacgaaatcctgcgcgagactgatgcattcatggtggcacgaggtgatcttggaatggagatcccagttgaaaagatattcctggcgcagaagatgatgatatacaagtgtaatctggttgggaagccagtggtgactgctacccaaatgcttgaatcaatgataaagtctcccaggccaacccgagctgaagcaactgacgtagccaatgcagttcttgatggaacagattgtgtgatgc

SEQ ID NO: 180688 - DNA, 253 bp, Glycine max
cggcgacgttcccttcactcacgccaacgtcagcttggccttcagggatttcgcctacaaacccaccaccgatctctccaccggtctcagcaagttcgtcaagtggtacctcggttatcacggcctccagccaagcctgaaaaaggataatcaccttcacaatattgaatgaccatttctataattatctctcctctattttgttctttttacggcaagaaaaaaaaaacaaaaaaaccttccccttgctcat

SEQ ID NO: 180689 - DNA, 251 bp, Glycine max
tccatctcttgcttcttgcttctattacttgcttctttcttcaccatgtcacttgctgggaaaatcaccactgaaattggggttcatgcaaccgctgcaaagtggttcaacctctttgcaacacaacttcatcatgttcaaaaccttactgatagagtacatggaaccaagctgcatcaaggtgaagactggcatcacaacgagacagtcaaacactggacttataccatagatggtaaggctacaacatg

SEQ ID NO: 180690 - DNA, 247 bp, Glycine max
gttatatttcaggaatcttcatctttgagaaacataccagtggtgattatgtcatctgaaaatgtgcctttaaggattaacagatgtttggaggaaggagccgaagaatttttcttgaagcctgtgaggttgtcagatttgaacaagcttaaaccccacatgaagaaaaccaagttcaaagatcaaaagcaagaaacagtagaaaggtttgaagactcagaagttcaacagcaacagtcacaacaac

SEQ ID NO: 180691 - DNA, 245 bp, Glycine max
ccttcttgaactcaaggcgatggctctgggcagaggcagtgcagtggttctactactttgcttcttgctgcttcactctcagatggctcgtgctgccacctacacagttggcgattctgggggttggccctttaacactgttgcctggcccacaggacagctctttcgggctggtgacacacttgctttcaattatagccctgggcctcaccatgtggtggccgtgaacaaggctggatatgata

SEQ ID NO: 180692 - DNA, 247 bp, Glycine max
atcacattgaacaatggtgaaggctgtggccgttcttggcagcagtgagggtgtcactggaactattcacttcgttcaggagggaagtggtccaaccaccgtaactggatctcttgctggtcttaagcctggtctccatggtttccatgtccatgccttgggggacactaccaatggttgcctctcaactggatcacatttcaatcctaataacaaggagcatggtgcccctgaagatgagaatcgt

SEQ ID NO: 180693 - DNA, 250 bp, Glycine max
ctcactcacaaacacacactgaactaaaaaacatcaaaagagacatggctgagcaaaccttcaccatgatcaagcctgatggcgtccaaagaggccttattggcgagatcattagcagatttgagaagaaaggtttctacttgaacggtttgaaccttgttactgtggaccgtccttttgctgagaagcactatgctgatttgtctgccagcctttctttagtggtttggtggattacattatctctggc

SEQ ID NO: 180694 - DNA, 254 bp, Glycine max
cagactcactgctatcactcaactggttcatcatggaatgatattcgttccaatcggttacacattcggtgccggcatgtttgacatggagaaagtgaaaggtggaagtccatatggtgctggaacttacgccggtgatggctcaagacagccaagtgcgcttgagttacaacaagcattccaccaagggaagtacattgctggcatcacaaagaagctcaagcaagctgcataatgttgccttgccttcatat

SEQ ID NO: 180695 - DNA, 256 bp, Glycine max
cggtcggattcgtattgatggtgaacaagcaaggccaaactcgccttgctcaatattaggaatacttcactctcgaagagcgacgtgccctcgaagagcgaatcgttcgcaaatgcttccgccgcaacgaacagcagtgttcctttgttgagcatcggcaactaacaaaattgtttatcggcgctacgcctctttgtttttcctcgttggagtcgacgatgatgagaatgagctaggcattttggaatttatacat

SEQ ID NO: 180696 - DNA, 250 bp, Glycine max
cagtacccggtttcgacactcgcgtctccccctcagtttcggatctctcccttctctcaccaatttccagattccaaaccaggattgaggaagccagtgttcaccaaggtcgatcagcttcgtccagggaccagcgggcacactttaactgtgaaggtggtcgatgctaagatggtgatgcagaaaggtcgttctgatggtcctcaatcccgccaaatgcgaattgctgaatgtttggttggtgatgaga

SEQ ID NO: 180697 - DNA, 251 bp, Glycine max
cgaatggctcccaagggtttaacctttctggctgtgttaatatgcgtttcagcactgtcactgagtccttctgttgcgggggaagggcaaaataatggccttgttatgaacttctacaaggaatcatgccctcaggctgaagacatcatcacagaacaagtcaagcttctctacacgcgccacaagaacactgctttctcctggctcaggaacatcttccatgactgtgctgttcagagttgtgatgcttc

SEQ ID NO: 180698 - DNA, 245 bp, Glycine max
gcttgcacttcgaggtgatccaccgcatggtcaggacaaattcgtccaggtcgacggcggctttgcctgtgcacgcgacttggtgcaacatatcagagctaaatatggtgactactttggcattacagtcgctggttatccagaggcacatccggatgttatagaaagtgatgggttggctacatcagagggttatcaaaatgatcttgcttacttgaagagcaaggttgatgctggagcagatc

SEQ ID NO: 180699 - DNA, 248 bp, Glycine max
cgaatggctcccaagggtttaacctttctggctgtgttaatatgcgtttcagcactgtcactgagtgcttctgttgcgggggaagggcaaaataatggccttgttatgaacttctacaaggaatcatgccctcaggctgaagacatcatcacagaacaagtcaagcttctctacaagcgccacaagaacactgctttctcctggctcaggaacatcttccatgactgtgctgttcagagttgtgatgc

SEQ ID NO: 180700 - DNA, 252 bp, Glycine max
cttgctaccaacactgagcttaaccgagcttcgcaaagatgaatcgggaaaagttaatgaagatggccggttcggttagaactggaggaaagggtactgtgagaagaaagaagaaggctgtccacaagacaacaaccacagatgacaaaaggcttcagagcaccctgaagagaataggggtgaatgccatccctgctattgaagaggtcaatatctttacggatgacgtagttatccagtttctaaatccca

SEQ ID NO: 180701 - DNA, 239 bp, Glycine max
  unsure (1)..(239): unsure at all n locations
cacactgcataccttaggtcttccgaattcgaagttaatttgcaagatggctaagggaaagggtcagattcacaatgtggtgggttgtcctgtgggaccctgaggaggcaacaacatttaacgagctgaggaagcctgtgtggagacagagctccaaggcatgcatatgaggcatgacgtacggctcggagggcancagacaatatgtaacacatatctggaacctatgtatcagtgtc

SEQ ID NO: 180702 - DNA, 260 bp, Glycine max
tgccagtggtggcaaagatggggttattcttctgtgggatttggctgagggtaagcgtctttactctctcgatgctggctcaatcatccatgcactctgcttcagccccaacaggtactggctctgcgccgccaccgagcagagcatcaagatctgggatttggagagcaagagtatcgttgaggatttgaaggttgacctcaagactgaggctgatgccacctccggtggtggtaacgccaacaagaagaaggttattt

SEQ ID NO: 180703 - DNA, 286 bp, Glycine max
cgagccgattcggctcgaggcaagacagtgtatttatgtggaactagatcaaagtaccgatagcaaaggtgtattttggtacaacaataagttgtgatgattaatgtagccgaggcttctttgaactttcccttgtgactgtttagtatcatggttgcttattgggaataattttgttgaaccctgatgttggtagtaagtatctagacagttgcatagcggttttctcttacagactaagatatagcctctctgaacagtttgattattgcaccaggtttgcaat

SEQ ID NO: 180704 - DNA, 280 bp, Glycine max
taactatgccagtatcattttcatggccctcttcatctctatagctgcaactggcatcctggaaatgcagtggggaggtgtcggtatacacgactggtggaggaatgagcagttctgggtcattggtggtgcctcctcacatctctttgctctctttcagggtttgctcaaagttctggcaggagtcaacacaaacttcacagtcacatccaaagcagcagatgatggagagtttgctgaactctacatcttcaagtggacatccttgttgatccctccc

SEQ ID NO: 180705 - DNA, 276 bp, Glycine max
cgcatagataacaccgtactctctaatatcccatactatgaaaaacatggatatggggtggaggaatttaatgaaaccttatatgatgaatgggttaacaagggcgacgcaccggcattgccagagactcttaaaaattacaacaagctgttgtctcttggcttcaagattgtattcttgtcaggaagatatcttgacaaaatggccgtaacagaagcaaacctaaagaaggctggcttccacacatgggagcagtcaattctcaaggatccacat

SEQ ID NO: 180706 - DNA, 273 bp, Glycine max
tctagatcgcgagctgccgcccttttttttttccttagtatttatcttcaacttagctgttattctcgacttaaaatttgcagcattgttagctgtaattctgtttaataacttcatcatttgagcttagaaacaataagtacacccgtagggcgttactttctttttattattgtttgatgggtagagatcacatggcagcatttcgttacatgtgaaataatagaaaggttattgatgtatgtcttgtttattactgagtatagatccata

SEQ ID NO: 180707 - DNA, 270 bp, Glycine max
cagaggaggcactgtggcagaagtcctaggagtgtaaaacagagacgcaaaatgaagacgatcttgtcgtctgagaccatgaatattcccgacggcgtgagcatcaaggttcacgctaaggttatcgaggttgagggccctcgtggaaaactcgtgcgagacttccaccatctgaagttggacttccaacttattaccgacgatggcggtaaaaggaagctcaagattgattcttggtttggttctcgtaaaacctccgccgccatccgc

SEQ ID NO: 180708 - DNA, 271 bp, Glycine max
tacagccgcaccttgattcagagcagagcgaccttgaagagctatggctgtcggaaagaataagaggatttccaagggaaagaagggtggcaagaagaaagccgctgatccctttgccaagaaggactggtacgatatcaaggccccttccgtctttcaggtcaagaatgttggcaaaaccctcgtctctcgtacccagggaaccaagattgcttctgaaggactcaaacatagagtgtttgaggtctcattggctgatctccaaggagat

SEQ ID NO: 180709 - DNA, 268 bp, Glycine max
caagaatatcaaattggtctcttgtcttcctcctcatctctacactactccacatatatcccagcctgtcaagcccaagcccaagcccaagcccaagcccgttcataaaatcctcctgcagcagcacccagtacccagccctctgcgtctcatccctctccgtctacgcctccagcatccaacaggaccctcaccaactggttcagacagcactctccctctccctgaaccgcacccaagccaccaaaaccttcgtggctaactgcaa

SEQ ID NO: 180710 - DNA, 266 bp, Glycine max
gtaattgtcaagtgaaaggacaaaaagttgcatagtgatacacagatggtgggctcaggagcatcagataggagcaaagaagctgttgggatgatggcccttcatgatgccctcagaagagtctgtctcaactcagactggacttactctgtcttctggaccattcgtcctcgcccgagagtccgaggtggcaatggctgcaaggttggagacgatagcggcagcttgatgttgatgtgggaagatgggttttgccaaggaagggg

SEQ ID NO: 180711 - DNA, 264 bp, Glycine max
ttaataacaagctagctattagttcgattttgtagtaagtgaggtgccaatatggtgaagatagctcttggtactttggatgactcttttagcgctgcctctcttaaggcttatttcgcagagttccatgcaactctgattttcgtgttcgctggtgttggatcagccatcgcttacaacgagcttacaaaagatgcagccttggatccaacggggctggtggcagtagctgtggcacatgcatttgcactgtttgtaggtgtc

SEQ ID NO: 180712 - DNA, 280 bp, Glycine max
cttgctcgccagaagtacaccgatgagtctgaggctactatcaaccaacagatcaatgtggagtacaatgtttcgtacgtttatcatgcgatgtttgcctacttcgatagggacaatgttgcgctcaagggtcttgccaagtttttcaaggagtcaagcgaggaggaaagggagcatgctgagaaattgatggaatatcagaacaagcgaggtggaaaggtgaagttacaatctatagtgatgcctcttactgagtttgaccatgaggaaaagggagatg

SEQ ID NO: 180713 - DNA, 270 bp, Glycine max
gtttgttgatgagtataagctagtttatcgtgaggagaatatgaagttgtttgtcttctttgttgctgcagtagttttggtagcatggccatgccatggcgcaggctaccaaaggttccctctccgaatgaaaactggctatggtgagcgttcttcggaggtaaaatgcgcaagttttaggcttgctgtggaagcacacaacatccgagcctttaaaaccattcctgaagagtgcgttgaaccaacaaaggactacattaatggcgaaca

SEQ ID NO: 180714 - DNA, 269 bp, Glycine max
ttctgagataaccacttttctctttgattcatcaatagcaaccgcgaggaccgtgaaggatgtttcgcctcacgatttcgtgaaggcttacgccccccatctcaagcgttccggcaagatggagcttcctgagtggactgatattgtaaaaacagcaaaatttaaggaattggctccatatgatcctgactggtattatgttagggctgcctcaatggcaagacagatttatttgagaggcggtcttggtgttggggctttccagagga

SEQ ID NO: 180715 - DNA, 273 bp, Glycine max
cttttaaataccatgtttcttctttctttaaaataatatttactaattgatcactaccaaaaacagctggtcttcttagatgcggaaaaagttgccgactgagatggatgaactatctgagacctgatataaagagaggaaacataaccccagaagaagatgatcttataattagaatgcactcacttttaggaaatatctggtccctcatcgcgggaagattaccaggacgaacagataatgagattaagaactactggaatacccatctca

SEQ ID NO: 180716 - DNA, 222 bp, Glycine max
cgaacagatcacactatggccacctcaagcgccaaatcagtccatgatttcaccgttaaagatgccaagggaaatgatattaatcttggtgactacaaaggaaaggtccttatcattgtcaatgttgcctcacaatgtggcttgactaattcaaattacactgagctcagtcagttgtatgagaaatacaaacagaaaggtctggaaattctggcatttcca

SEQ ID NO: 180717 - DNA, 267 bp, Glycine max
gaaaagaggagtttgagaatggcaacgatcagcgcggttcaggtggagttcctggagtttccagcggtggttacttcaccagcctccggcaagacctatttcctcggcggcgcaggggagagaggattgacgattgaggggaagttcataaagttcacaggcataggagtatacttggaggataaggcggtgccatcactcgccgctaagtggaagggtaaaacttcagaggagttagttcacaccctccacttctacagggatatc

SEQ ID NO: 180718 - DNA, 269 bp, Glycine max
gcgactcacactggtcttcgcttctcattcatcatttctcacctaaccttctcttcctctcagtctcagatcagaaacctcagccagccatggcagcgttccagaagatcaaggtcgacaaccccatcgtcgagatggacggagatgaaatgactagggttatctggaagtcaatcaaggacaagctcattttgcccttcttggagttggacatcaagtattatgacttaggccttccttaccgtgatgagaccgatgataaagttaca

SEQ ID NO: 180719 - DNA, 282 bp, Glycine max
attttcaattcatggcttccctcatgagcaccatcctcaagcaaatgtcttgttcttcttcttcaaatgctgggacgatgttgttctccacaacaacagcagacattgttgattccccttcacttgctcagagaatcagagatttgcctaaggaccttcctggaaccaacatcaagaagtctgtttctcagctcattgggaggactccactggtttatcttaacaacatcaccgaacgatgtggagcttatgttgctgtcaagcaagagatgatgcaaccta

SEQ ID NO: 180720 - DNA, 276 bp, Glycine max
gagagcgtcctagtcgcaaccctaataagaagaaccacagcttcaagcgagtgacatccaccagccatgggtcgtatgcacagccgcggtaagggtatatcctcttctgctttgccctacaaaaggacaccccctagctggctcaagatctcttcgcaagatgtggaagaaaatatctgcaagtttgcgaagaagggtttgaccccgtctcagattggtgtcattcttcgagattctcacggtattgctcaggtcaacagcgtcactggcagcaaa

SEQ ID NO: 180721 - DNA, 272 bp, Glycine max
cattgcaaagaaaatacacattacattactaagtctttgttcatttgagtagtagtgatggctagcctcaaggttgcatgtgtggttgctgtgatgtgcatggttgtggtggccatgagtgctgcacccatggcacaggccgcaatcacgtgcgggcaggtcgccggcgacatgtctccgtgcttcagttatcttcgaagcggcggaaaaccgtcgcaggcctgctgcaacggagtgaagtccctcagcagcgcggcgaagaccaccgcgga

SEQ ID NO: 180722 - DNA, 190 bp, Glycine max
agtctgcaacgtcgctatgtcgaactacaccgccaaacccctcgaccagcacgccaacacgggcttcgaccctacagcgccagggttcacatcgtgtacaccgagagaccacagaacgaggaggctgaggcctaccacatcagaagcctcacttcagtccttggcagtgaggaggctgcaaaggaagctt

SEQ ID NO: 180723 - DNA, 268 bp, Glycine max
ctataagctagtttatcgtgaggagaatatgaagttgtttgtctactttgttgctgcagtagttttggtagcatggccatgccatggcgcaggctaccaaaggttccctctccgaatgaaaactggctatggtgagcgttcttcggaggtaaaatgcgcaagtcttaggcttgctgtggaagcacacaacatccgagcctttaaaaccattcctgaagagtgcgttgaaccaacaaaggactacattaatggcgaacaatttagatca

SEQ ID NO: 180724 - DNA, 263 bp, Glycine max
ctggccaacaatgccagtacccaactcgagtgggaagattacttcttccaccttgctttccctgaggacaagcgtgacctctccttctggccaaagaaacccgctgattatattgaggtcacaagcgagtatgcaaagcgactgagggggcttgcgaccaagatattggaggcactctctattggattggggttggaaggacggaggttggagaaggaagttggtgggatggaagagcttctacttcaattgaagatcaacta

SEQ ID NO: 180725 - DNA, 261 bp, Glycine max
gtctgggtatcaatcttgctacagcagatactgttataatatttgattctgattggaatcctcaaaatgacctgcaggcaatgagtagagctcatagaattggacaacaagaagttgttaacatttatagatttgtgacaagcaaaagtgttgaggaagatattttggaacgtgctaagaagaaaatggttctggaccacttggtgattcaaaagctaaatgcagagggtaggctggagaagaaagaagccaaaaaaggag

SEQ ID NO: 180726 - DNA, 262 bp, Glycine max
gctgtggaagcacacaacatctttggctttgagaccattcctgaagagtgcgttgaagcaacaaaggaatacatccatggcgaacaatatagatcagactccaaaacagttaaccaacaagcttacttttatgccagagacctcgaagtccatcccaaggacacatttgtgttcagtatagatggcaccgtactctctaatattccatactacaaaaaacatggatatggggtggagaaatttaactcgaccttgtatgatg

SEQ ID NO: 180727 - DNA, 240 bp, Glycine max
ctctcgcactcgtatcttgtagcaatggcgagcgctcccactccacgcgaagagttcgtgtacatggcgaagtggcggacaggccgagcgctacgaggagatggtggagttcatggagaaggtctccgcctccgccgagagcgaggagctgaccgtgctcgagcgtaacctcctctccgtcgcctacaagaacgtgatcggcgctcgccgcgcctcctggcgcatcatccctcaatcgag

SEQ ID NO: 180728 - DNA, 272 bp, Glycine max
caggaccaaacagcatccgctgcacgacggtaaccctccaacaacaacacttccgctgcgaaaaatgtctctggtggcgaacgaggatttccagcacattctgcgtgtgctgaacaccaacgtggatgggaagcagaagataatgttcgcaatgacctccatcaagggtattggaaggagattcgccaacatcgcttgcaagaaggctgatgttgacatgaacaaaagggctggtgagttgactgctgctgagtacgatagtgtgatgactg

SEQ ID NO: 180729 - DNA, 273 bp, Glycine max
ctcatctttcaatttcaatcaacggttatacccttttctatttgagcatcatcatgtccaccgcagcgcacccaaggccaagaaaacggcgtcgtccaagaagcccctctcccatcctaccttcgccgcgatgatagcggaggcgatagcgagtctgaaggagagaaccggttcgagccaatacgcgataaccaaattcatcgaaggcaagcacaaggagttgcctccaacctacaagaagcttgttctcgttcatctcaagaagtctgttgc

SEQ ID NO: 180730 - DNA, 270 bp, Glycine max
ggaggattagagtaagaattgctcgcaagataaatgatgatgaagatgccaaggaagagctgtactctcttgttaccgttgttgagatccctaaggacgagctcaaagggttaggcactaaggttattgatgacgaggattgatttatatctgtttgaaacccggagacatacatgtagctttttgtttctgcaaccgagtcttgtttttccagatttatcaaattactcctaattttgttgggttacttcgaattttgttgagacgtaa

SEQ ID NO: 180731 - DNA, 267 bp, Glycine max
tcgagataactagaaacagtgtgatgaaaatgaaggtccttgttttcttcgttgctacaattttgcgtagcatggcaatgccatgcgtacgatatgttccctctccgaatgaacactggctatggtgcccgtactccggaggtgaaatgcgcaagttggaggcttgctgtggaagcacacaacatctttggctttgagaccattcctgaacagtgcgttgaagcaacaaaggaatacatccatggcgaacaatatagatcagactcc

SEQ ID NO: 180732 - DNA, 267 bp, Glycine max
gcgcaaagctgaagtgtctgcttcttccgattccggcacgcccccatcaccatggtgaacgttccgaaaacaaagaagacatactgcaagagtaaggactgcaggaagcacaccctgcacaaggttacccaatacaagaagggtaaagatagcattgctgcccaaggaaaacgccgttacgatcgcaaacaatctggttatggcggacaaactaagcccgtcttccacaagaaggctaagaccaccaagaagattgttctgaggttg

SEQ ID NO: 180733 - DNA, 267 bp, Glycine max
ttctcttcaacctaacgcacaatctttatactcttcattccatggctttgcccaatcagcaaaccgtggattaccctagtttcaaactcgttatcgtcggtgatggtggcacaggaaagacaacctttgtgaaaaggcatctcaccggagaattcgagcagaaatatgagccaaccatcggtgtggaggttcacccattggattttttcacaaactgtggaaagattcgattctactgctgggatactgctggacaggagaagtttt

SEQ ID NO: 180734 - DNA, 259 bp, Glycine max
acgaagatgtcgaagagaggacgcggtggttcggcggggaacaagttccggatgtcgctgggtctgccggtggcggcgacggtgaactgcgccgacaatacgggggcgaagaacctctacatcatatcggtgaaagggatcaaagggcgtttgaaccgtctcccctcggcttgcgttggcgacatggtgatggccaccgtgaagaaggggaaacccgatctgaggaagaaggttttgccagctgtcattgttcgccagc

SEQ ID NO: 180735 - DNA, 259 bp, Glycine max
cgcgagggattgcgctgcgtctcttcctcttctctttacattcatccctcattcataatcttccaatccaacaacctcagcctcacactcacacatacacacatctgaacgcgtatcgtccctcccatggcttcaaagcgcatcctcaaggagctcaaggacttgcagaaagacccaccaacttcttgcagcgctggtccagtagctgaggacatgttccattggcaagcaacgattatgggtcctgctgatagtcctt

SEQ ID NO: 180736 - DNA, 261 bp, Glycine max
tctattttaccaaacaattcaaactctattattcagtaaaaaagaaaggaaacctccgcaatcaatgaagtggccaagttcttcaatagtaaattgaaagaagttgtgagttcaactcagaaaagaacttcctttggctgccatcacttatgttgatgtttactcggtgaagtactctctcattagtcaaccaaagaagcatggttttgaggagccattaatagcatgttgtgggcatcgtgggaagtacaactacaattt

SEQ ID NO: 180737 - DNA, 263 bp, Glycine max
tgttgatcgagataactagaaacagtgtgatgaaaatgaaggtccttgttttcttcgttgctacaatcttggtagcatggcaatgccatgcgtacgatatgttccctctccgaatgaacactggctatggtgcccgtactccggaggtgaaatgcgcaagttggaggcttgctgtggaagcacacaacatcttcggctttgagaccattcctgaagagtgcgttgaagcaacaaaggaatacatccatggcgaacaatataga

SEQ ID NO: 180738 - DNA, 266 bp, Glycine max
aactagaaacagtgtgatgaaaatgaaggtcgttgttttcttcgttgctagaattttcgtagcatggcaatgccatgcgtacgatatgttccctctccgaatgaacactggctatggtgcccgtactacggacgtgaaatgcgcaagttggaggcttgctgtggaagcacacaacatctttggctttgagaccattcgtgaagagaccgttgaagcaacaaaggaatacatccatggcgaacaatatagatcagactccaaaacag

SEQ ID NO: 180739 - DNA, 264 bp, Glycine max
ggtgtcatctcttcctgtttggattgtttcctttatggtggtaatctatacatctttgaatatggggtttcacctgcattttttctagccaaagctcgaggaggcacctgcactcttgctccttctgatccaactgaagatgtccttcatcgttcttcatttcttcttgaaaatgggtttggtgtctacaacattttcaagaataactgtgaagactttgctcatttactgcaaaacaggtcttcttgtatccacaagtgtcag

SEQ ID NO: 180740 - DNA, 260 bp, Glycine max
ctcggggcttttagtctttggggtggtggctttctctaccaatggggcgttattgattattctggcggctatgtcatacacctttcttctggaatcgctggcttcactgctgcttactgggttggaccaaggttgaagagtgatagggagaggttcccaccaaacaatgtgcttctcatgcttgctggtgctgggttgttgtggatggggtggtcagggttcaacggtggagcaccatatgctgcaaacattgcatcttc

SEQ ID NO: 180741 - DNA, 263 bp, Glycine max
ttggactcttgttgacaacacacttgaaggcaaacaaacagctgtggacagaggacttccatggtggggtcctttccagaataggaagggagatgttagaaatgatgagttttaccgtcttcctctccggataaatgagtacatgcccaccagatttctctaaagtactctaatatatgctacctgtacttaaccccttctgcgaacttaattaaattctcatgtacaatgaaatgaccctgtaaaatatggatagacaaatt

SEQ ID NO: 180742 - DNA, 257 bp, Glycine max
atagactcttccttttctcttctctgtctaaggggtgccctgagatcacattgaacaatggtgaaggctgtggccgttcttggcagcagtgagggtgtcactggaactattcacttcgttcaggagggaagtggtccaaccaccgtaactggatctcttgctggtcttaagcctggtctccatggtttccatgtccatgccttgggggacactaccaatggttgcctctcaactggatcacatttcactctaataac

SEQ ID NO: 180743 - DNA, 254 bp, Glycine max
caaaggaaatgattgatctttgaaaatgcagggaggaaagaaagctggagagtccatcaaggaaacagctgcaaacattggcgcttctgccaaggctggcatggagaaaaccaaggccactgtccaggagaaggcagaaagaatgacggcacgtgatccgatgcaaaaggagttggcaacccagaagaaagaggcaaagatgagccaggcagagctggacaagcaggcggcgcgtcagcataacacggcggcga

SEQ ID NO: 180744 - DNA, 257 bp, Glycine max
gtgcggcgatcctagcactctcttctgcagctttcaccgacagcttcattcaccatggctgagcaaaccgagaaggcttttttgaaacaaccaaaagtgtttctcagctcgaagaaaactgggaagggaaagacacccggaaagggtgggaaccgcttttggaaatccattgggcttggatttaagactcccagggaagccatcgaaggaacctacattgacaagaagtgccccttcactggcaatgtttccatccg

SEQ ID NO: 180745 - DNA, 257 bp, Glycine max
cctgttgttgctgctcatcctccgtaacctccgagctctgcaccgaagaacgaagccatggggaagacacatggaatgggatctgctcgcaagctcaagtcccaccgcaggaggcaaaggtgggctgacaagtcatacaagaaatcacatcttggaaatgaatggaagaaaccttttgctggttcatcccatgccaagggaattgtccttgaaaagataggtattgaggctaagcagcccaactctgccattcgtaa

SEQ ID NO: 180746 - DNA, 257 bp, Glycine max
gataactagaaacagtgtgatgaaaatgaaggtccttgttttcttcgttgctacaattttggtagcatggcaatgccatgcgtacgatatgttccctctccgaatgaacactggctatggtgcccgtactccggaggtgaaatgcgcaagttggaggcttgctgtggaagcacaccacatctttggctttgagaccattcctgaagagtgcgttgaagcaacaaaggaatacatccatggcgaacaatatagatcag

SEQ ID NO: 180747 - DNA, 261 bp, Glycine max
ctccaaaatgcatcgtggaattggtttcatcacttttgcaagtgcagattctgtggagaatttgatgtcagaaacccatgaactgggaggttctgctgtggtggttgatcgagctactcctaaggatgatgactttaagccaatgggcagaatgccgccgccgccaccgccaccgccacaaggaggaggatatggtgcatacaatgcttatatctcagcagccactagatatgcagcacttggtgctcctactttgtatga

SEQ ID NO: 180748 - DNA, 261 bp, Glycine max
cgcacaagtcgtgggttggccaccagttaggtcatttagaaagaacatagttcaaaggaacaagaatgaagaggaagcagctttcgtgaaggtgagcatggatggtgcaccgtatctacgaaaggtggacataaagttgtacaagagctaccaggagctgtcagatgcgctggctaagatgttcagttccttcacgattgaaaaatgtgggtcccaagggatgaaggactttatgaatgagaccagattgatagacctttt

SEQ ID NO: 180749 - DNA, 275 bp, Glycine max
ctcgagccgtcttcttccacaaaaccatggctgaaaaggtgaccatcatgaaactcaaggttgaccttgagtgtgagaaatgctacaagaaggttaagaaacttctcggcaagtaccctcagaaattcgggaccagaagttcgatgagaaggaaaacattgtgttcatcacactggtgtgttgtagccccgagaagataagagacaagctttgctacaaaggtggaggctctatcaagagcattgagatactggaactgcccaagcccaaggccg

SEQ ID NO: 180750 - DNA, 266 bp, Glycine max
  unsure (1)..(266): unsure at all n locations
ttncgagccggcggttacatttgggctgtttttggcgaggaagttgtcgttgcccagggcgattttctacattgtaatgcaatgcttgggtgctatttgtggcgctggcgtggtgaagggtttcgaggggaaaacaaaatacggtacgttgaatggtggtgccaactttgttgcccctggttacaccaagggtgatggtcttggtgctgagattgttggcactttcgtccttgtttacaccgttttctgccgccacgatgccaaac

SEQ ID NO: 180751 - DNA, 139 bp, Glycine max
gaggaggtaaagaagattgttactactttgaatgaggctaaagtccctggagaagatgtcgtagaagttgttgtgagccctccttttgtgttccttcctgttgtaaaaagtttgctgcgccctgatttccatgtttcgg

SEQ ID NO: 180752 - DNA, 256 bp, Glycine max
cttctgaatccaccgccaccgcagcgtggacggaatcagagtgcagcacatagcagcagcagcagcagcagcagcagcagtcattgaagtgctgctctagtttgaggcacaatgagattggagaaatgctggttttgctcttcaaccgtataccctggacatggaatccagtttgttcgtaatgatgcaaagatttttcggttttgtagatcaaaatgccacaagaactttaaaatgaagagaatcctcgtaaggt

SEQ ID NO: 180753 - DNA, 137 bp, Glycine max
cgttgttgttctaaagcactcatccacacattctccgtcgccacgacaacaatggctccaaagaaaggtgcgaaaggtggagttgtagcagcaaagaagaaggttcaggagaaggtaacgaaccctttgttcgagaa

SEQ ID NO: 180754 - DNA, 253 bp, Glycine max
actgatcataaatcacatagctagttgtttaaagtgagataaaaagaaagaagaaaatggcaaactttccagttgttgacatggggaaacttaacaccgaagagagagcagcagccatggagattataaaagatgcctgtgagaactggggtttctttgagttggtgaaccatgggatatccattgagttgatggacactgtggagaggctcacaaaagagcactacaagaagactatggagcaaaggttcaa

SEQ ID NO: 180755 - DNA, 273 bp, Glycine max
ggagctccacccgaagtggtggcgcgtatggctgcggctaagcaagagtttgacgcacggcaaagatcttcagttggttcaagggaaacttcaaaagaccctgaacttgaccaattcatggaagcatactatgacatgcttgtgaagtatagagaggaattaacaaggcctattcaagaggctatggatttcatgcgacggatagaaactcagctaaatatgctatgcgatggaaccgtgcggatcttctctgatgagaaatgtgaaggtgcc

SEQ ID NO: 180756 - DNA, 275 bp, Glycine max
ctcctttctctgtctccatcgtttcgcattgcacaagcactctctctttcccttaccctttttcaggtttcaacgctccaactatccatggcaaaccgctggctcagacccgaggtgtatccactgttcgctgcggttggtgctgctgttgggatctgtggattccaactggttcgtaatatctgcatcaaccctgaagtcagggtgaacaaggagggaaggaaggcaggagttttggagaactttgctgagggagagaagtatgccgagcactt

SEQ ID NO: 180757 - DNA, 277 bp, Glycine max
caaggagggaatcccccagaccagcagaggctgatcttcgccgggaagcagctcgaggacggacgcacccttgctgactacaacatccagaaggagtcaactctccacttggtgttgcgtcttcgtggtggtatgcagattttcgtgaagactcttacgggtaagactattaccctcgaggtggagagctctgacaccattgacaatgtgaaggccaagattcaggacaaggaaggcatcccaccggaccagcagaggctgatttttgctggcaagc

SEQ ID NO: 180758 - DNA, 281 bp, Glycine max
caaaaaccaagtactacaagggaagaagaacttagctacaagctaaggaaggatcaaagagaatggctcaagcaatggcatcaatgactagcttacgtggttcctctcaggctgtgttggaaggtagccttggctccacacgcttgaatgtggggagtggaagcagggtggcctcagtcacacgtgcagggttcacagttagagcacagcaacaacaagtgaatggtggtgaggtacaaagtagccgtagggcagtgctttcacttgttgctgctggtttg

SEQ ID NO: 180759 - DNA, 282 bp, Glycine max
tctcgagccgctcgagccgattcggctcgagaagaaggcattagaagctttcaaaaggtttggcagcaaacaccctggaattgaaggaaaaatcaatgcacggaacagtgatccaagtctgagaaaccggactgggccagttcagctgccatacactttgctccatcgttcaagtgaggaagggttgactttcaaaggaattcccaacagtatctctatctaattaaaaagagtttgtggtttccttatctatgttgtacttctgaataacatagactttat

SEQ ID NO: 180760 - DNA, 277 bp, Glycine max
gtcttcataaacgcctttcttctccgtttccgtttcctcgttcgaattcgctttttgatctgcgaaaatgagagagtgcatctcgatccacattggtcaggctggtatccaggtcggaaatgcttgctgggagctctactgcctcgagcacggcatcgggcccgatgggcaaatgccaagtgacaagacagttggcggtggtgatgatgctttcaatactttcttcagcgagactggtgctggaaagcacgtgccacgtgcagtgtttgtagatctt

SEQ ID NO: 180761 - DNA, 279 bp, Glycine max
ggcgttctatatattattgaattgacaatgaggcctgctcttgctttgcttcctcttctatttgctttcttgttagctgccactacggaatcaagaaaagatccacgggaatattggaaaatgatcatgaaagatcaggaaatgccagaaggacttcaaggtcttgtttcatttcaatctgaaaataaccctaagactcaagagcagcttggtaaaggttccaaaaaccattgtgaagagtctctagttacaaatacacaagttaacagtgacttcgaa

SEQ ID NO: 180762 - DNA, 287 bp, Glycine max
cggttcgagctgaaagtggaaaatgcaaccctatgaaagcagttcacggatgctagccaacattttcgtgaggcagatacgaataaccgagtgctgaaatcagatgtagaagctttgagagccaaggtgaagttagcagaggatatggtgactaggagctcttttactacgttaaacaatcagcttcttcagacacaacatcatcaaatgagcacaccccagcaactgaacacgactaatctgcggcgcatggcgcatgtttcgccaacaatcaccgttcacggaaa

SEQ ID NO: 180763 - DNA, 277 bp, Glycine max
agcactcatcattcttcgtttgtctaagatccgccttctctgaattgtaaaactgtcgctcggagaaactgcttgttcatacgcagctctcatccttcatgaagatggaatcagtgtaactgccgacaagatcagcaccttgttggaaactgcaaaggttcaagtagatacctattggccaaccttatttgctaaacttgctgagaagaaaaatcttggcgatttgatagccaatgcagcaggcggtggtgcaccagttgctgttgcagctgcccct

SEQ ID NO: 180764 - DNA, 278 bp, Glycine max
ctcacttctcaaattgaatcgaacgaattcacaaaccctagttttcgaggatgggtcagatccagtactccgagaagtacttcgatgacacttacgaatatagacatgtggttcttcctcctgaagtcgcaaaactgcttcccaagaatcgtcttctctccgaaaatgagtggcgggcaattggggttcagcagagccgtggctgggttcattatgcaattcatcgccctgagccacacataatgctcttcaggaggcctttgaattatcagcagcag

SEQ ID NO: 180765 - DNA, 266 bp, Glycine max
ggtgaatgcgtagaaaaggaaaataaagaaattagcgcgaaaaatgttgggtgtgttcagcagctccatagtgtcgccgccggaggagctcgttgccgccggcagccgtacaccgtcgccgaagatgacggcggcggcgctgcggaagtggttcgaggacaagaacccctccgcagtgtcggtggaggtcggagagcatgtccagctcgcttatacccaccagaacgagtcgccgtaccagcccagatcctttgctgtgaaggatg

SEQ ID NO: 180766 - DNA, 280 bp, Glycine max
gagtaaattaactatgaagcctaccctactattatccctttccttcctgcctctctttgctttcctggctctttcagaagatgttgaacaagttgtggacataagtggcaaccccattttcccaggtggcacatattacattatgccatcaacttggggcgctgccggtggtggattgaaactaggccggacaggaaactcaaactgcccagttactgttttgcaagattactcagaaatcttccgtggcacaccagtcaaattcagcatacctgggata

SEQ ID NO: 180767 - DNA, 279 bp, Glycine max
aatgtcactccaaatcaaccaactccaaaggatcctttatggctatccaatagtgacctaatcgggttccaaggttatgtacccactctttacgtttacaaagcaaaacccaattatagcaacaacataattgagaggttgagaaactctcttagcaagcttttggtgtactactatcctgttgctggcagattgagcttgacaaaaagtggtcgaatggaagtggattgtaacgctaagggagtgacattgattgaagcagaaaccacaaacacattt

SEQ ID NO: 180768 - DNA, 279 bp, Glycine max
tagaaacagtgtgatgaaaatgaaggtccttgtcttcttcgttgctacaattttcgtagcatggcaatgccatgcgtacgatatgttccctctccgaatgaacactggctatggtgcccgtactccggaggtgaaatgcgcaagttggaggcttgctgtggcagcacacaacatctttggctttgagaccattcctgaagagtgcgttgaagcaacaaaggaatacatccatggcgaacaatatagatcagactccaaaacagttaaccaacaagctta

SEQ ID NO: 180769 - DNA, 276 bp, Glycine max
ctcgttcttcttcttttgttgttctgtgtttgtgtttgttttttctctcacctgaaaatgtcttgctgcggtggtaactgtggttgcggaagctcctgcaagtgcggcaacggctgcggaggctgcaagatgtacccagacttgagctacactgagtcaaccaccaccgagaccttggtcatgggagtggcacctgttaaggctcaatttgagggtgctgaaatgggtgtgcccgctgagaacgatggctgcaaatgtggaccaaactgctcctgc

SEQ ID NO: 180770 - DNA, 277 bp, Glycine max
tcggctcgagcatctctgatctcactcaccattcaccaacctgcttctctgttctcttctttcccttcccaagaagaagaagaagaagatgccttcttcagaatcatcaacaggcttctccgaaaccatttgtgtgaccggcgctggtggcttcatcgcctcttggatggtcaaactcctcttggagaaaggctacactgtccgaggaaccctcagaaacccagatgatcccaagaacgggcacttaaaagagtttgaaggagcttcccagagacta

SEQ ID NO: 180771 - DNA, 273 bp, Glycine max
tgacaatgcaatgctcgtgtcgttttggtgtcactgagtcagtctgagtacgaagaggaagccatgggcaacacatcctccatgctcacccaatacgacatcgaagaggttcagcaacattgcaaaaacgcttttacgcaacaggagatagtttctctgtaccaacgcttctgtcagctggatcgcaacaactgcggtttcatcccttccgatgaattcctctccattcccgaattcgccgtcaatcctctctctcagagtttgttgaggatg

SEQ ID NO: 180772 - DNA, 273 bp, Glycine max
cataaacccggcggtgacatttgggctgtttttggcgaggaagttgtcgttgcccagggcgattttctacattgtaatgcaatgcttgggtgctatttgtggcgctggcgtggtgaagggtttcgaggggaaaacaaaatacggtacgttgaatggtggtgccaactttgttgcccctggttacaccaagggtgatggtcttcgtgctgagattgttggcactttcgtccttgtttacaccgttttctccgccaccgatgccaaacgtaacgc

SEQ ID NO: 180773 - DNA, 279 bp, Glycine max
ctctattctttgaaaccaaagttcaaactctgtcttccctgggttctatttcgaaatcaacgacgatgagttccacagaggcagcagccacagagaagaaaggtggaagagggaaaccgaagacttcaaagtccgtttcccgttcctccaaagctggccttcagtttcccgtcggccgtgtcgctcgctacctcaaggccggtcgctacgcccagcgcgttggctccggttcccctgtttatctctccgcggttctcgaatacctcgctgccgaggttt

SEQ ID NO: 180774 - DNA, 276 bp, Glycine max
gaaggaggagggccgcaagaccgacgaccacgtctccctcgtcaagcactacagatccaaggtcgagaacgagctcactcaggtctgcgccacatcctcaggctcctcgactccaacctcgtaccctccgcctccgccagcgagtccaaggtcttctacttgaagatgaagggcgattaccaccgctatctcgccgagtttaaggttggggacgaaagataaaccgctactgaggataccatgttgtcttacaaggctgcccaggatattgcttct

SEQ ID NO: 180775 - DNA, 276 bp, Glycine max
aaaacccccaactccaacctctgttcatcgtctaccgcgctttcttttcaaccagaactatgattaagctttttaaagtaaaggaaaagcagagagaacttgcagaaaatgcaagtggcggaccacctgttaagaagcaaagtgctggagagttgcgtcttcacaaagatataagtgagctgaatctaccaaaatcatgtaccatgcaattccccaatggcaaagatgatctgatgaactttgaagtttcaattcgacctgatgatggatattact

SEQ ID NO: 180776 - DNA, 275 bp, Glycine max
tgagaaataaggggaaaaaatggtgtcgctgaaactgcagaagcggatggccgcaagcgtgctcaagtgtggcagaggaaaggtgtggcttgaccccaatgaagtcaacgaaatctccatggccaattctcggcaaaacatcaggaagttggttaaggatgggtttatcatcaggaagccaaccaagattcactcacgctcgcgtgctcgtaggatgaaggaggcaaagaagaagggccggcactctggttatggtaagagacagggtacaaggg

SEQ ID NO: 180777 - DNA, 275 bp, Glycine max
ggcttatggtggatacctaggcacccagagacgaggaagggcgtagtaagcgacgaaatgcttcggggagttgaaaataagcgtagatccggggattcccgatataggtcaacctttcgaactgctgctgaatccacgggcaggcaagagacaacctggtgaactgaaacatcttagtagccagaggaaaagaaagcaaaagcgattcccgtagtagcggcgagcgaaatgggagcagcctaaaccgtgaaaacggggttgtgggagagctgaaa

SEQ ID NO: 180778 - DNA, 277 bp, Glycine max
tgactccttgatgaagctctttgagacaacaataaactcctcaattgcatggaaggaattcaaatatacgtgattggggattcatcaaaacttcctgagtctctaaggagtactatagctaatgcagaaaagagtacaaaacataactcgagactccaacttattgtggcaatgaattacggtgggaaatacgatgttgttcaagcatgtaaaagtgtagcaaaaaaagtcaaagatggtcttcttcatttggacaacatcaatgaaaaaattattg

SEQ ID NO: 180779 - DNA, 272 bp, Glycine max
aaattagttcattctctttgcgcagttccctacctctcctttcaagatgcagatcttcgtcaagaccctcaccggaaagaccatcacccttgaggtggaaagctctgacaccatcgacaacgtcaaggccaagatccaggacaaggaaggaattcccccggatcagcaacgtctcatcttcgccggaaagcagctcgaggacggccgtaccctcgccgactacaacatccagaaggagtcaacccttcaccttgtccttcgtctccgtggtg

SEQ ID NO: 180780 - DNA, 276 bp, Glycine max
ggaaatagaatacccagatagccaaattacagagaagcatagagctactttacttgaatttgggaagactcttgatgaaaaaaccacaactgccatggcccttactgttggtattccagctgctgttggagctttgcttttattgacaaacaaaattcagacaagaggagtcttaaggcctatcgaacctgaagtatacaatccagcactggatattatagaagcttatgggatcaagttgatagagaagaccgagtaatttgcatctatgaattg

SEQ ID NO: 180781 - DNA, 276 bp, Glycine max
gccgtggttgcccagtacaatgccagccagcttattactcagcgagaggctgttagtcgggaaatccggaagattttgactgaaagggctgctaacttcaatattgcccttgatgatgtgtcaattactagtctgacttttggcaaggagtttactgctgcaattgaagcaaagcaggtagctgcacaagaagctgagagggctaaatttgttgtagaaaaagctgagcaagacaagagaagtgctgtaatcagagcacagggagaagcaaaaagt

SEQ ID NO: 180782 - DNA, 273 bp, Glycine max
ggaaggtacgctcagcgtgtcggtaccggtgctcccgtatacttggctgcagttctcgaatacctagctgccgaggtgcttgagttggctgggaatgccgcacgtgacaacaagaagaacaggattattccaagacacgtgcttttggcagtgaggaacgatgaggagttggggaaattgcttgctggagtgacaattgcacatggtggcgtgctatccaaacattaaccctgttttgttgcctaagaagaccgagagggcttccaaggaacc

SEQ ID NO: 180783 - DNA, 274 bp, Glycine max
aatccacagatcaacatttttctttggtgggtagcagtgaggataaaaaatggctatggccacagctgtcgtgtgtcctcagaacatcaccggagccatcgtgagctcacctagcaagaccaagaagagagtggtacacgtgagaggcataaattcatttgggggactgaaggctagcaatggtgttgtctctttggggattcctatgagcactgagaagtgctttgctaaggttgtgagctcagtgaaagcagctacatcaaatgggaaagga

SEQ ID NO: 180784 - DNA, 276 bp, Glycine max
agcaaacctaaagaaggctggcttccacacatgggagcagtcaattctcaaggatccacatcttatcactccaaatgcactttcatacaaatcagcaatgagagagaatctgttgaggcagggatacagaattgttggaatcattggagaccaatggagcgatctgcttggagaccacagaggcgaaagcaggacctttaagcttcctaatcccatgtactacattgagtagtaccttcacctctctcaacaatctagctagagtttgctcctatc

SEQ ID NO: 180785 - DNA, 272 bp, Glycine max
gagaatctgttgaggcagggatacagaattgttggaatcattggagaccaatggagcgatctgcttggagaccacagaggcgaaagcaggacctttaagcttcctaatcccatgtactacattgagtagtaccttcacctctctcaacaatctagctagagtttgctcctatctatatgtaataaggtatgctgatatgcactattcacataggagcattagctatgtttgttaatgtcactttatgttatgtgggtaagtcacctaagaca

SEQ ID NO: 180786 - DNA, 278 bp, Glycine max
gacagttacacaaagcaagaatcccaggcgaggagaaagatggaggggaaggagcaggatgtgtcgttgggagcgaacaagttccccgacagacagacgattgggacggcggcgcagagccaagacgacggcaaggactaccaggagccggcgccggcgccgctggttgacccgacggagtttacgtcatggtcgttttacagagcagggatagcagagtttgtggccacttttctgtttctctacatcaccgtcttaaccgttatgggagtcgccgg

SEQ ID NO: 180787 - DNA, 262 bp, Glycine max
  unsure (1)..(262): unsure at all n locations
gttccacacaagcancttccacatacaaattcaagtatcgaagaagaagatggctttaggtgttcctgcccttccgttaccatacgtggctcacgttctggcagttgttgccagcgtcttggtcgtggtctgggtcgtcaatttcaggggtggcttggcttgggattctgataacaagtccctcatcttcaacattcatccagttcttattgttattggcttactagttcatgggggtgaagctattataagttacaaagct

SEQ ID NO: 180788 - DNA, 272 bp, Glycine max
tggaaacgaaggacgacagtgctgaaaacgaagaagcttggtcttctcatgaagacgaaattcttttgaactatgttcaagtccgtggagaaggaaattggagaaaccttcctaaaagagctggcttgaaacgatgtggtgagagttgcaaacaacgatggttgaactatcttaagccaaccatatctagaggaaacatttctttagatgaacatgaactcataatcagactgcataagctcttggggaatagatggtctatcattgctgga

SEQ ID NO: 180789 - DNA, 273 bp, Glycine max
caacgagtggggatacagctcacgtgtcattgatcttcttgtattcgttgccaagaagtctctttaaggtgttacttcaaagtagcttgtcttcacattattaccgtatgtttatgtttagctgcgatttagtgtcttgctcgagcaaaaaatgagaggtctgaataaatcggtttctgaaaccagtggtgttacttgttggaggagcattagctcttttttggacttttgatgttttctcttgtggagggggatcgagtttttggattttta

SEQ ID NO: 180790 - DNA, 274 bp, Glycine max
caaacacgctgttcctacaatcattccaaatgtgcccttccggtcgcaccctcctcccttcctccgtctccgatttccgaccggcattcgacgtcctcgatgccgaccgcgacggcaaaatcagccgcgacgacctccgcgccttctacgccggagtcggcggcggaggagatgacgtgatcggggcaatgatgacagtggctgacaccaataaggacgggttcgtggagtacgaggagttcgagcgcgtggtctcggcggagagaaagcccgt

SEQ ID NO: 180791 - DNA, 274 bp, Glycine max
aagatgtcgaagcgtggtcgtggtggttcggcggggaacaagttccgcatgtcgctgggtcttccagtggcggcgacggtgaactgcgccgacaacacgggggcgaagaacctctacatcatttcggtgaaagggatcaaaggccgtttgaaccgtcttccctcggcctgcgttggcgacatggtgatggccaccgtgaagaagggaaaacccgatctgaggaagaaggtcttgccagctgtcatcgttcgccagcgcaagccatggcgccgaa

SEQ ID NO: 180792 - DNA, 272 bp, Glycine max
gtcatttctgatgataattatggtggtgttattgtggaacttgatcagcatatggattctgcaacatttgtctcgatccttagagcttcagtttctcattggaagctgctgggcaagaagggtgtttggataaaattacctattcatttagtcaatctggttgaagctttagtgaaggagggtttttggtatcatcatgcagaaccaaaatatttaatgcttgtatattggattcctgaaagtccaagcactattcctgcaaatgccacaca

SEQ ID NO: 180793 - DNA, 274 bp, Glycine max
gttatttttctttttttctcatttgcactgcaaattgcaatggcttccaacaaggttattgccaccatcatggtgctttctctccttgcctactcaacatcattcaccaatgcatgtcgcacatgccacccaaaacctaccccttctcctcctcctccatcaggaaagtgccctaaggacacattgaagctaggggtgtgtgcagatattctaggtcttgttactgttgttgttggctcccctgtctccagcaagtgttgtgcattgcttgaag

SEQ ID NO: 180794 - DNA, 271 bp, Glycine max
ctaacgcgtgcagagcagagagagacgcagccatggggcgaagacccccgaggtgttataggcaaattaagaacaaaccataccccaagtcacggttttgccgtggtgttcctgatcccaagatcaggatttacgatgttggtatgaagaagaagggtgttgatgagtttcctttctgtgtccatctggttagttgggagaaggaaaacgtttctagtgaggccctggaagctgctcgtattgcttgcaacaagtacatggccaaatttgc

SEQ ID NO: 180795 - DNA, 275 bp, Glycine max
actgatcataaatcacatagctagttgtttaaagtgagagacaaagaaagaagaaaatggcaaactttccagttgttgacatggggaaacttaacaccgaagagagagcagcagccatggagattataaaagatgcctgtgagaactggggtttctttgagttggtgaaccatgggatatccattgagttgatggacactgtggagaggctcacaaaagagcactacaagaagactatggagcacaggttcaaagaaatggtggccagcaaaggg

SEQ ID NO: 180796 - DNA, 273 bp, Glycine max
caaaaaatgggttcttcttcttctatgtggacggtgtgtgtgattttggcatcactggcctctgcagcactctgtgccaacccacgcaggccagtggatgtacaatttggccgaaactacgtgcccacatgggcctttgatcacatcaaatatttcaatggtggttctgacattcagcttcatcttgacaagtacactggtactggcttccagtccaaacggtcttacttgtttggtcacttcagcatgtacataaagatggttcctggagat

SEQ ID NO: 180797 - DNA, 262 bp, Glycine max
ctaacgcgtgcatagcagagtcagagacagagacgcagccatggccgcggagacctgcgaggtgttatacgcaaattaagaacaagccataccccaagtcacgtttctgccgtggtgttcctgatcccaagatcaggattcatgatgttggtatgaagaagaagggtgttgatgagtttccgctctgtgtccatctggttacttcggagaacgagaatgtttcaagtgaggccctggaagctgctcgcattgcttgctacaa

SEQ ID NO: 180798 - DNA, 272 bp, Glycine max
caaagagaatcctcactcattttcttcgtagccaaacactctgatattctcagttatgtcgtggcaaccgtatgtggatgatcacctactgtgtgaaatcgatggttaccatctcactcacgccgctatcatcggccaagacggaagcgtttgggctcagagcaccaacttccctcagttcaaacctgatgaaataactgccatcaataatgactttaatgagcctggctcacttgctccaactggattgtatatcggtggcaccaaataca

SEQ ID NO: 180799 - DNA, 274 bp, Glycine max
tggcacctgcaacacagagtctctctctcctcctcctgttctcactctgcatcgccgcaaccgttagatcgagcgacaggatctacgattgtgtgtacacggcctacgttagaaccggttcggtgttgaaggggggaacggactcgaagatcgggctgaagctgtacgacaagtacggctactacatctacattaaaaacatcgaagcatggggcggcttgatgggcaagggctacagctacttcgagcgcggcaacctcgacatcttcagcgg

SEQ ID NO: 180800 - DNA, 275 bp, Glycine max
aacatggctagggttagtgctttgtttcactctttgctcttgatttcttcccttgtattggcttctcaaatccatgtttcctctgggaaactagtccctggactatcatggaattactatttgttgacatgtcccaagcttgagaggattataaggaagcatcttgaggatgtcttcgagaaggacagtggagtagctcctggcatacttcgactcttcttccatgactgctttcctaatggatgccatgcgtctatattgttgaatggagacgg

SEQ ID NO: 180801 - DNA, 272 bp, Glycine max
agagtttgttgtgagctataagctagtttatcgtgaggagaatatgaagttgtttgttttctttgttgctgcagtagttttcgtagcatggccatgccatggcgcaggctaccaaaggttccctctccgaatgaaaactggctatggtgagcgttcttcggaggtaaaatgcgcaagttttaggcttgctgtggaagcacacaacatccgagcctttaaaaccattcctgaagagtgcgttgaaccaacaaaggactacattaatggcgaac

SEQ ID NO: 180802 - DNA, 273 bp, Glycine max
gatctgctgaaacacgccacactcttcttaccatgggcctcctcgatcacttgtgggatgacaccgtcgccggtcctcgcccggagaacggccttggcaagctccgaaagcaccacaccttcgctttccgatctgcctccggcaagggtacgcatgcgcatgcccttgctgaacttaatttcccaaattcattttagttattctaaaaataatgataataataataacaagaaccgcagcaagaattagttcttatgatctcacgcgatcata

SEQ ID NO: 180803 - DNA, 278 bp, Glycine max
aagaaaatggcggtgcctctactctcgaagaagatcgtgaagaagagggtgaagaagttcaagaggcctcagagtgacaggaaaatttctgtcaagacaaactggcgcagaccaaagggtatcgattcccgtgttaggagaaagttcaagggatgcactttgatgccaaacattggttatggttcagacaagaagacccgccactatctccctaatggttttaagaaatttgttgttcacaatgtgaaggacttggaactgctcatgatgcacaacag

SEQ ID NO: 180804 - DNA, 281 bp, Glycine max
gaaacgaaaaagggttcggtgttctgttcgcgatgagagccaagtggaagaagaagcgtatgaggaggttgaagaggaagcgccgaaagatgagacagagatccaagtagtgcgttaaacctagtttgtttctgttgcttttacaattgcttatgttgtcgaatgggacacccagttgttagtggcactggtttctcctttttgatgtttgatacattttgttggattcaagtagtttatgttcgtcttatgttattagctcaaaacaatgttgttactgc

SEQ ID NO: 180805 - DNA, 285 bp, Glycine max
ggattcggctcgagcccaattctcttgcggtttattcattgtccgatggcttctgcagatgttgagtaccgttgctttgtcggtgggctcgcttgggccactgacgaccatgccctcgagagagccttctctcagtacggcgaaatcgttgaaacgaagattatcaacgatcgtgagactggcagatccaggggttttggttttgtgaccttcgcctcggagcagtccatgacagatgcgatcggagcgatgaatggacagaacttggacggccgtaatatcact

SEQ ID NO: 180806 - DNA, 271 bp, Glycine max
ctgagaggaagagagagggagattctttgtttgctaccttctctcggaaaaatggttacgttcagggtgcgtaagattcacaccatttggtgttcgatttcattttcctctgttaatgatttttacgaggtggtgttttgttatgtgtatttgcagtttcaccagtaccaggtcgttgggagggctcttcccacggaagcagatcagcaccccaagatctaccgaatgaagctctgggccaccaacgaggttcgcgccaagtccaagttct

SEQ ID NO: 180807 - DNA, 270 bp, Glycine max
gagatattatggattgaagcgtggacaagttgtcaagattatccggccaagtgaaactgctggcagatatgttacataccgatttgttgtataagaatttgctttaacatatttggttatactgtcatagtgatggatagggatataaagccttctttttgcaaggggggaactcttgatttacaaggaaatgaaatgtgtgtttgtttctgtttattatagactattaagttcttttggtaaaaaaaaaaaaaaagggcggccgccgac

SEQ ID NO: 180808 - DNA, 280 bp, Glycine max
caactccgaaggcgagccacgatgtcaggaagaggaaagggaggcaagggtttgggaaagggaggagcgaagacgcaccgtaaggttctgagggacaacatccaggggatcaccaagcctgcgattcggcgcttggcgaggcgtggcggcgtcaagcgtatcagcggtctcatctacgaagagacacgtggcgttctcaagatcttcctcgaaaacgtcattcgcgacgctgttacttacaccgagcacgctcgccgcaagaccgtcactgccatggacg

SEQ ID NO: 180809 - DNA, 278 bp, Glycine max
gaaactggaagatcgagagggtttggatttgtgaccttcgcctcggagcaggcgatgaaagacgcaatcgaaggaatgaacggtcagaacctcgacggtcgtagtatcacagtgaacgaagcacaatcccgtggaagacgcggtggtggacgtggatacggaggtggtggtggttatggcggcagcggttacagccgcggtggaggaggatatggaggaggaggccgccgtgaaggtggtggaggtggctataaccgcaacggtggaggtggtggata

SEQ ID NO: 180810 - DNA, 280 bp, Glycine max
attccaaatcccttttccgatttccaccaaaatctaaaccccaattcccaattacccttcccaattttcaccagaacctaatactcccacaccaatcttcgatactggacgccgattcacaacctcaacaactcgaagagagaacagaggagcaagaactgaagtacctggaattcgtgcaattcgcgaccatacaggctctgatgcgctgcgccatcctctactcatacgccaaggagcgcgcgggtcctctgaagcccggtgtcgacaccgtggagga

SEQ ID NO: 180811 - DNA, 261 bp, Glycine max
gaaggcgtaatggagaacgtaggagacagtctgttcgtgggtgcattgtcagcccagacctctctgttttgaacttggtaattgtgaagaagggtgagaatgatttaccaggattgactgatgctgagaagccaaggatgagaggcccaaagagagcatccaaaatccgtatcctgttcaacctgtccaaggaggatgatgttaggaagtatgtcaacacctaccgtcgtacatttacgacaaaagctgggaaaaaggtga

SEQ ID NO: 180812 - DNA, 272 bp, Glycine max
caaagatgaagatgatccacgttcttctcctctttgctcttgtctcgttcacttcccatgcttctgtcaatgatttctgtgtagcagacctaaaaggtccagatagcccttcaggctatcagtgcaagccacctaacacagtcacagtggatgactttgtgttctctggctttgtagctggaaacaccacaaacactttcaatgctgcattaacctccgcatttgttactgattttccaggtgtgaatggtcttggtgtatctgtggcacgg

SEQ ID NO: 180813 - DNA, 269 bp, Glycine max
caaattcgatttgtaccaaattttcttcacaaaatgtctggtcgtgggaaaggtggcaagggtttgggaaagggaactgccaagaggcacagaaaagttcttcgtgataacattcaaggtatcacgaaacctgcgattcgtaggttagcgagaagaggtggcgttaagaggatcagtggtttgatctatgaggaaaccagaggagttctgaagattttcttggagaacgtgattcgagatgctgtgacctacaccgagcacgctaggag

SEQ ID NO: 180814 - DNA, 269 bp, Glycine max
gcttgctactgagtttccacactgcataccttacgtcttccgaattcgaagttaatttgcaagatggctaaggaaaaggctcagatcaacattgtggtggttggtcatgtggaccctgaggaggcaaccaccattaacgagctgaagaagcctgttgtggagaaagaagctccagggcatgccatatgagggcatgcacgtacggcctcggaggggaaccagaaaattatgttaacaaaataatctggaaccctaatgtatcagtgtca

SEQ ID NO: 180815 - DNA, 269 bp, Glycine max
cacgaaccctaacacctaaaagccagaagaagcgaaatcgtaatcgcaatctagcggatatgaaggtcgtcgctgcatacttgctcgcagtgttgggagggaatccatctccttctgccgatgatatcaaaaacatcctcggcgcagttggagctgaggctgagcatgagttgattgacttgctcttgaccgaagtcaagggcaaagacttcaatgagctacttgctagtggaagcgaaaagatttctgcagtggctggtggtggtgca

SEQ ID NO: 180816 - DNA, 271 bp, Glycine max
gagtgatttcagtgagtgatcggtgttcacttgatctcatcataatcgtcagcgtcaattgaagaagatgccgatcagaaacatcgccgtcggaaggcctgaagaggcgactcaccccgacacgttgaaggcggctttggctgagttcatctcaaccttcatcttcgtgttcgccggctcaggctccggcatcgcctacaacaagctcaccgacaacggcgctgccacccctgccggcctcatctccgcctccatcgcccatgcattcgcc

SEQ ID NO: 180817 - DNA, 268 bp, Glycine max
  unsure (1)..(268): unsure at all n locations
ctataagctagtttatcgtgaggagaatatgaagttgcttgtcttctttgttgctgcagtactcttggtcccatggccatgccatggcgcacgcacccagaggctccctctccgtatgccaactggctatggtgagcgttcttcggacgtacaatgcgcaagttttaggcttgctgtggaagcacacaacatccgagcctttncaatcattcctgaacactgccttgatccaacctaggactacattaatggcgggcgatttcgctca

SEQ ID NO: 180818 - DNA, 280 bp, Glycine max
cgatactcgctggtcaccaggttggcgattttggcctatcaaagattaagcgaaataccttggtgtctggtggtgttcgtggaactctaccttggatggcaccagagctgctaaatggtagtagcaataaggtctcagaaaaggttgatgtgttctcttttggcattgtcttatgggagattcttactggtgatgagccatatgctaatatgcactatggcgcaatcataggaggcattgtgaataacacattaagacctacaatccctagttattgtga

SEQ ID NO: 180819 - DNA, 250 bp, Glycine max
tttacacatttctatgaagcaatcggttcgtccataccattggtagagcttgtaaaaccacgactgatccataaaggaatgaatggaaaaagtagcatgtcgtatcgatgaagaattctaaaaatatttcattctcttataggatccggccagaatttttgtttgtgaattcttggctcggaacaaaaaaattcagttgggtttaattaataaagggatagagcttggtgattccaattataataataag

SEQ ID NO: 180820 - DNA, 271 bp, Glycine max
ggcgtactatatattattgaattgacaatgaggcctgctcttgctttgcttcctcttctatttgctttcttgttagctgccactacagaatcaagaaaagatacaggggaatattggaaaatgatcatgaaagatcaggaaatgccagaaggacttcaaggtcttgtttcatttcaatctgaaaataaccctaagactcaagagcagcttggtaaaggttccaaaaaccattgtgaagagtctctagttacaaatacacaagttaatagtg

SEQ ID NO: 180821 - DNA, 270 bp, Glycine max
attctttgttgcaatatcacaaacacctcgtccgtcacaatgcagctagctgtggcggccaacgctgtcgtttcaccgtcgccgttccgacctcatccccttctccggtcatccttctccggcgtctccgttaagctcactccccaatccataacgttttcacgcttgaagcccctcaccgtcttcgccgccaccaagaaggccgtcgctgtcctcaaggggacctccgccgtcgaaggcgtcgccactctcatccaagaagacgatggc

SEQ ID NO: 180822 - DNA, 276 bp, Glycine max
aaaatggcacctgcaacactgtctctgtctctcctcctcctgttctcactcagcatcgccgtaaccgttagatcgagcgactacgactacgattgtgtgtacactgcatacgttagaaccggttcggtgttgaagggcggaacggactctaagatcgggctgaagctgtacgacaagtacggctactacatctacattaaaaacctcgaagcatggggcggcttgatgggcaagggctacgactacttcgagcgcggcaacctcgacatcttcagc

SEQ ID NO: 180823 - DNA, 268 bp, Glycine max
gtaaattggaaaggtgtagcatactacaataggttgatcaattacttgctagagaaaggtattactccatatgcaaatctctaccattatgatcttcctttagcacttgaggagaggtacaacggattattgagtcgccaagttgtgaaagattttgcagattatgcagaattttgtatcccgacttttggagatagagttaagaattggatgacgtttaacgaacctcgtgtggtggctgctcttggctatgataatggtttctttg

SEQ ID NO: 180824 - DNA, 269 bp, Glycine max
aagaatttcaagacttatcttgggaggccttggaaggagtactctaggactgtgatcatgcaaagtagtataagtgatgtcattgacccaattgggtggcatgagtggagtgggaattttgcattgagtactttggtttatagggagtaccaaaacactgggcctggtgctggtacttctaatagggtcacttggaaagggtataaggtcatcactgatgctgccgaggccagggattatactcctggaagcttcattgggggctctag

SEQ ID NO: 180825 - DNA, 268 bp, Glycine max
caagctcttgaagatgaatatgggggatttctcaaacctgaaatagtggaggacttccgtaactatgctgacttttgcttcacgacatttggtgatcgggtgaagcactgggtaaccctaaatgaaccatatggctacagcgtgaatggctacagtggtggaaattttgcaccaggtagatgttctaactacgttggaacctgccctgctggtgattcttccaccgagccctacattgttaaccaccacttaatacttgctcatggag

SEQ ID NO: 180826 - DNA, 269 bp, Glycine max
aaacaaacccactaagatggcttcctttgtatccttcctagtgctgcttcttgcagcccttatcctcatgcctcaagggcttgctacttactacaaaccaattaagaagccaccagtgtacaagcctccagtgtacaagccaccagtgtacaaaccaccggtttataagccaaaaccaccggtttacaagccgaaaccaccggtttacaagccaccatataagaagccaccatacaagaaaccaccttatggaaagtaccctccagtag

SEQ ID NO: 180827 - DNA, 267 bp, Glycine max
gagagtttgttaaagaactgtgaagaagagggtaactgcaaacaaagcaagcaaaacaaaagacgcagtgatggagaggatgaagagggtgcttctgccgcttctggccttcactgttcttctcatgttgccagaagcttctgctacaaagtttactgttggaaacaaccagttttggaaccccaatattaactacactgagtgggctaaaggcaaacatttctaccttggtgactggctctattttgtgtacgataggaaccaagc

SEQ ID NO: 180828 - DNA, 274 bp, Glycine max
ctgtgtatttccctacctctcccttcaagatgcagatcttcgtcaagaccctcaccggcaagaccatcacccttgaggtggaaagctctgacaccatcgacaacgtcaaggccaagatccaggacaaggaaggaatccccccggaccagcaacgtctcattttcgccggaaagcaacttgaggacggccgtacccttgctgactacaacattcagaaggagagtactcttcacctcgtcctccgtctccgtggtggcatgcagatcttcgttaa

SEQ ID NO: 180829 - DNA, 275 bp, Glycine max
cctagttcgcttgcagtcacacaagaggccaatcctattcatagctcgagatgggtgaagaagtgaaggtagttgttccagaatcagtgttgaagaagcgcaagagggaggaggaatgggcgttggccaagaagcaagaactcgatgctgccaagaagaagagagccgagagccgcaaactcatctacaacagagctaagcagtacgctaaggagtacgatcaccaggagaaggaattgattcggttgaaacgcgaggccaagctgaaaggtggt

SEQ ID NO: 180830 - DNA, 272 bp, Glycine max
gacaaactccttttaagagagaaggatcgaaaatgggagctggaagtttcctcaaggtggttctaaaaaattttgatgttctcgctgggcctttgcttagtcttgcctatcctctatatgcctcggttagggcaattgagagcaagtctcctgttgatgaccagcaatggctcacttattgggttctctactccttgatcaccctctttgaacttacttttgccaaagttattgaatggattcccatctggccatatgcaaagctgatcctt

SEQ ID NO: 180831 - DNA, 277 bp, Glycine max
tcctgcgcgtgaacaagcctcaggtaagccaaagccatggttaagcataacaatgttatccccaacggacacttccgtaagcactggcagaactatgtgaagacctggttcaatcagccagcacggaagacaagaagacggttggctcgtcagaagaaagctgtgaagattttccccagacctacagctggacctcttagacccattgtacatggtcaaactttgaaatacaacatgaaagtgagagctggaaggggattttcccttgaagaactca

SEQ ID NO: 180832 - DNA, 279 bp, Glycine max
ggattgtggctaaggctggggacactgttgaggtgcgtgatgggaaactactggtaaatggtgctgctgaagaacggcaatttgtagtagagcctctagcttatgagatggatccaatggttgtgccagaaggatatgtgtttgtaatgggagacaatcggaacaacagctttgattctcataactggtgatgaaggtttccagatacgttcatctattctaaattgacagtttctcccgtctttgcctgggaatgagctgttcggagattctcttaga

SEQ ID NO: 180833 - DNA, 271 bp, Glycine max
aacctacctctttttcttctctctcaacaacttcaccttcttcctcctcgatcatgtctcacttcaagggcaagtaccatgatgagcttatcgccaatgctgcgtacattggcactcctggaaagcgtattcttgctgctgatgagtcaacagggacaattggcaagcgtttggccagcatcagtgtagagaacattgaatccaacaggcgagctcttagggagctgcttttcactgctcctggtgttcttcaatatctcagtggtgtcat

SEQ ID NO: 180834 - DNA, 269 bp, Glycine max
ctagctttgaaagaaataatccaattgaatttgagcttggtactggtcaagtgatcaaaggttgggaccagggattattgggaatgtgtcttggtgagaagcggaagctgaaaataccagcgaaacttggctatggagatcagggttccccacccactattccaggtggtgcaacactcatatttgacactgagcttgtgggagtgaacgacaaaagtttaggcgaagaaaaagaaaactccgaactgtagacaaatcaaaagaaatgg

SEQ ID NO: 180835 - DNA, 267 bp, Glycine max
gcctgtaagagtgaaaaaaccttctcttttccttctctcaagtctcaagagatttcatcatggctccaaagaaggacaaggctccaccaccttcctccaagcccgccaaatctggcggtggcaagcagaagaagaagaagtggagcaagggaaagcaaaaggagaaggtgcataacatggtgctgtttgatcagggcacctatgataagctcctttctgaagctcccaaattcaagctcatcactccttccattctttctgatcgtt

SEQ ID NO: 180836 - DNA, 268 bp, Glycine max
gggaggtgaaaccagcacaaatagcatagcatccatctttgcctggacaagagggctagcccacagggcaaaactggacgacaatgccaaactcttggatttcactgaaaaactagaggcagcttgcattggagtagtagaggctgggaagatgaccaaggatttggcacttattcttcatggatccaagctttcaagggagcattatttgaacacagaggaattcattgatgccgtggcagccgagcttagtgctaagctttctaca

SEQ ID NO: 180837 - DNA, 270 bp, Glycine max
gggttttccaattcacagagcaacacaacgaaccaacaatggcgcagctcagccgcagtcgcagccgcagcacgggcaagcagcgctggagcaggtgcagtgcttcggtcgcaagaagaccgccgtggccgtgacctactgcaagcgcgggcgcggtctcatcaagatcaacggctgccccattgagctcgtggagccggagatcctccgcttcaaggccttcgagcctatcctcctgttgggtaagagccgcttcgccggcgtcgacat

SEQ ID NO: 180838 - DNA, 259 bp, Glycine max
gacatcaaaactcctggttttggtgaaaaccgtaaatctggatctccaggatcttgctgtacttacaggaggtcaacttatcactgaagagcttggcttgaatcttgaaaaagtagatctcgaggtgtttggctcttgcaagaagataacaatttctaaggatgacactgtcatccttgatggagctggtgataagaaagcaattgaagaaacaagtgagcagattagatcagcaattgaaaatagcacttcagattat

SEQ ID NO: 180839 - DNA, 274 bp, Glycine max
tatctcatttgaatacattccttgtagtttatactgaaagatgggtttgaagatggcgttactgatcctaggcctttccctcatgctccttttggtctcctctgaggtggcatccacgaatacaaaagaggaggcaaatggagtggatgatgccaaatatcccggtggaagctatggagggggttacccaggtcatggcggtggcggttatcctggccatggcggtggcggttatcctggccatggcggtggtggtggctatcctggtcatggt

SEQ ID NO: 180840 - DNA, 275 bp, Glycine max
cttgctaccaacactgagcttaaccgagcttcgcaaagatgaatcgggaaaagttaatgaagatggccggttcggttagaactggaggaaagggtactgtgagaagaaagaagaaggctgtccacaagacaacaaccacagatgacaaaaggcttcagagcaccctgaagagaataggggtgaatgccatccctgctattgaagaggtcaatatctttaaggatgacgtagttatccagtttctaaatcccaaagttcaagcatccattgctgct

SEQ ID NO: 180841 - DNA, 275 bp, Glycine max
ctttcagctcctaagagcacgcatcactgttgcacttcttactcgttctccctctttttctcttcttcttcttcttcgctaaacccccctttatttttcctatctcactaacatcgatgggagacgagaataagaccaagtcccctgcttccggcgtgtggtccaccatcaagcctttcgtcaatggcggagctccggcatgctcgccacctgcgtcattcaacccatcgatatgatcaaggtgaggattcaacttgggcaaggatcagctgcgc

SEQ ID NO: 180842 - DNA, 276 bp, Glycine max
atcacaggggtgtaccacaactggcagaatctgaatcatgatagacaactatggaagttaggaacactgccaccgggtctcataacattctggaaacgcactttccctctgaaccgatcttggcacatcttaggtcttggctacaaccccaatgtcaaccaaagagatatcgagcagtctgctgttgtacactataatgggaacatgaaaccttggcttgagataagtattcccaagttccgaagttactggacgaagtatgttgactacgatcat

SEQ ID NO: 180843 - DNA, 183 bp, Glycine max
gtaaaattcaggaaaaaaaaaaaaaaaacatggtgctgaaggtgaatggtcaaacctatggatcccccaagagggacctggagtgtctgattgagaaggaaattgagtttgaaacagtgcatgttgatctcttcaagggagcgaataaggaacctgagtcccttaagctgcagccatttggat

SEQ ID NO: 180844 - DNA, 278 bp, Glycine max
cggctcgagttcacagatttttgagaaattgatttctggcatgtatttgggggaaattgtaaggagagctttatttaagatggccgaagaagctgatttttttggagatactgttccccccaaattgaaagttcctttcatacttaggacgcctgacatgtcagccatgcaccatgacacaagttctgatctgaaagtagttggaaacaaattaaaggatatattagagatctctaacacatccctaaaaatgaggaagattgttgttgaactgtgtg

SEQ ID NO: 180845 - DNA, 283 bp, Glycine max
ctcattctgctcaaaccaacctctcatcatggttagggaacggctgctatcttagctcggaaatcactccttgctcttcgtgcgcgccaattggctgtaagcggtcaagggctgcacagctcccaaaactatggccttcgattaagtgcacactcctactctaccaaaagagaggatgaagaaagggagcaactcgcaaaggaaatttcaaaggattggagttctgtttttgaacgtagcatcaacactctctttctcactgaaatggttcgaggtctaatgc

SEQ ID NO: 180846 - DNA, 276 bp, Glycine max
cgggatccctcttcgtagtgaattacattgcattgggttctagcagcgtatttcactcaccatgcaggctagtgataggtttaacatcaattctcagctcgagcatctccaagccaaatatgttggaaacggggacagcgggctgaacagacatgagaggggagagaacattcaacgtgatagctatgcatcatatattgggcactaccctttactgggattctttgctattgctgaaaatgaatctattggaagagaacgctacagctttatgca

SEQ ID NO: 180847 - DNA, 279 bp, Glycine max
cagagagagacggaggaaatgacagactggcaataaggaggacgaccctttggtatttggatcttcaagaaagagagaccttgggatttcgtcaccatgagtctcttcgggcttggaaagcagccgtctccaaaacactcgcccaaaaaagagcgctccagctggaagtaagggtgctcaacttcaaaaacacatagatgccacgttgggtagtgggaacttgagggaggctgttcaactgccccctggtgaagatattaatgagtggctagctgtaaa

SEQ ID NO: 180848 - DNA, 246 bp, Glycine max
cctttctctcgttttttctcagaaccttctgaggttaaagcaaaaaacaaagagagagagagagagaaaatgatgaagccatcgatgctcagatctctccactccgccgccacccgcggcgcctctcatctcttccgccgtgggtacgcctccgagccggtgccggagcgcaaggtagccgttctcggcggccgcggcgggattcgggcagcctctctcccttctcatgaagctcaatcccctcgt

SEQ ID NO: 180849 - DNA, 281 bp, Glycine max
ttgggattgatctaggttgggttcgcttgattacaccagaaaatgttctaagttgttattgctttactttggttggtgttggaattttactgacatgtctctgctggtttgttcgtcaattggttggatttctcatagcgaggggggatttttcaatgctattatgagtttcccatccaattacccaaatagtccaccttcagttaagttcacttcagagatatggcatcccaatgtatatcccgatggccgggtttgcatatcaattcttcatcctcctg

SEQ ID NO: 180850 - DNA, 274 bp, Glycine max
aagtttcacgagtggcaaggcagatggttgagagatttggattcagcaaaaaaattggacaagttgccattggtggacctggtggaaatccattcttgggtcaacagatgtcatcgcaaaaggattactccatggcaactgcggatgtagtggtcgcggaagtgagggaactggtagagagagcatattctagggcaacacatattatcacaactcacattgacatccttcacaagcttgctcaacttctcatagaaaaagaaactgtggatgg

SEQ ID NO: 180851 - DNA, 274 bp, Glycine max
acatgctctgttttcgtcacctgccggtcgctacattgtactggctgggttgaaaggcttcaatggacagttggaattttacaacgttgatgaacttgaaaccatggctactgctgaacattttatggcaacagatattgaatgggatccaactggaagatatgttgcaactgcggtgacttcagttcatgaaatggagaatggtttcaatatatggtctttcaatggcaagcatctatatcggattctgaaggatcacttctttcagttctta

SEQ ID NO: 180852 - DNA, 278 bp, Glycine max
agagggatcattgacctgctgcgacgaacacgacgtcgtttttgtttccctctgtgagtgatgggattcttcaaaagggtagctggatttcttgggtttggaaaccacaaacacgattccaaggatgagaccgacgacggtcaacctcgagtgagagaaaccgtcgtcgatcgcccccacctcgctcccgttctcactccctctacttccggcgacggcggaattcagggtctggattggtatgtaaatcatcttaggatggatgaagatggtgattt

SEQ ID NO: 180853 - DNA, 130 bp, Glycine max
gcaagaatggcactccggtgcttcgtgatgtcccttgctgtgctcttactcttggtcttgcgagagaaagccatgccagagacgacgatttttggcacgctgtgtcgccaaacactcccattccaagttc

SEQ ID NO: 180854 - DNA, 279 bp, Glycine max
  unsure (1)..(279): unsure at all n locations
actacgagcgaatcggctcgagcattggaggctaggagtttccggtcaccntgcgttttaatctacgnaattcaaaagcatgggaccactccaatgtgtggaactctcatccaaagaactacggacctggttctcgcacctgccgtgtgtgtgggaatcctcatggattgatcaggaagtatgggcttatgtgttgcaggcagtgcttccgtagcaatgccaaggaaattggcttcattaagtatcgctgaaggattagtgttcaactgcccattcggt

SEQ ID NO: 180855 - DNA, 282 bp, Glycine max
  unsure (1)..(282): unsure at all n locations
cctcgagataactagaaacagtgtgatgaaaatgaaggtccttgtcttcttcgttgctacaattttcgtagcatggcatatgccatgcgtacgatatgttccctctccgaatgaacactggctatggtgcccgtactccggaggtgaaatgcgcaagttggaggcttgctgtggaagcacacaccatctttggctttgagaccattcctgaagagtgcgttgaagcaacaaaggaatacatccatggcgaacaatatagatcagactccanaacagttaacc

SEQ ID NO: 180856 - DNA, 270 bp, Glycine max
cttagctacaagctaaggacggatcaaagagaatggctcaagcaatggcatcaatgactagcttacgtggttcctctcaggctgtgttggaaggtagccttggctccacacgcttgaatgtggggagtggaagcagggtggcctcagtcacacgtgcagggttcacagttagagcacagcaacaacaagtgaatggtggtgaggtacaaagtagccgtagggcagtgctttcacttgttgctgctggtttgaccactggctcttttgttc

SEQ ID NO: 180857 - DNA, 272 bp, Glycine max
cagactcggaacagcaacgttgtagagggagacttttgggggagagtgagtgagagtaaaaagatgtttctgcgtgcggtggcgcggccgttgatggcgaaggtgcaggcttccccggcgcgccgcgccgcggtgcgccgccccccaccccgacggaggtgctgattgggctgtacagcaagacgctgaaagagatccagaaggttcccgaagatgaagggtaccgcaaggccgtggagagcttcaccaagcacaggctcggcgtgtgcaag

SEQ ID NO: 180858 - DNA, 274 bp, Glycine max
gcagcggcaacagaggagagaagatgaagttcaatccacgagtgtcgagcagccgccgcaagagccgaaaggctcacttcacggcgccgtcgagcgtgcggagggtgctgatgagcgcccctctgtcggcggagctccggtcgaagtacaacgtgcggtcgatcccagtccgcaaggaggacgaggtgcaggtggtgcgcggaacatacaagggtcgcgaggggaaggtgacgcaggtgtaccgtcgcaagtgggtcatccacatcgagcgcat

SEQ ID NO: 180859 - DNA, 277 bp, Glycine max
cagaagcagaacgaggagaagcagaaagaggagacgaagcaatggcgccgaagaagccccgaaccacgtcgaggaaccctgatttggtcaggggaattggcaaattcgaggtcgcagatgtaccacaagacgggcatctgggccatcaaggccaaaaacggcggtgttttgcccctccacgatcccaagcccaaacccgaggccccggcccagaagccgcccaagttctacccggccgatgacgtgaagaagcccctcgtcaacaagcacaagccca

SEQ ID NO: 180860 - DNA, 270 bp, Glycine max
gataggcttaatgacaagtttgttgaattgggcgccattttggagcctggaaggcctgccaaaacagacaaggctgctatcctgattgatgctgtccgaatggtgacccagttacggggtgaagcccagaagttgaaagacactaatcagggtcttcaagcaaagattaaagagttaaaggctgagaagaacgaacttcgcgatgagaaacagaggctcaaggcagagaaggagaaactggagcagcagctgaaatctttgaatgcacag

SEQ ID NO: 180861 - DNA, 268 bp, Glycine max
attgtctgttgttgtaactcgttcttcttcttttgttgttctgtgtttgtgtttgtcttttctctcacctgaaaatgtcttgctgcggtggtaactgtggttgcggaagctcctgcaagtgcggcaacggctgcggaggctgcaagatgtacccagacttgagctacactgagtcaaccaccaccgagaccttggtcatgggagtggcacctgttaccgctcaatttgagggtgctgaaatgggtgtgcccgctgagaacgatggctg

SEQ ID NO: 180862 - DNA, 270 bp, Glycine max
gctgcatctcaacgaaacagagcgagctagagagagagagagagagaaagagaagagagagaagcagcgattcatcacaatgggtaaggttcacggatctctcgcacgtgcgggtaaagtgagaggacaaactcccaaagtggcgaagaagacaagaagaaaaagccacgcggacgcgctcacaagagaatgcaatacaaccgccgattcgtcaccgccgtggtgggattcggaaagaagcgtggaccaaactcctcggagaagtgaggg

SEQ ID NO: 180863 - DNA, 271 bp, Glycine max
catcgagataactagaaacagtgtgatgaaaatgaaggtccttgtactcttcgttgctacaattttcgtagcatggcaatgccatgcgtacgatatggtccctctccgaatgaacactggctatggtgcccgtactccggaggtgaaatgcgcaagttggaggcttgctgtggaagcacacaacatctttggctttgagaccattcctgaagagtgcgttgaagcaacaaaggcatacatccatggcgaacaatatagatcagactccaaa

SEQ ID NO: 180864 - DNA, 274 bp, Glycine max
cacagccttcttcactcacaggaggtgaagatgtcgactccggctaggaagagactgatgagggattttaaaagattgcaacaagatcctcctgctggcatcagtggggctccccaagacaataatattatgctttggaatgctgttatctttggcccagatgacaccccttgggatggaggtacgtttaagttgacacttcagtttacagaggattatcctaataaaccacctactgtgcgctttgtttctcgaatgtttcatcctaacattt

SEQ ID NO: 180865 - DNA, 275 bp, Glycine max
ctacaaagcattgaattcaaaaacttaagttcattccttgtgttttgctttcttcctcaaaaccaaacatgtcgaacacatgcggcaactgcgactgcgctgacaagactagctgcaccaagggaaacagctatggtgttattgtagagactgagaagagttacatcgagactgttgtcatggatgttccagcagctgagcatgatgggaagtgcaagtgtggcactaactgcacttgcacggactgcacctgtggccattaaggaatatgtatg

SEQ ID NO: 180866 - DNA, 278 bp, Glycine max
gtaagagtgagcaacttccaacaccatagtgaaatggcttccaaggctgcacttctcttgtgtttcaatgttctcttcttcaccgtggttagctccacatatgtgccatgcaacccaccccccaaaactccaaaacacccacctgtcccaaagccaccttccccaaagcaagcaagttgccccaaagacactattaagtttggtgtgtgtgctgatgtgttaggtttgatcaacgtgcaacttgggaagccaccaaagaccccatgctgcaacctcat

SEQ ID NO: 180867 - DNA, 279 bp, Glycine max
ggcggaatcgggcgaggaagagatagttggtaaacctgtccaagagctgctgttgaatcgcgaaaatctaccaaaaaattacatctacgaggaaggtggtgctggatttcgtgatgctcttgtgccatcacaggatgatgatattccggtgatcgaccttcatcgcctttcatcttcatccatctcacaacaagagcttgctaaactccaccatgcactccattcatggggctgcttccaggcaataaaccatggaatgaaaagctcatttctggacaa

SEQ ID NO: 180868 - DNA, 271 bp, Glycine max
aaggatgttaggaatattcatgtgctgcaggagatgtacaatcaatggcctttctttagggtcactattgatttagtggaaatggtgtttgccaaaggagacccagggatagctgctctttatgataggttccttgtttcagaggatctgtggtcatttggtgagcagttgacgaccatgtacgatgaaaccaaggaactcctccttcaggtggctggccatagggatcttcttgaaggagatccatacttgaagcaaagactgcgcttgc

SEQ ID NO: 180869 - DNA, 267 bp, Glycine max
gttgggttgggtttttttgttattaaaagaaaagaaaaggggggatggctcggagagcagaggaagagtacgattatctgttcaaggttgtactgatcggtgattctggtgttggaaaatccaatctcctgtcccgattcactcgcaacgagttttgcctcgaatccaagtccaccattggagtcgaattcgctactcgcactcttcaggtggagggaagaactgtgaaagctcaaatatgggatactgccggacaggaacgataca

SEQ ID NO: 180870 - DNA, 270 bp, Glycine max
caaatcctcacccattttcttcgtagccaaacactctgaaattctcagttatgtcgtggcaagcgtatgtggatgatcacctactgtgtgaaatcgaaggtaaccacctcactcacgtcgcgaacatcggccaagacggaagcgtttgggctcagagcaccaacttccctcagttcaaacctgaggaaataactgccatcaataatgactttaatcagcctggatcacttgctccaactggattgtatatcggtggcaccaaatacatgg

SEQ ID NO: 180871 - DNA, 274 bp, Glycine max
ccgcttccatctcttctcacacctccatggccaacacttctcttccctacgccgatgccggcatggacgctgtccagcgccgtctcatgttcgaagacgaatgcattttggtggatgagaatgaccgtgtggttggacatgattcaaaatacaattgtcacttgatggaaaagattgaagctgagaatttgctgcatagagctttcagtgtattcctgttcaactcaaagtatgagttgcttcttcagcaacgatctgcaacaaaggtaacttt

SEQ ID NO: 180872 - DNA, 272 bp, Glycine max
tcgctgttaggcttttggagccactcaaagcggagtcccctattttgagctacgccgatttctaccagttggctggcgttgttgccgttgaggtcaccggtggacctgaagttcccttccatcctggaagagaggacaaacctgagccaccaccagagggtcgcttgcccgatgccactaagggttctgaccatttgagagatgtgtttggcaaagctatggggcttagtgaccgagatatcgttgctctgtctgggggtcaactattggag

SEQ ID NO: 180873 - DNA, 275 bp, Glycine max
accatttttctcttgcttctgcttctggtggccactgagatgatggggccaacaatggtggcagaagcaagaacttgtgagtctcagagccaccgtttcaaggggccatgtttgagtgacaccaactgtggctctgtttgccgaacccaacgtttcactggaggacactgccgtggcttctgtcgcagatgcttctgcaccaaacattgttaattttaaaaaattaattaagagtgctttgatagaagatgatagatctatcatctttctactcg

SEQ ID NO: 180874 - DNA, 277 bp, Glycine max
tttccttgcgtttccctttcattttccctcactttctcgctcgccaaacgcccctctctctcctccaatggccgaccagctcaccgacgaccagatcgccgagttcaaggaggccttcagcctcttcgacaaggacggcgatggttgtattactactaaggaacttgggactgtgatgcggtcactagggcaaaacccaactgaggcagaactgcaggatatgattaatgaggttgatgctgatggcaatggaaccatcgacttcccagagttcctc

SEQ ID NO: 180875 - DNA, 276 bp, Glycine max
gaagaaacttaatcgatcatcacttcacttcactaatacatcatggcagacgagacccagaacaagtatgagagctctgaggttgaggtccaggatcgtggtgtttttgactttctcggtaagaaaaaggatgaagaagacaagcctcatcctcaggaggaggtcatcgccaccgagtttcaaaaagtcactgtctcagaccaaggagagaacaagcacagcctcttagaaaagcttcaccgatctgacagcagctctagctcttcaagtgaggag

SEQ ID NO: 180876 - DNA, 280 bp, Glycine max
tgcggctcgaacaattctctagggtttatacaattctcgatggcttcttcagatgttgagtaccgttgctttgtcggtgggctcgcttggggcactgacgaccaagctctcgagagagccttctctcagtacggcgaaatcgttgaaacgaagattatcaacgatcgtgagactggaagatccaggggttttggatttgtgaccttcgcctcggagcagtccatgacacacgccatcgcagggatgaacggccaaaaccttgacggccgtaacatcactg

SEQ ID NO: 180877 - DNA, 209 bp, Glycine max
agagtttcttgtgagctataagctagtttatcgtgaggagaatatgaagttgtttgttctctttgttgctgcagtagttttggtagcatggccatgccatggcgcaggctaccaaaggttccctctccgaatgacaactggctatggtgagcgttcttcggaggtaaaatgcgcaagttttaggcttgctgtggaagcacacaacatcc

SEQ ID NO: 180878 - DNA, 268 bp, Glycine max
tgctgctgctgctgcaaaacctagggttgagccttttgctcaggttttcagcgcttctttcttacaatggttctacagaacgatattgatttgctgaatcctccagctgagttggagaagagaaagcacaagcgcaagcggcttgtgcagtcaccaaactctttcttcatggatgttaagtgccagggctgcttcaacataacaactgtgtttagccactctcagactgttgtggtttgcggaaactgccagactgtgttgtgccaac

SEQ ID NO: 180879 - DNA, 272 bp, Glycine max
cggcaaggtgaggcgaaacgaaagagaaagagaatggagaagagggtagcaatattacaggaatggtttgaccgcgttgactcggagaaaagtggaagcataacagcggtgcagctaaagacagctcttgctgtgggcaacctggaatttccgctctcagtggttcagcaaatgatcaggatgtacgatttcgaccggaatggtactatgagctttcaagaatttgtttcactcaacaacttccttcttaaggttcaacatgcattttctga

SEQ ID NO: 180880 - DNA, 272 bp, Glycine max
tggatttgcagcagagcgagttcgatcgcctcctgttcttcgagcacgctcgtaaggccgcagaagccgaatacgagaagaaccctctcgacgctgataacttaacaagatggggtggagctttattagagttgtctcagtttcagagttttcctgaatcgaagaaaatgacccaagaggctgtttcaaagctagaggaggcgcttgcggtgaatcccaagaagcatgacactctttggtgcctgggaaatgctcacacttcacaagcattt

SEQ ID NO: 180881 - DNA, 273 bp, Glycine max
gaaattgcctctttcaagaagcatctgagtgcttattatttgtaatatatatagtcactcaagcttctaggatttgtgccagctacatgaaaatgggaagcaacttcaggtttttgagtctttgcctcttggcattgattgcatcaacccatgctcaacttcagcttggtttttatgccaagagttgcccaaacgctgagcaaatcgttttgaaatttgtccatgaccatatccacaatgctccatcaccagcagctgcattgataagaatgc

SEQ ID NO: 180882 - DNA, 275 bp, Glycine max
cgcactgcggagagagaaattgagtttccgagataaccagttttctctttgattcatcaatggcaactgcgaggaccgtcaaggatgtttcgcctcacgatttcgtgaaggcttatgcttcccacctcaagcgttccggcaagatggagcttcctgagtggaccgatattgtaaaaacagcaaaatttaaggagttggctccatatgatcctgactggtactacattagggctgcctcaatggcaagacagatctatttgagaggtggtcttggt

SEQ ID NO: 180883 - DNA, 286 bp, Glycine max
gtttccacactgcataccttaggtcttccgaattcgaagttaatttgcaagatggctaaggaaaaaggtcagatcaacattgtggtggttggtcatgtggaccctgaggaggcaaccaccattaacgagctgaagaagcctgttgtggagaaagaagctccagggcatgccatatgagggcatgcacgtacggcctcggaggggaaccagaaaattatgttaacaaaataatctggaaccctaatgtatcagtgtcatcatcagtgtgtagtttaagctagctttg

SEQ ID NO: 180884 - DNA, 286 bp, Glycine max
ctttccattgatttcttgcttctatatattacttgcttcatttcctgatcatgtcccttgctggtaaaatccagtcctgaaattggcgttcaggcaaccgctgcaaagtggttcaacctcttcacaacacaacttcatcacgttcaaaatcttactgatagaattcatggaaccgagctgcatcatggtgaagactggcatcacaatgagtcggtcaagcactggacttataccatagatggcaaggttacaacttgcaaggagagtattgaatccgttgatgaag

SEQ ID NO: 180885 - DNA, 283 bp, Glycine max
tgggtctcttccattcacaaccttaaacctttctttcttgtaaactttattgattgattctggagattagacttaggagggtatagacatggctagcgcaattgcagcttcttttttggttctgcttctggctttccccactgtatttggagctgaccatgaagttggtgacactagtggatgggccctcggagttaattacaacacctgggcctctgggaaaactttcacagttggtgacatttggtgttcaagtatgactccactcatcaagttgatgagg

SEQ ID NO: 180886 - DNA, 247 bp, Glycine max
gctagtttctgtctgacagctattctccaccgtagccgcaagttccgccgattgaaacagtgcttcaacaatggcagaccaaacagagaaggcttttctgaagcaaccaaaagtgcttctatgctctaagaaaggtgggaagggaaagaggcctgggaaaggtgggaatcgcttttggaagtcaattgggcttggattcaagactcccagagatgccattgaaggaacatatattgacaagaagtgc

SEQ ID NO: 180887 - DNA, 280 bp, Glycine max
ctgacagcctccaaatccaatggcttcagagaagaaactttcgaacccaatgagggagattaaaatggcagaagctcgtcctcaatatctctgttggcgagagtggagatcgtctcaccagagccgccaaggtgttggaacaacttagtggccaaaccccagtgttttccaaagcacggtacactgttcgttcctttgggattagaagaaatgagaagattgcatgctatgtcactgtcagaggtgacaaggcaatgcaacttttggagagtggtttgaa

SEQ ID NO: 180888 - DNA, 277 bp, Glycine max
cccgcacgaatatcttgttgtttggagcgatccgagacaaactctgtaaacatgttggtttaccaagaacttccttacaggtgatgagcttctctctgactccttccgttacaaggaaattgagaatggaatgctgtgggaagttgaggggaagtgggttgttaaacgagcagttgatgtagacattggtgcaaacccttctgctgagggtggaggagaagatgagggagttgatgatgcagctgttaaggttgttgacattgttgacacattcaga

SEQ ID NO: 180889 - DNA, 277 bp, Glycine max
cataacaaggttatgcttttgggtcacagtgacactttcactagggacaagaacatgcaagtccacaatggccttaacccattttggagaagggctagtgcagagaatgccaagatgcaggcatggatacttccatgtggtgaacaatgactacacccattggagaatgtatgccataggggggagtgctgtcccaactatcaatagccaagggaatagatttcttgctcccaatgacaataccttcaaagaggtgacaaagagggagaattcacca

SEQ ID NO: 180890 - DNA, 278 bp, Glycine max
gctagaatggaatttcgatgctcagtcatctcttttaccattctcttctctcttgctcttgcaggagagagcccatgtccatggaatcggttacttgaggaagattattgggaagctgtttggccaaacactcccattcccactgcactgcgagagcttctaaagcctctccctgccggtgttgaaatcgatgaactccctaagcaaattgatgatacacagtacccaaaaacattcttctataaagaagaccttcatccaggcaaaacaatgaaagt

SEQ ID NO: 180891 - DNA, 282 bp, Glycine max
atcaatctaagggtaaaggaggttttgtcagaggcaagcttcggttcaaggccgtctcaacacgtactcggcctaaggttcctaagcacattttacaccatgaagagtgataactctggttcgctttgtggacccgtcatagatgatgtaaaattgcttggtgttcgttatcccacacatgcttgatgatgaggtttcaatcaaaacacgtacatgtgctacattcatgtagttgagcatatataccacaggattcttgtaataataggagggtttactatt

SEQ ID NO: 180892 - DNA, 110 bp, Glycine max
gccctatgggcaaatgccaagtgacaagacagttggcggtggtgatgatgctttcaatactttcttcatcgagactggtgcttgactgcacgtgtcacgtgcagtctttg

SEQ ID NO: 180893 - DNA, 280 bp, Glycine max
atcaaattagttcattctctttgcgcagttccctacctctcctttcaagatgcagattctcgtcaagaaccttaacgggaaagaccatcacccttgaggtggaaagctctgacaccatcgacaacgtcaaggccaagatccaggacaaggaaggaattcccccggatcagcaacgtctcatcttcgccggaaagcagctcgaggacggccgtaccctcgccgactacaacatccagaaggagtcaacccttcaccttgtccttcgtctccgtggtggcat

SEQ ID NO: 180894 - DNA, 279 bp, Glycine max
gaagagcaaggttacaggcacaattttcacagatgaggcctgttgcaataacgccttctgttgcggcccggaatgcctctctaccctcctggtgctcctggtcttggacaacaatttttgtatgggcaaggacccccagccatgatgcctccacaagctggatttggttaccagcagcaactagttccgggaatgagacctggtggtggtcccatgccaagcttctttgttcccatggttcagcagggccaacaagggcagcgcccagtgggccgccga

SEQ ID NO: 180895 - DNA, 278 bp, Glycine max
cgtttacacatctctccaacctctcactttcgtttctcagttttattcgaatccctctctcaatcccccttccaaaatggccagcgttgaggttgcacagcaaacaccaacaacagttccagaaaatgaaacaaccgaggtaagcaagacccaggaaacaaccccagtcactgaggctcctgcaacagaacaaccagcagctgaggttcctgcaacagaacaacaaaccgctgaggctcctgccccagaatcaaccaccgaagcaccacaggaagaaa

SEQ ID NO: 180896 - DNA, 273 bp, Glycine max
ctttgtgccacttttcatgtctccttctctattatcgacggtttagttgccaacggcaatttgaagttgggtcaaaagccctccgccctaaaaggaacagtggtggtgggcgggagccactcgatcccagaatgggagatctccggctttgtggagtacataacatccggccaaaagcaaggggacatgttgctcgtcgtcccagagggtgcctacgcggtgcgcctagggaacgaggcctccatcaagcagagaatcaaggtgatcaagggc

SEQ ID NO: 180897 - DNA, 276 bp, Glycine max
atagagtatagagagcaacataggaagtgaagtgtaggtacatgagagccatgacagggtttatgaggccccgttcaaagttcttcatgtgcagcttgcaagctattgaagagaagatgcataccaaattgtatttttgcaccttactttaggtctgatgagtgcaagaagtttgcaaaggtgcacaaggtgtttggagccagcaatgtgagcaagattctgattgacgtgccagaagagcagagacaggacacggtgaattctctggcttatgag

SEQ ID NO: 180898 - DNA, 270 bp, Glycine max
tgctttgtaccattgacagtcacctcagtacctgcatcttattgtgaaggatgatgacatggtggtaatcttgaaactgatgacatcaaggatcttaaacccttgaatgatagagtcctcataaaggttgctgaagctgaggaaaaaacctctggcggtttgttgcttacagaggcaaccaaggacaaaccttcgattggaacagtgatagctgttgggccggggcatctggacgaggaaggcaacagaaaaccgttgtccgtgactccg

SEQ ID NO: 180899 - DNA, 187 bp, Glycine max
ttcggctcgagcacaaatagtctcaagatagattaggccaagagtatttgatgccgatttatctaaggaaaagaaaaaggctaaacgaaggtgataatgttgtagaagaggctcccgcagatataccagctttgctggagttgaagcagatatattacgaactaatgagtcggtattattctcataa

SEQ ID NO: 180900 - DNA, 280 bp, Glycine max
gaaagatgtcgaagcgtggtcgtggtggttcggcggggaacaagttccgcatgtcgctgggtcttccaatggccggcaacggtgaactgcgccgacaacacgggggcgaagaacctctacatcatttcggtgaaagggatcaaaggccgtttgaaccgtcttccctcggcctgcgttggcgacatggtgatggccaccgtgaagaagggaaaacccgatctgaggaagaaggtcttgccagctgtcatcgttcgccagcgcaagccatggcgccgaaagg

SEQ ID NO: 180901 - DNA, 238 bp, Glycine max
gtgaacgcgaagtccatcacaacgacatatttatattcggcatagataacaccgtactctctaataatcccatattatgaaaaccatggatatggggtggaggaatttaatgaaaccttatatgatgaatgggttaacaagggcgacgcaccggcattgccagagactcttaaaaattacaacaagctgttgtctcttggcttcaagattgtattcttgtcaggaagatatcttgaca

SEQ ID NO: 180902 - DNA, 278 bp, Glycine max
cgctatggggaagctctctcttaagatactgttgttgaataatcaacacttgggtatggttgttcaatgggaaggatcggttctataagtctaacagggctcacacatatctgggagacccctctaatgagaatgccatataccccaatatgttgaagtttgctgatgcttatgggataccggcagctcgtgtgaccaagaaagaagaccttagagcggcaattcagaaaatgctggagacccctggcccctatcttcttgatgtcattgtaccccaa

SEQ ID NO: 180903 - DNA, 278 bp, Glycine max
atcatattcctctctcattctcactataaacacaaaacccttcccatcctaattaaggtgaaaatggagggattcacccattgcttggttcactttggtggttgtgtttcttgtggctgaagttcaagtttcaatggcagtgacatgcagcccagtgcagctgagtgcatgtgtaagtgcaataacctcttcaacccctccatcaaacctatgctgctccaagatcaaagaacagaaaccatgcctctgccaatacctcaagaaccccaatctcaaga

SEQ ID NO: 180904 - DNA, 275 bp, Glycine max
cttctatctctctcttcaattccaaaaccctacccccatccaattccaattcaccctcaatcatggggtcctgaaggttcaactgtcgtcgttcctaggaacttcagattattggaagagcttgagagaggtgagaagggaattggagatggaactgttagctatggaatggatgatgctgatgatatctacatgcagtcctggactgggactattattggcccccctggtactgttcatgaagggcgtacataccagctgaaattattttgtgg

SEQ ID NO: 180905 - DNA, 275 bp, Glycine max
gtggtgtgggggttgcattgcagtatcatcagaatcagcgttgagttgaccccttcatttcattaactaatcacccttaacaatgcaagcagcaattgcagccatggccgcccacactattctcttttcttccttcccagctcctcaatccattgcccttcccgccactaccaagaaagccgttgcaatcctcaagggcaattcctccgtccatggccttgtcactctaacccaacaacaagacaacggcccaacaactgttactgttcgtgttt

SEQ ID NO: 180906 - DNA, 274 bp, Glycine max
ggcgagttgagagagaatgggaaggaagaaggggtatgttgagttcgaggagtcgccgccggacgaattcggatccggggcatcggtacaaggacccggtggcgatgctggagatgagggagcacatcgtgagggagaagtggatccaaatcgagaaggccaagatcattagggagaagctccgatggtgctaccgcatcgaaggcgtcaaccacctccagaagtgccgccacctcgtcaaccagtatctcgagtccacccgcggcatcggttg

SEQ ID NO: 180907 - DNA, 279 bp, Glycine max
cttctacctctcaagtttttgaagtatagacctggcagagacattcctatttacctcagagtcaatgaacggagggacaccctgacaagctctgtgaccaaatctctgatgctgtcctcgacgcttgcctcgaacaggacccagacagcacggttgcctgcgaaacatgcaccaaaaccaacttggtcatggtcttcggagaaatcacgaccaaggccaatgttgactacgagaagatagtgcgtgacacctgcaggaacatcggctttgtctcaaacg

SEQ ID NO: 180908 - DNA, 276 bp, Glycine max
gtattgctggcgctgtagctcaaactgcaatatcccatggatcttgttaaaacaagactacaaaccccatgcttttaaaagtggaagaattcctagtcttggaaccctttcaaaagatatatgggttcaggaaggaccccgggcattttataggggattgattccttctcttcttgggattatcccttatgccggcatagatcttgctgcatatgaaaccttgaaggatatgtccaagcagtatattcttcatgatggagaacctggtcctctagt

SEQ ID NO: 180909 - DNA, 276 bp, Glycine max
gagattacccatagatagagagcgcggcataacctaaacttacccttcttctctctgtgtgtgtgcgaatcaaaggcaaccagaagcagccatggccactgcaagaactgtgaaggacgtttctcctcatgagttcgtcaaagcttactcttctcacctcaagcgatctggcaagatggagctgccagagtggactgatattgtgaaaactgcaagatttaaggagttggctccttatgatcctgactggtactatgtcagagctgcttccatggc

SEQ ID NO: 180910 - DNA, 272 bp, Glycine max
caaagatgaagatgatccacgttcttttcctctttgctcttgtctcgttcaattcccatgctttctgtcaatggattcctgtgtagcagacctaaaaggtccagatagcccttcaggctatcagtgcaagccacctaacacagtcacagtggatgactttgtgttctctggctttgtagctggaaacaccacaaacactttcaatgctgcattaacctccgcatttgttcatgattttccaggtgtgaatggtcttggtgtatctgtggcac

SEQ ID NO: 180911 - DNA, 266 bp, Glycine max
aaacttgcaaccaatggacatgaactaaaggcatcttttaatgcagatgatctcgaaaaacatggaagacttaatgaatttaattactgatgctgctgctgtagcatttcaatatggtaatcctgataaagaatgcaagcctatggttgaagcaaagaatgctggagaggacttggtggatgcttatgccaaatacgtcaaagagtactacattggaacctttggtgttaatgtgcagacttatgaccaggagtacttgaagaaaa

SEQ ID NO: 180912 - DNA, 270 bp, Glycine max
cagtggatatatgggtttgtgatctttttcttccctggtgggactccagacattagacgcgctccactttccttggaaggcgctatttgggctgtttgtatttgtcttggctgtgggcactgctgctcttgggtttctggagaagctcactttccttgagaactcaggattggacaaatatggttctgaggctttgcttgtcaacttcactgccattatcacaatcttatttggtgcctttgttgtgttatctgctctagctgatgctcc

SEQ ID NO: 180913 - DNA, 272 bp, Glycine max
gtaacccaaaaccctagcggcgcctgctttcttcgttcgtcttttgcatcagccatcaggatggaatcctcaggtgaagcatgctcttgttgtcaaagttatgggtcgtactggatccagaggacaggtgactcaggttagagtgaagtttttggatgatcagaaccgtcatatcatgaggaatgttaaaggaccagtgagagaaggagacattctcaccctactcgagtctgaaagggaagcaagaaggttgcgctagagggtattttttt

SEQ ID NO: 180914 - DNA, 270 bp, Glycine max
ctagtttatcgtgaggagaatatgaagttgtttgtcttctttgttgctgcagtagttttcgtagcatggccaaggccatggcgcaggctaccaaaggttccctctccgaatgaacactggctatggtgagcgttcttcggaggtaaaatgcgcaagtcttaggcttgctgtggaagcacacaacatacgaaccaaaaaaaccattcctgaacagtgcgttgaaccaacaaaggactacattcatggcgaacaatttagatcagactctaa

SEQ ID NO: 180915 - DNA, 271 bp, Glycine max
gcgcaccacactgagaggaagagggagtgagagagagtgttcttcgtttgctaccttctcccagaaatgggtaacgtccaggtttcaccagtaccaggtggtcgggagggctctcccaacggaagcagatcagcatccgaagatctaccgaatgaagctctgggccaccaacgaggttcgcgccaagtctaagttctggtattttttgaggaagctgaagaaggtgaagaagagcaatggtcaagttcttgctatcaacgagatttttgag

SEQ ID NO: 180916 - DNA, 277 bp, Glycine max
gttagggtttgtaactttgtcttttgcttgcgaatctgaatcgaataataatcaatcaatcatcatggccgtcggcgaagaagatcacactgaagagttcggacgccgaggctttcgaggtggacgaggcggtggcgctggagtctcagacgataaagcacatgatcgaggacgactgcgccgacagcggcatccctctgccgaacgtgacgagcaagatcctggcgaaggtgatcgagtactgcaagaagcacgtcgaggccgcgaatcccgaaga

SEQ ID NO: 180917 - DNA, 277 bp, Glycine max
cgaagatttagggtttcgcattgctacttcgcgttcgttcatctctctctcacgcctccaagatttccaagaccagattccaatctggattccattccattttgtacagccttcgataggagtaaacctttgcagatatgggacaaagaagttgtgaatgcccatgttaaacgaccacaggatgaagacatacaatccaatgtactggaaataattggatcaaatattcagtccacatacattacatgctcagctgacccagctgcaacacttggta

SEQ ID NO: 180918 - DNA, 275 bp, Glycine max
cgagataactagacacagtgtgatgaaaatgaaggtccttgttttcttcgttgctacaaatttgggaagcatggcaatgccatgcgtacgatatgttccctctccgaatgaacactggctatggtgcccgtactccggaggtgaaatgcgcaagttggaggcttgctgtggaagcacacaacatctttggctttgagaccattcctgaagagtgcgttgaagcaacaaaggaatacatccatggcgaacaatatagatcagactccaaaacagtt

SEQ ID NO: 180919 - DNA, 275 bp, Glycine max
cagagaggggtttcagtgagtgatcggtgttcacttgatccttcataagtcgtcatcatcatcaacatgaaccacggttgattgaagaagatgccaatcagaaacatcgccatcggaaggcctgaagaggctactcaccccgacacgttgaaggcggggttggctgagttcatctccaccttgatcttcgtgttcgccggttcaggttccggcatcgcctacaacaagctcaccgacaacggcgccgtccatcccgccggcctcatctccgcttc

SEQ ID NO: 180920 - DNA, 270 bp, Glycine max
tgggagaattaggtttttagggtttacaccgagcagccacacctcccggagcagccatgggtctcaaaatggacttatgccgattcagtggtgccaagatctacccaggaaagggcatcagctttgttcgtggtgattctcaggtttttctgtttgctaactcaaaatgtaagatgtcatttcacaattgcctgatgtcttcaaagctcacctggactgcaatgtacagaaagcaacacaaaaaggacattgcacaagaagctgtgagga

SEQ ID NO: 180921 - DNA, 273 bp, Glycine max
cacgaatatcttgttgtttggagcgatccgagaaaaactctgtaaacatgttggtttaccaagaccttccttcaaggtgatgagcttctctctgactccttccgttacaaggaaattgagaatggaatgctgtgggaagttgaggggaagtgggttgttaaaggagcagttgatgtagacattggtgcaaacccttctgctgagggtggaggagaagatgagggagttgatgatgcagctgttaaggttgttgacattgttgacacattcaga

SEQ ID NO: 180922 - DNA, 271 bp, Glycine max
aaaccctcttcatcttgttctatctgtgacgagcatcatggcctcaagagcagtgttattgttgggtaagtggtgtgcttccggcgatggttgtggccattcgcccagcaaagaaccctttttgcgtgaagggtcgtgtctactgtgacccttgccgtgctggttttgagacctcagctaccacctacattgctggtgctgagattatgttgcaatgcaagagcagggttagcaacgaggttgtgtacacgaagaaggggtacaccgactc

SEQ ID NO: 180923 - DNA, 271 bp, Glycine max
gttcaaacaaatcaaagccatggccacctccaacttctctattgttctctccgtctccctagccctccttttgggtgttacttaccaaggcacactcgaccgataccgtttctttcaccttcaacaagttcaacccagtccaaccaaacattatgctccaaaaagatgctagtatttcatcctctggggtgttacaactcaccaaagttggcagcaacggcgtgcccacctcgggatctctcggtcgtgccctttacgctgccccaatcca

SEQ ID NO: 180924 - DNA, 247 bp, Glycine max
gcgagtcggtgctccttcgccacaactctcagaagacatgagcatctccagagattccatgaaacagcacgcgtgccatgggtggcaagaagaacgcctggaggaaaaggagacagtatgagcttggtcgccagcctgctaacactaagctgtaaagcaacaagacagtcaggaggatccgtgttagaggtggaaatgtgaaatggagggcatcgagattggatactggaaattactcctggggaag

SEQ ID NO: 180925 - DNA, 270 bp, Glycine max
agacaaccacctcgacgaaatcgaaacggctaacaacatcaacaagcgcctcaagccatctccaaggggattcagcagactccgccgcgtctgagcccacgcgccatgtcgtcctcgttgaccatcaggaagccggcgtgcgtctcgtccacactctcctggcgtcacgcggaggccgttcagcaggagaatctcaagctcgcggacgcgctcgtcaagcacgtgggcatactcgcggcttcccaagccggcgccatgaggaaggttgct

SEQ ID NO: 180926 - DNA, 273 bp, Glycine max
catgtctttgcctgctttattcagggcattaaaaacaagaggtaacactcccaaatatgggttgataattccactcttcttttattggtcgggcatctgccaaaaataagggtagaatggctcgttatcttgcaaacaaatgctcaattgcatcacggattgactgcttttctgaaaagggtactactgtttttgggcagaaactccgtgagcaagttgaggaacgacttgacttttatgacaagggagttgcccctcgcaagaacatagatg

SEQ ID NO: 180927 - DNA, 273 bp, Glycine max
agaaagagcaccagcgagtttttacaccatctgtgattgaaccatcatttggaattggacgtataatccaattgcctctttgagcacacattctacacgaggccaagcaaagctggggatgaacagttaaatgtatttcgtttcccttcacttgtagcccctattaagtgtacagttttcccactggttcagaatcagaagtatgaggaggttgccaaactcatttccaagtcattgactgctgttggaatttcacacaagattgacactcac

SEQ ID NO: 180928 - DNA, 270 bp, Glycine max
ctcaaggagatggctctgggaagaggcagtgcagtggttctactactttgcttcttgctggttcaatcttaaattggctcctgttgcaacctacacagttggagattctgggggttggacctttaacactgttgcctggcccaaaggaaagctctttcgggctggtgacacacttgctttcaattatagccctgggactcacaatgtggtggccgtgaacaaggctggatatgatagctgcaagactccaagaggagccaaagtgtataa

SEQ ID NO: 180929 - DNA, 273 bp, Glycine max
gcatctttctttctcttcctgcagaagctatccgtgttacttgttcccaagtctccaacaagcaaagttacatggttgatttggaaatccaggtccccagcgcattcgacccgtttgccgaggcgagagaatcagatgcccccggggcaaaggagtatgtgcacatacgaattcagcagaggaatggaaagaagagtctgacaacagtgcaagggctgaagaaggagttcagctacgagaagatcctcaaggacctcaagaaggacttctgct

SEQ ID NO: 180930 - DNA, 267 bp, Glycine max
cttcaaactagggttttacagaatataagctctctctatctttggtcctcgtcattcaaatccaatcccattatcaattatgagtcgtcatcccgaggttaagtgggctcagagacttgacaaggtctatatcacggtgcaattggctgattcaaaaaatgccaaggtggatcttacaccagatggtatttttaccttctctggtagtgctggtgctgaagaccatcagtatgagctaaaactggagctctttgacaaggttaatgt

SEQ ID NO: 180931 - DNA, 264 bp, Glycine max
caaatttctcagatctatccgacgtcgtcgcagatccaccaaccgttatcggctgcttcagcggtgatgaaaacggttccgttttccggcttccttggagccgcagctgccctcgtcttctgctgtatgggagctgcctatggcacagcaaagagtggtgtgggcgtggcttccatgggtgtgatgagacctgagctggtgatgaagtctattgtccctgttgtcatggctggagttttgggtatttatggccttattattgct

SEQ ID NO: 180932 - DNA, 169 bp, Glycine max
agcagacaccgacacagatctgtcttccgaagcaggaactaaatatggctgacttgttggaatggtcaaagcaagataagaaacgaatgcttcatgtcgtctaccgtgttggtgaccttgatcgcaccatcaaattttacacagaatgtttaggaagaagcttttgagg

SEQ ID NO: 180933 - DNA, 165 bp, Glycine max
gttcaaagatgaagatgatccacgttcttttcctctttgctcttgtctcgttcacttcccatgcttctgtcaatgatttctgtgtagcagacctaaaaggtccagatagcccttcaggctatcagtgcaagccacctaacacagtcacagtgatgactttgtgtt

SEQ ID NO: 180934 - DNA, 165 bp, Glycine max
caaagactccataacccaacaatgacgttcaagaggtacgttgagattggaagggttgctcagatcaactatggcaaagagtacgggcggctcgtgatcattgtcgatgtcattgaccagaatagggctcttgttgatgctcccgacatgggaggtcccaagtga

SEQ ID NO: 180935 - DNA, 162 bp, Glycine max
cttttaacaggtcccctcgaaacttctgaagatgggtggcattacattcggacgcttggatgattctttcagtctaacctcaatcaaggcctatattgctgagttccattcaaccttgctctttgtttttgccggtgttggttcagccatacctatggtaag

SEQ ID NO: 180936 - DNA, 163 bp, Glycine max
ggggctaccgctgagtttaagcatatcaataagcggaggaaaagaaactaacaaggattcccttagtaacggcgagcgaaccgggaaaagcccaccatgaaaatcggtcgccctcggcgtccgaattgtagtctggagaagcgtcctcatggcggaccgggcc

SEQ ID NO: 180937 - DNA, 175 bp, Glycine max
tcggctcgagcaacttccaagttaggtcactcttccagatggcgcgtacaaagcaaactgctcgcaagtccaccggcggcaaggctccccggaagcagctggcgacgaaggccgctcggaagtctgctccggcgaccggcggagtgaagaagccgcacaggttaggcctggaaca

SEQ ID NO: 180938 - DNA, 163 bp, Glycine max
ggctccatcttcttcgatctctcaaactctatcggcgcagaaccaatcctatatcactatggggaagacacatggaatgggagctgcccgcaagctgaagtctcaccgtaggagacaaaggtgggctgacaagtcatacaaaaagtctctcttggaaatgaat

SEQ ID NO: 180939 - DNA, 161 bp, Glycine max
ctctctctctacgctttctcgtttgacatccctcaagggatccactaactgaaggagacctggggttgacatttaccaagctttttagccggcttttcgccaagaaggaaatgcgaattctaatggttggtcttgatgccgctggtaaaccaccatcctgt

SEQ ID NO: 180940 - DNA, 165 bp, Glycine max
agcagaagaaggcaaagatagtggcagagctccaagctgtgaagcacaacagtggcaagtcctacaatcagttagcggaggagactggactcaccaacgtctatgttgctcagcttctcaggagacaggctcagctcaatccccaaactgccctctacttcgggc

SEQ ID NO: 180941 - DNA, 151 bp, Glycine max
aaagagactcaggcgctgctgcccttcagtccttcagcaatggtttacgtgaagtcccagaaatcaaaagcctacttcaagaggtatcaagtcaagttcaagatcagaagagagggaaaaaccgattaccgtgtcaggattcggttggtta

SEQ ID NO: 180942 - DNA, 159 bp, Glycine max
attctaagaaatgaagagccctaccattttcattctctatctactttctgccttctacacctcactcctaccttcagccaccgctcaagtcgtggttgacatggcaggtaatgatcttcaaaatggtgggaaatattatgtgttgccgtaatagagtca

SEQ ID NO: 180943 - DNA, 160 bp, Glycine max
cagaacggtgtctccgacgacttccggcgacgaacaggtactatcctcgaactcacctccgattgctgggaataataataatacagtgcaccgtaccacaagttgcaccactgcgcccgagctgctagacgagaatgacaggcttagaaagagaacatgc

SEQ ID NO: 180944 - DNA, 148 bp, Glycine max
aatcggctcgagacttggccttgatattaaaaaaactgaaaggtgcatggcagacccaaatgctgattctgaaaatcctgtcttgaaagaagagcaagatgcccaagttggtaaggggtcacgaggtgatgttacctattgcctactc

SEQ ID NO: 180945 - DNA, 158 bp, Glycine max
ctagcttccaaaccctaacactcctcttcctcttcgatcatcacctctccacaatgccgccgaagttcgacccctcccagatagtcgacgtcttcgtccgcgttaccggcggcgaagtcggcgcggcgagttccctggccccgaaatcggtcccctcg

SEQ ID NO: 180946 - DNA, 156 bp, Glycine max
ctagactcttctttttctctaagtctaaggggtgccctgagatcactttgagcaatggttaaggctgtggcagttcttggcagtagcgagggtgtcactggaactattttcttcactcaggagggaaatggtccaaccaccgaactggatctcttg

SEQ ID NO: 180947 - DNA, 154 bp, Glycine max
gcgacataaagatggtgaaagaagttgggttggattcatacagattttccatctcatggtccagaatattccccaagggcaagggagcagttaacaccttgggggtcaagttctacaacgatctcattaatgagattatgcaaatggtaaacat

SEQ ID NO: 180948 - DNA, 150 bp, Glycine max
ccttgctgctgctgaaggggcaaggatttctggtgcatcaagaatcattggggttgatttagtttctagcagatttgaagaagctaagaagtttggggtcaatgaatttgtgaacccaaaagaccatgacaagcctgacaagaggtgatt

SEQ ID NO: 180949 - DNA, 145 bp, Glycine max
cagccatgagcctcttcggtataggtagaaaccagagaacattccgcccgaaaaaaagtactccttctggaagtaagggagctcaacttcgaaaacatattgatgccacgtttggtagtggaaatctgagggagcagtaaagcta

SEQ ID NO: 180950 - DNA, 148 bp, Glycine max
ctcgagccctcgagccgaatcggctcgagactagaaacagtgtgatgaaaatgaaggtccacgttttctaccgttgctacaattttggtagcatggcaatgccatgtgtacgatatgttccctctccgaatgaaactggctatggtgc

SEQ ID NO: 180951 - DNA, 143 bp, Glycine max
gtttgttgtgagctataagctagtttatcgtgaggagaatatgaagttgtttgtcttctttgttgctgcagtagtcttggtagcatggccatgccatggcgcaggctaccaaaggttccctctccgaataacactggctatgg

SEQ ID NO: 180952 - DNA, 138 bp, Glycine max
ctcaacgaagaggttaaagagacggcaacactttgctgtccgccttgaccgagcagagcttcgtcttggccctcgattttgccctaaagtactctcagtcacaacagacaccgtcgtcgtcgtctcgtcatcaatggc

SEQ ID NO: 180953 - DNA, 139 bp, Glycine max
gtggtttcagtgagtgatcggtgttcacttgatccttcataagtcgtcatcatcatcatcatcatcaccgttgattgaagaagatgccgatcagaaacatcgccatcggaaggcctgaagaggctatcaccccgacacg

SEQ ID NO: 180954 - DNA, 169 bp, Glycine max
ctagaaacgaagccatttccttcctcaccaacgtcgcccgcactgccttcggcctgggcgcagggccaccgccgtctcctcttccctctacaccgtcgacggcggccagcgcgccgtcctcttcgaccgcttccgcggcatcctggactccaacgtcggcgaaggaccc

SEQ ID NO: 180955 - DNA, 178 bp, Glycine max
ctctgcagcaactatgcctaaccctaaggtcttcttcgacatgacgctcggcggtcaatctgctggccgcatcgtgatggagctctacgccgacgtcactccccgcaccgccgagaacttccgcgcgctttgcaccggcgagaagggcgtagggcggagcggcagcccctgcactaca

SEQ ID NO: 180956 - DNA, 176 bp, Glycine max
tcgactttgttgtgagctataagctagtttatcgtgaggcgaatatgaagttgtttgtcttctttgttgctgcagtagttttggtagcatggccatgccatggcgcaggctaccaaaggttccctctccgaatgacaactggctatggtagcgttcttcggagtaaaatgcgcaag

SEQ ID NO: 180957 - DNA, 178 bp, Glycine max
ccgaagaactagaactagggtttcatctttgccatcagtaaacgacaatgatttacgacgttaactctcctcttttccgatccttcctcagccagaagggaggctcctctgataagaggaaatcggacgaacagaagccaaaagagcagaaacccaaagccaacagaacaaacctata

SEQ ID NO: 180958 - DNA, 148 bp, Glycine max
ctctacactaactaaagccgagcagcgagagagagaaaccctagcaaaaatgccggctggtcacggtttgagatcacgcaccagagattccttctctcgtcccttcaggaagaagggtaccatcgccctcaccacatactcagaacct

SEQ ID NO: 180959 - DNA, 175 bp, Glycine max
ccaagatgtcgaagagaggacgcggtggttcggcggggaacaagttccggatgtcgctgtgtctgccggtggcggcgacgttgaactgcgccgacaatacgggggcgaagaacctctacatcatatcggtgaaagggatcaaagggcgtttgaaccgtccccctcggcttgcgtt

SEQ ID NO: 180960 - DNA, 168 bp, Glycine max
cgaacaatttagatcagactctaaaacagttaaccaacaagctttcttttatgctagtgaacgcgaagtccatcacaacgacatatatatattcggcatagataacaccgtactctctaatatcccatactatgaaaaacatggatatggggggaggaatttaatgaa

SEQ ID NO: 180961 - DNA, 166 bp, Glycine max
acggcttgttcagtctttcttggaactttgttactctcacacatgtctcgctccgtgcctttggtttcaaccatttttctcttgcttctgcttctggtggccactgagatgatgggaccaacaatggtggcagaagcaagaacttgtgagctcagagccaccgttt

SEQ ID NO: 180962 - DNA, 165 bp, Glycine max
cgacaagggcttgttgatagtggatcaccaactagccaatgacaagcggacgaagccttatgtgaagaaaatggccacgcgccaggactatttcttcaaggagttttctagagccattactttgctctctgagaacaaccctctcactgttcaaagggtgagatc

SEQ ID NO: 180963 - DNA, 168 bp, Glycine max
ccaatgatcaaattgctgcggaccttaaagagcatgttatcaagcctgtcattcctgagaagtaccttgatgagaagcccatcttccaccttaacccttctggccgttttgtcattggtggccctcatggtgatgctggtctcactggaagaaaatcatcattgatac

SEQ ID NO: 180964 - DNA, 169 bp, Glycine max
aggtcgctccgcaccagtttcaccgcacgaatatcttgttgtttggagcgatccgagaaaaactctgtaaacatgttggtttaccaggacctccttacaggtgatgagcttctctccgactccttccgttacaaggaaattgagaatggaatctgtgggaagttgaggg

SEQ ID NO: 180965 - DNA, 155 bp, Glycine max
ccactgcataccttaggtcttccgaattcgaagttaatttgcaagatggctaaggcaaaggctcagatcaacattgtggctggtggtcatgtggaccctgaggcggcaaccaccattaacgagctgaagaagcctgttgtggagcagaagctcca

SEQ ID NO: 180966 - DNA, 159 bp, Glycine max
cacctttgttcactcttcttctcttgcggctagggttttagcgcaggtcttctagatttaaggaagatgggtaaggaaaaggttcacatcagtattgtggtcattggccatgtcgactctgggaaatccactaccactggtcactgatttacaagcttg

SEQ ID NO: 180967 - DNA, 161 bp, Glycine max
cctgctcgtgcctctagggttatcatatctccatttccatttcctctctctcagtttccaagaatctctaagctatgggaaagtcttacccaaccgtgagcgctgattaccagaaggccgttgagaaggcgaagaagaagctcagagcttcatcggtgaga

SEQ ID NO: 180968 - DNA, 159 bp, Glycine max
ctgctttctcctggctcagaaacatcttccatgactgtgctgttcagagttgtgatgcttcactgttgctggactccacaagaaggagcttgcctgagaaggaaacagatagaagctttgggttgagaaatttcaggtacattagaccatcaaagaagc

SEQ ID NO: 180969 - DNA, 160 bp, Glycine max
cccacgacaatgtttgtccaagtccagacgccacacatgattttcacaggtcttgaagattacaaggccagaggaacacaagcagccccttactttactttgaccttttacacagaatttgcagagagcaaggacttggtactgtccgtggggatgttgt

SEQ ID NO: 180970 - DNA, 158 bp, Glycine max
cctaaaacagttaaccaacaagctttcttttatgctagtgaacgcgaagtccatcacaacgacatatttatattcggcatagataacaccgtactctctaatatcccatactatgaaaaacatggatatggggtggaggaattaatgaaaccttatat

SEQ ID NO: 180971 - DNA, 130 bp, Glycine max
cctctattgggcaaatggcaggagtctgaatatggaggtggtcagtctgttcctgttggtggtattgcatactacatcactgcaccttccagcttagctgatatggcagccactcctttccatgcattat

SEQ ID NO: 180972 - DNA, 157 bp, Glycine max
cggagaagagaagttttgtgcaaaatccttgggaacagtaattggttttgccatttcaaagctgggaaagaacattcaagtactttcaagttcctttgtcaataagcaagaccaatacactgtggaaggagtccagaatctggagacaaagcagtga

SEQ ID NO: 180973 - DNA, 156 bp, Glycine max
  unsure (1)..(156): unsure at all n locations
cgaaggtgtanactgacagcctccaaatccaatggcttcagagaagaaactttcgaacccaatgagggagctaaaagtgcagaagctcgtcctcaatatctctgttggcgagagtcgagatcgtctcaccagagccgccaagtgttggaacaactt

SEQ ID NO: 180974 - DNA, 155 bp, Glycine max
agaattttctagggtttatacaattatcgatggcttcttcagatgttgagtaccgttgctttgtcggtgggctcgcttggggcactgacgaccaagctctcgagagagccttctctcagtacggcgaaatcgttgaaacgagattatcaacgatc

SEQ ID NO: 180975 - DNA, 154 bp, Glycine max
cttcgagataactagaaacagtgtgatgaaaatgaaggtccttgtcttcttcgttgctacaattactcgtagcatggcaatgccatgcgtacgatatgttccctctccgaatgaacactggctatggtgcccgtactccgacgtgaaatgcgca

SEQ ID NO: 180976 - DNA, 153 bp, Glycine max
cactaactaaagccgagcagcgagagagagaaaccctagcaaaaatgccggctggtcacggtttgagatcccgcaccagagattccttctctcgtcccttcaggaagaagggtaccatcgccctcaccacatacctcgaacctaccacgtcgg

SEQ ID NO: 180977 - DNA, 152 bp, Glycine max
cgcaatcccagctcatcctcttctcacagatgacgattatccacaaatacgtggcgcttttaccaatttcaatgtgtgggtcactccatacaataggactgagaagtgggctggtggactctacgttgatcacagcatggagatgatacttt

SEQ ID NO: 180978 - DNA, 145 bp, Glycine max
tcgatttttcaccagttcagtgataaactcagaagctaggctagacattttcagctttctaccgggggacgttctggttgcatcgttggatgcattcagtagagtgtgcgatgccggtgaagtaactggaaaacatgtcatgtca

SEQ ID NO: 180979 - DNA, 277 bp, Glycine max
ctttgaatatctgttcattaagaagattctttcagccagagacatagggactgggtgcatgttatttgcttctctgctggatgatatcggcatagatttacctaaagcaccaaataattttggtgagataatagggaaactagttttggctgggggtttggattttaaggtggtgacagacatccttaagaacgtggaggatgaccggttccagaaagcactatttcttctgcgctggaggtaattactctgcatctgggcaaactgtgctggatgc

SEQ ID NO: 180980 - DNA, 305 bp, Glycine max
  unsure (1)..(305): unsure at all n locations
gcgtttttggatcggaacctcttctgcggcgtangcaatgggacactccaacgtttggaactctcacccaaaaaactacggtcctggttctggcacttgccgtgtgtgtgggaatccacatggactgatcaggaagtatggccttatgtgctggcggcagtgcttccgtagcaatgccaaggaaattggcttcatcaagtatcgctaaaagagcagttgtcaactacggaccaatattgtgttctggcactaggatgttttgaggatgttatgtttgaagacacttgagactttctttttcatct

SEQ ID NO: 180981 - DNA, 307 bp, Glycine max
  unsure (1)..(307): unsure at all n locations
attcacaaccgaaacagtttccatctctctcacaaaatgacaacaatatcaaattgctcccttctcttcctcttcctcttcctctccaccctccacatagcttccaccctctcaacccccaccaacttcatcaagtcctcctgcagcaccacccagtacccagccctctgcatccagtccctctccgtctacgcctccaccatccagcaagacccccacgagctcgtccagacagccctctccctctccctcaaccacaccgagggccaccaaaccttcgtcgncaaatgcaacaattcagaggctc

SEQ ID NO: 180982 - DNA, 311 bp, Glycine max
ctcgagtccaaactctcctcctacccaaaatggatgcaagggcatcatcttcttcagcttcctcgattcttttccttgcagcaattgtagctgcttatttctattcatcagaagcagctgtgtccaaaggatcttttgaggacaatttcagcataatgtggtctgaggaccattttactacctctaaagatggacagatctggtatctctcactagacagcgacacaggatgtggatttcaaacaaaacaacgctaccgatttcggtggttcagtatgaagctgaagttggtagcacgtgactctgctggt

SEQ ID NO: 180983 - DNA, 312 bp, Glycine max
caaccaacctcactctctctttctctctgttttctggtaattcatcaattgattcaaaatgcagaggctcaaactgcaactagtgctattcctctcaatctcaacttctcacactgttttctccttcactgatgggttgttgccaaatgggaacttcgagcagggcccaaagccatcacaattgaaggggtccgtagtgacaggccacgatgccataccgaattggacaatttcggggttcgttgaatacataaaatcaggacaaaaacagggtgacatgttactggttgtgcccgacggtgactatgcagt

SEQ ID NO: 180984 - DNA, 291 bp, Glycine max
cagaaatttaagtgaggagctagagaatgatgatgaagtctgctatgtgtgcagtggtggttgtagcacttcttcttctggcggcggtggggcccatggctgaggctgtgacatgcaccccaacagagttgagtccgtgtcttccagcaatcacttccggtgctaaaccttccaatgcttgttgcacgaagctgaagcagcaaaaaccatgcttatgtggctacctcaaaaacgctagcttgaagcagtatgttcactctcctaatgcacgacaaaccgttgcttcttgtg

SEQ ID NO: 180985 - DNA, 188 bp, Glycine max
ccgactccttttggttgctacagagacagggagacaagacagagtagtacagattactaccaatggctaccaaggtttacattgtttattattctacgtatggacatgttgagaagctagctagagagatagaaaaaggggctgcttctgtggagggagtagaagcaaaactgtggcaggtacctgaa

SEQ ID NO: 180986 - DNA, 309 bp, Glycine max
ccacaagccaagtgaaagagagaagaaaagtcaaagacaatgtcagggatcattcacaagattgaggagacccttcatgtgggaggccacaagaaggaggaggagcacaagggtgagcagcaccatggtggagaatacaaaggggagcatcatggtgaacacagtactgaatacaaaggagagcatcatgttggtgagcacaagccggagcaccatggaggagacgagcacaaagaggggttcctagacaagatcaaggacaagatccacggcgaagagggtggcgccccgccgagggcgagaagaaga

SEQ ID NO: 180987 - DNA, 310 bp, Glycine max
ctgctgcataggaagaaaccctagcctctcaccctccctgcgacacgatgcagatcttcgtgaaacccctaacgggtaagacgatcacccttgaggtggagtcttctgacaccatcgacaacgtgaaggccaagatccaggacaaggaaggcatccctccggaccagcagcgcctcatcttcgccggaaagcagctggaggacggccgcaccctcgccgactacaacatccagaaggagtccaacctccacctcgtcctccgtctacgcggtggcgccaagaagcgcaagaagaagaactacaccaagcc

SEQ ID NO: 180988 - DNA, 305 bp, Glycine max
  unsure (1)..(305): unsure at all n locations
gcattattctcttcccttttctatctccctctgcaaaaacgngtcaatgggtcggcttaatctcctacttgtgtggtcactctctttaacacttttccttaattatctacacccaacctctgcccagctcagtccaaaccactatgctaacatatgccccaaccttgaaagcatcgttagacaagccgttactaataagttccaacaaacctttgtcaccgtcccagccacccttcgcctattctttcacgattgctcttgtccaggttgtgatgcttccgttttgattgcatctacggaaataa

SEQ ID NO: 180989 - DNA, 306 bp, Glycine max
tctgggtcgacggaagtattgcatgtttttggtaagcaaaagccagactataatgggctaagtcaccttaaaattgtgaccatgattttatacgaggttctcaggttatacccacctttaatttattttgctcgagcgatcaagaatgatgtgaaacttggaaacctttccctacctgcgggagtgcaagtttccttaccaatactattgattcaccaggatcgtgatatttggggtgatgatgctacagagttcaaaccagaaagatttgctgaaagagtagcaaggcaacaaagggccaggtgt

SEQ ID NO: 180990 - DNA, 300 bp, Glycine max
gttcataccctgcttcagatacaatgcgttgatcagaagggcttgtgttatgacattatgaggatttctaaagactctgatattaaggttgcttttggtcgattttcttcaagtgtgaaaggctttcggaatatagacttgtttgtccagcacaacgatgggaaaaagatcatagatcctgaaagccagaaaaccttgtgttcatgcttaaaagaagagatgcttcatccgttgcgggtgacgatagtgaaccggggtccagacacagaacttctggttgctaatcctgtggagctgagt

SEQ ID NO: 180991 - DNA, 271 bp, Glycine max
ggcacttggaatccaaaaatgagagaaatcatcagcattcacataggtcaggccgggatccaggttggcaactcctgctgggaactctactgcctggaacatggcatccagcccgatggcatgatgccaagtgactcctccttcggtgtcgaccacgacgccttcaacaccttcctcagcgtgcacggatcacgcaagcacgtccctcgagccgtcttcgacgatctcgagcccaccgtcatcgcagaactccgttgtggcacttaacgtc

SEQ ID NO: 180992 - DNA, 308 bp, Glycine max
cggctcgaggaaaaaaaaaaacagcgccctagatttgctcttctttgcttcggaacaaagagaacaacaaataacaatggcgttcgcttctttcctcggcagagttctcttcgcttccgtcttcatactctctgcttaccaagaatttaacgactttggagttgatgggggacctgcagcaaaagcactcagacctaagtttgatgcctttacacatcgagtgcattctcaagttggctttcaacttcctgagattgatctgaaatttttaattgctggggctattgctctgaagggccttggagggg

SEQ ID NO: 180993 - DNA, 296 bp, Glycine max
attgagagacaaaatggccaaatcaatcaaattctttgagttgaacacaggggccaagattccatctcttgggttagggacttggcaagctgaacctggtgttgtagctgaagctctcaccacagccattcaggttggatacaggcatattgactgtgctagtgcgtataagaatcaagcagagattggttctgctcttaagaagctttttgatgatggtgtggtgaagcgtgaggacttatggatcacttccaaactctggtgttcagatcatgcaccagaagatgtgcccaaag

SEQ ID NO: 180994 - DNA, 272 bp, Glycine max
cttggtttatgggaagagagcaaggcaggaagtcagtgtttataaaacgacagtaggagcctggtctggtcggtgtggcactcaaacattgtttgttgtaggaagaggaatcttgagacatggcaggggacagcaagagcaagattctgttcatcggagggactggttacatcggaaaattcatcgtggaagccagcgccaaagctggccacccaactttccttttggtgagggagtccactctctccaaccccgcaaatcaccctcatcga

SEQ ID NO: 180995 - DNA, 308 bp, Glycine max
cggttttagggcacacaccgcagctttaagctcagggaaacgttttatttcacactctgcgattcgcgatggccgacgatgactatgaggatatcgacatggggtacgaggatgagccaccagagcccgagattgaggaaggtgcagaggaagatttggagaacaaaaacgatgagttaactggagagcctattgacactgaggataaggaagaggaccaaccagtggagcggcctcgaaagacatcgaaatatatgactaagtatgagcgtgctaggactttacgtacccgtgctcttcaaatcagt

SEQ ID NO: 180996 - DNA, 283 bp, Glycine max
aacttcccgatctctctctgtctctatatctgtatttctgaattttgggaatagaaaaaccctaagcaaagcaaagcggtaacgatggggaacacggagaagctgatgaaccagatcatggaattgaaattcacttcgaaatcgctgcagcgtcaatcgcgtaagtgcgagaaggaggagaaatcggagaagctgaaggtgaagaaggagatcgagaaaggcaacatggacggcgctcgaatctacgcggagaacgcgatccgtaagcgcacggagcagatga

SEQ ID NO: 180997 - DNA, 270 bp, Glycine max
gtgaggttgttgctgttactggtgatggaactaatgatgatcctgcactgtgcgaggcagacattggacttgcaatgggcatagcaggaactgaggttgccaaagaaaatgccgatgtcattataatggatgataacttcacgactattgtcaatgttgtcaaatggggacgtgcagtatacataaacattcaaaaattcgtgcagtctcaattgacagttaatgttgttgctctggttatcaacttcttatctgcgtgcatcactcgat

SEQ ID NO: 180998 - DNA, 278 bp, Glycine max
cggcgttcagtgttcaccacagtttacacacgagtacccattttctcttctcaatttctcagagtgtgcagagaaaatcatggtggacgcagcagaacgtaggtacttggaggatgacgattcatcactcatgaaaactattaagggggcaacaactggtttagttgctggcactcatctgggggaccgtagttgccacctggtatgatgtccctcgtgtagagagaaatgttgctcttccagggctgattaggactttcaagatgatgggcaactat

SEQ ID NO: 180999 - DNA, 297 bp, Glycine max
ctctttgcaacacaacattataagacaacacagagagaagcgtcttaataaacgctcttctctgaaaaacctgatttcttctcttcttctcttctctttcgtatcgatcttcgatctctgaaaatgagagagtgcatttcaatccacatcggtcaggccggtattcaggtcggaaacgcctgctgggagctctactgcctcgaacacggcattcagcctgatgggcagatgccaagtgataagactgttggtggaggtgatgatgctttcacaccttcttcactgaactggggctgg

SEQ ID NO: 181000 - DNA, 300 bp, Glycine max
tgcagatggctaatccacacattgcactgctcaaactcacctccatcttcattgtcattgcctcagcacctgagctgtgtggaagcagtaagactttcactctagtaaattactgcaaggagacaatatggcccggaataacgcgcagtgacaaccacagtggcgatggcttcgcattgaaatctgggcactcaactgtatatactgctcctgatggatggagtgggaggatatgggctagaacaggctgcaactttgacaacaatggccatggcaagtgccaaactggtggctgtggca

SEQ ID NO: 181001 - DNA, 270 bp, Glycine max
agtggttgcgcctctgcctgtaagagtgaaaaaaccttctcttttccttctctcaagtctcaagagatttcatcatggctccaaagaaggacaaggctccaccaccttcctccaagcccgccaaatctggcggtggcaagcagaagaagaagaagtggagcaagggaaagcaaaaggagaaggtgaataacatggtgctgtttgatcagggcacctatgataagctcctttctgaagctcccaattcaagctcatcactcctccaatctt

SEQ ID NO: 181002 - DNA, 314 bp, Glycine max
ctcttcttcgtctcaagtctcttcgttccttcgattcgttccatttcttccaaaatggccaaagacccagttcgcgttctcgtcaccagagctgcagggcaaattgggtatgctcttgtccctatgattgctaggggagtgatgttggtccctgaccagcccgtgatcctccacatgcttgacattcctccggcagcagagtcattgaatgggggtataatggaattggtggatgctgcattccctcttcttaaaggtgatgttgccacaactgatgtgggtgacgcatgcactggggtcaatattgccgtgat

SEQ ID NO: 181003 - DNA, 289 bp, Glycine max
caatagctttcctcggttataaccttcaaggtggaaagaaaaacccacccactatcccaattccaataaataccttcctctctatattttcgcacaataccctctcacccttcaacgatgagttactacaatcagcagcaaccacccgtcggtgttcctcctccccaaggttacccaccgccggattcttacggaaaggacgcgtaccctccgccagggtacccgacgcatagacggatacctccgcacgcgtattcagcacaggggtaacctccacctacgcggctct

SEQ ID NO: 181004 - DNA, 280 bp, Glycine max
ctcgaaaattctcagtttgcagagaaaatctgaatcatgtcgtggcaagcgtatgtcgacgatcaccttctgtgtgacatcgaaggtaaccacctcactcacgctgctatcatcggccaagacggcagcgtttgggctcagagtaccgacttccctcagttcaaacctgaggagataactgccatcatgaatgactttaatgagcctcgatcacttgctccaactggattgtatctcggtggcaccaaatatatggtcatccagggtgaacccggtgctg

SEQ ID NO: 181005 - DNA, 309 bp, Glycine max
cacgcactgagttagagtgagagacactagtgactgacttttcgagaaaggaaaaaaaaagagtttccggcattattccatcatgaacgctcttcccattcttctcttcttcctcttcgtttcggcattagtttatgcgaagaaaactggcgatgtgacggagttgcaaattggcgtgaagcataaaccagcatcatgtgaagttctggcacacaaaggtgacagagtcaaagtacactatcggggaaaactcactgatggaactgttttcgattctagctttgacagacataatccaattgactttga

SEQ ID NO: 181006 - DNA, 308 bp, Glycine max
acgcaactgaataggataaccctaagagatgaagagaactcctatcttgttccctctcttctatcttctttgtgccttcacctcatatctaccttcagacaccgctgatgatgatcatgtgtacgacactgacggcgataagcttcaatacggtgtcaattatttcgtgttgccagtgataagaggaaatggcggtggaatacaagtagcaaaagcaggaaacgaaacttgccctctgactgtggtgcaatctggcaacgagctctctcaggggttaccgataaagattgcatctcgatcagcaggag

SEQ ID NO: 181007 - DNA, 299 bp, Glycine max
acaaagcacaaagcaaagctcatccttgagttaaaaaatggcagcagcttcttccatggctctctcatccccatccttggctggcaaggccgtgaagctgggcccatcagccccagaagtgggaagggtgagcatgaggaagaccgtcaccaagcaggtctcctcaggaagcccatggtacggcccagaccgagtcaagtacttgggcccattctctggcgagcccccgtcctacctaaccggtgagttcccaggcgactacggctgggacactgctgggctttccgcagacccagaaa

SEQ ID NO: 181008 - DNA, 300 bp, Glycine max
cgacaagagaattagggtcacgagggtttcatcctgcggcatcagacatgggaggaggcaatgggcaaaaggcaaagatggctcgcgagaagaacatcgagaagcagaaggccgcctcaaagggaagccagctggattcaaacaagaaagcaatgtcgatccagtgcaaggtgtgcatgcaaacatttatgtgcaccacatcggaagtgaagtgtagggagcatgctgaagccaaacaccctaaatctgatgtttatgcttgtcttcctcatctcaaaaagtgaacatattggagagtgc

SEQ ID NO: 181009 - DNA, 269 bp, Glycine max
gtttccacactgcataccttacgtcttccgaattcgaagttaatttgcaagatggccaaggaaaaggctcagatcaacattgtcgtggttggtcatgtggaccctgaggaggcaaccaccattaacgagctgaagaagcctgttgtggagaaagaagctccagggcatgccatatgagggcatgcacgtacggcctcggaggggaaccagaaaattatgttaacaaaataatctggaaccccaatgtatcagtgtcctcctcagtgtgt

SEQ ID NO: 181010 - DNA, 264 bp, Glycine max
  unsure (1)..(264): unsure at all n locations
tcgtcattcggctcgaggcttgtgttagtgaggttagaagataaagaaagaatggcatttgcaggaacaacccagaagtgtatggcctgcgacaaaacggtttatctggttgataagttgaccgcggataaccgagtgttccacaaagcttgcttcatccgncatcactgcaaaggaaccctcaaggtctctctccctcttttacaattcttgttgattatatagtctctatctagttcaggcttctagctttggatctggtgt

SEQ ID NO: 181011 - DNA, 270 bp, Glycine max
ctcacactcattccgtgctctaaatctcaaattctagggttagggttcccaatttctccgccaatcagaagatgagttccaccggtggttctaccaagggcggaaggggcaagcccaaagcctccaaatccgtttcaagatcgcagaaagctggtctccaattccccgttggaagaatcgctcgattccttaaggctgggaaatacgctgagcgtgttggtgctggtgctcctgtgtaaccctctgcagtgttcgagtatctcgctgctg

SEQ ID NO: 181012 - DNA, 300 bp, Glycine max
cactgcgctaaccccttctctctctctctctctgctcggttctccgatcgccgtcttcgccttgcccattcctgatcaatatgtctagaagatatgatagccgtacaacaatcttctcccccgaaggacgtctttaccaagtggagtatgcaatggaggccattgggaatgctggaactgcaatagggatcttgtcaaaagatggggtagttctggttggtgaaaagacggtcacatccaagctgctgcaaacctcaacctccactgagaaaatgtacaagattgatgatcatgttgcat

SEQ ID NO: 181013 - DNA, 215 bp, Glycine max
atcgagataactagaaacagtgtgatgacaatgaaggtccttgttttcttcgttgctacaattttcgtagcatggcaatgccatgcgtacgatatgttccctctccgaatgaacactggctatggtgcccgtactccggaggtgaaatgcgcaagttggaggcttgctgtggaagcacacaacatctttggcttcatcacccttcctgaagagtg

SEQ ID NO: 181014 - DNA, 227 bp, Glycine max
catggatctaatagcaggtgggactgagagttcagcagtaacagtggaatgggcaatcacagagctattgagaaggccagagattttcaagaaggcaacagaggagctagacagggtaataggtagagaaagatgggttgaagagaaggacattgtaaatttgccttatgtgaatgccattgcaaaggaagcaatgaggctgcaccctgtgcgcacaatgttggtgc

SEQ ID NO: 181015 - DNA, 306 bp, Glycine max
cgagtcctcaaagatctatgcttacctcttcctctgcatgatctttctctcttccgccactcccattctccgttgtggctactgtggcaaaccccccaaaaagcacaagcctggtaacacaccaaagacacccaaaacacccgttgttaagccaccagtcaccatccctcccattaatgttcctcccgttgttcttccaccaatagtgaagcctccaggtattctccctccaattccaattattaacccaccacacacaccagggaagggagggaacactccatgcgcaccaccaaagtctcctgc

SEQ ID NO: 181016 - DNA, 292 bp, Glycine max
  unsure (1)..(292): unsure at all n locations
cggagaccaaaaggcaagaaaactctcaaaaaactattatagcaatggcagaacaaaaccaaaaccacacaactgcagctgccagngcacaagaggttggtcacaagagccttctccagagtgatgctctttaccagtatattctggagacaagtgtctacccaagagtacctgaatccatgaaagaactgagagagttgacagcaaaacacccatggaacatcatgacaacctctgcagacgaagggcagttcttgaacatgctccttaagctcatcaatgccaagcacac

SEQ ID NO: 181017 - DNA, 302 bp, Glycine max
attgaatctcagaattctctaaaagagatctttttctgctctttgaagaaagaagggtctttgcttgattttggagatgtctctgctctcagatctcatcaaccttaacctctccgataccaccgagaaggtgatcgcagagtacatatggatcggtggatcaggaatggacctgaggagcaaagcaatgactctcccaggaccagttagcgacccttcagagcttcccaagtggaactatgatggttccagcacaggtcaagctcctggtgaagacagtgaagtgattttatacccacaag

SEQ ID NO: 181018 - DNA, 298 bp, Glycine max
gggaaaaggggcaaagggattgataacaggtaaaacctcagcttcagccaaagacaaagacaaagacaagaagaaacccgtttctcgttcttctagagctggtcttcagtttcctgttggacgaattcaccgtcttttgaagtcaagggtgagtgccaatggaagagttggggccacagctgctgtgtattctgctgctatactggagtatctaactgcagaggtgttggagttggctggtaatgcaagcaaggatctgaaggtgaagcgtattacccctagacatttacagcttgct

SEQ ID NO: 181019 - DNA, 295 bp, Glycine max
cagattttgattcgattcgattcgattcagtcgaggttttaagcagcagcaagatgtctgggcgtggaaagggacgaaagggattgggaaaaggaggagcaaaacgacatcgtaaggtgctccgcgacaacattcagggaattacgaagccagcgattcgtcgtttggctcgcaggggtggcgtgaagcgtatcagcggtttgatctacgaggagactcgcggtgttctcaagatcttcttggagaatgtcatccgtgacgccgttacttacacggagcacgctaggaggaagac

SEQ ID NO: 181020 - DNA, 298 bp, Glycine max
caaggacacatttgtcttcagtatagatggcaccgtactctctaatattccatactacaaaaaacaccgatatggggtggagaaatttaactcgaccttgtatgatgaatgggttaacaagggcaatgcaccggcactgcccgagactcttaagaattacaacaagctggtgtctcttggcttcaagattatattcttgtcaggaagaacactggacaaacaggccgtaacagaagcaaacttaaagaaggctggctaccacacatgggaaaaattcactttcaaggatccacaagat

SEQ ID NO: 181021 - DNA, 284 bp, Glycine max
  unsure (1)..(284): unsure at all n locations
accactcgcatcttgttcctccgctcaacaactataacaacatctttctctctccgaacagatcacactatggccacctcaagcgccaaatcagtccatgatttcaccgttaaagatgccaagggaaatgatattaatcttggtgactacaaaggaaaggtccttatcattgtcaatgttgcctcacaatgtggcttgactaattcaaattacactgagctcagtcagttgtatgagacatacaaacagataggtctggagattctggcatntccatgcaatca

SEQ ID NO: 181022 - DNA, 279 bp, Glycine max
gagtgaaaaccttctcttacccttctctcaagtttcaagagatttcatcatggctccaaagaaggacaaggctccaccaccttcctccaagcccgccaaatctggcggtggcaagcagaagaagaagaagtggagcaagggcaagcaaaaggagaaggtgaacaatatggtgctgtttgatcatcggcactatgacaagctcctttctgaagctcccaaatacaagctcatcactccttccattctctctgatcgtttgagggataatggatcacttgc

SEQ ID NO: 181023 - DNA, 296 bp, Glycine max
ctcagccaaaacctgcaaaacctctacctgacatcatcagtcagagtggccaccagcatgccatagcgtatgtggagggagataagtattatggagccaaggcaaccataaacgtctgggacccaaaaattcaacagcccaatgaatttagcctttctcaaatgtggattttgggtggctcttttggtcaagatctcaacagcattgaagcaggttggcaggtcagccctgatttgtatggagacaacaatactagactcttcaattattggacaagtgatgcctatccagctact

SEQ ID NO: 181024 - DNA, 278 bp, Glycine max
tgcagatgctaggtgccaactctgggagaaggcatggagatcagggaaatgaaagatcaaatcaaagaacttgttggtctcttacggcaaagcgagatgaagagaaaggaagttgagaaggagctaaaagtaagagagcaagctgttggaaccacattggctacaccaccatctggagactccccaaatccatcgaaacaatatgctgaagacatgaaggggctcttatcaccagtgtctatgccagtgcctaaacagctaaaatacacgccagggtt

SEQ ID NO: 181025 - DNA, 281 bp, Glycine max
gtgaaaaactcactcactgagcggattgaaaatctgcccagaattcttgggttggaaaaggtggtgctcttactggagaaatcagcgcggaacaactaaaagatcttggatgcaagtgggttgttcttggacattctgagcgaagacatgttattggagaaaatgatgagtttatagggacgaaagctgcctatgctttgagccaaggtcttggggtgattgcatgcattggagaattgttagaagaaagggaggctggaaaaacttttgatgtttgtttt

SEQ ID NO: 181026 - DNA, 283 bp, Glycine max
ctcaaagtttcacttcagccttatccggtttagggtttcggtttttgacccaacctttgacgtatcgaaaccttaagtttcggatcaggtctgagcaatctggttggtagaacctttggtcttagagagtcaagttttatgtctgaattagacgatcaaattcctactgccttcgatccttttgctgatgcaaatgctgatgactcgggtgctgggtcaaaggagtatgtgcatattcgcgtacagcagcgaaatggaaggaaaagcctgacaaccgttcagg

SEQ ID NO: 181027 - DNA, 286 bp, Glycine max
aagaactagaactagggtttcatctttgccatcagtaaacgacaatgatttacgacgttaactctcctcttttccgatccttcctcagccagaagggaggctcctctgataagaggaaatcggacgaacagaagccaaaagagcagaaacccaaagccagcgagaacaaacctataatgactgagtgataacagctgagctgcattcagttgtagaatgaaaataggtggtaggtactgtatttggtgctaaactaagatctttttggctgtgtctgaagtatatg

SEQ ID NO: 181028 - DNA, 284 bp, Glycine max
gggtttttctagggtttggaggctatgccgaaaacgggttaaataagctcggaaaatgattctcacaaaagcagtaccgatgcatacactcagctagttgtcaatgtactaaagggcatttaagtgaagatatgatattcttagtatttcataatttgaattggaatcccaagctaattgcaactctatcatgtgtgtgcaaatggtttgatgatcttgccaagcgagttctatggaaagagttttgtcgaacaagagctccgaaaatgttgttgatctgcaat

SEQ ID NO: 181029 - DNA, 283 bp, Glycine max
gagtttgttgtgagctataagctagtttatcgtgaggagaatatgaagttgtttgttttcctttgttgttgcagaagttttggtagcatggccatgccatggcgcaggctaccaaaggttccctctccgaatgaaaactggctatggtgagcgttcttcggaggtaaaatgcgcaagttttaggcttgctgtggaagcacacaacatccgagcctttaaaaccattcctgaagagtgcgttgaaccaacgtaggactacattaatggcgaacaattagatcag

SEQ ID NO: 181030 - DNA, 288 bp, Glycine max
gagataactagaaacagtgtgatgaaaatgaaggtccttgttttcttcgttgctacaattttggtaacatggccattgccatgggtaggatatgttccctctccgaatgaacactggctatggtgcccgtactccggaggtgaaatgcgcaagttggaggcttgctgtggaagcacacacacatctttggctttgagaccattcctgacgagtgcgttgaagcaacaaaggaatacatccatggcgaacaatatagatcagactccaaaacagttaccaacaagctta

SEQ ID NO: 181031 - DNA, 289 bp, Glycine max
gaaacagtgtgatgaaaatgaaggtccttgttttcttcgttgctacaattttcgtagcatggcaattgccatgggaaggatatgttccctctccgaatgaacactggctatggtgcccgtactccggaggtgaaatgcgcaagttggaggcttgctgtgccagcacacaacatctttggctttgagaccattcctgaagagtgcgttgaagcaacaaaggaatacatccatggcgaacaatatagatcagactccaaaacagttaaccaacaagcttattttatgccag

SEQ ID NO: 181032 - DNA, 284 bp, Glycine max
caaccatacagtactcctcactagctataccctggttaatccatggagaaagaagctgttggccttgaaatcactactgagctaaggttgggccttcccggtggggaattacctgacaagaacgagaagatacagaagagggtgttctccgagattcaagctcatgatgatgatgaaaacagttcctccgaacaagaccgcaaaatccaaaccaagaatcaagtggtggggtggcctccggcgtgttcgtaccgcaagaagaacaccgtcaagaaaccaaaatg

SEQ ID NO: 181033 - DNA, 282 bp, Glycine max
  unsure (1)..(282): unsure at all n locations
caaaactcaaaacttctcttttctttcattctctctcttttattcttatcatcacaatgccttcaattcncgaagcgcgcctcctggctccgaacccggatcgcttctgcatgttcccaatccaatacccgcaaatctgggaaatgtacaagaaagccgaagcctcgttctggacggcggaggaggtggacctctcccaggacctccgccactgggactccctcaccgacggcgagcgccacttcgtcacccacgtcctcgccttcttcgcgcctccgatgg

SEQ ID NO: 181034 - DNA, 279 bp, Glycine max
ggtgaatgcgtagaaaaggaaaataaagaaattcgcgtgaaaaatgttgggtgtgttcagcagctccatagtgtcgccgccggaggagctcgttgccgccggcagccgtacaccgtcgccgaagatgacggcggcggcgctgcggaagtggttcgaggagaagaacccctccgcagtgtcggtggaggtcggagagcatgtccagctcgcttatacccaccagaacgagtcgccgtttcagcccagatcctttgctgtgaaggatgaggtatctgcttg

SEQ ID NO: 181035 - DNA, 285 bp, Glycine max
gctaaagatactgctttgtgcacttcctgtcagtgcttgtggtttggattcagaatcaactaaaacaaaagaagaccaaggagatagtattcaactatgtaaatcagctgtgcgagagcttgccaagtccaaatggagagtcagtagtagactgtaatagcatttatggattgccaaacatcacgtttactgttggagacaaacctttcaccctcacccctgagcagtatattctgaaaactggagaaggcattgcagaagtttgccttagtggtttattgcttt

SEQ ID NO: 181036 - DNA, 282 bp, Glycine max
caaaagattaggttttgtcatgtcgggcatggacacgcttcagaggctgttcgcgggtgcccgtggaacggctgggccatcccccaccggattcccccaccctcgattcctccgagcaggtctacatctcctccctcgcccttctcaaaatgctcaaacacggaagagctggggtacccatggaagtgatgggtctgatgttgggggagttcgtggatgcgtacaccgttcgcgttgtggatgtgtttgcgctgcctcacagtgggaccggtgtagcgttga

SEQ ID NO: 181037 - DNA, 286 bp, Glycine max
tctcttgcttcttgcttctattacttgcttctttcttcaccatgtcacttgctgggaaaatcaccaatgaaattggggttcatgcaaccgctgcaaagtggttcaacctctttgcaacacaacttcatcatgttcaaaaccttactgatagagtacatggaaccaagctgcatcaaggtgaagactggcatcacaacgagacagtcaaacactggacttataccatagatggtaaggctacaacatgtctggagagtattgaatccattgatgacagaacacaaca

SEQ ID NO: 181038 - DNA, 286 bp, Glycine max
  unsure (1)..(286): unsure at all n locations
ctaaactccactcccagtaaaagttaaattcatttacgtctggtctttttcaacggtaaacaatccattggggtncaatatctagtcataataaatgtcatcatccccgcaggagttgggatcacaaatctttcgctaacactcattaattgcaagaatggcacttcgttgcttggtgatgtccctttctgttctcttcactcttggtcttgcgagagaaagccatgccagagacgaagatttttggcatgctgtttggccaaacactcccattccaattcattgc

SEQ ID NO: 181039 - DNA, 277 bp, Glycine max
cgatgcctgagggaagctggaagtgcgaaagtgtaacaacataaactatcctttcagaaccaagtgcaacagacagaattgtggtgctgacaagccagccgagtctgaaaaatctccttcaccagctgcagatcaaaatgatcagtgagtactaggacatgtttgagggttgagaaggtccagagttgtcatcaagcattgctcagtttgggtgtctgacagtcagtcttgtcgtcttctatgttgcagcagttgtcaagtcactcacttctcaata

SEQ ID NO: 181040 - DNA, 280 bp, Glycine max
gtactttcaaattaagtctctgcattattctcttcccttttctatctccctctgcaaaaacgaagtaaatgggtcggcttaatctcctacttgtgtggtcactctctttaacacttttccttacttatctacacccaacctctgcccagctcagtccaaaccactatgctaacatatgccccaaccttgaaagcatcgttagacaagccgttactaataagttccaacaaacctttgtcaccgtcccagccacccttcgcctattcttcacgattgcttt

SEQ ID NO: 181041 - DNA, 283 bp, Glycine max
gttttccgcggaaaatcaaaatgggtatcatgataagatcaaagaaattgaagccgagatggctcggaacccagaaaaacaaactaacagagtatcatctctggcagctcaaggcaaaaatagcaaaactgaggacacaattattggagcctccaaaaggttctagtggaggtggagaaggatttgaagttacaaaatttggtcatggacgtgtggccatgattggatttccaagtgtggggaagtctactcttttgacaatgttaacggcacacattctgaa

SEQ ID NO: 181042 - DNA, 280 bp, Glycine max
ggtttctccaccaagagggaaatggctcccaaccgcctagtacgggtctgtttgttggactgaaccaagggacatgtcgtcaccaagaaggaattgcccccacgcccctcggatcgtaaggggaaaacaagcaagagggtgcactttgtgaggaccctcataagagaggttgctggttttgcaccctatgaaaagcgtataactgagttgctgaaggttgggaaggataagagggcacttaaggttgcaaagagaaagcttggaacccacaacgtgcaaa

SEQ ID NO: 181043 - DNA, 284 bp, Glycine max
ggagaaaggggccgacgacggagcaacctcggcggcgacgagccggaagaaagccgtcgtggagagaaaagggacaaccacagaaagaggaaaaagacgaagaagagcaatagcagcgaaaatatactcaggacttcaagctcaggggaacttcaacttgccaaagcattgcgacaacaacgacgttctgaaaactctctgcgcagaagctggttggtgcgtagaagaagacgggaccacttatcgcaagggttgcaagcggctctagccaatgtgctgggagt

SEQ ID NO: 181044 - DNA, 280 bp, Glycine max
cgccgtcgtcgctgtttgtgtgtgtatcaggtgcagctaccaacgatggtgaagggtcgtcaaaggagagcggcgtcaaattcaacgtgaggggtacaatcctgcgatacaaaaggtccaagtccaaccagtacccaaacacatccctgatccaaattgagggagtgaacaccaaagaagaagtaggacggtatgctggcaagtaaatggcctatatctacaaggctaaggtgaaaaaggatggaagccattaccgctgcatatggggcaagttacgagg

SEQ ID NO: 181045 - DNA, 283 bp, Glycine max
ttcacaaatctttttctaagtgtagtagaggagaggaaccgcgccaaccctctcttcttctttctcttccatccctttttaaacatttatagtttcatccttaatcgttgggaaaaatgttcatcgagaattttaaggtagagagtcctaatgtgaagtacaccgagactgagattcagtccgtgtacaactatgaaaccaccgaacttgttcacgagaacaggaatggcacctatcagtggattgtcaaacccaaatccgtcaactaccatttaaaaccaac

SEQ ID NO: 181046 - DNA, 289 bp, Glycine max
ggtctccaaatacctgattgaaggcgacctgagacggttcatgcggttaatataaagagactgaaggatattcagtgctacagaggaataaggcatattcaggggcttccttgcagaggccagcgaaccaagaataattgcagaaccttgaagggtaagaaggttgccattgccggtaaaaagcgaaagtaaacggctcctattttttgtgatgttgttttctaattgtcaatgttgtaaggcaaagaataataatgttttctatataattcaattgtcttgtttaagt

SEQ ID NO: 181047 - DNA, 279 bp, Glycine max
gttaattctcaaggatccacatcttatcctccaaatgcactttcatacaaatcagcaatgagagagcatctgttgaggcagggatacagaattgttggaatcattggagaccaatggagcgatctgcttggagaccacagaggcgaaagcaggacctttaagcttcctaatcccatgtactacattgagtagtaccttcacctctctcaacaatctagctagagtttgctcctatctatatgtaataaggtatgctgatatgcactattcaaataggag

SEQ ID NO: 181048 - DNA, 271 bp, Glycine max
gctgttaaggttgttgacattgttgacacattcagacttcacgagcaacccgcattcgataagaaacaagtttgttaccttcatgaagaggtttatcaagaatttgactcccaagctcgatgcagagcaacaggagttgtttaagaagcacatcgagggagcaactaaatacctgctctctaagattaaagatttccaattttttgttggtgagagcatgggtgatgatgcttgcttggtctttgcctactacaaggacggcgctgctgat

SEQ ID NO: 181049 - DNA, 280 bp, Glycine max
ggcagtcttgtcgtcgtctcttcctcttacgaacaatggttgccgccaagaaaaccaagaaagaccatgagaggatcaacaacaggcttgctcttgtcatgaagagcggcaaatacacccttggttataagaccgttctcaaatctcttaggagctccaaagggaaattgattatcattgctaacaactgcccccctttgagaaagtcagagattgaatactatgccatgttggcaaaggttggagttcatcattacaatgggaacaatgggatttgggc

SEQ ID NO: 181050 - DNA, 282 bp, Glycine max
atttctccatttccattttctctctcactttacaagaatcgtaagctatgggaaagtcttacccaactgtgagtgctgattaccagaaggcggttgagaaggcgaagaagaagctcagaggcttcatcgctgagaagagatgcgctcctctaatgctccgtttggcatggcactctgctggcccctttgacaagggcagaagaccggtggacccttcggaaccatcaagcaccctgccgaactggctcacagcgctaacaacggtcttgaatcgctgttagg

SEQ ID NO: 181051 - DNA, 281 bp, Glycine max
cgcaattgatgcattgcctgtttctgctcatcaatgactcaattcacaactaatgtcatggcccttcaaggtgcaaagtgagtttcagaaggcatatgagggtgggatagctaaggcaaggtattgggagccaacttatgaggatacaatgaatctaattgctcgtttgccagccattgctgcttatatttatcgacggaaatacaaggatggaaaaatcataccgttggatgattctttggattatggtgcaaactatgctcacatgtagggtttgatga

SEQ ID NO: 181052 - DNA, 281 bp, Glycine max
gaagagaatcataagacagcaagacagaaaatgggagtggagaagcagttgttgaggcctggccacgggccccaagccaattcccggtcagaacgtcaccgttcactgcactggtttcgggaagaacggtgacctttctcagaaattctggagcaccaaggatcctggccaggaccctttcactttcaaaatcggccaaggttctgttatcaaaggatgggatgaaggtgtgcttggcatgcaaattggtgaagttgctcgtctccggtgctcccggatta

SEQ ID NO: 181053 - DNA, 286 bp, Glycine max
cgaaacctcaaccccaacctcaaccttaacctctcctcactttcttttcaaccagaactatgaataagccttttaaaagtaaaggaaaaacagagagaactggcagaaaatgcgagtggcggaccacccgttaagaagcaaagtgccggcgagttgcgtcttcacaaagatataagcgagctgaatctaccaaaatcatgtaccatgcaattccccaatggcaaagatgacctgatgaactttgaagtttcaattcgacctgatgatggatattcttaggtggcac

SEQ ID NO: 181054 - DNA, 277 bp, Glycine max
ttcgcaatccgttccaaaccacatagctttaacaaagatggatgtagaaaagttgaagaagatggccagttctgttcgaactggtgggaagggtactatgagaaggaagaagaaagctgtccacaagactactactatagatgacaaaaggcttcaaagcaccctgaagaggataggagtgaatgctatccctgcaattgaagaagtcaacatctttaaggatgaaatagttatccagtttttaaaccccaaagtacaagcatctttgctgccaaca

SEQ ID NO: 181055 - DNA, 275 bp, Glycine max
gggttagcaacgaggttgtgtacagaagaaggggtacaccgactcaaccggagcatacacaatgtacgtggatgaggatcacgcagatcagatctgcagtgccaagcttgtaagcagccctcaccctcaatgcaaggacgtcaccccaggccgcgacgaagccgtcgtgattctcacccgctacaacggcattgcctccgacgataggttcgccaatgccatgggcttcatgtctcaggaggttgcttctggctgtgctgagatctcaggcaata

SEQ ID NO: 181056 - DNA, 280 bp, Glycine max
cttcccttctccaacatgccaaacgaagcgttctgagtcttttcttcttcgttaccctgcttcgcatgccttctctctgctaaattcccacgatgaccatattttgctaccgagtcaactccatgacgatgactcagtgagttgcactgctaccgacccaaaccttaactacaagccggtgatccggaatcctgacccacccggcggaggtgcctctgagcggctcagcaacgccaccggggtttcttacatcgccgcctcctacgttaattcgtggagt

SEQ ID NO: 181057 - DNA, 282 bp, Glycine max
tcgacttcaccgccggaaacggaaccgtggccgagtcgatttatggctccaagttcgccgacgagaaattcgtgaaaaaagaacaccggtcccggcatcctcaccatggcgaacgccggtcccggaaccaacggatctcagttcttcatttgcacggagaagacagagtggctcgacggaaagcatgtcctgttcggacaagtcatcgaaggattgaacgttgtcaaggacatcgagaaggtcggatccagctccggcaggacctccaagccgttgtcatcg

SEQ ID NO: 181058 - DNA, 280 bp, Glycine max
gagaaaaacagatagtgtgggagagagagagcggaagagaaaatgacgaccaggttccagaagaacaaggaggagaagaggtcacgtcacggccggacacggccgtatcggaaagcaccgcaagcatcccggaggtcgcggtaacgccggtggcatgcatcaccaccgtatcctcttcgacaagtaccatcctggtttcttcgggaaggtaggcatgcgctacttccacaaacttcgcaacaaattctacaatccgatcatcaacatcacaagctgtggt

SEQ ID NO: 181059 - DNA, 280 bp, Glycine max
gagtgcgttaggcttattgggacaaaagtacaagtttccttgaattttgcttgaagcaatctagatcagaagctgagattgcttcttatagaaaaccttggatcatatgatcctgaccatcaattcattgataaattcctcaattacaaggagttgttaccgtcagacgttttggacatagcttttcagagtaggaatgataagaaagttactggatatggtgtggaaggcacggcatcggttagtgcagatatactggatgtggactcactgaaggatc

SEQ ID NO: 181060 - DNA, 275 bp, Glycine max
aaatgagtctctctttttgttccttctaaggctaagccttcctagatagtagatccctttacactttacggattccaatattgtcaaactcactgtggatgaggctgcagccatgcattctaaaccctcatctatcacttccaattaccctctcatttctgccattgttgcttttgctctagctcaatccatcaagttcttcaccacttgatatgcaggtttaaggatagaagatgggatctgaagcaattagttgggtctggtgaatgccatca

SEQ ID NO: 181061 - DNA, 274 bp, Glycine max
gaaaaaagagaaacaaatggcagcatgggtggctttaccgacatcaccggagcacagaacagcatcgatatcgaaaatctcgctcgctttgctgttgatgaacacaacaaaaaagagaatgcagttctggagtttgtgagggtgattagtgcaaagaaacaagtggtttctggcaccttgtactatatcactttggaggcaaatgatggtgtgacgaaaaaggtttatgaaactaaggtgttggagaaaccatggttgaacatcaaggaggttc

SEQ ID NO: 181062 - DNA, 278 bp, Glycine max
  unsure (1)..(278): unsure at all n locations
gttgctgctcatcctccgtaacctccgagctctgcaccgaagaacgaagccatggggaagacacatggaatgggatctgctcgcaagctcaagtcccaccgcaggaggcaaaggtgggctgacaagtcatacaagaaatcacatcttggaaatgaatggaagaaaccttttgctggttcatcccatgcncagggaattgtccttgaaaagataggtattgaggctaagcagcccaactctgccattcgtaagtgtgccagggttcaattatcaagaat

SEQ ID NO: 181063 - DNA, 275 bp, Glycine max
ggagcacatgcagtactgtgttgagcacctgaagagataagcaagcttgctaaggtgaaagcttcaagttctggaagttaaagatgtcatgatggagaacattgaaaaggttctggaccggggggaaaagatagagcttctggttgacaaaactgaaaatcttcatcaccaggcacaagatttcaggaatcctgggaccaaaatcggtagaaaatgtggctgccaaacatgaagataaagctgattgtgttggcgattttgatagcctgatcctc

SEQ ID NO: 181064 - DNA, 152 bp, Glycine max
aggacaagctcgctgacaagttggagtctgatgaaaaggagaaaattgagactgctgtgaaagaagcactggaatggctggatgacacaagtatggagaagagatatgaggactgagagtgagcgtgaccatatatgggataaacgaggcag

SEQ ID NO: 181065 - DNA, 311 bp, Glycine max
catcgagccgaatcggctcgagcaggcgcagacgcaaacgcaaacgactcacgcaaacgcaaaaccagagcgtgatccattgaacaagatggtgcagcgtctcacctaccgcaagcggcacagctatgccaccaagtccaaccaacacagggtcgtcaaaacccctggtgggaagctcgtttatcagactaccaagaagagggccagcggacccaagtgccccgtcactggcaagaggattcaggggattccacacttgaggcctgcagagtacaagaggtcaaggttacccagaaaccgtaggactgtca

SEQ ID NO: 181066 - DNA, 306 bp, Glycine max
ctttagccgaggtcaggaggagcactagctaagttcacaatttcaaaatggctaggggactaaagaagcatttgaaaaggctcaatgctcctaagcattggatgcttgacaaactgggtggtgcatttgcgcctaaaccctcatctggaccacacaaatcgagggagtgcctccccctcattcttattctgcgaaaccggctgaagtatgctctgacataccgtgaagtcattgctattctgatgcagcgccatgttcttgttgatggcaaagtcaggactgacaagacttaccctgctggtttca

SEQ ID NO: 181067 - DNA, 246 bp, Glycine max
cgccaaacgacagcgttctgagtcttttcttcttcgttaccctcttcacatgccttctctctgctaattcccacgatgaccatattttcctaccgagtcaactccatgacgatgactcagtgagttgcatgctaccgacgcaaccttaactacagccggtgatcgaatctgacccacccgggacggtgctctggcggctcagcaacgcaccggggttcttacatcgcgcctcctacgttaatccgt

SEQ ID NO: 181068 - DNA, 239 bp, Glycine max
  unsure (1)..(239): unsure at all n locations
cgccgaggtcaggaggagcactagctaagttcacaatttcaaaatggctaggggactanagaagcatttgaaaaggctcaatgctcctaagcattggatgcttgacaaactgggtggtgcatttgcgcctaaaccctcatctggaccacacaaatcgagggcctgctcccctcattcttatctgccattcggctgagtatgctctgacatacgtgaagtcatgctattctgatgcagcg

SEQ ID NO: 181069 - DNA, 308 bp, Glycine max
gtctgcttcttccgattccggcacgcccccatcaccatggtgaacgttccgaaaacaaagaagacatactgcaagagtaaggcgtgcaggaagcacaccctgcacaaggttacccaatacaagaacgggtaaagatagcaattgctgcccaaggaaaacgccgttacgatcgcaaacaatctggttatggcggacaaactaagcccgtcttccacaagaaggctaagaccaccaagaagattgttctgaggttgcaatgccagggttgcaagcatgtctcccaacacgctattaagaggtgcaacact

SEQ ID NO: 181070 - DNA, 308 bp, Glycine max
gtttattcggtctactggcattaagctagaagctgttgattcgagaaacgcagcatcaacttacaacatactgaatgaagaaggtcgaattgtggctgctgcacttcttccacacgggagtttcttcatgaagcttggacttgtattcttagtagccaacaattgccccaaagaggttcacctcaatgccacaaaattttttagcccaagtccttgggacatgctttgattttccatttagaaagttttgacatagtaataggacaatgtgaattaaactcaagtgagtcctttgacgtctgctgaag

SEQ ID NO: 181071 - DNA, 282 bp, Glycine max
atttttgaaacagagaaacaaaaaaaaaaaaaaaacctcttccaaagtagaggcagagaatctgaaagctagggtttgggatcccgaagaacaagggaaagggaggaaagacccggaagcccggtaaaaacggggcggacgccgaaaaccggaaccgggtatccagggaggccggacaggattacccgaaggtcccccgaatccccgaaaacggtcgctgcaaacgatgtgcatcgagggcacaaagcgccttggcaatacccggggaaagttccacaaaaa

SEQ ID NO: 181072 - DNA, 301 bp, Glycine max
  unsure (1)..(301): unsure at all n locations
ggcagaagcangaagcagcattaacagaggagcaagatggtctctcaatggaacgacggctctcgtcaacggcggcacccgtgggatcgggcacgccatagtgagtgacttggccgcgtntggcgctgctgtgcacacttgctccaggacgcaaacagagctcaacaaatgcttacaagagtggcagagtctgggctttcaggtaactgggtcggtgtgtgacgtgtcctcaccatcccagagagagaagctcattgaggaagtcacttccatcttgaatggcaagcttaacatctatgtg

SEQ ID NO: 181073 - DNA, 241 bp, Glycine max
gtttcgttcgtcaccatgacttttaagcgcaggaatggaggtcgcaacaaacacggccgtggccacgtcaagttcattcgatgctccaactgcggcaaatgctgtcctaaggacaaggctatcaagagggtttctggtgaggaacattgttgaaaaggctgcagtcagagatgttcaggaggcttgtgtcaatgaccattacacgcttcggaagcttaaggtgaaatgccataatggggtt

SEQ ID NO: 181074 - DNA, 286 bp, Glycine max
  unsure (1)..(286): unsure at all n locations
tcaccgtcgaggtcttccccattcaatcaaagcacaaaaatggaggtgactgttttcactcctgcactggaaggaattaagcttgtaaaatcagagcaaggagaaattttgacncagtctttcttggatgcttgcaagcatatacttcctgttatagataagtttggagctgctatggcccttgttaaatctgacattggtggtaacatatcgagattggaatctaagtactcctccaatccaaccaaattcaactactggtacagtttggtacaagttgaggttg

SEQ ID NO: 181075 - DNA, 317 bp, Glycine max
  unsure (1)..(317): unsure at all n locations
cggaatcggtcgagaaagaaaaggaaccctagctggataggtcaaacatcatcatgtcggacgaagagcaccatttcgagtccaaggcagacgccggtgcctccanaacctaccctcagcaagccggtaccattcgcaagaacggctacatcgtcatcaaagggacgcccctgcaaggttgtggaagttccgaccttcaaaactggaaagcacggtcacgccaagtgccactttgttggaattgatattttcactgccaagaaacttgaggatattgtgccctcttctcacaactgtgatgttcctcatgtgaatcg

SEQ ID NO: 181076 - DNA, 138 bp, Glycine max
cttcttgtcaggaagatatcttgacgagaatacaatcttgaaaacaagagtcaacaagatgttgtaattattaagagtctctggcaatgccactgcgtcgacgtgttaagcattatcatataggttcataattctcac

SEQ ID NO: 181077 - DNA, 299 bp, Glycine max
catcgagccgattcggctcgaggcccttgttcctccaaaattctatctggtgttgcagatggacttgattactgcttggatcactgaccttttcacttgtatgggtggttgttttggatgctgtaatgaacccacaccatttattgctgtggatgaacctccaaagggattaagaattcaggggcagacagtaagaaaaccacacatatcagatggtttctggagttcaagcacttgtgatctggataacagcaacattcaatctcagagaagtatctcgtctgtcagtacattaaatc

SEQ ID NO: 181078 - DNA, 300 bp, Glycine max
ggatccacatcttatcactccaaatgcactttcatacaaatcagcaatgagagagaatctgttgaggcagggatacagaattgttggaatcattggagaccaatggagcgatctgcttggagaccacagaggcgaagcaggacctttaagcttcctaatcccatgtactacattgagtagtaccttaacctctctcaacaatctagctagagtttgctcctatctatatgtaataaggtatgctgatatgcactattcaaataggagcattagctatgtttgttaatgtcactttatgtt

SEQ ID NO: 181079 - DNA, 300 bp, Glycine max
tgagaaggtaacagatagaagctttgggttgagaaatttcaggtacattgagaccatcaaagaagctttggaaagagaatgccctggagttgtttcatgtgctgatatcctcgttctctctgccagagatggcattgtttcgctaggaggtccccatatccctcttaagactggaagaagggatggtagaaggagcagagctgatgtggttgagcagttcctcccagaccacaatgagtccatttctgcagttcttgacaagtttggtgccatgggaattgacacccctggcgtcgttgc

SEQ ID NO: 181080 - DNA, 293 bp, Glycine max
ttcatgaggaagcaacctatgacgaccaagagcctaaagacattccccaacgctctttttggtctgaaaggtggacgaggtggtcgtgtaacttgcatggcctcgtacaaggtgaagctcataaccccagaaggagaagtggagtttgaatgcccagatgatgttttcattgttgacaaggctgaggaagaaggcattgaacttccctactcgtgcagggctggttcttgcgtttcatgtgttgggaaattgtgaaggtgacgtggaccatcagatggtagttccttgatgat

SEQ ID NO: 181081 - DNA, 273 bp, Glycine max
  unsure (1)..(273): unsure at all n locations
cggctcgagacanaccattttattttatttttgaatcaagggtgagggccttccatggcttccgcttgtgcttcctctgcaattacagctggtgccatctctacgccgagttccgggcagaagaatggatcaggaggttgttctcttagtggaaggaaattgagggtgaaaaaggagagagcagcaattggaggacgatcgatgggcactacagtgtgcgcagttgctgagcctgacagacctctatggttccaggaagacncgctctcatgg

SEQ ID NO: 181082 - DNA, 147 bp, Glycine max
cattcacaaggtcaaacgactttggaaaggaacaacgtgaacttcaatgggcacatgcacaaagaacattacatggattacaaccagctgacaccaagttcaatgagcgtacacatgtcagtgaactcaatcaaatggccgaagaag

SEQ ID NO: 181083 - DNA, 300 bp, Glycine max
tttttctctctcccttagtcaaagggattcatcgttcttcttcccaggttatttagaaaagcaaaatggtgaagatttgctgcattggtgctggatatgtggggggtctactatggcagtcattgcacttaagtgcccatccattgaagtcgctgttgttgatatctctaaatcccgcattgcagcctggaacagcgaccagcttcctatctatgaacctggccttgatggtgttgtgaagcaatgccgtggcaagaacctcttcttcagcactgatgttgaaaagcatgtctttgaggc

SEQ ID NO: 181084 - DNA, 300 bp, Glycine max
atcgtaagcagcggctaccctaatcctctcctcttcctctctactaattacagctatggccgacgaagctgtggttgttccagatcccacccagatcgatgtcaagctctttaaccgctggaggttcgacgatattgagattactgaaattccctgggtgattatatcggaatggcgacatccaagaacgccaggtatgtgcttaaaacggcgggaaggaatccggtgaaccggttcaggaaggcgcaatgccccatggttgaaaggctgacaaattctctcatgatgcacggtagaaac

SEQ ID NO: 181085 - DNA, 189 bp, Glycine max
caattttctagggttttattcattttccgatggcttctgcagatgttgagtaccgttgctttgtcggtgggctcgcttggggcactgacgaccatgccctcgagagagacttctctcagtacggcgaaatcgttgaaacgaggattatcaaagatcgtgggactggcagtccaaggggttttggatttg

SEQ ID NO: 181086 - DNA, 265 bp, Glycine max
gtttgccttgtgccgtttgtgttgttttcgggacgaagaagaagatggtgtcaggttctggaatctgcgccaagcaggtcgtggtggacgcgcgccaccacatgctgggtcgtctagcctccatcgtggcgaaggagcttttgaacggccaagaaagtggtggtcgttcgcttgtgaagagatttgcatctcgggcgggctggtaaggcagaagatgaaatacttgaggttcctccgcaaacgcatgaccaccaaaccctcccat

SEQ ID NO: 181087 - DNA, 161 bp, Glycine max
agcatttgaagttcaaaaacttgtatcatacttaccagtctttcttgacatttctcttcccatgtttcaacacatacaacaatgggttttcgtcttcctggtttcagaaaggcgtccttttcttcaaaccaagcatcttctaaaagtgaagatgtcccaaa

SEQ ID NO: 181088 - DNA, 302 bp, Glycine max
gttacgctttgcgagtgagaattgataaacaaatcgttagggttttacggttgtgcgagtgagagtgagagagaacaatggaagacataacagagggagtgaacaacatcaacatctctgatttcgtataagaaaaatcgcattcaggtctctaacaccaagaagcccctcttctcctacgttaatcctggccaagagatatatgcaacagcatgatgaggtcgagctctcagctctaggaatggctattgccacagtagtaactgttgctgaaattttgaaaaacaacagacttgctgttg

SEQ ID NO: 181089 - DNA, 300 bp, Glycine max
ctaaattaaaccctagctagaggagagggtttaaagctctgaagcttctttcttcttctccaattaagatcgcagagagagatggggagtgacagcgaggcacagaagtgagagaagaagatgcttgcgctcgctcccattgctaaaccccttgccggaaagaagctttgcaagcgaaccctaaaacttgttcgtagagctgccgaacacaaatgcctgaaaagaggagtgaacgaggttgttaaaagcataaggagaggtcataaaggattgtgtgtgattgctgggaacatatcgccg

SEQ ID NO: 181090 - DNA, 300 bp, Glycine max
gttgcaggaaaaatggtttcgctgaaactgcagaagcggctcgccgcgagcgtgctcaagtgtggcagaggaaaggtttggcttgaccccaatgaagtcaacgaaatctccatggccaattctcgccaaaacataaggaagctggttaaggatgggtttatcatcaggaagcccaccaagattcactctcgctcacgtgctcgtcgaatgaaggaagccaagaggaaaggacgtcactctggatacggtaagcgtaagggtacaagggaggcaaggcttcccactaaaattctatggatg

SEQ ID NO: 181091 - DNA, 206 bp, Glycine max
ggctactatatatggtcattttcagatagctttgaatgggatgctggttacacagctcgatttggcatcatatatgtggattacaagaacaatttgagtagataccctaagtcctctgcgttttggctgaaaaaattcctttctcaagtggttcaaaatctattggtccctttggcatgcatgcccggttttcctcctggttggtt

SEQ ID NO: 181092 - DNA, 291 bp, Glycine max
cgctcggtgcaccggtctgtttcaatcgtgcctcctgcatactatgctcaccttgctgcattccgcgcaaggttttacatggaaccagagacgtcggatagtggctctatgacaagtggtgctgttgcaggccgtgggatgggcggtgtagggcgtacacgcgtgtacctgtgacaatggacctgtgagacaattgcctgcactcaaggagaacgtcaagagagttaggtttaatggtaaggacatgaaggccaagattactgtaaaacctggtttagtgaatcctttttg

SEQ ID NO: 181093 - DNA, 235 bp, Glycine max
tagtaagtcggaatcggtcgaggcttgttgagtcgtgttttgcaagagggtatggcgaaggacgttgaggttgctgagcgtggctccttctctgggaaggactaccaggaccctccaccagcaccactcattcgatgctgaggagttcacaaagtggtccttttaaagggctcttattgctgagttcattgccactttgctcttcctctacattactgtggcaccagtaataggg

SEQ ID NO: 181094 - DNA, 284 bp, Glycine max
ctcgaagcgaggtcgcggaggatcggcgggaaacaagttccgcatgtcgctgggtctgccggtggcggcgacggtgaactgcgccgacaacaccggcgcgaagaacctctacatcatatcagtgaaagggatcagggtaggcttgaaccggttgcctcagcttgggtcggagacatggttatggcaaccgtcaggaagggaaagcccgacctcggtaagaaggtgctgcccgccgtcatcgtccgcaagcgcaaccttggcgccgaaaggacggtgttaacatg

SEQ ID NO: 181095 - DNA, 203 bp, Glycine max
cgttgctctgcttcaaccttgcggaagaagaagacgccgcagccatggtgaagtactccagagaacccgacaatcccaccaagtcctgcaaggccagaggcgctgaccttagagtgcattccagaacactaggagactgccttgccatcggaattgccccgtaaacctaaggtactggaggagtttggcccaaacggccacct

SEQ ID NO: 181096 - DNA, 296 bp, Glycine max
gcaaaatcaaaatgtgggcaagcgccgcagaaggtggtgctccggaggtgactctggaaacttccatgggttctttcacctttgagctgtactacaagcatgcgccgaggacttgtaggaacttcattgaactgtctcgccgaggttactacgacaacgttaaattccataggatcattaaggacttcatagtacaaggtggggatcccactggaacaggaagaggaggagaatccatatatggtgcaaagtttgaagatgagattaaacgagagttgaagcacactggagctgga

SEQ ID NO: 181097 - DNA, 291 bp, Glycine max
cagaagagtcgctgcgccgcttgtgctttccccgctgcacgcacgcggaaatataactggagcgtcaaggcaattcgcagaaagaccaccggaactggcaggatgagatacttgcgtaacgtgcctcgccgtttcaagagtggcttcagagaaggtaccgaagctgcaaccaaggcagaagggagaagctacaatggattagactttccaaagacggtcctcgttgggtacggattaccaggattagattgcttttgggccttttgccagtaattttggacacctaatttt

SEQ ID NO: 181098 - DNA, 203 bp, Glycine max
cttccgaattcgaagttaatttgcaagatggctaaggaaaaggctcacgatcaacattgtcgcggttggtcatgtggaccctgaggaggcaaccaccattaacgagctgaagaagcctgttgtggagaaagaagctccagtgcatgccatatgagggatgcacgtacggcttcggaggggaccagaaaattatgttaacaaat

SEQ ID NO: 181099 - DNA, 122 bp, Glycine max
catcaacagcaacgatggtgcagaggctcacttatcgcaagcgccatagctatgctaccaaatccaaccagcaccgggttgttaagacccctggtgggaagttggtgtaccagaccactaag

SEQ ID NO: 181100 - DNA, 292 bp, Glycine max
attgaattctccagagagaagaagaaacttaatcgatcatcacttcacttcactaatacatcatggcagacgagacccagaacaagtatgagagctctgaggttgaggtccaggatcgtggtgtttttgactttctcggtaagaaaaaggatgaagaagacaagcctcatcctcaggaggaggtcatcgccaccgagtttcaaaaagtcactgtctcagaccaaggagagaacaagcacagcctcttcagaaaagcttcaccgatctgacagcagctctaagctcttcaagt

SEQ ID NO: 181101 - DNA, 292 bp, Glycine max
catctgatcccaattccattcattcattcattcgttcttcttctttcaccaacaacaaagaacacagagaaactttcatttcatatattttcatcatcgcagcaaaggaatcaatcaatcaaaaccatggcaggcttcagtggcgacgaaaccgttcctttcttcggcttcctcggtgccgctgcggccctcgtcttctccggtatgggagcggcgtacggaacggcaaagattggggtgggggtggcgtcgatgggcgtgatgaggccggacctggtgatgaagtcgatcg

SEQ ID NO: 181102 - DNA, 293 bp, Glycine max
gcaaactgactggaattgaaggaaaaatcaatgcaaggaacagtgatccaagtctgagaaaaccggactgggccagttcagctgccatacactttgctccatcgttcaagtgaggaagggttgactttcaaaggaattcccaacagtatctctatctaattaaaaagagtttgtggtttccttatctatgttgtacttctgaataacatagactttatgcatgtctatgcgtaattattgcctgaacttctgcactattgtatttggatgctctcggttttcatataataaag

SEQ ID NO: 181103 - DNA, 287 bp, Glycine max
gccaagtgaaagtgagaaaaaataaaaatcaaagagcataatgtcagggatcattcacaagattggggagacccttcatgtgggagggcacaagaaggaggaggagcataagggtgagcaccatgctggagaatacaaaggggagcaccatggtgaacacagtagtgagtacaaaggagagcatcatggtgaacacaaagctggagagtaccatggcgagcacaagacagagcacaaagaggggttcctagacaaagtcaaggacaagatccatggtgagggcggcg

SEQ ID NO: 181104 - DNA, 289 bp, Glycine max
gcgcactcactctaacggcgtaccttttgcatgatgggtcagcgagaaaatgggaacagcggcttaagccattaggtgtaggcgcctttcagaggtggaatcttctagttcttcctatttgacccgaaaccgatcgatctagccatgagcaggttgaagagagctctaacaggccttggaggaccgaacccacgtatgtggcaaaatacggggatgacttgtggctaggggtgaaaggccaaccaagatcggatatagctggttttccgcgaaatctatttcagtagag

SEQ ID NO: 181105 - DNA, 284 bp, Glycine max
cattgttgctatttttggccttggaactgttgggcttgctgttgcagagggtgctaaaactgctggtgcatcccgggttattggcatagatattgacagcaagaagtttgatgtagcaaaaaactttggagtcactgagtttataaatccaaatgaacatgataaaccaatccagcaggtcataattgatcgcacagatggtggagttgattatagctttgagtgtattggaaatgtctccgtgatgagagctgcgttggaatgctgccacaagggctggggga

SEQ ID NO: 181106 - DNA, 283 bp, Glycine max
cttttctcagctgctgttcctgcgcgtgaacaagcctcaggtaaaccaaagccatggttaaccataacaatgttatccccaacggacacttccgtaagcactggcagaactatgtgaagacctggttcaatcagccagcacggaagacaagaagacggttggctcgccagaagaaagctgtgaagattttccccagacctacagctggacctcttagacccattgtacatggtcaaactttgaaatacaacatgaaagtgagagctggaaggggattttccct

SEQ ID NO: 181107 - DNA, 285 bp, Glycine max
gaaagatgtcgaagcgtggtcgtggtggttcggcggggaacaagttccgcatgtcgctgggtcttccagtggcggcgacggtgaactgcgccgacaacacgggggcgaagaacctctacatcatttcggtgaaagggatcaaaggccgtttgaaccgtcttccctcggcctgcgttggcgacatggtgatggccaccgtgaagaagggaaaacccgatctgaggaagaaggtcttgccagctgtcatcgttcgccagcgcaagccatggcgccgaaaggacggcg

SEQ ID NO: 181108 - DNA, 286 bp, Glycine max
gcaaaaagaaagaatcccaggcgaggagaaagatggaggggaaggagcaggatgtgtcgttgggagcgaacaagttccccgagagacagccgattgggacggcggcgcagagccaagacgacggcaaggactaccaggagccggcgccggcgccgctggttgacccgacggagtttacgtcatggtcgttttacagagcagggatagcagagtttgtggccacttttctgtttctctacatcaccgtcttaaccgttatgggagtcgccggggctaagtctaagtg

SEQ ID NO: 181109 - DNA, 282 bp, Glycine max
gaagttgtttgttttctttgttgctgcagtagttttggtagcatggccatgccatggcgcaggctaccaaaggttccctctccgaatgaaaactggctatggtgagcgttcttcggaggtaaaatgcgcaagttttaggcttgctgtggaagcacacaacatccgagcctttaaaaccatttctgaagagtgcgttgaaccaacaaaggactacattaatggcgaacaatttagatcagactctaaaacagttcaccaacaagctttcttttatgctagtga

SEQ ID NO: 181110 - DNA, 284 bp, Glycine max
ccatcaactagcaaaaaggagtttgtgtaagggaagaagatggtgtcaggttctggaatctgcgcaaagcgagtggtggtggacgctcgccaccacatgttgggtcggctagcgtccatcgtggcgaaagagcttctgaatgggcagaaggttgcggtggtgcgctgcgaagagatttgcatctccggcggtctggtgaggcagaagatgaaatacttgagattcctccgcaaacgcatgaacaccaaaccctcccatggccctatccacttccgcgccccagc

SEQ ID NO: 181111 - DNA, 278 bp, Glycine max
accttcacaccctacaatgccaaaagtggtgtcatactaacctcaaccgatctcaacatcaagtcttatgggaaaaccaccacttgtgacaaacccccagtgtggaagctcctcaaggtgctaactggggtgtggtttttgagcactggtggtgttgaagggaatccaggggttaacactgttgtcaattggttcaagattgagaaggctgagaaagactatgtgctttctttctgtccctcgtttgcacagatttgtgcagggaactgggttgtatg

SEQ ID NO: 181112 - DNA, 285 bp, Glycine max
gcgatcgaagtttcacatcagccttatccagtttagggtttcggttccttaccctacctttgacgtatcgaaaccttaaatttgggattaggtctgagcaatctggttggtagaacctttggtcttagagagtcaagttttatgtctggattagacgatcaaattcctactgccttcgatccttttgctgatgcaaatgctgatgactcgggtgctgggtcaaaggagtatgtgcatattcgcgttcagcagcgaaatggtaggaaaagcctgacaaccgttcag

SEQ ID NO: 181113 - DNA, 257 bp, Glycine max
cagcacgcagaggagcagaagcctaagccttcaacatggcgagacggttgaagaaacacttgaagaggctcaatgctccaaaacactggatgcttgacaagcttggtggggcctttgcaccgaagccatcatctggaccccacaagtccagggagtgtcttcctttgatcctcatcctacggaacaggctaaagtatgctctaacatatagagaagttattgccatcttgatgcagcgccatgttcttgttgatggc

SEQ ID NO: 181114 - DNA, 280 bp, Glycine max
gataactagaaacagtgtgatgaaaatgaaggtccttgttttcttcgttgctacaattttggtagcatggcaatgccatgcgtacgatatgttccctctccgaatgaacactggctatggtgcccgtactccggaggtgaaatgcgcaagttggaggcttgctgtggaagcaactaacatctttggctttgagaccattccactagagtgcgttgaagcaacaaaggaatacatccatggcgaacaatatagatcagactccaaaacagttaaccaacaa

SEQ ID NO: 181115 - DNA, 281 bp, Glycine max
cattaatttgccttcatctttctctatcttaaccttcaccttgcaaagtgtaccaaacctcaaatggatcatcaaaacaaacacgtagcagtctttgctttcccctttggcagccaccttatgcctctcttaaaccttgtcctcaaactagctcattcccttccattttgttcattctcattcattggcacagacaaatccaatgcaatccttttcccaaaaccccacatcccaaataacatcaaggcctatagcataagctatggaatcccagatggtca

SEQ ID NO: 181116 - DNA, 286 bp, Glycine max
ctaccatggcttcgagactcacggtaacagccttggtgctgatagctttggcaacagttttctctccaaacctacgcttcatcagtgggtaaattcatcgaactaaccatcacttcccacaagatcgtcattttttccaagacctattgcccgtactgtagaagggcaaaagctgttttcaaagagttgaaccaagttccacatgttgttgagctcgacgagagataggatggttcaaagattcaggatatcatgattaatattgttgggaggcgtactgtgccac

SEQ ID NO: 181117 - DNA, 284 bp, Glycine max
ggtcaagtgatcaaaggttgggaccagggattattgggaatgtgtcttggtgagaagcgtaagttgaaaataccatcaaaacttggctatggagagcagggttccccacccactattccaggtggtgctacactcatatttgacgctgagcttgtgggagtgaacgacaaaagtttaggcgaaggaaaaggaaacaacgaactgtagacaaatcaaaacaaatggatagtcgagcttttgctatcttagcttatttttgttcctcaataatatgcttttatgac

SEQ ID NO: 181118 - DNA, 285 bp, Glycine max
ctttctctcttctctctccccgcccaaaccctaactccctaccctattccgctttctctcatccatccatgaaaggaggaaagtccaagaccgaatctaagagagccgatgccaaacttgctgtgaataagaagggcgccgccaccaagactaggaaacccgccggaaaggggaaggcagcgaaagatcctaacaagccaaagaggcctccaagtgctttcttcgttttcatggaggaattcaggcaggtgttcaacaaggaacatcccgacaacaaagcagtgt

SEQ ID NO: 181119 - DNA, 283 bp, Glycine max
attaattgcaagaatggcacttcgttgcttggtgatgtccctttctgttctcttcactcttggtcttgcgagagaaagccatgccagagacgaagatttttggcatgctgtttggccaaacactcccattccaagttcattgcgagatcttctaaagcctggccctgcaagtgttgaaatcgacgatcaccctatgcaaattgatgaaacacagtagccgaaaaccttcttctataaagaagacgctcatccaggcaaaacaatgaaagtacaactcagcaag

SEQ ID NO: 181120 - DNA, 282 bp, Glycine max
gaaaaaatgggttcttcttcttctatgtggacggtgtgtgtgattttggcatcactggcctctgcagcactctgtgccaacccacgcaggccagtggatgtacaatttggccgaaactacgtgcccacatgggcctttgatcacatcaaatatttcaatggtggttctgacattcagcttcatcttgacaagtacactggtactggcttccagtccaaagggtcttacttgtttggtcacttcagcatgtacataaagatggttcctggagattctgctggc

SEQ ID NO: 181121 - DNA, 280 bp, Glycine max
gttcgagataactagaaacagtgtgatgaaaatgaaggtccttgttttcttcgttggtcaaatcttcgtagcatggcaatgccatgcgtacgatatgttccctctccgaatgaacactggctatggtgcccgtactccggaggtgaaatgcgcaagttggaggcttgctgtggaagcacacaacaactttggctttgagaccattcctgaagagcgtgttgaagcaacaaaggaatacatccatggcgaacaatatagatcagactcccaaacagttaac

SEQ ID NO: 181122 - DNA, 284 bp, Glycine max
gcattcactttctcctacctcgtccttctaacccaacctcaacctgtttctccgagaatcacatccaacgcttctgtcatggaggaagttaacgttgtggaaactaaggatggaactgtctcagtagctgctgcgtttgctggtcatcaggaagccgtgcaggatagagaccacaaatttttaagaaaagctgttgaagaagcatataaaggggtagattgcaaagatggaggcccttttggtgctgttatagttcataatgatgaaatagttgctagttgtca

SEQ ID NO: 181123 - DNA, 280 bp, Glycine max
gtctccacgatacagagattcagtaagaacaataactccagggttgcccatttttctgtacaactactccactcaccaactccatggtatctttgaggctgcaagttttggaggatccaatattgatccaacggcttgggaggacaagaagtgccctggtgaatctcgtttccctggtcaggttcaagtgattactaggcaagtttgtgagccactagaggaagattcctttagaccaattcttcaccattatgatggccctaagttccgtcttgaactg

SEQ ID NO: 181124 - DNA, 278 bp, Glycine max
gagagagagagagaaatggcttgcaggcaattgtgggcttcaagagctgactcttacctgaggatctctgtgtttcacagacgcttttctaatgttattaaagatttcaagtatgttgattctcatgagtgggtgaaagttgatggaaattacgcaaccatcggcataactgatcatgcgcaagatcatttgggtgatgttgtccatgtcgaattgccagaagtaggagcagctgtgacacaaggaggtagttttggtgcagttgacagtgtgaaggc

SEQ ID NO: 181125 - DNA, 285 bp, Glycine max
gcaccagtttcaccgcacgaatatcttgttgtttggagcgatccgagaaaaactctgtaaacatgttggtttaccaggacctccttacaggtgatgagcttctctctgactccttccgttacaaggaaattgagaatggaatgctgtgggaagttgaggggaagtgggttgttaaaggagcagttgatactagacattggtgcaaacccttctgctgagggtggaggagaagatgagggagttgatgatgcagctgttaaggttgttgacattgttgacacattc

SEQ ID NO: 181126 - DNA, 213 bp, Glycine max
tgatggcacaaattcaagcctagacaagaggattttcggatgtgctataccttgattcagacacctactcaaaatctcgagcaggtctcttcttgtacacatttttattgccaacggcaaatgcatctcaacacctgctactaattgcaatattctttccggatttatccgaaaaagtgtcattgacattgctcgcgatcatggctatcaggt

SEQ ID NO: 181127 - DNA, 282 bp, Glycine max
tttctcagccgcctcggctagggttcggaaacgaagaagggttctgttttcttttcgcgatgaggggcaagtggaagaagaagcgtatgaggaggctgaagaggaagcgccgaaagatgagacagagatccaagtagtgcgttaaacctagtttgtttccgttgctttcacaattgcttatgttgtcaaataggacacccagttgttagtggcactggtctctcctttttgatgtcttgatacattttgttggattttatttcgtcttatgttcttagctga

SEQ ID NO: 181128 - DNA, 281 bp, Glycine max
cctaaaaggactcaggactatttagtctcctttggagaatgcatgtctacaaggatctttgcatgaacatcttaataaaataggtgtcaaggctcgccaatatgatgcatttgagattggttttataacaactgacgacttcacaaatgcggacattttggaagccacttatccagctgttgcaaagagcttgcatggtgattagctctccgctcctgcaattgcaattgttactggctccttggaaaggcccggaactcatgtgcagtgccaacactggg

SEQ ID NO: 181129 - DNA, 294 bp, Glycine max
cacacacactgtgtttgtgaaactccctctcacacacaagtcacattgacaacttagtgttggtccacatggaatcacgcaactaacaccttttgaagagatgagctcgatcatcgtgcatccccacgcatcaggcaatctgcgatttcttcgaagatgtggaacgccattctttgagccttggccatctcatagttgtgcaagatggtgctccttcaaagaccatcagggtccctgaaggctttgactgtgagctctacaaccggaatgacatcatcaggatcgttgggccca

SEQ ID NO: 181130 - DNA, 283 bp, Glycine max
caagaatttccattgcatgctaagcaaatacgcattatattactagttttaatttgttttgtcgtttgcttctttctttgattaatgatgactagctttaaggttgcatgtgtggttgcgatgatgtgcatggttgtcgccatgagtgttacacccatggcacaggccgcaatcacgtgcgggcaggtcgccggcgacgtgtctccgtgcctcagttatcttcgaagcggcggaaaaccgtcggacgcctgctgcaacggagtgaagtcgctcagcggcgcgg

SEQ ID NO: 181131 - DNA, 280 bp, Glycine max
gtgcatagcatattccagtgtttttcatttcatcgtgcattcaatggccaccacagcagctctatccggaaccatggtgagcacctccttcatgaggaggcaacctatgaccaccacaagcctaaagacattccccaacgttggtgaagctctttttggtctgaaaagtggacgaggtggtcgtgtcacttgcatggcctcgtacaaggtgaagctcataaccccagaaggagaagtggagtttgaatgcccagatgatgttttcattgttgacaaggca

SEQ ID NO: 181132 - DNA, 258 bp, Glycine max
ctagagccggttcgtgaaccgcgtggtttcgtcaatgtttatcactgttgcaaccaacaagatcgcacttcttgggtttgcattcaagacggacactggtgacacaagggagacactagccattgatgtgtgcaaggatatcggcgacaaggcgcctaagatatatgatccacagtcactgagcccaattcagaggatttatgacgacaagtttgtctggacacctattcattgcagccaactagtctacaactgaga

SEQ ID NO: 181133 - DNA, 282 bp, Glycine max
gagaaaaccctaattcgctcgcagtcacccaagaggcgaatccttaccattgctcgagatgggtgaagaagtgaaggccgtggttccagagtctgttttgaagaagcagaagagacacgaggaatgggcgttggccaagaagcaagacctcgaggctgcgaagaagaagagagccgagagccgcaaactcatctacaacagagctaagcagtacgctaaggagtacgatcaccaggagaacgaattgattcggttgaaacgcgaggccaagctgaaaggtgg

SEQ ID NO: 181134 - DNA, 285 bp, Glycine max
gggtttctccaccaagagggaaatggctcccaaaccgcctagtacgggtctgtttgttggactgaacaagggacatgtcgtcaccaagaaggaattgcccccacgcccctcggatcgtaaggggaaaacaagcaagagggtgcactttgtgaggaacctcataagacaggttgctggttttgcaccctatgaaaagcgtataactgagttgctgaaggttgggaaggataagagggcacttaaggttgcaaagagaaagcttggaacccacaaacgtgcaaagaa

SEQ ID NO: 181135 - DNA, 278 bp, Glycine max
gggcttttgttcactggtatgttggtgagggtatggaagaaggggagttttctgaggctcgtgaggaccttgctgctcttgagaaggactatgaggaggttggagctgaaggagcggaagatgatgaggaaggagaggactattgataatcgaaggcttttttttgttatcaatgtaattgtttccgagttaaaagggtacatgcttcgttacattaccctgaaccattattgttcgttcttttttgtttttgctcctgctgtgtgatatagttctcc

SEQ ID NO: 181136 - DNA, 278 bp, Glycine max
  unsure (1)..(278): unsure at all n locations
ctgaaagaaacagtcagacatcagaatcagaagaagcgagcaaagatgtcgggtcgtggtnagggaggcaagggtttgggtaagggaggagccaagaggcacaggaaggtgctccgcgataacatccagggaatcacaaaacccgccattcgccgtttggctcgcagaggcggcgtcaagagaatcagtggcctcatctatgaagaaacccgcggcgtccttaagatcttcctcgagaacgttattcgcgacgctgttacctacaccgagcatgctag

SEQ ID NO: 181137 - DNA, 247 bp, Glycine max
cagcctacgtactgcaaaagcttatgccacaaggacaatcctgttcttgaaagatgatggtgatttgaagccacttgctattgaattaagcaaaccacatccagctggagataatttgggtcctgagactatagtggtgttgcctgcaactgaaggtgttgatagtacaatttggctattggccaggctcatgttatgtgaatgactcggttatcatcgctcggagcatggtaatgcctgcgtgatg

SEQ ID NO: 181138 - DNA, 278 bp, Glycine max
cctcgagccgaatcggctcgagggaagaggaaccctagctagggtttctaagaagctgatccgactagatggtgcagcgtctcacctaccgcaaacgccacagctatgctaccaaatccaaccagcacagagtcgacaagactcccggtggcaagcttgtttatcagaccacgaagaagagggccagcggacccaagtgccctgtcactggaaagaggattcaagggattccacatttaaggccagcagagtataatagatcaaggttacacagaaac

SEQ ID NO: 181139 - DNA, 276 bp, Glycine max
cctcgagccgaatcggctcgaggttttcttcagaaaatttgccatcgctgagggaagcgcgacactcttcgttgttcaagatgactgctaagtggaagaagaagcgcatgaggaggttgaagaggaagcgccgaaagatgagacaaagatctaagtaggtgcttgaacaaggagtggagatgatgtgcttttccatctgctaccagcttcatgacattttatgctgtcatggctcttatgatgatcttgaggtctagtcgcgaggggagcttccat

SEQ ID NO: 181140 - DNA, 279 bp, Glycine max
ccgttttcctttgctttgcgttctacaatgtcgaaaacctcagagattattacatgcaaagctgctatttgctggggaataggaaaacctgtgactgtggaagagatacaagtatgaccctcccaaagccaccgaagttcgagtttagatgctttgtgccagtatatgctccacagacatctctagcccaaaaggattcccacataccaattttcctatagcacttggacacgaaggagttggtattatagagagtgtcggtgatcaagtaacgaatct

SEQ ID NO: 181141 - DNA, 279 bp, Glycine max
aaagtagacttgaagaattactctgcgtatgccgaactatcttctgcgctggagaacatgttcagctgttttaccataggttcttgtggatctcatggaaatctgggaggggaggtgctgaatgaaaccaagctgaaggatctgcttcatggatcagaatatgttcttacgtacaaggataaagatggcgactggatgctagtgggtgatgttccctgggagatgtttattgagacatgcaagaggctaaggatcatgaagagctccgaagccattggt

SEQ ID NO: 181142 - DNA, 289 bp, Glycine max
caccaaggtaggttaaacactcttcttcatcgtcgtcgcaatgggacgtgtgatccgtgcgcacgtaagggagcaggctcggtcttcaagtcccaaacggaacaaccgaaagggccttgccggtttcggaagcttgaattccgaaaagcgcaacggctacctgaagggtgtcgtcactgacgtcatccacgatcctggccgtggcgcgcctctcgctaaggtcgccttccgccacccgttccgctacaagaagcagaacgagctcttcatcgccgccgagggtctctac

SEQ ID NO: 181143 - DNA, 247 bp, Glycine max
ctctcatctttctctcttctctctccacccaaaccctaactcccgaccctgttcccctctcgtatccgtcatgaaaggaggaaagtccaagaccgaatctaagagagccgatcccaaacttgctgtgaataagaagggaagcgccaccaaggctaggaaaaccgccgggaaaggggaaggcaggaaagaaccttaacaacccaaaaaggctccaaagtgccttctcgttttcctggaaggagttcag

SEQ ID NO: 181144 - DNA, 244 bp, Glycine max
cagctacaaaggatgatcttactgtttatgcagctttgccaactgctccatcagatgaatatggaaatgtttccaggtggtacaagcacattgatgctttgttgagaatctctggtgttactggcgatggctctggtgttattgttgaggggactctagttgcagagcctgttgcaactccccctgctgcagacacacaggctgctggtgctgaaggagcacgatgatgatgatgtggattgtt

SEQ ID NO: 181145 - DNA, 256 bp, Glycine max
ctcttttcttcttctcgtcgttgcttcggtgttgaatcatggatccgaaagtcgatttcagtgctccgcattccatgggaaccactatcatcggcgttacttacaacggcggtgtcgttctcggagccgactctcgaaccagcactggagtgtatgttgccaaccgagcatcggacaacatcacacagctcactgataatgttgacgtgtctccgtctggatcggctgctgattctcagattgtctctgactatgt

SEQ ID NO: 181146 - DNA, 286 bp, Glycine max
ggctcgagattgcaacaccgcgatatgaacgatgcaaaatagtttcagatacgtcgcgttgattgattgatatgaagtggttgactttctggaactgcatatctatcctcgtgttgtcttttgctttcttcttcttctattgtcacacatacacatctactccttccctcatggctgagcaatcttccaagtccatttacgatttcacagtcaaggacatcagtggaaatgatgtgagtctgaataattacagcgggaaggttctactgattgtgaatgtcgcctc

SEQ ID NO: 181147 - DNA, 273 bp, Glycine max
ggttttagaggaactcaatgagataagaagaaacggggatgaaatagtcgtcagggaagggccaaagacaattattggtggatgtatagatagggagggttccagtgatatgcctagtgctttcctttgccccatacttcaggaggcaatgacaaacccacacgtggcagcagatggattttcttatgagctagaagcaatagaacactggctgcagtcggggcgtgacacatcaccaatgacaaatttgaggctgaagcacacattcctcac

SEQ ID NO: 181148 - DNA, 280 bp, Glycine max
gagaaaaaagatgagcgacggaggaaaacgacaaggtggaagagcgttgccgccgccgccaagaggccctccgcctcctcccccctctcgccctcgcctcgaacccgtcgatcgcgaaaagacatgtccgttactgctgcgagtgttcactaagattgggagtcaccattccatggaagactttgccgtcagaggcaaagatcccaaagacgaggttcagatttacacctggaaggacgctactctccgagaactcaccgatcttgtcaaagaagttgct

SEQ ID NO: 181149 - DNA, 133 bp, Glycine max
gtgagctataagctagtttatcgtgaggcgaatatgaagttgtttgtactctctgttgctgcagtagttttggtagcatggccatgccatggcgcaggctaccaaaggtttcctctccgaatgcacactggct

SEQ ID NO: 181150 - DNA, 212 bp, Glycine max
caaattagagggtgtaacatgcaacaaagcagaaggggcaatgtacctgttcccccaaattcgcctgtccgaaaaggctatcaaagctgcagaggctgcaaatgcaacacctgataacttctattgcaaacgcttgcttaatgccacaggagtcgttgttgttcctggttctggttttggacaggttcctggcacatgggcattttaggtgc

SEQ ID NO: 181151 - DNA, 279 bp, Glycine max
caagttcaaagatgaagatgatccacgttcttttcctctttgctcttgtctcgttcacttcccatgcttctgtcaatgatttctgtgtagcagacctaaaaggtccagatcgcccttcaggctatcagtgcaagccacctaacacagtcacagtggatgactttgtgttctctggctttgtagctggaaacaccacaaacactttcaatgctgcattaacctccgcatttgtaattgattttccagtgtgaatggtcttggtgtatctgtggcacggtt

SEQ ID NO: 181152 - DNA, 275 bp, Glycine max
ctgggggctggggtgattgaggaggttcgagttcagagggataaacgttttggatttatcagatacaacactcatgacgaagctgctctggccattcagatggctaatggaagacttgtacgtgggaagaatatgaagtgttcgtggggtagtaaaccaactccacctggaacagcttcaaacccactacctcctcctgctcaaccatatcaaatacttcgcactgcagggatgaaccaatggtattctcctgctgagttgttggcttatcagcg

SEQ ID NO: 181153 - DNA, 273 bp, Glycine max
cgcgaaggatcatggtggggttcagaaacagatacatggttatggaggtttttctgaaccctaatagggacaaaggtggggatgattctgttatagttacacagtttaatgtctccaaagctgtaagagacagcatactggtgaattttggggagtgtggtttggcttcgtcattgggatcgtttcaggggaacagtatcagacagtatggtccgccattacaatggtcacaaatattggaaactgcccggtcatgtttaacttgctggattt

SEQ ID NO: 181154 - DNA, 275 bp, Glycine max
  unsure (1)..(275): unsure at all n locations
ggaagaagagaagattttcatcagttgagttgagagaaggaaagggaaaatgggtaaggatctgagtccggaacaagtgtcttccatgaaggaagccttctctctattcgacactgacggagacggtcggatcgctccgtcggagctggggatcctgatgaggtctctgggaggtaacccgacgcaggcccaactcacagccatcgtggctgaagagaacctcacggcccccttcgacttcccccgattcctcgatctaatggccanacacatta

SEQ ID NO: 181155 - DNA, 273 bp, Glycine max
cactcactagcttcttctctgttctcaccaatggcatcaacaatatcagcaatggccatgatcaacgccaaatgcctcaacccaaagttccccaatcccaccaagctcgcaccatcaaaaccctcccttcagatcaaccttccaaagggcctcatagcctcacccgaaagcactaaactttcccccgcgacagcaatcgcaggagcaatattcacaaccctcggaacctgcgacgccgcattcgctgttcaacagatagccgacatagcagaa

SEQ ID NO: 181156 - DNA, 206 bp, Glycine max
gcttcctcggtgccgctgcggccctcgtcttctcctgtatgggagcggcgtatggcacggcgaagagtgcggtgggggtggcgtcgatgggagtgatgaggccggagctggtgatgaagtcgatcgtgccggtcgttatggcgggagtgttggggatttacggggtgattattgcgtttattatcagcaatggggataaacccaaa

SEQ ID NO: 181157 - DNA, 160 bp, Glycine max
gttgttgtaactcgttcttcttcttttgttgttctgtgtttgtgtttgttttttctctcacctgaaaatgtcttgctgcggtggtaactgtggttgcggaagctcctgcaagtgcggcaaaggctgcggaggctgcaagatgttaccagacttgaagtac

SEQ ID NO: 181158 - DNA, 236 bp, Glycine max
gctgaaacacgccacactcttcttaccatgggcctcctcgatcacttgtcggatgacaccgtcggcggtcctcggccggagaaccggcttggcaagcttccgaaagaccacaccttcgctttccgatcctgcctccggcaaagcatcagacagcggaaacgttgaaatcgtacggtgaagatttgccggaggatgcggtgagagtgacgcgaagtatcctgatcgtgaaaccacct

SEQ ID NO: 181159 - DNA, 273 bp, Glycine max
ttctattctggttgacgcttctctcaccatccccatttcgctttggtgcaaagcatccttcgtttcaatttctctctctcagcactttctgcaatcgaacctttcatctccaaagggatccacaggctcgaagcgatatggggctgacattcacaaagcttttcagtcggcttttcgcgaagaaggaaatgcgaattctgatggttggtcttgatgctgctggtaagaccactatccagtacaagctcaagctcggagagatcgttaccacaa

SEQ ID NO: 181160 - DNA, 270 bp, Glycine max
ctaacgcgtgcatagcagagtcagagacagagacgcagccatacggcggagacctgcgaggtgttataggcaaattaagaacaagccataccccaagtcacgtttctgccgtggtgttcctgatcccaagatcaggatttatgatgttggtatgaagaagaagggtgttgatgagtttcctttctgtgtccatctggttagttgggagaaggaaaatgtttcaagtgaggccctggaagctgctcgcattgcttgcaacaagtacatggc

SEQ ID NO: 181161 - DNA, 187 bp, Glycine max
cgcttatggtggatacctatgcacccagagacgatgaagggcgtagtaagccacgaaatgcttcggggagttgaaaataagcgtagatccggggattcccgatataggtcaacctttcgaactgctgctgaatccacgggcaggcaagagacaacctggtgaactgtaacatcttagtagccagagg

SEQ ID NO: 181162 - DNA, 269 bp, Glycine max
aaaaactaatcactacgaaaacaagagatatcgaagatggctctgcccaaagctaaggagatcgtgtcgtccaattccgtcgtcgtttttcagcaaaactaatgcccttctgcgtcgatgtgaagaactctctcggtgacctcggtgccatttagcaggccatcgaattcgacactgaatccgatggaaaagagctccaagcagcattagttgagtggacggaccagcgaaccgtgcctacatgtgtttattggtggaaacccattggt

SEQ ID NO: 181163 - DNA, 264 bp, Glycine max
tcggggagtatggtcgcaaggctgaaacttaaaggaattgacggaagggcacatatgctcgcgttgcgccgcgttcggggttggcgtggaagcactcgatcgacgtgggtgcgggggtgatagatgcggattacaggggtccggttggggttatacttttcaaccattcggacacggattttgaggtgaaggttggggacagggttgcgcaacttatcattgagaagattgtgacaccgaatgttgttacagaggtcgaggatt

SEQ ID NO: 181164 - DNA, 266 bp, Glycine max
ctctctgtctcgtttacacatctctccaacctttcactttcgtttctcagttttattcgaatccctctctcaatctcctttccaaatggccagcgttgaggttgcacagcaaacaccaacaacagttccagaaaatgaaacaaccgaggtaagcaagacccaggaaacaaccccagtcactgaggctcctgcaacagaacaaccagcagctgaggttcctgcaacagaacaaccagccgctgaggctcctgccccagaatcaacca

SEQ ID NO: 181165 - DNA, 265 bp, Glycine max
ccaaaatgaacaacctcttctctctcttcttcctcctcttcttagcctccgccgccgccagcgtccccgcccacaacatcacccgcatgcctgccaaacaccccggcttctccaccttcaaccactatctctccctcacccacctcgccgaagagatcaaccgccgccagaccatcaccgtcctggccctcgacaatgccgccatgtcctccctcctcgacaagcacctctccctccccaccatcagaaacgtcctctccctcca

SEQ ID NO: 181166 - DNA, 258 bp, Glycine max
cgaacgtttgcaatactctcttctcttgttttgctcttaatccaacccagctttgttcgcggagcttttgtcacgtttcaaaatgctgccaagactggtggccctgctgctgccgcagttggtggaaaactaatccgcactgagcttctaactagtgcttggactggtttctttgctggctgcttgcacacactgtcagggcctgaccaccttgcagctttggctccattgtcaattgggcgaacccgaatggagagt

SEQ ID NO: 181167 - DNA, 239 bp, Glycine max
cattttatgggtaccaatttatctatggacactgcctatcagactaacgttcttgtttaattagtccatgcatctgcatcttgggcaccataagattgtatataaacatcaattatggtgtgttgtgtatgttgtgcaagacctggaacttcacctttctacgtacgtgtgctgttaggatgcagtgtgctttgatgatgctttgatgaatatgcagtgtgcttttttaagtctaaaaa

SEQ ID NO: 181168 - DNA, 258 bp, Glycine max
caagacagcaatggacgaggctattgatgctatgaatgggatagatttagacgggcgaactattactgttgatagagctcagcctcaacaaggatcaactagagatgatggtgatcgttaccgggagcgtggtcgtgatcgtgatcgtaaccgagattatggaggtggaggtggtcgaggatctaatggtggtgaatgctttaagtgtggaaaacctggtcattttgctagggaatgccctggtgaagggtccagggg

SEQ ID NO: 181169 - DNA, 257 bp, Glycine max
tcggaaaagaaaaatcagctttcttcaagcaccctagatttcctctctctctctctaaaatggcgttctcttcttttctcggccgagtcctcttcgcctctgttttcatcctctccgcttaccaagaatttaatgcttatggagttgatgggggacccacagcaaaagcactcagaccgaagtttgatgcctttgcacatcaagtacattctaaagctggctttcaacttccagatattgatatgaaaattttagtt

SEQ ID NO: 181170 - DNA, 261 bp, Glycine max
gctccgacaccatcgataacgtcaaggccaagatccaggacaaggcgggtatccccccggaccagcaacgtctcatcttcgccggaaagcagctcgaggacggccgcaccctcgccgactacaacatccagaaggaatcaacccttcacctcgtcctccgtctccgtggtggcatgcagatcttcgttaagaccctcaccggcaagactattaccctagaagtcgagagctccgacaccatcgacaacgtcaaggctaaga

SEQ ID NO: 181171 - DNA, 226 bp, Glycine max
ctggtgaagttcctgaagcctaacaaggcagtgatcgtcctgcagggccgctacgccgggcgcaaggcggtgatcgtgaggcccttcgacgagggcaacagggagcgcccctacggccactgcctcgtcgccggaataaagaagtacccaagcaaggccatcaagaaggactccgcgaagaagaccgcgaagaaatctagggttaagggcttcgtacagctcgtga

SEQ ID NO: 181172 - DNA, 255 bp, Glycine max
cgttgtgactcgttcttcttcgtcgttatcttcttcttttgtcgtttgtgtgtttgtcttttctctcacctgaaaatgtcttgctgcggtggtaactgtggttgcggaagcgcctgcaagtgcggcaacggctgcggaggctgcaagatgtacccagacttgagctacaccgagtcaaccaccaccgagaccttggtcatgggagtggcaccagttaaggctcaattcgagagtgctgaactgggtgttcccgct

SEQ ID NO: 181173 - DNA, 255 bp, Glycine max
gtgcagtggttctactactttgcttcttgctgcttcactctcagatggctcgtgctgccacctacacagttggagattctgggggttggacctttaacactgttgcctggcccaaaggaaagctctttcgggctggtgacacacttgctttcaattatagccctgggactcacaatgtggtggccgtgaacaaggctggatatgatagctgcaagactccaagaggagccaaagtgtataagtcagggacggatc

SEQ ID NO: 181174 - DNA, 257 bp, Glycine max
cgcatttggttatatacttctccgagacccgtttagctggagaaactccactgggtattttgatagccatgattgggatgatactatattcttactattgcactcttgagaatcagcaaaaaactcgtcgaagctgcatcgcaatcatcccaggcaagagaagatgaatctgatcctctgatgaatgtggaacatggaagtgcagttgtgagttctaatgtcggacaaagaccaatgtctcctgtatggagcaagag

SEQ ID NO: 181175 - DNA, 244 bp, Glycine max
ctatttctcaatctctctgtgtgcggctgaggattccgaacgagtgaccttccccgtttctcgcaaagtttaagtcatcatgggtaaggacaaggttcacatcgacattctcgccagtgaacatgtcgactctggaaagtcaactaccactggtcacttgatctacaagcttggaggtattgacaagcgtgtgattcagcggctcgagacagaggctaccgagatgaacaagcggtcattcaag

SEQ ID NO: 181176 - DNA, 284 bp, Glycine max
gcctgcagcggtgcaacctatcagcctccaaatccaatggcttcagagaagaaactgtcgaacccaatgagggagatgaaggtgcagaagctcgttctcaatatctctgttggagaaagtggaggacgtcttaacagaaccggcaaagtggttggacaagctaattggccaaaccccatggttttccaaggcaaggtacactgtcggttcctttgggattagaggaaatgagaagattgcatgctatgtcactgtcagaggtgacaaggcgatgcaacttttgg

SEQ ID NO: 181177 - DNA, 278 bp, Glycine max
ccaatcagagagaaaagttagggttcacaacttttccttttccttttgcttgcgaatctgaatcaaataatcaatcatccattcaataatcaatcatgtcgtcggggaacaaattaaggttgaaaattccgaacgccgaggctttcgaggtggaggagccgttggcgctggagtcgcagacgataaagcacatgatcgaggacgactgcgccgacagcggcatccctctgccgaacgtgacgagcaagatcctggcgaaggttatcgagtactgcaag

SEQ ID NO: 181178 - DNA, 277 bp, Glycine max
aatccctcccattgttaatccaccagtcacaatccctcccattgttaatccaccagtcacaatccctcccattgttaaatccaccagtgacaagttcaacccgttgtgcttcaaccattagtgaagcccccgggttttctccctccaattcttaacccaccaagtacaccaacaccgtcgccggggaagggagggaacactccatgtccaccaccaaagtctcctgcacaggctacatgccccattgacacgctcaaactaggtgcttgtgtggatc

SEQ ID NO: 181179 - DNA, 274 bp, Glycine max
tgagtcctcaaagatctatgcttacctcttcctctgcatgatctttctctcttccgccactcccattctcggttgtgcgtactgtggcaaaccccccaaaaagcacaagcctggtcaaaacaccaaagacacccaaaacacccgttgttaagccaccagtcaccatccctcccattaatgttcctcccgttgttcttccaccaatagtgaagcccccaggtattctccctccaattccaattattaacccaccaaccacaccagggaagggagg

SEQ ID NO: 181180 - DNA, 261 bp, Glycine max
cttcttcccaaccactactactcaatcactgcagatctcaattgcatcgctgtccatggctaccatcgttagcatcaaggcccgccagatcttcgacagtcgtggcaatccaactgtcgaggtggatttgacttgctccgatggtacttttgccagagctgctgttccaagtggtgcatccactgggatttatgaggcccttgaattgagagatggaggatctgactaccttggaaagggtgtatcaaaggctgttgacaa

SEQ ID NO: 181181 - DNA, 265 bp, Glycine max
tctctatcaccccattttctcaaacacctacacaaaatgtgcttcctcaacacaaagtccctggctcacttcatgttgctaacaacaattgtagttggcattgcaatgggagattcatcaaaggacaaagaggaatgcactgagcaattggcaggcctagcaacatgtctgccctatgttgggggtcaagcacaagctccaaccccagattgttgtagtggtctcaagcaagtgctcaagaacaacaaaaagtgtttgtgtgtta

SEQ ID NO: 181182 - DNA, 243 bp, Glycine max
  unsure (1)..(243): unsure at all n locations
gagtttgttgtgagctataagctagtttatcgtgaggagaatatgaagttgtttgttctctttgttgctgcagtagttttggtagcatggccatgccatggcgcaggctaccanaggttccctctccgaatgacaactggctatggtgagcgttcttcggaggtaaaatgcgcaagttttaggcttgctgtggaagcacacaacatccgagcctttaaaaccattcctgaagagtgcgttgaa

SEQ ID NO: 181183 - DNA, 265 bp, Glycine max
gggtgatcggggagtgccggcgtgcgttgaagtttgctaggttcgtgagcaggttcgggaagagttaccaaagcgaggaagagatgaaggagaggtacgagatattctcgcagaatctcaggttcatccgctcccacaacaagaagcgtttgccctatactctctctgttaatcattttgctgattggacttgggaggagttcaaaagacacagactaggagctgcccaaaattgctctgccactcttaacggcaaccacaagct

SEQ ID NO: 181184 - DNA, 173 bp, Glycine max
gttcggtggagggagggagtcgtagcagcggaagctctagcttgggtagcgaatcacaatggcgagaggattaaagaagcatctgaagaggcttaatgccccaaaagcattggatgcttgacaaactgggtggtgcatttgctcctaagccctcatctggaccacacaacata

SEQ ID NO: 181185 - DNA, 264 bp, Glycine max
ggtgaactgagtgctgctgagttggatagtgtgatgactgtggttgccaacccccggcaattcaagattccggactggtttttgaacagaaagaaggactacaaggatggcaagtattctcaggtggtgtcagatgcactggatatgaagttgagggatgacttggagagacttaagaaaatcaggaaccatcgaggtttgagacactactggggtcttcgtgtacgtggccagcataccaagaccactggtcgtaggggtaaa

SEQ ID NO: 181186 - DNA, 254 bp, Glycine max
cgaactgagcttataatgattcatttctaattcctagttttctaacttttttctatatttcttttctctcaatttgcaagaatatactaattcagtttcatcttgttaatcaattagatctacgacttcgacggggattataaggatgtcggcatttctctgttcacaacaaaatatatggttttcaaaaattgcctatctaatgccaaatctgatacaattctgtcagcatggaatccccaacccgattgggg

SEQ ID NO: 181187 - DNA, 262 bp, Glycine max
agcatggtgccctgaggatgagaatcgtcatgctggtgatcttgggaatgttaatgtcggtgatgatggtactgtcagcttcactattactgacagccagattcctctcactggaccaaacaacatcatagggaagggcggttgttggtcatgctgatcctgatgatcttgggaagggtggtcatgagcttaccaaaactacctggaatgctggtggcagagtagcttgtggtatcattggtctgcaaggataaactaatca

SEQ ID NO: 181188 - DNA, 260 bp, Glycine max
ataccttgtaagcagtcacaattctcggcttctttgcgagccacgtcgaggacagagtcgatcaactcggcgccttcggtgtagtggcccttgagccaattgtcgccggcgccggactggccgaagacgaagttgtcggggcggaagacttgccgtatgggccggatctgatgctgtccatggtgccgggctcgagatccatgaggacggcccgtggaacgtaccttccgccggacgttcattgtagtagacgttgatcc

SEQ ID NO: 181189 - DNA, 265 bp, Glycine max
cttccctcttccgtgcacagcttgaacacaccgcgtttcggagaacgacgtcgcaatggggaggaggcctgcaaggtgttatcggcagataaaaaacaagccataccccaaatcacgcttttgccgtggtgttcctgatcctaagatcagaatttatgatgttggtatgaagaagaaaggtgttgatgagtttcccttctgtgttcatctggttagctgggaaaaagaaaatgtctcaagtgaagcattggaagctgctagaatt

SEQ ID NO: 181190 - DNA, 217 bp, Glycine max
  unsure (1)..(217): unsure at all n locations
gctataagctagtttatcgtgaggagaatatgaagttgtttgttctctttgttgctgcagtagttttggtagcatggccatgccatggcgcaggctaccanaggttccctctccgaatgaaaactggctatggtgagcgttcttcggaggtaaaatgcgaaagttttaggcttgctgtggaagcccacaacatccgagactttaaaaccatccctga

SEQ ID NO: 181191 - DNA, 261 bp, Glycine max
ctagtttatcgtgaggagaatatgaagttgtttgtcttctttgtcgctgcagtagttttggtagcatggccatgccatggcgcaggctaccaaaggttccctctccgaatgaacactggctatggtgagcgtccttcggaggtaaaatgcgaagttttaggcttgctgtggaagacacaacatccgacacattaaaaccattcctgaagagtgcgttgaaccaacaaaggactacattaatggcgaacaatttagatcaga

SEQ ID NO: 181192 - DNA, 269 bp, Glycine max
gagaattgttcctctcttccattcgtgtacccgcaaaagaatcatgacgagttcctctgctgccgctcgcaagaatctgagtaagattgcctgcaataggctccagaaaggagtcgtggagtggcaggtcatcccccaaatcggtttcaggcacaaggtcacggaaattctccagaggtgggtggttgaagtcactggagctcctgggacactttacgctaacgagacctaccagcttcaggtcgattttcctgagaattacccgatgg

SEQ ID NO: 181193 - DNA, 269 bp, Glycine max
gctagtttatcgtgaggagaatatgaagttgtttgtcttctttgttgctgcagtagttttggtagcatggccatgccatggcgcaggctaccaaaggttccctctccgattgaaaactggctatggtgacgcgtcttcggaggtaaaatgcgcaagttttaggcttgttgtggaagcacacaacatccgacacattaaaaccattcctacagagtgcgttgaaccaacaaaggactacattaatggcgaacaatttagatcagactcta

SEQ ID NO: 181194 - DNA, 261 bp, Glycine max
ctgcgactgcgcttcacgatgggtgcttacaagtatgtttcggagctatggcgcaagaagcagtctgatgttatgagattcttgcagcgggtgacgtgctgggagtaccggcagcaaacttctattgtccgtttgacaaggtctactcgccagacaaggctcgccgcttgggtttacaggctaagcagggttatgtgatttaccgtgttcgtgtacgaaggggtggccggaagagaccagttccaaaaggtattgtttatg

SEQ ID NO: 181195 - DNA, 262 bp, Glycine max
agcaaattaactacacattcctctgttttggctcccctgttaaaccaagaaacttccaatggcaccccatgcatcttcttttgctcttgttcttgtcatttttctctttgttgaaatgcacttccacggtgcaactgctgactatggcggctggcagggtggtcatgctaccttctatggtggtggtgatgcttctggcacaatgggaggtgcatgtggctatgggaatttgtacagtcagggatatggaaccaacactgca

SEQ ID NO: 181196 - DNA, 264 bp, Glycine max
gggttggttggtcccattccataggaagagatcaaagagaagagaaaagatgtttgagccgcagcagctatacactcgagcgaagaccgaggaattcgacctcgaatcaggggaaaccctctacccagggctgagcgtcggcgagaaccagctccgatggggcttcatccgcaaggtctagggcatcctctccgcccagatcgtcctcaccaccctcgtctctgtcaccaccgttttctatactccaatcaatgacctcctcaa

SEQ ID NO: 181197 - DNA, 262 bp, Glycine max
gaaagaagaaaaagaagcgaaactaaagtcagcattcgaaaaacatgagtagcatcggtacaggttacgatctatcggtcaccactttctcccctgatggccgcgttttccagatcgagtatgccgctaaagccgtcgacaacagcgggactgttattgggatcaagtgcaaagatggggttgtgttgggcgttgagaagcttattccgtcgaaaatgatgcttccgggttccaatagaagaatacactccgttcatcgtca

SEQ ID NO: 181198 - DNA, 265 bp, Glycine max
gaagaagatggcgtcgagcggagcgctgccgttttggagggcagcggggatgacatacatcacatactcaaacatatgcgcgaatctggtcaggaattgcctcaaggaaccctacaaggctgaagccatctctcgtgagaaggtccattttgctttctccaaatgggtcgacgccaagcctgaaaaacctactattcgttcagacaccccagagcagtgttccggaatagttggaagctataaatgcataaatctttgagatctg

SEQ ID NO: 181199 - DNA, 262 bp, Glycine max
ctcccttcaagatgcagatcttcgtcaagaccctcaccggcaagaacatcgaccttgaggtggaaagctctggcaccaacgacaacgtcaagggcaaggatccaggcaagggagggaatccccccggaacaagcaacgtctgcattttcggccgagaaagcaacttggagggacggaggtacccttgctggactacaacattcagaaggcgagtactcttcacatcgtcctccgtctccgtggtggcatgcagatctccgtt

SEQ ID NO: 181200 - DNA, 268 bp, Glycine max
attctcatgagtgggtgaaagttgatgaaaattctgcaaccgtcggcataactgatcatgcccaagatcatttaggtgatgttgtatatgttggaatgccagaagtgggagcagctgtaacccaaggaggtagttttggtgacattgaaagtgtgaaggcaactagtgacattaactctcacgtttcaggaaaagttgttgacgttaatgaagcgcttaacagctctcctgctttgatcaattcaagcccttataaagatggatggat

SEQ ID NO: 181201 - DNA, 267 bp, Glycine max
ctttctcttctctgtctaaggggtgccctgagatcacattgaacaatggtgaaggctgtggccgttcttggcagcagtgagggtgtcactggaactattcacttcgttcaggagggaagtggtccaaccaccgtaactggatccctggctggtcttaagcctggtctccatggcctccatgtccatgccttgggggacactaccaatggttgcctctcaactggatcacatttcaatcctaataacaaggagcatggtgcccctgag

SEQ ID NO: 181202 - DNA, 110 bp, Glycine max
gttgtgagctataagccagtatatcgcgaggagaatatgaagtcgtctgtcttccccgtcgccgcagtagtccccgcagcacggccacgccatggcgcaggctaccaaag

SEQ ID NO: 181203 - DNA, 256 bp, Glycine max
agacgagaaaggagaagaagagaatcataagaaagcaagacagaaaatgggagtggagaagcagttgttgaggcctggcaccggtcccaagccaattcccggtcagaacgtcaccgttcaatgatatggtttcgggaagaacggtgacctttctcagaatttctggagcaccaaggatcctggccaggaccctttcactttcgaaatcggccagggactgttatcaaaggatgggatgaagggtgcttggcatgca

SEQ ID NO: 181204 - DNA, 260 bp, Glycine max
ctcattaattgcaagaacggcacttcgttgcttggtgatgtccctatctgttctcttcactcttggtcttgcgagagaaagccatgccagagacgaagatttttggcatgctgtttggccagacactcccattccaagttcattgcgagctcttctaaagcctggccctgcaagtgttgaaatcgatgatcaccctatgcaaattgaagaaacacagtacccgaaaaccttcttctataaagaagaccttcatccaggca

SEQ ID NO: 181205 - DNA, 262 bp, Glycine max
ctctctctctctcgttcgtgttcttcgtcgcaaattcaaaggaggatctctcttgcgttttctctaggttttcgctatggcgtcgaagcgaattttgattcgagttaaggatttgcagaaggatcctccaacattttgcagtgccggtcctgttgttgctgaagatatgttccattggcaagctacaattatgggtcctccagacagtccctatgcaggaggtgttttcctagtgaccattcatttccctccagattatccc

SEQ ID NO: 181206 - DNA, 261 bp, Glycine max
cgaggtaactagaaacagtgtgatgaaaatgaaggtccttgttttcttcgttgctacaattttcgtagcatggcaatgccatgcgtacgatatgttccctctccgaatgaacactggctatggtgcccgtactccggacgtgaaatgcgcaagttggaggcttgctgtggatgcacacaacatcttcggctttgagaccattcctgaagagtgcgttgaagcaacaaaggaatacatccatggcgaacaatatagatcaga

SEQ ID NO: 181207 - DNA, 258 bp, Glycine max
cttttacttctcagcagcttcggctagggttcagaaacgaaaaaggcgttcggtgttctgttcgcgatgagagccaagtggaaggagaagcgtatgacggaggttgagaaggaaccgccgaaagatgagacagagatccaggtagtgggttaaaccaagttggtttctgttgctttaacaattgctaatgttgtcgaatgggaaacccagttgtaagtggaactggttcccccttttggatgtttgaaacatttggtg

SEQ ID NO: 181208 - DNA, 264 bp, Glycine max
ggaaaaccctaagagatgaagagaactcctatcttgttccctctcttctttcttctttgtgccttcacctcatatctaccttcagccaccggtgatgatgatcatgtgtaagacactgacggcgataagcttcaaaagggttcaaattattccgtgtggcaagtgcttagagccaatggcggtggattacaagtagcaaaaccaggaaacgaaacttgccctctgactgtggtgcaatctggcaacgagctctctgaggggtta

SEQ ID NO: 181209 - DNA, 265 bp, Glycine max
  unsure (1)..(265): unsure at all n locations
ccctcgagccgattcggctcgagcttctttcactttccatttccatttccatttcttctggttcactttctcgatggcctccgaacancccaccgccgacgacgccgtcaacggctccaatcggccggaaatgttctcggaaaacctcgccggcaccgtcgacgcctacgaccgccacgtgttcctctgctacaagagtcacctgtcctggcccccgcgcatcgaggcctccgacgccgatcccttccccaagcgcgtcgccgcc

SEQ ID NO: 181210 - DNA, 258 bp, Glycine max
gctgcagcttattgcactggtctcctgttggcccgaagagtcctcaaaacacttgacatggatgaggagtatgaaggaaatgttgaggctactggagaggattattccgtggaacctgctgagagcaggaggccattccgtgctctccttgatgttggtcttattaggactacaaccggtaaccgtgtgtttggtgcccttaagggagctctggatggggggttggatattcccacagtgacaagaggtctgctgggt

SEQ ID NO: 181211 - DNA, 261 bp, Glycine max
  unsure (1)..(261): unsure at all n locations
gttgcgactaagagttgctgcttcttccgccactcagcacttccctccctctgtgcttcaccaaccatggtccgaaatcgaagctaccgttccagatccctctcaaatcgacgtcaaacttttcaaccgctggagcttcgacgacgttgaggttactgatatgtctctggctgattacattggagtgtccccgtcaaagcatgctacatatgttcctcacactgctggtagctnatcagtgaagaggttcaggaaggcgca

SEQ ID NO: 181212 - DNA, 262 bp, Glycine max
attctctttgcgcagttccctacctctcctttcaagatgcagatcttcgtcaagaccctcaccggaaagaccatcacccttgaggtggaaagctctgacaccatcgacaacgtcaaggccaagatccaggacaaggaaggaattccccggatcagcaacgtctcatcttcgccggaaagcatttcgaggacggccgtaccctcgccgactacaacatccagaaggagtcaacccttcaccttgtcgttcgtctccgtggtgg

SEQ ID NO: 181213 - DNA, 260 bp, Glycine max
cagccccatcatggcttcagagaagcaagcggctcttgccgtcactccctctgatgctgatgctcctaccatatttgacaagatcatcaataaggagattccttctactgtgggttatgaggatgacaaggtgcttgccttcagggacataactcctcaagctcctacacatatccttatcattcctaaattcaaagacgggttaagtggtctatccaaggctgaggagaggcactttgagattcttggccgccttctgt

SEQ ID NO: 181214 - DNA, 263 bp, Glycine max
  unsure (1)..(263): unsure at all n locations
gatggctctgggaagaggcagtgcagtggttctactactttgcttcttgctgcttcactctcagatggctcgtgctgccacctacacagttggagattctggggggttggacttntacactgttgcctggcccaaaggaaagctctttcgggctggtgacacacttgctttcaattatagccctgggactcacaatgtggtggccgtgaacaaggctggatatgatagctgcaagactccaagaggagccaaagtgtataagt

SEQ ID NO: 181215 - DNA, 274 bp, Glycine max
gcaatctacagccaaaatgcctttcaagaggtacgttgagatcgggaggtgttgccaaatcaactatggcaaggaatatgggagggtcgtcgtcaatgtcgacgtcaattgataaaacaagagttcttgtcgatgccctgaaaatggtgaggtccaaagtcaatttcaaaaggttttccctaaccgatattaggattgacattaggagggtccttaggatgaaggatcttgtcaaagccatggaggatgctgatgttaagaccaagtgggagac

SEQ ID NO: 181216 - DNA, 268 bp, Glycine max
atcggaacaaacagggaatagaagagaggagaagatgggtttcataatggaatttgcggagaacttggtattaaagttgatggaagatcccgaagatacgggatccgaggtgaggggagaccggttataagattgaaggacaggtgccgaaaagacgaaggagatgtggagttaccctatgggacccaatgggttttggacattcgaacgccacaattctcagcttgctcgggatgcacagattagccaagtggccgggaggagggac

SEQ ID NO: 181217 - DNA, 261 bp, Glycine max
tggattttggagaaggatttgccagcttcaatatttgtccgagttcttgagtcaaggatggatcttttaaggggtgtgattattggagcagaagggatccttatcatgatggcctttcctttttggatgtttccttgcaaattgcctatcccaatgtaccgccgaaagtcactaccattctggaggtcttcggctcaacccaaatctgtatgtttgtggcaaagtatgccttagtctacttaacacctggtccggtagcaa

SEQ ID NO: 181218 - DNA, 149 bp, Glycine max
gctagtttatcgtgaggagaatatgaagttgtttgtcttctctgttgctgcagtagttttcgtagcatggccatttcatggcgcaggctaccagaggttccctctccggaatgaaactgggtatggtgagcgttcttcggaggtaaatg

SEQ ID NO: 181219 - DNA, 260 bp, Glycine max
tttcattctcattgccgtcacagagagagacaagaaacaatgaagtttaaccctagggtttcctcaagccgtcgcaagagccgcaaggctcacttcaccgctccgtcgagcgtgcgccgcgtcctgatgagcgcgcctctctccaccgatctccggtcaaagtacaacgtgcggtccattccggttcgcaaggacgacgaggttcaggtcgtgaggggaacctacaagggccgcgagggcaaagtggtccaggtctatcg

SEQ ID NO: 181220 - DNA, 263 bp, Glycine max
aaaacaccaaagacacccaaaacacccgttgttaagccaccagtcaccatccctcccattaatgttcctcccgttgttcttccaccaatagtgaagcccccaggtattgctcctccaattccaattataaacccacaaacaacaccagggaagggagggaacaactcaatgccaacaaccaaagtccttctgcgcaggctacgtgcccaattgacacgctcaaacttggtgcctgtgtggatcttcttggagggttggttcac

SEQ ID NO: 181221 - DNA, 260 bp, Glycine max
cgagataactagaaacagtgtgatgaaaatgaaggtccttgttttcttcgttgctacaattttggtagcatggcaatgccatgcgtacgatatgttccctctccgaatgaaaactggctatggtgcccgtactccggaggtgaaatgcgcaagttggaggcttgctgtggaagcacacaacatctttggctttgagaccattcctgaagagtgcgttgaagcaacaaaggaatacatccatggcgaacaatatagatcag

SEQ ID NO: 181222 - DNA, 283 bp, Glycine max
ctcattaattgcaagaatggcacttcgttgcttggtgatgtccctttctgttctcttcactcttggtcttgcgagagaaagccatgccagagacgaagatttttggcatgctgtttggccaaacactctcattccaagttcattgtcagatcttctaaagcctggccctgcaagtgttgaaatcacatgatacccctatgcaaattgaagaaacacagtacccgaaaaccttcttctataaagactacttcatccaggcaaaacaatgaaagtacaattcagc

SEQ ID NO: 181223 - DNA, 281 bp, Glycine max
caacaagctgttgtctcttggcttcaagattgtattcttgtcaggaagatatcttgacaaaatggccgtaacagaagcaaacctaaagaaggctggcttccacacatgggagcagtcaattatcaaggatccacatctacatcactccaaatgcaccttcatacaaatcagcaatgagagagaatctgttgaggcagggatacagaattgttggaatcattggagaccaatggagcgatctgcttggagaccacagaggcgaaagcaggacctttaagctt

SEQ ID NO: 181224 - DNA, 277 bp, Glycine max
cgaccatgatgccggcctttcggacttcggcctcaaccccttgttcggaaacggagccccgtcaaaccgtgtggagggataccgggcacccgaagtggtcgaaacccggaaggtgagcttcaagtcacacgtgtacagcttgggagtgttgctgctggagcttctaacgggaaaagcgccaaaccaagcctcgctcggggaagagggcattgatctgtccaggtgggttcagtcagttgtgcgtgaagaatggaccgcagaagtgttcgatgcggag

SEQ ID NO: 181225 - DNA, 280 bp, Glycine max
caaatagtggaggacttccgtaactatgctgacttttgcttcaagacatttggtgatcgggtgaagcactgggtaaccctaaatgaaccacatggctacagcgtgaatggctacagtggtggaaattttgcaccaggtagatgttctaactacgttggaaaatgccctgctggtgattcttccaccgagccctacattgttaaccaccacttaatacttgctcatggagcagcagtcaattgctacaagaacaaataccaggctcatcagaaaggacaaa

SEQ ID NO: 181226 - DNA, 278 bp, Glycine max
taagtttcgttgccactgaggaatgaaatggccaatggtaacaacattagtcatttcttcaagctcttgcttttccttctaactttccactcttgtctcgatgagattttcttccaagagagattcgaagatggatggacgagccgttgggtgctatccgattggaaaaggagcgagggaaaagcgggtaccttcaagcacacagcagggaaatggtctggggatcctgatgacaaaggtcttcagacatataatgacgccaagcatttcgccatatc

SEQ ID NO: 181227 - DNA, 277 bp, Glycine max
ccttcaccttcccttcgagatggcaaagtctaagaatcacacagcgcacaatcagtcctacaaggcccacaaaaacggcatcaagaaacccaagaggcatcgccacacttccaccaaagggatggatcccaagtttctgaggaatcagaggtacgcgaggaagcacaacaagaagagcggcgaaattgccactgaggaagagtgaagtggcactttctaacggaaccattagggttttttttttaagctcggtttttttttgttttattttgttttc

SEQ ID NO: 181228 - DNA, 273 bp, Glycine max
aggcgttctatatattattgaattgacaatgaggcctgctcttgctttgcttcctcttctatttgctttcttgttagctgccactacggaatcaagaaaagatccaggggaatattggaaaatgatcatgaaagatcaggacatgccagaaggacttcaaggtcttgtttcatttcaatctgaaaataaccctaagactcaagagcagcttggtaaaggttccaaaaaccattgtgaagagtctctagttacaaatacacaagttaacagtga

SEQ ID NO: 181229 - DNA, 282 bp, Glycine max
cgctttagcaaattccaattcccaatccaaaaccctaatttcgttcaaagaacaattgtgatggcaccaaaggcagagaagaagccagcggagaagaagcccgcggaggagaagaagtcgacggtgggagacaaggctccggcggagaagaagccgaaggcggaaagaagcttcctaaggagggaggagccggcggagaaggggggaagaagaagcagaggaacaagaagagcgtggagacatacaagatatacatattcaaggtgctgaagcaggtccacc

SEQ ID NO: 181230 - DNA, 287 bp, Glycine max
gtgaagagtgagagagagagagagagagaggcacttggaatcccaaaatgagagaaatcatcagcattcacataggtcaggccgggatccaggttggcaactcctgctgggaactctactgcctggaacatggcatccagcccgatggcatgatgccaagtgactcctccttcggtgtagcccacgacgccttcaacaccttcttcagcgcaaccggatccggcaagcacgtccctcgcgccgtcttcgtcgatctcgagcccaccgtcatcgacgaagtccgttgt

SEQ ID NO: 181231 - DNA, 284 bp, Glycine max
gttggtaaagaaagaaagagaagagaagaatcgaagacgaagatggaggacgcatcagcatcaaagttcattccacaccaaatcggaggcgtccaaaacgacgcgcttcgattcggtctccatggagtcaagagcgacatcgttggttctcaccctcttcaatcttcactccaatctacaaggagaatggatgaagcgatgaagaggcaatgcaaagttaacctgtacggaactgcttttcccatgaaggaggagcttgacaggcaaatcctgtccaggttcca

SEQ ID NO: 181232 - DNA, 282 bp, Glycine max
ccctcttttgctttaccaaattccactttccaattcaaaaccctaactccgttcgaagcaccaaatcgtgatggcaccaaaggcagagaagaagccagcagagaagaagcctgtggaggagaagaaatcgacggtgggagacaaggctccggcggagaagaagccaaaggccggaaagaagcttccgaaggagggaggcgccggcggagaaggtaagaagaagaagagaaacaagaagagcgtggagacatacaagatctacatcttcaaggttctgaagca

SEQ ID NO: 181233 - DNA, 281 bp, Glycine max
cctaaaaagcgcaagaaaacaaaatccccaaaatatctctcgctctgaaaccgccatggatttgcagcagagcgagttcgatcgcctcctgttcttcgagcacgctcgtaaggccgcagaagccgaatacgagaagaaccctctcgacgctgataacttaacaagatggggcggagctttattagagttgtctcagtttcagagttttcctgaatcgaagaaaatgacccaagaggctgtttcaaagctagaggaggcgcttgcggtgaatcccaagaagc

SEQ ID NO: 181234 - DNA, 280 bp, Glycine max
gcttctcattgttgaaaagaaaccctagcaagtggagcaatggcagacgttgaagtcgatgtggcggcagcagcagcagcagggctgccgaagaagagaacgttcaagaagttcagttttcgaggcgtggatctcgatgcacttctcgacatgtccaccgatgaactcgtcaagatgttcagtgcccgcgctcgtagaaggttccagagaggcctcaccagaaagcccatggccttgatcaagaagctccgtaaagcgaaaagggaagctccaccaggtg

SEQ ID NO: 181235 - DNA, 272 bp, Glycine max
tgagaaagtgagaatggagctggaggaacaaaaaatgaggcaatcaaggatgtttgtgagcgcaatccaagaagcaatggcgaagaagctgaaggaaaaagaccaagagattcagagaatggggaagctgaattgggcccttcaagaaagagtcaaaagcttgtgcatggagaaccaaatttggagggaattggcacaaacaaacgaatccacagccaactacctacgaagcaatttggaacaagtgctggcacatgtcggcgaggaacgcg

SEQ ID NO: 181236 - DNA, 271 bp, Glycine max
aattcctcttcccattctaggcttcccaaatggacgctggcggaaagatcaagaagggcgccggatcgaagaaagggcggcggcactaagaagaagccggtttcaacgtccgtcaaggccggtctccaattccccgtcggaagaattcttcgttatttgaagaaaggaaggtacgcccagcgtgtcggtaccggtgctcccgttacttggccgcagttctcgagtacctagctgctgaggtgcttgtcctggctgggaatgctgcacgtga

SEQ ID NO: 181237 - DNA, 270 bp, Glycine max
gagggttgcccttggagaatgtgggagagtttggaaaaggccaagaaagagttagcagcaagcattgagaagggcatttctttcatcagaaaatgagtagttgatgatagtacgtcccgaaaataaatggttagattgtgctgtgtccattgtgagatcatatagatttataattagttatgtgatatgtatgaatatcgagttctatctagaaacatgtaaatgtaataattggaataccgaatttcatttattattccgtctcgagtt

SEQ ID NO: 181238 - DNA, 273 bp, Glycine max
agagagagagagggagtcagagaaaccctaggtaagaagaaaagatgccggctggtcatggtttgagatcccgcaccagagattccttctctcgtcctttcaggaagaagggaaccatcgccctcaccacatacctgagaacctaccacgtcggcgactatgttgacgtcaaggttaacggtgccgttcacaagggaatgccccacaaattctaccatggccgcaccggacgcgtctggaatgtcaccaaacgtgctgttggcgtcgaagtca

SEQ ID NO: 181239 - DNA, 278 bp, Glycine max
  unsure (1)..(278): unsure at all n locations
gcggaaatcgttgttgagttcacagacttacccgtcaagaggccaagagaagaagaagaaggaaccaatggcgtctccaacgacgccgtttcagcgctccccaatgaccctcaataccctggcatctctgcggttattcccggttggttctccgaaatcagcccaatgtggcccggggaggcacattccttgaagatggaaaagattttgtttcaagggaagtctgactatcagaatgtcatggtcttccagtcatcaacatatacaanagttcttgt

SEQ ID NO: 181240 - DNA, 280 bp, Glycine max
cccaattcctaattgtttaaacctaattctcatttcttcatcgttcgattcttctcactctaaagatgcagatcttcgtgaaaactttgaccggtaagaccatcacccttgaggtggagtcctccgacaccatcgataacgtgaaagctaagattcaagacaaggaagggatcccacctgaccagcagagacttatctttgcgggtaaacagcttgaggatggtcgaacccttgccgactacaacatccaaaaggaatccactctccacctcgtgcttcg

SEQ ID NO: 181241 - DNA, 281 bp, Glycine max
  unsure (1)..(281): unsure at all n locations
agagtttgttgtgagctataagctagtttatcgtgaggagaatatgaagttgtttgtactctttgttgctgcagtagttttggtagcatggccatgccatggcgcaggctaccaaaggttccctctccgaatgaaaactggctatggtgagcgctcttcggaggtaaaatgcgcaagttttaggcttgctgtggaagcacacaacatccgagccattaaaaccattcctgaagagtgcgttgaaccaccacangactacattaatggcgaacaatttagat

SEQ ID NO: 181242 - DNA, 279 bp, Glycine max
aaaccctagttagcctcttcttgtttctcctgcaatcaacgacacccccccaaaaatgacaggagagacagtgaacccaaaagcttaccctttggccgatgcgcaactcgcaataacaatactggatcttgtgcaacaagctgccaactacaagcaactcaaaaagggtgctaatgaagcgaccaagacactgaacagaggcatctctgagttcgttgtgatggccgcggacactgagcctcttgagattcttctccatcttcctctcctagctgagga

SEQ ID NO: 181243 - DNA, 269 bp, Glycine max
ctcgagccggtcaccatagtgactttcttctttgaaccaaaatctaatagtgatgctgatcccaaggcagcaaggcgagctctggactttatgtttggctggtttgctaatcccattacatttggtgactatcctgagagtatgagatctttagttggttctagactccccacattcaccaaagctcaatctgaaagtctcaaaggttcatatgattttactggtataaattcattacacctcaaatttcgtggaatatgctccaccaa

SEQ ID NO: 181244 - DNA, 277 bp, Glycine max
  unsure (1)..(277): unsure at all n locations
ctcaagcaagctaaggcattattatggcttatcaagtgttgctaatttgtttggtctccaccatagtgtttgcatacatactatggagaaaacaaagcatgaaaaaccttccaccaagtctaaaggtacaatnncataattggccaactcaaacttgtgtcnccaattccccatgaagattgttacaagntntnaanacgccacggacccatcatgcaacttttccttggctcagtcccttgtgtggtggcttccaccgcagaagccgccaaagagt

SEQ ID NO: 181245 - DNA, 264 bp, Glycine max
cgcaaaaatggcacctgcaacactgtctctgtctctcctcctcctgttctcactcagcatcgccgtaaccgttagatcgagcgactacgactacgattgtgtgtacactgcatacgttagaaccggttcggtgttgaagggcggaacggactctaagatcgggctgaagctgtacgacaagtacggctactacatctacattaaaaacctcgaagcatggggcggcttgatgggcaagggctacgactacttcgagcgcggcaa

SEQ ID NO: 181246 - DNA, 264 bp, Glycine max
gcatgtgccaccggagccagcgggccgtcggatcatgggtggtcctactcctcctccagcgtggttacaccgtccatgccaccgcccaagctatccaggatgaaaatgagacgaaacatttggaggaaatggaaggagcaaagagtcatctccattttcctgaaatggatcttcttgacatcgactccattgccgctgccataaagggctgttccggcgtaatccaccttgcatgtcctactatcattggtcacgtcgaagatc

SEQ ID NO: 181247 - DNA, 194 bp, Glycine max
tctgcgttcggctcgaggttcactcttattctcgatgcggatatggcctcagcgctttccttgtagcattcaatgacgatcggtcaggttacggttcacaacagtatcgtggtcattggccatgtcgaatctgggaattcctctctcactggtctcctgatgtggaagatccgatggtttgataggcgtgttat

SEQ ID NO: 181248 - DNA, 273 bp, Glycine max
gaaggctggctaccacacatgggaaaaattaattctcaaggatccacaagatccttccactccaaatgcagtttcatacaaaacagcagcgagagagaaactgataaggcagggatacaacattgttgggatcattggagaccaatggagcgatctcctcggaacccacagaggcgaaagcaggacctttaagcttcctaatcccctgtactacattcagtagttccttcacctctcaacaatctagcttgctcctatctatctatatgtaat

SEQ ID NO: 181249 - DNA, 289 bp, Glycine max
ttcggctcgatgagtctgttgtgagctataagctagtttatcgtgaggagaatatgaagttctttgttctctctgttgctgcagtagttttggtagcatggccatgccatggcgcaggctaccaaaggttccctctccgaatgaaaactggctatggtgagcgttcttcggaggtaaaatgcgcaagttttaggcttgctgtggaagcacacaacatccgagccgttaaaaccattcctgaagagtgcgttgaaccaacaaaggactacattaatggcgaacaatttag

SEQ ID NO: 181250 - DNA, 281 bp, Glycine max
gcacagctacctgcatcgacatcctccttgccatcatcctccctcctctcggtgtcttcctcaagtatggatgcaacgtagagttctggatctgtttggtgcttactctttttggttacattcctggaattatctatgctgtctatgctatcaccaagtgatcatattcatcacctcttgtagacaatgaataatttgtcaaagtacaacggttatgcatgtttctcaactccagcattgatataatcgtttgatctcagaacaatgtgattcttttttgt

SEQ ID NO: 181251 - DNA, 273 bp, Glycine max
atttactctctctctgatctgaaatctgaatgattgaattgcgttgcagatggtacaccatgactcttgctgacggatctgtttccgagacattccattatttaaggcagaatgggttgcagggtttgctacatatatggcccacccccactcccaccgcctgcaaaatcattgcagtctatgctgcatttgaggcagcacttcagcttcttcttcccgggaaaaccgtttacggccctatttctccaaccggccaccgacctgtctacaagg

SEQ ID NO: 181252 - DNA, 266 bp, Glycine max
gtgagagcaaaatcaaaatgtgggcaagcgcagaaggtggtgctccggaggttactctggaaacttccatgggttctttcaccgttgagctgtactacaagcatgcgccgaggacttgtaggaacttcattgaactgtctcgccgaggttactacgacaacgttaaattccacaggatcatcaaggacttcatagtacaaggtggggatcccactggaacaggaaggggaggagaatccatatatggtgcaaagtttgcagatgag

SEQ ID NO: 181253 - DNA, 273 bp, Glycine max
cggctcgagcggctcgagggcgagtaccctgaggcttctcttctcttctcttctctgtcgtgagtcaccatggtgagggttagtgtgctgaacgatgctctgaagagcatgtacaatgctgagaaaaggggaaagcgccaagtcatgattaggccatcctccaaagtcattatcaaattccttttggtgatgcaaaagcacggatacatcggagagtttgagtatgttgatgaccacagggctggtaaaatcgtggttgaattgaacggtaga

SEQ ID NO: 181254 - DNA, 268 bp, Glycine max
cacaagccaagtgaaagtcagaaaaaataaaaatcaaagagcataatgtcagggatcattcacaagattggggagacccttcatgtgggagggcacaagaaggaggaggagcataagggtgagcaccatgctggagaatacaaaggggagcaccatggtgaacacagtagtgagtacaaaggagagcatcatggtgaacacaaagctggagagtaccatggtgagcacaagccagagcacaaagacgggttcctagacaaagtcaagg

SEQ ID NO: 181255 - DNA, 224 bp, Glycine max
gactactagaatctacttcagattcttgttcttgtggtctgttttctgttgtgtttgatgttcagatgtgtaccagtaccgatgtggttttaatttggatgcattgcttttatgcttcaaaaaaaaaaaaaaaaaaaaaaaaaaaaaaaaaaaaaaaaaaaaaaaaaaaataaaaaaaaacaagcaggatgttatcgcgcaataattgtcagatcccccccccc

SEQ ID NO: 181256 - DNA, 278 bp, Glycine max
aagcagatcaatctctctctctctctcaaccataatagtcatgggtttgaaggaggattttgagcagtatgctgagaaagcaaagactttgccaccgactcaatcaaacgaagacttgcttatcctttatggattgtacaaacaggccaccgttggacctgtcaacaccagccgtcctggaatgttcaacatgagggacagagctaaatgcgatgcatggaaggctgttgaagggaaatccaaggacgaagcaatgggtgattacatcattaaggtga

SEQ ID NO: 181257 - DNA, 272 bp, Glycine max
ctccttctcaaactagttctatatactattattcatccattccattctatatatttcataatgggtgttttcactttcgaggatgaaaccacctctcctgtggctcctgctaccctttacaaagctctagttacggatgctgacaacgtcatcccaaaggctgttgacgccttcaggagtgttgaaaacgttgagggaaatggtggccccggaaccatcaacaagatcactttccttgaggatggagaaaccaagtttgtgttgcacaaaat

SEQ ID NO: 181258 - DNA, 271 bp, Glycine max
tgagagggacggtagcagagattccgtgagttgcaaaaatgaaaacaattcttgccgcagagaccatgaacatcccggacggcgtgagcctcaaggttaatgccaaggtcatcgcagttgagggcccccgcggaaaattggtgcgagacctcaagcacttgaatctcgactttcagctcatcactgacgaaaacggtaaaaggaagctgaaggtggaggcctggttcggttctcggaaaacatccgccgccattcgcaccgccctgagcca

SEQ ID NO: 181259 - DNA, 258 bp, Glycine max
aaacacaagccaagtgaaagtgagaaaaaataacaatcaaagagcataatgtcacggatcactcacaagattggggagacccttcatgtgggagggcacaagaaggaggaggtgcataagggtgacaccatgctggagaatacatggggaccaccatggtgagcacagtattgagtacaaatgagcgcatcctggtgaatccacagctggctacctacatggtgagcacaagccagtgctcgcacaggggttcctaga

SEQ ID NO: 181260 - DNA, 262 bp, Glycine max
gttgagggttgtgttggaatttttcacactgacaccccaattgatttcgcggtgaacgacccagaggaagtggtgaccaaaagacgcattgatggagcactaggcatattgaaagcacgcctaaaaggcaagactgtgtagagggctgtttacacttctaacggacccactgcttgcttcagcagcctagaagagacaggatgtggccgatgagactgattggagtgatgcggatttgctcaggcgtctgaagccttttagc

SEQ ID NO: 181261 - DNA, 154 bp, Glycine max
  unsure (1)..(154): unsure at all n locations
gcgcttcagcacaatgggtgcctacaagtatgtttcggagctatggcgcaagaagcagtctgatgttatgagattcttgcagcgggtgaggtgctgggagtatcgccagcaaccttctattgntccgtttgcacaacggtctaactcgcccaga

SEQ ID NO: 181262 - DNA, 264 bp, Glycine max
gtaattaataacaagctagctattagttcgattttgtagtaagtgaggtgccaatatggtgaagatagctcttggtactttggatgactcttttagcgctgcctctcttaaggcttatttcgcagagttccacgcaactctgatttccgtgttcgctggtgttggatcagccatcgcttacaacgagcttacaaaagatgcagccttggatccaacggggctggtggcagtagctgtggcacatgcatttgcactgtttgtagg

SEQ ID NO: 181263 - DNA, 271 bp, Glycine max
ctttgttaactccactaagtaaaggtgataccacaacattagaggtcgtttacatattgacacattctctggaacctttcccagtagaaataagtcaatcagagtcacagttggtttatttccgtgatagtgcaatattattgtctccctatcatgtcaatcaacagacaacttttattaagactccaagcacccgggtagaatcattcacagtggtggaccccactaaacgtgctggtacagagttgaaatacgggccatatgaaaatca

SEQ ID NO: 181264 - DNA, 277 bp, Glycine max
cacaattcctacacatttctactctttagtttctccaattttctttctcaattctcaacaatggccactacaacacaacttcacttaccccctggattcagattccatccaacagatgaagcactcgtcatccactacctttgtcgcaaatgcgcttcgcaacatatcgcggttcccataatcgccgaaattgatctgtacaagtacgactcttgggaccttccaggaatggctttgtacggagagaaagagtggtattttttcacgccgagggacc

SEQ ID NO: 181265 - DNA, 273 bp, Glycine max
atcaaacatggctagggttagtgctttgtttcactctttgctcttgatttcttcccttgtattggcttctcaaatccatgtttcctctgggaaactagtccctggactatcatggaattactatttgttgacatgtcccaagcttgagaggattataaggaagcatcttgaggatgtcttcgagaaggacagtggagtagctcctggcatacttcgactcttcttccatgactgctttcctaatggatgcgatgcgtctatattgttgaatgg

SEQ ID NO: 181266 - DNA, 190 bp, Glycine max
cacaaacagagcaaaactcgctccaccaatggcgggttacagagccgacgacgactacgactacctcttcaaggtggtcctgatcggcgatcggcgtgggaagtcaactcctcctcgctcacagacgatcattgatcagtcacatgcgcgatccacgactgcgcgatcaatcatagcaactggacgagca

SEQ ID NO: 181267 - DNA, 270 bp, Glycine max
gctgtctgctgttagatctgtacccgcctagccattgatttggaaaagtccaacttcaaggatgagtaagcttcagagtgatgctctaagagaagctatctcaggaatcatggctgattccaaggaaaagaacaggaaatttgtggagaccattgaactccaaattgggttgaaaaattatgatccccagaaggacaagcgtttcagtggctctgttaagttgcctcatattcctcgccccaagatgaagatttgtatgcttggagatgc

SEQ ID NO: 181268 - DNA, 269 bp, Glycine max
cctcgagccgaatcggctcgagtagcaagctagctaggttgaaaatactttggttctgtagtacgtgaggtgaggtgccaaaatggtgaagataactcttggtactttcgatgactcttttggtgttgcctctcttaaggcttatttggtagagttccatgcaactctgacttccgtgttcgctggtgttggttcagccatcgcttacaacgagcttacaaaagatgcagccttggatccaacggggctggtggcagtagctctggccc

SEQ ID NO: 181269 - DNA, 266 bp, Glycine max
ctttggattcttattgttcatcgcagactcaacactctctccagacacttccttcatcaaatggcttctcacgacggcatctccgctgcttcttcagattccgtcttcaatcacctcgttcgtgctcccgaagatcctatcctcggggtaactgttgcttataacaaagatccaagtcctgttaagctcaacttgggagttggtgcttaccgaactgaggaaggaaaacctcttgttttgaatgtagtgaggcgagttgagcagca

SEQ ID NO: 181270 - DNA, 275 bp, Glycine max
ctggagaaagagaaagatgatgaggttaaggtggagtttagtcgtaacggtcacgttcgctgttttgctgttttggattggatcgctgcaagttcaagcctctaattctgtttccgccttcgttcaaaacgccatctactccaacagaatcgccgttttctccaaatcctattgcccctactgtttgcgcgccaaacgcttgcttgctgagctcaatgagaaaccgtttgtggtggagctcgatttgcgagatgatgggtatcaaattcagagtg

SEQ ID NO: 181271 - DNA, 275 bp, Glycine max
attctctctgtgtatttccctacctctcccttcaagatgcagatcttcgtcaagaccctcaccggcaagaccatcacccttgaggtggaaagctctgacaccatcgacaacgtcaaggccaagatccaggacaaggaaggaatccccccggaccagcaacgtctcattttcgccggaaagcaacttgaggacggccgtacccttgctgactacaacattcagaaggagagtactcttcacctcgtcctccgtctccgtggtggcatgcagatctt

SEQ ID NO: 181272 - DNA, 271 bp, Glycine max
ctgctgccgaaacccttccggaaccctaaggtaagtgagtaatcagcggttgagaatggtggacaaggcgaagggtagaaaggaggaggtggttacacgtgagtacaccattaacctccacaagcgcctccatggctgcacatttaagaagaaagctccgaaagctattaaggagataaggaaatttgcccaaaaggccatggggaccaatgatgtgagggtggatgtgaagttgaacaagtttgtctggagccagggaatcaggagtgtt

SEQ ID NO: 181273 - DNA, 269 bp, Glycine max
  unsure (1)..(269): unsure at all n locations
cggcggcaacagggagagaagatgaagttcaatccacgtgtgtcgagcagccgccgcaagagccgaaaggctcatttcacggcgccatcgagcgtgcggcgggtgcttatgagcgcccctctgtcggcggagctgcggtctaagtacaacgtgaggtcgatccgcacntaggaaggaggacgaggtgcaggtgatgcgaggaacatacaagggtcgcgaggggaaggtgactcaggtctaccgtcgaaagtgggtgattcacattgagc

SEQ ID NO: 181274 - DNA, 269 bp, Glycine max
gcaaaaggccatataattttcttttatttgaaataatgtccgggatcatccacaagattgaggagaccctccatgtgggagggcacaagaaagaggagcacaaaggagaacaccatggtgagcacaaaggtgaacacacaggagaacaccatggtgagcacaaaggtgaacacaaaggagcacaacaccatggggagcacaaggagggacttgtggataagatcaaggacaagatccatggtgatggccatgacaagggtgagaaaaag

SEQ ID NO: 181275 - DNA, 268 bp, Glycine max
ttcccttctccaacatgccaaacgacagcgttctgagtcttttcttcttcgtcaccctcttcacatgccttctctctgctaattcccacgatgaccatattttcctaccgagtcaactccatgacgatgactcagtgagttgcactgctaccgacccaaaccttaactacaagccggtgatcggaatcctgacccaccccggcgacggtgcctctggccggctcagcaacgccaccggggtttcttacatcgccgcctcctacgttaa

SEQ ID NO: 181276 - DNA, 259 bp, Glycine max
gtccggcagtggaacaacatgtaatacgtttcaacagcagcatttctgctctcaatatactctgatttccttcaaaacacagatcaaaagcttaattgccatggcggtacagtggaccatgaagaaattcttaattttgctaagtcacaggttgattacattttggcggtcaacccaatgaacatgagctatttagttgggtatggccctaactaccctaaaagggtgcaccatagaggggcatccattgtgtcataca

SEQ ID NO: 181277 - DNA, 268 bp, Glycine max
ggagtagcggcattaaaaatgcagatcttcgtgaaaactctgacagggaagactataaccctcgaggtcgagagcagcgacaccatcgacaatgtcaaggccaagattcaagacaaggaaggcatccctccggatcagcagcgtttgattttcgccggaaagcagcttgaagatggaaggaccctggccgattacaacatccagaaggaatcaacccttcatctcgtcctcaggcttcgtggtggcatcattgagccttccctcatgg

SEQ ID NO: 181278 - DNA, 267 bp, Glycine max
cctccccttctcttgcggctagggttttagcgcacttcttctagatttaaggaagatcggtaaggaaaaggttcacatcagtattgtggttattggccatgttgactctgggaagtccactaccactggccacctgatctacaagcttggaggccttgagcagcgtgttattgagagatttgagacggaagctgctgagatgcacaagaggtcttccaagtatgcctgggtgcttgataagcttaaggctgagcgtgaaagaggaat

SEQ ID NO: 181279 - DNA, 272 bp, Glycine max
aggtagaacccttccacggtggtgactgcgcgatgggtgcctacaagtatgtttcagagctatggcgcaagaagcagtctgatgtcatgcgcttcttgcagcgggtgaggtgctgggagtataggcagcaaccttccattgttcgcttgacaaggtcgacccgccctgacaaggctcgtcgcttgggcttcaaggctaagcagggctatgtgatataccctgttcgtgttaggaggggtggccgaaagaggccagttcccaaaggtattgtt

SEQ ID NO: 181280 - DNA, 275 bp, Glycine max
gtaaattaactatgaagcctaccctactattatccctttccttcctgcctctctttgctttcctggctctttcagaagatgttgaacaagttgtggacataagtggcaaccccattttcccaggtggcacatattacattatgccatcaacttggggcgctgccggtggtggattgacactaggccggacaggaaactcaaactgcccagttactgttttgcaagattactcagaaatcttccgtggcacaccagtcaaattcagcatacctggg

SEQ ID NO: 181281 - DNA, 269 bp, Glycine max
ctcactcacaaacgcacactgaattcaaaaacatcgaaagagagaggcatggccgagcaaaccttcatcatgatcaagccagatggcgttcaaagaggccttattggcgagattattagcagatttgagaggaagggtttttacttgaaagggttgaaactcgttactgtggaccgtccttttgctgagaagcactatgctgatttgtctgcaaagcctttctttagtggtttggtggattacattgtctctggccctgttgttgccat

SEQ ID NO: 181282 - DNA, 268 bp, Glycine max
cccgcttcgtggaaatcccgaaccagaaaccatgcttctccgaaccgctgctgcttctgcttcgtccctctccctcttcagcccgcacgccgaacctccccgttcggttcccgctcgtggactggtggttcgcgcagcgaaaggatccacgaaccaccgcgccccgaccggagtgatttttgaaccgttcgaagaggtgaagaaggagctcgatctcgttcccaccgttccgcaagcttctctcgcgcgccaaaaatacgttgacgaa

SEQ ID NO: 181283 - DNA, 267 bp, Glycine max
ggtgaagtgttcggattgcggcgacgtgagcggttcgctgcccgcgacgtcgtgagaagtccactgaaccttatcatttagaggaaggtgatgaggatgaagctgatgatgagggaaaggaggatgaatctggtgatgatgatgacgatcaagaggaggatgacgatgagggtgaggaggaggatgacaagtgaaaaatacattatggtcatattactttttttttttggggttgtaggagtatttaagcgttctttaggggatgat

SEQ ID NO: 181284 - DNA, 267 bp, Glycine max
tagcaagctagctaggttgaaaatagtttggttttgtagtaagtgaggtgaggtgccaaaatggtgaagataactcttggtactttcgatgactcttttggtgttgcctctcttaaggcttatttggcagagttccatgcaactctgattttcgtgttcgctggtgttggttcagccatcgcttacaacgagcttacaaaagatgcacccttggatccaacggggctggtggcagtagctgtggcccatgcatttgcactgtttgta

SEQ ID NO: 181285 - DNA, 271 bp, Glycine max
gagtagcggcattaaaaatgcagatcttcgtgaaaactctgacagggaagactataaccctcgaggtcgagagcagcgacaccatcgacaatgtcaaggccaagattcaagacaaggaaggcattcctccggatcagcagcgtttgattttcgccggaaagcagcttgaagatggaaggaccctggccgattacaacatccagaaggaatcaacccttcatctcgtcctcaggcttcgtggtggcatcattgagccttccctcatggcttt

SEQ ID NO: 181286 - DNA, 266 bp, Glycine max
ggaatccaaaaatgagagacatcatcagcattcacataggtcaggccgggatccaggttggcaactcctgctgggaactctactgcctggaacatggcatccagcccgatggcatgatgccaagtgactcctccttcggtgtagcccacgacgccttcaacaccttcttcagcgaaaccggatccggcaagcacgtccctcgcgccgtcttcgtcgatctcgagcccaccgtcatcgacgaatccgttgtggcacttaccgtcaac

SEQ ID NO: 181287 - DNA, 265 bp, Glycine max
gatctgttcggagagagaaagatgttattatagttgttgagcggaggaacaagatgcgagtggttcaaattacactgagctcagtcagttgtatgagaaatacaaacagaaaggtctggaaattctggcatttccatgcaatcagtttggggcacaggagcctggatctaatgaacagatacaagagtttgtttgtactcgcttcaaggctgagtttcccgtttttgacaaggttgatgtgaatggtgacaaagctgctccactg

SEQ ID NO: 181288 - DNA, 274 bp, Glycine max
gaaagtgagaggagagagaaagtagcagatcctccatggcctccaccaaggaacgtgaaaacttcgtctacgtcgccaagctcgccgaacaagccgaacgctatgaagaaatggtggaagcaatgaagaatgtcgcgaactaaacgtggaattgacggtagaggaccggaaccttctgtcggttgggtacaagaacgtggtgggtgctcgtagggcttcgtggaggattctttcctcgattgaacagaaagaagaagctaaagggaacgatgtg

SEQ ID NO: 181289 - DNA, 264 bp, Glycine max
cggaaactgatggtggattgtactggggaaggtgttttgttcattgaggctgatgcagatgtcacttaagcaatttggtgatcctcttcaacctcctttcccgtgctgggaggaactcctttatgatgtacctggttctcaaggagtgcttaacactccccttctgcttattcaggtaacgcggctcaagtgcgggggtttcatattagctgtccggctgaaccacacgatgagcgacgcagccggtctggttcagttcatgag

SEQ ID NO: 181290 - DNA, 268 bp, Glycine max
aatgaaagtacaattcagcaagcctccctttcaacaaccatggggtgttggtacatggttaaaggaaattaaagacactactaaagaaggatatagttttgaagagctatgcatcaagaaagaagccattgagggagaagagaagttttgtgcaaaatcctagggaacagtaattggttttgccatttcaaagctgggaaagaacattcaagtactttcaagttcctttgtcaataagcaagaccaatacactgtggaaggagtgcag

SEQ ID NO: 181291 - DNA, 266 bp, Glycine max
gcaagaatggcacttcgttgcttggtgatgtccctttctgttctcttcactcttggtcttgcgagagaaagccatgccagagacgaagatttttggcatgctgtttggccaaacactcccattccaagttcattgcgagatcttctaaagcctggccctgcaagtgttgaaatcgatgatcaccctatgcacattgaagaaacacagtacccgaaaaccttcttctataacgaagaccttcatccaggcaaaacaatgaaagtaca

SEQ ID NO: 181292 - DNA, 213 bp, Glycine max
cttaattgttaattctggtaaattatagtgtatgaacttttaaaaacaaaaaaaaaaaaaaaaaaaaaaaaaaaaaaaaaaaagaaaaatagaaaaaacaatagaaaagacatagtcccaggggggacgaacactgggctatggtgccgtactccggatgtgaaatgcgcaagttggcggcgtgctgtcgtacgccacaacatctgtcgcttc

SEQ ID NO: 181293 - DNA, 263 bp, Glycine max
tgaacacaagtagcagagtttacaatagctcatgcacgtgccactctctcttgggaagaagcattgaagaatgcaagcactattgggtatttcaactcagctcaagccttggcagattatgcatcaatactcaaacatgtaaagaagacattacacgccaaaaattccccagtgattgtacttggaggatcatacggtggaatgcttgcttcatggtttaggctcaaatatccccacctggcgattggtgccctggcctcatc

SEQ ID NO: 181294 - DNA, 265 bp, Glycine max
  unsure (1)..(265): unsure at all n locations
caattttcgagggttttattgattttccgatggcttctgcagatgttgagtattgttgctttgtcggtgggctcgcttggggcactgacgaccatgccctcgagagagtcttctctcagtacggcgaaatcgttgaaatgagaattatcaangatcgtgagactggcagatccaggggttttggatttgtgaccttcgcctcggagcagtccatgaaagatgcgatcggagcgatgaatggacagaacttggacggccgtaatat

SEQ ID NO: 181295 - DNA, 270 bp, Glycine max
agataactagaaacagtgtgatgaaaatgaaggtccttgttctcttcgttgctacaattttcgtagcatggcaatgccatgcgtacgatatgttccctctccgaatgaacactggctatggtgcccgtactccggaggtgaaatgcgcaagttggaggcttgctgtggaagcacacacacatctttggctttgagaccattcctgacgagtgcgttgaagcaacaaaggaatacatccatggcgaacaatatagatcagactccaaaaca

SEQ ID NO: 181296 - DNA, 236 bp, Glycine max
gttctttacttgttgggttgttctgatcttctctcatagcaatcaaatcacactcccatcttctcatctcgtaaaccctaaaccccgttttcagtgacatcgagatcgatcgaacatggatgaggagtacgatgtgatcgtgttgggcacgggtctcaaggagtgcattctcagcggtcttctctccgtcgatggtctcaatgttctgcacatggacaggaatgatattacggagg

SEQ ID NO: 181297 - DNA, 266 bp, Glycine max
gtgaaaaccctaaccgggaagacaatcacccttgaggtggagtcaagcgacaccattgacaatgtcaaagccaagattcaggacaaagaagggattcctccggatcagcagaggttgatcttcgccgggaaacagctggaggatggccgtaccctcgccgattacaacatccaaaaagagtcaacattgcatcttgttttgaggcttcgtggtggtattattgagccatctttgatggcactggcgaggaaatataaccaggataa

SEQ ID NO: 181298 - DNA, 266 bp, Glycine max
ccaagattgtcgatgatcagtccatacttgaagatgaaccaaggttaagagaagtactaaagtttgcaaatgcatgtggagctattacaactacccaaaagggagcaattccggcccttcccaaagaggaggctgcactgaaactgatcaaaggggggtcacagaatcttttggcaaaatgcaaaagtgctagcatgatttcgttttcttcccctaatgtttaaattttccgttggatttgcttgctataagtttaggagggaact

SEQ ID NO: 181299 - DNA, 263 bp, Glycine max
ctcgagccgctcgagccgattcggctcgaggcaaaccacatccagatggagataatttgggtactgagagtacagtggtgttgcctgcaactgaaggtgacgatagtacaatttggctattggccaaggctcatgttattgtgaatgactctggttatcatcagctcgtgagccattggttaaatactcatgcagtgatggaaccatttgccatagcaaccaataggcatctcagtgtgctccaccctatttacaaacttctt

SEQ ID NO: 181300 - DNA, 269 bp, Glycine max
tttccctcctcccactcccaccgccaacgccaaacaaaccctaaatctctctcgtcttcttcttcttcttcctccttcaaccatgagcgagatcctgcacgttcagggaggccaatgcggtaaccaaatcggttccaagttctgggaggtgatatgcgacgagcacggcatcgatcctaccggaaagtacaacgacgaaggcgccagcggcatccaactcgagaggatcaatgtctattacaatgaggcctctggcggaaggtacgttc

SEQ ID NO: 181301 - DNA, 266 bp, Glycine max
gagaatggctcccaagggtttaacctttctggctgtgttaatatgcgtttcagcactgtcactgagtccttctgttgcgggggaagggcaaaataatggccttgttatgaacttctacaaggaatcatgccctcaggctgaagacatcatcacagaacaagtcaagcttctctacaagcgccacaagaacactgctttctcctggctcaggaacatcttccatgactgtgctgttcagagttgtgatgcttcactgttgctggact

SEQ ID NO: 181302 - DNA, 265 bp, Glycine max
cggagtgtctgtgcaaatttgcgttgttcttcgcggcacacctcactcactgaacggtaagtatggcggacaaggctgttacaatccgaacccgaaagttcatgaccaacaggcttctttccaggaagcagtttgtcgttgatgtccttcatccagggagggcaaatgtttccaaggctgaacttaaggagaagctggctaggatgtatgaagtgaaagaccctaatactgtatttgtcttcacattccgaacacattttggagg

SEQ ID NO: 181303 - DNA, 257 bp, Glycine max
ttctttcctcaaccttctttcttcttatatatcgaacatggctaagtatcattcaagtgggaaaagctcttccatgactgctatagccttcctgtttatccttctaatcacttatacaggcacaacagatgcacaatccggggtatgttatggaagacttggcaacaacttaccaacccctcaagaagttgtggccctctacaatcaagccaacattcgcaggatgcgaatctaaggtccaagcccagaagtcctcg

SEQ ID NO: 181304 - DNA, 188 bp, Glycine max
tggttcgatgggcaacacctcaactccataatatcgatgctttggctaaaatggttgatcctgcattggaaggactataccctgtgaagtccctttctcgatttgcggatgttattgctctatgcgttcagccagagccggaattccgaccacctatgtcagaagtagttcaagcgctggttcgatta

SEQ ID NO: 181305 - DNA, 281 bp, Glycine max
aactcggctcgagatgacatgaagagcggtcaagaaatctcaaaaacaccatcctcttctaagagaacactaagccagggttcagttgatatatatgctgctcagtgcaaaaattgtttgaaatggagagagattgatacacaggaagagtttgaagagattagaagtaaagtgactgaggaaccttttctttgcagcagaaaggctaatagttcctgtgatgaacctggtgatattgaatatgattccactcggacgtgggtcattgacaagcctaacct

SEQ ID NO: 181306 - DNA, 267 bp, Glycine max
cagaaagctaaaggctaaagcctagaaccttcttcctttacacctcgctggaacccgcgatggatcctcagcctgagccagtcagctacatatgcggagattgtggaatggagaatacgctgaagcccggtgacgttatacagtgccgtgagtgcggttaccgtattctttacaagaagcgcactcgtcgcattgtccagtacgaggcacgctgaagaaaactgctataacgtttgcaagtactttccatgaagaaattgttactac

SEQ ID NO: 181307 - DNA, 261 bp, Glycine max
agcgagcgcgcagtttcaaagagaggatttgggattgggaaggcgagggattgcgctgcgtctcttcctcttctctttcgattcatccctcattcatgatcttccaatccaacaacctcaccctcacactcacacatacacacatctggccgcggagcgtccctcccatggcttcaaagcgcatcctcaaggagctcaaggacttgcagaaagacccaccaacttcttgcagcgctggtccagtagctgaggacatgttcc

SEQ ID NO: 181308 - DNA, 263 bp, Glycine max
ggcggcttccaccgcagctatgtcagacatgcttggaaaccccgtgagcctgagacgcgccaccaggtctgctccatcaccgtctacacctgttactttcaagaccgctgcgcttttctccaagaagaaggcagcaccacctcctccaaagaaaaagcctgctgctgtatcccccgccaatgaggaactcgccaagtggtatggtcctgacagaaggatcttcttgcctgagggtctcttggaccgatcagagatccccgagt

SEQ ID NO: 181309 - DNA, 261 bp, Glycine max
gattcattcttcaccaaaacttcgcaaagaaacactacacatccatggcaactgctggcgtgcaagaagttcgtgttccccctctaacttccacctctgagccaccttctctctttgacggaaccaccaggttgtacatcagttatatttgtccctcatgcgcacgtgtttggatcactcggaactataagggactacaagacaagatcaaactggttcctattgacctacaaaacaggcctgcttggtataaggagaaag

SEQ ID NO: 181310 - DNA, 265 bp, Glycine max
gcagaactctgcttcttcggattccgatcgcacgcgccgtcaccatggtgaacgttccgaaaacaaagaagccatactgcaagagtaaggagtgcaggaagcacacgctgcacaaggttacccaatacaagaagggtaaggatagcattgctgcccaaggaaaacgccgttatgatcgcaaacaatccggttatggtggacaaactaagcccgtcttccacaagaaggctaaaaccaccaagaagattgttctgaggttgcaatg

SEQ ID NO: 181311 - DNA, 261 bp, Glycine max
gtgagtttgttgatcgagataactagaaacagtgtgatgaaaatgaaggtccttgttctcttcgttgctacaattttcgtagcatggcaatgccatgcgtacgatatgttccctctccgaatgaacactggctatggtgcccgtactccggaggtgaaatgcgcaagttggaggcttgctgtggaagcacacaacatctttggctttgacaccattcctgaagagtgcgttgaagcaacaaaggaatacatccatggcgaa

SEQ ID NO: 181312 - DNA, 259 bp, Glycine max
ggctctctctctttctctcataaaaacactccgagtacaaagactctctctcctctcctctttgcattcgagtgaaagaagcgaagaaaaagaaacatgtcagacgcgttctgcagcgactgcaagaggcagacggaggtggtgttcgaccacttcgccggtgacacggtgtgctcggagtgcggcctcgtcctcgaatcccactccatcgacgagacctccgagtggcgcaccttcgccaacgagtccggcgacaacg

SEQ ID NO: 181313 - DNA, 264 bp, Glycine max
  unsure (1)..(264): unsure at all n locations
ggtgaccggcaacaccaaaaccaccaccgcctctcctacctcccggagccatggccgccaccgactcctccgctgcttcgtcacgccagctttcgcagagggagacggacatccagatgatgctcgccgacgacgttcanctcggnacnaaaacctgttacntctagatggaccgctacgtcntctagcgccgcaccgatggtatttacataatggatcttggaaagacatgggagaggcttcagcttgctgctaggattatag

SEQ ID NO: 181314 - DNA, 249 bp, Glycine max
cgcttccacctcgcaaccatgatcatcccggagaagaaccgcaaggagatctgcaaatacctcttccaagagggagtttgcttcgcgaagaaggacttcaatttggccaagcaccctgagatcgacgtgccgaatctgcaggtgattaagctgatgcagagtttcaagtctcgcgagtacgtgagagaaacttttgcttggatgcactattactggttcctcaccaacgatggcatcgagtttctcaga

SEQ ID NO: 181315 - DNA, 264 bp, Glycine max
cagcagcagagcttgtatacgtcgccgcttcagcgtagaacatgatcattcccgagaagaaccgtaaagagatctgcaaatacctcttccaagagggagtttgctttgcgaagaaggacttcaatctggcgaacacccggagattgatgtgccgaatctgcaggtgataaagctgatgcagagcttcaaatccagagagtacgtgagggaaacatttgcgtggatgcactattactggttcctcaccaacgatggaattgagtt

SEQ ID NO: 181316 - DNA, 263 bp, Glycine max
gcacactctctgctcctagggtttctccttcgagtgagggaaatggctcccaaaccgcctagtacgggtctgtttgttggactgaacaagggtcacgtcgtcaccaagaaggaattgcccccacgcccctcagatcgtaaggggaaaacaagcaagagggtgcactttgtgaggaacctcataagagaggttgctggttttgcaccctatgaaaagcgtataactgagttgctgaaggttgggaaggataagagggcactgaa

SEQ ID NO: 181317 - DNA, 128 bp, Glycine max
attcgcacgcattgcttcgcctcacaacagcagcaatacgcagcaatggctcccaaacgaggtggaaaggctccggctcttgcacgtaagaagaagcctgagaaggtcacgaatccgttgttcgagaa

SEQ ID NO: 181318 - DNA, 263 bp, Glycine max
ccgagattccccctaaacccgtttgccttgttgtttgcgaagaaatggcgactaagaggagcgtgggaacgttgaaggagggtgatttgaaagggaagagggtgttcgtgagggtcgatctgaacgtgcctttggatgacaaccttaacatcaccgatgacactagagtccgtgctgctgttcccaccatcaagtacttaactggtcatggagccaaagtgatcctttctagccacttgggacgtcctaaaggtgtaacacct

SEQ ID NO: 181319 - DNA, 259 bp, Glycine max
cttgaactcaaggagatggctctgggaagaggcagtgcagtggttctactactttgcttcttgctgcttcactctcagatggctcgtgctgccacctacacagttggagattctgggggttggacctttaacactgttgcctggcccaaaggaaagctctttcgggctggtgacacacttgctttcaattatagccctgggactcacaatgtggtggccgtgaacaaggctggatatgatagctgcaagactccaagag

SEQ ID NO: 181320 - DNA, 260 bp, Glycine max
gtccggcagtggaacaacatgcaatacgtttcaacagcagcatttctgctctcaatatactctgatttccttcaaaacacaaatcaaaagctaaattgccatggcggcacagtggaccatgaagaaattcttaattttgctaagtcacaggttgattacattttggggtccaacccaatgaacatgagctatttagttgggtatggccctaactaccctaaaagggtgcaccatagaggggcatccattgtgtcatacaa

SEQ ID NO: 181321 - DNA, 264 bp, Glycine max
tagagttgttaccatttgctcccagtacagagcttaaccgagcttcacaaagatgaatcgggaaaagttgatgaagatggccggttcggttagaactgggggaaagggtaccatgagaagaaagaagaaggctgtccacaagacaacaaccacagatgacaaaaggcttcagagcaccctgaagagaataggggtgaatgccatcccggctattgaggaggtcaatatctttaaggatgacgtagttatccagtttctaaatcc

SEQ ID NO: 181322 - DNA, 242 bp, Glycine max
gagagttcttgaggaagaagaaaaggaggctaaataaagagagtgaagaagaagagagggtttgggttttggtgtttgttgttgaatcgtgaaaatgttcagaaaccagtacgacacggacgtgaccacatggagccctgcggggaggctgttccaggtggagtacgctatggaggcggtgaagcagggctcggcggcgatagggctccgatcgaagacccacgtggtcctcgcatgcgtca

SEQ ID NO: 181323 - DNA, 280 bp, Glycine max
gctttcagttcggctcgccccgcgatcaacctcgacgaaggcaaggcgctgcttctcggctccttcagatttctgaaatggcgcctgtttcagctttagccaagtacaagctcgtcttcctgggtgaccaatccgtgggcaaaaccagcatcatcactcgcttcatgtatgataaattcgataacacctatcaggctacaattggtattgatttgctatcaaaaactatgtatcttgaagatcgaactgttcgactgcagttgtgggatacagctgggca

SEQ ID NO: 181324 - DNA, 263 bp, Glycine max
ccgactgcgattcagcacaatgggtgcctacaagtatgtttcggagctatggcgcaagacgcagtctgatgttatgagattcttgcagcgggtgacgtcgtgggagtatcgccagcaaccttctattgtccgtttgacaaggtctactcgcccaataaggctcgtcgcttgggtttcaaggctaagcagggttacgctgatttaccgtgttcgcgtacgaaggggtggccgtaagagaccagttccaaagggtattgtttatg

SEQ ID NO: 181325 - DNA, 283 bp, Glycine max
tcgcattgacctgtaaccttttctctccggttaccaaaaccgtaagtcgctgaacatggacccgcaatcgccggttcgggcggaactgcgagctccggttccgacgttctccccacggttcgcgctcacatccagttcgcagcggaaaatcgcgacgcggtcgatctgagcgacgagagtgcctacgcggtacgctgggcggtgcagaactacctgcgaccgggcgacgccgtgatcctcctgcacgtgcgtcccacgagcgtcctctacggcgcggactggg

SEQ ID NO: 181326 - DNA, 284 bp, Glycine max
  unsure (1)..(284): unsure at all n locations
cagaaacagtgtgatgaaaatgaaggtccttgttttcttcgttgctacaattttcgtagcatggcaatgccatgcgtacgatatgttccctctccgaatgaacactggctatggtcgccgtactccggaggtgaaatgcgcaagttggaggcttctgtggaaccacacaacatctttggctttgagaccatccctgaagagtgcgttgaagcaacaaaggaatacatccatggcgaacaatatagatcagactccanaacagttaaccaacaagcttactttta

SEQ ID NO: 181327 - DNA, 263 bp, Glycine max
tatcccatactatgcacaacatcggatatggaggtggaggaatttaatgaaaccgtatatgatgaatgggtttacaagggcgacgcaccggcaattgccagagactcttaaaaattacaaccaagctgttgtctcttggttcaagattgtaatcttgtcaggaagataatcttgacaaaatggccgtaacagaagcaaacctaaagaaggctggcttccacacatgggagcagtcaattctcaaggatcaaaatcttatcact

SEQ ID NO: 181328 - DNA, 243 bp, Glycine max
ccggaggccacagaggcgaaagcaggacctttaagcttcctaatcccctgtactacattcagtagttccttcacctctcaacaatctagcttgctcctatctatctatatgtaataagatgcgttcaaataggggcactagcttcactttatgtgtttcagctgtgtgtcaacaagtcatgtaagagacttcactatgttgttttctctttcgtggctttaataaattatgcgcccttgttcc

SEQ ID NO: 181329 - DNA, 278 bp, Glycine max
  unsure (1)..(278): unsure at all n locations
ccaaacacccacattttcttcttcttacattcccatttctctctctctctctctgggttattagcaaaaatggcgtcgagtataggcatgatggacagtgcctactttgtcggaaggaaccagattctgacctggatcaacaacaggctccactcaatctctcacgcattgaggaggctgcatctggggctgtgcaatgccagatgatggatatgacgtntccagggggttgtcccatgcacaaaggtgactttgatgccaagactgagtatgatatg

SEQ ID NO: 181330 - DNA, 295 bp, Glycine max
cggaatcggctcgacggagtgtctgtgcaaatttgccttgttcttcgcggcacacctcactcactgaacggtaagtatggcggacaaggctgttacaatccgaacccgaaagttcatgaccaaaaggcttctttccaggaagcagtttgtcgttgatgtccttcatcagggagggcaaatgtttcaaaatcagacttaaggagaagctggctaggatgtatgaagtgaaagaccctaatactgtatttgtcttcaaattccgaacacattttggaggtggcaaatccactggatt

SEQ ID NO: 181331 - DNA, 264 bp, Glycine max
tctttcggttacttattcagtagttcttctctctcgaatttccactcactttctgtgcatcaatggcggcgataagtctccggaaggggaacacgcggcttccgccggaggtgaaccgcgtgctgtacgttcggaaccttcccttcaacatcaccagcgggagatgtacgacatctttggcaaatacggcgccattcgccagatccgcatcggcaccaacaaggacactcgcggaaccgctttcgtcgtctacgaggacatcta

SEQ ID NO: 181332 - DNA, 285 bp, Glycine max
ctctgtcaatgatttctgtgtagcagacctaaaaggtccagatagcccttcaggctatcagtgcaagccacctaacacagtcacagtggatgaccttgtgttctctggctttgtagctggaaacaccacaaacactttcaatgctgcattaacctccgctttgttactgattttccaggtgtgaatggtcttggtgtatctgcggcacggttagacatagccaaaggcggatcaatcccaatgcacacacaccctgctgccactgaacttctaataatggtggaa

SEQ ID NO: 181333 - DNA, 245 bp, Glycine max
atgagttgctgttaaggactcatctgctccccatggagttcgtctcttgattgaagactatccttatgcttctgatgggctagagatatgggatgtcatcaagtcctgggtgcaagaatatgtctcattctagtacaagtcagatgaggaactccacaagactctgaaactcacagcatggtggaaagaacttgtagaggtgggtcatggtgatttgacagataagccatggtggcaaaagatgc

SEQ ID NO: 181334 - DNA, 283 bp, Glycine max
  unsure (1)..(283): unsure at all n locations
ctttaaacggagttctaaatttccggcgagtttccctctctcgaatctgccacaccgacgaatctcactaagcggaacttcgcattcagaaaatggctngcccgcgcngnagntgncccgagcngaagtgcagnagatantgtcagcatgatggaaggagaacagacgatggtgcggcctctgaaggagcagatggaactatgctcgaattttacactgatgatgcacctggactcaagatctccccaaatgtggttcttgtaatgagcattggctttatagc

SEQ ID NO: 181335 - DNA, 271 bp, Glycine max
ccagacagcaagctcatcctagcgttgtaaaaacggtagcagactcctccatgggtctctcttccccatccttggctggcaaagccgtgaagctgggcccatcaggccccgaagtcgggaaggtcagcatgacgaagaccgtcaccaagcaggactcctcggaagcccatggtacggcccagaccgcgtaaagtacttgggcccattctctggcgaacctccgtacctagtcactggcgagttccaggtgactaggctgggacactgctgg

SEQ ID NO: 181336 - DNA, 275 bp, Glycine max
ctcaaactgtggctgtcggagtcatcaagagtgttgagaagaaagaccccaccggagccaaggtcaccaaggccgctgccaagaagaagtgattgcatttgggcaattttgctagcacatgtgatcatcatcgtggttactcctttatgtagttttatccttgcagagtcttaggtgttttgtttaagttatatttttaagtttctgccgatttcatgtagccgtaactttcaaaactaggttcttgatcggcggtggtcaattttcattgctgt

SEQ ID NO: 181337 - DNA, 277 bp, Glycine max
ctcaaagatgaagatgatccacgttcttttcctctttgctcttgtctcgttcacttcccatgcttctgtcaatgatttctgtgtagcagacctacaaggtccagatagcccatcaggctatcagtgcaagcacactaacacagtcacagtgatgactttgtgttctctggctttgtagctggaaacaccactaacactttcaatgctgcattaacctccgcatttgttcatgattttccatgtgtgaatggtcttggtgtatctgtggcacggttag

SEQ ID NO: 181338 - DNA, 272 bp, Glycine max
tcagggttctcatttcgcaaccatcggccgcacttactcttgttctcaagggattcgattttctctgcactcacttctagggtttcctccgcgctatcagcaatcatggccgacgaaacaccaaatgagatgaaggaggaggttccagaaatgttccttttgatcctaccaagaagaagaagaagaagaagattacaattgtagatcctgctgatgaccctgtggagaaattggctgagaagacagacaactctcagttctgacggggtgag

SEQ ID NO: 181339 - DNA, 101 bp, Glycine max
  unsure (1)..(101): unsure at all n locations
aagctcaataagcagttgngctacctcgttcggaacatcgttgagatattggaaatgaacccagaagacgaagctgaagcagatggtgccaatattgatct

SEQ ID NO: 181340 - DNA, 269 bp, Glycine max
  unsure (1)..(269): unsure at all n locations
cggcgtcgtcgctgtttttgtgtgtcgcttcttcgtaggtgcagctgcaatggtgaacggacgccaaggagaacgtgtcagactctacgtgaggggtacaatccttgccagcaaaaggtccaagtcaaaccagtatccanatacatccctgatccaaattagggtgtgaatgccaaagaagaagtagcatggtatgctggcaagaaaatggcctatatctacaaggctaaggtgaagaagaatggaagccattaccgctgcatatgggg

SEQ ID NO: 181341 - DNA, 284 bp, Glycine max
  unsure (1)..(284): unsure at all n locations
tgatcgagataactagaaacagtgtgatgaaaatgaaggtccttgttttcttcgttgctacaattttcgtagcatggcaatgccatgcgtacgatatgttccctctccgaatgaacactggctatggtgcccgtactccggaggtgaaatgcgcaagttggagcttgctgtggaagcacacaacatctttggctttgagaccattcctgaagagtgcgttgaagcaacaaaggaatacatccatggcgaacaatatagatcagactccanaacagttaaccaac

SEQ ID NO: 181342 - DNA, 279 bp, Glycine max
cgctatttctctatggagacgaaacactgctaatgttatccgttatttccccacgcaggctttgaacgctgcatttaaggattacttcaagaggcttttcaactttaagaaggatagacatggcaactggaaatcgtttgctggcaacttgcctctggtggtgctgctggtgcaccatcccttttgtgtgtttactctcttgactatgcccgtaaccgtcttgccaatgatgcaaggctgcaaaaaagggtggagagagacaattcaatggtctcgttg

SEQ ID NO: 181343 - DNA, 282 bp, Glycine max
cttcttgtcaggaagatatcttgacaaaatggccgtaacagaagcaaacctaaagaaggctggcttccacacatgggagcagtcaattctcaaacgatcacatcttatcactccaaatgcactttcatacaaatcagcaatgagagagaatctgtgaggcagggatacagaattgttggaatcattggagaccaatggagcgatctgcttggagaccacagaggcgaaagcaggacctttaagcttcctaatcccatgtactacattgagtagtaccttcac

SEQ ID NO: 181344 - DNA, 279 bp, Glycine max
  unsure (1)..(279): unsure at all n locations
cgnctctctcgaccgatctccggtcgaagtacaacgtgcggtccattccggttcgcaaggacgacgaggtgcaggtggtgaggggaacctccaacggncgcgagggncaagtggtccaggtctatcgccgcaagtcggtcatccacatcgagcgcatccccgcgagacggttaacggctccaccgtcaacgttggcattcacccttccaaggttgtcgtcaccaagcttcgaatggacaaggaccgcaaatccttgctcgatcggaaggccaagggtcg

SEQ ID NO: 181345 - DNA, 285 bp, Glycine max
attgaatctcaagattctaagagagattttgctgctctttgaagaagggtgtttgcttgattttcgagatgtcgctgctctcagatctcatcaaccttaacctctcagacactactgagaaggtgatcgcagagtacatatggatcggtggatcaggatggacctgaggagcaaagcaaggactctcccaggaccagttagcgacccttcaaagcttcccaagtggaactatgatggttccagcacaggccaagctcctggagaagacagtgcagtgattatata

SEQ ID NO: 181346 - DNA, 236 bp, Glycine max
cgcagtgaaagtatacggtctccactgtgcttccatcaagcgggtgctggtttgtctggttgagaaggatgtcgaatttgatgttgttcctgatgatgtctctaagggggagcagatgtgatctgagtacttcaaactatagtcatttggagttgtcctgtcatcaatgatggagattatatcttatatgaatctcgtgctataatgatgtattatgctgataaatatagatctca

SEQ ID NO: 181347 - DNA, 278 bp, Glycine max
tatagcttcctcttctttcatcacagtttgaaaaaagaaaaaccagaaaagaattccaaggtttctattttttgaggcaacaatgggtttgacggtgtcacggctatagcagattgtctaatgcagggaaagaaatgaggattctgatggtgggtcttatgctgtggggaaaacaacaataatctacaaactggaacttggagaaatcgtcactacaatacccacaataggcttcaatgtggagactgttgagtaccaaaatgtcagcttcaccgtct

SEQ ID NO: 181348 - DNA, 279 bp, Glycine max
ccattaatcaaacatggctagggttagtgctttgtttcactctttgctcttgatttcttcccttgtattggcttctcaaatccatgtttcctctgggaaactagtccctggactatcatggaattactaattgttgacatgtctcaagcttagagggatatacagcagcatcttgaggatgtcttcgagaaggacagtggagtagctcctggcatacttcgactcttcttccatgactgctttcctaatggatgcgatgcgtctatcatgttgaatgga

SEQ ID NO: 181349 - DNA, 287 bp, Glycine max
ctaacactttccaatacaataatcacacactgaatatccgatcggagatgtctgccgccgccgaagaagctaacgctcccgccgtcgaaaagccggttgaggaggtgaaggcgccgaaccccgcgaaggagaagaaacctaaggctccgaagaaaaaagccaaaacaggccaaaacagcttcacatcctccatattttcagatgattaaggaggctttgatcgctttgaacgagaaaggaggatcgagtccttatgcgatacgaagtacatggaggagaagcacaag

SEQ ID NO: 181350 - DNA, 231 bp, Glycine max
cagagcagagagaccttgaagagctatggacgtcggaaagaataacgaggatttccaagggaaagaagggtggaaacacgaaagcagctgagccctttgctaagaagagatggtacgatagcaaggctccttgcctcctcgaggtcaagactatgggaacacactcgtctctcgtacaaagggaacaaacattacagccgaaggactcacagatagggtattaaaggtctc

SEQ ID NO: 181351 - DNA, 280 bp, Glycine max
  unsure (1)..(280): unsure at all n locations
ctttggttctggtttatagatctctgtgaagtcgctttataacacccaacctaagatgcagaacgaggaaggacagatcaccgagctttacattcctaggaagtgctctgcaacaaaccgattgattaccgctaaggaccatgcttcggttcggttaacattnggcatgtggatgagaatggcgtctacaatggccatgtctccacttttgctctctgcggcttcatacgtgctcagggtgatgctgacagtgccctagatcgcttgtggcagaagaaga

SEQ ID NO: 181352 - DNA, 282 bp, Glycine max
cggctacaaatttatgtttgtaggtcaaggctctggagtatgttggactggctccaaagggtagtctaagggttcaagatttcctagagacggctgcagagggactagttgaaggaggacagtaagtttcgcatctatctcataatatcacttctagccatgcatatgaaatttatggatatagtttttcacctgagtacaaatgaggatgctctttgcaacatgtacagttctcctcatcaatgtggcaatttttaatcctcaaggtctctaatctgagtc

SEQ ID NO: 181353 - DNA, 289 bp, Glycine max
ctttgttgtgagctataagctagtttatcgtgaggcgaatatgaagttgtttgtcttctttgttgctgcagtagtcttggtagcatggccatgccatggcgcaggctaccaaaggttccctctccgaatgaaaactggctatggtgagcgttcttcgaggtaaaatgcgcaagtcttaggcttgctgtggaagcacacaacatccgagactttaaaaccattcctgaagagtgcgttgaaccaacaaaggactacattaatggcgaacaatttagatcagactctaaaa

SEQ ID NO: 181354 - DNA, 266 bp, Glycine max
caatttctcattctcccatttcctctcagaaccctcgatcactcccacgcgctcctatatcctctccttcatcgtcgctctctccaacgatcacaacaacatcgtcatcccatggcaaacgccgcatctggtatggcagtccatgatgactgcaagttaaggtttttggagctgaagacaaagacgacacaccgtttcatagtttttgagattcaggagcagcataagcacgtcattgtggagctgttagtggtcagcaaaggcta

SEQ ID NO: 181355 - DNA, 270 bp, Glycine max
gattttccatctcatggtccagaatattccccaagggcaagggagcagttaacaccttgggggtcaagttctacaacgatctcattaatgagattatagcaaatggcttaaagccatttgtcacgctgtttcattgggacctcccacaagctcttgaagatgaatatgggggatttctcaaacctgaaatagtggaggacttccgtaactatgctgacttttgcttcaagacatttggtgatcgggtgaagcactgggtaaccctaaatg

SEQ ID NO: 181356 - DNA, 270 bp, Glycine max
cgccaacctagtcttattcatcaactcggccgaaaacttttccaatgcggcaggccgcagaccctgttcgtggaaataccccatccaatggccgctcctagaggacaccaacaccaaaacaaacccactaagatggcttcctttgtatccttcctagtgctgcttcttgcagcccttatcctcatgcctcaagggcttgctacttactacaaaccaattaagaagccaccagtgtacaagcctccagtgtacaagccaccagtgtacaaa

SEQ ID NO: 181357 - DNA, 266 bp, Glycine max
ctaaggaataccaagattaccaccagaaagcaatgggcggtatactttctgcgcttcttggcggcgacgcggcggcggcggagtcttcgccggagagttctacttctagagtctcctccttccactcgtcgccgcgctggcagctctacttcaacgagatcaaagataccgataagctcgttgtgatagatttctcggcgtcgtggcgcggtccttgcaaattcatagagccagcgattcacgccatggccgacaagttcaacgac

SEQ ID NO: 181358 - DNA, 245 bp, Glycine max
ctattctctaacatcacaatttcaattgtattccttttacataatcatggccatgaaacgtgctgttcaatccctgcttgcctcatcttccaccctcaccaggtaccttcatgcctcaggagcaaaaaagaagattgtaggggtgttctccaaagggaatgagtatgcttcgaaacccaatttcgtgggatgtgtagaaagatcattgggaatacgttagtggtctcgatcatagggtcacaagc

SEQ ID NO: 181359 - DNA, 233 bp, Glycine max
ctttgtcattagcacttcttcttttcacactgccgctgcaacaatggcttcagagaagaaactttcgaacccaatgacggagataaaagtgcagaagctcgttctcaatatctctgttggcgagagtggagatcgtctcaccagagccgccaaggtgttggaacaagttagtggccaaaccccagtcatttccaaagcaaggtacactgttcgttcctttgggattagaagaa

SEQ ID NO: 181360 - DNA, 277 bp, Glycine max
atggtggtgaatgtcttggcaggaggagctggagagaaatcgaaagacatcaggttccaagtctgatggatctgcaagacggatgaaggaagttgcatgtcccatttgcactgtccatctgcaggttcaggtgcctagctcgggttcagagacaattgagtgtggagtttgccagcacccatttcttgcgagcgctcattgagttcagataaacatgaatacggaagcggtgtctacgtgtttcataagtttaaaatgcatttgttttactgatcta

SEQ ID NO: 181361 - DNA, 275 bp, Glycine max
agagtttgttgtgagctataagctagtttatcgtgaggagaatatgaacttgtttgtcttctttgttgctgcagtagttttggtagcatggccatgccatggcgcaggctaccaaaggttccctctccgaatgaaaactggctatggtgagcgctcttcggaggtaaaatgcgcaagttttaggcttgacgtggaagcacacaacatccgagcctttaaaaccattcctgaagagtgcgttgaaccaacaaaggactacattaatggcgaacaat

SEQ ID NO: 181362 - DNA, 279 bp, Glycine max
ggatttgttacatcaaaagtagcatgttgcggtcaaggaccctacaatggtcttggactgtgcactccggcatccaacttgtgccctaaccgtgatatttatgccttttgggatccttttcatccatcagaaagggctaataggttaatcgttcaacagattttgtcaggcacctcagagtatatgtatccaatgaatcttagcaccattatggctttggattccaagaactagatcaatcaatcaagggtctctgtccatcattttattaccgcacct

SEQ ID NO: 181363 - DNA, 263 bp, Glycine max
acggcttgttcagtctttcttggaactttgttactctcacacatgtctcgctccgtgcctttggtttcaaccatttttctcttgcttctgcttctggtggccactgagatgatggggccaacaatggtggcagaagcaagaacttgtgagtctcagagccaccgtttcaaggggccatgtttgagtgacaccaactgtggctctgtttgccgaaccgacgtttcaccggaggacatgccgtggcttccgtcgcagatgcgtct

SEQ ID NO: 181364 - DNA, 265 bp, Glycine max
cacatagagacacaatacagagtgagttgttgctccttcgccacaactctctgccaacatgggtatctccagagattctatgcacaagaggcgtgccactggtggcaagaagaaggcatggaggaaaaagaactagtatgagcttggtcgccagcctgataacactaagctgtcaagcaacaagacagtcaggaggatccgtgttagaggtggagatgtgaactggagggcattgagattggatactggaaattactcatgggga

SEQ ID NO: 181365 - DNA, 272 bp, Glycine max
ccattattaaggcctcagtttgttatgttcggttcttccattgttcagtatggtctttatgatgaaggttggatggctgatctttctcacttgtatgctcgcaaggttgatatagttttgcgaggatatgctggttggaattcaaggcgtgctctgcaggttctggataaaatctttcctaaggacgcccctgtacaaccttcattggtcattgcctactttggtggtaatgattcttctactccccactcatcaggcctaggtcctcatgt

SEQ ID NO: 181366 - DNA, 276 bp, Glycine max
cggtaatgggtttgcgatcgtggtggctgattcatcggcggtgcacagcatcctcgtccacaagtccaacgaggacaagatcatgctcctcgattcccacaaactcattgccgctagcggcgagcccggagacagggttcagttcacagagtacattcagaagaacgtcgccttgtatcacttccgtcaaggcatccctcttaccaccgccgccgccgccaatttcacgcgtggcgaactcgccactgctctccgcaagacaccatactctgtgaa

SEQ ID NO: 181367 - DNA, 277 bp, Glycine max
cagagagaaaagcgtgaatcatgtcggacgaagagcatcacttcgattctcaggcggatgcgggagcgtccaagacgtatcctcagcaggctggtaccattcgcaagaatggctacatcgtcatcaaatccaggccttgcaaggttgtagaggtctctacgtcaaagacaggcaagcatggacatgcacagtgtcactttgttgcaattgatatttttaatgggaaaaagcttgaagatattgttccatcatcccacaactgtgatgttccacatgt

SEQ ID NO: 181368 - DNA, 274 bp, Glycine max
tgaagcactatctagtgtgcgctgttttttgattgcagctagcgagcaagaaaacggatgcgcgaacgcggctttctttcgccttgcttgttgctttactaaatagaaagaaagggcttttctcgcttgtttagtaaagtccagtttttggccttatcttgcaggtcacgacgacgtcgagttggcggccgagaaagactcggcattcaggtgagccgcccggtggtgtggtacgtagtgggtttagtacgccccgccaaaacggctccgaaac

SEQ ID NO: 181369 - DNA, 279 bp, Glycine max
cgtccctccttcctctggcttataattcttgtgacccttttcgctggtagcattgaaagtgcaccagcacacgtgaacgcaagccaatatgctgcacccttcaataggagtgtttttccttctggttttctatttggaataggctctgcagcttaccagatagaaggagcagcagctatagatggcagaggcacaagtatatgggacacctatactacatagccaccagcgacgatttgggatcatcgtgatggaactctagcagttgatttttatcac

SEQ ID NO: 181370 - DNA, 188 bp, Glycine max
aatgggagcactatgctaagctaactgctgaagttggagccaatgtacaaattgttggtgatgatctcttggttaccaaccccaagagggttcagaaggaaattgatactaaagcatgcaatggtcttatcctcaaggtcaaccaaattggttctgtgactgagagtattgaagctgtcaggatgtcc

SEQ ID NO: 181371 - DNA, 264 bp, Glycine max
tgtgttcacttgatctcatcataatcgtcagcgtcaattgaagaagatgccgatcagaaacatcgccgtcggaaggcctcaagaggcgactaaccccgacacgttgaaggcggctttcgctgagttcatctcaaccttcatcatcgtgttcgccggctcaggctccggcatagcctacaacaagctcaccgacaacggcgctgccacccctgacggcactcatctccgcctccatcgcccatgcattcgccctcttcgtcgccg

SEQ ID NO: 181372 - DNA, 266 bp, Glycine max
ttccgccaagagcattccaagccacgcactcgcaactggtgtgaacgattttcaagctgtagtgttagagattgtaatcacatttgggttggtttacactgtgctatgcaactgcagcagacccaaagttcgggtcattgggtatcattgcacccattgctattgggttcgtagtgggtgccaacatcttagcagcaggcccattcagtggcggttcaatgaacctagctcgctcattcggcccagtgtggtcagtggagattcgc

SEQ ID NO: 181373 - DNA, 269 bp, Glycine max
gagcgagcgagcgagcagtttcaaagagaggatttgggattgggaaggcgagggattgcgctgcgtctcttcctcttctctttcgattcatccctcattcataatcttccaatccaacaacctcagcctcacactcacacatacacacatctgaacgcgtatcgtccctcccatggcttcaaagcgcatcctcaaggagctcaaggactcgcagaaagacccaccaacttcttgcagcgctggtccagtagctgaggacatgttccatt

SEQ ID NO: 181374 - DNA, 277 bp, Glycine max
agcagaaggaggagaagcagaaagaggagacgacacaatggcgccgaagaagccccgaaccacgtcgaggaaccctgatttggtcaggggaattggcaaatattcgaggtcgcagatgtaccacaagccgggcatctgggccatcaaggccaaaaacggcggtgttttgcccctccacgatcccaaccccaaacccgaggccccggcccagaagccgcccaagttctacccggccgatgacgtgaagaagcccctcgtcaacaagcacaagcccaag

SEQ ID NO: 181375 - DNA, 254 bp, Glycine max
agtgaatacctaattcggagggtttcagttttcgccctcttttctcatctccaacatcttcgtcgtcacggaggctagtcttcctgttatacaaaacaatgtctgacggtcaagaatcagacaagactattgagatatggaagatcaagacattgataaaggcattggaagctgctcgaggtaatggcaacagcatgatttctcagataatgcctccacgtgaatcaaatatctcgggtcactaagatgttggg

SEQ ID NO: 181376 - DNA, 265 bp, Glycine max
  unsure (1)..(265): unsure at all n locations
tgctagtttatcgtgagcagaatatgaagttgtttgtattctttgttgctgcagtagttatggtagtctggacatgccatggcgcaggctaccaaaggttccctctccgaatgaaaactggctatggtgagcgttcttcggaggtaaaatgcgcaagttttagggctgctatgggagcacataccagccgagccgttnnaaagcattgtgaagagtgcgttgaaacaacaaaggactacattaatggcgagcaatttagatcaga

SEQ ID NO: 181377 - DNA, 258 bp, Glycine max
cgaacattcgacaggtagagtttcttcaatggctcctaaagttgataagaagaacgacccaaaggcacaggccttgaagactgctaaggcagttaagtctggtgctacctttaagaagaaggcaaagaagatccgaacttctgtcactttccacagaccgaggacatcgaagaaggataggaaccccaagtaccctcgcattagcgcgcctccaagaaataagcttgatcattatcagatcctgcaataccctctgac

SEQ ID NO: 181378 - DNA, 277 bp, Glycine max
tcagttctccgctagctgtcaagacgctctatacgtgtagtgctattctgcgtcttgccgcttcactctcagatggctcgtgctgataactagacagttggagattctggcgcgtagagctgaaacactgttgcctggcccagaggaaagcactttcgggctggcgatgcacgtgcttgcaattatagccctgggactcacaacctggtggccgtgaacaaggcttgatctgatagctggaagagtccaagaggaaccacagtgtacaagtcaagga

SEQ ID NO: 181379 - DNA, 274 bp, Glycine max
gtttgttgtgagctataagctagtttatcgtgaggagaatatgaagttgtttgtattctatgttgctgcagtagttttggtagcatggccatgccatggcgcaggctaccaaaggttccctctccgaatgaaaactggctatggtgagcgctcttcggaggtaaaatgcgcaagtattaggcatgctctggaagctttcaacatccgagcatctataaccattcctgaagagtgcgttgaagcaccaaatgactatattaatggcgaacaattt

SEQ ID NO: 181380 - DNA, 280 bp, Glycine max
cgtgagactgatggcgtgcgtattcggattggtgggtaatgggcttgcgatcgtggtggctgattcatcggcggtgcacagcatcctcgtccacaagtccaacgaggacaagatcatgctcctcgattcccacaaactcattgccgctagcggcgagcccggagacagggttcagttcacagagtacattcagaagaacgtcgccttgtatcagttccgtaacggcatccctcttaaccacctcgccgccgccaatttcacgcgtggcgaactcgccact

SEQ ID NO: 181381 - DNA, 272 bp, Glycine max
tacaaaacaaaacagagcaaagagagagtgtgtgaaaagtgaaacaaaaaacagaacaacaatggcgacacttaaggttcctcagcctcttccccccgttgcagatgattgtgagcagctccgaaaagccttctcaggttggggaactaacgaggagctgattgtatcgatcttggctcataggaattctgctcagaggaagcttatcagagaaacttatgcccagacctatggagaagatctcctcaaggccttggacaaagaactcacga

SEQ ID NO: 181382 - DNA, 271 bp, Glycine max
tattggttgtgatgcaaaggttgctttggacattcataatctgcgtgaagagaatccagataagttttataaccagtttatgaataaagttctatatgcaagagaaggtgctaaaagtattatggataggacatttgcagatttaccttggcagattcgagttgaggttgatggagttgaaattgaggtccctgaggatgcggaaggtgtgcttgttgcaaatattggaagctacatgggaggtgtagatttgtggcaaaatgaggatgaa

SEQ ID NO: 181383 - DNA, 219 bp, Glycine max
tagaatcaaattctgtaggtatacacgtttctgtttaaagatctcaatgggagtttgttctacaattatggatgagtacagttatcttgtaaactagaaatttggattaacaatgtaacaattctctgtgaaaaaaaaaaaaaaaaaaaaaaaaaaaaaaaaaaaaaaaaaaaaaaaaaaaaaaaaaaataaaaaagactaaaaaaaaatacacggata

SEQ ID NO: 181384 - DNA, 246 bp, Glycine max
ctctttcttggaactttgttactctcacacatgtctcgctccgtgcctttggtttcaaccatttttctcttgcttctgcttctggtggccactgagatgatggggccaacaatggtggcagaagcaagaacttgtgagtctcagagccaccgtttcaaggggccatgtttgagtgacaccaactgtggctctgtttgccgaaccgaacgtttcactggaggacactgccgtggcttccgtcgcaga

SEQ ID NO: 181385 - DNA, 274 bp, Glycine max
  unsure (1)..(274): unsure at all n locations
aagcttccaaaccctaacactccccttcctcttcgatcatcanctctccacaatgccgccgaacctagantcctnnnagatagtcgacgtcttcgtccgcgttaccggcggcgaagtcggcgcggcgagttccctggccccgaagatcggtcccctcggtctctcccccaagaagatcggagaagacatcgccaaagataccgccaaggactggaagggcctccgcgtcaccgtcaagctcaccgttcagaatcgtcaggcgaaggtcacggtg

SEQ ID NO: 181386 - DNA, 272 bp, Glycine max
taacatactcaaacatatgcgcgaatctgctcaggaattgcctcaaggaaccctacaaggccgaatccctctctcgtgagaagctccattttgttctctccaaatgggtcgacgccaagcctgaaaaacctactattcgttcagacaccccagagcagtgatctggaatagttggaagctataaatgcataaatctttgagatctggaagttcattgtcattttgaacctttctgtgatgtttaattcctttgtttttttctctccatgaaa

SEQ ID NO: 181387 - DNA, 269 bp, Glycine max
cctattcattttcccaagagggaccctgcaacatcccctaagttgtggccaagagaagaagcagactcacttcctttctcactgaacaaattcccaaaccttctcaaaatcttctctgtaactcaaaactctcccaaagccaaggccatggaagatacccttagggaatgtgagaccaaacccatcaaaggagaggtaaaattctgtgccacctctttagaatccatgcttgacttcactcaaagcattcttggcttcacatctgatct

SEQ ID NO: 181388 - DNA, 272 bp, Glycine max
  unsure (1)..(272): unsure at all n locations
caaagccagccagcagtccccattgctgtgccagtgaagcattcattcattcatcttctaaaactttgatcatttcgtggatcttctgattcttcgatctcgattctggttagggtttacggttttctgaagagaagagaagtttgcccagaatggggattctggttccgcttttcatccacgtcgtcgctttcatttgcaccgttgcagctatcgctttggccgttcttcacatttacaggcactntctcagttacaccgagcccacttat

SEQ ID NO: 181389 - DNA, 227 bp, Glycine max
ggggtgtcaggattgtggtgaagattccagagggtttggcgccagagcaagtcgcaccattactgtgtgcgggtgtgacagtgtacagtccactggtacactttgggctgaaagagagtgggctaagaggtggaatattggggcttggaggagtgggacacatgggggtgaagatagcaaaggcactgggtcatcatgtgactgtgataagctcttctgacaagaag

SEQ ID NO: 181390 - DNA, 233 bp, Glycine max
agcaacttcaggtttttgagtctttgcctcttggcattgattgcatcatctcatgctcaacttcagcttggtttttatgccaagagttgcccaaaagctgagcaaatcattttgaaatttgttcatgaacatatccacaatgctccatcactagcagctgcattgataagaatgcacccccatcactgttttgtaaggggatgtgatggatcggtgcctctgcaatcaacaac

SEQ ID NO: 181391 - DNA, 277 bp, Glycine max
cttttacttctcagcagcttcggctagggttcagaaacgaaaaaggcttcggtgttctgttcgcgatgagagccaagtggaagaagaagcgtatgaggaggttgaagaggaagcgccgcaagatgagacagagatccaagtagtgcgttaaacctagtttgtttctgttgcttttacaattgcttcatgttgtcgaatgggacacccagttcgttagtggcactggtttctcctttcttgatgtctgatacattttgttggattcacgtagtttatg

SEQ ID NO: 181392 - DNA, 274 bp, Glycine max
ctcatactgtgatgactacttcaaactcacatacccctgtacacctggtgctgagtactatggtcgtggagctattcccattttctggaactacaactatggtgctgttggagaagctttgaagatcgacctactcagccatccagaatacatagagcagaatgccacccttgcttaccaggctgctatttggagatggatgacaccaatgaaaaagtcacagccctctgcgcatgatgcctttgtcggcaaccggaagcctagcaagaatgat

SEQ ID NO: 181393 - DNA, 269 bp, Glycine max
atttgatgcagaacttgagacaggcttatgagggaacattcatgtgtagtggtggctttactaggaagttgggaatggaagctgtagctgaaggccatgctgacttggtatcctatggtcgacttttcatctccaatccagacttggttttaaggcttaagcttaatgcacctcttaccaagtataacaggaagacattttacacccaggatcctgttataggatacacagattatcctttcctaagcaaagaaagtgagacaaaggag

SEQ ID NO: 181394 - DNA, 312 bp, Glycine max
caaacagggaatataagagagaaaaagatgggtttcataatggaattcgcggagaacttggtattgaagttgatggaggatccgaagaaagggatcggaggttccgggagcacgtttatagagtgaaggacaggtgcgagaagacgaaggagatgtggagctaccctatgcgaccctatgggttttggactttcgaacgccacaattctcagcttgcttgggatgcacagattagccaagtggctgggaggagggaccttatgatgatatcctccaacattctctaccccacctagtgagtgtgctgaactg

SEQ ID NO: 181395 - DNA, 273 bp, Glycine max
gtgccggtgcaatctgcggtgctgggttggccaaagggttccagaaatcgttctacaacaggtacggaggtggggttaacactgtcagcgatggctacaacaaaggtaccgctttgggtgctgagatcattggtacctttgttcttgtctacaccgttttctccgccactgatcctaagaggaacgctagggactctcatgttcctgtgttagcaccacttcccattgggtttgccgtcttcatggttcacttggctacaatcctgtcactgg

SEQ ID NO: 181396 - DNA, 316 bp, Glycine max
acgatctcaacggagcacctctcttcaggtcgccatctagactgcaatcatggctgatggaccacagcatccatcagttgttcagaagctagctggacagtcttacctggtgtccaggctaagccccaactttaactctgggaattattcctcgactggttcttacttcaatggaggcctgcactcttctgggttggctgttgtgtcgcctggatctccagttactgtgcatgctccagcagagaaaggagtgactggatttctagtggattctctgatgggtggagtgtctgctgctgtgtcacagacagctgct

SEQ ID NO: 181397 - DNA, 313 bp, Glycine max
tcttgaactcaaggagatggctctgggaagaggcagtgcagtggttctactactttgcttcttgctgcttcactctcagatggctcgtgctgccacctacacagttggagattctgggggttggacctttaacactgttgcctggcccaaaggaaagctctttcgggctggtgacacacttgctttcaattatagccctgggactcacaatgtggtggccgtgaacaaggctggatatgatagctgcaagactccaagaggagccaaagtgtataagtcagggacggatcagatcagacttgccaagggacag

SEQ ID NO: 181398 - DNA, 310 bp, Glycine max
tatcgctttgcactagcagctttgaaacccggttcatccgaagcccttcaccgaaccatgtcgaggagaaaggttagagagccaaaggaggaaaatgtgactctgggtccagctgttagagatggtgaacacgtttttggcgttgctcgcatctttgcctccttcaacgacaccttcatccatgtcactgatttgtctggcagggaaacccttgtccgaatcactggtggtatgaaagttaaagctgacagagatgaatcatctccttatgctgctatgcttgcagctcaggatgttgctgccagatgca

SEQ ID NO: 181399 - DNA, 301 bp, Glycine max
ctgacgcagagaaagcaaaagacagtcgcagcattcgtcctggaaaggggaaaatgcgtaaccgtcgctacatctcacgccgtggaccactcatcgtgtacggaacggaaggagccaaagccgttaaggccttccgtaacgtccccggcgtggaagtcgctaacgtcgagaggcttaaccttctgaaacttgctccaggaggacactcgggaggtttgtggtttggacaaaaagcgcttttgagaagctggattcgatttatgggtcttttgataagccctctgcagagagcaagggtact

SEQ ID NO: 181400 - DNA, 316 bp, Glycine max
cccttttgagtcttccaagttttcaccatcgtaatgggttccgaaggatccagcgtcgtggttcctaggaatttcagattattggaagagcttgagagaggtgagaagggaattggggatggaactgttagctatggaatggatgatgctgatgacatatacatgcaatcttggactgggactatcatcggtccccctagtactgttcatgaagggcgtatctaccagttgaaattgttttgcagcagggattatccagacaatcctccatctgttagatttcaaacaaggattaacatgacatgtgtcaatcaag

SEQ ID NO: 181401 - DNA, 310 bp, Glycine max
gtttgctctctcaagtctctcgaagcctctttctctctcttctagaagctatctgtgtttggtgttactaagtctccaacaagcaaagtacatggttgatttggaaatccaggtccccaccccattcgacccgtttgccgaggcgagagaatcggatgcccccggagcaaaggagtatgtgcatattcgaattcagcagaggaatgggaagaagagtctgaccacagtgcaagggctgaagaaggagttcagctacgagaagatcctcagggactcaagcaggagtctgctgcacggaaccgtgtgcaga

SEQ ID NO: 181402 - DNA, 177 bp, Glycine max
aagaaatttaagtgaggagctagagaatgatgatgaagtctgctatgtgtgcagtggtggttgtagcacttcttcttctggcggcggtggggcccatggctgaggctgtgacatgcaccccaacagagttgagtccgtgtcttccagcaatcacttccggtgctaaaccttccaatg

SEQ ID NO: 181403 - DNA, 178 bp, Glycine max
aagcaacacaagaacactctcttgaacattcatggatccagtgagcgtgtggggtaacacgcccttggcgacggtggatcccgagatccatgacctcatcgagaaggagaagcaccgccaatgccgcggcatcgagctcatcgcctccgagaacttcacctccttcgcagtcatcgag

SEQ ID NO: 181404 - DNA, 314 bp, Glycine max
gtgaaggacaaggcctccaaggagaacaaggcgccgctgatcgacgtcacgcagttcgggtactttaaggttctcggaaagggtgttttgccgcagaaccagcccgttgttgtcaaagctaagcttatttccaagatcgctgagaagaagatcaaggaggctggcggtgctgttgttctcaccgcctgattttattgacggtatcgctttttcaacgatttagggtttttctttgttttgttctgatacgtttcgttttggatgacgttgttgtttagtctatgctacatttcaggatttaatttaaggtttta

SEQ ID NO: 181405 - DNA, 148 bp, Glycine max
cggtttttgtgcttggcaaaagaaagagaagagaagatggtgtcaggttcggggatctgcgcgaagcgtcggaggtggacgcccggcaccacatgctgggtcggctcgcctcgattgtggcaaaggagctgctgaacggacaaaaagt

SEQ ID NO: 181406 - DNA, 306 bp, Glycine max
cgatgatgctgctagggctgttgaggctctcaatggcaaaaattttgatgacaaagaatggtatgttggaaaagctcagaagacatctgaaagggagaatgaattgaaacaacgatttgagcagagcatgacagaagctgctgataaatatcaaggcgcaaacttgtatgtaaaaactttagatgatagcattggtgatgaaaaacttaaggagctgttctccccttttggtaacattacctcttgcaaggttatgagagacccaaatggcttaagtcgtggatcgggtcttgttgcattctcgac

SEQ ID NO: 181407 - DNA, 315 bp, Glycine max
caactcgcaaaccacaatgcctaagcagatccacgagattaaggattttcttctgacggcgcggaggaaggatgcgaggtcggtgaaaatcaagaggagcagggatgtcgttaagtttaaggttcgatgctccaagtacttgtacacgctttgtgtctttgaccctgagaaagccgataagttgaagcaatctcttcctcccggtttgagtgttcaagacctgtagagctgttgagtgtggcagcatgcgtttgtttctctttttgttacctgatgctctagattttgtggcttggttttatatgttggtgattt

SEQ ID NO: 181408 - DNA, 318 bp, Glycine max
  unsure (1)..(318): unsure at all n locations
attcctctctcattctcactataaacacaaaacccttcccatcctaattaaggtgaaaatgaaggcatcacccattgcttggttcactttggtggttgtgtttcttgtggctgaagttcaagtttcaatggcagtgacatgcagcccagtgcagctgagtgcatgtgtaagtgcaataacctcttcaacccctccatcaaacctatgctgctccaagatcanagaacagaaaccatgcctctgccaatacctcaagaaccccaatctcaagaagtttgttgactctcctaatgcaaggagagttgctagcacttgtgg

SEQ ID NO: 181409 - DNA, 317 bp, Glycine max
caagttcaaagatgaagatgatccacgttcttttcctctttgctcttgtctcgttcacttcccatgcttctgtcaatgatttctgtgtagcagacctaaaaggtccagatagcccttcaggctatcagtgcaagccacctaacacagtcacagtggatgactttgtgttctctggctttgtagctggaaacaccacaaacactttcaatgctgcattaacctccgcatttgttactgattttccaggtgtgaatggtcttggtgtatctgtggcacggttagacatagccaaaggtggatcaatcccaatgcacaca

SEQ ID NO: 181410 - DNA, 310 bp, Glycine max
aaagaaagaaaggagatgggagtggagaagcagttgttgaggtctggcaccggtccgaagccaattcccggtcagaacgtaaccgttcactgcactggtttcgggaagaacggtgacctttctcagaaattctggagcacaaaggatcctggccagaacccattcactttcaaaatcggccaaggttctgttatcaaaggatgggatgaaggtgcgcttggcatgcaaattggtgaagttgctcgtctccggtgctctccggattatgcttatggtgctggtggctttcctgcttggggaatacggccca

SEQ ID NO: 181411 - DNA, 311 bp, Glycine max
ttagctttgattctctgttctctgttttgttctgtttcgcgtattgtcttcatacaggaacttgaacaatgaagaatgcaaagggcaagggagcagcaagggcctcaaaagaatcactgaagcccgttgatgaccgaaaggttggaaagcggaaggcttccggtaagcctgggagaagtagtgcaccaaagaaggagaagaaggccaagaaagaccccaacaagcctaaaagaccacccagtgctttctttgtgttccttgaggagttcaggcagacctttaaggctgagaatcctaatgtgaaggctgta

SEQ ID NO: 181412 - DNA, 290 bp, Glycine max
agagagagagggagtcagagaaaccctaggtaagaagaaaagatgccggctggtcatggtttgagatcccgcaccagagattccttctctcgtcctttcaggaagaagggaaccatcgccctcaccacatacctgagaacctaccacgtcggcgactatgttgacgtcaaggttaacggtgccgttcacaagggaatgccccacaaattctaccatggccgcaccggacgcgtctggaatgtcaccaaacgtgctgttggcgtcgaagtcaacaagcaggttggcaacag

SEQ ID NO: 181413 - DNA, 312 bp, Glycine max
acgaaaccctcttcatcttgttctatctgtgacgagcatcatggcctcaagagcagtgttattgttggctatgtgtgtgcttccggcgatggttgtggccattcgcccagcaaagaaccctttttgcgtgaagggtcgtgtctactgtgacccttgccgtgctggttttgagacctcagctaccacctacattgctggtgctgagattatgttgcaatgcaagagcagggttagcaacgaggctgtgtacacgaagaaggggtacaccgactcaaccggagcatacacaatgtacgtcgatgaggatcacgc

SEQ ID NO: 181414 - DNA, 308 bp, Glycine max
ctcttagtcccaattttctagggttttattcattttccgatggattctgcagatgttgagtaccgttgctttgtcggtgggctcgcttggggcactgacgaccatgccctcgagagagccttctctcagtacggcgaaatcgttgaaacgaagattatcaacgatcgtgagactggcagatccaggggttttggatttgtgaccttcgcctcggagcagtccatcaaagatgcgatcggagcgatgaatggccagaacttggcacggcgtaatatcactgtcaatgaagctcagtcccgcggtggcgg

SEQ ID NO: 181415 - DNA, 311 bp, Glycine max
gttcatcccctgaaggtctctctggaggatctttacctcggaacatctaagaacatctctctttcacgaaacgtgctgtgttcaaaatgcaatgggaagggctcaaagtctggggcttcaatgacctgtgctggttgccagggtactggcatgaaggtgtctattaggcacttggtccttctataattcagcagatgcagcatccttgcaatgagtgtaagggtactggagagacaatcaatgacagagacaggtgccaacagtgcaaaggagagacagtcgttcaggagagaagtacttgaagtgtgtgg

SEQ ID NO: 181416 - DNA, 306 bp, Glycine max
attggaggcaacatcactctcatcactggtttcttatactggattgcccaattgttgggttctatagtcgcatgcctcctcctcaatttgatcaccgctaagagcattccaagccactcgccggctaatggtgtgaacgatttgcaagctgtagtgtttgagcattgttatcacatttgggttggtttacactgtgtatgcaactgcagtagacccaaagaaggggtcattgggtatcattgcacccattgctattgggttcgttgtgggtgccacatcttagcagcaggccattcagcggcggtt

SEQ ID NO: 181417 - DNA, 307 bp, Glycine max
aactatgagcaaggattatctaatcatactttctctccttctttccacggtgcttgcaactgcaagttcttcttcttcttcttcctccctctatcttgggaagggcttctcccatcgcaaattgtctcccagttatcacattcacaaaaccattgacgaatcctatgcagttatcttcgatgctggtagcacgggaagccgtgtacatgtctatcgttttaaccaacaattagatctccttcgcattggccaagaccttgagttgtttgtcaagactatgccaggtttaagtgcttacgctgagaat

SEQ ID NO: 181418 - DNA, 300 bp, Glycine max
cgcttgcagccggaagactctgacgtctcccaacaatcccgcaccgtggctctctccgccaccgatctggtctccgacgacgaccgctccgtcgccgccgactcttggtccatcaagagcgagtacggaagcactctggacgacgaccagcgccatgctgacgccgccgaagctctctacaacgccaagctccgacatcactccgattacagttctgacacggatgaacctgattctggagcagtcacatccatgctgggacttcagagttattgggattctgcatatgctgacgagctc

SEQ ID NO: 181419 - DNA, 305 bp, Glycine max
gtttcgtttccaggtttcggcgcaatcggcttctgcttcaaggaatcagagcttgttattctctatcaacaagtaaaatgtcaggtgaagagggtgtcattgcagttgagccagctgctgctgctgctgccatcccaggcgagccaatggatatcatgactgccttacaacttgtgctcagaaaatctctggcttatggtggtttgtcgcgtggccttcatgaaggtgcaaaagtgattgagaagcatgctgcacaactctgtgttcttgcagaagactgtgaccagcctgactatgttaaactg

SEQ ID NO: 181420 - DNA, 262 bp, Glycine max
  unsure (1)..(262): unsure at all n locations
ctttcctcaaccttctttcttcttatatatcgaacatggctaagtatcattcaagtgggaaaagctcttccatgactgctatagccttcctgtttatccttctaatcacttatacaggcacaacagatgcacaatccggggtatgttatggaagacttggcaacaacttaccaacccctcaagaagttgtggccctctacaatcaagccaacattcgcangatgcgaatctacggtccaagcccagaagtcctcgaagcact

SEQ ID NO: 181421 - DNA, 301 bp, Glycine max
ttaggttgcagtatctctacttcgagtacttttatttatcgcaagaccaaggacatttctcttaggcaacattccaaattctgcagtatacagaaatgtggaacaatatccaaatgcaaaccatattcctggaatcctaattcttgaaattgatgcacccatctactttgccaatgcaagctcatttaagagaaaggatcacaaggtggattgatgaagaggaagatagaatcaaagctacagggcaaaccagtttgccatatgtcataatggatatgactgctggtgctaacattgatac

SEQ ID NO: 181422 - DNA, 296 bp, Glycine max
gactacgactacgattgtgtgtacactgcatacgttagaaccggttcggtgttgaagggcggaacggactctaagatcgggctgaagctgtacgacaagtacggctactacatctacattaaaaacctcgaagcatggggcggcttgatgggcaagggctacgactatttcgagcgcggcaacctcgacatcttcagcggaagggcgacctgtcttgacggacccgtctgtgccgttaacgttacttctgacggatcgggttctcaccacgctggtacttaatacgtccagtcact

SEQ ID NO: 181423 - DNA, 304 bp, Glycine max
atttaatatgaccaaaataattaataattcaaggacaaccttacattctgcaaacaaatgtgttcaccggaggcaagggtgatagagagcaaagaatctatctctggtttgatcccacgaaagaataccacagatactccattctctggaacttgtatcagattgtgttctttgtggacgaggtgccaatcagggtgttcaagaacagcaaggacttgggagtgaaattcccattcgaccagccatgtttagtgccaacagtttgtggaacgctgatgactgggcaacgaggggtggtttggag

SEQ ID NO: 181424 - DNA, 305 bp, Glycine max
gggaaggacccaagggagaagacaaatactgtgcagaatccttggaaaccctaatgaactttgtcatttcaaagcttggaaagaacgttcaggcattttcaagctccttcttgagtaagcaagaggaatacacagtggagggagtgcataatcttggaggcaaagcagtgatgtgtcataggttgaatttccaaaaggctgtgttttactgccatgaagtcatgacacaacagctttcatggttccattgcttgccggtgatggaaccaaaactcaggcacttgctgtttgccactttgatactt

SEQ ID NO: 181425 - DNA, 306 bp, Glycine max
  unsure (1)..(306): unsure at all n locations
caacactataggcgaaggactttaggttgggatttgggaattagggttattcgcgtggcgaagatgattgaggtggttttgaacgatcgattggggaagaaggtgcgcgtgaagtgcaacgagcgatgataccatcggcgacctgaagaagcttgtggcggctcagactggcacaagagccgacaagatccgcatccagaagtggtacaccatctacaaggatcacatcactctcaaggattacgagatccatgacggcatgggtctcgaactctactacaactanacacaacaaggtgtgttttt

SEQ ID NO: 181426 - DNA, 291 bp, Glycine max
tgcgtggttggttttgcggtatcgaagaagaagaccgggaaacaggttgtgccggtgaaatcagtgatctacgcgctttcccctttccagcaaaagattatgccgggtctctggaaggacttgcccacgaagattcaccacaaggtctccgagaattggatcagcgccactcttttgctcggtcccctcgtcggcacctacgcgtatgttcagaactacctggacaaggagaagctggctcacaggtactgagctcttgcaagagctgattggataccttctagtttgttg

SEQ ID NO: 181427 - DNA, 306 bp, Glycine max
  unsure (1)..(306): unsure at all n locations
ctctgcttcttgatgggggtacgctgaactactttgggaaacccatccccatcaatcttattgtggctgtcattgctgagattgttcttgtgggaggtgcagagtactacagaattattaatggcctgaacttcgaagacaaacttcatccaggtggtccatttgacccattggggcttgcacatgatccagaccaagctgcactgctanaggtgaaggaaattaagaatggcagacttgctatgtttgccatgcttggtttctacttccaagcatatgtcaccggagaaggtcctgttgagaact

SEQ ID NO: 181428 - DNA, 307 bp, Glycine max
ctctgatctcctcatcaggacatgccacaggcgcggtgtgcatgccatgggaggaatggcagcacagattccaatcaaagatgacccagttgcaaatgaggcagcactggaacttgtaaggaaggaccagcttagagaagtgaaggcaggccacgatggaacttgggctgcacatcctggtctcattccatcctgcatggaggttttcaacaacaacatgggcaatgctcccaaccagatagacacagtgaaacgcgatgatgctgcaaacttaactgaacaagcctcttgcagataccaacaggaa

SEQ ID NO: 181429 - DNA, 303 bp, Glycine max
ctgcagacagcttggatccttgtcaagcgcagtgctgaatataaacctttgcagtttttagcctttgcctttgtttataggctttttgagaagttaaaaacctttgaatctcctgtaacccccaaatataatgtgagtttcatcttttatgacagcaaatttggtgaaattttaaaatcttctgtttttgaaccatgttgagtttttagtagaattgtatagttcatgttactgttggctacaggaagagggtgaagacacaggcgaaggactccgcatgggaaaacgattgcttcgatcact

SEQ ID NO: 181430 - DNA, 239 bp, Glycine max
gtttgttgtgagctataagctagtttatcgtgaggagaatatgaagttgtttgtactctttgttgctgcagtagttttcgtagcatggccatgccatggcgcaggctaccaaaggttccctctccgaatgacaactggctatggtgagcgttcttcggaggtaaaatgcgcaagtcttaggcttgctgtggaagcacacaacatccgagcctctaaaaccattcctgaagagtgcgttg

SEQ ID NO: 181431 - DNA, 303 bp, Glycine max
ttagcaaccaagcaagagaatggcgacgacagcagccttgtgcggcactatgatgagcagctccttcctgaggagaaaagcagtggtcacaagcctgaaggcattccccaatgctaacgcagtgtttggtgtaaagggtggacgtggaggtggtgtgactgccatggctagcttcaaggtgaagctgataaccccagagggagagaaagaatttgaatgcccagatgatgtatacattcttgaccaggcagaggaggaagggcttgagcttcctactcatgcagggctggtctgctctgtgtg

SEQ ID NO: 181432 - DNA, 297 bp, Glycine max
gaaacagtgtgatgaaaatgaaggtccttgttttcttcgttgctacaattttcgtagcatggcaatgccatgcgtacgatatgttccctctccgaatgaacactggctatggtgcccgtactccggaggtgaaatgcgcaagttggaggcttgctgtcgaagcacacaacatctttggctttgagaccattcctgaagagcgcgttgaagcaacaaaggaatacatccatggcgaacaatatagatcagactccaaaacagttaaccaacaagcttacttttatgccagagacctcg

SEQ ID NO: 181433 - DNA, 293 bp, Glycine max
cgactataagctagtttatcgtgaggagaatatgaagttgtttgtactctttgttgctgcagtagttttcgtagcatggccatgccatggcgcaggctaccaaaggttccctctcccaatgaaaactggctatggtgagcgttcttcggaggtaaaatgcgcaagtcttaggcttgctgtggaagcacaccacatccgagcccctaaaaccattcctgaagagtgcgacgcaccgacaaaggactacattaatggcgaacaatttagatcagactctagaacggttaaccaac

SEQ ID NO: 181434 - DNA, 302 bp, Glycine max
ggcagcttcattcaccaggtgttttggcaattggaagtagtatgaaaggagaaaattcatattcacatcatttggattcagatgttggcgtttcagttgttgatcgttttacattttacactcttgctttctttgagaggctgaatatgtatgacaatgcttcgttgagcagccttttcaattcatataatccaaatttgttgatgtcgactgcatattacagaatggatatataccaacgctatttaaaggaggtacctgtgacaaacttctttggttctgtaatgaaaacgatacatact

SEQ ID NO: 181435 - DNA, 282 bp, Glycine max
ctgattttgatgttcgaaatccttgtagataaactcagagggagtgcccaggaatttctaccctggcgaccaacttccattatggcacgaggaaatggagccccacaactccttgctagacattcttggtgccccagagccgatgagcatgtgatgtgaagaagttgccgtgtttcagaaatgtttcctgatagattatatcttgtcttctctcttttatgaactagctaacgatttgtgtagtcaattactttgtttggttggatatttttgatggttgag

SEQ ID NO: 181436 - DNA, 304 bp, Glycine max
catcttttgatttgataacaacaacctcgttgtggttttccaatgctgcgaagtcgaagatctagctagaggcagagaacgttctccctaatcttctgccgatggcgatcttctacgctttggtggccagaggcaccgtcgtcctggcggagttcagcgccgtcaccggcaacaccggcgccgtctcccgccgcatcctcgagaagcttccggcggagtccgactccaggctctgcttctctcaggatcgctacatcttccacatactccgatcggatggcatcacctacgtctgtatggccaa

SEQ ID NO: 181437 - DNA, 303 bp, Glycine max
  unsure (1)..(303): unsure at all n locations
gtgatttcagtgagtgatcggtgttcacttgatctcatcataatcgtcagcgtcaattgaagaagatgccgatcagaaacatcgccgtcggaaggcctgaagaggcgactcaccccgacacgttgaaggcggctttggctgagttcatctccggcatcgcctacaacaagctcaccgacaacggcgctgccacccctgccggcctcatctccgcctccatcgcccatgcattcgccctcttcgtcgccgtctccgtcggcgccaacatctccggcggncacgtcaaccccgccgtcaccttcg

SEQ ID NO: 181438 - DNA, 261 bp, Glycine max
tcgcagatcagagcgagcattcgaaaacggcgtcgcctccggaggaccatgaccgtcccgttcgagtgtacgcggatggcatctacgatctcttccactttggccacgctcgctccctcgagcaagccaggacatcgtttccgaatacatagttgcttgttgggtgttgcaacgatgaagtctaccacatatacaaaggcgaaactgttatgccagacgtcgaacgatacgaatccctgcgcaactgcaaatgggtggatg

SEQ ID NO: 181439 - DNA, 308 bp, Glycine max
gagggatttggaactttggatatctatagcgaaagcgctgacaccaccaaaaaccgaactgttcccagatctctctctcactcttccaacaatcgaaatccaaaaccctaccgacaccacactcaatcgaaattcttcattctcttctcatcgatggggcagaagtctctgatctacgcgttcgtgtcgcggggaacagtgattctcgcggagtacaccgaattcagcggaaacttcaactccatcgccttccagtgccttcagaagctccctgccaccaacaacaagttcacctacaattgcgacgc

SEQ ID NO: 181440 - DNA, 307 bp, Glycine max
gtgaaaatggcggtaccttgctctccaagaggatcgtgaagaagcgcgtcaagaagtttatacgcccccagagtgatcgcaagatctccgtcaagccaagctggcgcagacccaagggtattgattctcgtgtcaggagaaagttcaaaggatgcactttgatgcccaacattggttatggctcagacaagaaaacccgccattatctaccaaatggtttcaagaaatttgtcgtgcacaatgtgaaagacctggaacttctcatgatgcataacaggacatactgtgctgagattgctcacaatgt

SEQ ID NO: 181441 - DNA, 263 bp, Glycine max
  unsure (1)..(263): unsure at all n locations
ctttaagatctgattgggcggcgacgatngagaacaacgacagtatcatatcgcgggagaagatcgaccaggcggccgtgtggctcggctccgccgtctcttccgctttcttttcctctttggaacgcttttcctgcgtcaacgtcgccacctctgaccccgacaacgacgaagacgacgacgattattactccaccaccaccgccactcccaccgccgcatccaccaccaccactagccctccctccattcagatcgacggg

SEQ ID NO: 181442 - DNA, 270 bp, Glycine max
cccctaactacgcacgcattcgtgagacactcaatattcgtcgctcatggcactctcttctcgtctctcttccaaatccaaattgatctatggcagtcaaatacttctacaaaaggagcatgctattccagttcgtcactttgctaaagagtctgcccctcctgcccttaagggagacgagatgctgaagaacatttttgtggaggtgaagaacaaatttgagaccgccataggaatattaaagaaggagaaaatcaccattgacccaaa

SEQ ID NO: 181443 - DNA, 266 bp, Glycine max
cactcttgttcttcggtctcctcctattctccgctgccgtagccaccgtcgaacgaagctacgattacgacaaccttctgatccgtcaagtggtgccggacgcggaggaccaccacctgctcaactcggagaccacttctccgccttcaagacaaagttcgccaagacctacgtcacgcaggatgagcacgaccaccgcttccgtatcttcaagaacaacttgctccgcgccaagtcgcaccatatattggacccctccgtcgtcc

SEQ ID NO: 181444 - DNA, 269 bp, Glycine max
cgagcacacacaaacccgtccctcacactctccaaaccctagcggcactacacactagttctatcgctatctccccaagatgtcgagcgccgatcccgagcacagagaagaggaggaggcacccgccgttggcgacgacgaggacaccggagctcacgtcgctccaatcgtcaagctcgaggaggttgctgtcaccaccggcgaggaggacgaagatgcaatcctggatctcaaatcgaagctttaccggttcgacaaggacgggaaca

SEQ ID NO: 181445 - DNA, 272 bp, Glycine max
ctctcagtgagagaaactctctctctagaaaccctattgcacgttttgcaatcgaactcgacaatggccaacagcaacctccctcgaagaatcatcaaggaaacgcagcgtttgctcagtgagccagcaccaggaattagtgcctccccttctgaagagaatatgcgatatttcaatgtgatgatccttgggccaacccagtcgccttatgaaggaggagttttcaagttagaactatttttgccagaagaatatccaatggctgctccaag

SEQ ID NO: 181446 - DNA, 272 bp, Glycine max
tctcgctactaagagttgctgcttcttcagccactccgcacctcgcagcctctgtgccctcaacaaccatggctgaaatcgaaactaccgttctagatcccacccaaatcgacgtcaaactcttcaatcgctggagcttcgaggatgttgaggttaatgatatgtctctggctgattacattggagtgtccccatcaaagcatgctacatatgttcctcacactgctggtaggtactcagtgaagaggttcaggaaagcgcagtgccccatg

SEQ ID NO: 181447 - DNA, 269 bp, Glycine max
ctcttttgcacacccaaccgttcactaatctcactctgttccgtccaagaagaaaatggcggtgatggcggttcatcaattcgcgcaatgcatcacttgccacgcttggagccctgaccaatccatggttgctttatgcccaaacaataatgaagtgcacatctataggttggttgaagacaaatgggaaaaggtgtatgttcttcaaaagcatgaccaggtaatttctgggatagactggagtgcaagatcaaatagaatagttacgc

SEQ ID NO: 181448 - DNA, 268 bp, Glycine max
ctttcattttccctcactttctcgctcgccaaacgcccctctctctcctccaatggccgaccagctcaccgacgaccagatcgccgagttcaaggaggccttcagcctcttcgacaaggacggcgatggttgtattactactaaggaacttgggactgtgatgcggtcactagggcaaaacccaactgaggcagaactgcaggatatgattaatgaggttgatgctgatggcaatggaaccatcgacttcccagagttcctcaacctg

SEQ ID NO: 181449 - DNA, 266 bp, Glycine max
cagcagcagagcttgtatacgtcgccgttcagcgtagaacatgatcattcccgagaagaatcgtaaagagatctgcaaatacctcttccaagagggagtttgctttgcgaagaaggacttcaatctggcgaagacccggagattgatgtgccgaatctgcaggtgataaagctgatgcagagcttcaaatccagagagtacgtgagggaaacatttgcgtggatgcactattactggttcctcaccaacgatggaattgagttcct

SEQ ID NO: 181450 - DNA, 261 bp, Glycine max
cagctgtctgctgttagatctgtactccctagccatttatttggaaaattccaatttcaaggattgagtactcttcagagtgatgctctaagagtagctatctcaggaatcattgctgattccaaggataagaacaggaaatttgtggagaccattgaactccaaattgggttgaaaaattatgatccccataaggacaagcgtttcagtggctctgtcaagttccctcatattcctcgccccaagatgaagatttgtatg

SEQ ID NO: 181451 - DNA, 269 bp, Glycine max
cgtttgctacctaaaccctagtctccatacatcaacttgggaggttaaagagacggcaacgttgtgctgtccgccttgaccgagccagagcttcgtcttggccctcgattttgccctgtaaaactaatcccagtcacaacagaaataatcaatggcaccgaaacagaccaaggctgagaagaagatcgcttacgatgcgaactgtgcgacctaatggaggagtacggccaaatcctcgttgtaaactccgacaacgtgggatcgaacag

SEQ ID NO: 181452 - DNA, 268 bp, Glycine max
  unsure (1)..(268): unsure at all n locations
ggcgaacacgcatacgatgttaatttgaatgggacagtgacttcggtattcctggtgcattttatattaagaacttcatgcaaaatgagttctacctcaagtctctaattctcgaagacattccataccacggaaccatacaacntcgtatgccactcctgggtttacaattcaaaaaactacaagactcttcgtcatttctttgccaacaatacatatcttccaagcgagacatcagcctcacttgtgaagtacagagaagaagaat

SEQ ID NO: 181453 - DNA, 264 bp, Glycine max
gtctctccgcagcagccacacttctgcgccgtttcagctgaagagccatccgcaggtaagcaatggttaagcataataatgttatccccaatgggcacttccggaaacactggcaaaactatgtgaagacttggtttaatcaaccagcccgaaagaccagaagacggttggctcggcagaagaaggctgtcaagattttccccaggcctactgctggatctctcaggcctattgttcatggccagactctgaaatacaacatga

SEQ ID NO: 181454 - DNA, 263 bp, Glycine max
gctagctattagttcgattttgtagtaagtgaggtgccaatatggtgaagatagctcttggtactttggatgactcttttagcgctgcctctcttaaggcttatttcgcagagttccacgcaactctgatttccgtgttcgctggtgttggatcagccatcgcttacaacgagcttacaaaagatgcagccttggatccaacggggctggtggcagtagctgtggcacatgcatttgcactgtttgtaggtgtctccgtcgcc

SEQ ID NO: 181455 - DNA, 266 bp, Glycine max
cattttggcacccttgccaattgggtcgctgtgttcttggttcacttggcaaccatccccatcaccggaactggtatcaaccctgctcgtagtcttggtgctgctatcatcttcaacaaggaccttggttgggatgaacactggatcttctgggtgggaccattcatcggtgcagctcttgcagcactctaccaccaggtcgtaatcagggccattcccttcaagtccaagtgattcaatcaaacggttcatgcttaatcaagttg

SEQ ID NO: 181456 - DNA, 270 bp, Glycine max
cggctcgaggtggtgttagatctgtacccgcctagccattgatttggaaaagtccaagcttcaaagatgagtaagcttcagagtgatgctcttagagaagctatctcaggaatcatgactgattccaaggaaaagaacaggaaatttgtggagaccattgaactccaaattgggctgaaaaactatgatccccagaaggacaagcgttttagtggctctgttaagttgcctcacattcctcgccccaagatgaagatttgtatgcttggg

SEQ ID NO: 181457 - DNA, 268 bp, Glycine max
caaaccaaacacaacacaaggagagaaccagatctctctttctcaaatcaccaagaatagttgaaaatggggctgtctttcacgaagctgttcagccggctctttgcgaagaaggagatgcgtattcttatggtgggtctcgacgccgccggtaagaccaccattctctacaaactcaagctaggagagatcgtcacaaccattcccaccattgggtttaatgttgaaactgtggaatacaagaacatcagcttcactgtctgggtgt

SEQ ID NO: 181458 - DNA, 268 bp, Glycine max
caagctcatcctagagttttaaaattggcagcagcctcctccatggctctctcttccccatccttggctggtcaggccgtgaagctgggcccatcagcccccgaagtcgggagggtcagcatgaggaagaccgtcaccaagcaggcctcctccggaagcccatggtacggcccagaccgcgtcaagtacttgggcccattctctggcgagcccccgtcctacctcactggcgagttcccaggtgactacggctgggacactgctggct

SEQ ID NO: 181459 - DNA, 266 bp, Glycine max
caacaagctttcttttatgctagtgaacgcgaagtccatcacaacgacatatttatattcggcatagataacaccgtactctctaatatcccatactatgaaaaacatggatatggggtggaggaatttaatgaaaccttatatgatgaatgggttaacaagggcgacgcaccggcattgccagagactcttaaaaattacaacaagctgttgtctcttggcttcaagattgtattcttgtcaggaagatatcttgacaaaatggc

SEQ ID NO: 181460 - DNA, 264 bp, Glycine max
ccctcctgggagggatagcaccactcgtcttggccagaccctccctagcagaagaatttgagaaagcagcactcaccgacttcaacctcaccctgcccataataatggtggagtttctgctgctgatggttgccttggacaagatatggttcaccccacttgggaaattcatggacgagagggacgcggcgatcagggagaagctgagcagcgtgaaggacacgtcggaggacgtgaagcatgctggaggacaaggccaatgct

SEQ ID NO: 181461 - DNA, 266 bp, Glycine max
cgcaaagagcttggggattgaattactcctttggaagtgagcctcaaggagactgtggatagcttgaaagaaaagaagtttaccaacttttaatttgtgatatctcctagaggagaaaacgttaataatagaaaccttgtgtggttggtcacttggcttgtgatgctcatgcttctgaacaaacttactattaaataagacttaaatcaagattggtataagtactgaaagaaaccattcttggtctgatttgtaccggtgacatt

SEQ ID NO: 181462 - DNA, 266 bp, Glycine max
caacaattgacatctcacactgcattccttcttctcccagaatcggtcactaaatccgcaatcatgaagctcgataccaccggtctcgaatcgtttcccacactgcttgcgccccaaaacgacgtcgttggagaactctccgccgctccatccttcgaccttccgaattccaacgattttgatgggtttgtgaaagaagctattcagatggtgaagcccgcgaagggtactacgactcttgcttttatatttaaggagggtgtttg

SEQ ID NO: 181463 - DNA, 264 bp, Glycine max
ctgacagtgttggcagacttcatgggggccatcggttcaggaaccggaatattgcttgcagtaacaatcatctatcagtactttgagacatttgagaaggagagagctagtgagcttggcttcttcggtttctaagttctgccaagcaaataatgttggttggtgactccaacgagctctcccacaccccttgtttgagggatcgttatacttgtaggtcgtttaacatcgtaagggaggacataactagtttgttgtcaaatt

SEQ ID NO: 181464 - DNA, 144 bp, Glycine max
cgtaaggtaggttaacactcttcttcatcgtcgtcgcaatgggacgtgtgatccgtgcgcacgtataggcatcaggctcggtcttcaagtcccatacgcaccaccgcaatggccctgcatgcttccggagcctggacttcgggg

SEQ ID NO: 181465 - DNA, 265 bp, Glycine max
agcaacatttgaaaatgttgaagatggctgaaagaattgcggaaccacaacaatgttggcatctgtgtgggtaataaatcagaccttcgtcaccttgtagccgtgtcaactgaagatgggaagtcctatgctgagaaggaatcactttacttcatggaaacctcagctctggaggctactaatgtagagaatgcctttgccgaagttctgactcaaatctatcacattgttagcaagaaagcagtagaggtggctgaaaatgaac

SEQ ID NO: 181466 - DNA, 265 bp, Glycine max
cctcgttcgtatcgaagaagagaagatggggaaacagattgtgaccgtgaaatcagtgatctacgcgctctcccctatccagcagaagataatgccgggtctctggaaggacttgcccacaaagattcaccacaaggtctccgagaattggatcagcgccactctcttgcttggtcccctcgtcggaacctacacgtatgttcagaactacctggaaaaggagaagctgtctcacaggtactgaactcatgcaagagctgatggt

SEQ ID NO: 181467 - DNA, 265 bp, Glycine max
cagagggagtagcggcattaaaatgcagatcttcgtgaaaactctgacagggaagactataaccctcgaggtcgagagcagcgacaccatcgacaatgtcaaggccaagattcaagacaaggaaggcattcctccggatcagcagcgtttgattttcgccggaaagcagcttgaagatggaaggaccctggccgattacaacatccagaaggaatcaacccttcatctcgtcctcaggcttcgtggtggcatcattgagccttcc

SEQ ID NO: 181468 - DNA, 265 bp, Glycine max
ctgcctgtaagactgaaaaaccttctcttttccttctctcaagtctcaagagatttcatcatggctccaaagaaggacaaggctccaccaccttcctccaagcccgccaaatctggcggtggcaagcagaagaagaagaagtggagcaagggaaagcaaaaggagaaggtgaacaacatggtgctgtttgatcagggcacctatgataagctcctttctgaagctcccaaattcaagctcatcactccttccattctttctgtcg

SEQ ID NO: 181469 - DNA, 263 bp, Glycine max
ccagaaaggagatgggagtcgagaagcagttgttgaggtctggcaccggtccgaagccaattcccggtcagaacgtaaccgttcactgcactggtttcgggaagaacggtgacctttctcagaaattctggagcacaaaggatcctggccagaacccattcactttcaaaatcggccaaggttctgttatcaaaggatgggatgaaggtcgtgcttggcatgcaaattggtgaagttgctcgtctccggtgctctccggatat

SEQ ID NO: 181470 - DNA, 260 bp, Glycine max
gttggtatgtcaatggcaatgaaacccgtgatatactatgtggtggacgcgtttactgagtcagcattcaaggggaaccctgcatctgtgtgtttcttagaggaagagagagatgaggagtggctgcaagcagtagccgctgaattcaatatctctgagacttgttacttatcacgcatcacccactcgctccatggaatctctaatccccgttttcgcctcagatggtttactcctgttgctgatgttaaactttgtgt

SEQ ID NO: 181471 - DNA, 257 bp, Glycine max
ctagcttggacgagtgaattagattcatcattaagatgtcgtctctgatagcagaagatgtgaagagcagatcagaggtgtaccacggggacgaaatgtgccaagtgaagtccaaggagcttctcaaggaaatcgccctccccaacggccttcttcccctcaaggacatggaggagtgcggctacgacagacaaaccggcttcgtctggctcacgcgccagaagagttacacccacaagttcgacaagatcggaaag

SEQ ID NO: 181472 - DNA, 264 bp, Glycine max
ctaagactgagcaacttccaacaccatagtgaaatcgcttccaaggctgcacttctcttgtgtttcaatgttctcttcttcaccgtggttagctccacatatgtgccatgcaacccaccccccaaaactccaaaacacccacctgtcccaaagccaccttccccaaagcaagcaagttgccccaaagacactattaagtttggtgtgtgtgctgatgtgttaggtttgatcaacgtgcaacttgggaagccaccaaagacccat

SEQ ID NO: 181473 - DNA, 263 bp, Glycine max
agacagtgatacaatacagagtgcgttgttgctccttcgccacaactccctgccatcatgggtacctccagagattctatgcacaagaggcgtgccactggtggcaagaagaaggcatggaggaagaagagccagtatgagcttgggcgccagcctgctaacactaagctgtcaagcaacaagacagtcatgaggatccgggttagaggtggaaatgtgaagtggagggcactgagattggatactggacattactcctggga

SEQ ID NO: 181474 - DNA, 262 bp, Glycine max
caccctggaagtcgtgataatttgatcttggatattacaaacaagtggttaagagaaggggtttgttccaatcagatgctgaattgcttactagtcctatcacaaggtctattatcgctagtcaacttcagtcaactcaaggattctttgcggaatttgccaagtctatggagaaaatgggacgaattaatgtcaagcttggatctgaaggagagataaggaaacattgtgcacgagttaataactaagaatctctttgtaa

SEQ ID NO: 181475 - DNA, 262 bp, Glycine max
cttcaaacctaacgcagcatcgctattctcttcattccatggcttacgcccaaccagcaaaccgtggattaccctagtttcaaactcgttatcgtcggcgatggtggcacaggaaagacaacctttgtgaaaaggcatctcaccggagaattcgagaagatatctgagccaaccatcggtgtggaggttcacccattggattttttcacaaactgtggaaagattcgattttactgctgggatactgctggacaggagaaat

SEQ ID NO: 181476 - DNA, 251 bp, Glycine max
ccacaaaatgtcctctaatccagtaatactgcagagtgtgaacttgaccaagtatatactggagaccagcgtttatccacgagaagaagagactctcaaagagctaaggaaagccactgcaggccacccttggggctttatgggcgctgctcccgatgcgggtcagctaatgaccttgctcttgaagttgttgaatgctaagaagacaattgaagtgggagtttttactgggtactctctactcctcactg

SEQ ID NO: 181477 - DNA, 260 bp, Glycine max
ctgaagagccggtggttgtgtggcttttggcggtactaggcatcatcggagccacactcttcatagtgagcttgatccaaacctcggagaacaacttcctatgttccataacaagaacgatgcagcagcagcagcagcagttcaccgatggccccacatcgatgcaacccaaagccatcctccactacgcgacctctcagattgtccctcaacaatctcgttccgagattactataaccttcgacgtgctccaaagcctc

SEQ ID NO: 181478 - DNA, 253 bp, Glycine max
cagaaactctagccaactagttgtatgctgtcttcatctcggcaaaccatctaacaaatcattcagccagctgaaactttctcacccagagcatgtattggtcaaacgggtatcatcagctgaagaaagttttgatagagcgctacaatcattttcctcatgagtgtcgatgattgaatttctttcaagagttgaacggtgtgaggtcttcccgtgcaatttttacaccttatcgtggctattgtattggttg

SEQ ID NO: 181479 - DNA, 260 bp, Glycine max
cgcgttttgtttctttctggaagcttcacttcggcatccatggcgtcgttcgaagaagctcctcccggaaactccaagaacggcgagaagatcttcaagaccaagtgcgctcagtgccacaccgtggacaaaggtgccggtcactaacaaggacccaatctgaatggtttgtttggaaggcaatctggcacaactcctggatattcctattctactgctaacaaaaacatggctgtgatttgggaggtaaagaccttgat

SEQ ID NO: 181480 - DNA, 275 bp, Glycine max
atctactgctctatcacacacacacacttactaaaaaacatcaaaagagacatggctgagcaaaccttcatcatgatcaagcctgatggcgtccaaagacgccttattggcgagatcattagcagatttgagaagaaaggtttctacttgaaaggtttgaaacttgttactgtggaccgtccttttgctgagaagcactatgctgatttgtctgccaagcctttctttagtggtttggtggattacattatctctggccctgttgttgccatatc

SEQ ID NO: 181481 - DNA, 261 bp, Glycine max
catagataacaccgtactctctaatatcccatactatgaaaaacatggatatggggtggaggaatttaatgaaaccttatatgatgaatgggttaacaagggcgacgcaccggcattgccagagactcttaaaaattacaacaagctgttgtctcttggcttcaagattgtattcttgtcaggaagatatcttgacaaaatggccgtaacagaagcaaacctaaagaaggctggcttccacacatgggagcagtcaatctc

SEQ ID NO: 181482 - DNA, 261 bp, Glycine max
cccatctcttgtttctgctttctttcttcaccatgtcacttgctgggaaaatcaccactgaaatctgggttcatgcaaccgctacaaagtggttcaacctcttcgcaacacaactccatcatgttcaaaacctaactgatagagtgcatggtaccaagctgcatcaaggtgaagactggcatcacaacgagacagtcaagcactggacttataccatagatggtaaggttacaacatgtctggagagtattgaatccatga

SEQ ID NO: 181483 - DNA, 261 bp, Glycine max
caacaacaagcagatcatctctctctctctctcaaccataatagtcatgggtttgaaggaggattttgagcagtatgctgagaaagcaaagactttgccaccgactcaatcaaacgaagacttgcttatcctttatggattgtacaaacaggccaccgttggacctgtcaacaccagccgtcctggaatgttcaacatgagggacagagctaaatgggatgcatggaaggctgttgaagggaaatccaaggacgaagcatg

SEQ ID NO: 181484 - DNA, 256 bp, Glycine max
  unsure (1)..(256): unsure at all n locations
tccaggatacaatccagaggctttgctaaaacgtcttccactagatgctttgtctcgnagatcatgctatattgttggggattatgaaccgacatgaactgccattatctttgtatgttcttaagcttaatgctccagaattggcattgtcttattgtgatcgggtctatgagtctatgcatcagccatctgcaaaaaattccagcaacatataccttctgcttttgcaaatttatttgaatcctcgaaggaccaa

SEQ ID NO: 181485 - DNA, 257 bp, Glycine max
cgttgagcttcctgacaactgccaaggtttgtactattgcaacatcttaagtggcgtcatcagaggagccttagatatggtgtcaatgaaaactgaggtaacttggcttcgtgatgtacttcgtggtgatgatgtgtttgagttgcaggtaaaacttctcaagcatgttcctgaagagtatccatacaaggatgatgagtgaatttgtttttgtagtgatatatgctcgaggtttttattacttcatttctgcagat

SEQ ID NO: 181486 - DNA, 273 bp, Glycine max
gagatagtgtggtagagagagaggagcggaggagagaaaatgacgacgaggttcaagaagaacaggaagaagagaggccacgtcagcgccggtcacggtcgtatcgggaagcaccgcaagcatcccggtggtcggggtaacgccggtggcatgcaccaccaccgcatcctcttcgacaagtaccatcccggtttcttcggaaaggtgggtatgcgctacttccacaaactccgcaacaaattctactgccccatcgtcaacattgataagcta

SEQ ID NO: 181487 - DNA, 271 bp, Glycine max
tgagtttgttgatctagataactagaaacagtgtgatgaaaatgaaggtccttgttttcttcgttgctacaattttcgtagcatggcaatgccatgcgtacgatatgttccctctccgaatgaacactggctatggtgcccgtactccggaggtgaaatgcgcaagttggaggcttgctgtggcagcacacaacatctttcgctttgcgaccattcctgaagagtgcgctgaagcaacaaaggaatacatccatggcgaacaatatagatc

SEQ ID NO: 181488 - DNA, 274 bp, Glycine max
gagagaattatcaaaggtgaaacgaagaagccctaactacgcacgcattcgtgagacaactcaatattcgtcgctcatggcactctcttctcgtctcttttccaaatccaaattgatctatggcagtcaaatacttctacaaaaggagcatgctattccagttcgtcactttgctaaagagtctgcccctcctgcccttaagggagacgagatgctgaagaacatttttgtggaggtgaagaacaaatttgagaccgccataggaatattaaag

SEQ ID NO: 181489 - DNA, 272 bp, Glycine max
actagaaacagtgtgatgaaaatgaaggtccttgttttcttcgttgctacaattttcgtagcatggcaatgccatgcgtacgatatgttccctctccgaatgaacactggctatggtgcccgtactccggaggtgaaatgcgcaagttggaggcttgctgtggacgcacacaacatctttggctttgagaccattcctgaagagtgcgttgaagcaacaaaggaatacatccatggcgaacaatatagatcagactccaaaacagttaacca

SEQ ID NO: 181490 - DNA, 272 bp, Glycine max
accaaaccaaaacccttatctgcactcacttcacacaaaccaaagtttcttaattaccaacacaaaatggatggaggctgtgtcacacacgaaaccaccacatccagcgactctctttccgttccgccgcccagccgcgtcggcagcgttgcaagcgccgtcgtcgaccccgacggttgttgcgtttccggcgaggccgaatcccggaaactcccttcgtcgaaatacaaaggcgtggtgccgcaaccgaacggtcgctggggagctcagat

SEQ ID NO: 181491 - DNA, 278 bp, Glycine max
gatccagcagcaatggtgtacgtcaaggctcagaaatcaaaagcctacttcaagagatatcaagtcaagttcaagagaagaagagagggaaaaaccgattaccgtgccaggattcggttgattaatcaggacaagaacaaatataacactccgaaataccgatttgtggttcgctttagcaacaaggacattgttgcacaaataatatctgctagcattgccggcgatttagttcttgctacagcatattcacatgagctgccacgatatggtcttga

SEQ ID NO: 181492 - DNA, 275 bp, Glycine max
tctcttccaccgcacactctctgctcctagggtttctccttcgacgtgagggaaatggctcccaaaccgcctagtacgggtctgtttgttggactgaacaagggtcacgtcgtcaccaagaaggaattgcccccacgcccctcagatcgtaaggggaaaacaagcaagagggtgcactttgtgaggaacctcataagagaggttgctggttttgcaccctatgaaaagcgtataactgagttgctgaaggttgggaacgataagagggcactgaa

SEQ ID NO: 181493 - DNA, 275 bp, Glycine max
cctcgagccgaatcggctcgaggtgcaagtgtaacccaaaaccctacgcggcgcctgctttcaccgttcgtcttttgcatcagccatcaggatggagtctcaggtgaagcatgctcttgttgtcaaagttatgggtcgtactggatccagaggacaggtgactcacgttagagtgaagtttttggatgatcagaaccgtcatatcatgaggaatgttaaaggaccagtgagagaaggagacattctcaccctactcgagtctgaaagggaagcaa

SEQ ID NO: 181494 - DNA, 272 bp, Glycine max
ctaatctgaaggctcccgccatctgcgatcggatttcatggctccaaagaaggacaaggctcccccaccttcatccaagcctgccaagtctggcggtggcaagcagaagaagaagaagtcgagcaagggtaagcaaaaggaaaaggtgaataacatggtgctcttcgatcagggtacctatgacaagctcctctctgaggcacccaaatacaagctcattactccttccattctctctgaccgtttgagccttaatggatcacttgcaagga

SEQ ID NO: 181495 - DNA, 272 bp, Glycine max
cgcgttctatatattattgaattgacaatgaggcctgctcttgctttgcttcctcttctatttgctttcttgttagctgccactacagaatcaagaaaagatacaggggaatattggaaaatgatcatgaaagatcaggaaatgccagaaggacttcaaggtcttgtttcatttcaatctgaaaataaccctaagactctcgagcagcttggtaaaggttccaaaaaccattgtgaagagtctctagttacaaatacacaagttaatagtga

SEQ ID NO: 181496 - DNA, 274 bp, Glycine max
  unsure (1)..(274): unsure at all n locations
gttctgagtattctgatcgctccctgagagagctcgtcgcggcggttgcagaagaagattgcaagatgaagttcaacatcgcgaatcccaccactggatgccagaagaagctcgagatcgacgacgatctgaaactgcgagcattttgggacaagaggatctcacaggaggtcatcggagatgcactcggtgaggaatttaagggctatgtcttcaaaattaccggaggttgtngacaaacaaggatttccaatgaagcagggagtgctgactc

SEQ ID NO: 181497 - DNA, 273 bp, Glycine max
tccctcccttgttctgcactgcggccgataacaattttctgttttgtgtgatttttttgttctttgtttacagctctgcgagatcttgagtcgccgatttgaaaagatgagtaagcttcagagtgatgctttgcgtgaagccatctcaggaatcatggccgattccaaggagaagaatcgcaaatttgtggagaccatcgaactccaaatcggtttgaagaactacgatccacagaaggacaagcgtttcagtggctccgtcaagttgcccca

SEQ ID NO: 181498 - DNA, 274 bp, Glycine max
atatagcccaagccctatacaaccaaaccctaacacacacccatttgattcagtttccatggctagcctcaaggttgcatttttcgctgcagtgctctgcatggttgtggtgagtgcacccatggcacatgcagctatcacgtgcgggcaggtgacgaatagcctgatcaattgcatcggttacctccagaacggaggaacgccgccgtcgggatgctgcaacggagtgaagagcctcaatgccgccgccaagaccaccgccgaccgccagacg

SEQ ID NO: 181499 - DNA, 274 bp, Glycine max
gtacaatttttgccaacagttgcaactgtactgtctcctgaggttattgagagagaggctgaatcaggaggaaagcttggggaattggattcatatgagattgaaggtggcgagacaaaagctgaaattcttcagaatctggctgagttccagttttcttgtgtcatgtacaatgctgtgttggagaatgcttgtagtgagcaaggagcaagaatgtctgcaatggacagctctagcaggaatgctggggatatgcttgatcgtctcaccctca

SEQ ID NO: 181500 - DNA, 258 bp, Glycine max
ctgaatctgcgtgtgtatgtgaattgttgttgagatctgaatcacaatcagaaacgataatggctacaccggaccacctcttcaacctccgcaacaacttctacctcggcgcttaccaagccgccatcaacagcagcgacgttgccaacctctcccaagaagataccctcgagcgcgacaccctcgtccaccgctgctacatcgccctcggccagctccagttcgtcatctccgagatccacgacgatgctctcacac

SEQ ID NO: 181501 - DNA, 279 bp, Glycine max
ctgagtttccagactgcataccttaggtcttccgaattcgaagttaatttgcaagatggctaaggaaaaggctcagatcaacattgtggtggttggtcatgtggaccctgaggagggaaccaccattaacgagctgaagaagcctgttgtggagaaagaagctccagggcatgccatatgagggcatgcacgtacggcctcggaggggaaccagaacattatgttaacagaataatctggaaccctatgtatcagtgtcatcatcagtgtgtagtttag

SEQ ID NO: 181502 - DNA, 226 bp, Glycine max
gtcgcttcttcgtaggtgcagctgcaatggtgaagggacgccaaggagaacgtgtcagactctacgtgaggggtacaatccttggatacaaaaggtccaagtcaaaccagtatccaaatacatccctgatccaaattgagggtgtgaatgccaaagaagaagtagcatggtatgctggcaagaaaatggcctatatctacaaggctaaggtgaagaagaatggaag

SEQ ID NO: 181503 - DNA, 267 bp, Glycine max
gtttgttgtgagctataagctagtttatcgtgaggagaatatgaagttgtttgttctctttgttgctgcagtagttttggtagcatggccatgccatggcgcaggctaccaaaggttccctctccgaatgacaactggctatggtgagcgttcttcggaggtaaaatgcgcaagttttaggcttgctgtggaagcacacaacatccgagcccttaaaaccattcctgaagagtgcgttgaaccaacaaaggactacattaatggcga

SEQ ID NO: 181504 - DNA, 262 bp, Glycine max
cgtcttcttcggtgaatgattgatccctcatcatcatcatcatgggggtgtcagaggagaagctctcgtcgttctactagagccgctggctggtattcgtggccgcaatgtggctgcagtcgtgggccggcatcgagtacttgttcaggagcatatcgcccgtcatacagagctatctgggatacagccagaagcagctcgcgatgctcggcgtcgtcaaggaccttggcgacgccgtcggcttcatgacgggcctgctctg

SEQ ID NO: 181505 - DNA, 271 bp, Glycine max
aaggcttatggtggatacctaggcacccagagacgaggaagggcgtagtaagcgacgaaatgcttcggggagttgaaaataagcgtagatccggggattcccgatataggtcaacccttcgaactgctgctgaatccacgggcaggcaagagacaacctgttgcatcattggagcatggtgaaggtgctcatcatgaaggagaggcgaaggagaagaaaggtatattggaaaagatacaagagaatcctcctggttatcactccaagacag

SEQ ID NO: 181506 - DNA, 106 bp, Glycine max
ctcgttgtgtaatgttggatgtgttcccaaaacatttgaagaactttgatgtttaatgggtctgtaataatgtcccttgaaaataagttcggtttgtgttgaactc

SEQ ID NO: 181507 - DNA, 267 bp, Glycine max
agagtttgttgtgagctataagctagtttatcgtgaggagaatatgaagttgtttgttctctttgttgctgcagtagttttggtagcatggccatgccatggcgcaggctaccaaaggttccctctccgaatgacaactggctatggtgagcgttcttcggaggtaaaatgcgcaagtcttaggcttgctgtggaagcacacaacatccgagctattaaaaccattcctgaagagtgcgttgaaccaacacaggactacattaatgg

SEQ ID NO: 181508 - DNA, 269 bp, Glycine max
ctcttggcttcaagattgtattcttgtcaggaagatatcttgacaaaatggccgtaacagaagcaaacctaaagaaggctggcttccacacatgggagcagttaattctcaaggatccacatcttatcactccaaatgcactttcatacaaatcagcaatgagagagaatctgttgaggcagggatacagaattgttggaatcattggagaccaatggagcgatctgcttggagaccacagaggcgaaacaggacctttaagcttccta

SEQ ID NO: 181509 - DNA, 269 bp, Glycine max
aactcaaggagatggctctgggaagaggcagtgcagtggttctactactttgcttcttgctgcttcactctcagatggctcgtgctgccacctacacagttggagattctgggggttggacctttaacactgttgcctggcccaaaggaaagctctttcgggctggtgacacacttgctttcaattatagccctgggactcacaatgtggtggccgtgaacaaggctggatatgatagctgcaagactccaagaggagccaaagtgtat

SEQ ID NO: 181510 - DNA, 269 bp, Glycine max
gccttggtgcatcatggtggtgctggaacaacggctacaggactaaaggctgggtgtccaacaaccattgttccattctttggagatcagttcttttggggagatagaataaatcagaaagggctaggaccagctccaattccaatatctcagctcagtcttgagaatttatcaaattccattaaattcatgctccagccagaggtaaaatcacgggcaatggaagtggcaaagttgatcgagaatgaagatggtgttactgctgcagt

SEQ ID NO: 181511 - DNA, 269 bp, Glycine max
cttcaccgcgcaccacactgagaggaagagggagtgagagagagtgttcttcgtttgctaccttctcccagaaatggttacgttcaggtttcaccagtaccaggtggtcgggagggctctcccaacggaagcagatcagcatccgaagatctaccgaatgaagctctgggccaccaacgaggttcgcgccaagtctaagttctggtattttttgaggaagctgaagaaggtgaagaagagcaatggtcaagttcttgctatcaacgaga

SEQ ID NO: 181512 - DNA, 270 bp, Glycine max
atagcttgaaaacacagtgcttgtttagactagtatcttccatggctccgaaagatagaatcctggttttgggacccacaggagccattggaagacacatagtttgggcaagtgtaaaggcagggaatcccacttttatattggttagggacacccctgcctctgttaacaagccaaggcttgtcactgctgctaatcctgaaaccagggaagagctcattcagagcttccaaaattctggagttactctaatccagggagatatgaacg

SEQ ID NO: 181513 - DNA, 274 bp, Glycine max
ctcattcccgttttcctttactggtaagttgtaaccctataagccgttgctcccaccgccgccgcgcagatctccgtttcaacttgggttatctctaaggtcctaaacaatcctctttcaaaaacataccgagatgagtgtggaaatgacgacaccatcattggtagagtctctagttcttcaactccatgagatctcagctgtcaaatttggcaacttcaagctcaaatctggcatcttctcaccaatctacatagacctccgcctcatcata

SEQ ID NO: 181514 - DNA, 269 bp, Glycine max
gataaattgattcaagcagaaggtgtggattctctttcagaagatgaacttcaggaagattgcagagagcgaggcatgcttggacatgctttctgttgaagaaatgcgccaacagcttcgagattggttggacttatctctgaatcactctgttccatcatctcttttgatactttcaaggtcatttactgtgtctgggagattgaaaccagaagaagctgtgcaggctacactttcttctctccctgatgaggttgtagatactatac

SEQ ID NO: 181515 - DNA, 263 bp, Glycine max
gcacggagcttctgatccgaaagcttccgtttcagcgtttggttcgtgaaatcgctcaggatttcaaaacggatctgaggtttcagagcagtcgctgtttcggcgctccaggaagctgctgaggcttacttggtgggactctttgaagacaccaatctctgtgccattcacgctaagagggttactattatgcctaaggatattcaactcgccagaagaattagaggggaaagggcttaattttgtgatcccttttggtttta

SEQ ID NO: 181516 - DNA, 267 bp, Glycine max
gcgaccacctttatattacccttttgatcagagtttaaaatggtgttgtgattctacgagggtcttgcatgcccctttgagtttcaagtttcaagtttgagccccctttctgtaatccataaccatagctttggttgagttgagggatttgattatggataagtatgaggctgtcaaggatttgggagctgggaattttggggtggctaggctcatgaggaacaaggagaccaaggagcttgttgccatgaaatacatcgagcgtgg

SEQ ID NO: 181517 - DNA, 268 bp, Glycine max
ttgagaaaccgctatgggccagctaaaatgccttacactctgctctatccttctagtgaggagggattgactttcagaggaattcccaacagtatctctatctaaggaccctatggttgcttaagtactgttcctggttttaaataaatgtgaaattgaaggaaccagattccttaatcagttgtgtatgcttaagtcatgtatttggagtggctgaatgtatttgtatttgtcattaataaagagagttgtgttagtataatggaaa

SEQ ID NO: 181518 - DNA, 272 bp, Glycine max
gaaaactgctgcttctcgacccacttttgaagttcaaaacttaaaccctagttctctctctctttctttctcctgcatcttcaaccatgtcagcaatgctgcaacctcagatcattctgctcaaggaaggcacggacacttcgcaagggaagccacagctggtgagcaacatcaatgcctgcaccgccgtcgccgacgtcgtccgcaccaccctcggccctcgcggcatggacaagctcatccacgacgacaagggaaccgtcaccatctcc

SEQ ID NO: 181519 - DNA, 270 bp, Glycine max
gcgcagtcgagcctccagaagacgaatcgaaaatgccgtcgcacaagacattcagaatcaagaagaagttcgcgaagaagatgaggcagaacaggcccattccctactggatccgcatgaggaccgataacaccatcacgtacaacgcgaagcccgtcactggcgtcgcaccaagcttggatactgaggtgtatgctctgcctaggttcaatttatccaattaattagtgttttattttcttgaggcaaaacaatgttttgagtttttaa

SEQ ID NO: 181520 - DNA, 271 bp, Glycine max
  unsure (1)..(271): unsure at all n locations
gtttacagagaagcgaagaggcgcagcgtnagcagtaactcgtggaattgctagcaatggcgaggatcaaggtttacgagctgaggcagaagacgaaggctgatctgttgaatcagctgaaggacctcaaggccgagcttgccttgcttcgtgttgctaaggtcaccggcggtgcacctaacaagctctctaagatcaaggtggtgaggttgaacattgcccaggttttgacggtgatttctcagaagcagaaggccgcgttgagggatgc

SEQ ID NO: 181521 - DNA, 182 bp, Glycine max
ggccactgagatgatggggccaacaatggtggcagaagcaagaacttgtgagtctcagagccaccgtttcaaggggccatgtttgagtgacaccaactgtggctctggtttgcacgaaccgaacgtttcactggaggacactgccgtggcttccgtcgcagatgcttctgcaccaaacattg

SEQ ID NO: 181522 - DNA, 269 bp, Glycine max
ttgaatctcagaattctctaaaagagatctttttctgctctttgaagaaagaagggtctttgcttgattttggagatgtctctgctctcagatctcatcaaccttaacctctccgataccaccgagaaggtgatcgcagagtacatatggatcggtggatcaggaatggacctgaggagcaaagcaaggactctcccaggaccagttagcgacccttcagagcttcccaagtggaactatgatggttccagcacaggtcaagctcctgg

SEQ ID NO: 181523 - DNA, 268 bp, Glycine max
atccccagtggcacgcggattaagacccgcaaacggaatattgctgcgccgctggaccctgcagcattctcggatacagtggtccagatttatttggataatgctggtgatctggaacttattgctaagagcattgaatcttcagaccttaacttttcaagatacggcgataccttttttgaggttgttttcactgggggtcgtacacaacctggaactaccaagcctgatgagggggaccgccatccatactctataatagagtgtg

SEQ ID NO: 181524 - DNA, 268 bp, Glycine max
gagctgtgtctggggaaatttgcgttgtttttcgcggtacagctcacacacactgaacggtaagtatggcggacaaggctgttacaatccgaacccgaaagttcatgaccaacaggcttctttccaggaagcagtttgtcgttgatgttcttcatccagggagggcaaatgtttccaaggctgaacttaaggagaagctagctaggatgtatgatgtgaaagaccctaatactgtatttgtcttcaaattccgaacacattttggagg

SEQ ID NO: 181525 - DNA, 266 bp, Glycine max
aggatgagacccttggacgagaaggagacgagcgcagtgttcgagaagctgttcaagttcgtcggaaacaacctgaagaacatcgtggagaacccctcgcacgaaggtcccgattcgaaccccgggcgctactgcttccggctccacaagaacaagatcttctacgccagcgagtccctcgtgaagcgcgccaccaacgtcgcccgccccaacctggtctccctcggcacctgcatcgggaaatacacccacggcggcagcttcca

SEQ ID NO: 181526 - DNA, 266 bp, Glycine max
gacagcttcatactgtcttttgagaacatcatagtctttctccaactgcttggtcttccacctggcccttctattctggaaccatatagcaatttgtcttggttgcaagccaagtgctcttgcaagctgcatttttctctctggctcaagcttgttccccaactcaaagctcttctcaagtgtcttttcctgctccatgttgagccttctcttcttctcccctgcttgtgatccatcatcagacaaatcttcctcagcattattgg

SEQ ID NO: 181527 - DNA, 271 bp, Glycine max
gcaaattaatcaaacatggctagggttagtgctttgtttcactctttgctcttgatttcttcccttgtattggcttctcaaatccatgtttcctctgggaaactagtccctggactatcatggaattactatttgttgacatgtcgcaagcttgagaggattataaggaagcatcttgaggatgtcttcgagaaggacagtggagtagctcctggcatacttcgactcttcttccatgactgctttcctaatggatgcgatgcgtctatat

SEQ ID NO: 181528 - DNA, 269 bp, Glycine max
gtaatcaatgattgctctgagcatgatgtcgaaggcgtagacgattagccaaactttgacgtcgaagatcgcaaacctgagaatcttcatgcacccaatcttgggatcgacagaatgatcgcaagactcccttctttcccaatcaagggagaggctgttacaaatttggatttcattcggaagaggaagatctctggtgacttcaacatgataatggatcagaaaattctcacatgcgaacaactgcgtgcccttacagtgaaattcac

SEQ ID NO: 181529 - DNA, 267 bp, Glycine max
cttgtgcatcaaaggaattgttttcttctgcttttggcagggaatgttgctggaccttttagcggcaattggtgtcattcaatctcgtcatttgcggttagatgtggagcacattgaggaagcaatgcagaatattttggtatgtctagagatggttatcttttctgttcttcaacagtatgcttatcatcctgcaccatatagtggagaagttgagaaaatgcttaaacaaaacaagaaaaatgaatgatatgataaggtcaaaag

SEQ ID NO: 181530 - DNA, 267 bp, Glycine max
cgctgctgccgaaacccttccggaaccctaaggtaagtgagtaatcagtggttgagaatggtggacaaggcgaagggtagaaaggaggaggtggttacacgtgagtacaccattaacctccacaagcgcctccatggctgcacatttaagaagaaagctcctaaagctattaaggagataaggaaatttgcccaaaaggccatggggaccaatgatgtgagggtggatgtgaagttgaacaagtttgtctggagccagggaatcagg

SEQ ID NO: 181531 - DNA, 267 bp, Glycine max
cgcagaactttgtttcccaatttccattgcctccgcttccacctcgcaaccatgatcatcccggagaagaaccgcaaggagatctgcaaatacctcttccaagagggagtttgcttcgcgaagaaggacttcaatttggccaagcaccctgagatcgacgtgccgaatctgcaggtgattaagctgatgcagagtttcaagtctcgcgagtacgtgagagaaacttttgcttggatgcactattactggttcctcaccaacgatggc

SEQ ID NO: 181532 - DNA, 269 bp, Glycine max
cctctcattccgtggagatctagtgcttctgctgcaagacctcgctgcaaattagggtttcgattcggaggtagacgaagatgttcggaagggctccgaagaaaagcgacagcaccaggtactacgaaatcctcggcgtttccaagaacgcttcgccggatgacttaaagaaggcttacaagaaagccgccattaagaaccatcctgacaaaggcggggatcccgagaagtttaaagagcttgctcaagcctatgaggttctgagtgac

SEQ ID NO: 181533 - DNA, 267 bp, Glycine max
gctgcaactctctaccttccctctttttccgaatctgaatagaaatggcttcggagactgagacgttcgcttttcaggccgagatcaaccagctcctcagtctaataatcaacaccttctacagcaacaaggagacatttcttcgtgagctcatcagcaatgcctctgacgctttggaccagattcgatttgagagtcttacagacaagagcaagcttgatgctcagccagagttgttcattcacattattcctgacaagaccaaca

SEQ ID NO: 181534 - DNA, 265 bp, Glycine max
gcgggttttggatttggacttggtcgtcaacacagtctaattaatatctttttgctccttcgcttatgaatcttcttcttcttcttcttgttcctgcaacgcactgaattcgatcaatcaatccatcttcaattgctttgtctcgatcggaggaaaatggccgatcagttatcgaagggagatgaattcgagaaaaaggctgataagaagctcagcggttggggcttgtttggctccaagtatgaagatgccgccgatctcttcg

SEQ ID NO: 181535 - DNA, 266 bp, Glycine max
gagaggacgcggtggttcggcggggaacaagttccggatgtcgctgggtctgccggtggcggcgacggtgaactgcgccgacaatacgggggcgaagaacctctacatcatatcggtgaaagggatcaaagggcgtttgaaccgtctcccctcggcttgcgttggcgacatggtgatggccaccgtgaagaaggggaaacccgatctgaggaagtaggttttgccagctgtcattgttcgccagcgcaaccatggcgccgaaagga

SEQ ID NO: 181536 - DNA, 274 bp, Glycine max
caatatagcccaagccctatacaaccaaaccctaacacacacccatttgattcagtttccatggctagcctcaaggttgcatttttggctgcagtgctctgcatggttgtggtgagtgcacccatggcacatgcagctatcacgtgcgggcaggtgacgaatagcctgatcaattgcatcggttacctccagaacggaggaacgccgccgtcgggatgctgcaacggagtgaagagcctcaatgccgtcgacaagaccaccgccgaccgccaga

SEQ ID NO: 181537 - DNA, 256 bp, Glycine max
gttctcacaaccgagctgtgccgattcagcggtgccaagatctacccagggaaaggcatcagatttgttcgtggtgattctcaggttttcctgtttgctaactcaaaatgtaagacgtatttccacaacaggttgaagccgtcaaagctcacgtggactgcaatgtaccgaaagcagcataagaaggatattgctcaagaagctgtgaagaagagaagacgtgctaccaaaaaaccttactctaggtctattgttg

SEQ ID NO: 181538 - DNA, 254 bp, Glycine max
ggcgcaagtcaggaacaagcaagtgcttctaaaggactatgttaccggttttcccaaagaatccgacatgaatattgtcgaaagtaccataacattgaagcttccacaaggttccaatgatgtcttgctcaaaaatttgtacttgtcttgtgatccgtatatgaggaatctcatgaacaagcccgaaggccctcccaatagtcgtgcttacactcctggctctccattaataggatatggtgtgtctaaagtcc

SEQ ID NO: 181539 - DNA, 255 bp, Glycine max
actcgagccgaatcggctcgagtagaaacagtgtgatgaaaatgacggtccttgttttcttacgttgctacaattttggtagcatggcaatgccatgcgtacgatatgttccctctccgaatgaacactggctatggtgcccgtactccggaggtgaaatgcgcaagttggaggcttgctgtggaagcacacaacatctttggctttgagaccattcctgaagagtgcgttgaagcaacaaaggaatacatccat

SEQ ID NO: 181540 - DNA, 253 bp, Glycine max
gaaaacagtatgtgttttgacgttgggatggctgctatttgattcagagctaactttcaagaatatcatgggaatgattatcgcagttgttggcatggtaatttacagttgggctgtagagcttgaaaagcagtcaaatgcaaagaccttacctcacgtgaaaaacagcatgacggaagaagaaattagattattgaaggttggagtagaaaacagtcctctgaaggatgttgaacttggtgaggcccaagga

SEQ ID NO: 181541 - DNA, 252 bp, Glycine max
gtggtctccactgactttatcggcgatagagatcaagtatttttgatgcaaaggctggaattgcattgaataagaactttgtgaagcttgtttcttggtacgacaacgagtggggatacagctcacgtgtcattgatcttcttgtattcgttgccaagaagtctctttaaggtgttacttcaaagtagcttgtcttcacattattaccgtatgtttatgtttagctgcgatttagtgtcttgctcgagcaaa

SEQ ID NO: 181542 - DNA, 253 bp, Glycine max
cagaaaatcctcacccattttcttcgtagccaaacactctgaaattctcagttatgtcgtggcaagcgtatgtggatgatcacctactgtgtgaaatcgaaggtaaccacctcactcacgccgctatcatcggccaagacggaagcgtttgggctcagagcaccaacttccctcagttcaaacctgaggtcataactgccatcaataatgactttaatgagcctggatcacttgctccaactggattgtatat

SEQ ID NO: 181543 - DNA, 253 bp, Glycine max
cttgcggctgcagcagagaagcactcatcattcttcgtttgtctacgatccgccttctctgaattgtaaaaatgtcgctcggagaaactgcttgttcatacgcagctctcatccttcatgaagatggaatcagtgtaactgccgacaagatcagcaccttgttggaaactgcaaaggttcaagtagatacctattggccaaccttatttgctaaacttgctgagaagaaaaatcttggcgatttgatagccaa

SEQ ID NO: 181544 - DNA, 252 bp, Glycine max
caagttccaggtttcagcgagcattctacaatggctactataccagttaatcccaagcctttcttgaacaatttgactgggaagcctgtaattgtgaaactgaagtggggaatggagtacaagggctatctcgtttccgttgattcctatatgaacttgcagctggccaacaccgaggagtacattgagggacaatttactggaaatttgggagagattttaatcagatgtaacaatgttctctaccttcga

SEQ ID NO: 181545 - DNA, 257 bp, Glycine max
gaaagaactgacctcagcggcggcggcggcggcaacagaagaacaaccaccaccacacacaatgggtcgcgtgagaacaaaaacggtgaagaaatcctcccgccaggtgattgagcgttactactcgcgcatgaccctcgacttccacacaaacaaaaagcttctcgaagaagtggccatcatcccttccaagaggctgcggaacaagatcgcgggtttctccacgcatctcatgaagcgcatccagaagggtcccg

SEQ ID NO: 181546 - DNA, 256 bp, Glycine max
cggtgtccaacgctgaaccttccggtagcgatcctcagaagtctctggagttggcgaacgagctgatggaaaaaggaaacaaggcaattaaggagaacgattttggagaagcagctgataacttcagccgtgctctcgaaatcagagtggcacattatggtgaacttgctcctgagtgtgtgcacacatattacaaatatgggtgtgcacttttatacaaggctcaggaggaagctgatcctttagctgatgtgcc

SEQ ID NO: 181547 - DNA, 257 bp, Glycine max
cctcgagccgattcggctcgagcgaagaagccctaactacgcacgacattcgtgagacaactgaatattcgtcgctcatggcactctcttctcgtctcttttccaaatccaaattgatctatggcagtcaaatacttctacaaaaggagcatgctattccagttcgtcactttgctaaagagtctgcccctcctgcccttaagggagacgagatgctgaagaacatttttgtggaggtgaagaacaaatttgagacc

SEQ ID NO: 181548 - DNA, 255 bp, Glycine max
cgaattcccaatctaaaaccctaataccttcaaagaacgaagtagtggatcagtgatggcacctaaggcagagaagaagccagcggagaagaagcccgcggaggagaagaagtcgacggtgggagacaaggctccggcggagaagaagccgaaggccggaaagaagcttccgaaggagggaggagccggcggagaaggggggaagaagaaaaagaggaacaagaagagcgtggagacgtacaagatatacatatt

SEQ ID NO: 181549 - DNA, 245 bp, Glycine max
gcagaaaagattaggagatggcgaacgcttgattccctgcttcaatcgcattctcatcgagaaaatcgtccctccctccaaaaccagcgccggcattctactcccggagaagacctcccagcttaattccggtaaggtgatagcggttggacctggatcacgtgacaaggcggggaacttgattccggtgtctgtgaaggaaggtgatcacgtgctcttgccggagtacggtggcacgcagatca

SEQ ID NO: 181550 - DNA, 253 bp, Glycine max
ccaagttcaaagatgaagatgatccacgttcttttcctctttgctcttgtctcgttcacttcccatgcttctgtcaatgatttctgtgtagcagacctaaaaggtccagatagcccttcaggctatcagtgcaagccacctaacacagtcacagtggatgactttgtgttctctggctttgtagctggaaacaccacaaacactttcaatgctgcattaacctccgcatttgttactgattttccaggtgtga

SEQ ID NO: 181551 - DNA, 252 bp, Glycine max
ctcgagccgcactcattaattgcaagaatggcacttcgttgcttggtgatgtccctttctgctctcttcactcttggtcttgcgagagaaagccatgccagagacgaagatttttggcatgctgtttggccaaacactcccattccaagttcattgcgagatcttctaaagcctggccctgcaagtgttgaaatcgatgatcaccctatgcaaattgaagaaacacagtacccgaaaaccttcttctataaa

SEQ ID NO: 181552 - DNA, 253 bp, Glycine max
cttcaatttctgcaaaatggatccgtctgcggcattgctgtttaaccacctcaaaggtgcagacccgttcttcctgctagcgggtcctaatgtgattgaatcagaggagcacattctgcggatggctaagaacatcaagactattgcatctgaagttggaataccgttggttttcaagtcaagctttgacaaagctaaccgaacatcatcaaaatcatttcgtggcccggggatggttgagggattgaagata

SEQ ID NO: 181553 - DNA, 249 bp, Glycine max
gtgatttcagtgagtgatcggtgttcacttgatctcatcataatcgtcagcgtcaattgaagaagatgccgatcagaaacatcgccgtcggaaggcctgaagaggcgactcaccccgacacgttgaaggcggctttggctgagttcatctcaaccttcatcttcgtgttcgccggctcaggctccggcatcgcctacaacaagctcaccgacaacggcgctgccacccctgccggcctcatctccgcct

SEQ ID NO: 181554 - DNA, 250 bp, Glycine max
gttccaagttgaagatgattcactttcttttcctctttgctcttgtctcgttcacttcccatgcttctgtcaatgatttctgtgtagcagacctaaaaggtccagatagcccttcaggctatcagtgcaagccacctaacacagtcacagtggatgactttgtgttctctggctttgtagctggaaacaccacaaacactttcaatgctgcattaacctccgcatttgttactgattttccaggtgtgaa

SEQ ID NO: 181555 - DNA, 251 bp, Glycine max
cttcgagaagcttgctcaggaatcttccagacttgcccgctacaacaagaagcccaccatcacttcaagggagatccagaccgcggtcaggcttgtgctgcccggtgaactggccaagcacgccgtttctgagggtaccaaggccgtcaccaagttcaccagctcttgaacaaaatatcttaactttgtttacctcgctcttgttttgcttcatgtgtatctgttagatctagcgaccctatgtttaggtt

SEQ ID NO: 181556 - DNA, 251 bp, Glycine max
caaaaaacacacacgacacactcccatacacacacgttgtctcgcacacattccttcattccgcagcagcaaacatctttaccttaaacgacaacaatggccgatgccgaggatattcaacccctcgtttgcgataatggaaccggaatggtcaaggctggttttgccggagatgatgcgccgagggcggtgttccccagcattgtggggcgtccacgtcacacgggagtgatggttgggatggggcagaa

SEQ ID NO: 181557 - DNA, 251 bp, Glycine max
gttccagcacaggaagacttccccataatgccattattgagcactgcattcgagctcaggccaaccaatttcttcgagaggaatccggttcttaaaacactttctcccccggatgtccaatggcctggttgccccaagtaaaactagctagccagccatttccattatattagtgtgcttcgagtgctacaactagatgtgttccttggataatgtgaaatgcgatctgcttattgcatgtgcaagaataa

SEQ ID NO: 181558 - DNA, 248 bp, Glycine max
agttcgacgagtcggacaagggagagaagaagcagatgctgaaattcttcaactggttcgtgttcttcataagcttggggacactaactgcagtgacggttctcgtgtacattcaggatcatatagggaggtactggggctacgggataagtgtgtgtgctatgctggtggctcttctggtgttgttgtcgggcaccaggaggtaccgctacaagagactggtgggaagtcccttggcgcagatcgcg

SEQ ID NO: 181559 - DNA, 250 bp, Glycine max
ctttgtttttcttttaaatttttctttaaatttctcaattgatcaaagatcttcagcaaaccggtcaagtttgtgtagtttggccagatgggaggtgggtttagagtgctacacttagttagaccttttctctcgttcctacctgaagttcagactgctgataggaaagtgccatttagagagaaggtcatatatactgtgatctctctgttcattttccttgtttgcagtcagcttcctctgtatggaa

SEQ ID NO: 181560 - DNA, 251 bp, Glycine max
gtcgtttcaatctcaaacgccatggcgttttggagatccctcgcgttctctgcgatccttctctcgctcttcatccatggcgctctctgcttctacctccccggcgtcgctccacaggacttccagaagggagatccactgcaagtaaaagtaaacaaattgacttcaacgaagacccagcttccttatacatattattctcttccttattgtccaccaaataaaatagtggatagtgctgaaaatcttgg

SEQ ID NO: 181561 - DNA, 263 bp, Glycine max
caagaatgtccataattcacaccttcacttattgcttcatgacaatgtcatccctttatgctgttgtcttcatcctctatggcattgtacctcaagtgtgcctcctcaaaggaatcactgtgtttccaaaggccacggacccttggtttgcagtgtttgcatttgtgtatgtatctactcaaattcaacatttgattgaggttctatctggggatggctctgtggctatgtggtgggatgaacaaagaatttggattctgaag

SEQ ID NO: 181562 - DNA, 250 bp, Glycine max
ggaattaaccccgatgggaccatgcctagtgacacctctgttggcattgcacacgatgctttcaacaccttcttcagcgagaccggattcggcaagcatgtgccaagggctttatttgttgatttggaacctagtgttattgatgaagtaagaactggtccttacagacaactctttcaccctgagcaattaatttctggcaaagaagatgctgctaataactttgcaaggggacactacactgttggaa

SEQ ID NO: 181563 - DNA, 251 bp, Glycine max
ctcgaatttcgatactttgatcagatccacaacactccttcacgcatgacgcttggctcttcaggatccagtgtcgtggttccaaggaacttcagattgctggaggagcttgagaagggagaaaaaggaatcggagatggaacagttagctatggaatggatgatggtgacgacatttacatgcgctcttggactggaaccattattggcccctataatactgtacatgaaggaagaatttatcaattgaa

SEQ ID NO: 181564 - DNA, 251 bp, Glycine max
gaagaagcccatacttgtgggagatagatggcacgcttgtcactgctcattttcgcgttctgcgccgtcgccgtcgccgtcgccgtcgcgggctcctccttcgatgatgccaaccctatccgtttagcgtcggacttggagtcgcaggtgctggacgtgatcggacagagccgccacgctctctccttcgcccgcttcgctcgccgccacggcaagcgctaccgttccgtcgacgagatccgcaaccgctt

SEQ ID NO: 181565 - DNA, 253 bp, Glycine max
gcaacctagcagcctccaaatccaatggcttcagagaagaaactttcgaacccaatgagggagataaaagtgcagaagctcgtcctcaatatctctgttggcgagagtggagatcgtctcaccagagccgccaaggtgttggaacaacttagtggccaaaccccagtgttttccaaagcaaggtacactgttcgttcctttgggattagaagaaatgagaagattgcatgctatgtcactgtcagaggtgaca

SEQ ID NO: 181566 - DNA, 151 bp, Glycine max
gtttccgagataaccagttttctctttgattcatcaatggcaactgcgaggaccgtgaaggatgtttcgcctcacgatttcgtgaaggcttatgcttcccacctcaagcgttccggcaagatggagcttcctgagtggaccgatattgtaa

SEQ ID NO: 181567 - DNA, 251 bp, Glycine max
ggctaaccaaccctgacactccttcttctccgcttcctcttcgatcatcgcttcagaatgccgccgaagttcgacccctcccagatcgtcgacgtcttcgtacgcgtcaccggcggtgaggtcggcgcggcgagttccctcgccccgaagatcggtcccctcggtctctcccccaagaagatcggagaagatatcgccaaggaaaccgccaaggactggaagggcctccgcgtcaccgtcaagctcaccgt

SEQ ID NO: 181568 - DNA, 251 bp, Glycine max
cactcttctaacatggcgactcacatcctctctcgcatctcccccaaaaccctaccccccttcctctcccgttctctctccaccgccccctctcctccctccctctccgcgctctccttcctccgccgcatctccgttgccgccaacccctccctccaccgcgccctcctccccaactctccctccctccgcgccctctccacacgcgccactacctcctccctcaacgaccccacccctaactggtccaa

SEQ ID NO: 181569 - DNA, 249 bp, Glycine max
cagataactagaaacagtgtgatgaaaatgaaggtccttgttttcttcgttgctacaattttcgtagcatggcaatgccatgcgtacgatatgttccctctccgaatgaacactggctatggtgcccgtactccggaggtgaaatgcgcaagttggaggcttgctgtggaagcacagcacatctttggctttgagaccattcctgcagagtgcgttgaagcaacaaaggaatacatccatggcgaacaa

SEQ ID NO: 181570 - DNA, 247 bp, Glycine max
gttcttcttcttttgttgttctgtgtttgtgtttgttttttctctcacctgaaaatgtcttgctgcggtggtaactgtggttgcggaagctcctgcaagtgcggcaacggctgcggaggctgcaagatgtacccagacttgagctacactgagtcaaccaccaccgagaccttggtcatgggagtggcacctgttaaggctcaatttgagggtgctgaaatgggtgtgcccgctgagaacgatggct

SEQ ID NO: 181571 - DNA, 251 bp, Glycine max
gaactcgcagcaccaccaccagcaccaccaccagcaccgttctattcttcttccacaatgggtatctctcgtgattccatgcacaagaggcgcgccaccggcggcaagaagaaggcttggaggaagaagagaaagtatgagcttgggaggcagccagcaaacacaaagctatcaagcaacaagacggtgaggaggattagggttcgcggccgaaacgtgaagtggcgtgctttgaggcttgataccgggaa

SEQ ID NO: 181572 - DNA, 248 bp, Glycine max
cttggaaccgttcttcgtgttctccattccctctctcactccttcatctacttcacatattatatcatcacatatcatagtgatatcatatcacaatgtgtggcatacttgctgtgcttggttgctctgattcatctcaagccaaaagggtccgcgtccttgagctttctcgcagattgaagcaccgtggtcctgactggagtgggctccatcaatatggtgataactatttggctcatcaacggtta

SEQ ID NO: 181573 - DNA, 247 bp, Glycine max
cttctttcctcacttcaaacttgacaaaaatggcaacagaattggcatcatctcccaattgggttccaagcgcaccacatgtttggcagcctttgccgccctccttctcctcttcctccgcggtctccgccgccgccgatacaacctccccccaggcccaaagccctggcccatcataggcaacctaaacttaattgggtcccttccacatcggtcgatccacacgcttagcaaaatctacgggccc

SEQ ID NO: 181574 - DNA, 247 bp, Glycine max
cgagtttgttgtgagctataagctagtttatcgtgaggagaatatgaagttgtttgttttctttgttgctgcagtagttttggtagcatggccatgccatggcgcaggctaccaaaggttccctctccgaatgaaaactggctatggtgagcgttcttcggaggtaaaatgcgcaagttttaggcttgctgtggaagcacacaacatccgagcctttaaaaccattcctgaagagtgcgttgaacca

SEQ ID NO: 181575 - DNA, 247 bp, Glycine max
ggaccattattaaggcctcagtttgttatgttcggttcttccattgttcagtatggtctttatgatgaaggttggatggctgatctttctcacttgtatgctcgcaaggttgatatagttttgcgaggatatgctggttggaattcaaggcgtgctctgcaggttctggataaaatctttcctaaggatgcccctgtacaaccttcattggtcattgcctactttggtggtaatgattcttctactc

SEQ ID NO: 181576 - DNA, 249 bp, Glycine max
ggcggagttgttggaaaaggccaaaaactatgttgcggagaaagtcaccaacatgcccaagccagatgcgagtgtcaccgacgtggacttcaagcgcgtgagccgcgacaggttcgagtacttggccaaggtctccgttcagaacccttattccacttccattcccatttgtgagatcaagtactccctcaaaagtgctggcagggagatagcagcaggaacaatacctgacccagggtcattgaaggc

SEQ ID NO: 181577 - DNA, 244 bp, Glycine max
ccaaaatgtgcccttccgcctcccatttccgaccggcattccacgccctcgacgccgcccacgacggcaaaatcagccacgacgacctccgcgccttctacgccggagtcggcggagaaggagacgacgtgatcggggcaatgatgacgctggccgacaccaacaaggacgggttcgtggagtacgaggagttcgagcgcgtggtcgcggcggagagaaaacccgtcgcgtgtggggccatgga

SEQ ID NO: 181578 - DNA, 246 bp, Glycine max
attagggttttcgctgaccggtgcgcagtcgagcctccagaagacgaatcgaaaatgccgtcgcacaagacattcagaatcaagaagaagttggcgaagtagatgaggcagaacaggcccattccctactggatccgcatgaggaccgataacaccatcaggtacaacgcgaagcccgtcactggcgtcgcaccaagcttggattctgaggtgtatgctctgcctaggttcaatttatccaattaa

SEQ ID NO: 181579 - DNA, 246 bp, Glycine max
ctctgttctctgtcactgctgcgtctctcgtaaccatgcctaagccaatccacgagattaaggatttccttctcactgctagaaggaaggacgcaaggtcggtgaagatcaagaggagcagagatgtggttaagttcaaggtcagatgctcgaagtacctctacacactttgtgtgtttgacccagagaaagctgataaattgaagcaatctcttcctccaggtttgagtgttcaagacctgtaaa

SEQ ID NO: 181580 - DNA, 248 bp, Glycine max
ccgaaacccttcccgatccctaaggtaagtgagtaatcggtggttgagaatggtggccaaggcgaagggtaggaaggaggaggtggttaccagagagtacaccattaacctccacaagcgcctccatggctgcacatttaagaagaaagctcctaaagctattaaggagataaggaaatttgcccaaaaggccatggggaccaatgatgtgagggtggatgtgaagttgaacaagtttgtctggagcc

SEQ ID NO: 181581 - DNA, 250 bp, Glycine max
acacagaaaagttagggttcacaacttttccttttccttttgcttgcgaatctgaatcaaataatcaatcatccattcattattcatcatgtcgtcaccgaagaaaatcacgctgaagagttcggacggcgaggctttcgaggtggaggaggcggtggcgctggagtcgcagacgataaagcacatgatcgaggacgactgcgccgacagcggcatccctctgccgaacgtgacgagcaagatcctggcg

SEQ ID NO: 181582 - DNA, 252 bp, Glycine max
ccctaattcgctcgcagtcacccaagaggcgaatccttaccattgctcgagatgggtgaagaagtgaaggccgtggttccagagtctgttttgaagaagcagaagagagacgaggaatgggcgttggccaagaagcaagacctcgaggctgcgaagaagaagagagccgagagccgcaaactcatctacaacagagctaagcagtacgctaaggagtacgatcaccaggagaaggaattgattcggttgaaa

SEQ ID NO: 181583 - DNA, 249 bp, Glycine max
cgaccctggaggcttcagtttactgttgattttcgtgttatgcttctaccaatgccataagcttgaagcaggaactaaatatggctgacttgttggaatggtcaaagcaagataagaaacgaatgcttcatgtcgtctaccgtgttggtgaccttgatcgcaccatcaaattttacacagaatgtttaggaatgaagcttttgaggcaaagagatatcccagaggagaaatatgctaatgcttttcttg

SEQ ID NO: 181584 - DNA, 248 bp, Glycine max
ctcctggtgacaatgtgggattcaatgttaagaatgttgctgttaaggatttgaagcgtggttatgttgcctcaaactcaaaggatgaccctgcaaaggaggctgctaacttcacagcccaagtcatcatcatgaaccaccctggtcagattggaaatggctatgcccctgtcctcgactgccacacttctcacattgctgtcaagtttgctgaactcatgaccaagattgacaggcgatccggcaaa

SEQ ID NO: 181585 - DNA, 247 bp, Glycine max
caaagtcttccatagccccccaaaaatgaagagcaccatcttctttgctctctttctcttttgtgccttcaccacctcatacctaccttcagccatcgctgatttcgtgctcgataatgaaggtaaccctcttgaaaatggtggcacatattatatcttgtcagacataacagcatttggtggaataagagcagccccaacgggaaatgaaagatgccctctcactgtggtgcaatctcgcaatgag

SEQ ID NO: 181586 - DNA, 248 bp, Glycine max
cgaaactgcaaagaattggcagcacagcccgatgttgatggatttttggttggtggtgcatccctcaaggcggaatttgtggacatcataaacgctgctactgtgaagaagaattgaaattcgtagttaggaactgataatgctgcctttcaagctgcttcggaaattgctgtttttgagttttggttctgtgctttgtggccaatgtattgaactctgtttagtacctgaataaacatgctttcctt

SEQ ID NO: 181587 - DNA, 247 bp, Glycine max
cgtggctcagtgcttaggtgctatctgtggagttggtttggttaaggctttccaaaagtcttacttcaacaagtatggtggtggggctaattccctcgctgctgggtacagcacaggtactggattgggtgctgagattattggaacctttgttttggtctacactgtcttctctgccactgaccccaagaggaatgccagagattcccatgtgccggttttggctccacttcccattggatttgct

SEQ ID NO: 181588 - DNA, 250 bp, Glycine max
ctctatcgagtaaattaactatgaagcctaccctactattatccctttccttcctgcctctctttgctttcctggctctttcagaagatgttgaacaagttgtggacataagtggcaaccccattttcccaggtggcacatattacattatgccatcaacttggggcgctgccggtggtggattgaaactaggccggacaggaaactcaaactgcccagttactgttttgcaagattactcagaaatctt

SEQ ID NO: 181589 - DNA, 247 bp, Glycine max
gttgatcgagataactagaaacagtgtgatgaaaatgaaggtccttgttttcttcgttgctacaattttggtagcatggcaatgccatgcgtacgatatgttccctctccgaatgaacactggctatggtgcccgtactccggaggtgaaatgcgcaagttggaggcttgctgtggaagcacacaacatcttcggctttgagaccattcctgaagagtgcgttgaagcaacaaaggaatacatccat

SEQ ID NO: 181590 - DNA, 247 bp, Glycine max
gaaagcagcttgaagatggacgtacgctggcagactacaacattcaaaaggagtctacccttcaccttgtccttcgtctgaggggaggtatgcagatctttgtgaagactttgacagggaaaactatcaccttggaggttgaaagttcagacacaattgataatgtcaaggcaaaaatacaggacaaggaaggtatccccccagaccaacagaggttgatctttgctgggaagcaactggaggatgg

SEQ ID NO: 181591 - DNA, 247 bp, Glycine max
tccaagttcaaagatgaagatgatccacgttcttttcctctttgctcttgtctcgttcacttcccatgcttctgtcaatgatttctgtgtagcagacctaaaaggtccagatagcccttcaggctatcagtgcaagccacctaacacagtcacagtggatgactttgtgttctctggctttgtagctggaaacaccacaaacactttcaatgctgcattaacctccgcatttgttactgattttcca

SEQ ID NO: 181592 - DNA, 286 bp, Glycine max
cgctcgaggcaaggtgtactagtttcagagatcgcatatacaatcaaaccaacattgatagaacatttgcattggccaggcagaggaggtgtcctaggactaatggcacaggtgacaacaatctagcaaatctagacttcagaactccaatcattttgacaacaactacttcaaaaaccttctcatcaaaaggggactcctgaattctgatcaagtgcttttcaatggtggatcactgattcactggtaagaacttacagccagaataacaaggcatttgatactg

SEQ ID NO: 181593 - DNA, 277 bp, Glycine max
cactcattaattgcaagaatggcacttcgttgcttggtgatgtccctttctgttctcttcactcttggtcttgcgagagaaagccatgccagagacgaagatttttggcatgctgtttggccaaacactcccattccaagttcatgcgagatcttctaaagcctggccctgcaagtgttgaaatcgatgatcaccctatgcaaattgaagaaacacagtacccgaaaaccttcttctataaagaagaccttcatccaggcaaaacaatgaaagtaca

SEQ ID NO: 181594 - DNA, 280 bp, Glycine max
gcggaatctgctagaattttctaataatggcgaaagacgttgagcaggtcacagagcaaggtgaatactccgcgaaggactaccatgaccctcctccggcaccgttgatcgacccagatgagctcacaaagtggtccttgtacaagccgccatagctgagttcatagcaacactcctttttctttacatcaccgtgttgaccattattggctacaagagacagagtgacaccaaaatccccggtaacaccgaatgtgacggcgttggcattttgggcatc

SEQ ID NO: 181595 - DNA, 277 bp, Glycine max
cgcaaaaatggcacctgcaacactgtctctgtctctcctcctcctgttctcactcagcatcgccgtaaccgttagatcgagcgactacgactacgattgtgtgtacactgcatacgttagaaccggttcggtgttgaagggcgaacggactctaagatcgggctgaagctgtacgacaagtacggctactacatctacattaaaaacctcgaagcatggggcggcttgatgggcaagggctacgactacttcgagcgcggcaacctcgacatcttca

SEQ ID NO: 181596 - DNA, 269 bp, Glycine max
cggggtatcatcttccaggtgagacagaggaagaattttcaaccagattagccaataatttggagcagttgattctgaaagagggaccagagactattgctgcatttattgctgaacctgtaatgggggcaggaggtgaatacctccaccatcaacttattttgagaaggtccaagccgttgtcaagaagtatgacattctttttattgcagatgaggtaatatgtgcctttggaaggcttgggacaatgtttggatgtgacaagtaca

SEQ ID NO: 181597 - DNA, 269 bp, Glycine max
cgtgttcggattgcggcgacgtgagccgttcgctgcccgcgacgtcgtgagaagtccactgaaccttatcatttagaggaagaagcgaagttacgtagccagcgagaagatttcagtgacatggttgcagagaacgagagaagaggaaaagaaagatgcaagacaaagagggcaagtcaaagaagagagacttcaagttttaggctgcgcctagttcgtttcttttgctggaagatgggcggctgctaccctttttctactggggaagt

SEQ ID NO: 181598 - DNA, 272 bp, Glycine max
gataagaagcagttgatcgatgacgtcaggcaggctctgaatgcttccaagattagcagttatgctcaggggatgaatttgttgagggctaagagtaatgagaaaggatggaacttgaatttgggggagttagctaggattggaagggagggtgcatcataagggccgtgttcttggaccggatcaagaaggcttatcagaggaaccctaatttggcgagtttgattgtggacccggagtatgcaaggcgaatagtccagagacacgctgcg

SEQ ID NO: 181599 - DNA, 277 bp, Glycine max
ctttgttgtgagctataagctagtttatcgtgaggcgaatatgaagttgtttgtcttctttgttgctgcagtagtcttggtagcatggccatgccatggcgcaggctaccaaaggttccctctccgaatgaaaactggctaggtgagcgttcttcggaggtacaatgcgcaagtcttaggcttgctgtggaagcacacaacatccgagcctttaaaaccattcctgaagagtgcgttgaaccaacaaaggactacattaatggcgaacaatttagat

SEQ ID NO: 181600 - DNA, 275 bp, Glycine max
cgctccgaattagggttttccaattcgcagagcaactcaacacaacgaaccaaaccaacaatgtcgcagccgcagcctcagtcgcagccgcaacacgggcaagcggcgctggagcaggtgcagtgcttcggtcgcaagaagcggcggtggccgtgacctactgcaagcgcgggcgcggcctcatcaagatcaacggctgccccatcgagctcgtcgagccggagatcctccgctttaaggccttcgagcccatcctcctgttgggaaagagccgc

SEQ ID NO: 181601 - DNA, 272 bp, Glycine max
ccaagaaaaaagcgatcatagtttcacttcggccttatccagtttagggtttcggttctctaccctatctttcacgtatcgaaaccttaaatttacgatcaggtctgagcaatctggttggtagaacctttggtcttatgagtcaagttttatgtctgaattagacgatcaaattcctactgccttcgatccttttgctgatgcaaatgctgatgactcgggtgctgggtcaaaggagtatgtgcatattcgtgtacagcagcgaaatggta

SEQ ID NO: 181602 - DNA, 273 bp, Glycine max
cgtggtttcagtgagtgatcggtgttcacttgatccttcataagtcgtcatcatcatcatcatcatcaccgttgattgaagaagatgccgatcagaaacatcgccatcggaaggcctgaagaggctactcaccccgacagttgaaggcggggttggctgagttcatctccaccttgatcttcgtgttcgccggttcaggttccggcatcgcctacaacaagctcaccgacaacggcgccgccactcccgacggcctcatctccgcttccatcg

SEQ ID NO: 181603 - DNA, 270 bp, Glycine max
cagaaaaaagatgagcgacggaggaaaacgacaaggtggaagagcgttgccgccgccgccaagaggccctccgcctcctcccccctctcgccctcgcctcgaacccgtcgatcgcgaaaagacatgtccgttactgtgcgagtgttcactaagattgggagtcaccattccatggaagactttgccgtcagaggcaaagagcccaaagacgaggttcagatttacacctggaaggacgctactctccgagaactcaccgatcttgtcaaa

SEQ ID NO: 181604 - DNA, 268 bp, Glycine max
cgagtttgttgtgagctataagctagtttatcgtgaggagaatatgaagttgtttgttttctttgttgctgcagtagttttggtagcatggccatgccatggcgcaggctaccaaaggttccctctccgaatgacactggctatggtgagcgttcttcggaggtaaaatgcgcaagttttaggcttgctgtggaagcacacaacatccgagcctttaaaaccattcctgaagagtgcgttgaaccaacaaaggactacattaatggcg

SEQ ID NO: 181605 - DNA, 269 bp, Glycine max
gttcggtggagggagggagccgtagcagcggaagctctagcttgggtagcgaatcacaatggcgagaggattaaagaagcatctgaagaggcttaatgccccaaagcattggatgcttgacaaactgggtggtgcattgctcctaagccctcatctggaccacacaaatcgagggactgcctgccactcatactcattttgcgaaaccggctgaagtatgctctaacataccgtgaagtcattgctattctgatgcagcgacatgtcct

SEQ ID NO: 181606 - DNA, 271 bp, Glycine max
caagttcaaagatgaagatgatccacgttcttttcctctttgctcttgtctcgttcacttcccatgcttctgtcaatgatttctgtgtagcagacctaaaaggtccagatagaccttcaggctatcagtgctagccactaacactgtcacagtggatgactttgtgttctctggctttgtagctggaaacaccacaaacactttcaatgctgcattaacctccgcatttgtcactgattttctaggtgtgaatggtcttggtgtatctgtg

SEQ ID NO: 181607 - DNA, 276 bp, Glycine max
cgagataactagaaacagtgtgatgaaaatgaaggtccttgttttcttcgttgctacaattttggtagcatggcaatgccatgcgtacgatatgttccctctccgaatgaacactggctatggtgcccgtactccggaggtgaatgcgcaagttggaggcttgctgtggaagcacacaacatctttggctttgagaccattcctgaagagtgcgttgaagcaacaaaggaatacatccatggcgaacaatatagatcagactccaaaacagttaac

SEQ ID NO: 181608 - DNA, 272 bp, Glycine max
ctttgcacaaaccctaacacctaaaagccagaagaagcgaaatcgtaatcgcaatctagcggatatgaaggtcgtcgctgcatacttgctcgcagtgttgggagggaatccatctccttctgccgatgatatcaaaaactcctcggcgcagttggagctgaggctgagcatgagttgatcgagttgctcttgaccgaagtcaagggcaaagacttcaatgagctacttgctagtggaagtgaaaagatctctgcagtggctggtggtggtgc

SEQ ID NO: 181609 - DNA, 273 bp, Glycine max
gttcgttgttgtcgttggaagccaaaaccctagcagccggcgagactggcagacgttgaggttgatgtggcggcggcggcggcggcggcggctgcagggcagccaaagaagagaacgttcaagaagttcagcttcagggggtggatctggacgcgcttctggacatgtccactgacgaactcgtgaagatgttcagtgctcgcgcacgcagaaggttccagagaggtctcaccagaaagcccatggccttgattaaaaagctccgcaaagcga

SEQ ID NO: 181610 - DNA, 270 bp, Glycine max
cgagtgtttattattcgtaatatatagtcactcaagcttctaggatttctgccagctacatgaaaatgggaagcaacttgaggtttttgagtctttgcctcttggcattgattgcatcaactcatgcccaacttcagttggtttttatgcccagagctgcccaaaagctgagaaaatcattttgaaatttgttcatgagcatatccacaatgctccatcactagcagctgcattgataagaatgcatttccatgattgtcttgtaagggg

SEQ ID NO: 181611 - DNA, 266 bp, Glycine max
ctgagtcttgtctatttgatattaacaagtagcaaagatgtttggcatcatcggaggaaacaagggtcacaagataaaggggaacttggtgattatgcgaaagaatgtgttggatatcaacagcattaccagtgccagggtgtcatcggaaccggcattaacatcattggaggagtcgtcgacaccgttactgctttggcgtcccacatctccatccagctcattagtgccaccaaggctgatggacatgggaaaggaaaagttgg

SEQ ID NO: 181612 - DNA, 270 bp, Glycine max
gcgaagtcgtaggagggtttcaaaagatggagaacatgcagagcttctggcaattgggcgatgaactccgtggacactcaaaagcatcggaggatcacaaatggttaatggttgcttcgaaattggcggaacagacagattgaagggggagcgtgtgaacaaccttgatctttcaaagggccccattgaaacaaggtcaagggataaatttgggttccaggaagagaacaaatttgattctcttaacttaagcatgttgaacctggactc

SEQ ID NO: 181613 - DNA, 265 bp, Glycine max
cttctccttctctctctctttttcgcctcattccattttcatctatcaatggctccagtagcagcagcatcttcagattcaatcaagccaagagatgtttgcatcgttggtgttgcacgtacaccaatgggtggattcttggtactctgtcatctctatctgccaccaagctaggctctatagctattgaagctgctcttaaaagggccaatgttgatccatcccttgtggaagaagtattttttgggaatgttcttagtgctaa

SEQ ID NO: 181614 - DNA, 266 bp, Glycine max
ccttaatttgccaccctaacctactgcattattattctcttccccttaatttctatctccaatccctcagcaaaacgcagcaaatgggtcggcttaatctcctacttgtgtggtcactctcattaacactgtcctttattatctacacccaatctctgctcagctcagtccaaaccactatgctaaaacatgccccaatcttgaaagcatcgttagacaggccgttaccaagaagttccaacaaacctttgtcaccgtcccagcca

SEQ ID NO: 181615 - DNA, 265 bp, Glycine max
cgacgattcgccttgctcgtcaaactgagcgctctcgtagatctgcacacctggagatggagcttatctctaaattaagacacccattcattgtggagtacaaagattcatgggtagaaaagggttgttatgctgcatcattataggttattgtgagggaggagatatggcggaagctataaagaaagctaatggtgtcctgtttcctgaggagaaactttgtaagtggctcgttcaacttcttatggctcttgactacttgcac

SEQ ID NO: 181616 - DNA, 260 bp, Glycine max
  unsure (1)..(260): unsure at all n locations
acacactctctctgggtgttgttgagttttgaaaatggtgtcgtcgcaggttgtgaatacttacccgttgtccagctacacgttcggcacgaaggagcccaagatggagaaggatacctccgtcgcggatcgtccgctcgcatgaaagtcaactatatgaaggagggaatgaggaccagtgtggaaggaattttactggtacaagagcacaatcatcctcatatacttcttctccanattggaaacacattctgcaaact

SEQ ID NO: 181617 - DNA, 268 bp, Glycine max
gtttcaccgcacgaatatcttgttgtttggagcgatccgagaaaaactctgtaaacatgttggtttaccaggacctccttacaggtgatgagcttctctctgactccttccgttacaaggaaattgagaatggaagctgtgggaagttgaggggaagtgggttgttaaaggagcagttgatgtagacattggtgcaaacccttctgctgagggtggaggagaagatgagggagttgatgatgcagctgttaaggttgttgacattgtt

SEQ ID NO: 181618 - DNA, 272 bp, Glycine max
gcagtttcttcgattctctctttctctttcttcataaaaattaaacccattcaaagaaagatagaaagagcgatcatttccaatcacaatggcagatcaactcaccgatgaacagatctcggagttcaaggaagcctcagtttgttcgataaggatggcgatggttgcatcacaacaaaggagcttgggactgttatgcgttcggtgggtcagaatccaacagaggctgagctccaagacatgatcaatgaagtagatgctgatgggaatgg

SEQ ID NO: 181619 - DNA, 272 bp, Glycine max
cattgcaagactggcacttcgttgcttggtgatgtccctttctgttctcttcactcttggtcttgcgagagaaagccatgccagagacgaagatttttggcatgctgtttggccaaacactcccattccaagttcttgcgagatcttctaaagcctggccctgcaagtgttgacatcgagcgatcaccctatgcaaattgaagaaacacagtacccgaaaaccttcttctataaagaagaccttcatccaggcaaaacaatgacagtacaat

SEQ ID NO: 181620 - DNA, 267 bp, Glycine max
ctcgaatttcgatactttgatcagatccacaacactccttcatccatgacgcttggctcttcaggatccagtgtcgtggttccaaggaacttcagattgctggaggagcttgagaagggagaaaaaggaatcggaatggaacagttagctatggaatggatgatggtgacgacatttacatgcgctcttggactggaaccattattggcccctataatactgtacatgaaggaagaatttatcaattgaagttgttttgtgataaag

SEQ ID NO: 181621 - DNA, 264 bp, Glycine max
ctcaccaaagtattcaagaattcatagtacctgaaacattgcctgaagaagtccttgctaagttgggagcacctccaaagagtgatgttccaattattactcccaatgagcttcctgaggctgatggctttttgttggttttcccacaagatttggatctatggccgctcaatttaaagcattttttgatgcaactggaggcctttggcgtacacaggcactagcaggaaaggccgcaggttcttctatagcactagttctcaa

SEQ ID NO: 181622 - DNA, 264 bp, Glycine max
ctccttttagcaagttaacaacacttttgtcttcgttccattatctagttctcaattctcttcaccctttgcctctgaaagaaatgggtagtcttgaagcggaaagaacaacagtaggattggcagcaagaacccttcagggattctctccccatacacctacaatctaagaaacacaggccctgatgatgtttacattaaagttcactactgtggaatttgccattctgatctccaccagattaaaaatgatcttggcatgtc

SEQ ID NO: 181623 - DNA, 265 bp, Glycine max
  unsure (1)..(265): unsure at all n locations
cagaaacagtgtgatgaaaatgaaggtccttgtcttcttcgttgctacaattttcgtagcatggcaatgccatgcgtacgatatgttccctctccgaatgaacactggctatggtgcccgtactccggagggaaatgcgcaagtcggaggcttgctgtggcagcacacaacatctttggctttgagaccattcctgaagagtgcgttgaagcaacaaaggaatacatccatggcgaacaatatagatcagactccanaacagtta

SEQ ID NO: 181624 - DNA, 265 bp, Glycine max
attcattttagcatcaaggttgaatctcagagaaaaagaaacatcgacaagcatgtctggaagaggaaagggaggcaagggtctcggaaagggaggagccaaacgacaccgtaaggttctgagggataacattagggaatcaccaagcccgcgattcgccgtctggccagacgtggtggcgtcaagcgtatcagtggtcttatctatgaagaaactcgcggtgttctcaagatctttctagagaacgtcattcgcgacgctgtca

SEQ ID NO: 181625 - DNA, 264 bp, Glycine max
ccacccagccgcagcagcaagtgatcgaagcgaaaagagagtaatcagcagagaaattcatcgtcgtagttatgggtaaagttcacggatcacttgcacgtgccggtaaggttagaggccaaaccccaaaagtggcaagcaggataagaagaagaagccacgtggccgcgctcacaagaggatgcagtatcatcgccgattcgtcaccgccgtggtgggattcggcaagaagaggggacctaactcgtctgagaagtgaggctg

SEQ ID NO: 181626 - DNA, 271 bp, Glycine max
caaaaagttctgttctttttcccacccaattcagttttctcaaatggctcgtacgaagcaaacggctcgcaagtccaccggcggcaaggcgccacgtaagcagctggccaccaaggcggctcgtaagtctgctccggcaccggcggcgtgaagaagccgcacagattccgtccgggaaccgtagcgctccgcgagatccggaagtaccagaagagcacggaacttctgatccggaagctcccgttccagcgattggtccgtgagatcgcgc

SEQ ID NO: 181627 - DNA, 268 bp, Glycine max
ccaggatcaatcaattggctgaaaccaaaggctatgacatcaactatgttcttgatggtgagaagggccaaaagatcaagctagcagctatagtgcaggataagaaatcagggagagtgttggagttgttcacaatgctcctggtttgcagttctacactggtaactatgttaaggatttgaagggaaaaggtggatatgtgtaccaatctcattcaggactatgtttggagtctcaagccttccctgattcagtgaatcagcctaat

SEQ ID NO: 181628 - DNA, 267 bp, Glycine max
cctcattcgcttcaaatttcaggaaatcaattatggctcaaccctcaacaagaataggccttgctggactggctgttatgggccaaaatctagcactcaatattgctgagaaaggctttcccatttctgttttaaccgaaccacttccaaggttgatgagactgtagaacgagcaaaacaagaaggaaatcttccagtttatggctaccatgaccccgaagcttttgttcattccattcaaaagcctagggtgataataatgcttgt

SEQ ID NO: 181629 - DNA, 266 bp, Glycine max
cggagttgccgttaaggatccatctgctccccatggagttcggcttttgattgaggactatccttatgcttctgatgggctagagatatgggatgccatcaagtcctgggtgcaagaatatgtgtcattctatacaagtcagatgcagcaattcaacaagaccccgaactccaagcttggtggaaagaactcggcaaagtgggtcatggtgatttgaaagataagccatggtggcaaaagatgcaaacttgtgaagagttgattga

SEQ ID NO: 181630 - DNA, 265 bp, Glycine max
gctgtctgctgttagatctgtacccgcctagccattgatttggaaaagtccaacttcaaggatgagtaagcttcagagtgatgctctaagagaagctatctcaggaatcatggctgattccaaggaaaagacaggaaatttgtggagaccattgaactccaaattgggttgaaaaattatgatccccagaaggacaagcgtttcagtggctctgttaagttgcctcatattcctcgccccaagatgaagatttgtatgcttggag

SEQ ID NO: 181631 - DNA, 263 bp, Glycine max
ctctctctttctctctttctagttcgtgttcttcgtcgcaaatcccaagtaggatctctcttgttttttctctaggtttttcgcgatggcgtcgaagcgaattttgaaggagcttaaggatttgcagaagatcctccaacatcttgcagtgccggtcctgttcatgaagatatgtttcattggcaagctagcattatgggtcctccagacagtccctatgctggagcgtgttttcctagtgactattcatttccctccagatt

SEQ ID NO: 181632 - DNA, 257 bp, Glycine max
catcgagataactagaaacagtgtgatgaaaatgaaggtccttgttttcttcgttgctacaattttcgtagcatggcaatgccatgcgtacgatatgttccctctccgaatgaacactggctatggtgccgtactccggaggtgaaatgcgcaagtcggaggcttgctgtggaagcacacaacacctttggctttgagaccattcctgaagactgcgttgaagcaacaaaggaatacatccatggcgaacaatatag

SEQ ID NO: 181633 - DNA, 260 bp, Glycine max
cataatctcctgagagtgtttggttgacagtagcaaagatgtttcctttcgggcaaaagggccaaaagataaaggggactatggtggttatgcagaagactgtgttggatatcaacagcatcaccagtgtggagggatcgttgaccaaggcttaggcttcataggcagtgcagtcgatgcacttacttttgcagccaccaaaatctccatccagttgattagtgctacctcggctgatggtgggaaaggaaaaattggaa

SEQ ID NO: 181634 - DNA, 258 bp, Glycine max
gtaaggtccgcagaaaacagaattctagtgaagagatggttagacttggacgtttgtggatgtctcttcttccatttggatttctcttgttctttagttcagctttcatcagagtacctggtgcccttgctggagcaaagagggtcatgtcatgacatgccaaattgcgcaggcacttttagagcctgaggcatcagaagccgtgtaccaattgttacctgactatgtcaaaggtaacttatcatccctatgcatatg

SEQ ID NO: 181635 - DNA, 266 bp, Glycine max
cgcaccggccaccggccatgacattcaagcgcaggaatggaggtcgcaacaaacacggccgtggccacgtcaaattcatccgatgctccaactgtggcaaatgctgccccaaggacaaggccatcaagaggttcttgtgaggcacattgttgaacaggctgcagtcagagatgtgcaggaagcctgtgtctatgaacagtacacgcttccgaaactctatgtgaagatgcagtactgtgtttcctgtgctatccactctcatgttg

SEQ ID NO: 181636 - DNA, 265 bp, Glycine max
cgcacttctgaggttaaagcaaaaaacaaagagagagagagagagacaatgatgaagccatcgatgctcagatctctccactccgccgccacccgcggcgcctctcatctcttccgccgtgggtacgcctccagccggtgccggagcgcaaggtagccgttctcggcgccgcggcgggatcgggcagcctctctcccttctcatgaagctcaatcccctcgtttcgagcctctccctttacgatatcgccggaactcccggcgtc

SEQ ID NO: 181637 - DNA, 263 bp, Glycine max
caaagagaatccgaggcgaagagaagagaaaaattaagatggaggggaaggagcaggatgtgtcgctgggagcgaacaagttcccggagagacagccgattgggacggcggcgcagagccaagacgacggcaggactaccaggagccggcgccggcgccactggttgacccgacggagtttacgtcatggtccttttacagagcagggatagcagagtttgtggccacttttctgtttctatacatcactgtcttaaccgtca

SEQ ID NO: 181638 - DNA, 262 bp, Glycine max
cgaagagagatggatccagacgcgttggcaaaggcattcgtggagcactactacagcaccttcgacaccaacaggaacggcttagcgaatctctaccaggagggttccatgctcactttcgaagggcagagatccaaggcgcttccaacatcgttgccaagctcacctccctcccttttcagcagtgccaccactcaatctccaccgtcgactgccagccctccggcgtcaacgccggcatgctcgtcttcgtcagcggaaa

SEQ ID NO: 181639 - DNA, 261 bp, Glycine max
ctctactgcttcaccttctgctctagaaaattcagtggtgatacatggcttcggctactctctctgtagccaaaccagcccttcaggcaaatgggaaaggcttctctgaattctctggcctccgcagctatcaggcttccttcccttttctagaaaatcttcagaggatttccattctgtcattgccttccagacctatgcagtcgcaagcagtggaggatacaagaacggtgtgacagaagcaaaactgaaggttgccat

SEQ ID NO: 181640 - DNA, 265 bp, Glycine max
caaccactcaaaatgtcctccatggcttcctccaccgctttcttcacacccctccatgatttcactcaagccagaacaaccccatcaccccctttgcctttcatcaaatcctcctttgcttcctccaagtaaccttttttcaccctgccctttccctacaaacctcttccaactttcccaggctttttggaaagcctaagtttttctctgttcatgcaagggctgccacagaaaaaaccatttatgattttactgtcaaggatat

SEQ ID NO: 181641 - DNA, 264 bp, Glycine max
ccagagagagagagggagtcagagaaaccctaggtaagaagaaaagatgccggctggtcatggtttgagatcccgcaccagagattccttctctcgtcctttcaggaagaagggaaccatcgccctcacccatacctgagaacctaccacgtcggcgactatgttgacgtcaaggttaacggtgccgttcacaagggaatgccccacaaattctaccatggccgcaccggacgcgtctggaatgtcaccaaacgtgctgttggc

SEQ ID NO: 181642 - DNA, 257 bp, Glycine max
cacaggcaaaccagatccaaccctagatcctaagtatgttaacttcttgcaaaggaagtgtagatgggcctcagagtatgtggatcttgatgctacaacaccaaagacctttgacaatgtttactaattaatctcgaaaagaaaatggggttgttatctactgatcagttgttatactctgatgcaaggacttctccccttgtttctgcattggctgcctcgcactcagtttttgagcaccagtttgctgtgtcaat

SEQ ID NO: 181643 - DNA, 257 bp, Glycine max
cttcgttcgtatcgaagaagaagaagatggggaaacagattgtgccggtgaaatcagtgatctacgcgctctcccctttccagcagaagataatgccgggtctctggaaggacttgcccacaaagatcaccacaaggtctccgagaattggatcagcgccactctcttgcttggtcccctcgtcggaacctacacgtatgttcagaactacctggaaaaggagaagctgtctcacaggtactgaactcatgcaagag

SEQ ID NO: 181644 - DNA, 258 bp, Glycine max
cgaaaaagaggattggagggtcgccacgtttagcaacaaccaaaccctctctactctttcttcttctcttcgctagggttttagcttcttcctcttcacttcgttcttctggcctctacaatgagcacgacaaggacaccttcaacgtcgctgatctcacttccgctctcaacgaggacaatagagcagaccttgtcaatgctctcaagagcaagatacagagtttggctggacagcattctgatattctagagtctc

SEQ ID NO: 181645 - DNA, 261 bp, Glycine max
ctgcctttggcattttttcgccaatccctgaggagaactgaaaaaagcagaaagtatggcttcgacggcagcgtacctggctcggcgcgcggcgcagaaggagagggttcggatcctctaccgccgtccctcaaagacactctcaactgggccgtacatcgccacctcttctacgacgacgcttcaaacctccgcgaaaggttcgaggagaacagacacgtggaagaccctgataccattgacaggctcatagcggatgct

SEQ ID NO: 181646 - DNA, 262 bp, Glycine max
ctttgcaaaagacggtagggataacagctggaatttgtgtgttgatccaaaacaaatcagagaagaagggagatatgtatgacgcaatctacagcttctactttggggactatggtcacatttcagtgcgggttcatacctgacctatgaagacacttatcttgctgtgactggtggatctggcatctttgaaggggcttatggtcaagtcaagctgcatcaaattgtgttcccctttaaattattctacacattttatctt

SEQ ID NO: 181647 - DNA, 277 bp, Glycine max
aaaatcctcacccattttcttcgtagccaaacactctgaaattctcagttatgtcgtggcaagcgtatgtggatgatcacctactgtgtgaaatcgaaagtaaacaactcaatcacgccgcaacctcgggccagaacggaaccgtttgggtccagaccaccaatttccctcagtccaaacctgaggaaataactgccatcaataatgactttaatgagcctggatcacttgctccaactggattgtatatcggtggcaccaaatacatggtcatcca

SEQ ID NO: 181648 - DNA, 274 bp, Glycine max
aaaaggaggagcaggaggcatcaccgttaccaaacatggtgaaagggcgccaaggagagcgtgttagactttacgtccagggttcatacttggatacaagggttcaagtcaattcaataccaaacacttcattaatccagattgagaatgtaaacactaaggaagaagttgcgtggtactgtgggaagcgtatggcttacatttacaaagccaaggtaaagaaggacggaagccactatcgctgcatttggggtaaggtcaccaggcctcatgg

SEQ ID NO: 181649 - DNA, 275 bp, Glycine max
ctcaagggaaaccttctttacgccatcgagagagttctgaagctttctgttccaaatttatatgtgtggctctgcatgttctattgctttttccacctttggttaaatataatggccgacttctcggatttggtgatcgtgaatcctaccaggattggtggaatgccaaaactgttgaagattattggaggatgtggaatatgcctgttcacaaatggatgatccgccacctatattttccatgtttaaggcacggtataccaaaggccgttgct

SEQ ID NO: 181650 - DNA, 274 bp, Glycine max
caatgagacaaacactggaccttggtgattcagggcttttacccttagagataaggttcttgcatgatcctgctaaagatacagggtttgtcgggaatggcattgacaagtaacatgatagattttttaagacccaagatgaatcatggagccatgaggttgccatatcagtgaaaccactgaaagtgcaaaactggattcttcctgaaatgcctgggcttataactgattttttgatttctcttgatgatcggtttctgtactttgtaaactg

SEQ ID NO: 181651 - DNA, 184 bp, Glycine max
acttcaccttagtttccgattccaaccttcagatgaatgcgcgcttcatcggacacaggcctgaaggaagaagccgtgactacacatggatccaaagccttggaattctcttcaaattcaaaactttttcatttaaggcaaccaagacaccccaatggaatgatgaacttgaccacttcaaatt

SEQ ID NO: 181652 - DNA, 182 bp, Glycine max
ggcgactattactcttggggacaagcgaattggactcaagactagtgttctagaggaaaaagctacagcatgtaacatgctttgttgctatgctgatgagctgcaggaaggattctttccaggattgatcaggctgctggaactttagttccactccttaaattttatttccacgaggcggt

SEQ ID NO: 181653 - DNA, 280 bp, Glycine max
  unsure (1)..(280): unsure at all n locations
tcangggcagtagccgagattccgtgagttgcaaaaatgaagacgattctttccaccgagaccatgaacaacccggacggcgtgagcatcaaagttcatgccaaggtcatcgaagttgagggccccggggaaaattggtgcgagaattccagcatttgaatctcgaatttcaggtcaataattgcggaaaacggtaaaggaaagctgaaaatcgacgcgtggtttggttctcggaaaacatcggcggccattggcaccgccttgagccacgtggagaatc

SEQ ID NO: 181654 - DNA, 275 bp, Glycine max
aagttacttgcaacaattgcgccaaatatgcccgaatggtggacccaacaaccttgtgaattttgcacctgtcactcctgataaaattgacagggtctacttcttcaatcttcaggtcagaagggcttgcttcagagtgaaccagaagtggtctcgaaaaccggttgcggtaccaatccccatgtccataaggtccagcagtgaccaaaatgccacctttgatgcctttgaggcttcaatgattaagatgggtaccattggtgtgctcactggga

SEQ ID NO: 181655 - DNA, 275 bp, Glycine max
tcattcacacattcacagttatactctctctctctttgtcgcttggatcactgatctcatctcaattttcagatatgtcgacatctgataaagccaaaagtggtggaaaggggtagcaagatgaaaaacacaaggaagatgatcaagaggaggggaagggtggattcattgagaaggtgaaggatttcattcatgacattggtgagaagattgaggaagctattgggtttgggaagccaactgctgacgttactgcgattcacattccatcgatt

SEQ ID NO: 181656 - DNA, 91 bp, Glycine max
acattcccttctccaacatgccaaacgacagcgttctgagtcttttcttcttcgttaccctcttcacatgccttctctctgctaattccca

SEQ ID NO: 181657 - DNA, 250 bp, Glycine max
gttgatcgagataactagaaacagtgtgatgaaaatgaaggtccttgttttcttcgttgctacaattttggtagcatggcaatgccatgcgtacgataatgttcctctccgaatgacattggtaatggtgccggaattcgggaggtgaaatccgcaagttggaggcttgctgtggaagcacacaacatctttggctttgagaccattcctgaagagtgcgttgaagcaacaaaggattacatccatggcg

SEQ ID NO: 181658 - DNA, 193 bp, Glycine max
ttgctccagtgtcaaagacaggataggatatagcatgattgtagacgctgaggagaaaggactcatcacaccgggtgaaagtgtcctcattgaacctaccagtggaaacactggcatagtttggcattcatggcagctgctaagggttataaacttattataaccatgccttcttcgatgagtcttgaaagaa

SEQ ID NO: 181659 - DNA, 268 bp, Glycine max
caagtgagagaggttgaaggcggcgtgagaatgttggacatcaacctattcagagaggagaagggccacaaccctgaactcatacgcgaatcccaacgccgtcgtttcgccagcgtcgaatcgtcgacgaggtcatcaatctcgacaaagaatggcgaaaacgtcaattcgagttggaaaatctccgcaaggcattcaaccaggtccaccagggagtctcccaactccagcgttcctgggaagatacctcctaggtccataccggatc

SEQ ID NO: 181660 - DNA, 271 bp, Glycine max
agcgtggctccttctctgggaaggactaccaggaccctccaccagcaccactcattgatgctgaggagctcacaaagtggtccttttacagggcccttattgctgagttcattgccactttggtcttcctctaaaataatggtgtcacaagtattagggaacagccacaaacgggtccttgtgatgcgttttgttggggttggcatccttggcattgcatgggcctttggtggcatgatcttcatcctggtctactgcactgctgggattt

SEQ ID NO: 181661 - DNA, 270 bp, Glycine max
cgagcgaagagaatggctcccaagggtttaatctttttggctgtgttatgcttctcagcactgtcactgagtcgttgtcttgcggaagataatggactttgtatgaacttttacaagaatccatgccttcaggctgaagccttcatcaaagaccaagtcaagcttctctacaagggccacaggaacactgctttctcctggctcagaaacatcttccatgactgtgctgttcagagttgtgatgcttcactgttgctggactccacaaga

SEQ ID NO: 181662 - DNA, 264 bp, Glycine max
caaccatggccacctccaacttctctattgttctctccgtctccctagccttctttttggtgctacttaccaaggcacactcgaccgataccgtttctttcaccttcaaacaagtcaacccgtcccaaccaaacatatgcttccaaaaggtggctagaattccatcctctggggtgttacaactcaccaaagttggcagcaacggcgtgcccacctcgggatctctcggtcgtgccctttacgctgccccaatccagatttggg

SEQ ID NO: 181663 - DNA, 278 bp, Glycine max
tatcgagccgctcgagccgcgcgtcgctccgcaccagtttcaccgcacgaatatcttcgttgtactggacgcgattcgcgagaataaacttctgtacaaccatgtttggtttaaccatgaacttccttacaggtgatgagcttctctctaattctttcggttacaaggaaattgagattggaatgctgtgggaagttgaggggaagtgggttgttaaaggagcagttgatgtagacattggtgcaaacccttctgctgagggtgaaggagaaattaag

SEQ ID NO: 181664 - DNA, 146 bp, Glycine max
gcagagagaagagaagggctacacaaacacaatctctaatggcactcaggatgtgggcttcttccactgccaatgcactcaaactctcttctgtctccagacctcatctcttgcctctttttctttctccagatgcttaacctccg

SEQ ID NO: 181665 - DNA, 253 bp, Glycine max
atgaagcgagaagcgagaagcgacatggatccagacgcgttggcaaaggcattcgtggagcactactactccaccttcgacaacaaccgcaacaatctcgccaatctctaacaggacggttccatgctctctttcgagggtcagaagatccagggctcccaaaacatcgtcgccaaactcaactcccttcccttccaacagtggccgcaattcatcaacaacggcgagtcttcagccttcaggcgtcaaggcg

SEQ ID NO: 181666 - DNA, 267 bp, Glycine max
ataactagaaacagtgtgatgaaaatgaaggtccttgttttcttcgttgctacaattttggtagcatggcaatgccatgcgtacgatatgttccctctccgaatgaaaaatggtaagggtgccggaattcggaaggtgaatgcggcaatttggaggcttcctgtggaagcacacaacatctttggctttgagaccattcctgaagagtgcgttgaagcaacaaaggaatacatccatggcgaacaatatagatcagactccaaaaca

SEQ ID NO: 181667 - DNA, 247 bp, Glycine max
tagtggagatgttttcccaggctccacactttctgaccatgttttgcggtttaacaacataccacaggttaaaatgatggttgtacttggggaacttggtgggcgtgatgagtatctcctgtggaaagcctaaaaacaagggaaatgaattaaacaattggttgcttggttaacgggaacttttcaaggatcttcaaatctgaagtaccatttggtcatgctggagcttaaagttgttgttagatgg

SEQ ID NO: 181668 - DNA, 262 bp, Glycine max
gcagcatcgctattctcttcattccatggctttgcccaaccaggaaaccgtggattacctagtttcaaactcgtatcgtcggcgatggtggcacaggaagacaactttgcgaaaagcatctccacggagaattcgagaagaaatatgaggccaccatcggtgttgaggttcaaccattggattttttcaccaactgtggaaagattcgattttactgctgggatactgctggacaggagaaatttggtggcctcagagatgg

SEQ ID NO: 181669 - DNA, 259 bp, Glycine max
ctgaaagtgcgatatcctcagcgaattactattcttagaggaaaccatgaaagccgtcagatcactcaagtatatggattttacgatgaatgcctcagaaaatatggtagtgcaatggtttggaagaccttaactgacctttttgattcctttcggttgactgcattggttgagtccgaaatatttggtttgcatggtgggctttcacctccaattgagaccctggataccttaaggacctccgaccgggtccaggagg

SEQ ID NO: 181670 - DNA, 246 bp, Glycine max
atacctatggtgggtggggtgctcatggtggaggtgccttttcagggaaggatcctaccaaggttgacagaagtggtgcctatatcgtgaggcaggctgcaaagagtgttgtggcaatggccttgcccaaaaggtgccatggtccaggtttctaatgccattggtgtccctgagcccttgtcagtgtttgtggacacttatggaactgggaagattcctgacaaggagattctccaaattgtgaag

SEQ ID NO: 181671 - DNA, 120 bp, Glycine max
gtgatatcagtgagtgatcggtgttcacttgatctcatcataatcgtcagcgtcaattgaagaagatgccgatcagaaacatcgccgtcggaaggcctgaagaggcgactcacccgacac

SEQ ID NO: 181672 - DNA, 139 bp, Glycine max
ccacattcgactccaaattggttgctggtcccaatggagggtctgctgggaagctcactgtcaaatacgaaacaaaaggagatgctgagcccaaccaagacgaactcaaaatggaaaagccaaggctgatgctctcttc

SEQ ID NO: 181673 - DNA, 98 bp, Glycine max
gtggacacagtcttgaaagcatcaaggctagcattgaagcaaggaagcctgattttgaagcatatattgatccacaaaagcaatacgccgatgcagtg

SEQ ID NO: 181674 - DNA, 265 bp, Glycine max
ttaagcttgctactgagtttccacactgcataccttaggtcttccgaattcgaagttaatttgcaagatggctaaggaaaaggctcagatcaacattgtggtggttggtcagtggaccctgaggaggcaaccaccattaacgagctgaagaagcctgttgtggagaaagaagctccagggcatgccatatgagggcatgcacgtacggcctcggaggggaaccagaaaattatgttaacaaaataatctggaaccctaatgtatc

SEQ ID NO: 181675 - DNA, 266 bp, Glycine max
gcacaaagggcgtaggagaagagggtttcgttccgtttcaatggggagcgaagagcagaacggcgaattctacctgcgttactacgtcggtcacaaaggcaagtttggtcagaattcctggaagtcgaatttcggcccaaacggcaagttcggttaggccaacaattccaattacaaaaacgacaccatcatccgcaaggaggtttacctaacccccgccgttctccgcgagtgccgtcgcatcatcgccgagagcgagattatga

SEQ ID NO: 181676 - DNA, 182 bp, Glycine max
cagaaaatcctcacccattttcttcgtagccaaacactctgaaattctcagttatgtcgtggcaagcgtatgtggatgatcacctactgtgtgaaatcgaaggtaaccacccaatcacgccgctatcatcggccaagacggaagcgtttgggctcagagcaacaacttccctccattcaaac

SEQ ID NO: 181677 - DNA, 203 bp, Glycine max
cagagatgggttgaagaccgatcccaccaggtaccgcaagatgaaggagcgtctcgttggggtttctgaggacaacaccactggtgttaagaggctatatcagatgccagcgaatgggatctaattcttccttgtaattaatgtcaatgatctggttaccaagagcaagtttgacaacttgtacgggtgccgtcattctctcc

SEQ ID NO: 181678 - DNA, 177 bp, Glycine max
tccacactgcataccttaggtcttccgaattcgaagttaatttgcaagatggctaaggaaaaggctcagatcaacattgtggtggttggtcatgtggaccctgaggaggaaccaacattaacgaacttaaaaaagcttttgtggaaaaaaaaagttcaagggattgcattttaaggg

SEQ ID NO: 181679 - DNA, 264 bp, Glycine max
ccgtgagacacaataaaaatcaaagagcataatgtcagggatcattcacaagattggcgagacccttcatgtgggacggcacaagaaggcggaggaacataagggtgaacacatgctggagaataccaaggggaacaacattgtgaacaccgtagtgagtacaaaggggagcatcatggtgaacaccaaactggagagtaccatggtgaacacaagccagagcacaaagaggggttcctagacaaagtcaaggacaagatccat

SEQ ID NO: 181680 - DNA, 252 bp, Glycine max
gcagaaatagagaaagagaaacgattgtctaatgtgaaggcttgggaagaaagtgaaaaatccaaagcagagaataaagcccaaaagcagctctctgctgttgctgcttggaaaacagccagaagccactccttgaagctcagctaagaaaatttgaggaccaactagagacaaagaaagcagattatggtgaaaaattgaaaaccaaattagccttagtccacaagcaggcggaggcgaggagagcattgg

SEQ ID NO: 181681 - DNA, 262 bp, Glycine max
gaaaatgtcgcagttgttggaaaaggccaaaaactatgttgcggagaaagtcaccaacatgcccaagccagaggcgagtgtcaccgacgtggacttcaagcgcgtgagcgcgaaaaggtcgagtaatttggcaaaggcctcggttcaaaaccctaatcccacttcaattcccatttgtgagatcaagtactccctcaaaagtgctggcagggagatagcagcaggaacaatacctgacccagggtcattgaaggcaagtgac

SEQ ID NO: 181682 - DNA, 266 bp, Glycine max
cactaaaccaaagtaagaggtatagtgttctaagagtgagccacttgtgagacatggcttccaaggctgcacttctcttgtgtctcaatggtctctttttcactgtggttattccacatatgttgcatttaattcaacccccaaaaattcccaaaaaccaacttgtcccaaagctacaatccccaaagttagcaagctgccccaaagacactattaagttcggtgtgtgtgctgatgtgttaggtttgattaatgtgcaacttggg

SEQ ID NO: 181683 - DNA, 184 bp, Glycine max
ccttcttctccgcttcctcttcgatcatcgcttcagaatgccgccgaagttcgacccctcccagatcgtcgacgtcttcgtacgcgtcaccggcggtgaagtccgcgccggaattccctccccccgaaaatccgtccccttcggcttttccccaaaaagattcggagaggttttcgccaaggaa

SEQ ID NO: 181684 - DNA, 253 bp, Glycine max
gttcggattgcggcgacgtgagcggttcgctgcccgcgacgttgtgagaagtccactgaaccttatcatttagaggatgggatgaaggtgtgcttggcatgcaaattggtgcagttgctcgtctccggtgctctccggattatgcttatggtgctggtggctttccttcctgggggatacaggccaactcaggcctggaatttggaatcggagtcctgaattccccattgaaaaccttggaatccggccccgg

SEQ ID NO: 181685 - DNA, 286 bp, Glycine max
catatttctgtgccaacaaaagaagatggcctcacaggtttgcaaagctgcttccagagccgcgaggtcccttctctccgcttccagagcctcccatggacgtgcggttggggctgctacggctgtttcattgagctgcaaagtgcctcttttctacggaaagaacggttctggaagtggttccgcttcatcatcatcatcatcatggatttcaggagcacttgctcttcctgccgcagcttacatgttccaagatcaggaggtgcgcgcacttgagctggagcgc

SEQ ID NO: 181686 - DNA, 283 bp, Glycine max
gtttgattatgtctttgactggaccattttgaagtatcagcaatcacagctagccactcctccaacacgggccattggtcctagtgctggaaccagttctggaatgcccccggctgttactaatgctgataggcatacaggaggggaagaagggcgacctcctgctttggtttcagtggattcctcgaggcggagaatgtcagggcccattttaaatactttatcaagtgccaatgtcttgggtcagtcaagtggatcatctaggcgggctgctgtttctagt

SEQ ID NO: 181687 - DNA, 288 bp, Glycine max
catcctcccaaaatcatataattctctttcatctgaattctccctttcaaatctcttcctctgacgtgttcgtagttctctgcatcatcgagcatgcaacgcgtcttcgagtttcctcaaactcacatggatcggcgcccgagacagagagcgagattgggctgggaccatccctgaggtccccaaggctcaggtaggattgtcttgtggacaagatgttgggactatttcaagctttgctccttcaaggggtcactcagaaaataccactagttctctatttgttaa

SEQ ID NO: 181688 - DNA, 284 bp, Glycine max
tttggccacaaggtggtggatttgctactggaaccatcaacataggagggctagaattgtttcaaatttcaacattcaacaaagtttggacaaccttagaaggtggacaaggtgatgcaggggcagctttctttgagccagcaggaatacctgagggattcttcacactaggccactacagtcaacccaacaacaagcctctttttggatcaattctggtggcaaaagcatgagacatcatcaggtgacaataatggagctttgaagaaaccaattgattacac

SEQ ID NO: 181689 - DNA, 283 bp, Glycine max
ctcgagccgtctctatctctcacacacactttctctctctctctctctcacccagatcttgtcagaatggcgagcgctcccactccaggcgaagagttcgtgtacatggcgaactggcggacaggccgagcgctacgaggagatggtggagttcatggagaaggtctccgcctccgccgagagcgaggagctgaccgtggaggagcgtaacctcctctccgtcgcctacaagaacgtgatcggcgctcgccgcgcctcctggcgcatcatctcctcaatcgag

SEQ ID NO: 181690 - DNA, 282 bp, Glycine max
attttctattccccaaatctcctccttagactgccaacccaatatagccattggatcgaattcagtttggattcggtctgatggtttgggagttctaataagtctaaggaacagaaattctgtacatatatatttagaagatcacaggtgcttgatcagtggtgtatcaatatggacaaggtgatgaggtttgcctctgaaaagggtgtggtgattttcacaaagagttcttgttgcctctgctatgcagttaacattctgtttcaagaacttggggtgaat

SEQ ID NO: 181691 - DNA, 285 bp, Glycine max
atcgatgcaactcaaagccatcctccactacgcgacctctcagattgtccctcaacaatctctttccgagattacaataaccttcgacgtgctccaaagcctccaccgccccgccaacttcctcgtgtttgggctgggccgcgattctcctcatgtgggccagcctcaacccccacggtaccacgctgttcctcgaggaggaccctaaatggttcgggatcgtcaccaaggaggcgccctacctccgggcccacacggtccgttaccggacacagctccgagaag

SEQ ID NO: 181692 - DNA, 220 bp, Glycine max
gaggacactttgaaggcactggagatgggtgctgtggaaacactcattgtatgggaaaatttggatattaataggtatgtgctgaaaaatggtactactagtgagattatcataaaacacttgaacaaggaacaagatgctgatcaaagcaacttccgtgattcagccacctctgcagagttggaagttcaggagaagatgcccttgcttgagtggtttg

SEQ ID NO: 181693 - DNA, 284 bp, Glycine max
ggctaatctattaggcgctgttctctcgtcttctacaaaattttctgttcgatctcaaccaaggttgttccttccaccgccatgagtatcatcttcggaagcgaaaacacccgcagagctgcgggaaaataagaggatgctggacaaatcaatcagagaaattgagcgcgagcggcaaggcttgcaaacgcaagagaagaaattgattgcggagataaagaaaagtgccaaacagggccagatgggagctgttagagttatggcaaaagatcttgttagaacaa

SEQ ID NO: 181694 - DNA, 287 bp, Glycine max
cgaaatatggcttcaactcatctgcttcccctagcaaccttcttcttacttctctccgcttcttatctccagattgctggggcggaagcacaaccgttgactagtctcaagcttaactctcatattcttcaggagtctactgctaaagagattaatgaaaatcccgaggcaggatgggaggctgctataaatcctcgtttctccaattatacagttgaacaatttaagcgccttcttggagtcaaaccaatgcctaagaaggaacttagaagtacacctgctatatc

SEQ ID NO: 181695 - DNA, 284 bp, Glycine max
gatggatcttggtcatcatccagtactcggttctcttttttccagagcatacagttatatttaaacctcttttttgcaggtttcctgtaattggaaacctgttacgagttttttggcactccgttgatgggatgccactttcaaaatggctgtttatctctgccagcatagttaccgagttctggagttaggtatttttctttccagtgttggcacccgatgtttttagcactgttttgtatcggttttgccaccatgtgtgtccttgtccttgtttctttgca

SEQ ID NO: 181696 - DNA, 285 bp, Glycine max
ctcgagccggatctggtcatcgttgggatctccatacgccggatctgctaaaatacgcttgatccatatgggcctcctcgaccacttgtgggacgacaccgtcgccggcccaaggccggaaaacggtctcggcaagctccgaaaacaccacaccttcactttccgacctagctccggcaaggaaacggagggcgggagcgtgagatcgtacggagacgaatcgtcggaggaagcgacgagagtgacgcgacatatcatgatcgtgaaaccgcccgggtaccagag

SEQ ID NO: 181697 - DNA, 287 bp, Glycine max
aaattccccaaactcgtgggcccaatccagcccgcaatcgccaaactcaccaaactcaagtaccttgatctctccaacaacaatctctctggcccaatacccgattttttcgcgcaactcaagaacctcgacgatatcgacctttcctttaacaacctctccggccccataccaagctcgcttggtaaactgcctaaactcgcgtatctagatttgagccgcaacaagctcacgggctcaattccggcctcatttggatccttccaaaagcccgggccggctattat

SEQ ID NO: 181698 - DNA, 283 bp, Glycine max
tttgttttggagggtagacctttaagggcttgtcttggaaccacaaaatattgtcatgcatggatccggaatgtggtatgaggatgactggtctagatagaattttcaaattatgcttaattacctgtgcttgtaattgagggaaagatctctatgaccagccttgcagcaatccggattgtctgtatttgcatgagattggctctcaagaagatagttttaccaaggatgaaataatttcagcatacactagaagtcgagttcaacaaatcactggtgccac

SEQ ID NO: 181699 - DNA, 281 bp, Glycine max
gtggaagcagaaggcattgttatggctataccaatgcctggacatccagtacaaagccaggaacaggacagtgtgctttatgattgtacacgtttgtgtgatttaattgatcgtcatgattccgcttttttattgactgatacaagggaaagtcgatggctcccaacacttctctgtgccaatactaacaagattactgttactgctgcactggggtttgatagtttcttggttatgcgccatggagctggtcctttatctgcggatatgccagtaaataa

SEQ ID NO: 181700 - DNA, 284 bp, Glycine max
ggcgaaaatggtgatatacaaagaatggattgtagtagtcgtggtggttggcgctttctgatgcacgtgtataaaaggcattgtactttgaaattgcaattggtgtacatttcctctccctctccattttttgttgctccctcaaagtttgagagattcaggttcagatctgatcaacaaaaatggcgactgtgtccctctcgccaaatacaagctcgttttcttaggcgatcaatcggtcggcaaaaccagcatcatcactcgcttcatgtatgacaaattcg

SEQ ID NO: 181701 - DNA, 285 bp, Glycine max
ctcgagccgcaatatgcttatggactagctgcacttggatgtcagctacaagctttaggattctgttgaaaccccgtatattgatcttgataaccctttggccaaggaattaatggaaatctatgagtccataggcgacacattagcctttcaatatgggggttctgcagcacacaataagatattttctgagagaagaggtcaatggaaggcagcagctcaatcccaggaatttattcgaacactacagcgttattataacaacacatatttagatggtgataa

SEQ ID NO: 181702 - DNA, 296 bp, Glycine max
ctttggcttccttttcatagtgtttgtgatcctattaatcacctgtgccgagattaccattgtgctttgctacttccaattgtgcagtgaggattacaattggtggtggagatcttatctcactgctgggtcctctgcgttgtacctcttcctctactcaattttctacttctttaccaagttggagatttcaaagctggtatcgggcatcctttacttcgggtacatgataattgtttcatatgccttctttgtgttgacgggaactattggcttctatgcttgcttctggtttg

SEQ ID NO: 181703 - DNA, 285 bp, Glycine max
caccggtttatgtcctcctatgaacagagggtgcaacctttgataaaaggtatcagtacctcttgtttgctgctgaaccatatgaaatcgttgctttcaaggtgcccagcacggagattgacaagtccactccaaatttcttctcgcactgggatcctgactccaagatgttcacgctacaattgtattttaaatccaagccgccagaggcgaacaaaccgcagcctgcctctactgccaatggcacagcaccatctggtgtaccaccaaggcctttgcccccac

SEQ ID NO: 181704 - DNA, 288 bp, Glycine max
caaagccttcctagaacgaaaaaaaaaagaagagcaattttccctcaccaaagaagaagaagcaaacaatggccgatcaacttaccgatgaacagatctccgagttcaaggaagccttcagcttgttcgacaaggacggcgatggttgcatcacaaccaaggagcttggaactgttatgcgttcattggggcaaaacccaactgaggcagagctccaggacatgatcaatgaagtggatgctgatgggaatggtaccattgacttccctgagttcctaaatctcatgg

SEQ ID NO: 181705 - DNA, 290 bp, Glycine max
gcagtgccggcgcgcgctgaagtttgctaggttcatgagcaggttcgggaagagttaccgaagcgaggaagagatgaggggagaggtacgagatattctcgcaaaacctcaggttcatccgctcccacaacaagaaccgcttgccctacactctctctgttaatcattttgctgattggacttgggaggagttcaaaagacacagactaggcgctgcccaaaattgctctgccactcttaacggcaaccacaagctcactgatgctgttcttcctcccacgaaagactgg

SEQ ID NO: 181706 - DNA, 285 bp, Glycine max
aggacaactacctcaactaccacaagaggttgatagagcttgtaaaagttgggggcgtgatcgggtacgacaacaccctatggaacggatctgtggtggcacccctgatgttcctcttaggaagtatgttaggtattacagggatttcgtgctggagctcaacaaagccctcgctgtggaccccaggatcgagatttgcatgctcccggttggtgatggaatcactatctgccgtcggatcaagtgatttctgatcatcataatcgtggaccaccgttgcttctt

SEQ ID NO: 181707 - DNA, 289 bp, Glycine max
tgcgactcagatcctctctcgcatcttccccaaaaccctagccctcttcctctcccgttctctctccagcgccccctctcctccctctctctccgcgctctccttcttccgccgcatctccgttgccgccaacccctccctccaccgcgccctcctccccaactctccctccctccgggccctctccacacgcgccactacctcctccctcaacgaccccacccctaactggtccaaccgtcccccgaaagaaaccatcttgctcgacggctgcgatttcgaacactgg

SEQ ID NO: 181708 - DNA, 283 bp, Glycine max
actcgagcagctcgagccgctttgaccggaaaaacaataactttagacattgaaagttctgataccatcgatacacgtgaaggcaaagatacaggacaaagaggggatttcaccagaccagcagaggcttatctttgctgggaagcagctggaaactggtcgtactcttgctgattataatatccagaaggagtccactctgcatttggtgttgaggcttcgtggaggtatgcagatatttgtgaagactctgacagggaagaccattaccttggaggtggaa

SEQ ID NO: 181709 - DNA, 282 bp, Glycine max
ctcgagccgcgctgactctgaccttctctggcgaactttctttccttctgattactctgacattgtctcaagggctctcaaccccctctcccttaattcctcttcttcatacaaacaccttttctatgctctttgtcatccactcctcctagatggaggcaacatgagcttcaaattagacaagtcttcgggtaagaaatcttatatcctatctgcaaggcagctttctataacgtggagcaatgaccctttgtattggagctggagaccagttcctgaatc

SEQ ID NO: 181710 - DNA, 281 bp, Glycine max
ggccgaccagctcaccgacgaccagatcgccgagttcaaggaggccttcagcctcttcgacaaggacggcgatggttgtattactactaaggaacttgggactgtgatgcggtcactagggcaaaacccaactgaggcagaactgcaggatatgattaatgaggttgatgctgatggcaatggaaccatcgacttcccagagttcctcaacctgatggctcgcaagatgaaagacaccgactccgaggaggagcttaaggaggctttccgtgtgttcgaca

SEQ ID NO: 181711 - DNA, 281 bp, Glycine max
  unsure (1)..(281): unsure at all n locations
ctcgagccgctcgagccgcgcaggatcgaagtttcacatcagccttatccagtttagggtttcggttcctactnctcgctttgacgtatcgaaaccttaaatttgggattaggtctgagcaatctggttggtagaacctttggtcttagagagtcaagttttatgtctggattagacgatcaaattcctactgccttcgatgcttttgctgatgcaaatgctgatgactcgggtgctgggtcaaaggagtatgtgcatattcgcgttcagcagcgaaatgg

SEQ ID NO: 181712 - DNA, 285 bp, Glycine max
cattcacaacacaacacaaccaaatccaacatggtagccattctgaagagacaaagagaaaccgaagccgaggagagcatcataagactggcagaaagtctcatgcaactgtcgcgagtccaacaaaaaagcaagcctcttctcaaaaccttttctccaacggagttcgagtgcaaaacctgtaaccgcaagtttccatcttttcaagcccttggtggtcacagggcgagccacaagaagcccaagttcgaaggtgaagaactcaaagaggaggccaagaagggt

SEQ ID NO: 181713 - DNA, 280 bp, Glycine max
ggagagtccagcctgccgcttcatgagatggaaggacgaagaacttactatctgggaatgtttttgggtggggcttacgaggaggcgctcggtggaggtcacaacttgttcggcggccccagcgtggtcagggtgtcgcagagcatggccctcacagctttgcggtcacgcgtgccgtgccggggccatcctgtggagatgttcttcgagtgatgcagcaccagcccgagctcatgttcgagacactcaagcaccgcgcgcaggagtatgtcagccacga

SEQ ID NO: 181714 - DNA, 281 bp, Glycine max
gtttgacctggcctcaaagctctccgccgaacgcgccatgaacgcgtcgccgtttatttggacactaaaacgactcctcaacataggatccgagaagaaactgagagaaacaattaacgtcgtaaacgacgtcgcaaaagagatgataaagcagagaagagaaatggggttcaagacgcggaacgaccttctctcgcggttcatgggatcaatagacgacgacgtttatttaagagacattgtggtgagttttctattagcgggtcgtgacaccatcgctg

SEQ ID NO: 181715 - DNA, 272 bp, Glycine max
ccgtagcggtggcggtggagcatggcggggcggtggatatggcgtggcgtggcggtggcatggcggtggcagagaccgtggttatggtggtggtggtgaccgtggttactctcgtggtggtgacggtggtgatggaggctggagaaactagggcttgatgtcgttgattagggtttatgattatgctcagtaattttagttgtgtttgagtttgagtatctttatggttttgtgtcaccgtggttcttgtgtttgaccaatatatctggttg

SEQ ID NO: 181716 - DNA, 279 bp, Glycine max
aacataattggagcaaaatatttccgcatggatggttcatttggagaagatgacataatatcacccagggattcaaatggccatggaactcactgtgcatccactgctgctggaaactcagttgagtccacaagcttctttggccttgcctcagggacagcaagaggaggagttccatcggcacgaatcgcggtgtacaaaccttgttggtcatctggctgcgatgatgccgacatccttcaagcattcgatgaagccatcgcagatgatgttgacgtc

SEQ ID NO: 181717 - DNA, 275 bp, Glycine max
cggaatcggctcgagcggtcgagcgatgcaaaggcagacggagtgggttgaccatctgccggcgacacggtgtgcttggagtgcggcctcgtactggagtccactctatcgacgagacctctgagtggcgtaccttcgccaacgagtccggtgacaacgatcccaatcgtgtcggcgggccctccaaccccctcctcaccgacggcggcctctccaccgtcatcgccaagcccaacggcggcggaggtggcggcgagttcctctcctcctccctc

SEQ ID NO: 181718 - DNA, 282 bp, Glycine max
gcttaatgccccaaagcattggatgcttgacaaactgggtggtgcatttgctcctaagccctcatctggaccacacaaatcgagggaatgcctgccactcatactcattttgcgaaaccggctgaagtatgctctaacataccgtgaagtcattgctaattctgatgcagcgacatgtccttgttgatggcaaagtcaggactgacaaaacataccctgctggttttatggatgttgtatcaatccctaaaacaaatgagaacttccgcctgctgtatgaca

SEQ ID NO: 181719 - DNA, 280 bp, Glycine max
gagtcactcttcttgcataacccagatctgcagacaatatgcgaagaactggcttgttacatttgttatgccttgtcattgctttagtaagtgtgaaagcagaagatgcgtataagtattacacatggacggtgacttatggaactatttctccattgggtagtccccagcaggttattcttatcaatggtcagtttcctgggcctagacttgacttggtgactaatgagaatgtaattctcaaccttatcaacaagctggacgagccatttttactcac

SEQ ID NO: 181720 - DNA, 277 bp, Glycine max
cgagaaacaacgccacgctgaaatcccttttttgtgtccatgggcagcagcatgctgaggctagtgttgggcttgtctgttttgagttgtgtgcttgtgacatcctcagctcaaacgtgcagaaaccaaacattctcaaacagggtgtttgccacatgtcgtgatcttccacagttgacggcttacctgcactggacatacgaccaggctagtgggaggttggagatagcattcaaacacgctggaatcacctcgaccaacaggtgggttgcatggg

SEQ ID NO: 181721 - DNA, 282 bp, Glycine max
gtgggcagctggaggattcgagagttctcaagggagtcatgataaacaaagatgtggttgcccctggcaaaatgaggagaaggattgttaacccacacatcattcttcttgattctccccttgagtataaaaagggtgaaaaccaaacaaatgccgaactgctcaaagaagaagactggagtctcttattgaagatggaagaagaatatattgaggagctatgcatgcagatattgaagtttaaaccggacttggtaatcacagagaagggtctgagtgatt

SEQ ID NO: 181722 - DNA, 283 bp, Glycine max
atggagaaggtctccgcctccgccgagagcgaggagctgaccgtggaggagcgtaacctcctctccgtcgcctacaagaacgtgatcggcgctcgccgcgcctcctggcgcatcatctcctcaatcgagcagaaggaggagagccgcggcaacgaggaccacgtcgccgtcatccgcgactaccgctccaagatcgaggccgagctctccaacatctgcgacggaatcctcaaactcctcgacacgcgcctcgtcccctccgccgcctccggcgactccaagg

SEQ ID NO: 181723 - DNA, 277 bp, Glycine max
attgatacctatggtgggtggggtgctcatggtggaggtgccttttcagggaaggaccctaccaaggttgacagaagtggtgcctatatcgtgaggcaggctgcaaagagtgttgtggcaaatggccttgccagaaggtgcattgtccaagtttcctatgccattggtgtccctgagcccttgtcagtgtttgtggacacttatggaactgggaagattcctgacaaggagattcttcaaattgtgaaggagaatttcgacttcagacctggaatga

SEQ ID NO: 181724 - DNA, 279 bp, Glycine max
aaaagggcaatgcattagaagttgttttcatctcaagtgacagagatcaaacctcctttgatgaattctttgcgggaatgccatggttggcacttccctttggggactcgaggaagaaattcctgagtcgcaaattcagggtatctggcatccccatgcttgtggccattgcatcaagtggtcagacattgacaacaaaagctcgagatctggtttcactctatggagcagatgcatatcctttcaccgaggagagaataaaagaaatagagacagaac

SEQ ID NO: 181725 - DNA, 281 bp, Glycine max
agcgcagtgaaaaaagcttacgttgaaacagatgagaaaatattggaacaagaacttgtgttcgggcgaggagggtcaacagctgtgactgcaatacttattgatggtcagaagcttgtagtagcaaatgttggtgactcaagagctattatctgtgagaatggaaaggcaagacaactatcagtggatcatgaaccaagcaaggaaaaaaaatcgattgagaggcgtgggggttttgtatcaaacattccaggagatgtccctcgagtagatggacagct

SEQ ID NO: 181726 - DNA, 283 bp, Glycine max
gttgctcaaacattagttgtctatgctaaaacagacataactgctgggtcaaaaggcattactgcattcatcattgagaagggaatgcctggattcaatactgcccagaaattggataaacttgggatgcgaggaagtgatacgtgtgagcttgtctttgagaattgctttgttccagacgaaaatattcttgggaaagaagggaaaggagtctatgtcatgatgtctgggctggatctggagagacttgttttggcagctggtcctcttggtattatgcagg

SEQ ID NO: 181727 - DNA, 289 bp, Glycine max
cgagaatttgtgtctgctcactcgctcttctccgccacttctgaatctattgaatcaacaatcatgtcggacgaagagcaccatttcgagtccaaggccgacgccggagcctccaaaacctaccctcagcaagccggtaccatccgcaagaacggctacatcgtcatcaaaggccgcccctgcaaggttgtggaagtttcgacttccaaaactggaaagcacggtcacgctaagtgtcactttgttggaattgatattttcactgccaagaaacttgaggatattgtgc

SEQ ID NO: 181728 - DNA, 278 bp, Glycine max
cggcactgagttattagtaattgtgttgtgttgtgttgagcagagagaaggatcaagacaggataagaagaaacatggaatacggttacggttagggttcaggttagggtgatgatgccggagtatcaagggaaagggaggtaagaccaggaagaggggaaagaacgaggcggacgacgacaagcgagagctggtgttcaaggaggacgggcaggagtacgcgcaggtgctccggatgctgggtaacgggcggtgcgacgcgatgtgcatcgacggga

SEQ ID NO: 181729 - DNA, 277 bp, Glycine max
tccttatctctctctctctctatctctcccgaattattgttcgttcgacccttttacttagtattccctgtttccggtattcgctcccttgtttctgcagtctggttctacttagatctctgtcgcgcaccagatctggtgcagggtaagagggttgggtccatcaattttgtatcaatccttccttctcagcggtaggcgttgggataccatagtctttccgggaaccaagatagggttctctccgttttcagtagatctctcactgtcttctttt

SEQ ID NO: 181730 - DNA, 184 bp, Glycine max
aagagaatggccactttctgattggatttgaatcgtctatgtaaaatatgctatgtttattatgtcttagattctttattgacttctgtcttttgtttctgccttgttttttagtttctattttatagttgctaatgtatatgtatattaaggggtcttaacaataaatcatattctttgtacc

SEQ ID NO: 181731 - DNA, 279 bp, Glycine max
cacggagttatatgcttctgaaactcgtaaactggttgaaagtttcattaattatgtcatttacaagctatcaagaagtggacttcaaaatgtggagggaaaacggattcatgatttctttctgacactggcaacctgcaacaccattgtgcctcttgttgttgagtgttgacacacctgaccctgatgtcaagctgatagattaccaaggagaatcaccagatgaacaagcactggcttattctgctgctgcctatggttttatgctcatagaacgaa

SEQ ID NO: 181732 - DNA, 279 bp, Glycine max
actcgagccgaatcggctcgagaccatggcctcaaccaacgctctctcttcagcctccattctacgctctcccaaccgccagtactctgaccgaagagcgaaccataatggaagagtaaattaccggaaaccgaataaccgtttctccgtgaaagcctccgccaaagagattgcctttgaccagcattcccgctctgctatgcaggccggcattgacaagctcgccgacgctgttgggctcactcttgggcccagagggaggaatgttgtgttggatga

SEQ ID NO: 181733 - DNA, 278 bp, Glycine max
gggagttttatgatgaatgttcaggagctggccaccatcaaggtggagaagctccctgttaagatattgttgttgaataatcaacacttgggtatggttgttcagtgggaggatcggttctataagtctaacagggctcacacatatctgggagacccctctaatgagaatgccatataccccaatatgttgaagtttgctgatgcttgtgggataccggcagctcgtgtgaccaagaaagaagaccttagagcggcaattcagaaaatgctggagac

SEQ ID NO: 181734 - DNA, 278 bp, Glycine max
tgaatatcgtgataagaccaatagttgcactcaatgtactcaatcagaaacagaagccactagaagtccagaagagctgttattacttgttagattagagcagatgcttctttctgcatcaacaataaagaatgacaacatagaatctggaattcctctcataaaacagaaagctgatgatgactcgtggagccatattatagaggctcttctagttggcagtggaacgtcgactggtactgttgattggcttcttgaagagcttctaaaggataagc

SEQ ID NO: 181735 - DNA, 273 bp, Glycine max
cgaaaccctcttcatcttgttctatctgtgacgagcatcatggcctcaagagcagtgttattgttggctatgtgtgtgcttccggcgatggttgtggccattcgcccagcaaagaaccctttttgcgtgaagggtcgtgtctactgtgacccttgccgtgctggttttgagacctcagctaccacctacattgctggtgctgagattatgttgcaatgcaagagcagggttagcaacgaggttgtgtacacgaagaaggggtacaccgactca

SEQ ID NO: 181736 - DNA, 283 bp, Glycine max
tgagaagtttcctcaattgggtttgaagcaattcgattgcattgagacaacctggcttcgatcggtgctgttttgggacaacatagacattgcaaccccagttgagattttgcttgaaagacaacctcagtcttttaagtacttgaaaagaaaatctgactatgtgaagaagccaatttccaaggagggttgggaggggatttggaccaagatgattgaattggagaaggcaataatgtacttcaatccttatggtggaagaatggctgagattccatcaaca

SEQ ID NO: 181737 - DNA, 267 bp, Glycine max
gatggatccagacgcgttggcaaaggcattcgtggagcactactacagcaccttcgacaccaacaggaacggcgtagcgaatctctaccaggagggctccatgctcactttcgaagggcagaagatccaaggggcttccaacatcgttgccaagctcacctccctcccttttcagcagtgccaccactcaatctccaccgtcgactgccagccctccggcgtcaacgccggcatgctcgtcttcgtcagcggaaacttcagctcgcc

SEQ ID NO: 181738 - DNA, 279 bp, Glycine max
ataacacaaagcacaaagcaaagctcatccttgagttaaaaaatggcagcagcttcttccatggctctctcatccccatccttggctggcaaggccgtgaagctgggcccatcagccccagaagtgggaagggtgagcatgaggaagaccgtcaccaagcaggtctcctcaggaagcccatggtacggcccagaccgagtcaagtacttgggcccattctctggcgagcccccgtcctacctaaccggtgagttcccaggcgactacggctgggacact

SEQ ID NO: 181739 - DNA, 281 bp, Glycine max
cttcgaatctggaagccacagtgtggtggaacttaccaaagctaactatgaaaactgtgaagtcgataacaacatcaaagcctttaatagaggaccagctagagtcaccctcaatcgcacaggagaattctacttctcctgtaccttctcaggtcattgcagcagtggccaaaagctaagcattaaggtcactgattcttcatcaccagcacctcagaaagcaccagctgaaggtccttcagcttctgctcctccaccacagaatgctccagctgaaggtc

SEQ ID NO: 181740 - DNA, 275 bp, Glycine max
atttttcattcgttgtgatcttcctcttcctcgtacacaggtgagcgactgaaaggtagcaatggcgaccaggaacttggaaaagatggcatccattgatgcacagttaggcaattgctcctgcaaagtgagtgaggatgacaaactgattgagtatgatgctcttctgctggatcggttccttgatatccttcaagatttacatggggaggatctgaaggaaacagttcaagaagtgtatgaactttcagctgagtatgaaggaaagcatgacc

SEQ ID NO: 181741 - DNA, 278 bp, Glycine max
gaagagagtgaagtttgtgaaagagatggcactcgtaacaacaaacccaaccatcaatgaggggcctctgttcgccgaagttgacatgggttccgacttcaacgccccaacggttcgagctaccgttgttcaagcctccaccatcttctacgacacaccagccaccttagataaggctgagaggttgttggctgaagctactagctatgggtcccagcttgtggtgtttccagaagcctttgtgggtggctacccgcgtggttcagcttttggtcttt

SEQ ID NO: 181742 - DNA, 281 bp, Glycine max
caacaactataataacatctttctctctccgaacagatcacactatggccacctcaagcgccaaatcagtccatgatttcaccgttaaagatgccaagggaaatgatattaatcttggtgactacaaaggaaaggtccttatcattgtcaatgttgcctcacaatgtggcttgactaattcaaattacactgagctcagtcagttgtatgagaaatacaaacagaaaggtctggaaattctggcatttccatgcaatcagtttggggcacaggagcctgga

SEQ ID NO: 181743 - DNA, 284 bp, Glycine max
caaagcgtctcttacgtacttgccaaagaggaacaaaagtgtttgactgttgatagcatcatcaagaagaagttgtagagatgttagggctatttgacaagagccacaagatcaagggcactgtggtgttgatgcccaaaagtgtcttggacattaacgacttgaattcagtcaaaaatggcggagttggtggcgttgtctctggtatctttggcgccgtcgccgacgtaaccggccaaatagttgatactgcaactgccatcttttcccggaacgtctccttc

SEQ ID NO: 181744 - DNA, 291 bp, Glycine max
atgatgtcgaggtttctggatcaccaacagaaaaggcaattttacaatggggaatacagattgggatgaattttacggcagctcgatctgaatcatcaattattcatgttttcccattcaattcagagaaaaaaagaggcggagttgcaattcaaacggctgactctaacatccatatacactggaaaggtgctgctgagatagtcctagcctgctgtacaggctatgttgatgtgaatgccagctggttgggatggatgaggagaagatgacatttttcaaaaaagctat

SEQ ID NO: 181745 - DNA, 282 bp, Glycine max
cagaagagaagaagaagaagaagaagaagaagctctggattccacctcttcccgtcgttcgagacggttgttgtgctgcttgctcttcaggttgacctgggattgaatctaaagaatcttgatttacattttgagatatggagggagtttgtttctggacaaattgctaccagtatcggttttttgcattccaagaagtgcttgattggcgagttttcatccttggagattttcttcggtttcctttgtgaattgcacttagggttctgctccgctttaatg

SEQ ID NO: 181746 - DNA, 277 bp, Glycine max
ctcgagccgctcgagccggttattaggaccgccttggttgatgcagccagtgtgtcatctctgatgacaccaactgaagctgttgtgtctgaactcccgaaggacgataaagatgttcctgccatgggtggtggcatgggtggcatggattattaaggggctattttccctgaacaaccttgcttcctttaattggacgtagattggggtggtgtttcaccactattttgctgctttttctttcttatttattgacagaaggcatcactgtaatcat

SEQ ID NO: 181747 - DNA, 275 bp, Glycine max
cgcgcacatctatttgaagtggcgtcagggcttgactcacttgttcttggggaaggtcaaattcttgctcaggtgaagcaggttgtgaaagctggacagggagtgcctggttttgataagaaaatcagtggtttgttcaagcaggcgatatcggttgggaagcgggttagaaccgagactaacatttcatctggatcagtttctgtaagctcggctgctgtggagctgcactgatgaagctaccggattcctcctttgctgattctggagtgttg

SEQ ID NO: 181748 - DNA, 281 bp, Glycine max
gttccatttcccgcttcttcttttttccctcacttttccccggcgagaaaatgagagaaatcctccacattcagggcggccagtgcggcaaccagatcggagccaagttctgggaggtgatctgcgatgagcacggcatcgaccacaccggaaagtacagcggcgactccgaactccaattggaacgcatcaatgtctactacaacgaggccagcggtggaaggtacgttccagcgccgttctcatggatctggagcccggcacaatggactcggtcagat

SEQ ID NO: 181749 - DNA, 268 bp, Glycine max
ccgaatcgaggcctccgaggacacgtggccgccgcggaagagcgtcgtctcctgcgccggcgtctgccgcagctggagacatatcaccaaagacattgtcaaaacgcccgaactctcctccaagatcaccttccccatttctgttaaacagcgctagctgaagatgggaagttccttcttgctgcacgcaaatgcagacgtccaacctgcacagattatatcatctctcttgacgcaatgatatgtcaaaggggagcaactcctatgt

SEQ ID NO: 181750 - DNA, 288 bp, Glycine max
cgccaccttaaatataacaaatacttgtctggtaaatgtaagttttatcctcctatcctcttcacaacacttgacaaagtgatgatgagaacaccaataagcagtgatgaaagtggtttgaagaaggggccatggagcccagaagaggacaaaatattagtggatttcattgagaaacatggtcatggaagttggagagcccttccaaggcttgcaggcttaaacaggtgtggaaaggttgcagactgaggtggactaattacctcaggcctgacatcaaacgcggaa

SEQ ID NO: 181751 - DNA, 271 bp, Glycine max
atcggctcgagtgaattcatgataaaacccttcaccgttcctttattatacattttcctgtcaataaagggatcaacgggttgggggatcaaatggtaaagttctactgttggtaaattggaggattagaaacatgactattgctttccgattagctgcttatgcaccaattgctatctcatttatgctattgattagcgtacctgttgaatctgcttctcctgaagctggtcgcataacaaaaatgtcgtatcttccggtacatcattat

SEQ ID NO: 181752 - DNA, 292 bp, Glycine max
gactcgagcagctcgagcggctcgagcggctcgagctcgagccgattcggctcgagaaacccacaggcacgctgaacatggaacacagaacccatagaactcaacctggcttcagcaaaggatctcaaagacttgagtatattctcaaagatggatgtatatgctgtgctttcactctccggcgatcaaaagatcaagactcccgtccacagaaacggcggcatacaagcaacatggaatttcgggtcaagttcacttttgatgaatcggtggcgcggcagaaccgtttggg

SEQ ID NO: 181753 - DNA, 278 bp, Glycine max
ttctgttacagctgaggattggttgaagcctaatgtagtgttggaagcatttgaagctagggcttctaggatgtcagttgcttgtgctcaaaatcttagcaagtttgctaaccctgaagagggttttcaagaactagctgctgatttagttgatgccgcggttgctcattgccagttaattgttgtttccaaatttattgagaagttgcagcaagatatacctggaaagggaggaaaaagcaattagaagttctttgcagcatttatgctttgtttct

SEQ ID NO: 181754 - DNA, 280 bp, Glycine max
cacaaagcgggttactgtctgttcaagctaccatctctctctctctttcttagtgcctccttgccagaagttaaaatggcccaagaaactttcctattcacatctgaatcagtgaacgaggggcaccctgacaagctctgtgaccagatctccgatgctgtgctcgatgcatgcttggagcaggaccctgacagcaaggttgcctgtgaaacctgcaccaagaccaacatggtatggttttcggagagatcacaaccaaggccaacgtggactatgagaa

SEQ ID NO: 181755 - DNA, 283 bp, Glycine max
ttctagtcccaaagagctaacaagagattcaagaccggcatggctaatgaagaggaacagaaaaaccacctcttcggcatcaaagatctcggtcacaagactctccttcagagtgatgcactctatcagtatatacttgaaaccagtgtctatccaagagagcacgagtgcttgaaagagatacgcaagatgactgcaaaacacccactgaacatcatggcaacaccagcagcgaaggacaacttctgagcatgcttgttaagctcacgaattcaaagaacgc

SEQ ID NO: 181756 - DNA, 280 bp, Glycine max
cgccaaccaaaaccttctccgttaagaataactctctctctctctctctgaaatgggcgaggaatctcaagggattaagctgtttggtgcgctgattacattgaagggtggggaagtaaagaaaggagaaaaaggaagcgaatatgagagggtggagaagagagcagagaagataataccctgcccgagatgcaagagcatggaaactaaattctgttacttcaacaactaaacgttaatcagccgaggcatttttgcaagagctgccagaggtactgga

SEQ ID NO: 181757 - DNA, 279 bp, Glycine max
aattaataacaagctagctattagttcgattttgtagtaagtgaggtgccaatatggtgaagatagctcttggtactttggatgactcttttagcgctgcctctcttaaggcttatttcgcagagttccacgcaactctgattttccgtgttcgctggtgttggatcagccatcgcttacaacgagcttacaaaagatgcagccttggatccaacggggctggtggcagtactgtggcacatgcatttgcactgtttgtaggtgtctccgtcgccgcca

SEQ ID NO: 181758 - DNA, 283 bp, Glycine max
aaaaccttgatcaagaattgaagcattaatcttcaaccatggccacacccttggcctaccaagagcaccttccggcggcacccagttggctgaacaaaggtgacaacgcatggcagttaacagcagccaccctcgttggtcttcaaagcatgccgggtctcgtgatcctctacgcaagcatagtgaagaagaaatgggcagtgaattaagctttcatgggtctctatgcctttgcagcattctaatatgttgggtgttgtgtgttacgcatggcctttggaga

SEQ ID NO: 181759 - DNA, 265 bp, Glycine max
cagatgagttcatgcttgatttcatacagtgggagtgtgggaggactcgaagagcttctgcaataattttgaacacctttgatgccttagagcacgacgttttggaagcgttctcgtccattttgcctccggtttattccattggtcctttgaatttactcgtgaaacatgttgatgacaaagacttaaacgcaattgggtccaatctttggaaagaggagtctgagtgcgtggagtggctgaccacaaagagcccacagtgtcg

SEQ ID NO: 181760 - DNA, 283 bp, Glycine max
gtgcctttggaagaccgaatactgattcttaagaagggttctaagcctgatgatcggatatggttcctggagattgacacccaatatgttaggcagcagcaaaaaattttggggactgaggtagttgcatggagtaaaggtgtgataggcaatgctgagaagcctgttgttattagtggtccttctggagtaggcaaaggaacactgatatcaatgcttatgaaggaatttcatctatgtttggtttttccgtgagccacaccacccgtgctccaagaggtat

SEQ ID NO: 181761 - DNA, 281 bp, Glycine max
gaaaaacaatagcccacaagattggcctgagccaatagtcagagttcagtccttgtccgaaaggtgcacagattcaatccctgagaggtatatcaaacccctcagtgaccgtccatctgatgatgccgttgctgttgatgatgccaacatcccaatcattgaccttgcagggctttatggtggtgacccagatgctcgagcctccacactgaagaaaatatctgaggcttgaatgagtcgggtttcttccagatcgtgaaccatggtgttagccctcagct

SEQ ID NO: 181762 - DNA, 280 bp, Glycine max
gtaacggaaactggtgacacagtttagagagagagagaaacaaagcaaaagccatttggatcctctcttctcttctttgatctccgttacccttttcgttttctcaacacagagagagagagagagtctttcggagttcgtttgcgtgtgttgtgtgatcagtcaccgatggcagcaccacctgcgagggcacgtgccgattacgattacctcatcaagcttcttcttatggcgatagcggtgtcggaaagagttgtctgcttttgcgattttctgatgg

SEQ ID NO: 181763 - DNA, 278 bp, Glycine max
gaaaaattaagcaacgattcaagaagaaaatgggttctgaacttgaagctcccattcacgtcctcatggtgtcctatccagcacaaggacacataaaccctttgctcagactaggtaagtgccttgctgcaaagggcttatttgtaaccttcaccacctcagagaccgctggtaaaaacatgcgaaccgccaataacatcactgacaaatcagtgattcctgtcggcgaggttttctcaagttcgatttctctgaagatggcatggcagatgatgatg

SEQ ID NO: 181764 - DNA, 275 bp, Glycine max
gtaaaatttgaacacgtatctgctcctcagcctgatgatattgccaaagccgttagtggggaagctgctgaaatgattatccaagtgtctgatagtgtggttcctgcattcaagtctgctgctgaagatcttttgaacaattctggtttaccagtcattgaattactggcaaaggctcttgcaaaggctgttggttatactgaagtaaagcaaagatcacttctaattccatggagaactatgttacattacttcttgagactggcaaaccaatc

SEQ ID NO: 181765 - DNA, 277 bp, Glycine max
cctgttgcatcattggagcatggtggtggtggaggaggagtagtagctgtggcctcctctaccaccacctgttgcatcattggagcatggtgaaggtgctcatcatgaaggagaggccaaggagaagaaaggtatattagaaaagatacaagagaagcttcctggttatcactccaagacagaggaggaaaaggaaaaggaaaaggagagtggtgctcattgatattaagattgagacaaggcttttttgttggttggagatgcatgattgtggtgt

SEQ ID NO: 181766 - DNA, 277 bp, Glycine max
ctcagttctgccacatattaacattccggcgcaaaatgaaggtcatcgccgcctacttgctcgccgttttgggaggcaacgcagccccttccgccgatgacttgagggacatccttggctccgttggagctgacgcgaacgatgacaacatcagcaacttcttgtctgaagttaagggcaaagacattgtggagcttatcgcctccggtagggaaaagctggcctccggccttctggcggtggcgccgcgttgccgttgctgccgctcccggcggtg

SEQ ID NO: 181767 - DNA, 270 bp, Glycine max
cctcgagccgaatcggctcgaggacatttttcaaacatttgaaggacacaacacagttctgcaccaacaggttgcaggtgatattttgaaacaatacaagggaaagttcaaaggtggaactttcgcagtgacatggaactacttgagagaatccatgaatacttatctgtcacagccaaatccggttactgctcggtgggaaggcgaagaccatttacgagatcctaaatttcattggatgcgttcagataccgaacatctagattactt

SEQ ID NO: 181768 - DNA, 276 bp, Glycine max
ccactccatcatcgacatggacgctgatgttatcaccattgagaactctcgctccgatgagaagctcctgtcagtcttccgtgaaggtgtgaagtatggtgctggaattggccctggtgtctatgacatccactccccaagaataccaccaactgaagaaatcgctgacagaatcaataagatgcttgcagtgctcgagaagaacatcttgtgggtcaaccctgactgtggttcaagacccgcaagtacactgaagtgaagccagcctcacaacat

SEQ ID NO: 181769 - DNA, 254 bp, Glycine max
ggacaactcagtcgttatgggaacattgaactcagtccatcagctggtgtcctaaattatggtcagggtttattcgaaggcacgaaagcatacagaaaagaaaatgggggcttgctactcttccgtccagaagaaaatgccattcgcatgaagactggtgcccaaagaatgtgcatggcatcgccttccattgatcattttgttgatgctttgaaagcaaatgtcttggctaatagcgttgggtcctccaccgg

SEQ ID NO: 181770 - DNA, 235 bp, Glycine max
gcttgcaacaattgacaatccatcaaatgcttttgaatgggcacttgctgaaatgataaaccaaccggagttactccaccgagccgttgaagaattggatagtgtggtaggaaaagagagactggtccaagaatcagatatacctaaactcaactatgtgaaggcttgtgcaagagaagctcttcgccttcatcccattgcaccttttattcctccccatgtctctatgagtgac

SEQ ID NO: 181771 - DNA, 275 bp, Glycine max
gaatgatgcagggtgtatgtttcacagtgaaggaggtctgatgagctttgagcatccaatgaacaagttgaaggcaatgccaagagtggacagtgaaggggccatgtgtggggccaacttcaaagttgataagttcgccagagtcaacagcattcctcgagtgggaagtcaatccaattggatggaatgggaccaacattagcttaaaaataaagccttacgataatgtaaataaaaaaaaaaatgtcatctatgtatgctcctttcctaactta

SEQ ID NO: 181772 - DNA, 275 bp, Glycine max
cctcgagccgattcggctcgaggcttcggctatcagaaactgtgatcctgagggtcctctgatgctctatgtctcaaagatgcttccagcatctgacaagggcagattttttgcttttggtcgtgtattctctggcagagtttcaactggtttgaaggtgaggattatgggaccaaattatgtccctggggagaagaaggatttgtatgttaaaagtgttcaaagaatgtcatttggatgggaaaaagacaggaaactgtggaagatgtcccctg

SEQ ID NO: 181773 - DNA, 279 bp, Glycine max
ggccgaaccgggcggctggcaccggttactggaaggcaaccggggcggataagcccaacggtcagcccaaaccggttgggattaaaaaagctttggtgttttacgcagggaaagctcctaaagcggacaaaagcaattggatcatgcacgagtatcgtctcgcagacgtagatcgctccgttcgcaaaaagaacaccctaaggttggatgattgggtgctttgccgtattacaacaagaagggcacgatcgagaaactgcaaccaagcagcgatgttgc

SEQ ID NO: 181774 - DNA, 271 bp, Glycine max
tctcgagccgattcggctcgagcaaaggtgtatttccagtgcttgactatcccttggtaataacattctgccgtctatcggttcgcatggttgggatgcctctctttcagttttgtgtgcttctgtgccaagagattccatgtctggttcacaaatctccataattcaatacgcgatgaccggtatctgattggccggaggttgcataactttggagaacatgctgagaaagcaatgtagcagaaacttctacaggggagcaggaagctat

SEQ ID NO: 181775 - DNA, 279 bp, Glycine max
gggagttccattgactgccgaagagttagaagaaaaggagcagttgctagaggagggattttcatcatggagccggaaggattttaatgctttcattagggcctgtgaaaagtatggccgaaatgatataaaaggtattgcttctgagatggaaggaaaaacacaagaggaagttgaaagatatgcaaaagtcttcaaagaaagatacaaggaattaaatgattatgatagaatattaaaaacattgaaagaggggaggcagaatatcccggaagatga

SEQ ID NO: 181776 - DNA, 281 bp, Glycine max
  unsure (1)..(281): unsure at all n locations
caattatacaaacacatattcattctcctcacataccaaaaataaattatttttcttgttattttccctttgctaacggaaagccatgaaattcgggaagagcctgagcagccagatcgagaaaaccctgccagagtggcgcgacaagttcctctcctacaaggagctcaagaagaagctcaagcagttcgaccctcncgcccccgcctccgccgccgatgaacgcccggcaacgcctcaagaccgacgccggcaacgcgacgccgacgccgtttccgacg

SEQ ID NO: 181777 - DNA, 282 bp, Glycine max
ttccttctctctcctcatttccaaagttcccaactttactaacccgagctgcaacgaatgccgctgatattagcgaaaagcgattcgatccagattcgcgaggtgtggaacgataacctggaagaggagttcgcgttgattcgcgaaattgtggacaactacccttacatcgccatggacacggagtttccggggatcgttctccgaccagtggggaatttcaaaaacagctagattaccattaccaaaccctataggacaacgtcgacatgctcaaactca

SEQ ID NO: 181778 - DNA, 279 bp, Glycine max
ctaggtcaaaagggactacatgtgtctgtactgcaatgatcgatgttatccattcagcagcttggaagcagtcaggaaacatatggaggcaaaaagtcactgtaaagtgcattatggtgatggtgatgatgacgaggaggtagaattagatgagttctatgattatagcagcagttatgtggatgatcaaggcaagcagcttgttgcatcttgtgatgcatctaacaagtagaacttgctggtgggtccgagctcataatcaccacgaaatctggtgat

SEQ ID NO: 181779 - DNA, 273 bp, Glycine max
ctcgagccgtcttactctagactcttccttttctcttctctgtctaaggggtgccctgagatcacattgaacaatggtgaaggctgtggccgttcttggcagcagtgagggtgtcactggaactattcacttcgttcaggagggaagtggtccaaccaccgtaactggatctcttgctggtcttaagcctggtctccatggtttccatgtccatgccttgggggcactaccaatggttgcctctcaactggatcacatttcaatcctaataac

SEQ ID NO: 181780 - DNA, 265 bp, Glycine max
cttcattcataccccttatcaaatctccacacatatatattatttccaccgatctctctgtcattctccctcgcgttctcattgtctctagacgaagcgttcgcaaaaacaagttcgttgatttcgttggtgagtatcaccttgatcttatagtagggtatggcgcggtgcccgtgattgttcctcgtgtttccggggtgcacatgttgttggatagctttgagcaatccacggcgtgcttctgtgtgaaggagaagacattgat

SEQ ID NO: 181781 - DNA, 268 bp, Glycine max
tgctgattgccttgttgggtggtgcacaagctgttgtgttatgtaacatcgactcaagtcaactaaacttgtgtcgtgctgcagttactggtcaaaaccctccaccaccagatgagaaatgttgtgcagttattcgccaagccaatttaccttgcctctgcagatacaagtctattcttcctttaattggaataaaacccgaaaaggctttggccttgcctggtaatgtggtctccaatcccctcctaattgttgagtgtagtgaagc

SEQ ID NO: 181782 - DNA, 274 bp, Glycine max
actacctccaggaccaaggaaactacccttcattggcaacctccaccagcttggtacgttgccacatcaatcccttcaatacctttcaaataagcatggacctctcatgttcttgcagctgggttcaatacccaccttggtagtttcctctgctgagatggccagagagattttcaaaaaccatgactcagttttctctggcaggccttcgctatacgctgcaaacgtttcggatacggttcaaccgtgagttttgcaccgtacggtgagtact

SEQ ID NO: 181783 - DNA, 270 bp, Glycine max
  unsure (1)..(270): unsure at all n locations
gaacgtacccgccaacttgatggtgctcatgttgaattcttgagaggagttgctaatccacttggcatcaaggtgagtgataagatggttcccgatgaacttgttaagctgatagatattctgaaccctaaaaacaagcctggaagaattacagtcattgttagaatgggagctgagaatatgcgagtgaagcttccacatcttatcagggcagttcgcagagcaggtcaattgtcacttgggttagtgacnccatgcatgggaacacca

SEQ ID NO: 181784 - DNA, 280 bp, Glycine max
gctaatgataattttacttttgtgcataaaaactcattggtgccaccttcaaaagcagtcaaccaacgtgatgcagatctcatccatttctgggataagttccgcaaagctcctgtgggttcttctaggaaagctgcagctgagaaagaaattctggaagcaatgtctcacagaatgcatatagatgacaacatgaaacttattggaaagctcttatttggcattgaaaaggtccagaactgcttagcagtgttagacctgctgggcaaccatttgttga

SEQ ID NO: 181785 - DNA, 277 bp, Glycine max
aaaggagtgatttggagtttggagcgactgaactaatcattaatttgcactcgctgtttcagcttcatcacccttcttttgcatcatttatatctcttgagaaatggcacaagaaacctttctattcacatctgaatctgtaaacgagggtcaccccgacatgctgtgcgaccagatctctgatgcagtacttgatgcgtgccttgaacaggaccctgacagcaaggttcctgtgagacatgcaccaagactaacatggtcatggtcttcggagaga

SEQ ID NO: 181786 - DNA, 273 bp, Glycine max
caccactttcataatggcactgttgaatcccctccagaagaacccttttaccctatggcctcacttgtgtatttccaattcacttttgctgctattacccttattttgttggctggctctgtcctcggccgaatgaacatcaaggcttggatggcttttgtgcctctttggttgatcttttcctacactgttggggcttttagtctttggggtggtggctttctctacaatggggggttattgactattctggcggctatgtcatccaccttt

SEQ ID NO: 181787 - DNA, 274 bp, Glycine max
cttaccagtatggctatccaacaatctctgttagacaggcctagacaatctgtttccaaaactatctgcttaatcttttctatagctgctgtcatgatctcatcagcctttgttggttcttatctcatcaaatccacctccttcttcaaccaatcctctcctcaacatctctgtgatcatgcacttgatagggcaacatgtttaacccatgtctcagaagtggtcaaggtccgatcttgacccccacaaaagaccacaaattcaatttgttaca

SEQ ID NO: 181788 - DNA, 275 bp, Glycine max
gtgaataccctaattcggagggtttcagttttcgccctcttttctcatctccaacatcttcgtcgtcacggaggctagtcttcctgttatcacaaacaatgtctgacggtcaagaatcagacaagaatattgagatatggaagatcaagaaattgataaaggcattggaagctgctcgaggtaatggtaccagcatgatttctctgataatgcctccacgtgatcagattctcgggtcactaagatgttgggagatgaatttggaactgcttcaa

SEQ ID NO: 181789 - DNA, 270 bp, Glycine max
ctctctctctctcttcttcttcttcttcttcttgcacgtattgttctaatccacaaaaataatggccttaaattacaacattgccctcgccttctctacggttctcacgctgcttctccttcccttaccaacccttggggagctcgtgcaggagcagccactagtcctcaagtaccacaacggccaactcctgaaggggcgcatcaccgtcaatctcatctggtacggcacttcaccccgatccaacggtccataatcgtggacttcata

SEQ ID NO: 181790 - DNA, 239 bp, Glycine max
aaagtgtcttctcagaatggaacaagggagaacttctgagtttcctgattgaaatcactgcagatatatttggaattaaggatgataagggagatggatatcttgttgacaagcgtcctagacaagactggcatgaagggcactggtaagtggactgttcagcaagctgctgaattatcaattgctgctcccactattgaagcatcattggatgcaagggtcctgagtggggtgaagga

SEQ ID NO: 181791 - DNA, 268 bp, Glycine max
cgataatctcccaactggggatgaggaaggcctctattatgcattggatcttggcggcacaaacttccgtgtccttcgtgtacatttaggggggaaagacaaaggtgttatcggccaggagtttgaagaagtttcaattcctccaaatttgatgactggctcttcagatgcattgttcgattttatagcagcaggtcctgcaaagtttgttgggtcagaaccctgaaggtttcatctccccctgggaagacaagaggactgggtttac

SEQ ID NO: 181792 - DNA, 272 bp, Glycine max
cttgtggaagtcaggggaagctcactattactgatgatgatgtgatagagaagagtaacctaagcagacagttccttttccgtgattggaatattggacaggccaagtccacagttgctgcttcagctgctgcagctataaatcctagttttaatattgaagctctacaaaatcgagttggtactgaaactgagaatgtgtttaatgataccttctgggaaaacttgagtgtcgttgtaaatgcactggacaatgttaatgcaagactatat

SEQ ID NO: 181793 - DNA, 264 bp, Glycine max
cacaaatgataatcatctctactgaccaaatctgaagaaaattgctttctctttggttcctagctcgcactctctctacgcacgcctcaacatcccttctctgctccattcattatgtctccgtcgttggatcttccccccaagggtggcttcagttttgatctatgccgaagaaacgcaatgcttcaaaacaagggcctcaaagccccaacctttctcaaaactggcaccactattgtcggtttagttttccaggatggtgtc

SEQ ID NO: 181794 - DNA, 214 bp, Glycine max
cagaactcgttccccgcctcatccggttccttcaaaaccgaactcgtcgaaccggttatcaaacccatgctcgacctgctccgccaaaccggttcctacttaatggtgaatgcgtatccgtttttcgcttacgctgcaaactctgataaaatctctttagactacgcgctattcaaggaaaaccccggcgtggttgattccggtaatggtttaa

SEQ ID NO: 181795 - DNA, 261 bp, Glycine max
gaaaagtaaagtttctggcagagggaaactggggcattcgcaaggtttatggagcagtgccacatgatttggggacacatgatccatggcatgaaatgaatgcctataacatccatgatactagcaagtggaaggacctgaacccaaaatttgttcttcaggtgtatcgagattttgctaccacaggtgatttggaatttggagtggatgtgtggcctgctgtccgtgctgcaatggagtacatggaacaatttgatagag

SEQ ID NO: 181796 - DNA, 259 bp, Glycine max
cagagccagcgagagcaaaaccctagttcatccatcaccagtcgaggaagaagatggtgaagttccttaagcccaacaaggctgtcatcgtcctgcagggccgctacgccgggcgcaaggcggtgatcgtgaggaccttcgacgagggaaccagggagcgcccctacggccactgcctcgtcgccggaatcaagaagtaccccagcaaggtcatcaagaaggactccgccaagaagacggccaagaaatctagggttaa

SEQ ID NO: 181797 - DNA, 250 bp, Glycine max
actcgagccgaatcggctcgaggttggtcataggagaacaccttggctggttagattccatcaattgcatccacatatacttactagtgggagcttggatcaagaagttcgtttatgggatgctaacacatcagagtgcataatatctcatcatttctaccgtcccattgcatctattgcttttcatgccaaaggtgaaataattgctgttgcatctggccacaagttgtacatatggttccacaacaag

SEQ ID NO: 181798 - DNA, 255 bp, Glycine max
ggctagggttagtgctttgtttcactctttgctcttgatttcttcccttgtattggcttctcaaatccatgtttcctctgggaaactagtccctggactatcatggaattactatttgttgacatgtcccaagcttgagaggattataaggaagcatcttgaggatgtcttcgagaaggacagtggagtagctcctggcatacttcgactcttcttccatgactgctttcctaatggatgcgatgcgtctatatt

SEQ ID NO: 181799 - DNA, 260 bp, Glycine max
ctcagccacagccacaacacacaaacacaaacccttcgttcctctctcgttcccttcttcaattcgatcaaacacagaatagtacttttttattatgatggccgtggcccgaaaggaaatggaccggatcaagggcccgtggagcccggaggaggacgaggctcttcagaagctcgtggagcggcatgggcccagaaactggtccctcatcagcaggtccattccgggccggtctgggaaatcgtgcaggctccgatggt

SEQ ID NO: 181800 - DNA, 266 bp, Glycine max
cctcgctctatttctcagtctctgtgtttgcggctgaggattccgaacgagtgaccttcttcgtttctcgcaaagtttaagtaatcatgggtaaggaaaaggttcacatcaacattgtcgtcattggacatgtcgactctgggaagtcaactaccactggtcacttgatctacaagcttggaggtattgacaagcgtgtgattgagaggttcgagaaggaggctgccgagatgaacaagaggtcattcaagtatgcctgggtgctc

SEQ ID NO: 181801 - DNA, 268 bp, Glycine max
atctattcttacaagttacatccattgagaaacatgaaggtctcccccttagcattttcaatcctttttttgtccttcaccatagaactcttcattggcattgcttcagcagcacaagaaccagtgcttgacacctcaggccagaagctgagaacaggtgtcaagtactacattctaccagtcttcagaggcagaggtggaggcctaacagtttcaagcagtggcaacaacacatgccccctctttgtggtgcaagagaagcttgaat

SEQ ID NO: 181802 - DNA, 265 bp, Glycine max
gctttgaaacccggttcatccgaagcccttcaccgaaccatgtcgaggagaaaggttagagagccaaaggaggaaaatgtgactctgggtccagctgttagagatggtgaacacgtttttggcgttgctcgcatctttgcctccttcaacgacaccttcatccatgtcactgatttgtctggcagggaaacccttgtccgaatcactggtggtatgaaagttaaagctgacagagatgaatcatctccttatgctgctatgcttg

SEQ ID NO: 181803 - DNA, 254 bp, Glycine max
ccaaatgggttgatgaagtggcaccggatctggcctggatgacccagagatcaagctgggtcggatacgtggctgtttacgaggatagaagagaaatagcacggatgggaagaagagacattataatctctcttcgtggaacttccacgtgtatggaatgggcggagaatctcagggcccatatggtggaaatgggagacgaagaagcaaaagccaaagtagagtgcgggttcatgagcttgtacaacacaaaa

SEQ ID NO: 181804 - DNA, 253 bp, Glycine max
gagagaagaagaaacttaatcgatcatcacttcacttcactaatacatcatggcagacgagacccagaacaagtatgagagctctgaggttgaggtccaggatcgtggtgtttttgactttctcggtaagaaaaaggatgaagaagacaagcctcatcctcaggaggaggtcatcgccaccgagtttcaaaaagtcactgtctcagaccaaggagagaacaagcacagcctcttagaaaagttcaccgatctg

SEQ ID NO: 181805 - DNA, 257 bp, Glycine max
ctcgagccgcagcactactctctgatcagttttttcttggtctccgaatcacaaactcttcgaaaaaactaacattaatggctccgagggatatcaatagatctaacgttgttgttgccggaggatccaacccgacccgtaaagagatccgataccgcggcgtgaggaagcggccgtggggccgtacgccgccgagatccgcgatcccggcaagaagacgcgcgtctggctaggaacgttcgacaccgcggaggagg

SEQ ID NO: 181806 - DNA, 263 bp, Glycine max
atcctggaacgcaaaggaggattgctgcgagtggttctgctgcgttaagtgtgacgagaaaacaaaccgcgtcattagcgttgccttatcatccccttttccagacaccaatctctcggcccaaatacctccctctgtgggtgacctcccttacctcgagtccctcgtcttccacaaattccccaaactcgtgggcccaatccagcccgcaatcgccaaactcaccaaactcaagtaccttgatctctccaacaacaatctct

SEQ ID NO: 181807 - DNA, 266 bp, Glycine max
gaacttgacagggaccaataatttgagttttgttggtggtgacatgttcaactctatccctcaagctgatgcagtgctactaaagtgggttttacataattggaccgacgaaaattgcataaagatcctgcaaaagtgtagagattctatttcaagcaaaggcaacagtggaaaagtgattatcatagatgccgtaataaatgagaagctagatgacccggatatgacacaaacaaagcttagtttggacattattatgttgacga

SEQ ID NO: 181808 - DNA, 266 bp, Glycine max
cggatgggctattaacaggacctaatgagcaaattttggttcttgcagcaaccaacaggccatttgaccttgatgaagctatcataagacggtttgagagaaggatcttggttggtcttccatctgttgagaacagggaaatgatcttgaagactcttttggctaaagaaaaacatgaaaatttagacttcaaagagctggcaaccatgacagaaggatatactggaagtgatctaaagaatttgtgcatcactgcggcttatcga

SEQ ID NO: 181809 - DNA, 264 bp, Glycine max
gaacgaaacacagagggagagagagtgagagaagcagtaattcatcacaatgggtaaggttcacggatctctcgcacgtgcggggaaagtgagaggacaaactcccaaagtggcgaacaagacaagaagaagaagccacgcggacgtgctcacaagagaatgcaatacaaccgccgattcgtcaccgccgtggtgggattcggaaagaagcgtggaccaaattcgtcggagaagtgagggaggcgtttggaagatgatggtttt

SEQ ID NO: 181810 - DNA, 257 bp, Glycine max
gaaaatcatggtggacgcagcagaacgtaggtacttggaggatgacgattcatcactcatgaaaactattaagggggcaacaactggtttagttgctggcactatctgggggaccgtagttgccacctggtatgatgtccctcgtgtagagagaaatgttgctcttccagggctgattaggactttcaagatgatgggcaactatggtttgacctttgctgccataggaggagtctacataggtgtggagcagttgg

SEQ ID NO: 181811 - DNA, 259 bp, Glycine max
cggctcgagtgaaaatatgagggtgaagcttccacatctcatcagggcagtgcgcagagcaggccaaattgtcacttgggtcagtgatcctatgcatggaaacaccattaaggctccctgtggtcttaaaactcgccccttcgattccatcagggccgaagtgagagcattcttcgacgtacacgatcaagaaggaagccacccaggaggggttcatctagagatgacgggtcagaatgtgacctagtgcattggtggg

SEQ ID NO: 181812 - DNA, 255 bp, Glycine max
caaaaacatcatcacagaaactcacaaaggaaaaacaaacaaacaaacaaaatgtcttctccaagcaagcggcgagaaatggacttgatgaaactgatgatgagtgactacaaggtggagatgattaatgatggaatgcaagagttttatgtgcacttccatggacccaatgagagtaaattctcctttgtttatatctttgttacatgttttgaagctttttgtgaattgttttttgtgaaaaaagttgggttg

SEQ ID NO: 181813 - DNA, 256 bp, Glycine max
tctcggccgattcggctcgagttcacaaccgaaacagtttccatcactctcacaaaatgacgacaatatcagattgctccctactcttcctcttcgtcttcctctccaccctccacatagcttccaccctctcaacccgcaccaacttcatcaagtcctcctgcagcaccacccagtacccagccctctgcatccagtccctctccgtctacgcgtccaccatccagcaagacccccacgagctcgtccagacagc

SEQ ID NO: 181814 - DNA, 264 bp, Glycine max
caaaatggggaaccaatcctcttcaaacaagatagaaactcttcccatcgacacaacatttaagctcccagcaaatataccagtttggccacaaggtggtggatttgctactggaaccatcaacataggagggctaaaattgtttcaaatttcaacattcaacaaagtttggaaaaccttagaaggtggaccaggtgatgcaggggcagctttctttgagccagcaggaatacctgagggcttcttcacactaggccactacag

SEQ ID NO: 181815 - DNA, 261 bp, Glycine max
cgaaattcgatttcccccaatttctagggtttcgctgaaaccctaccctgcgattttgcgattcttccttcgaactttacttggttttcagttcccttttaaccatccagatcaccatgtcaagtttggacgagccagttggccttgacaagttgccaagcatgagtaccatagatagactccagaggttctcatccgctgcttgctgtcccagagtagataattttactttgggtctgggaaactgctggattgaaggac

SEQ ID NO: 181816 - DNA, 262 bp, Glycine max
tctcaatcgttttctacataatacaaacctctctaatttttgaagcttattatacccaatctcgatatgcagatcttcgtgaaaaccctaactggcaagacgatcaccttggaggtggagtcctctgacaccatcgacaacgtgaaggccaaaatccaagacaaggagggcattcctccggatcaacagcgtttaatcttcgccggaaaacagctcgaagacggcagaaccctcgccgactacaacatccaaaaggagtcca

SEQ ID NO: 181817 - DNA, 258 bp, Glycine max
acagaacaagatcttgaaggtcatccgtaagaacttggtcaagaagtgccttgagctcttctttgaaattgcagagaacaaggaggattacaacaagttctatgaggctttctctaagaacttaaagcttggtatccatgaggattcccagaacaagggaaagattgctgaattgctcaggtaccactccaccaagagtggtgatgagctgacaagcctcaaggattatgtgaccaggatgaaggaaggtcagagtga

SEQ ID NO: 181818 - DNA, 268 bp, Glycine max
cggtgttgaatcatggatcagaaagtcgatttcagtgctccgcattccatgggaaccactatcatcggcgttacttacaacggcggtgtcgttctcggagccgactctcgaaccagcactggagtgtatgttgccaaccgagcatcggacaaaatcacacagctcactgataatgtttacgtgtgtcgctctggatcggctgctgattctcagattgtctctgactatgtgcgctacttccttcaccaacacacgatacaacttggac

SEQ ID NO: 181819 - DNA, 134 bp, Glycine max
cggctctgatgctcggtgtcgccgtcgtttgcctccacggcgcgttccgcgtgccggaggatctgttcctcgaccatcaggagaattctcaggctaccggattcctctgcttcctccgcggccctgcctccgcc

SEQ ID NO: 181820 - DNA, 260 bp, Glycine max
tggcaggtttgtcattggagggccgcatggcgatgctggtctcatcggccgcaagatcatcatcgacacctatggaggatggggtgcacatggtggtggtgccttctctgggaaggatcctaccaaggttgataggagtggtgcctacattgtgaggcaagctgcaaagagcattgttgcaaatggacttgctaggagggcaattgtgcaagtttcctatgccattggtgtgcctgagcccttgtctgtgtttgttgaca

SEQ ID NO: 181821 - DNA, 257 bp, Glycine max
aaaactttcatctttgtcatccacttaacccaggtgtaaaaatgtcagcagtgaacatgtccactatgagacttccaagagcttccttgtctggaacaacaccagctaggagatcatgtgctcttacaaagagtccatcatctttgaggtctgtgaagaatgtgtctaaagtgtttggattgaaatcatcttcctttagagtgtcagcaatggcggtatataaagtgaagctgattggaccggacggtgaagagaat

SEQ ID NO: 181822 - DNA, 258 bp, Glycine max
cgcgccgattgatatttgggaatcgcagtattcgaaatactactatggatgcaaagagagagggcgacatttccgtcctgctgtacgtgagcggaagtccaaaggctacttgttaattgcaactagtggaggactgaaccaacaaagacatgggataacagatgcagttgttgttgcaagaattcttaatgctacactagttgtacctgagttggatcatcaatctttttggaaagatgacagtgactttgccaatat

SEQ ID NO: 181823 - DNA, 255 bp, Glycine max
gcaatttagcttgcacatactcaagcattccaccattgtggcaaagccaaggtcattttagactccaccacatgatcatgatcatatgatcaatccccttaattttttcttttttcttttcccttttctttactctgtattgtatcaatgcttgaaaatggggttgttccaaaaatgtcatatatatttggcctgctaatgggtattgtaaatctctgaacttgaagtgatgcacggttttgagatggttttcta

SEQ ID NO: 181824 - DNA, 254 bp, Glycine max
cctcgagccgattcggctctagaagccccactcaaccaccacacctcacctcgttcacgctacccctttctgctcttcttctacctttcaagttttaaaagtataaagatggcagagacattcctatttacctcagagtcggtgaacgagggacaccctgacaagctctgcgaccaaatctccgatgctgtcctcgacgcttgcctcgagcaggacccagacagcaaagttgcctgcgaaacatgcaccaaaac

SEQ ID NO: 181825 - DNA, 252 bp, Glycine max
cggctcgagtgaaggtgtacggtccaacctatggagcccccaagagggtgctggtgtgtctgattgagaaggaaattgagtttgaaacagtacatattgatctcttcaagggagagaataaggaacctgagttcctaaagctgcagccatttggatcacttcctgttattcaagatggtgattatactctctatgaatctcgtgcaataatcagatactttgcagagaagtataaagaccaagggacagact

SEQ ID NO: 181826 - DNA, 261 bp, Glycine max
tccgctttcacttcttctctctcaccctccaactatgagttactacaaccagcagcagccacccgtcggtgttcctcctccccaaggttacccaccgccggaatcttacggaaaggacgcgtaccctccgccagggtacgctccacatggaggataccctccgcaggcgtatccagcacaggggtaccctccaccctacgcgcctcctcagtacggtcagcctccgccgcaacaacaccagaattcatctggcccgggttg

SEQ ID NO: 181827 - DNA, 255 bp, Glycine max
gagaatatgaagaatttaaaattcgcgtcaatggacttgttgcgaaggcacaaaaggttcctgaagaaggatgggtgatgcaagatggtacgccatggcctggaaacaacactagagaccatccaggaatgattcaggttttcttgggccaaagtggaggacttgacaccgaacgtaatgaagttccaggttagtctatgtttctcgtgaaaaacgtccagggttccaacatcacaagaaggctggtgccatgaa

SEQ ID NO: 181828 - DNA, 241 bp, Glycine max
tttgggagttaggttctgcacgctctgcttccagcgagtgttctttcttcgtttcaacaccttaatttgcacacgctgcttcttcagcttgagaaatggcacaagaaacctttctattcacatctgaatctgtaaacgagggtcaccccgacaagctgtgcgaccagatctctgatgcagtgctcgatgcgtgccttgaacaggaccctgacagcaaggttgcttgtgggacatgcaccaa

SEQ ID NO: 181829 - DNA, 251 bp, Glycine max
attattatagcaggcacctaatagatagatagatagatacgtagggatagggttaaggccatggagcgcatcatctgcgccaagtacaagctaggtcgcaagatcggaagcggatccttcggcgaaatctaccttgcgacgaatattgataccttcgagatcgtcgccgtcaagatctagaacggtaaaacgaagcatccacaattgctttacgaggccaagctctacaatattcttcaaggagggagtgg

SEQ ID NO: 181830 - DNA, 248 bp, Glycine max
gattaatgaaaatcccgaggcaggatgggaggctgctataaatcctcgtttctccaattatacagttgaacaatttaagcgccttcttggagtcaaaccaatgcctaagaaggaacttagaagtacacctgctatatctcacccaaagacgttgaaattgccaaagaattttgatgcgaggacagttggtcgcagtgtagcactattggaagaattctagatcagggtcactgtggttcttgttgggc

SEQ ID NO: 181831 - DNA, 241 bp, Glycine max
cctcattcttatttctttcctctcttcactttcactctctctctctctctcagccatcatcatgggagcagtgattctcccagatctcggcactgagattttgattccggtctgcggcatcatttgaatagggttcgccctcttccagtgggtcctcgtctccaaggttaatctctcctttggcagagacgcttcccctaacgccgctggcaaaaatggttacaacgattacctcatcgaa

SEQ ID NO: 181832 - DNA, 251 bp, Glycine max
ttgctgttagggacatgcgtcaaactgattatgtgggagtcatcaagaacgttgagaagaaggatcctaccggagtcaaggtcaccaaggctgcccagaagaagaagtgaatcgttcgggctggttcatcaggggatgttggttacaataaatgttggtttcttttctgtactcttgtgtcttcttttctaggtagcttgtctttcggacaaagtttgaagtctccaccatcatctcgcaacttctgttcc

SEQ ID NO: 181833 - DNA, 251 bp, Glycine max
atgaggtttgaaggtgaagaggctccagagcagaggtttactggtaccattgttggaatagaagattctgatcccagaaggtggagagattccaaatggagatccctcaaggtgagatgggatgaaacatccaacacccctcggccagagagagtttccccttggaaaatagagcctggtcttgctcccccggctctaaatcctctttcaatgcccaggcctaaaagagctcggtctaatgcagttccttc

SEQ ID NO: 181834 - DNA, 256 bp, Glycine max
agcaggtgcgctggccttgatcgttcggcagccaattggggccaaagcagtggtgaatgaggaatcagcagtggctggactaattgggatgatgcgttgtggaacaccgagaggtaaagagaatgtggttgcagcgttgcttgagttgtgccggagtggaggcgcagctgcaacagaaagagttgtgaaggcaccagctttggccggattacttcaaacccttcttttcacagggacaaaacgcgcaagaagaaaa

SEQ ID NO: 181835 - DNA, 268 bp, Glycine max
ggtacatgttgttgatggttcatcacagcagccagatctcgagtttgacgcagttcgtctagagctgaagctatttaatcctgaacttgctgagaagccttatgtagttgcttttaacaaaatggatcttccagaagcatatgaaaactgggaatccttcaaagaaaagttgcaatctcgtgggatcacaccattttgtatgagtgctgtcaaaagggaaggtactcatgaagttatctgtgctgcttatgagcttttgcgtaaaaga

SEQ ID NO: 181836 - DNA, 277 bp, Glycine max
ctcgagcgctttttctccctgtaattttcctttttaggttttggttatcggtggaggtgatggaggggtcatacgagaagtagcacgccattcttcagttgaaaagatagacatttgtgaaattgacaagatggttgttgatgctccaaacaatacttccctgatgtagctgttgggtatgatgatcctcgtgtgacacttcatattggtgatggagttgcatttttgaaggaagttccagaaggaacttatgatgctgttatagtggattcatccg

SEQ ID NO: 181837 - DNA, 257 bp, Glycine max
ctttaatgagcctggatcacttgctccaactggattgtatctcggtggcaccaaatatatggtcatccagggtgaacccggtgctgtcattcgagggaagaagggtcctggtggtgttactgtgaagaagacggtgcggccttgatcattggcatttatgatgaaccaatgactccaggtcaatgcaacatggtagttgaaaggcttggtgattatctcattgaacagggtctctaatctttgcttaatgtcttgtt

SEQ ID NO: 181838 - DNA, 256 bp, Glycine max
ctcgagcgcttaaaaatattcagtgaagatcaacctcaatggcatctcttggcgtgcgaccagttcttccccctccattaacttccatctccgacccacctcctcttttcgatggcaccaccaggttgtactcagttattcttgcccctatgcacaacgtgtgtggatcgctaggaactacaaggggctacaagataagatcaatttggtccctattaaccttcaagacaggccagcttggtataaggagaaagtc

SEQ ID NO: 181839 - DNA, 257 bp, Glycine max
gttggacaagaacaggagaaaggcaagctgcaagaatgagagttaggtaccttaaagcagttctcaggcaagaagtagcatactttgatttgcatgtcacaagcacatcggaggtcatcaccagcgtctctaagatagcctcgtaattcaagattgtcttagtgaaaaggtcccaaactttttgatgaatgcgtccatgtttgttgggagctacatagtggcttttgcattattgtggagattggccattgtggggt

SEQ ID NO: 181840 - DNA, 261 bp, Glycine max
tcgacaccgaacaaggctttgttgatgcgcgcagaaacgaacatgatgctgatgagtcccttaaacgacggaaagccccacgcttcgaagcttcaccagctcgacattgaaacggggaagattgttacggagtgaagtttggaaaagacggtgctgacttaacgatgagggatatcaccaatgacaccaaagggtcgcagttggacccttcggagtcaacgtttttggggctggatgataaccggttgtgccagtgggaca

SEQ ID NO: 181841 - DNA, 289 bp, Glycine max
aatcgcatcgcagaagcagtttccggtgcatctcatcgtctccgaaaatgaacgacgcagatgtctcgaagcaaatccagcagatggtgcggttcatccgccaggaagctgaggaaaaggccaacgagatctctgtctccgccgaagaggattcaatatcgagaagctgcagttggtcgaagccgacaagaagaagatcaggcaagaatacgaacgcaaagagcgccaagttgaaattcgcaagaagattgagtactcaatgcagctgaatgcttctcggattaaagtt

SEQ ID NO: 181842 - DNA, 254 bp, Glycine max
gagatttcagagcgtgatgaaggtgctctcaagtttcttaaagatatcaagtggagcaggatagaaaatcctaaaggattcaagcttgagttcttctttgataccaatccttacttttcaaataccatctgacaaaaacatatcatatgattgatgaggacgaacctatattggagaaagccattgggacggaaattgaatggtacccgggaaaatgtttgactcagaaggttttgaagaaaaagcctaagaag

SEQ ID NO: 181843 - DNA, 255 bp, Glycine max
tctcgagccgaatcggctcgagcggtctcgagcactttccattctcttcaacctaacgcagcatcgctatactcttcattacatggctttgcccaatcagcaaaccgtggattaccctagtttcaaactcgtatcgtcggtgatggtggcacaggaaagacaacctttgtgaaaaggcatctcaccggagaattcgagaagaaatatgagccaaccatcggtgtggaggttcacccattggattttttcacaaac

SEQ ID NO: 181844 - DNA, 258 bp, Glycine max
gagaagaagaaacttaatcgatcatcacttcacttcactaatacatcatggcagacgagacccagaacaagtatgagagctctgaggttgaggtccaggatcgtggtgtttttgactttctcggtaagaaaaggatgaagaagacaagcctcatcctcaggaggaggtcatcgccaccgagtttcaaaaagtcactgtctcagaccaaggagagaacaagcacagcctcttagaaaagcttcaccgatctgacagcag

SEQ ID NO: 181845 - DNA, 269 bp, Glycine max
aaaacatggggtggtttttcctttgaatgtttcacacagtggaagtctcttctcaatttggccattccaagctgtgtttcagtgtgcttggagtggtggtggtatgagatcatgattttgttgtgtggtttgttggtaaccccaaggctactgtggcttcaatggggattttgattcaaaccacttctttgctttacattttcccttcttcattgagcttcagtgtgtcaacaagagttggcaacaagcttggtgcacagaagccctca

SEQ ID NO: 181846 - DNA, 263 bp, Glycine max
gcgacgcaccagatcgccgagtcgtggatccacgcgtcgcggaaggttctagagaggatcgcagacgcggtgctctccagaaccttcgagaaggcggctgaggactgctacgccgtggaaaggatctggaagctctcgcggaggtggaggacctccacctgatgatggatccggacgatctcttgagactgaagaatcagctctcggtgaaatcctccggcggcgaaacggcttcgttctgcttcaggtcgaaggagttggtt

SEQ ID NO: 181847 - DNA, 254 bp, Glycine max
atcctatcgtagcaaagaaagaaagaaagaaaaccctagcttaccttttcaactttcaagatgcaaatcttcgttaagacactcactggtaagacaatcacccttgaggtggagagttcagataccatagtaatgtaaagtccaagattcaagacaaggaagggatcccaccagaccagcaacgtctcatttttgctggcaagcagcttgaggatggacgtacacttgctgattacaacatccaaaaggagtcc

SEQ ID NO: 181848 - DNA, 252 bp, Glycine max
gaaaaacaaaagagtagtggcctttaggtggtgaagaacaagagctcaaatcaaatcgaatcgaaaaaagaaagaaagatcatattcatggcgatggcaagcctggctcgacggaagggttacgccgtgttttgtcgtcgaggtcgtcgttttgtctgacaagctggaggggattcgcgtccggatctgacgaaaacgacgtcgtcgtcatcggcggcggtcccggcggctacgtggccgccatcaaagccg

SEQ ID NO: 181849 - DNA, 252 bp, Glycine max
cttgctttagccatcactaacactcagtctctgaattggggctgagggtttcgagtaacgtttatttttcacgagtttaagatatcatgggtaaagagaaggttcacattaacattgtggtcattggcatgttgactctgggaagtcaaccaccactggccacttgatttacaagcttggaggtattgacaagcgtgttattgagaggtttgagaaagaagctgctgagatgaacaagaggtcattcaaata

SEQ ID NO: 181850 - DNA, 253 bp, Glycine max
taatgagttagttgacatatattcctttgggatgtgcatattagagatggtcacatttgaatatccttatagtgaatgtactcatccggctcaaatctacaagaaagttatttctgggaaaaagccagtgctttgtatagagtgaaggatccagaagtgcgacaatttgttgaaaaatgcttggtcacagtgtctctaaggctttctgcaagagagcttctaaatgatccatttcttcaaattgatgattatg

SEQ ID NO: 181851 - DNA, 257 bp, Glycine max
caatcttctgagagtgtttggttgaaagtagcaaagatgtttcctttcgggcaaaagggtcaaaagataaaggggactatggtggttatgcagaagaatgtgttggatatcaacagcatcaccagtgttgggggatcgttgaccaaggcttaggcttcataggcagtgcagtcgatgcacttacttttgcagccaccaaaatctccatccagttgattagtgctaccaaggctgatggtgggaaaggaagaattgga

SEQ ID NO: 181852 - DNA, 266 bp, Glycine max
tgcctcctttgactttgtggctggtgctgccttttctcgtgttgctagcggcggcaacaacgtctccaacacgcgccacgacggtcgcctcgtcgttccacggtcaacgagagtttgactatttcgctttcgcgtgcaatggcccggtacttactgcaaacgcacccgcagttgctgccccaccaacggttgctgcagaggctccaattttccaacagtgttcaccatacatggactctggcctgactataatgatggaacctggc

SEQ ID NO: 181853 - DNA, 261 bp, Glycine max
tggatgccttggctctgagaggcgatgaaggacgtggtaagctgcgataagccggggggagctgcacacaagcattacatccccggatctccgaatgggacaacccagcacattgaagatgtgttatctcgaagagaggccaacctcctgaactgaaacatctaagtagggagaggaaaagaaaacaaactagtgattccctgagtagtggcgagcgaaaagggaatagcccaaacttgatccgcgtgcggatcgagggtt

SEQ ID NO: 181854 - DNA, 258 bp, Glycine max
tggatgccttggctctgagaggcgatgaaggacgtggtaagctgcgataagccggggggagctgcacacaagcattacatccccggatctccgaatgggacaacccagcacattgaagatgtgttatctcgaaagagaggccaacctcctgaactgaaacatctaagtagggagaggaaaagaaaacaaactagtgattccctgagtagtggcgagcgaaaagggaatagcccaaacttgatccgcgtgcggatcgag

SEQ ID NO: 181855 - DNA, 252 bp, Glycine max
caccaaaacaatttgctcacaaaggaggaaaaatggcacctttcgtttccctctctttgttgcttctctttctcaaccaccccctcctttccctctcaaccaaccctgaagggaacgctctgcatgcttgagaagcaggctttctgatcccaacaatatgttgcagagttgggacccaacactggttaatccctgtacttggtttcatgttacctgtgactccaacaatcatgtgattcgcttagacttggg

SEQ ID NO: 181856 - DNA, 250 bp, Glycine max
tgatcactggatcttctgggtgggacctttcattggtgctgcacttgcagcactctaccaccaggtcgttttcagggccattcccttcaagtccaagtgattcaatcaaaccgttcatgcttaatcagttgggaacaacaaaaaaaatcaaaacaatgtttctgggtttcggtttcatttcatcaagatgatctgtttatctttttttttttaattttaatttaaagtctttgtattttgtatgtaaaga

SEQ ID NO: 181857 - DNA, 245 bp, Glycine max
cacaagccaagtgaaagtgagaaaaaataagaaccaaagagcataatgtcagggatcattcacaagattggggacacccttcatgtgggagggcacaagaaggaggaggagcataagggtgagcaccagctggagaatacaaaggggagcaccatggtgaacacagtagtgagtacaaaggagagcatcatggtgaacacaaagctggagagtaccatggtgagcacaagccagagcacaaagag

SEQ ID NO: 181858 - DNA, 257 bp, Glycine max
tttttgaatactttgagcatgagacaccttataatcgtgaaccattggcaaataagatttctgatcttgaacggcaatttccagagttgaaaacatactggagctgtgatctttcccctgcaagttgggttcatttgcttggtacccaatatacagaatacctactggtccaacattacaaagcttgagtgcctgcttcttgacctttcattccctgtcaacaactttgcagagttcaaatactgatgggctacata

SEQ ID NO: 181859 - DNA, 271 bp, Glycine max
cctctttctaaagttttgcttctttctttcttactttctctcactcaccaaatagttttctcacaaaggaggaagaatggcatctttcatttcactctctttgttgcttctctttctcaattaccccttcctttcccctcaaccaaccctgaagggaacgctctgcatgctttgagaagcaggatttctgatcccaacaatgtgttgcagagttgggacccaacactggttaatccctgtacttggttccatgttacttgtgactccaaca

SEQ ID NO: 181860 - DNA, 260 bp, Glycine max
gcagaagcctatttggatgaggaagcctgaggagatcacaaaagaggagtattctgctttctacaagagtcttaccaatgactgggaagagcatttggctgtcaagcacttctctgttgagggtcagttgggtttaaggctatactctttgttcccaagagggcaccttttgacctctttgacacaaggaagaagcctaacaacattaagctctatgtccgccgtgtctttattatggacaactgtgaggagttgattcc

SEQ ID NO: 181861 - DNA, 251 bp, Glycine max
cagaaattgttgtccctgactggcgtgggcgtctgtgtatgaatgtgtttgtgagaaaatggaagctgcgatgggactgatgcggaggattcctccgaaacacacagaaacagctctgtcagcgctctgagccttatgcctgacaactcctccgatctcctctctcaagtcgatcagcccctccaggttctgtgcgatgtggaatgcggcaaggagttcattttgtgcgaatacaatagagatgccgactc

SEQ ID NO: 181862 - DNA, 248 bp, Glycine max
tttgctgtatactacaaaacatcatctttgttccagcgaaacaaagctcttgtaaaggagttaagcacacccccgcctggagctactgatttgtatttccccactaagtattctcaatccacattgggcaatttaaatcctgtttttggaagcaatggctgacatactggaggagtccagattataatcttgtcagatattttttcacattggcttgtgccctcatgatagggacagtattttggaga

SEQ ID NO: 181863 - DNA, 258 bp, Glycine max
gtcccaaagagctaacaagagattcaagaccggcatggctaatgaagaggaacagaaaaaccacctcttcggcatcaaagatctcggtcacaagactctccttcagagtgatgcactctatcagtatatattgaaaccagtgtctatccaagagagcacgagtgcttgaaagagatacgcaagatgactgcaaaacacccactgaacatcatggcaacaccagctgacgaaggacaacttctgagcatgcttgttaag

SEQ ID NO: 181864 - DNA, 260 bp, Glycine max
gaacagtgttcaacctgtactctcaggagtggctataggagcagggtggcaaagcattgtagcatatgtgaatatggggtgttattatgccataggtattcctgtaggtattgtacttggtaacgttctggtttgcaagtcaagggaatctggattggaatgttgtttggaacgttgattcaaactatagtgctaattgtaatcacctacaaaactaattgggacgagcaggttaccattgctcagaagcgtattagcag

SEQ ID NO: 181865 - DNA, 199 bp, Glycine max
gcctcggctagggttcggaaacgaagaagggttctgttttcttttcgcgatgagggccaagtggaagaagaagcgtatgaggaggctgaagaggaagcgccgaaagatgagacagagatccaagtagtgcgttaaaccagtttgtttccgttgcttttacaattgcttatgttgtaaaataggacacccagttgttagt

SEQ ID NO: 181866 - DNA, 279 bp, Glycine max
tgagaaggctcagagatgtgtgaaggctgtgaaggagttcatgcgtctgatgggggtgttcacggtggcagatgctattcctttcttgagatggtttgattttggtggctatgagaaggccatgaaggaaactgccaaggatttgatgagatttttggtgagtggttagaggagcacaaacaaaatagggcttttggtgagaacaacgttgatggaattcaagacttcatggacgtcatgctttccttgtttgatggaaaaacaattgatgggatagat

SEQ ID NO: 181867 - DNA, 253 bp, Glycine max
atccttgaggaaagtgattgctgaatatggtgaaggagtggttaagctaggaggaaggatactcaagatgatgtcaataaaccttggtttgaaagaagatttccttctcaatgcatttgggggagaagtgaggttggtgcatgcctaagggtgaatttctatccaaagtgccctcaacctgacctcacttttggactctcccctcactcagatcctggtggcatgaccattcttctccctgatgattttgtgt

SEQ ID NO: 181868 - DNA, 250 bp, Glycine max
agtagccctccaccctcccggttgaagaggttcaatgataaagaccaaatggagtacactgaaatattgaagatgcgcggccttcctttccaagtgacaaaatctcaaattgttgaattctttaagatttcaagctgatagaagatagggtacacattgcgtgtcgtcctgatgggaaagctactggagaggcatatgtggagtttgtttctgcggaggaggctaagagggcaatgtccaaggataaaat

SEQ ID NO: 181869 - DNA, 247 bp, Glycine max
caaccagcctggtgtgcttatccaggtctttgagggtgaaagagcaaggaccagagataacaatttgttgggcaaatttgagctatctggcattcctcctgcacccaggggtgttcctcagattcagtgtgctttgacattgatgccaatggtatcttgaatgtctctgccgaagataaaaccactggccagaaaaataagatcactatcaccaatgacaagggtagattgtcaaagggagatattg

SEQ ID NO: 181870 - DNA, 246 bp, Glycine max
gtgtggtccttgtaaggtgattgcaccacattattgcgagttgtccgtgaaatacccgtctatcatgttcttattagtcgatgtggatgaactagctgacttcagcacttcgtgggacatcaagccacaccaactttcttctttcttaaagatggaaaagaagttgacaaacttgtaggagccaacaagccagagctggagaagaagattgttgtggttaatgatgtagtgcctcataagcaatag

SEQ ID NO: 181871 - DNA, 249 bp, Glycine max
gtaaagtattgggttacattgaatgagccctggagttacagccaaaatggctatgcaaatgggcgaatggcacctggtcgttgttctgcttggatgaatctgaattgcactggaggtgattcttaacggagccttatttggttacacatcaccaacttcttgctcatgcaacagctgttcgtgtgtacaagaccaagtatcaggcatctcaaagtggtgtgataggcataaccttggtagctaattggt

SEQ ID NO: 181872 - DNA, 254 bp, Glycine max
cggcagcgaggttctccactggggcgacaccaacatgatccgcggcctcgtccctgccatgagaacccttcactcagccctcctagccgagggcataaccgacattaaggtaaccactgctcactcttggcgataatgcggtcatcgataccaccaagtatgggcaggttcaggcccgggtacgcaaagcacgtgttgggcccaatgctgaagtttctgagggagacgagaacacccttgatggtgaacccgta

SEQ ID NO: 181873 - DNA, 264 bp, Glycine max
cgcgcgccgcaccccgccgcgctcgaagaaatccgtcgacatcagcgcacgcgcgcgccagctccagacgcggcgcctctggacctacgcgctcaccttcggtggcctcgccggctttgtcgtgatcgttctcacaacttccaagaccagctcgtcttctacgtcaccccaaccgaagccctcgaaaaatacgccaacaatccaacaaaagcgcggtttcggctgggcggtcttgtcctggaaggcagcgtggtgtacccggcg

SEQ ID NO: 181874 - DNA, 263 bp, Glycine max
caacagcacaaagcgggttactgtatgttcaagctaacatctctctctctctatcttagtgcctccttgccagaagttaaaatggcccaagaacactttcctattcacatctgaatcagtgaacgaggggcaccctgacaagctctgtgaccagatctccgatgctgtgctcgatgcatgcttggagcaggaccctgacagcaaggttgcctgtgaaacctgcaccaagaccaacatggtgatcgttttcggagagatcacaa

SEQ ID NO: 181875 - DNA, 268 bp, Glycine max
cgaatttcgatactttgatcagatccacaacacttcttcatccatgacgcttggtacttcaggatccagtgtcgtggttccaaggaacttcagattgctggatgagcttgagcagggagaataaggaataggagatggtacagttagttatggaatggatgatggtgatgacatttacatgcgctcttggactggaaccattatcggtccctataatactgtacatgaaggaagacttgatcaattgaagctgttttgtgataagact

SEQ ID NO: 181876 - DNA, 268 bp, Glycine max
ctcgcaagcaaaaagaaagaatcccaggcgaggagaaagatggaggggaaggagcaggatgtgtcgttgggagcgaacaagttccccgagagacagccgattgggacggcggcgcagagccaagacgacggcaaggactaccaggagccggcgccggcgccgctggttgacccgacggagtttacgtcatggtcgttttacagagcagggatagcagagtttgtggccacttttctgtttctctacatcaccgtcttaaccgtatggg

SEQ ID NO: 181877 - DNA, 265 bp, Glycine max
cgacacaggagtggcggaatctttctgaaaaatcgccgcaaagcgaagcgcaatctcatattaactgcaactgctactacgaactacgaacatcagggtagtcattaagacaaaccctagaaatggggaagaagcagcacagcaaagacagaatgttcatcatccaaacggagtgtgcaacggcgtgaggacgcgctaaatccagagacaatcgcactcccttcaacgtcttccttctattgctgctcgcttacgtttacgccgt

SEQ ID NO: 181878 - DNA, 265 bp, Glycine max
gatgacctagccagggcattaaatagcttcagctcacaaaggaaggtgtacttgtctgcagccccacagtgcataatccctgatgctcacttggatagagccatccaaactgggctttttgactatgtgtgggttcaattctacaacaacccttcatgccaatactccagtggaaacaccaacaatttgatcaattcctggaaccaattgatcacagtgccagcttctcaaatcttcatggggcttcctgcatctgaggcagctg

SEQ ID NO: 181879 - DNA, 229 bp, Glycine max
ccgacggtcgcctcgtcgttccacggtcaacgagagtttgactatatcgctttcgcgttgcaatggcccggtacttactcgcaaacgcacccgcagttgctgacccaccaacggttgctgcagaagctccaattttccaacagtgttcaccatacatggactctggcctgactattatgatagaccctggccgtacctgttgctctggatctagtttcgatcctaaaga

SEQ ID NO: 181880 - DNA, 202 bp, Glycine max
cgacgtcttcgacgagtccaagctctcccgcctccccggcacctcggccattggccacgtccgctactccaccgccggccaatccatgctcaaaaacgtccaaacttcctggccgactacgcttcgtccgcgcgtcgctcaacggacttgcactacgtcctcgacgccgaacacaggtcactcacacactcgcacggtgctc

SEQ ID NO: 181881 - DNA, 269 bp, Glycine max
ggaaggcactgcttaagggcctcagcccagctgaaaatcggagtattcctccactgaaatatgagtacttttatggcctcttacgtgactttcccgacttatcatttacaatcaatggtggtattgctagtattgatgaggtcaatggagctctaaaggctggggctcatggtgttatggttggacgtgcagcatacaataacccttggcatattctgggacacgttgatactgcaatttatggtgcatcaagtagtggtcttcacgtc

SEQ ID NO: 181882 - DNA, 265 bp, Glycine max
caaaccctagtggccgattccgtgttggacttggatcgtgccctcttggactctatgcgcgctaaaattcacgatgagctcgccaacctcgacgaaaagattgctgatgctgaggcaaacttaggagagagtgaagttcgtgaggctcacttggcaaaatccttgtgtatcatccggattatggacaaggagaaagccttggaacatctcaaggtaacagaaaccaagacagttgctgttggccagaaaatggacttggtgttta

SEQ ID NO: 181883 - DNA, 269 bp, Glycine max
ctctgctcgtgcctctagggttatcatatctccatttccatttcctctctctcagtttccaagaatcttaagctatgggaaagtcttacccaaccgtgagcgctgattaccagaaggccgttgagaaggcgcagaagaagctcagaggcttcatcgctgagaagagatgcgctcctctaatgctccgtttggcatggcactctgctggaacttacgacgtgagctccgaagaccggtggtcccttcggaaccataaagcagccctcgaa

SEQ ID NO: 181884 - DNA, 264 bp, Glycine max
gggaaagatgcagatattcgtgaaaaccctaaccgggaagaccatcacccttgaggtggagtcaagcgacaccattgacaatgtcaaagccaagattcaggacaaagaagggattcctccggatcagcagaggttgatcttcgccggtaaacagctggaagatggccgtaccctcgctgattataacatccaaaaagagtcaacattgcatcttgttttaaggcttcgtggtggtattattgagccatctttgatggcactggc

SEQ ID NO: 181885 - DNA, 259 bp, Glycine max
gcgaagaagaagccacagagaaccagtctcctactctctctcacccacaagaaaaatggcatctcacatcgttggatacccccgcatgggtcccaagagagagctcaagttcgctctcgagtctttctgggatggcaagagcagcgccgaggatttgcagaaggtggctgctgatctcaggtcatccatctggaagcagatcgctggtgctgggatcaagtacatccccagcagcactttctcgttctatgaccagctg

SEQ ID NO: 181886 - DNA, 266 bp, Glycine max
acctgacctcacaaggattgagtgttggatctagtcatctagataaaaaaaataaaaatgaagatcattgagaaaattcgcgcacttctgctgatccaaacagggtggtgttctcatttgagttcttcccccccaagactgaggatggtgtggacaatctgtatgagaggatggaccgcatggtggctcacaacccctctttttgcgacatcacttggggcgctggagggacaacggctgatcttacattggaaattgccacaaga

SEQ ID NO: 181887 - DNA, 261 bp, Glycine max
cagaaaatggggtctctaatggcctctcttactctcactcttgtattggcaatagtttctctaagcttgtcatctcaagcctcagctgacaagtacgactattcatctccaccaccaccagtttacaagtacaagtccccaccaccaccctacaagtattcatctcctccaccacctcctaagaagccttactaatacccatcaccaccaccaccagtgtacaaatacgagtcaccaccaccatctcaccagtacccttct

SEQ ID NO: 181888 - DNA, 266 bp, Glycine max
ctctgcattgatggttggattggcgatcgtgtgctcgcacggcgcgttccgcgttcccgaggatctgtttctcgacgatcaggagccgaacagctccggattcctctcgttcctcggtggcgccgccgcttcagccgccgcgccggccgtcgcgcgcgtgtaaacggcgggatctggacgaacgctgtgtccggtggattcttctcaggttggttcggccttttttgttgtaatatgctacattgaaaattgttgcgatattcttg

SEQ ID NO: 181889 - DNA, 269 bp, Glycine max
cggcaagggccaggacatggtcttcaccgtctacggcgagcactggcgcaaaatgcgccgcatcatgaccgtccccttcttcaccaacaaggtggtgcaacaataccgccatggctgggaatccgaggccgccgccgtcgtggaggacgtcaagaacaaccccgacgccgccgtctccggcaccgtcatccgccgccgcctccagctcatgatgtacaacaacatgtaccgcatcatgttcgaccggagttcgagagcgaggaggacga

SEQ ID NO: 181890 - DNA, 274 bp, Glycine max
atcagctccttctccgtcaaaagacgcataacctcaaccgtcttgaggctcagagaaacgagctcaattccagggtgaggatgctgcgcgaagaattacagcttttgcaggaaccaggctcttatgttggtgaagttgtcaaagtcatgggcaagaacaaagtccttgtcaaggtccacccagaaggaaaatatgtcgttgatattgaccatagtattgacattacaaagattactccatccactagagttgcacttcgcaacgacagtatgtt

SEQ ID NO: 181891 - DNA, 277 bp, Glycine max
ccctcgagccggctcgagcggctcgagctaatcataatcacttccaactgctctcactagtcactactactactggagatggcttcacctgcctcttgcacttctatttccccttctagtgatggttgcctttgctggtgacttaaacaaagactttgacatcacttggggagatggccgcgccaagatactaaacaatggagagttactcactctttcattggacaaagcatctggttcaggttttcaatcaaagaatgagtatctctttggaaga

SEQ ID NO: 181892 - DNA, 271 bp, Glycine max
ctcgagccgcaaaatttgtcatcacggataaagtggttactaaggatgtccaaaagaggtatgagcaagaggtcattgaatttggaggctcttcaatcatgttaaccatattagctacagtggcattgctaaatctttttggtctcctttggggaatgaagaggattatgatggatttggaattcagctctagccaattgatgatgcagattacactgagttcattggtggtaatgatcagtttaccagtgtatgaggcacttttcttcgt

SEQ ID NO: 181893 - DNA, 266 bp, Glycine max
cgactgtttattaaaaacacaggactctgctaagtggtaacacgatgtatagagtctgacacctgcccggtgctggaaggtcggaaggagaagtgttataagctttgaatggaagccccggtaaacggcggcagtaactctaactgtcctaaggtagcgaaattccttgtcgcataagtagcgacctgcacgaatggtgtaacgactgccccgctgtctccgacatggacccggtgaaattgaattctccgtgaagatgcggatac

SEQ ID NO: 181894 - DNA, 261 bp, Glycine max
atgaccacccctcgcatgacgtggcggccgggcagatgttcgtgaaggaggtgtacgaggttttgaggaagagtccgcagtgggaggagatggcggtgctgattacttacgatgagcatggtgggtttgatgatcatgtggcgacgccggtagaaggggtgcctaaccccgatgggatcgttgggccccacccttattactttcggtttgataggttgagggtgagggtgcccacgtttattatctcgccttggatcgaca

SEQ ID NO: 181895 - DNA, 256 bp, Glycine max
cattattgcgctcaacttttaaatttccccaaagccttggcatcatgggtggcaaaccaggtgcttcaacatacattattggtgctcagaatgaaaaagcattctaccttgatccccatgatgttcagcaggttgttaatatcagtggggatactcaagagcctactagtacttcgtcataccattgcaatattatgaggcacatacccctagattcaattgatccatccttagctattggcatttactgccgaga

SEQ ID NO: 181896 - DNA, 265 bp, Glycine max
ctcggaaatcgaggatgtcgatgatgaggacgatgaagaggaggaggagttgaagaagaagaagccctttgggttctctcgctccaacaacaaggctgcttctaagcctctctctcgtggagcaacaactgtgaaatctgtggaatcaaaggggcaagctgagaagtgtgccaagagaaagaggaagaaccagtatcgcggaatccgccagcgtccatggggaaagtgggctgctgagattcgcgacccaagacagggggtcgtg

SEQ ID NO: 181897 - DNA, 271 bp, Glycine max
  unsure (1)..(271): unsure at all n locations
cactagtcttcctccataagggccgattaccatggcaaggttaccagggtgatagcaaatccttccttgtttgcaaaaagaagatggggacatctcctgagacgctatgctgcttgtgtcctcctccttttaggcattttcttgagattgtagtgaatatgaaatttgatgaagaacctaattattccaagctaatatctttgtttgatggtacgattggcaccaatccagcattgcggccaattaatactgaaggtgcccanaagttggg

SEQ ID NO: 181898 - DNA, 269 bp, Glycine max
gccaagtgaaagtgagaaaaaataaaaatcaaagagcataatgtcagggatcattcacaagattggggagacccttcatgtgggagggcacaagaaggaggaggagcataagggtgagcaccatgctggaggatacaaaggggagcaccatggtgaacacagtagtgagtacaaaggagagcatcatggtgaacacaaagctggagagtaccatggtgagcacaagacagagcacaaagaggggttcctagacaaagtcaaggacaaga

SEQ ID NO: 181899 - DNA, 191 bp, Glycine max
tctggttatatctgagtctcgatctgatgcacttgttcatatagctgcattggcaattcgaagtgagaatggtttactgctctaaaggtggaacataatcccgacgatcatatgcagtcttactcaaggtcattacttcagtgatgccagatactctcggtgacagactgattgggcttgtgatttcaaga

SEQ ID NO: 181900 - DNA, 258 bp, Glycine max
ctcgagccggttttccttttaaatgtttctttaaatttctcaattgatcagagatcttcagcaaaccggtcaagtttgtgcagtttggccagatgggaggtgggtttagcgtgctacacttagttagaccttttctctcgttcctacctgaagtgcagactgctgataggaaagtgtcatttagagagtaggtcatatatactgtgatctctctgttcagtatcctgtttgcagtcacttcctctgtatgtatacata

SEQ ID NO: 181901 - DNA, 263 bp, Glycine max
cctcgagccgattcggctcgagatcactttccatgatgctcaaggacccaaggctgatagactctcgataacaagagagcctacttccgctcaagaataaggcaacaacatgaccaacacttgtctgggccattgcgtataagtgtaaggcgggcttacattttggaggactcttataatcagctaaggatgcgtcctactcaggatctgaaggggcgattacatgtgcaatttcaaggtgaagagggtattgatgctggtgt

SEQ ID NO: 181902 - DNA, 228 bp, Glycine max
actaggattcccaaggttcaacagttgttgtaggacttcttcaagggtaaggcgctttgctagagcattaagccacatgtagctgttgcctatggtgcagcagtgcaggctgccagtctcagtggcgagggtaatgagacagtccaggatcttctgttgttggatgttacgcctctctccccttgagttggagaccgcgggatgagtcatgactgtgtcgattcccag

SEQ ID NO: 181903 - DNA, 284 bp, Glycine max
gcttcattaacatgggtgctggtgactactacaaaatactgaaggtgaagcatgatgccactgatgaagaagtgaagaaggcttataagaaattggcaatgaaatggcacccagataagaaccttgaagaccctcttaggaaagaagagtttgaggccaagtttaaacaagtttctgaggcctatgatgtgcttagtgacccaaagaagcgccagatctatgacttgtacggtcactatccccttaactctcaacgcttcaccaaggaatatggctatggaaca

SEQ ID NO: 181904 - DNA, 118 bp, Glycine max
ccgacgtcttcgacgagtcgaagctctcccggctccccggcacctcggccattggccacgtccgctcctccatcgtcgagtaatccatgctcaaaaacgttccaccccttgctggccc

SEQ ID NO: 181905 - DNA, 137 bp, Glycine max
ttagaacatcgagtctcatgacttccttaagctccgtagtgctggtccttgtagctctaattctattacctcatgttcttgctgactatgagaacgtcccggtgtaccagattcccattgagaatctagcactttac

SEQ ID NO: 181906 - DNA, 260 bp, Glycine max
tgacggtctattcaagacacacaaggtaaactatgtcaaaggttatggcaaatttgtgtcaccatctgaagtctctgtggacaccactgaaggtggaaatactgttgtgaaaggctagcatattataattgccactggctcggatgcgaaatccattgcctggcgtcactattgatgaaaagaaagtcgtatcatcaacgggggctcttgctttgactgaaatctccaagagactcgtagtcattggggcaggctacatt

SEQ ID NO: 181907 - DNA, 265 bp, Glycine max
cgaagggacgtgtctgactccgatggcttcctcataatgtgaccgtacgtaggagttccgattactatcggagactatgaagaagatcggaggtccggttcaacccgaaaatcctccttcgacctctcgcggcggcgagtcgtcgtattcgagatccgaattcaaccgaaaggcctcgcgaatcgggttggggatccacgagacctcgcagaagatcgcgaggctcgcgcagctggcgaggaaatcgtccatgttcaacgtcccg

SEQ ID NO: 181908 - DNA, 259 bp, Glycine max
catcgagccgaatcggctcgagcagctgtgcaaatagagtggtctttgtggactcgtgacattgcagaagagatagtccctctctgcagggaacttggtattggaattgtaccatatagtcctcttggtcgtggcttttttggcggcaaaggagttgtggaaaatgtgcctacaaatagctccctgacagcacatccacgctttcaagccgagaacttagacaagaacaagaatatatatgaacgaattgaaggccttg

SEQ ID NO: 181909 - DNA, 217 bp, Glycine max
catgtgtttgacttgactcgtccatcttcgtcgttatcgtctgcttttgttgtttgtgtgattgttctttctctcatctgaaaatgtcttgctgcggttgtaaatgtggttgcggaagcgcctgcaagtgcggcaactgctgccgatgctgctagatgtatccagacttgagcgactccgagtcaaccaccagtgagaccttgggcatgggagtggc

SEQ ID NO: 181910 - DNA, 213 bp, Glycine max
cttatctctctctctctctatctctgccgaatcactgttcgctcgacccttccacttcgtattccctgtttccggtattcgcgtcctatctggctgcacagctggcatccacttacgatgctctgtcccgtaccagatctggatcaactgtgacaaggttgggtgcagtaatgttgtatcaatctgccttctgaccggtacgcgtggggatac

SEQ ID NO: 181911 - DNA, 184 bp, Glycine max
tctcgagccgattcggctcgagtgttgagcaggctatccgaaacaagcagttgttcatcttagatcaccatgactatctcattcctcatttgaggaaaataaatgcaaataccacatagacttatgctaccagaaccatattcttcttgaaagatgatcggaactttgcacaccattgagccat

SEQ ID NO: 181912 - DNA, 275 bp, Glycine max
ctcgagccgctttcttctcggtccagtgtctctttcaaagtgctgctcgtgccagcattgaccttagctagagcagtaaccgtcatcaccactgccagtacggtaccatggctgtgcttcaatctttcgtttcggtccacccagattctcacttccccatacagaacctcccctacggagtgttcaagccccaatccgcttctcctcctcgtcccggcgtacgcatcggagacttcgtcctcgatctctccgaaatctcttccgctggtctctcg

SEQ ID NO: 181913 - DNA, 262 bp, Glycine max
gatgagacaggctctcgctaaagatcaaccttggaagttgaaagaatcacgtgtgctggagatattgcaagcgatagacagcaacacagatgggctagtggatttcaccgagtttgtggcagctacattacatgtacatcaattggaggaacatgattctgacaagtggcagcagcggtcacaggctgcttttgagaaatttgacttggataaggatggctttattactccagatgaacttagaatgcatacgggtttagag

SEQ ID NO: 181914 - DNA, 262 bp, Glycine max
gccgattgcctgagtatccttcagaacaaatttaacagagatacgcgaacttttgctccagactcagagatattgcaggctttacaacagagttctgtaggtcaatcttctaattataaacaaatccaaaagcgttgtatgcctttcttgaggtttaagaaagaggaagcaattgcacttgggcctcaagccctggatttgagattgccgtttggtgaaattgaggttcttaaggaaaacttggacttgatcaagagcagat

SEQ ID NO: 181915 - DNA, 258 bp, Glycine max
ctctaatccagctctgcatacacaagtaatgggcaaaattcgaagtgcatgccatgagtggggatttttccaggtgattaatcatggaattccaatcagtgtcttggatgagatgattggtggaattcgtagatttcatgaacaagatgctgaggtaaggaaagagttctatactcgagatttgaagaaaaaagttttgtattactccaacattagcttgtacagtgaccaacctgttaattggagagatacattggt

SEQ ID NO: 181916 - DNA, 258 bp, Glycine max
aaagataagaccatcaaagtatcacttcagccttatccggattagggtttcggtttttgacccaacctttgacgtatcgaaaccttaagtttcggatcaggtctgagcaatctggttggtagaacctttggtcttagagagtcaagttttatgtctgaattagacgatcacattcctactgccttcgatcctttaactgatgcaaatgctgatgactcgggtgctgggtcaaaggagtatgtgcatattcgcgtcagc

SEQ ID NO: 181917 - DNA, 271 bp, Glycine max
ctctcgtcttctacaagattttctgttcgatctccaccaaggttgttccttccacctccgccatgagtctcatctttggaaagcgataaacccccgcagagcatcttcgggatcataagaggatgctggacaaatcaatcagagaaattcagcgtgagcgtcaaggattgcaaacaccagacaagaaattgattgcgaggatacagaaaagtgccaaacagggccagatgggagctgttagagttatggcaacagatcttgttcagacaag

SEQ ID NO: 181918 - DNA, 261 bp, Glycine max
attaccagttactatactctctctttctgaaacaatttgcccaattgtttgagatgttcaatatgagatttgtatctcaagatttgggtggtttcatgtgcactaatacttctggtgtcatgcacaacatactcatcagcttcttcggggaaacctgagaacaacataacaacatctgtttataaatcacccaagattgagctaggtccagggttagtttcacacaaattatattttgatgttgactttcaagaggccata

SEQ ID NO: 181919 - DNA, 280 bp, Glycine max
aatttctcccacgacaacgtatcacaagctcccaatatagcaagcagcaaacatgatttcttccgtgtcctttccagcgtctcttcccgccgttaacttctccggcaacgccatggcttcgccgtcgtgccgcgtcaaatcccggccaatagtcgccttcgccaccgtcactgccaccggtgaagctcgctcttcctggacggagcaaccgagaacttcctatctgaattcctcttgctcttcgctttacgatatcctcggcatccccgtgggcgtctaa

SEQ ID NO: 181920 - DNA, 139 bp, Glycine max
gttcactcttcttctcttgcggctagggttttagcgcacttcttctagatttaaggaagatgggtaaggaaaaggttcacatcagtattgtggtcattggccatgtcgactctgggaaattcactaccatggtcactga

SEQ ID NO: 181921 - DNA, 248 bp, Glycine max
aaaattgttctcaccgtgtgtgtgttgtgtgtgtgtgtgagagagagagagagagagagagagagagagagagagagagaggttacgctatggctgatgagagcggcgttgagtccccagtggagagggagagagattatgatggagaaaatgatgtccctggttccaagggatgtggagggtgcaaaaaaccttttaaaaacgggttaatcactggggattccgggggggtcctcgaaaataagtcc

SEQ ID NO: 181922 - DNA, 262 bp, Glycine max
ctcgttcgtttcatttcgtttcgttgaagagcaacttttctctctctgtctctgtacaattctcccttatcttccctcgtagatcgaaagggaatattcttccatggcctccaagcggattctgaacgaggtcaaggacctacagcaagaccctccaacctcttgcagtgccggtcccgtagcagaagatatgtttcattgggcagcaaccataattggtccccctgataacccctatgctgggggtgtttttctagttacc

SEQ ID NO: 181923 - DNA, 241 bp, Glycine max
gctgacctgacaatgattataggagccatgtatgctgctgtcattcttgttcgcattaacaattgccaaactgttcaaccaattgtagccgttgaaagtacagtggtctatcgcgaaagagctgccgggatgtatgctcctttggcttatgccctagccccggggagcagattgatttacttcaaagaataattttagtttctagtgttcaatgcttgttatgacgtcaatgccgtgttac

SEQ ID NO: 181924 - DNA, 253 bp, Glycine max
ctctcaaatacatagaagatattcttctcaatgtggcagctcaagtacctgacagtggtccttgcgtgacttatcttggtaaaggtgggtctggtaattttgtgagagagattcaacaatggaatgagtaatggtgaattcagctgaattccaaaggcttataaggtccggaattcagttggaaagtggtcaattgaggactaacaaggggcctcctcggattggaccaaggaagacctccgaagttcccgga

SEQ ID NO: 181925 - DNA, 249 bp, Glycine max
tttgatttcaactttgaagtttagttgttttgtggaatggcagcgaagagcaaaatcctagtccttggaggaacaggatacattggaaaattcatagttaaggcaagcggaagagcagggcaacccaattttggcctaattaagagggacaaccttttctaatctggaaaggcttaacttaatgagaggctcaaagggtcctgagttaatcctccttaaggggaaggtaatggtcaaggaaggcttggt

SEQ ID NO: 181926 - DNA, 265 bp, Glycine max
aacaaaaagaaagaatcccaggcgaggagaaagatggaggggaaggagcaggatgtgtcgttgggagcgaacaagttccccgagagacagccgattgggacggcggcgcagagccaagacgacggcaaggactaccaggagccggcggcggcgccgctggttgacccgacggagtttacgtcatggtcggtttacagagcagggatagcagagtttgtggccacttttctcgttctctacatcaccggcttaaccgttatgggag

SEQ ID NO: 181927 - DNA, 247 bp, Glycine max
agaacctgagttcccactccgattggagacaaggtctcgaagtcaagccatttggaggcggccatcagagaggcatgttcctaggatagtatcttctcctgttgttgaaacaagagctgatctttctgctattgaaacccagggtcggaatttgggtgaagggttgaagaactccgatggtgatactccaagggaaggaacagcaggacttcggcttcctggtaaggaccatttgggttatccgatt

SEQ ID NO: 181928 - DNA, 256 bp, Glycine max
gtggccttttccctctctttctctggaaaattcccccgattttctcgagaaagtgaaacggaattatgagctttcaggacatcgaggctgggcggcccttcagttcgaggcgcgggttgatgaacgggaagcacagaccgacgcaagcggtggctgccggaatattccagatcaacaacggcggcttcaacttccagagactcgtcaacaacctcggaaaccccaaagacaaccccgaacttcgggaaaaacttca

SEQ ID NO: 181929 - DNA, 256 bp, Glycine max
ctcaaaccgagagaatacgctgccttgaaggactgcgctgaagaaatcagtgacagcgtcgaccggctcagccggtcgctgaaggaactcaaattgtgtaaggtgaagggtgaggacttcacgtggcacatcagcaacgttgagacgtgggtgacttcggctttgaccgatgagagcacttgcggcgatgggttccccgggaaggcgctgaatgggaagattaaggaggcgattagggctaaaatgggccatgttg

SEQ ID NO: 181930 - DNA, 263 bp, Glycine max
ctcttggtgagatgaatggtaaaatgtttgctggaaaacctctgtatgttgcccttgcacagagaaaagaagagagaagagcaaggttacaggcacaattttcacagatgaggcctgttgcaataacgccttctgttgcgccccgtatgcctctctaccctcctggtgctcctggtcttggacaacaatttttgtatgggcaaggacccccagccatgatgcctccacaagctggatttggttaccagcagcaactagttccg

SEQ ID NO: 181931 - DNA, 219 bp, Glycine max
cgttggtgcaaagcatccttcgtttcaatttctctctctcagcgctttctgcaatcgaacctttcatctccaaagggatccacaggccgaaggagatatggggctgaccatcacaaagcttttcagtcggcttttcgcgaagaggaaatgcgattctgatgggtggtcctgatgctgctggtcagacactatcctgtacaagctcagctcggagagatc

SEQ ID NO: 181932 - DNA, 251 bp, Glycine max
gtgaaaatggcggtacccttgctctccaagaagatcgtgaagaagcgcgtcaagacgtttatacgcccccagagtgatcgcaagatctccgtcaagccaagctggcgcagacccaagggtattgattctcgtgtcaggagaaaagtcaaaagatgcactttgatgcccaacattggttatgggtcagaccagaaaacccggcattatctaacaaatgggttccaggaatttgtcgggcccaatgtggaaga

SEQ ID NO: 181933 - DNA, 255 bp, Glycine max
gtcaaaaccgctttgattttattgtcacggtgacaattgccattggagaaactgtaacttttgctgtacctgatgatgatcttcctttcatctcatatggagaatggattcgttaccttcttcttgcaagaatgttgagattaataaggatcctaatgtatgtcaagcgataccgagcctttgtgggaactttaatgactctcataccaagtttgatggcataactaaggatcataatttggaacctgggtaatt

SEQ ID NO: 181934 - DNA, 261 bp, Glycine max
gtgggcttcagaggaatttggattcatcacaccaagcgactctgtttcaaccggaagtagtataatgcctcagaaaaagaatccagatccgatggaacttgttcgagggaagtctgccagggtcataggggatcttgttactcttctcacattgtgcaaaggacttcctcatgcttacaaccgtgatttgcaggaagaccaagaaccagtgtttgacagcgttaaaacaattttggggatgcttgaagtatcagcagaatt

SEQ ID NO: 181935 - DNA, 223 bp, Glycine max
gagaagaaaagtcaaagacaatgtcagggatcattcacaagattgatgagacccttcatgtgggaggccacaagaaggaggatgcacacaaaggtgaacagcaacatggtggaaaactaaaaagggcagaaccatggtgaccccagtattgattccaaaggaggcctccattttggtgaccccaagccggacaaccaggaagaggattaccccaaaaaggggt

SEQ ID NO: 181936 - DNA, 239 bp, Glycine max
cgagcccgtgcccatggaattgacgggggaggagaaggacgcagagcagaagaaggctgaggctctgaaggaaaaggaagcgggcaatgcagcgtataagaagaaggattttgataccgggattccacaatacaccaagggcttggaattggatgaagaagataattcggaacccaataaacggggcggcggccaattgggaattgggaaggtagaaggattcattaaaggatgggaac

SEQ ID NO: 181937 - DNA, 227 bp, Glycine max
ctcatttcccagatcatttcgtcgctaaccacttccttgaggtttgatggcgctatcaatgtggatatcactgagtttcagaccaaccttgtggcataccccaggatccacttcatggtttcttcttatgctccgggtaactctggcggcaaaggctaccacgagcaattgtccgtggcaaagatcacgaatgccggggttgaacccgcgaacatgatgggcaaatt

SEQ ID NO: 181938 - DNA, 253 bp, Glycine max
actggatcaagcatccgtgttcttgagcatatattcagggaagatgcctacttgtctaacctccctgtttccattataaactcttggtatcaacgagaaggttatattaagtcaatggctaacttaattcagaaagagcgccagagtttttcttaaccaaaagaggtaatgatatttttcagtgcccatggtgtacctgtcaagtacgttgagggagctggggatccataccgagaccaaatggaggagtgca

SEQ ID NO: 181939 - DNA, 194 bp, Glycine max
gctgaaccatcttctgactcagccaaagtccaagaactgagtgtgtatgagatcaatgagagagatcgtggaagccctgcttatcttagattgagccagaaaactggtcaattcccttggtgacctagtccccttcagcaataaagtgtaatctggatgtttgccaaagaaggtaaggattacagctggaattt

SEQ ID NO: 181940 - DNA, 256 bp, Glycine max
ccgcgctttagaatccccacgcactctccctgaagatagaacaaacaaatcaagcattccatagttcttagatagggcacgcttctctcccttgcgccgcctcacaaaaggttattggcctattattgtctgaagatcgttgatggccatgatactgataagaacattgaggtgtggaaaatcaagatattgatcaaagctcttgaggctgctagaggctatgggacaagtatgatttcccttatcatgcctccac

SEQ ID NO: 181941 - DNA, 258 bp, Glycine max
tgcttcccgaagaaggagtagcgtagaggaagagtgcgaaagaaagatcgttctcgatgacagaggggaacggtgacaaaactctgcgaaagatcgcagacgcattcaatgaccttgcaaacgttttcaccgattctcagagcgcagaagcagaggtcaagggtgctcccttctctcatgcctgctctctcgtctcccctctcttcggttgcttgggcgtcggcctcaagttcggcgaaatggattacgtcgccaaag

SEQ ID NO: 181942 - DNA, 258 bp, Glycine max
gttgaatgcacatgctggtctccggtccggttagggcatttctgggaccttaaatcaccaatttctcacccaatcaattccaattaagctgagagtgtttctgatctatatgtgatgggtgctccgaagcagaaatggactgcagaagaggaacaagcacttaaagccggagttgtcaagcatggtgttcgtaaatggcgcaccatactgaaggatccagagtttagtagtgtcttgtacctgcggtcaaatgtggat

SEQ ID NO: 181943 - DNA, 276 bp, Glycine max
tctgaaatgcagaatcatgatagacaactatggaagttaggaacactgccaccgggtctcataacattctggaaacgcactttccctctgaaccgatcttggcacatcttaggtcttggctacaaccccaatgtcaaccaaagagatatcgagcagtctgctgttgtacactataatgggaacatgaaaccttggcttgagataagtattcccaagttccgaagttactggacgaagtatgttgactacgatcatgtgtatttgagaggatgcaac

SEQ ID NO: 181944 - DNA, 234 bp, Glycine max
cacacgtaaacacattcagacaccaccatgataactctagctccttctcttgatactccaaaaactgatcacaaccaagtttctgatccccaaactagccatgtcttcaaatcaaaattaccagatatcccaatctccaaccacctccctctccactcctactgcttccagaacctctcccaatttgcccaccggccttgcctcatcggcggacccgcgtccaaaccttcacct

SEQ ID NO: 181945 - DNA, 258 bp, Glycine max
gtggcgtctcatgcccatacatctgcggcaagcatttggatcatggggttcttttggtgggctatggatctggtgcttatgctccaattcgttttaaggaaaagccttactggatcataaagaattcatggggggagagctggggataagaaggatattacaagatctgcagaggtcgcaatgtatgtggggtggactcgatggtctcaactgtagctggtatacatgtctctaaccattaaatataaggatggatgc

SEQ ID NO: 181946 - DNA, 241 bp, Glycine max
cgtttttcgtttattccttctttcatccattctactttcttttcctctcgctagtgtttagtgctaggtgattgattaacttagaaggactttgtgtgttacaagaaaacaagggcaagtttcatgtctgaatttgacacgaacatcccaactggttttgatcccgttgctgaggcaaatgctgaggactcaggtgccgggacaaaagagtatgttcatgttcgtgtacaaaagcgcaacg

SEQ ID NO: 181947 - DNA, 251 bp, Glycine max
ttctcactctgtcacttgacaaagcctctggctcgggtttccaatccaagaacgaatacctttttggcaaaattgacatgcaactcaaactagtccctggcaactctgctggcaccgtcactgcctactatttgtcttcaaaaggagcgacatgggatgagattgactttgaattcttgggcaatttgagcggcgacccatacatccttcacaccaacgtgtttagccaaggcaagggaaatagggagcac

SEQ ID NO: 181948 - DNA, 259 bp, Glycine max
gaaagtatccaaatgggcatcgattgaacagagcgacgaataatgggtattggaaggcgacggggaaggatcgtaaaatcaagtctgggacgattttgattggaatgaagaagactttggtgttctacactggtcgagcacccaaggggaataggaccaattgggttatgcatgagtatcgccccactttgaaggagcttgatggtaccaatcctggacagaatccatatgtcctttgtccgttgtttaaagaaacatg

SEQ ID NO: 181949 - DNA, 259 bp, Glycine max
gaaaagaccatcaaagtttcacttcagccttatccggtttagggtttcggtttttgacccaacctttgacgtatcgaaaccttaagtttcggatcaggtctgagcaatctggttggtagaacctttggtcttagagagtcaagttttatgtctgaattagacgatcaaattcctactgccttcgatccttttgctgatgcaaatgctgatgactcgggtgctgggtcaaaggagtatgtgcatattcgcgtacagcagc

SEQ ID NO: 181950 - DNA, 264 bp, Glycine max
atcaatccaaggcttcctatttctccaaagcttctgctctttcatctggggcatgtgggtatggctctttggcactagacataagtggtggacaccttgcagctggtgtggattctctcttcaaaaatggagcaggttgtggtgcctgctttcagataagatgcaagaacccaactctatgtagcaaagaaggtaccatagtggtattgactgatcttaatcacaacaatcaaactgattttgtgctaagcagcagagcctttg

SEQ ID NO: 181951 - DNA, 254 bp, Glycine max
caatcatcttttgtttgttcttcagtactttagtgtgtgatttaattccaagattttgagaatgtctagctgtgggtgtggaagtagctgcaactgtggcagcaactgcggttgcaacaagtactcttttgacttgagctatgttgagaagacaaccacagagactcttgttttgggtgttgggtctgtgagggcccaattggagggtgctgaaatgggtgttgcagcttagaacggcggctccaactgtggat

SEQ ID NO: 181952 - DNA, 260 bp, Glycine max
cgaaagcgaggaagttcgatattgaaaaggcaaaacatatgtggactgacatgctacaatggaggaaggagtttggtgctgatactattatgcaggattttgagttcaaggagttagatgaagtcgtgaagtattatccacatgggcatcatggcatcgacaaggagggaaggcctgtttatattgaaagacttggaaaggtcgatccaaacaaacttatgcaagttacaactttggataggtatgtgaagtaccatgtg

SEQ ID NO: 181953 - DNA, 247 bp, Glycine max
cgttgttcgcacgccttgttcggtgaagtgagtagtgagtgctgaatcgaatcgaatcgattctccgaacatggcggcgagcgatcgcacagtgttgcaattctcttcatcatcttcttcttcttcgcagatcttgtccgcgaaggtccaccctctggtcatcttcaacatctgcgattgctatgttcgacgccctgaccaagccgaccgcgtcatcggaaccctattcgggtccgtcgttcccgac

SEQ ID NO: 181954 - DNA, 215 bp, Glycine max
ctttgttcagtcttcttctcttgcggctatggttttagcgcacgttcttcctagatttaaggaagatgggtaaggaaaaggttcacatcagtattgtggtcattggccatttcgactctgggaaatccactaccactggtcacctgatttacaagcttggaggcattgacaacccggttattgagaggtttgagagggaagctgctgagatgaac

SEQ ID NO: 181955 - DNA, 238 bp, Glycine max
gagcccttgtctgtgtttgttgacacttatggcactgggaagatccctgacaaggaaatcctcagcattgtgaaggagagttttgacttcaggcctggcatgatctccatcaaccttgatctcaagaggggtggaaatggcagggtttcttgaagactgctgcatatggacaatttgggcagagtatgaccctgaatttcacatggggaagtggttgaagccactcaaggggggagaa

SEQ ID NO: 181956 - DNA, 258 bp, Glycine max
cgcctcttcaacaacccttgttttgttctgtgcaagtgatcttgaaaggaacaacaatggtgaagtctataaactttctcctgcttctgtctctactagcctttgttccctcctgtcactgcaaaaagaaaataggaggttacctctaccctcaattttacgacggttcatgccccagagctcaagagattgtccaatccatcgttgccaaggctgtggcaaaagaaccccgaatggctgcttcgttgctcagactac

SEQ ID NO: 181957 - DNA, 258 bp, Glycine max
caccagtttcaccgcacgaatatcttgttgtttggagcgatccgagaaaaactctgtaaacatgttggtttaccaggacctccttacaggtgatgagcttctctctgactccttccgttacaaggaaattgagaatggaatgctgtgggaagttgaggggaagtgggttgttaaaggagcagttgatgtagacattggtgcaaacccttctgctgagggtggaggagaagatgagggagttgatgatgcagctgttaa

SEQ ID NO: 181958 - DNA, 255 bp, Glycine max
gtgaaagagaatccgaggcgaagagaagagaaaaattaagatggaggggaaggagcaggatgtgtcgctgggagcgaacaagttcccggagagacagccgattgggacggcggcgcagagccaagacgacggcaaggactaccaggagccggcgccggcgccactggttgacacgacggagtttacgtcatggtccttttacagagcagggatagcagagtatgtggccacttcacggtttccatacatcactgt

SEQ ID NO: 181959 - DNA, 256 bp, Glycine max
gcggcaacagaggagagaagatgaagttcaatccacgagtgtcgagcagccgccgcaagagccgaaaggtcacttcacggcgccgtcgagcgtgcggagggtgctgatgagcgcccctctgtcggcggagtccggtcgaagtacaacgtgcggtcgatcccagtccgcaaggaggacgaggtgcaggtggtgcgcggaacatacaagggtcgcgaggggacagtgacgcaggtgtaccgtcgcaagtgggtcatca

SEQ ID NO: 181960 - DNA, 257 bp, Glycine max
gcaaaagttgggtctcaaacctgagaagatgaaggccactagagatgtgcttagtgaatatgggaacatgtcaagtgcttgtgttcttttcatcttggatgagatgaggaggaaatctgctgaaaatggacataaaaccacaggtgaaggacttgaatggggtgtgttgttcggttttggacctggacttaccattgaaactgttgttttgcatagtgtggccatctggagatgcctcatatattatttcattattg

SEQ ID NO: 181961 - DNA, 256 bp, Glycine max
gttttcttttcgttcgcatcttctctctctctcagaaagatgaaggtggtcgccgcgtatttgctcgccgtcctcggtggcaacaacagcccctccgccgatgtcatcaaggaaatccttggctccgttggagtagaagcagatgaagataggattgaatcgtttttgtctgaagttaagggtaaggatatagttgagcttattgctgccggtagggaaaagttggccacggttccttctggtggtggtggtgccg

SEQ ID NO: 181962 - DNA, 258 bp, Glycine max
cagactgagagctctttcttgattctatgggtggtggtgcattgccgttcttagttggtggagcgatttgtctggttaattccgttaacgaacgagacctcagcctgctaaatagctatgtggaggtaaccctccacggccagcttcttagagggactatggccgcttaggccacggaagtttgaggcaataacaggtctgtgatgcccttagatgtcctgggccgcacggcgctacactgatgtattcaacgagtct

SEQ ID NO: 181963 - DNA, 276 bp, Glycine max
gatcgacgtttgataactttgctgaagtgcgcaaactctatgaaggtggagttacactacctacaaactttcttagcaagatcgcccctataccagtggtcaaggaaatttttcgaactgatggcgaacagttcctcaagtatccaccacctaaagtgatgcaggtggataagtctgcatgaatgactgatgaagaatttgctagagaaacgattgctggtgttaatccaaatgtcattaagattcttgaggagttcccaccacgtagcaagctag

SEQ ID NO: 181964 - DNA, 242 bp, Glycine max
tatacttcacagtctttatgataactgcatgaaataccatattggggtgcttgttgacaagtctctcatacagattagtgacgatagagttacattgcatgacttgattgagaacatgggtaaagaaattgacagacagaaatcacctaaagagacagggaagcggaggagattatggttactagaagatataattcaagtcttaaaagacaactcggggaccagtgaagttaaaatcattt

SEQ ID NO: 181965 - DNA, 259 bp, Glycine max
ggaggaaaagagatgaccctgaagcaatggaagaggatgatgttgaagatgaaatagcagaaatcaaggctgctcattttgaggaatcaatgaaatatcctcgaaggagtcttagcgatgctgacattcgcaagtaccaggcattcgcccaaacattacagcagtctagaggatttggaagtgagttcaggtttgcagattccacctccggcggtggtacagctgctgcatctgagccattttcctctgctggtggagc

SEQ ID NO: 181966 - DNA, 260 bp, Glycine max
ggagattattatcgttatcttgccgaatttaaggcaggcaatgagaagaaggaagctgctgatcagtctatgaaagcatatgagtctgctaccactgcagcagaggctgatttacctccaacacatcccatccgattgggtctagctttaaatttctcagttttctattacgagatcttgaactctccagaaagagcctgtcatcttgcaaaacaagcttttgatgaagctattttctgagcttgacaccttgaatgagg

SEQ ID NO: 181967 - DNA, 265 bp, Glycine max
ggcttatggtggatacctaggcacccagagacgaggaagggcgtagtaagcgacgaaatgcttcggggagttgaaaataagcgtagatccggggattcccgatataggtcaacctttcgaactgctgctgaatccacgggcaggcaagagacaacctggtgaactgaaacatcttagtagccagaggaaaagaaagcaaaagcgattcccgtagtagcggcgagcgaaatgggagcagcctaaaccgtgaaaacggggttgtggg

SEQ ID NO: 181968 - DNA, 246 bp, Glycine max
ctccagttttccacaatggaccttgcaaaagcatatactccatggagggaaatttcatccatgctattgagatgaatgaccaattccgaacaagggatcctgagaaagcacatgtgtttttcttaccttttagtgtagcaatgttggtgcaatttgtctatgtacgtgactctccatgactttggccccataaaaaagactgtcacggactatgtcaacgtcattgcgggaagatatcgctattgg

SEQ ID NO: 181969 - DNA, 256 bp, Glycine max
aacatgagtaacatgacttccttaagctccttagtgctgctccttgcagctctaattctattccctcaagttcttgctgactatgagaagcccccggtgtacaaggctcccattgagaagccaccactttacaagcccccaattgacaaacctcctgtttataaacctccagttgagaaatcccgcatttatgagcccccagtagagaggccaccattgtacaagcctcctggtagagacacccccagtttacaag

SEQ ID NO: 181970 - DNA, 253 bp, Glycine max
ccacaacaaggcagcagtgcgaagagaaagaaagagaagaagcgcttatcgaactcggacggaagcactgagttaactcagagcgagtgaaagtgttgctgcgtgatgtctggtggtatcgcccgtggacgcctcaccgaggagcgcaagtcgtggcggaagaaccatccccatggttttgttgcgaaccggagacgctgcccgatggaaccgtgaacttgatggtgtggcattgcactattcccgggaagac

SEQ ID NO: 181971 - DNA, 252 bp, Glycine max
ctttgagtggctttactggcctcaagctcgccagccatactccccagaaactattgactacataaagtcactggatgctgaagaagatattgcccttttaaagtttcatggatgggatctgccagttgaatgtgcccgcactcttaggatctcaaccatgcttttgaagaaaggggtagagagaggattgaccccttttgccattggaaacctgatgtgcagagaatccttgaacaaggaatctgtgattga

SEQ ID NO: 181972 - DNA, 239 bp, Glycine max
ccacaattcacaaccgaaacagtttccatctctctcacaaaatgacaacaatatcaaattgctcccttctcttcctcttcctcttcctctccaccctccacatagcttccaccctctcaacccccaccaacttcatcaagtcctcctgcagcaccacccagtacccagccctctgcatccagtccctctccgtctacgcctccaccatccagcaagacccccacgaagtcgtccaggca

SEQ ID NO: 181973 - DNA, 254 bp, Glycine max
gaacattaccatcataagaaggagtcagaccttgtcgttccaaccgataaactaagtttcctgaatagagcctgtgttatcaaagatcgggaacaagaaatagcctcggatggttcagcatcaaatccatggaaactctgcacagtagatcaagtagaggaactaaaagccattattaaagtgattcccttgtggtctacagggatcatgatgtcagttaacattggaggctcatttggattgctgcaagctaa

SEQ ID NO: 181974 - DNA, 254 bp, Glycine max
tctcgagccgattcggctcgagaaacattataatttctattacatacattttgtagctaggatcagcaagttactactcattcgtgttgctgggttcgtggcaacctttgtcaccatggtgatgatgatggtgcccaaaaacgtgagtgcccaaaacataggtgatgacatcgtcacacaagacttcttcaacagcataatcagtcaggctgatgatggttgtgcagggaagaacttctactcacgagatgctt

SEQ ID NO: 181975 - DNA, 227 bp, Glycine max
gatccttactacgatctggatgtgaaggaggcgctgaatcggcttccgaaagaggtggtggacactcgccacgcgcgtcttaaacgcgccatcgatctttccatgaagcacgagtacctccctgacaatctggagtcaatgcaaacaccattcaggggctacctccaggatatgctgattcttgtgaggagagagaccagcagaccgtgaagcattgggaggttgcc

SEQ ID NO: 181976 - DNA, 262 bp, Glycine max
gtaatggctctatcgccaaggccactctcacattccacaccaaagacgatgtcccactctcagatgcagtgcgtgatgaaacaaaggccaggggtgctggaattttcaaggccattgagggctacgttttggcaaatcctgctcaatgattatccttcaaaccacttgcatgcatgcaataataattatatcagcttatgaactggttgttggagttaatttgtatcatgtggccttggttgggttaattaatttcccttgc

SEQ ID NO: 181977 - DNA, 264 bp, Glycine max
aggttccctaatagtgattttatgagcagagagtttgaagtaccaatccctggttgcaaaccctacaagctcaacctcttcaggttggtttggaggacactttttgtgattttgtcaactgtgatagccatgctcctaccattcttcaatgacattgtatccgttattggagccattggattttggcccctcactgtgtatttaccagtggagatgtatataactcaaactaagataccaaagtggggcataaaatggataggc

SEQ ID NO: 181978 - DNA, 269 bp, Glycine max
tggaaaatatttttattttaccgtactgaatgttttcattggagttactattggtggaaccttgttcaaagcattcaagagaattcgggagcacccgacgttggatgaaatttcgtccttgctagctgaaagcctcccaggcaatgctacttttttcttgacctacgtggcccttaaatttttcattggctatggtcttgaactgtcccgaatagttccccttattatctaccatttgaagagagaatatctttgcaagactgaagctg

SEQ ID NO: 181979 - DNA, 268 bp, Glycine max
ttcgaatccaaggaagggaaaggaaagtaagagaagagaagaatggccgaagagggacaagtgattggtgtccacagcgtggaggagtgggaggaacatctcaagaagggacaagagtccaagaaattgattgtggtggattttactgcttcttggtgcggcccatgccgtttcattggcccaattcttgcggatatggctaaaaagttgccgaatgtcaccttcctcaaggtggatgtggatgaattggcgactgtttccagggagt

SEQ ID NO: 181980 - DNA, 229 bp, Glycine max
cacacactgtgtttgtgaaactccctctcacacacaagtcacgaaaacaacttgtgttgttccaatggcatcagcaacaccccttttgaaagatgagctcgacatcgtgatccccacgatcaggaatctgggtttcctggagatgtgcggggcaatctttgagccctaacaactcataaatgtgccagatggttgaccttcaaaggccaaccagggtcccgaaaggctt

SEQ ID NO: 181981 - DNA, 229 bp, Glycine max
cagaccttattttttctgtcatttgcttcaaatttcaggagattaattatgcgctcaacccacaacaagaataggccttgctggattggctgttaatgggcaaaatctggcactcaatattgcttgaaaagggcttcccaattccggttaacaacggaaccatttccaaggttattgggccataagacgaagcaaaccaggaaggaaaccttcaatttatggggaacaa

SEQ ID NO: 181982 - DNA, 274 bp, Glycine max
tcaagcttcagcaagtgcgttttggaagcagagaccgaaatacttcgagatggcccgtacactgcaaactgctcgtaagtcaactggaggaaaagctcccaggaagcagcttgcaaccaaggctgcacgtaagtctgcaccaacaactggtggtgtgaagaagcctcatcgttatcgccctggaactgttgctcttcgtgagattaggaaataccagaagagcactgagctcctaatcaggaagcttccttaccagaggttggttcgtgaaatt

SEQ ID NO: 181983 - DNA, 208 bp, Glycine max
cgcagcaaccacccgtcggtgttcctcctccccaaggttacccaccgccggattcttacggaaatgacgcgtatcctccgccagggtatccgccgcaaggaggataccctccgcaggcgtatccagcacaggggtagcctccaccctacgcgcctcctcagtacgctcagcctccgccgcaacaacaccagaattcatctggcccagg

SEQ ID NO: 181984 - DNA, 229 bp, Glycine max
gccagtagtcatatgcttgtctcaaagattaagccatgcatgtgtaagtatgaactaattcagactgtgaaactgcgaatggctcattaaatcagttatagtttgtttgatggtatcttctactcggataagcgtagtaattctagagctaatacgtgcaacaaaccccgaattctgggaggggatccattaattagttaaagggcaacaaagggtcttgctggtggct

SEQ ID NO: 181985 - DNA, 212 bp, Glycine max
attggaactcatgtcattcatcacctatttcctcaaattccacactatcacttagttgaggctactgaggcagctaagccagtgtttggaaaatattatagagaaccacagagatcatctcctcttccctttcaccttattggggaattaattaagaagtttaaagattgccaatttggtaatggcaaaggggatgttgcgtaatatccaac

SEQ ID NO: 181986 - DNA, 263 bp, Glycine max
aacctctcaagtccaacctacccctttttcttctcccaccaacttcaccgtcttcttcctcgatcatgtctcacttcaagggcaagtaccatgatgagcttattgccaatgctgcttacattggcactcctggaaaggggtatcttgctgctgatgagtcaaccaggaccattggcaagcgttttgccaacatccgtgtagaagatgttgaattccacaaggcggctcctaaggaactggttttcaacggttcccgtgctcct

SEQ ID NO: 181987 - DNA, 262 bp, Glycine max
gggaagccaacttgtgtgtaatgggtgtaggaacatcttggtttaccctagaggagcaaccaatgtttgctgtgcattgtgcaacaccgttacctctgttcctcctcctggaatggacatgtcacaactttattgtggaggctgtacgacattgctaatgtacacacgtggtgctacaagtgtgagatgttcctgctgtcacactattaaccttgtaccagtactagaatctaatcaagtcattcattgtacgaactgccgg

SEQ ID NO: 181988 - DNA, 262 bp, Glycine max
  unsure (1)..(262): unsure at all n locations
ttcattcttataataatcattattttcttccacaccttcgtccgcttctgncgccgtcgccgccgtcgcctcttctctcgttcgcttccgaccaattcctccgccgccgcctctctcgacgacccgtgcctcgacccttccgtcatcaagtcccttcccacttttactttctccgccgccacccaccgctctctccaggactgcgccgtttgcctgtcggagttcgccgacggcgacgagggccgcgtgctcccgaattgta

SEQ ID NO: 181989 - DNA, 268 bp, Glycine max
aagcaaccccgttgtccggagccaccattttgcgctccggcaatgttcttcccggtggccatcgtcccttaaacccaccacacttcaaagtcatgggtattccatgggacgacgtcgttgtgatccagcaagggaaggatcacaatgagccctgcatcgtcaccgtcaattgccccgacaaggctggtctcggctgtgatctttgcagaatcatcctcgagttcggtctccgcattacccgtgctgatatttccacggatggaagatg

SEQ ID NO: 181990 - DNA, 260 bp, Glycine max
gcaaattgagaaaaacttggcaagcttagaaaatgttgtgatcatgctgatatactatcagttggaccagccaaagaggagaagaaagatgaaccaaagaaagatgagaagaagccagaagacaagaaagatccagaggaggaataatgtgaacttctgaaaggcttttcatatcagaccaagcaagcagaataacccccttaattatccaggaccatgggaagagatcccactagctgggttaattgctcagtaatggg

SEQ ID NO: 181991 - DNA, 263 bp, Glycine max
atcgccgctggctccaaggtgcccacactcgatcagcttctctccttcctccgatccaaatccaccgatcatctcaactccttcgcctctcagctcttcgccgtcgtgctctccgacgcctctcccgccggcgggcctcgcctccttcgccgacggcgtgtggggtgagcaatccctctcgcttctcccttccttcaaacaacttgtcagtggctgttacaaggcccatttgggttcagttgatttccagaacaagggtgttg

SEQ ID NO: 181992 - DNA, 252 bp, Glycine max
cgtttgctacctaaaccctagtctccatacatcaacttgggaggttaaagagacggcaacgttgtgctgtccgccttgaccgagccagagcttcgtcttggccctcgattttgccctgtaaaactaatcccagtcacaacagaaataatcaatggcaccgaaacagaccaaggctgagaagaagatcgcttacgatgcgaactgtgcgacctaatggaggagtacggccaaatcctcgttgtaaactccgac

SEQ ID NO: 181993 - DNA, 267 bp, Glycine max
tgcaaattcaatggcttcagagaagaaactatcgaacccaatgagggaaataaaggtgcagaaactcgtcctcaatatctccgttggtgagagtggagatcgtctcaccagagccgccaaggtgttggaacagcttagtggccaaaccccagtgttttccaaagcaaggtacactgttcggtcctttgggattagaagacatgagaagattgcatgctatgtcactgttagaggtgataagggtatgcaacttttggagagtggttt

SEQ ID NO: 181994 - DNA, 254 bp, Glycine max
aaataacaaacgcacgcttctcattctctctctactcgttcagaaggattttctcacaaggactgagtatgaccgaggagtcaacaccttttctcccgaaggccgtttgtttcaggttgagtatgcaatcggagccatcaagctgggatcaactgcgattggggtgaaggccaaagaaagacgtgtcctttcagttgaaaagcgcatcacattggcggtccttgagcctagtaatgtttaagaaattatgggaa

SEQ ID NO: 181995 - DNA, 250 bp, Glycine max
agaaaacaaaaaatgaaaaattactcgatttttatttctccaaaatgatcaattttataagattgaatcgactaaaaaatgaaatgaatcatttcatattgatagtattgctatgcttagtgtgcgactcgttagttttttagaacggttccaatttaacaaatttataaaccggttcatcgtataaatgaattaaaaaagaactaataaccaacgcatcgcttcgggatatctagatctaaagaactag

SEQ ID NO: 181996 - DNA, 204 bp, Glycine max
tataaacctgattataacagattactgcatgccaggaatgactggctatgatctgctgagaaaaatcaaggaatctaaatctcttagaaacataccagttgtgattatgtcctcagagaatgtagcatcaaggatcaacagatgcttggaagagggagcaggagagttctttctgaaaccagttcaacaggcagatgtggacaa

SEQ ID NO: 181997 - DNA, 256 bp, Glycine max
tactagggttcagaaacgaaaaagggttcggtgttctgttcgcgatgagagccaagtggaagaagaagcgtatgaggaggttgaagacgaagcgccgaaagatgagacagagatccaagtagtgcgttaaacctagtttgtttctgttgcttttacaattgcttatgttgtcgaatgggacacccagttgttagtggcactggtttctcctttttgatgtctgatacatttggttggattcaagtagtttatgttc

SEQ ID NO: 181998 - DNA, 143 bp, Glycine max
tgtatgcatggtggactctctcctgagttacacaatctgaatcagataaagagtttgccgcgtcctattgaagtgcctgaaactggtctactatgtgcactcctttggtctgatcctagtagtgacattcggggttggggaga

SEQ ID NO: 181999 - DNA, 162 bp, Glycine max
ctctgtttctgtctctgtgtttgcggctgaggattccgaacgagcgaccttcttcgtttctcgcaaagtttaagtcatcatgggtaaggaaaagactcacatcaacattgtcgtcattggacatgtcgactctgggaagtcaactacaactggtcatttgat

SEQ ID NO: 182000 - DNA, 157 bp, Glycine max
gttttggagtcatcctatgggagcttgccactctaaggttgccgtggagtgaaatgaatactatgcaagttgttggtgccgttggtttccaaaaccgtagacttgatattccgaaggaagtcgatcctatagttgcaagaataatctgggagtgttg

SEQ ID NO: 182001 - DNA, 160 bp, Glycine max
agacgagatgtgcaagacatcttcaaattgactccccacgataagcaagtgatgatgttttcagctacactcagtaaagagatccgacctggttggaagacatttatgcaagatcccatgggaatttatgtcgatgatgaggccaaattgactcttcatg

SEQ ID NO: 182002 - DNA, 154 bp, Glycine max
tcgaggattcaatttattggcagttaaaggatggtctctcacctgaggctgaggttgtttatgtgggatctctcaaggctgatgttgatgcaaatgagcaagagaaagtttcccttcagttgctggatggaatcaattgcgtgcctacttttat

SEQ ID NO: 182003 - DNA, 145 bp, Glycine max
cctcaggttgattctatttgtctgatggccatcttgcacgtcctgatcttattgtgttcaagtgacggacaaatccagacaggaaagagagatttgaaatgtacatgccaagcaaatgtgcaaagtacagtcaatttttagtgat

SEQ ID NO: 182004 - DNA, 159 bp, Glycine max
cggctcgagagaagaagaagatggagaagtatcagatctggagcaggagaatagcgttggcagcgcttgcctttgctctgctgttccaatcggcctcagcagaccgacgtcgttgtggtctctgaagataacttcgagaaggcagttggtcaggacaga

SEQ ID NO: 182005 - DNA, 145 bp, Glycine max
caatattccaatttttgctattgcaattagtatttttgttagtttcacctttgctgccatgtatggtatagctgttgctgcgcttggcatgctgagtaccattgccaccggattggccattgatgcatatggtccaatcagtgac

SEQ ID NO: 182006 - DNA, 196 bp, Glycine max
ttcaccgcacgaatatcttgttgtttggagcgatccgagaaaaactctgtaaacatgttggtttaccaggacctccttacaggtgatgagcttctctctgactccttccgttacaaggaaattgagaatggaatgctgtgggaagttgaggggaagtgggttgttaaaggagcagttgatgtagacattggtgcaa

SEQ ID NO: 182007 - DNA, 185 bp, Glycine max
attgactccaggcatttggctgagaatttgaagaatacggtgaagaacgttgtgagccaagttgctaagcggactctcaccacaggtgtcaatggatagcttcacccttcaaggttttgtgcgaaggacttgctcaaggttgttgatagggagtacacatttgcatagattgatgacccctgcag

SEQ ID NO: 182008 - DNA, 185 bp, Glycine max
cgggcatctgcacactgaagagccacttgaagctgctggtaagaagacagaagagggaaatgtcctcattaaagctagtacatatgcaagagcttccaaaagctatgaaaggccgtgaagtacatagaatatgattcctcctttggtgaggaggagaaaaagcaggcccagaccttgaaggttgc

SEQ ID NO: 182009 - DNA, 182 bp, Glycine max
cggattcggctcgcttcgagcgaatcggctcgagcaattatttagatccattgatgattgagctgcttttgggctcccacagactcctgaagacgctgccagagcggagcttgtccatgggaaggataatataatagatcgtagtcttccggatgcttatgttaatgccattcgacgtgcga

SEQ ID NO: 182010 - DNA, 175 bp, Glycine max
cttctttttctctaagtctaaggggtgccctgagatcactttgagcccttttgaaggctgtggcagttcttggcagcagcgagggtgtcactggaacattttcttcactcaggagggacatggtccaaccaccgtaactggatctcgtgctggtcttaagcctggtctccatggc

SEQ ID NO: 182011 - DNA, 188 bp, Glycine max
ctggagatttgcaaaagcgcattgggataacatctggtatctgtactttgatccaaaacaaagctgaaaagaaaggggacaggtatgaagcaatcttcagcttctactttggagactatggtcacatagcagtgcagggaccttacctgacctatgaggacacatatttggctgtgcctggtgggtct

SEQ ID NO: 182012 - DNA, 180 bp, Glycine max
tgaaatccccaaaatagtgtttccaaattcctctgcccatcaaagggtgctcgtgatcggaatgggatctgcccctgacttcacatgcaagacagacataaggaggctatcattgaggccgtgaaacagggttacagacacttcgacaccgtgctgcctatggctctgacaaggtctcgg

SEQ ID NO: 182013 - DNA, 187 bp, Glycine max
ggcaagaatgagttcggtgagcaattgatatcccatgttgatacattcagcaaagacctgttcgtttcattgaaaggggatgatgtacagcaagccagtcccgctgtcgaatacttggagaatgctcttggtaaatttgatgatgggccattcttgcttggccaattcagtttggtggatattgctt

SEQ ID NO: 182014 - DNA, 189 bp, Glycine max
cgtgagtgtgacacagataacatagggacatgctattgagactggtcaaaagcttgtcacccaaggttgtgacccttgttgagcaagaatccaacaccaacacttctccctttttccaaaggtttgttgagaccttgagttactactctgctatgtttgagtccatagatgtggccctccccagagatg

SEQ ID NO: 182015 - DNA, 183 bp, Glycine max
ctgctcgagctcgagccgatttgcactgtttgtaggtgtctccgtcgcagccaacatctcgggtggccatttcgtacccagctgttacttttggattggcattggaggcaacatcaccctcattactggtttcttatactggattgcccagttgttgggttccattgtggcatgcctcctcct

SEQ ID NO: 182016 - DNA, 253 bp, Glycine max
gcgattactcagaaagctatctcatcatcgactccttacaatgatcagttcagggaacttctgcaagcagggaaagacattgaaagtgcatattgggaacttgtagtgaaggatatccaagatgcttgcaaattatttgaaccaatctatgatcaaacagatggtggtgatggctatgtttctgttgaagtatctcccaggctcgctgatgaacctgagggaaccatagcagctgcaaaatggcttcataaag

SEQ ID NO: 182017 - DNA, 251 bp, Glycine max
agcgagagcaaaaccctagttcatccatcaccagtcgaggaagaagatggtgaagttccttaagcccaacaaggctgtcatcgtcctgcagggccgctacgccgggcgcaaggcggtgatcgtgaggcccttcgacgagggaaccagggagcgccccacgggccactgcctcgtcgccggaatcaagaagtaccccagcaaggtcatcaagaaggactccgccaagaagacggccaagaaatctagggtta

SEQ ID NO: 182018 - DNA, 251 bp, Glycine max
cagaatcaattgagaatggggatccgattcgtactgatggtgaacaagcaaggccaaactcgtcttgctcaatactacgaatatctcaccctcgaagagcgacgtgccctcgaaggcgaaatcgttcgcaaatgcctcgcccgcaacgaacagcagtgttccttcgttgagcatcgcaactacaaaattgtatatcgtcgctacgcctctttgttttccctcgttggagttgacgatgatgagaatgagct

SEQ ID NO: 182019 - DNA, 250 bp, Glycine max
cgcggattggatgttcgtcaacacctttgaagcattggaaagcgaggtgttgaaaggcttaacggagctctttccggcaaagatgataggaccaatggtcccttctggttacttggatgggagccttaaaggggacaaagggtatggagcaagtctatggaagccgctaactgaagagtgcagcaattggttggaatcaaagcctcctcagtctgtagtgtacatctcctttggaagcatggtgtcattg

SEQ ID NO: 182020 - DNA, 249 bp, Glycine max
cctcttgttgttgcctatgcccttgctggcacagtggacattgactttgacactgaacccattgggatagggaaggatggaacagagatcttcttcaaggatatttggccatccagtgaagaaatagcaaatgttgtacaatcaagtgtgctgcctgatatgtttagggacacatataatgcaatcacccaagggaatcccatgtggaataatttatctgttccaacgggcactctttatgcttgggac

SEQ ID NO: 182021 - DNA, 265 bp, Glycine max
ccaccatcctcaaaatctccaaactcgcgatcctcctcgttttgttcgcttcagtctgcaacgtcgctatgtcggactccaccgccaaacccctcgaccagcacgccaccacgggctctgaccctactgcgccacggttcacatcgtgtacaccgagagaccacagaacgaggagcctgaggcctaccacatcagaaccctcacttcagtccttggcagtgaggaggctgcaaaggaagctttgttgtatagttacaagtctgca

SEQ ID NO: 182022 - DNA, 249 bp, Glycine max
ctgccagtagtcatatgcttgtctcaaagattaagccatgcatgtgtaagtatgaactaattcagactgtgaaactgcgaatggctcattaaatcagttatagtttgtttgatggtatcttctactcggataaccgtagtaattctagagctaatacgtgcaacaaaccccgacttctggaagggatgcatttattagataaaaggtcaacacaggctctgcctgttgctttgatgattcatgataact

SEQ ID NO: 182023 - DNA, 249 bp, Glycine max
cgaattatgagcaaggccaaggctgctgctgctgcttccaaggcggcgaaggctcccaagaagttcaccatcgagtgcactgagcccgtggaggatgacattttcgacattgcttctttcgagaagttccttcacgaccggttcaaggtcggcggcaaggttggcgtgctcggcgatcaagtcaccatcacccgcgagggctccattatcactgttgtctccaaagtcgcgttctcaaaagcttacctg

SEQ ID NO: 182024 - DNA, 250 bp, Glycine max
ctctacgccgccaacaaccacattcttcgctacgcctagggatcttccgtttctctcttcaaaactttcttcttcttcttcttcttctactgcgtcgtcctcgccttgttgctcctccatcactcccaaggttaaatccaaagataacaacaattgctacctcgtctccgctaaacattctcccgctaacatgtccgcttcggtttcgtcacgcaccttcctcaacgctcggaacgcacaagagcttcta

SEQ ID NO: 182025 - DNA, 248 bp, Glycine max
ctttctttctcccctacacaaaacatggatcatccaatcagcacaccgtcgattaccccaaattcaagcttatcatcgtcagcgacggtggcacaggaaagacaaccttcgtgaagaggcatctcactggtgaattcgagaagaaatatgaaccgaacattggtgtggaggttcatccgttggattttttcacgaactgtggaaagattcgcttctattgttgggatactgctgggcaagagaagttt

SEQ ID NO: 182026 - DNA, 251 bp, Glycine max
cccatttctgtgaactgccatggctggaggtgttattcggcagttatttaggaggaaactccaatctcattctcctaattcttgcattaagtcattcattatcacaaagaaagatggtgctgactctattggcaacaactccttaagagtgcttgcactagttggagctggtgtctcagggtttctaggttttgcaacaacagcattcgctgatgaagctgagcatggcctggcatgtcctacctatccat

SEQ ID NO: 182027 - DNA, 263 bp, Glycine max
gtcggacttcggtcgggaattttgcgggtatttgtcagtgtgtgagagagagagcgagcagtttcagacacagagagaggggtttgggattggagggattgacgctgcgtctcttcctcttctctttcgatccatccctcattccttatcctccaatccaaccacctcagtctcacactcacatatacacatatctgaacgcgtatcgtccctcctatggcttcaaagcgcatcctcaaggagctcaaggacttgcagaaaga

SEQ ID NO: 182028 - DNA, 245 bp, Glycine max
tgctgaggttattgctgatattgctctttgcccatttgaggctgtgaaggtccgtgtccaaactcagcctggttttgcaaggggtttgtctgatgggctcccaaaatttgtcagatctgaaggagccttagggctgtacaaggggttagtgcctctctggggacgacaaattccatacacaatgatgacttctgcttcttttgagaccattgttgagctgatctataagcatgccatcccaacac

SEQ ID NO: 182029 - DNA, 246 bp, Glycine max
  unsure (1)..(246): unsure at all n locations
tacgnagtccggagagacagccgatcaggacggcggcgagagacaagacgacggcaaggactaccaggagccggcgccggcgtcactggttgacccgacggagtttacgtcatggtccttttacagagcagggatagcagagtttgtggccacttttctgtttctatacatcactgtctaaaccgtcatgggagtcgccggggctaagtctaagtgcagtaccgttgggattcaaggatcgcttgg

SEQ ID NO: 182030 - DNA, 247 bp, Glycine max
cgcggcgttggcgtacgaccgcgccgcctaccggatgcgagggtcgagggcgctgctgaattttccgttgagggttaactacggagagccagatccggtgagggtgacgtcgaagcggtcgtcgtcgccggaaagtatggcggcggtctcgccgaagagaaagaaagttatggtggtggggacggtgcaagagcaagtggggagtcaagtggtgcagtgtacacgtggcgaacagttattggttagc

SEQ ID NO: 182031 - DNA, 243 bp, Glycine max
aagagaacgggttttgaagaagaagcagttcaattgatcaagtcagatttcagggacctaagtctagctgctaatagactcgcccatcatgccatcaaacttggtggcattggctttggagcctcttttttcggattgtttgctgccattgctgctatttatctgttgattttggatcgtacaaactggaaaacaaatattctcacagcactactcattccatacattttcttcagcttgcct

SEQ ID NO: 182032 - DNA, 185 bp, Glycine max
caatcacaagctctcatgatttcggtttagcaatagatggaccggtaaaagaccatacacatatcacgactcatgtgatgggtacacatggttatgctgcccctgagtacatcatgacaggccatttgacaaccatgagtgatgtatatatctttgtagttgttctcctagagctcctcacagga

SEQ ID NO: 182033 - DNA, 258 bp, Glycine max
caggacaacgaaggaatccccccggaccagcaacgtctcattttcgccggtaagcaacttgaggacggccgtacccttgctgactacaacattcagaaggagagtactcttcacctcgtcctccgtctccgtggtggcatgcagatcttcgttaagacactcaccggcaagaccataaccctagaggttgaaagctccgacaccatcgataacttcaacgccaagatccaggacaaggagggtatccccccggaccag

SEQ ID NO: 182034 - DNA, 242 bp, Glycine max
gccatcgctgaacgtgcagaaacgaggatcgcatacacatcatagacttccaaattgctcagggaactcaatggatgactcttcttcaagcgcttgccgcaagacctggcggtgctccccatgtgcggatcacagggattgatgatcctgtttccaaatatgctcgtggcgacggaccagaagttgttggcaaaaggttggccttgatgtctgagaaatttggcatcccagttgagtttcat

SEQ ID NO: 182035 - DNA, 246 bp, Glycine max
cgtctccatcctaatagtgttaattcgtctttctctatctctatcactcgatgggtgcttttgcttttgatgaggaaaactcctccaccgacgctccggcaacactctacaaagctctgacaaaagatgctgacactatcatcccaaagattattggggccatccaaactattgaaatcgttgaaggaaatggaggacccggaaccgtcaagaagataacagctagtgaaggtgaccaaaccagtt

SEQ ID NO: 182036 - DNA, 244 bp, Glycine max
cggattaaagctgatatatggtcatgtggggtaatcttgtatgttctattggctggtcatcttccattccaggagtacaaatctgatggagatgtacaggaagattggtagaggggaattcaaatttcctaaatggtttgcaccggatgttcgccggtttttgtccagaatattggatccaaacccaaaggccaggatatcaatggccaagattatggaaagttcttggtttaaaaaggggttg

SEQ ID NO: 182037 - DNA, 243 bp, Glycine max
caacatgctcgtcttactctagaagggtctaaggattacccctaccctcgtaggggaagaactagtagaccaccggccaaatcagatcctaaatgtgagagtaggctgaatattgcctcgagcttagacatctatcgtccaagggatgaaagattctgtcacttgaaaatggcggattttcttgcctatgcactgaaatccatagttcaagttctcaaaccggagtctgaatctctattcgac

SEQ ID NO: 182038 - DNA, 248 bp, Glycine max
ctcgagccgtgaagaactaaaggcaggattgcatagacttggctcaaagcttacagaggctgaagtgaagcagcttatggaagctgctgatgtagatggaaatggctcaattgactacatagaattcatcactgctacaatgcatagacacaaattagaaagagatgaccaacttttcaaggccttccaatattttgataaagacaacagtgggtttattacaagagatgaactagaaacagccatga

SEQ ID NO: 182039 - DNA, 242 bp, Glycine max
ctctcagaagcccttgttgtcaacattggggacattatagagattatgagcaatggggcatacaaaagtgttgagcacagggcaacagtgaattcagaaaaggaaaggatatccgttgctatgttctttctccccaagtttcaatctgagattggacctgcagttagcctcacaaacccagaacatctcccgttgttcaaaaggattgtagtagaggcgtatatcaaagattacttcactca

SEQ ID NO: 182040 - DNA, 242 bp, Glycine max
agaagacaggttcaaaccggcgcaaaaaaacttgttacgatggtttcttccgacaaggatccacgacaggcagtccttcaagcatggtacatggatgatagtgatgaagatcaaagactcccccaccacaaagaacccaaggagtttgtctcgttggaccaacttgctgaacttggagtccttagctggaaattagatgctgataaccatgaaaatgatccagagctgaaaaagattcgtga

SEQ ID NO: 182041 - DNA, 240 bp, Glycine max
ggactctaataatgctcagagtgattctttcttgttggatgacagttccagcatccccttctcagtagatgacttctctacatcactgcaagagaaggatttctccgacatgaaaccagcggatgagctgcttgagaatcccgccttccgatttttaaatgagtaggcaagggaagcttagtgtatgtgtttatcatagtcatatagggaagcaacaaaatcagttgttggtccttgtca

SEQ ID NO: 182042 - DNA, 248 bp, Glycine max
cttagaaagacaaaaacttaaatcaaaatacttaatagcatggcgatacatttatacaatccttctaccccaagcacacgctatggagccgtagacagtcaagtaaaatccaatccacgaaatcatttgatctatggacagcatcgttgtggtaaaggccgtaatgccagacgaatcattaccgcagggcatagagggggaggtcataagcgtctataccgtaaaattgattttcgacggaatgaaaa

SEQ ID NO: 182043 - DNA, 253 bp, Glycine max
ccactggcttcaagtgtggtataaactatcagcctccaaccgttgttcctggaggtgaccttgccagggtgcagagggctgtgtgcatgatttctaactccaccagtgtggctgaagtgttctcaaggattgatcataagtctgatctcatgtatgctaagacggcattcgtgcactggtatgtgggtgaaggtatggaagacggtgagttctcggaggctcgtgaggaacttgctgctcttgagaaggatta

SEQ ID NO: 182044 - DNA, 254 bp, Glycine max
gcaacagagagcaacaattctatctctggtttgacccaactgcagatttccacacttattcaattatgtggaatccccaacgcattgttttttctgtggatggcacccccatcagggaattcaagaatttggaatcaataggagttccttttccaaagagccaaccgatgaggatatactcaagcctatggaacgctgatgattgggccacaaggggtggactcatcaagactgactggtccaaagctcctttc

SEQ ID NO: 182045 - DNA, 269 bp, Glycine max
ctttctcctaaaacatctcaatgggttcttcttctattacaacatcgccgcgaaccatgaccatggctgcgatcgtgctcctgttcacggtctttgccgtttcctccgccctagacatgtcgataatctcgtacgacagcgcccacgcggacaaggccgccacgttgcgcaccgaggaggagctgatgtccatgtacgagcagtggctcgtgaagcacgggaaggtgtacaacgcgctcggcgagaaggagaagcgcttccagatcttc

SEQ ID NO: 182046 - DNA, 152 bp, Glycine max
ggagaaaatggggtctctaatggcctctcttactctcactcttgtattggcaatagtttctctaagcttgtgctctcaagcctcagctgacaagtacgactattcatctccaccaccaccagtttacaagtacaagtccccaccaccagcct

SEQ ID NO: 182047 - DNA, 175 bp, Glycine max
ctcgagccgctcgagccgcttccgcaccaacatgccccctggacccttcctcgcccccgacccaaacactcgtcgttctcctcgatgccaaaagtttccccgtcctcttcgacaactctaaggtcgagaaaaaagacgtcttcactggaaccttcatgccttccaccgaactcac

SEQ ID NO: 182048 - DNA, 256 bp, Glycine max
gattgtagaatactttgaggcaattccaggggttccaaaaattaaagagatgtacaacccagcaacatggatgctagaagtgagttctgtagcagctgaagttcgtcttggaatggactttgctgaatactacaaaacatcatctttgttccagcgaaacaaagctcttgtaaaggagttaagcacacccccgcctggagctactgatttgtattccccactaagtattctcaatccacattggggcaatttaaat

SEQ ID NO: 182049 - DNA, 267 bp, Glycine max
gccagtagtcatatgcttgtctcaaagattaagccatgcatgtgtaagtatgaactaattcagactgtgaaactgcgaatggctcattaaatcagttatagtttgtttgatggtatcttctactcggataaccgtagtaattctagagctaatacgtgcaacaaaccccgacttctggaagggatgcatttattagataaaaggtcaacacaggctctgcctgttgctttgatgattcatgataactcgtcggatcgcacggccttt

SEQ ID NO: 182050 - DNA, 265 bp, Glycine max
gggacgtgttgagaccggtgtcttgaagcctggaatggtggtgacttttgcaccaactggactgacaactgaagtcaagtctgtggagatgcaccatgaatctcttacagaggcacatcctggtgacaatgtgggattcaatgttaagaatgttgctgttaaggatttgaagcgtggttatgttgcctcaaactcaaaggatgaccctgcaaaggaggctgtaacttcacagcccaagtcatcatcatgaaccaccctggtcaga

SEQ ID NO: 182051 - DNA, 260 bp, Glycine max
cgctttgtgctgctgctgctgcaaaacctagggttgagccttttgctcaggttttcagcgcttctttcttacaatggttctacagaacgatattgatttgctgaatcctccagctgagttggagaagagaaagcacaagctcaagcgtcttgtgcagtcaccaaactctttcttcatggatgttaagtgccagggctgcttcaacataacaactgtgtttagccactctcagactgttgtggtttgcggaaactgccaga

SEQ ID NO: 182052 - DNA, 256 bp, Glycine max
gtggaggcattttaccgttcaagaggaaaattattggagtttaacctgcctggaggaatcccggagtcttggcctaagttgctacatgctcttaatcttgatgattatgaggacaaacgatctgctgcagcataacgatataataatgtatcataacagtaagtatttcattctttgcgtgcatatattgcatgcttggcaattttgcaggacgagagccaaagaaagggaacttccatgtgagtattattttgga

SEQ ID NO: 182053 - DNA, 237 bp, Glycine max
gaaaaccctagcttaccttttcaactttcaagatgcaaatctttgttaagacactcactggtaagacaatcacccttgcggtggagagttcagataccatagataatgtaaagtccaagattcaagacaaggaagggatcccaccagaccagcaacgtctgctttttgctggcaagcagcttgaggatggacgtacacttgctgattacaacatcagaaagagtctactctacacct

SEQ ID NO: 182054 - DNA, 268 bp, Glycine max
cggctttctgccgcagaagctgaaatagaggacttgagatccaagctggatgcatctgagagggatattttggagctgactgaggctgttaaagttaaagatgctgaggcagaggcatatatatccgaaattgagactattggtcaagcatatgaagatatgcagacacagaaccaaaatctgttggaccaggtgatcgagagggctgactataatattaagctgtatcagatagtgtgaagacaaaacaggcgcacaacactttaat

SEQ ID NO: 182055 - DNA, 263 bp, Glycine max
gtcgatccgggctgaagacattgtcaggtgagggagtacgaggagtgcattgagagggacagtgcggatgttgtggcagtgaacaacaaggctctgtgtttgatgtatctgagggacttgtcggattctattaaggtgttggagagtgcgcttgacagagttcccactgtggctctcaatgagacgcttgttgtcaatttgtgtagtatgtatgagttgggtatgttaatcactctgatgttaagagaacgcttagtagctgg

SEQ ID NO: 182056 - DNA, 264 bp, Glycine max
aagcactctctctttcccttaccctttttcaggtttcaacgctccaactatccatggcaaaccgctggctcagacccgaggtgtatccactgttcgctgcggttggtgctgctgttgggatctgtggattccaactggttcgtaatatctgcatcaaccctgaagtcagggtgaacaaggagggaaggaaggcaggagttttggagaactttgctgagggaagaagtatgccgagcacttcctgaggaagtatgtgcgcaacag

SEQ ID NO: 182057 - DNA, 266 bp, Glycine max
tgagaattttgctgagtctcaacttgttcccaagatgccaaaacaagcttctgaagagcctaagaagaaaaagaaagtgaagctgccacttccattagttccagctgataacaatcaaaatgcctcacaacctgttaggcaatgcatgcattgtgagataaccaagacaccacagtggagggcagggccaatgggaccaaaaacactatgcaatgcttgtggtgttcgttacaagtccggccggctcttccccgagtaccggcctg

SEQ ID NO: 182058 - DNA, 257 bp, Glycine max
ggggaacacggagaagctgatgaaccagatcatggaattgaagttcacgtcgaaatcgctgcagcggcaatcgcgtaagtgcgagaaggaggagaaatcggagaagctgaaggtgaagaaggcgatcgagaaaggcaacatggacggagcgcggatctacgcggagaacgcgataccgtaagcgcacggagcagatgaactacctccggcttgcctccgcctggacgccgtcgtgacccgcctcgacacgcaggcga

SEQ ID NO: 182059 - DNA, 249 bp, Glycine max
cagatttaagtctctctaaacttcttgtttatagtgaaaggggccatgtcactactcaagtgcaatggacaattggttacttggatcctgaatattacatgactcagcagttgactgaactgagggatgtatatagcattggagtgttaatgctataactatcaacagcaagaaggccaatatagcaatgccattatattgtaatagcggcatgagggtaatggacatatcataagatttatacaacct

SEQ ID NO: 182060 - DNA, 255 bp, Glycine max
  unsure (1)..(255): unsure at all n locations
tagcaggtggctgcacttcacctgggcaaacttggacctaagctgacccagcttagcaagtcccaggctgattacatcagtgtgctcgttgagggtccatacaagcctgctcactacatgtactaagtgattgacatgatcaactgaaaagtgagtgagggacagacaaaaatcggttttatcaatcggatttgattgtttaattttccttttttgatttttggtgttcgnattttcagagctgtggtagaagaa

SEQ ID NO: 182061 - DNA, 264 bp, Glycine max
ccagaatattgtaattggtaatgtggctctatatggggccacatctggtgaggcatatttcaatgggatgacagctgaaaggttttgtgtgcgtaattctggagccaaggcagtagtggaaggtgttggcgatcatggatgtgagtacatgactggtgggatagtagttgtgcttggaaacacaggcagaaattttgctgcaggtatgagtggtgggattcttacgttcttgatatggatggcaaattcctatctcggtgcaac

SEQ ID NO: 182062 - DNA, 248 bp, Glycine max
gcttgtcactgtaactcgttctacttctcctgttgttctgtgtttgtgtgtagtctttcactcacctgaaaatgtcctgctactgtggtaactgtggttgcggaagcccctgcaagtgcggcaacggctgcggacgctgcaagatgttcccagactcgagctacactgagtcaaccaccaccgagaccttggtcatgggagtggcacctgttaaggctcatttgagggtgctgaaatgggtgtgcccg

SEQ ID NO: 182063 - DNA, 260 bp, Glycine max
cgattacgatggattcgagttcggagcatcaagaattcgattatttgtttaagttgttgatgattggagactctggggttggcaagagtagtcttcttctcagtttcacctccgatgcttttgaagatctctcccccactattggtgttgattttaaggtcaaatatgtgacgatggggggtaaaaagctgaagcttgcaatttgggatactgctgccaggagaggttcagaacactgacgaattcttattaccgagggg

SEQ ID NO: 182064 - DNA, 261 bp, Glycine max
ctccgaactccgaagcccttcagcaaccatgtcgaggagaaaggttagggacccaaaggaggaaaatgtcactcttggtccagccgttagagacggtgaacatgttttcggcgtggctcgcatctttgcctccttcaacgacaccttcatccatgtcactgatttgtctgggagggaaacccttgttcgcatcactggtgggatgaaagttaaagctgacagagatgaatcatctccatatgctgctatgcttgcagcaca

SEQ ID NO: 182065 - DNA, 255 bp, Glycine max
ctctgcgagatcttcattcgccgaatttaaaagatgagtaagcatcagagtgatgctttgcgtgaagccatttcaggaatcatggccgattccaaggagaagaatcgcaaatttgtggagaccatcgaactccaaatcgggttgaaaaactacgatccacagaaggacaagcgtttcagtggctctgtcaagctgccccacatccctcgccccagatgaaaatttgcatgcttggtgatgctcagcatgttgaag

SEQ ID NO: 182066 - DNA, 252 bp, Glycine max
ctgtatatggatgttggatcctctcgatgagaatctccggcgccctgtcgtccgctacggcgaattcgtccaagccgcgtatcaagtcatccattcagacgccgccatcgtcaacggaggagccgccacacacccaatacgtcgcacttcccgatagatcctaccgaatgaccaaaagcctctacgccacgtcatccattggtttacccaaagggtagatgacgtggcaccggatctaggatggatgaccca

SEQ ID NO: 182067 - DNA, 255 bp, Glycine max
ctcacaaccgaaacactttccatctctctcacaaaatgacaacaatatcaaatctctcccttctcttcctcttcctcttcctctccaccctccacatagctcgcaccccctcaacccccaccaacttcatcaagtcctcctgcagcaccacccagtacccagccctctgcatccagtccctctccgtctacgcctccaccatccagcaagaccccacgagctcgtccagacagccctctccctctccctcaacca

SEQ ID NO: 182068 - DNA, 252 bp, Glycine max
ctccagcaactcactggaatcaatgtcatcatcttttacgcgctactcctgttcagctccatcgggtttaaggatgatgctgctctaatgtcagctgtgatcaccggcgttgttaatgttgtcgcaacttgtgtctcaatttatggtgttgacaagtggggtaggagagcccttttccttgaaggtggagtccaaatgctcatttgccagctgtagttgcagctgcaattggagcaaagtttggaactgatg

SEQ ID NO: 182069 - DNA, 262 bp, Glycine max
gttcacttggctacaatccctgtcactggaaccggcattaaccctgcaaggagtttcggaccagctgtgctcttcaacaacgacaaagcctgggacgaccaatggatttactgggttggaccgtttgttggagctgcggtggctgcaatctaccatcaatacattcttagaggttctgcaatcaaagctcttggatccttcaggagcaacgcttaattaaaaaaaaaaaaaatcaagtttctccactacctaaattatgatg

SEQ ID NO: 182070 - DNA, 264 bp, Glycine max
caacaagttaatagcattccgcaaaatggctgccaccaccttagtctctgaagtcactctcccctcctcctccggccagcggaagatgccgctgatgggcctcggcaccgcgccggaagcaaccagcgcggttaccacaaaagatgctgttcttgaggccatcaagcagggctacaggcactttgatgctgcttctgcttatggtgtggaacagtctgtggagaagccatagctgaagcacttcagcaaggactaattgcatcc

SEQ ID NO: 182071 - DNA, 260 bp, Glycine max
caatttaccagctatacttgttccttttgaaggttagaagtgctacaatacaaacaatggcagctactcaggaagatgtgaagcttttgggtattgtgggaagcccatttgtgtgcagggtccagattgcccttaagttgaagggagttgaatacaaatttttggaagacaatttgggcaacaagagtgatttgcttctcaaatacaaccctgttcacaagaaggttccagtgtttgttcacaatgagcagcccatagca

SEQ ID NO: 182072 - DNA, 258 bp, Glycine max
ggttcccgttgcgtgaagccaccgatcatctatggtgatgtgagccgcccaaagccaatgaccgtcttctggtcgtctctggctcagagctttaccaagcgcccaatgaagggaatgcttaccggtcctgttaccattctcaactggtcctttgttagaaatgaccaacctagatctgcgaccacctaccagattgctttgtctatcaaggacgagtggaagaccttgaaaaggctggcatcactgttatccaaattg

SEQ ID NO: 182073 - DNA, 257 bp, Glycine max
  unsure (1)..(257): unsure at all n locations
aagcaacctctaacctacctctttttcttctctctcaacaacttcaccttcttcactctcgatcatgacacacntcaaaggcaagtaccatgatgagcttatcgccaatgctgcgtacattggcactcctggaaagggcattcttgctgctgatgagtcaacagggacaattggcaagcgtttggccagcatcagtgtagagaacattgaatccacaggcgagctcttagggagctgcttttcactgctcctggtgt

SEQ ID NO: 182074 - DNA, 251 bp, Glycine max
tgattggaaaggcaatcattaaaactcacatacagacgatattcatcatctcagtttgcaacaatcaacttcttcattggattgagaatgaatttatttgggttctcagccacatacctggttttgcatctgtcttgcctagagtgacttctagtctccgtgcaatgaaagataagtatctgaaaaaagattcccatccagtttccccaataagcagggggaaaagtgggatttttctttcactttagtct

SEQ ID NO: 182075 - DNA, 261 bp, Glycine max
ccacgattatgtagtgattcacatattcatgctcttcacaaagaattggatgaagtttcatgtcctatctgcatggaccatccacataatgctgttctcctcctttgcagctctcatgagaagggctgcagatcttacatttgtgataccagttatagacattcaaattggctggaccggtttaaaaaaatgaagggcaattccaagggggacccaaaatttaccaagtccttaagtaaccccaacaattctggttcagga

SEQ ID NO: 182076 - DNA, 218 bp, Glycine max
  unsure (1)..(218): unsure at all n locations
attctctctctcattctcttctccatcgcgcgtaagaaacacattttagttgctactaatgggaactgttgaagctgcaaacaaggatgcaaatggaagtctcctagagaacaatccttcagtcgtttttgtgttaggtggcccangaagtggaaagggtacccaatgtgcnaatattgtcnanaatttttgggtatactcatctcagcgctggtgat

SEQ ID NO: 182077 - DNA, 268 bp, Glycine max
agccaccaccgccaacaaaacaacgggaaatgataatgaagaggaggaagatgaaacagcaatagatgcaacagcaggcagagaagaagaagatcatcaagaccaagacaagactaagaaacagctcaagccaaaaaagaagaaccaaaaaaagcaaagagagccgagatttgcgttcatgacaaagagtgaagtggatcacctcgacgatggctatagatggcgcaagtacggtcaaaaagccgtcaaaaacagccctcatccaagg

SEQ ID NO: 182078 - DNA, 251 bp, Glycine max
cagatattaatgatgttgagtatcaatggtatatacgccgaactagacgatatatatcgcataaggcgacactgtctaccgaggaggccaaggatcccctggagaaggcagtgctagatggtagacagctagccctgaagattagtgccaattctgtgtatgggtttacaggggctaccattggtcagttaccatgtttagagatatcatcgagtgtaacaagctatggtcgacaaatgatcgagcacacg

SEQ ID NO: 182079 - DNA, 256 bp, Glycine max
  unsure (1)..(256): unsure at all n locations
ctcatatccttatcctgtttctttcaatggaagtcatttctgcttctagcttgaatcccaacgctccgatgttcgtcccactcgcctatcggacggtggaggatttctccgaccagtggtgggacctcgttcactcctccccctggttccgcgactactggctccgcgagtgcttccaagatccccagttccanaacgacgacgctttcgacttcgactttgacctagatctccaagatgaagatgaaagggacga

SEQ ID NO: 182080 - DNA, 253 bp, Glycine max
cggctcgagaacgaggagaagcagaaggagcaaaagcaatggcgccgaagaagccgagaaccacgacaaggaaccctgatttggttagggggattggcaagtattcgaggtcgcagatgtaccacaagacgggcatctgggccatcaaggccaaaaaccgtggcgttttgccccgccacgatcccaagcccaagcccgaggccccggcccagaagccgcccaagttctaccccgcggacgatgttaagaagcc

SEQ ID NO: 182081 - DNA, 252 bp, Glycine max
  unsure (1)..(252): unsure at all n locations
catttggagtttggagcgactgaactaatcattaatttgcactcgctgtttcagcttcatcacccttcttttgcatcatttatatctcttgagaaatggcacaagaaacctttctattcacatctgaatctgtaaacgagggtcaccccgacaagctgtgcgacnagatctctgatgcagtacttgatgcgtgccttgatcaggaccctgacagctaggttgcctgtgagacatgcaccagaccacatggtc

SEQ ID NO: 182082 - DNA, 254 bp, Glycine max
cctgtatcgatacacaaggaaggagaaggcaaaaaaatcaattatgttacagtatttgaacgccctgggttgaaggaatttttaaagcaactcagtgaatttgctgacatggtgctgtttacagctggtcttgaaggctatgctagaccccttgttgacagaatagatgtggaaaatcgattcagtctacgactttatcggccctcaacaattagcacggaatatcgggagcatgtcaaggatcttacctgcat

SEQ ID NO: 182083 - DNA, 273 bp, Glycine max
cccaaatcaatcaaattctttgagttgaacacaggggccaagattccttctcttgggttagggacttggcaagctgaacctggtgttgtagctgaagccctcaccacagccattcaggttggatacaggcatattgactgtgctagtgcgtataagaatcaagcagagattggttctgctcttaagaagctttttgatgatggtgtggtgaagcgtgaggacttatggatcacttccaaactctggtgttcagatcatgcaccagaagatgtg

SEQ ID NO: 182084 - DNA, 258 bp, Glycine max
ctgacaaggagattcttcaaattgtgaaggagaattccgacttcagacctggaatgatcaccattaacttggacctctaagacgggtggccataggttcctcaagacagctgcttatggacactttggaagggatgaccctgacttcacctgggaagttgtgaagccactcaagtctgagaagcctcaagcttaagattgttgtgaagttaatcactcccttcaatggatgtcttgctaggtgtggatgaataatttg

SEQ ID NO: 182085 - DNA, 254 bp, Glycine max
ccgagggtttcgctccgtttcaatggggagcgaagagcagaacggcgaattctacctgcgttactacgtcggtcacaagggcaagtttggtcacgagttcctggagttcgagttccgcccagacggcaagctccgctacgccaacaactccaactacaaaaacgacaccatcatccgcaaggaggtttacctaacccccgccgttctccgcgagtgccgtcgcatcatcgccgagagcgagattatgaaggaag

SEQ ID NO: 182086 - DNA, 224 bp, Glycine max
ccaatttttgacaaggctcgtggttctgctccatgtgtcctattctttgatgaacttgactctattgcaactcagaggggtagtagtgtcggagatgctggtggtgctgctgacagggttttgaaccaactgcttacagaaatggacggaatgtcggcaaagaaaactgtgttcatcattgggggcactaatcgaccagatattattgacccagctcttctgcg

SEQ ID NO: 182087 - DNA, 254 bp, Glycine max
cctaatttgtctttctctatctctatcggtcatgggtgcttttgcttttgatgaggaaaactcctccaccgtggctccggcaacactctacaaagctctgacaaaagatgctgacactatcatcccaaagattattggggccatccaaactattgaaatcgttgaaggaaatggaggacccggaaccgtcaagaagataacagctagtgaaggtgaccaaaccagtttcgtgctgcaaaaagtggatgcaattg

SEQ ID NO: 182088 - DNA, 254 bp, Glycine max
ccagcttttgatccggaagctccccttccagaggctggttcgtgacattgcccaggacttcaagactgatctgcgtttccagaaccacgccgtgcttgcattgcaagaagctgctgacgcataccttgttgggctctttgaggacactaacctgtgtgccattcacgccaagcgtgtaaccattatgcccaaggatattcagctggcaagaaggattcgtggtgagcgtgcttgagttggtggttggaaagatg

SEQ ID NO: 182089 - DNA, 253 bp, Glycine max
atttggcctgtaggaaggggaaaccattaggattaatgtgaagcacaaatcaactagtggaactggcatgctctcagctgctggcctaaccagtgggcatgctgcgacaccaaagccaaaaatcgtgagtcttgctcccccaccaagtggagctgggaaaatcaggtctcctcttccacccccaccaaatgatccagttgctgctcggactgcttccaccagtcgtgctactggtcctaaagggacatacgaa

SEQ ID NO: 182090 - DNA, 260 bp, Glycine max
ccattacgctagaggtcgagtcctctgacaccatcgataacgtgaaagctaagatccaggacaaggaaggtactccaccagaccagcagcgcttgatcttcgccggaaaacagctcgaagacggcagaaccctcgccgattacaatattcagaaagatcgacgctcaatctgtgctcgactccgcggagggatgagatctcgtgaaacgtcaccgggaaactattactctggaggtgagagtctgatacgatcgatacgt

SEQ ID NO: 182091 - DNA, 252 bp, Glycine max
cttcgaattcgaattgttccatttgcttcgcaaaacttgcaactacttccacagaaagacaaaaattttctaagttaaggcaatccagagtgaaaacaaaaaaatggccggtgacggtgcagctacatgcatggacatccttcttgccattattctccctcctcttggtgtctttctcaaatatggttgccaggtggagttctggatttgtttggtgctgaccctttttggttatatacctggaattatcta

SEQ ID NO: 182092 - DNA, 238 bp, Glycine max
cgcaagacgaaagaaagaatcccaggcgaggagaaagatggaggggaaggagcaggatgtgtcgttgggagcgaacaagttccccgagagacagccgattgggacggcggcgcagagccaagacgacggcaaggactaccaggagccggcgccggcgccgctggttgacccgacggagtttacgtcatggtcgttttacagagcagggatagcagagtttgtggccacttttctgttt

SEQ ID NO: 182093 - DNA, 246 bp, Glycine max
tcgagcacatgcagaatctacttggctatgcttgttctgtatattgtgtgtataaaatgatcaagtcattgcaaagtgttgttttcaaacaggatggttctgttgatcctgtgacaaggacaataagtatatttcttcagttctttgatataggaataaatgcagccttattatcacagtatatttccttgctattcatcggaatgttggttgtgatatcagtgcgtggattcttaaccacctaat

SEQ ID NO: 182094 - DNA, 269 bp, Glycine max
gtctctcgaagcctctttctctctcttgtagaagctatctgtgtttggtgttactaagtctccaacaagcaaagtacatggttgatcttggaatccaggtccctaccccattcgacccgtttgccgaggcgagagaatcggatgcccccggagcaaaggagtatgtgcatattcgaattcagcagaggaatgtgaagaagagtctgaccacagtgcaagggctgaagaaggagttcagctacgagaagatcctcaaggacctcaagaag

SEQ ID NO: 182095 - DNA, 250 bp, Glycine max
cccacagaaccattccatagaaatgtcaggcgttggccctctttctcaagattgggaacccgtcgtcctccgcaagacggctcccactgccgccgccaagaaggatgagaaagccgtcaacgccgcccgccgctccggcgccgaaatcgaaaccctaaaaaaatataatgctgggacaaataaagcagcatctagcagcacttcattgaacactaagaggctggatgatgatactgagagtctagctcat

SEQ ID NO: 182096 - DNA, 251 bp, Glycine max
gcaaaaagaaagaatcccaggcgaggagaaagatggaagggaaggagcaggatgtgtcgttgggagcgaacaagttccccgagagacagccgattgggacggcggcgcagagccaagacgacggcaaggactaccaggagccggcgccggcgccgctggttgacccgacggagtttacgtcatggtcgttttacagagcagggatagcagagtttgtggccacttttctgtttctctacatcaccgtctta

SEQ ID NO: 182097 - DNA, 249 bp, Glycine max
ccggacataagacagcgtcctagtcgcaaccctaataagaagaaccacagcttcaagcgagtcacatccaccagccatgggtcgtatgcacagccgcggtaagggtatatcctcttctgctttgccctacaaaaggacaccccctagctggctcaagatctcttcgcaagacgtggaagacaatatctgcacacctgcgaagaagggcttgatcccgtctcagattggtgtcattcttcgagattctca

SEQ ID NO: 182098 - DNA, 247 bp, Glycine max
gttacattccaaacaaaggtggttcctggcactgatggtaatggctctatcgccaaggccactctcacattccacaccaaagacgatgataccactctcagatgcagtgcgtgatgaaacaaaggccaggggtgctggaattttcaaggccattgagggctacgttttggcaaatcctgcccaatgattatccttcaaaccacttgcatgcatgcaataataattatataagcttatgatctggttg

SEQ ID NO: 182099 - DNA, 247 bp, Glycine max
cccggtgtgagtctaatatttgcagtgctgaaaatgtcgcagttgttggacaaagccaaaaactatgttgcggagaaagtcacgaacatgcccaagcccgaggcgagtgtcaccgacgtggatttcaagcgcgtgagccgcgacaggtacgagtacttggctaaggcctctgtttccaacccttattccactcccattcccatttgtgagatcaagtactccctcaaaagtgctggcaaggagatag

SEQ ID NO: 182100 - DNA, 250 bp, Glycine max
cagtcttcaaccatggccacacccttggcctaccaagagcatcttccggcggcacccagttggctgaacaaaggtgacaacgcatggcagttaacagcagccatcctcgttggtcttcaaagcatgccgggtctcgtgatcctctacgcaagcatagtgaagaagaaatgggcagtgaattcagctttcatggctctctatgcctttgcagcagttctaatatgttgggtgcttgtgtgttaccgcatgg

SEQ ID NO: 182101 - DNA, 277 bp, Glycine max
cgcacctacataactaaataatcttatgcataacaatttcacaagtgttattttgcgttaattttcttcagttatgagggtgaacacagagtttgagcgtgttcttaagtattttgatgaggatggggatggtaagatttccccatctgagctcaggaaccggctaggcatgatgggtggtgtgttattgttcaaagacgctgaaaagttgattgaggaattggattctgacggtgatgggtttttgagtttggaagattttgtgaagataatggag

SEQ ID NO: 182102 - DNA, 270 bp, Glycine max
aaatcaatcaaattctttgagttgaacacaggggccaagattccttctcttgggttagggacttggcaagctgaacctggtgttgtagctgaagctctcaccacagccattcaggttggatacaggcatattgactgtgctagtgcgtataagaatcaagcagagattggttctgctcttaagaagctttttgatgatggtgtggtgaagcgtgaggacttatggatcacttccaaactctggtgttcagatcatgcaccagaagatgtg

SEQ ID NO: 182103 - DNA, 265 bp, Glycine max
agctgaattgctcaggtatcactccactaagagtggtgatgagatgaccagcctcaaggactatgttaccaggatgaaggaaggacagaatgacatctactacattactggtgaaagcaagaaagctgtcgagaattcccccttccttgaaaagcttaagaagaagggatacgaggttctctacatggttgatgctattgatgagtatgctgttggccagcttaaggaatttgagggaaagaagttggtctctgctaccaaggaa

SEQ ID NO: 182104 - DNA, 264 bp, Glycine max
tgcatttgcactgtttgtaggtgtctccgtcgcagccaacatctcgggtggccatttgaacccagctgttacttttggattggccattggaggcaacatcaccctcattactggtttcttatactggattgcccagttgttgggttccattgtggcatgcctcctcctcaatttcatcaccgccaagagcattccaagccacgcaccggcaactggtgtgaacgattttcaagctgtagtgtttgagattgtaatcacatttgg

SEQ ID NO: 182105 - DNA, 268 bp, Glycine max
aatgaatgctctggtgcgggcatcagcaattatcacaaatgcaccgtatcttctgaatgttgattgtgatcactacattaacaatagcaaggcacttagagaagctatgtgttttatgatggaccctcaacttgggaaaaaggtttgctatgtgcaatttcctcagagatttgatggaattgatagacatgatagatattcaaacagaaatgtggtatttttcgatattaacatgaaaggattggatgggatacaaggtccaatatat

SEQ ID NO: 182106 - DNA, 266 bp, Glycine max
accaaaccaaaaccccacttccaatttcctcttctacgtgcctctagcttgttctaatttgaataatttggcatggacaacatgaggctcatgaggaaacacaacactactcacacatgcatggccaataattcacacacaccttcttcttccctagccatgcacaaaggttcccacatgatatccaaaaccaaaccaaagattcgcataatccacatatttgcacccgagatcataaaaacggatgtggagaacttcagggagct

SEQ ID NO: 182107 - DNA, 265 bp, Glycine max
gcgagagagagagagaaacaaagcagcacccatttggatcctctcttctcttctttgatctccgttaccctttttgttttctcaacagagagagagagagagaatctttcgaagttcgtttgcgtgtgttgtgtggtcagtcaccgatggcagcaccacctgcgagggcacgtgccgattacgattacctcatcaagcttcttcttattggcgatacggtgtgggaaagagttgtctgcttttgcgattttctgatggttccttc

SEQ ID NO: 182108 - DNA, 265 bp, Glycine max
cctttgtatggtttaggagagcttccccaggcatttgcacggcttagtgctgtttatggtgggacatatatgttgaataagcctgagtgcaaggtagaatttgatgaggaaggaaaggttgttggtgtcacatctgaaggggaaactgcaaagtgcaaaacagttgtttgtgatccatcatatttgcccggcaaggtgaggtccgttggtagggttgcaagagcaatagccataatgagtcacccaatccccagcactgatgatt

SEQ ID NO: 182109 - DNA, 123 bp, Glycine max
tgtttggccaaacactcccattcccactgcactgcgagacttctaaagcctctcctgcaggtgttgaaatcctgaactcctaagcaattgatataacagacccaaaaatctcataagagactc

SEQ ID NO: 182110 - DNA, 270 bp, Glycine max
ctgattcgggtaatggccaccagtggaggcgatgaggggcagaacaaccctgccctcgacccggatttggatgctccggatgacccggatcacgagttcgctgagttcgggtcgggttgcttctggggtgctgagttggcctttcagcgagttgtgggtgtggtgaagactgaggttggttacactcagggtcacactccggatccgaattacaaactggtttgcaccggaaccactaaccacgttgaagtggttcgggtccagttcgac

SEQ ID NO: 182111 - DNA, 273 bp, Glycine max
caggtggtgcatgatgtggatttgcagaagctgcctgtaagatttgcaatggacagggctggattagttggagcagatggtcccacacattgtggttcttttgatgtcacatttatggcatgcctgcctaacatggtggtgatggctccttctgatgaagccgaccttttccacatggttgccaccgcagcagccattaatgatcgacctagttgttttcgatacccaaggggaaatggcattggtgttcagctaccaactggaaataaagga

SEQ ID NO: 182112 - DNA, 269 bp, Glycine max
gattttgtgattgatggaactgaatcgacacccgagcagcaagcagctttagctgagatcaggaaaaagaaaagcttgctcatccagcagcataggatcaccaagagcaatgcagagaatcggccaactgttccaaggaagtttgataacgacaagcagttcacatcagaaagaatgggaaggcaactgtcatctttggggcttgatcccagtttggcaattaagagactgcacagcagatctgtctctagaggtcggaaaagggatag

SEQ ID NO: 182113 - DNA, 265 bp, Glycine max
cttctgcgcaaacttaaaaagctgtttctttttctcgatcctaatgcttctctttttagcaactgttgctctgctctacgttaaggacaagcaagttgaagcaattcctctggatgatgccactcaaccctcttgtttctttcagcttttcggtgctctgaaagagctcaagagaccgatgtggatgctgatgctggtcacagctgtgaactgggtggggtggtttccttacttccttttcgacactgactggatgggtcgtgag

SEQ ID NO: 182114 - DNA, 260 bp, Glycine max
gagactacatggcctgctcgtaagcacgtggttgcgtgtgctgctgtgtgcaggtcctggagaggaatcgtgcaaagaaattgttaccagtcctgagttctgtgggaagattactttccctgtctccctgaagcagcctggttcaagggatggaaccatccagtgtttcatcaagagagacaaatctaatctgacgtaccacctattcctttgtcttagtcctgcattgctagttgaaaatggaaagtttcttctttctg

SEQ ID NO: 182115 - DNA, 268 bp, Glycine max
gagaggtgtccctgttgccactgttgcagttaataatgcaactaatgctggattgctggcagtgaggatgttgggtgttgccaatgataatcttctgtcaaggatgagtcaatatcaagaggcccaaaaggaaagcgtattgggcaaaggagataagttagaaaaacatggctggaaatcctacttaaacaatagttaattatccccattaatttggtgattatctcttaggctcatttctcatttttggtcaactacaaaattttga

SEQ ID NO: 182116 - DNA, 257 bp, Glycine max
ctcgctccagcaacaaggctgcttctaagcctctctctcgtggatcagcaactgtggaatcaaaggggcaagctgagaagtgtgccaagagaaagaggaagaaccagtatcgtggaatccgtcagcgtccatggggaaagtgggctgctgagatccgtgacccaagaaagggggttcgtgtttggcttggaactttcagcactgctgaagaagctgcaagagcttatgatgctgaagcaaggaggatccggggcaag

SEQ ID NO: 182117 - DNA, 275 bp, Glycine max
atttccctacctctcccttcaagatgcagatcttcgtcaagacactcaccggcaagaccatcacccttgaggtggaaagctctcacaccatcgacaacgtcaaggccaagatccaggacaaggaaggaatccccccggaccagcaacgtctcattttcgccggaaagcaacttgaggacggccgtacccttgctgactacaacattcagaaggagagtactcttcacctcgtcctccgtctccgtggtggcatgcagatcttcgttaagacactc

SEQ ID NO: 182118 - DNA, 267 bp, Glycine max
gaagatggttcaagaggctgagaagtacaagtctgaggatgaagagcacaagaagaaggttgaggccaaaaacgctttggaaaactatgcatacaacatgaggaacaccgtgaaggatgacaagattggtgagaaacttgacccggctgacaagaagaagattgaggatgcaattgagcaagcaatccagtggttagacagcaaccagcttgcagaagcagatgagtttgaggacaaaatgaaggaattggaaagcatctgcaatcc

SEQ ID NO: 182119 - DNA, 262 bp, Glycine max
agctaccaaagacgctggtgtcattgctggtctaaatgtgatgcgaattatcaatgagcctactgcagctgccattgcatatggtcttgataagaaggccacgagtgttggtgagaagaatgtgttgatttttgaccttggtggtgggacatttgatgtgtctttactcaccattgaggagggtatctttgaggtgatagccactgctggttgacaccatcttggaggtgaagattttgataacaggatggtgaaccacttt

SEQ ID NO: 182120 - DNA, 263 bp, Glycine max
aacagagcaaagagagagtgtgtgaaaagtgaaacaaaaaacagaacaacaatggcgacacttaaggttcctcagcctcttccccccgttgcagatgattgtgagcagctccgaaaagccttctcaggttggggaactaacgaggagctgattgtatcgatcttggctcataggaatgctgctcagaggaagcttatcagagaaacttatgcccagacctatggagaagatctcctcaaggccttggacaaagaactcacgag

SEQ ID NO: 182121 - DNA, 263 bp, Glycine max
aataaaacaaaacacaagccaagtgaaagtcagactaaatcaaaatcaaagagcataatctcagggaccattcacaagattcgggagacccttcatgtgggagggcacaagaaggaggaggagcataagggtgagcaccatgctggagaatacaaaggggagcaccatggtgaacacagtagtgagtacaaaggagagcatcatggtgaacacaaagctggagagtaccatggtgagcataagccagagcacaaagaggggtt

SEQ ID NO: 182122 - DNA, 251 bp, Glycine max
gaagaacctgatcgatatgttctgcttgggaaccatagagatgcatggacgtatggtgctgttgatcccagcagtgggacagctgcactactcgatattgctcgtcgattttctgctctattgggcttgggttggaagccgaggaggacaatcattctctgcagttgggatgcagaggaatttgggatgataggatccactgagtgggttgaacaaaaccttattaatcttggttccaaagctgtagcata

SEQ ID NO: 182123 - DNA, 247 bp, Glycine max
ctcatctgattcccctagcaaccttcttcttacttctctccgcttcttatctccagattgctggggcgtaagacaaccgttgactagtctcaagcttaactctcatattcttcaggagtctactgctaaagagattaatgaaaatcccgaggcaggatgggaggctgctataaatcctcgtttctccaattatacagttgaacaatttaagcgccttcttggagtcaaaccaatgcctaagaaggac

SEQ ID NO: 182124 - DNA, 259 bp, Glycine max
cttctacacaaccattacccttgcccgttttgaagagctaaacatcgatttattcaggaagtgcatcgagcccgtggagaagtgtttgcgggatgccaagatggataagagtaccgtccatgatgttgttcttgttggtggttctactaggattcccaaggttcaacagttgttgcaggacttcttcaacggaaaggaactttgcaagagtattaacccagatgaagctgttgcttatggtgctgcagtgcaggctgcg

SEQ ID NO: 182125 - DNA, 268 bp, Glycine max
ctcgagccgctcgagccgctaagttctatggattacttgggcttgggtttcaggagatcacagttgaaaactgtgtgccagtatggtacaatatggtgaagcaaaatcttgtaagcgaacaggtgttctctttttggctcaatggtgatccaaaagcgaaagatggtggtgaactaatttttggaggtattgatcctaaacacttcaaaggagatcatatttatgtcccagttactaaaaagggctactggcagattgaaatgggaga

SEQ ID NO: 182126 - DNA, 267 bp, Glycine max
ctcccttagtcaaagggattcatcgttcttcttcccaggttatctagaaaagcaaaatggtgaagatttgctgcattggtgctggatatgtggggggtcctactatggcagtcattgcacttaagtgcccatccattgaagtcgctgttgttgatatctctaaatcccgcattgcagcctggaacagcgaccagcttcctatctatgaacctggccttgatggtgttgtgaagcaatgccgtggcaagaacctcttcttcagcactg

SEQ ID NO: 182127 - DNA, 107 bp, Glycine max
ctcacaacagcagctgcagcagcaatggctcccaaacgaggtggaaaggctccggctcttgtcgctaagaagaagcctgagaaggtcacgaatccgttgttcgagaa

SEQ ID NO: 182128 - DNA, 267 bp, Glycine max
gatccgagaagaaactgagagaaacaattaacgtcgtaaacgacgtcgcaaaagagatgataaagcagagaagagaaatggggttcaagacgcggaacgaccttctctcgcggttcatgggatcaatagacgacgacgtttatttaagagacattgtggtgagttttctattagcgggtcgtgacaccatcgctgccgggttaacgggcttttttatgttgttatcgaaaagcccggaggtggaggagttgattagggaggaggtgg

SEQ ID NO: 182129 - DNA, 265 bp, Glycine max
attatgatgtaatccttctggtggggctaggaattggtgccacccctttgataagcatactcaaagacgtgctaaacaacatcaagcaacataaagatgtagaagaaggagaggtggaaaaggacaagagaaaaccttttgccactaagcgagcttatttctactgggttacccgtgaggaaggttcctttgaatggtttaaaggggtgatgaatgaggtggaagagaatgacaaggaaggagttattgaacttcacaactattg

SEQ ID NO: 182130 - DNA, 263 bp, Glycine max
gtagcaccttatgaacgtcctgctctgagcaaggcttacctttttccagagtcccctgctagacctcctgggttccatgtctgtgttggaagtggaggggaaaggttgcttcctgagtggtacacagagcaagggatagagttaatacttagcacagaaatagtaaaggtggaccttgcggcaaaatctctgatcagtgcgggaggagaaacattcagttatcagattttgattgttgcaactggctcaacagttataaggct

SEQ ID NO: 182131 - DNA, 265 bp, Glycine max
cgcgaggtcacgaggagcactagctagtttcacaatttccaaatggctaggggattgaagaagcatctcaagaggctcaatgctcctaagcattggatgcttgacaaactgggtggtgcatttgcgcccaaaccctcatctggaccacacaaatctagggactgccttcccctcatactcatcctacgaaaccggctaaagtatgctctgacttaccgtgcagtcatcgctattctgatgcagagacatgttcttgttgatggaa

SEQ ID NO: 182132 - DNA, 148 bp, Glycine max
aaaaacatgggcagaaaattcttcgtcggtggcaactggaaatgcaatgggaccactgaggaggtaaagaagattgttactactttgaatgaggctaaagtccctggagaagatgtcgtagaagttgttgtgagccctccttttgtgt

SEQ ID NO: 182133 - DNA, 263 bp, Glycine max
cctgtgttcactctgcttctcttgcggctagagtttcagcgcagtttcttctagacttaatgaacatgggtaaggctaaggttcacatcagtattgtggtcattggccatgtcgactctgggaaatccactatcactggtgacctgatttacaagcttcgaggcattgacaagcgtgttattgagaggtgtgagaaggaagctgctgagatgaacaagaggtctttcaagcatgcctgggtgctggacaaacttaaggctgag

SEQ ID NO: 182134 - DNA, 267 bp, Glycine max
actcgagccgctcgagccgattcggctcgaggagacagaaagcgcagtgaaaaaagcttacgttgaaaaccatgagaaaatattcgcaacaagaactcgtgttggggcgaggagggtcaacagctgtgactgcaatacttattgatggtcagaagcttgtagtagcaaatgttggtgactcaagagctattatctgtgagaatggaaaggcaagacaactatcagtggatcatgaaccaagcaaggaaaaaaaatcgattgagaggc

SEQ ID NO: 182135 - DNA, 266 bp, Glycine max
gttcctaacattccagtagtctaattgtaagaatttacggataactttggtcaagactctctgattggagagggatcctatggaagagtatattatggtgttcttaaaagtgggcaggcttgcagtaatcacgaatctggatgccagtaaacagcctcatgaggaatttctagcacaggtttcaatggtatcacggctgaagcatgaaaattttgttcagttgctttgatatggcattgatggaagctcccgtattcttgcttatc

SEQ ID NO: 182136 - DNA, 267 bp, Glycine max
gtggaaaaaccatgggagcgtgtcactgtggatggtcaacctcatgaacatggtttcaaacttgggtctgagaagcatacaacagaggcgatagtacaaaagtctggttcacttcagttgacttctggtattgaaggattgtcagtgttgaagacaacccagtctggttttgtgaatttcataagagacaagtacacagcacttcctgatacccgtgaaaggatggtagcaacagaagtaaccgcactgtggaggtattcgtatgaa

SEQ ID NO: 182137 - DNA, 251 bp, Glycine max
cttcgatcccttcactttgcaatttcatgtctaggctcatggaaccacttgttgtgggaagagtgataggagaagtggtcgacattttcagcccaagtggaaaaatgaatgtgacatattccaccaagcaagttgccaatggtcatgaggtaatgccttctactattatgggcaagccacgcggtgagatttgtggtgatgacatgaggactgcttataccttgatcatgactgacccagatgctccaagt

SEQ ID NO: 182138 - DNA, 266 bp, Glycine max
gtgggaggtttaaattgtattgatcttgtggtagaactggttcgccgctcagcacatgaaatccctctccaaacgcctccgcaaatatgggctccgatacgacgatttgtacgatccttactacgatctggatgtgaaggaggcgctgaatcggcttccgaaagaggtggtggacgctcgccacgcgcgtcttaaacgcgccatcgatctttccatgaagcacgagtacctccctgacaatctgcagtcaatgcaaacaccattca

SEQ ID NO: 182139 - DNA, 270 bp, Glycine max
tatcggggacagagactgatgatcagatcctgtagcgactacgtattgctgatgctgagattgagcaagggtaatcttcgcaaatatttgatttcatcctatacaatgacaatctttaggagtgtcatgagagacttaaggtaaatgcttctgaagcaaagacctccagagtcttttggatgtcttttgaccattaatcatcctgatgttaagtatcatttggtgcagaaactattgggacttgacggctatgtcactgctccacctata

SEQ ID NO: 182140 - DNA, 265 bp, Glycine max
cgcaccagtttcaccgcacgaatatcttgttgtttggagcgatccgagaaaaactctgtaaacatgttggtttaccaggacctccttacaggtgatgagcttctctctgactccttccgttacaaggaaattgagaatggaatgctgtgggaagttgaggggaagtgggttgttaaaggagcagttgatgtagacattggtgcaaacccttctgctgagggtggaggagaagatgagggagttgatgatgcagctgttaaggttg

SEQ ID NO: 182141 - DNA, 262 bp, Glycine max
cacggtgttcatattcatattggcgcttgttggtgtgttttatccatacaatcgaggggcactgtttactgcacttgttgtcatatatgcacttacttcagggattgctggatacactgcaacttcattctattgtcagttggaaggaacaaactgggttaggaatctgctgttgactggatgccttttctgtggacctctgtttctgactttctgctttctgaacactgttgcaattgcttacaaagctactgctgctctt

SEQ ID NO: 182142 - DNA, 265 bp, Glycine max
acttaattgccttaaggaacgttcgagaccacagaggtttctctagtcttcttctgtggagagcttgttttctcttgttcattcatctcacttccaattaaggaacaagctttccaccaatttgaatcaccaatggctcgctctttctccaacctcaaggttctctctgctcttgtcgccgacggattctccaacactctcaccaggcgtgggtacgcagtagcgacacaaagcgcaccaagaggaggagcagcctccatcagcg

SEQ ID NO: 182143 - DNA, 266 bp, Glycine max
ccgagccagcgagcagtttcaaagaaaggatttgggattgggaaggcgagggattgcgctgcgtctcttcctcttctctttcgattcatccctcattcataatcttccaatccaacaacctcaccctcacactcacacatacacacatctgaacgcgtatcgtccctcccatggcttcaaagcgcatcctcaaggagctcaaggacttgcagaaagacccaccaacttcttgcagcgctggtccagtagctgaggacatgttccat

SEQ ID NO: 182144 - DNA, 268 bp, Glycine max
caacatttgaagaattgaacctgccattattgtaagtaagaattgggaaaggaaggaaggagatgaatctccctatcatagatctgtcctcacctgatcctctttccactgccatttccatccgtcaggcgtgcattgagtatggtttcttttaccttgtgaaccatggcgtggagaatgacttggtcaaagcctttgatgagagtaagaggttcttctcacttccaccaggagagaaaatgaagttggcccgcaaggaatttagagg

SEQ ID NO: 182145 - DNA, 265 bp, Glycine max
ctagccgcagcacgaggagcagcctcaggaggagaaggatgtctcacaggaagttcgagcacccaaggcacggttcactgggatttcttcccaggaagcgtgctgctcgtcacaggggaaaagtgaaggcattccccaaggatgacccatccaaggcacccaagctcactgcattcttgggttacaaggccggtatgactcacattgttagagaggtcgacaagccaggatcaaagcttcacaagaaggaaacttgtgagcctgt

SEQ ID NO: 182146 - DNA, 262 bp, Glycine max
cggctcgaggtcgttctgaacggaaaagcactggcgcactaccctgaggctcatcttctcttctcttctctgtcgtgagtcaccatggtgagggttagtgtgctgaacgatgctctgaagagcatgtacaatgctgagaaaaggggaaagcgccaactcatgattaggccatcctccaaagtcattatcaaattccttttggtgatgcaaaagcacggatacatcggagagtttgagtatgttgatgaccacagggctggta

SEQ ID NO: 182147 - DNA, 260 bp, Glycine max
ctatattccattctctctgtctatttccctacctctcccttcaagatgcagagcttcgccaataccctcaccggcaagaccatcagcctggaggtggaaagctctgacaccatcgacaacgtcaaggccaagatccaggacaaggaaggaatccccccggaccagcaacgtctcattttcgccggaaagcaactttaggacggccgtacccttgctgactacaacattcagaaggagtgtactcttcacctcgtcctccg

SEQ ID NO: 182148 - DNA, 262 bp, Glycine max
ctcgagccgttcttagacagaatcaagcaggcatatgaaagaacccctaatctggcaaaccttcttgtggatccagagtttgcaaaggaaataattgattaccaatctgcctggaggagagttgtttgccttgctatcaattctggtattagcactccaggtatgtctgctagtcttgcttattttgacacttacagaagggaaaggttgccagctaatttggtgcaagctcaacgagactactttggtgctcatacatatg

SEQ ID NO: 182149 - DNA, 259 bp, Glycine max
gttgctgctcatcctccgtaacctccgagctctgcaccgaagaacgaagccatggggaagacacatggaatgggatctgctcgcaagctcaagtcccaccgcaggaggcaaaggtgggctgacaagtcatacaagaaatcacatcttggaaatgaatggaagaaaccttttgctggttcatcccatgccaagggaattgtccttgaaaagataggtattgaggctaagcagcccaactctgccattcgtaagtgtgcca

SEQ ID NO: 182150 - DNA, 257 bp, Glycine max
aagcgtctcaagccatctccagttgaatcagcagactccgcgtctgagcccacgcgcacggtgctgctcgttgaccatcaggaagccggcgtgcgtctggtccacactctcctggcgtccgcggaggccgtccagcaggagaatctgaagctggccgacgcgctcgtcaagcacgtgggcatactcgcggcttctcaagccggcgccatgaggaaggtggcttcctacttcgccacaacactcgcgcgccgtatcta

SEQ ID NO: 182151 - DNA, 255 bp, Glycine max
tggctgctgcatcatttggtcaggtttactttgcccgtactactgatggtaataatgttgctgttcaagttcagctgtctaatttgcatcatgtggtggtgcgggatatctacatccttcgttttgggttggggctgctgcataagattgcgaagagaaagagtgtcgctcgcctgtatgctgatgaactagggaaaggttttgttggtgaattggattacactttagaggctgcaaatgcttcaaagtttctgg

SEQ ID NO: 182152 - DNA, 257 bp, Glycine max
ctgatggacaagttcaatgaggaaattcagctgaggggattgaaggatcagatatctgttttggcctgttctcatatcggtggccataagtatgctgggaatgtaatcatattctctccaggatcagatggaaaaatcatgggtcattggtatggctatgttactccggatgacgtggcagccttgttggaccgacaaattgccaagggagaggtcataaaaaaactttggaggggtcaaatggggccacccggtgc

SEQ ID NO: 182153 - DNA, 258 bp, Glycine max
  unsure (1)..(258): unsure at all n locations
ctttccttctctctgccctttcattacttctaccaagctactacatctttaacttcctctttctacatttctctcanaacaatcatggcttctcttcattccattacattttcaacaaaaactgtcctttatgtatttgtattggcctcttccatcgcagcctctgctggcaacttctaccaggattttgacgtaacttggggagatggtcgtgccaagatactcaacaacggcgatcttctcactctttcccttgat

SEQ ID NO: 182154 - DNA, 260 bp, Glycine max
acgatacgtaataagttctatcattgaggaagtttcctgtgcatcgtctccgaaaatgaacgacgcagatgtctcaaagcaaatccagcagatggtgcagttcatccgccaggaagctgaggaaaaggccaacgagatctctgtctccgccgaagaggaattcaatatcgagaagctgcagttggtcgaagccgacaagaagaagatcaggcaagaatacgaacgcaaagagcgccaagttgaaattcgcaagaagattg

SEQ ID NO: 182155 - DNA, 262 bp, Glycine max
ctttcgaatagattatcctaagtctttgggaatagtgctgcaatggcttcaagtcaggaggaggtgacccttttgggagctactggaagcccatttgtgtgcagggttcatattgccctcaagttgaagggagttcaatacaaatatgtcgaagaaaatttgaggaacaagagtgaactgcttctcaaatccaacccagttcacaagaaggttccagtgtttattcacaatgagaagcccatagcagagtctcttgtgattg

SEQ ID NO: 182156 - DNA, 258 bp, Glycine max
attcggaagagcttcaaagtcatgatttagctgatgctgtgaagctaatgaaagacaagcgcaggtttaaggatctcctgataatggtggacacctgttaagcctctactctgttctcccagcttcattcaccaggtgttttggcaattggaagtagtaagaaaggagaaaattcatattcacatcatttggactcagatgttggcgtttcagttgttgatcgttttacattttacactcttgctttctttgagaggc

SEQ ID NO: 182157 - DNA, 256 bp, Glycine max
cgcttctcaaatccatgtttcctctgggaaactagtccctggactatcatggaattactatttgttgacatgtcccaagcttgagaggattataaggaagcatcttgaggatgtcttcgagaaggacagtggagtagctcctggcatacttcgactcttcttccatgactgctttcctaatggatgcgatgcgtctatattgttgaatggagacggtgacgagaagcaacaccgtgctaactttggtttaaggcaa

SEQ ID NO: 182158 - DNA, 255 bp, Glycine max
cagaatttttctcaaaagtcgggagccgggaggtgggaaggttgatcaaacgctacgcagcggacgtgacttggtagggcatggcacccacacactgtcaagagctggtggtaattttgttcctggtgcaaatgttgaaggtaacggcaatggtactgctaagggaggatcccctagggctcgcgttgttgcctacaaagcatgctggaataaactggatgaaggagggtgctatgatgcagatattctagaagc

SEQ ID NO: 182159 - DNA, 257 bp, Glycine max
atccctcactcttgttcttcagtctcctcctattatccgccaccgtagccgccgccgaacggatcgacgatgaagacgaccttctgatccgtcaagtggtgccggatgcggaggaccaccacctgctcaacgcggagcaccacttctccgccttcaagacaaagttcggcaagacctacgccacgcaggaggagcacgaccaccgcttccgtatcttcaagaacaacttgctccgcgccaagtcacaccagaaattg

SEQ ID NO: 182160 - DNA, 258 bp, Glycine max
ctgacttcttctgggagtggttgacaccaggtggaggtggaaagccatccggggagcttctagaactgattgacagagactttgcgctcagtggaaaaattccttgatgagtgtaaggctgctgctgcaacacaatttggttcaggatgggctttgcttgcatagagagcaagcaaatttgatggggaaaatgcagcaaatcctcctgtcaccagatgaggacaacaagctagtggtgctcaagagtcccaatgctgt

SEQ ID NO: 182161 - DNA, 255 bp, Glycine max
ctttcaagtttcaaacaactgcacccaaaagctgttgcatgcgtcctcctgggggcatccttgcacctggtgagagtatcatagcaacagtgttcaagtttgtagagcaaccagaaaataatgaaaagcctgaaaaaagtggactcaaatttaaaatcatgagcttgaaggtgaaaggatcaattgattacgtccctgaactgtttgatgagcagaaggaccaagtagcagtggagcagattttgcgagttgttt

SEQ ID NO: 182162 - DNA, 258 bp, Glycine max
ctcgagccgctggatttaggattgataaattaagccatggtcatggaaacagcacaactgctaggtcttgcaaaaggggaatgagaaggggatcctaaggactgaaatcaattgggcgctcgcttgggttgggagtatctagggctgtgttcccagaagatctgaaagtgtcagaaaagaagatatgtgatcctcaagacaagtttctgctcgtatggaataaactttgtgttatctcatgcattttggccggctcta

SEQ ID NO: 182163 - DNA, 257 bp, Glycine max
caaaatttgggcaagaagagtgatttgcttctcaaatagaaccctgttcacaagaaggttccagtgtttgttcacaatgagcagcccatagcagagtctcttacgattgttgaatacattgatgagacatggaagaagaaccccatcttaccttctgatccttaccaaagagccttggctcgtttctggtccaaattcattgatgataagattgtgggtgctgtatcgaaatctgttttcacggttgatgagaaaga

SEQ ID NO: 182164 - DNA, 265 bp, Glycine max
ctcgagatctggtgagatccttggtaggggaacaaagataactttgtttctcaaggaagagcaacttgagtatcttgaggaacgccgtctgaaggatttgataaagaagcattctgaattcattagctatccaatgtctctttggattgagaagaccactgaaaaggagatttctgatgatgaggacgaggaagagaagaaggatgaggagggtaaagttgaagatgtggatgaagataaagagtaggaggagaagaataagttg

SEQ ID NO: 182165 - DNA, 259 bp, Glycine max
tgaccaccgacgattccatttctacgaactcagacccttcaatcccaactcagaaaaaaaaatcatgaagctgaagacatatgcgggtcttagtatcattgcaactctggctattatatatcatgcgtttaacagtaggggccagttttatccggcaatggtgtatctgtcaacttccaagatcagtttggtgcttcttctcaacatgggtttcgtctttatgtgtattctatggcaattaaccaagaaggtgttcctg

SEQ ID NO: 182166 - DNA, 257 bp, Glycine max
cgttttggagccctacacaaaggaggttgttcgtgttgatgggaagtttttggaatcagctactacatatcatcgccaggtccaagcttctgtccaagagacactgaaaaagcatgagcttactagacctcttgctactaaagagttggaatggtttgcggcctctccccttctggcttgacctattgttttaatggctagagtgttttcagctgttttctgtagcaaaaaagtgagtaaacctgctcgaaatggaa

SEQ ID NO: 182167 - DNA, 254 bp, Glycine max
tctcagcccagtttcactggctcagtattgactctcctatggagaaagatacagtgagagagagaaaaaaatccctggcgtaggaggtattagcaacggagggggcaaggagtaccctggaagcctcactccttgtgtgacggtaacatgtatagttgcacccatgggtgggttaatcttcggtgacgatatcggaatttcaggtggggtgacatccatggatccgtttctgctcaagtttttcccgtcggtgt

SEQ ID NO: 182168 - DNA, 255 bp, Glycine max
atcgtttcttgcgcagatatcactgttttggcagcacgtgattcagttttcctgacaggaggtcccgattatgcagtgccactaggaagacgagatggcctgagcttcagcacatcaggaagaagtgatctccccaaacccttcaacaccaccggcgtgacccttgacgctttcgccgccaaaaactttgatgtcaccgacgttgtcgccttatccggcgcagacacctgtggtcgtgcccattgcggcacattc

SEQ ID NO: 182169 - DNA, 258 bp, Glycine max
agagagaagaagaaactgaatcgatcatcacttcacttcactaatacatcatggcagacgagacccagaacaagtatgagagctctgaggttgaggtccaggatcgtggtgtttttgactttctcggtaagaaaaaggatgaagaagacaagcctcatcctcaggaggaggtcatcgccaccgagtttcaaaaagtcactgtctcagaccaaggagagaagaagcacagcctcttagaaaagcttcaccgatctgaca

SEQ ID NO: 182170 - DNA, 253 bp, Glycine max
tgatgatattgtgaagggttgcgtcgggtcgttggatacttcggctaagagtaccgggtcgggtgggaagaagcgtggacccgctccgtatagaagatttaacctggggaatacttcgccggttactgttcctactcttgtgagtatattggagcggcatttgaaggtgaaggcgaagaggaatattgtggacatgcctggaaacggtgacgttccttttactcacgcgaatattagttcggcccggagagag

SEQ ID NO: 182171 - DNA, 253 bp, Glycine max
ataacaccttacagtgatcatgacaagagagccaagggtagtggatgagctccatggcctgcaagattgactagtcctcctcctagattagctgactttggctattcgagtgacatgtttgaaaaggacatggaactatggcaaaggagagttgagaagtactgggatctcttgagttcaaaaatcacagcaaacacattgaggaatattatggatatgaaagcaaacatgggttcatttgcagctgctctta

SEQ ID NO: 182172 - DNA, 249 bp, Glycine max
gttggttgcggttataagtggaagaggagagggaagatgatgatgatgacaatggaggggatgatggacaagggggtgttggatcatgtgataagaacgcttctggaagggaaaggagggaaacaggtgcaactctctgagtcggagatccgtcaactctgcggcaacgccagacaaatcttcctctctcagccaattcttctcgacctccgtgctcccatccgcatctgcggtgatatacatggtcag

SEQ ID NO: 182173 - DNA, 255 bp, Glycine max
cgcatcttgttcctccgctcaacaactataataagatctttctctctccgaagagatcacactatggccacctcaagcgccaaatcagtccatgatttcaccgttaaagatgccaagggaaatgatattaatcttggtgactagaaaggaaaggtccttatcattgtcaatgttgcctcacaatgtggcttgactaattcaaattacactgagctcagtcagttgtatgagaaatacaaacagaaaggtctggaa

SEQ ID NO: 182174 - DNA, 253 bp, Glycine max
cccggatagcggtgataaatatgcacgccccgttcttggtggttcagccttaccttaccctcgcagaggaagaaccggaagaggaaaaactagaaaagatcccaacagtgagaagccgagcgattttctttaccttccaagagatgaagcatttggtcacttgaagtcatcagattttctcgcttactggaatcaaagctgtatcccaagatgtcttgcctgtcttgactgatgcattcgatggaaatatttt

SEQ ID NO: 182175 - DNA, 251 bp, Glycine max
ccactcaacatttgacactcttttcttcttctcgttgttgcttcggtgttgaatcatggatcagaaactcgatttcagtgctccgcattccatgggaaccactatcatcggcgttacttacaacggcggtgtcgttctcggagccgactctcgaaccagcactggagtgtatgttgccaaccgagcatcggacaaaatcacacagctcactgataatgtttacgtgtgtcgctctggatcggctgctgatt

SEQ ID NO: 182176 - DNA, 251 bp, Glycine max
ctagttttcgtagcatggccatgccatggcgcaggctaggaaaggttccctctccgaatgaaaactggctatggtcagcgttcttcggaggtaaaatgcggaagttttaaccttgctgtggaagcagagaagatccgagataggaaaagcattcctgaagagtgcgttgaaccaagaaaggagtacattaatggcgaacaatttagatcagactctaaaacagttaaccaacaaggctttctttgatgcta

SEQ ID NO: 182177 - DNA, 254 bp, Glycine max
catggatggaatcttccagttgaatgcgcccgcactcttcaaatctcaaccatgcttctgaagaaaggagtggagacggggatgaccccctttgccattggaagtcttatgtgcagggaatccttgaacaaggagtctgtgattgagggaattgtaaaggcagctctggattctgaccttcctggcacaagtgaagccacgtttctggatgctgtttctgaaatcatggaccagcaccttgattagatcaccgg

SEQ ID NO: 182178 - DNA, 254 bp, Glycine max
tgcaaatcgagatcctgctcggaatcatcaagctcgactcgctcgtaggctcatggctcgccgggagaacctccgactggagaggtcggcgttacacgattgttttcgccggcgccatcttctttgtcggagcacttctcatgggtttctcccccaagtagtcctttctcatgttcggccgtttcgttgccggcatcgggatcggctacgccctcatgatagcccccgtctagagcgccgaggtctccccggcc

SEQ ID NO: 182179 - DNA, 259 bp, Glycine max
tgcaaatcgagatcctgctcggaatcatcaacctctactctctgataggctcatgcctcgcccgcagaacctccgactggataggtcggcgttacacgattgttttcgccggcgccatcttctttgtcggagcacttctcatgggtttctcccccaactattcctttctcatgttcggccgtttcgttgccggcatcggcatcggctacgccctcatgatagcccccgtctacaccgccgaggtctccccggcctcctt

SEQ ID NO: 182180 - DNA, 278 bp, Glycine max
gccttttccatggcagcatgatttgtttgaagatagcctaagagctgcagggattcaaggagtagaagttggcaccaagttgtatgtttccaatttggaccatggagtgaccaatgaagacataagggaacttttctctgagcttggagagttgaagcgttttgctgttcattatgacaaaaatggacatccaagtggttcagctgaagtcgtttatactagaagaagtgatgcatttgctgcccttaaacgatataataacgtacttttggatggaa

SEQ ID NO: 182181 - DNA, 278 bp, Glycine max
ggcacttctctcattcaagagtaatggcagaagcaacaaaagggtatgctgtggtcactggagcaaataagggaattggatttgcaatatgcaagcaattggcttctaatgggatcactgtggtgttgacagccagagatgagaagaggggtcttcaagctgtcgagaaactccaagagcttggtctttctggccatgtgggttttcatcaacttgatgttacagaccctgcaggaataagatcacttgcagatttcatcaggaacaaatttggaaaa

SEQ ID NO: 182182 - DNA, 278 bp, Glycine max
cagaaagagaaagagaatggacgccattgattctgtgttcgatccgctgagagaattcgcaaaggacagcgtgaggctcgtgaagcgctgccacaaacccgatcgcaaagaattctccaaggttgccgtccgtactgcaattggtttcgtcgtgatgggattcgtcggtttcttcgtgaagctcattttcattccaattaacaacatcattgtcggatctggttaggatgaagggaactacaattgcctcagaattcaggttgtcaagcaaaaggagg

SEQ ID NO: 182183 - DNA, 279 bp, Glycine max
gtgcaaaagagcgtcgtagtcgcaaccctaatcagaagaagcgcagcttcaagcgagtgacagccaccagccatgggtcgtatgcacagccgcggtaagggtatatcctcttctgctttgccctacaaaaggacacctcctagctggctcaagatctcttcgcaagatgtcgaagaaaatatctgcaagtttgcgaagaaaggtttgaccccgtctcagattggtgtcattctcagagattctcacggtattgctcaggtcaatagcgtcactggcagc

SEQ ID NO: 182184 - DNA, 277 bp, Glycine max
cttaaaatgggtcccatcagccaggtcttttctatgctaccaggatttagtgctgaattaatgccaaaaggccgtgagaaggaaagccaggcaaaaattaaacgttacatgacaatgatggactcgatgacaaatgaagagttggatagttcaaacccaaagctcatgaatgagtcccgaatgatgcgaatagctcgaggttctggtcgtccagttagggaagtaatggaaatgttagaagagtacaaacgtcttgcaaagatatggagcaaaatga

SEQ ID NO: 182185 - DNA, 276 bp, Glycine max
gaaaatgtgtgtgatagattgcttcttcctttccagcatgaggagaagtggtcagaaaatctgagatctaaattacccaagacaaaggaatcacttgagggtgctgatggccccaccttacggtggaggcgtaatgtactacttgttgaagcttcacataatccagattctggaagagtgatccaccatgcccgggaacttgagtcattttgtgctcgtaatggcatacgtttatccctaatgcagggtttgtctgggattgtaaaaacagtgcca

SEQ ID NO: 182186 - DNA, 280 bp, Glycine max
gccatggagcagctttacagtcttggagcattggatgaagagggccttttaactaaattagggaggaaaatggcagaatttcctttggatccaccgttgtctaagatgttgcttgccagcgtggaccttggatgcagtgatgagattttgaccataattgccatgatccagaccggaaatatgttttacaggccaagggaaaagcaagcccaagccgatcagaagagggcaaagttttttcagccagagggtgaccatcttaccctacttgcagtttatg

SEQ ID NO: 182187 - DNA, 282 bp, Glycine max
cagaagaaaatagtcgttcgagatggctcgtacgaagcaaactgctcgtaagtccacaggaggaaaggctcctaggaagcagcttgcaaccaaggctgcacgtaagtctgcaccaactactggtggtgtgaagaagccacatcgttaccgtcctggtaccgttgctcttcgtgagattaggaaataccagaagagtaccgagcttttgatcaggaagctccccttccagaggctggttcgtgaaattgctcaggacttcaagactgatctgcgtttccagag

SEQ ID NO: 182188 - DNA, 283 bp, Glycine max
accctttgagagttagaatggctgctgctattgaaatccccacaatagtgtttccaaactcctctgcccaacagaggatgccagtggttggaatgggatctgcccctgacttcacatgcaagaaagacacaaaggaggctatcattgaggccgtgaaacagggttacagacacttcgacactgctgctgcttatggctctgaacaggctctcggtgaagctctcaaggaagctatccatcttggcctcgtctcccgccaagacctctttgtcacttccaagct

SEQ ID NO: 182189 - DNA, 274 bp, Glycine max
gcatcactggcaagcaccccagaagagaaccgttcactgaggatgggtgattctgatgatgaggaaatgaatctatcgttgtttcctaagaagtttggaaactctactttcctcattgactcaattccagtggcagagttccaaggtcgtccgctagctgatcaccctgctgtgaaaaatggacgtccacctggtgctctcaccataccccgcgatcttcttgatgcatcaactgtcgcagaagccatcagtgtcatcgcctgttggtacgagg

SEQ ID NO: 182190 - DNA, 280 bp, Glycine max
atcgttttctacataatacaaacctttctaatttttgaagcttattatacccaatctcgatatgcagatcttcgtgaaaaccctaactggcaagacgatcaccttggaggtggagtcctctgacaccatcgacaacgtgaaggccaaaatccaagacaaggagggcattcctccggatcaacagcgtttaatcttcgccggaaaacagctcgaagacggcagaaccctcgccgactacaacatccaaaaggagtccacgctccacctcgtcctccggctc

SEQ ID NO: 182191 - DNA, 274 bp, Glycine max
tttggagttggggtcccattgttcaatcacaatgttagaagtactcatacgatcaagtggagtttgtggataatacataaattattgcttgctgcagcatatggcttcattttatttgcaaatttctccaaatggagagagaagctgcctccaaggccatctttccacaactatgttgctgtaatgtttgtcttcagtgtgattaccctgtttgcttgtggactagcagcaattgacgctggacttggcaattggttgtatgatctcactgtgc

SEQ ID NO: 182192 - DNA, 284 bp, Glycine max
gctcgagggcggtttccgttggagaagggcgtttgtccaccatggtggcctactgggaatgaagagttgtggcgccaaataggtttgccgaaagatcaaggtcctcctccttacaagaaacctcatgacttgaagaaggcatggaaagtgggtgttctgactgcagttatcaaggcacatgtctcctgatatcgccaaaatttgcaagctcgtgaggcagtccaaatgccttcaagataagatgacagccagggaaagtgcaacctggcttgcaatcatcaatc

SEQ ID NO: 182193 - DNA, 281 bp, Glycine max
gaacagaagagatttaggcagcccgaaccgacgatgttgtttttaactgacagcagcagtaagcgaacactaacactaacgtgaaacgcgttgcgttgtcggaaaatcaccctcacctgatcactgtggaagtctctaggtgatggccggttcagaacctgttagggcagagggagagactatggctgtggatgctgccccaaggaagccccggattctacttgctgcgagtgggagtgttgctgctgtcaaatttgcaaatctttgtcactgtttctctg

SEQ ID NO: 182194 - DNA, 276 bp, Glycine max
caggagctcagtgttgggtgagagtgagaagcacaagtctgatgttttcccaggaaactctagtcctttttccaaggacattgaagtgaatgggaaggaagttgtcatgtcaaatgtagaggagtatcttggagtgcttgatgtttacatacatcaggccagggacattcaaaacatttgcatataccacaagcaagatgtttatgctaagatttgtctgaccagtaatcctgagacaactgtgtctaccaaaaccatcaatggaggaggaaggaa

SEQ ID NO: 182195 - DNA, 276 bp, Glycine max
ttttcggatgatatcacctaaaggctctcgcatgtctccacaacttcttgcagtgttgcaagcttttgaggcaacattggcagagaggctgaaaaatcttatgcctaaaagcaaggatgaaatcctcaccttgtcttggatgactttagctatgaagtcactttgtgaaagtcacaatgacatacggacccttatgactgcccttgagcttcctgtgagtgattgggaggacaaatggattgatgtgtacttggacataagttcaaagttgctaga

SEQ ID NO: 182196 - DNA, 274 bp, Glycine max
ggccaaatcaatcaaattctttgagttgaacacaggggccaagattccttctcttgggttagggacttggcaagctgaacctggtgttgtagctgaagctctcaccacagccattcaggttggatacaggcatattgactgtgctagtgcgtataagaatcaagcagagattggttctgctcttaagaagctttttgatgatggtgtggtgaagcgtgaggacttatggatcacttccaaactctggtgttcagatcatgcaccagaagatgtg

SEQ ID NO: 182197 - DNA, 272 bp, Glycine max
gccacataaagacacaatacagagtgagttgttgctccttcgccactgctctctgccaacatgggtatctccagagattctatgcacaagaggcgtgaccactggtggcaagaagaaggcctggaggataaagagaaactatgatcttggtcgccagcctgctaacactaagctgtcaagcaacaagacagtcaggaggatccgtgttagaggtggaaatctgaaatggagggcattgagattggatactggaaattactcctggggaagtg

SEQ ID NO: 182198 - DNA, 279 bp, Glycine max
ctaggatttcggccgtttgctccccaaggaaagaagcagagtgtttcttttgaaatcagctagaaaagatgtcaggtgaagaggtagctgttgcagctgaggcacctgctgcttcaattccaggtgagccaatggacatcatgactgctctacagcttgtgctgagaaaatctctggcctatggtggtcttgcacgaggtcttcatgaaggtgctaaggtgatcgagaagcatgctgcacagctctgcgttctagcagaagattgtgaccaacctgatt

SEQ ID NO: 182199 - DNA, 272 bp, Glycine max
ctcgagccgattcggctgagggcagttgcagaagcagttgagaaggtgaaagggggctctacattactattgggcaagttccaggccccatcagagggtaactacagtttgacttgctattgcctgtgtgatgcttggttcggctgttacacaaggacaaatttaaagctcaaagttttgagacggactcgggctggcaccagggctgctgtattcgctgatgaaggacctatcatggaggattgagttgaggaggatgatgacaacgacga

SEQ ID NO: 182200 - DNA, 271 bp, Glycine max
ctccaggttaatcctgccgaggaggagacacaggaaagtgatacaattgcagaggaggatttctttcgcaccagccggaaacaagccgaagaacgtgttgagaggtgtgtcatacgtgtgcaggccatgttccgttctaagatatcacaagatcaatatagatggttgattctgatacataatctttctatgctggatgatttagaagatttcctaaattctgaagatgacatgttacccaagacatagcttggtgccttttccaaaacaa

SEQ ID NO: 182201 - DNA, 272 bp, Glycine max
acgtattctgctcaaaatgtaaagagaaaggttcacaaagtggaacagctggtaggtgttttggatgccaaggcactggtatgaaaattacaagaaggcagattggactaggcatgattcaacaaatgcaacatgtctgtcctgactgcagaggatctggtgaggtcattaacgagagagataaatgtcctcagtgcaaaggaaacaaaatttcccaggaaaagaaggtgctggaagtgcatgttgagaagggtatgcagcagggtcagaag

SEQ ID NO: 182202 - DNA, 272 bp, Glycine max
tgtagcaggtggtatttgtgattcagtgtgcggtgaagtggtttctaagcaccgggcggcggccagtgccgttggtggtggcggtgttggttttcgtggcagagttgaatggggttggggtggggatggaagaattagctaaggaggttcatgctaaggtttccacatgtagggctatttttaaagagttgcttgagacacttgtgaaggttgcacaggtgttgccttgggggaaggatgttaccgtgaagaacattgttaagaatgaccga

SEQ ID NO: 182203 - DNA, 266 bp, Glycine max
agaaaagtcaaagacaatgtcagggatcattcacaagattgacgagacgcttcatgtgggaggccacaagaaggaggaggagcacaagggtgagcagcaccatggtggagaatacaaaggggagcatcatggtgaacacagtactgaatacaaaggagagcatcatgttggtgagcacaagccggagcaccatcgaggagaagagcacaaagaggggttcctagacaagatcaaggacaagatccacggcgaggagggtggcgcac

SEQ ID NO: 182204 - DNA, 260 bp, Glycine max
ggctgctggtattagtatgggcttactcatggttggaactggcagtgataaggcaaatgagatgctcacttatgcccatgagactcaacatgaaaagattattagggggttagcattgggaatagctcttacagtttatggaagagaagaagaagctgacactttgattgagcagatgactagggatcaagatccaatattgcgttacggtggcatgtatgctttggccttggcgtataggggaacagcaaacaataagg

SEQ ID NO: 182205 - DNA, 279 bp, Glycine max
atcctaaaaacatgcgagctctggtgggaagtagattgcctaagttcaccaaatggcaagccaagctagtgaatgcatcatttgattttattggcttaaactattactcctctgtgttatattaatggtgtccctccaagcaacgacaaacccaattttctaacagattctcgcaccaacacttcatttgaacgcaatggaagacccctaggtctaagggccgcttcagtttggatatacttttatccaaggggacttctagatcttctgttatataca

SEQ ID NO: 182206 - DNA, 268 bp, Glycine max
cactcgagccgaatcggctcgagtcaccgcgcaagcaaaaagaaacaatcccaggcgaggacaaagatggaggggaaggagccggatgtgtcgttgggagcgaacaagttccccgagagacagccgattgggacggcggcgcagagccaagacgacggcaaggactaccaggagccggcgccggcgccgctggttgacccgacggagtttacgtcatggtcgttttacagagcagggatagcagagtttgtgggcacttttctgtttc

SEQ ID NO: 182207 - DNA, 273 bp, Glycine max
gcaaagttctaatctttcgcctattgggttctactcctttctctcttcgtttccgatcgatccaattttcttcccatggctacgatcggacacaacaatctcaatgccaaattggttcttctcggggacatgggtgctgggaaatccagcctcgttttgcgctttgtcaagggtcaatttctcgaatttcaggaatcaacaataggcggcagcgttcttttcacagacgctggcagtaaatgacgcgacggtaaagtttgagatatgggacac

SEQ ID NO: 182208 - DNA, 269 bp, Glycine max
cctcgagccgattcggctcgagcgccgtcgtacacggtggcggaggacgtggaggggagggcacggatggcggtggtggctccgagggaaaacgtcgacgttttgaaggtgaaaacggagagagggaacagcgttgtggcgatgtacataaagaacccaacggcgtcgttgactttgctttactcgcacggaaacgccgctgatctgggtcagatgtacgagttgttcagcgaactcagtatccacctccgagttaacctcatgggtta

SEQ ID NO: 182209 - DNA, 269 bp, Glycine max
cgcactccgtcttcatcaatcaccatcaccaccgctccaatacaggggaaaactcacggagatccttcacgttcagggagggcaatgcgggaaccagatcagttcgaagttctgggaagtggtgtgcgacgagcacggcatagatccgacggggaagtacgtcggaaactcagatctacaactcgagcgcgtgaacgtgtactacaacgaagcttcctgcgggcggtttgtcccacgcgcagtgctgatcgacctggagcccggagcca

SEQ ID NO: 182210 - DNA, 278 bp, Glycine max
ggaatgtttgaggcagagttacatgatattcttagcaaagctgaagaagcaccatttttcacctggtccagaatcatcggcatgccaactttttccacttgatgatatacctttcaattctttatccttttcatcaatggtggttaccttaagtttgtatgttgaggatattaaggctggaaagctcaaattccattatggaaccattaacaaaaggccgggtacaagtccttctgatattcgtgcctatacactggatcaccatatgcattcatgag

SEQ ID NO: 182211 - DNA, 280 bp, Glycine max
atggtgaaggagtggttaagctaggaggaaggatactcaagatgatgtcaataaaccttggtttgaaagaagatttccttctcaatgcatttgggggagagagtgaggttggtgcatgcctaagggtgaatttctatccaaagtgccctcaacctgacctcacttttggactctcccctcactcagatcctggtggcatgaccattcttctccctgatgattttgtgtctggccttcaagtaagaagaggagatgaatggattacagttaagcctgtcca

SEQ ID NO: 182212 - DNA, 278 bp, Glycine max
gcttgtttgggatgatagaacatcagttggtttgttgaaaaaagatggactaatggctactcacgatgaagaaactgcacagttctttgaaggcactgaggtgcattgtgttttatgcccccgcaatcctgatgatggtggtagcattgttcaggatttacaaatttctaccatgtttactcatcaccagaagatcgtggtggttgacggtgcgatgccaggtgaagggtcagataggcgaagaattgtgagttttgttgggggtattgacctctgcg

SEQ ID NO: 182213 - DNA, 273 bp, Glycine max
ttcacatattatatcatcacatatcatagtgatatattatatcatatcacaatgtgtggcatacttgctgtgcttggttgctctgattcatctcaagccaaaagggttcgcgtccttgagctttctcgcagattgaagcaccgtggtcctgactggagtgggctccaccaatatggtgataactatttggctcatcaaaggttagccatagttgatccagcttctggtgatcaacccctcttcaatgaagacaaaactgtcgtggttacggtg

SEQ ID NO: 182214 - DNA, 272 bp, Glycine max
gggacccaacactggttaatccctgtacttggtttcatgttacctgtgactccaacaatcatgtgattcgcttagacttgggcaactctaacgtttctggaactctgggcccagaacttggccagctacagcatctgcagtacttggagctctacaggaatgagataacaggaaagattcctaaggaacttggtaacttgaaatcacttattagcatggatttgtatgataacaagttggagggtaaaattccaaaatcatttggaaagttg

SEQ ID NO: 182215 - DNA, 269 bp, Glycine max
ctcagaactcagcaaggctcactgttcctggaggaccaagtgttgcatgtagcacagcaaaagctgttgagtgggatgctgcttggtctaacaaccttgatccatcaggtagagcagcacttggagtgcatgcatcagcttatggaaaccaggtcaaagctgtagaaccagagaagatcatacccacgatggaagtttctccactaggagttgccatatagagcctgtatgagccatagcaaggactagtagttgccctagaaccagca

SEQ ID NO: 182216 - DNA, 273 bp, Glycine max
gtcctgttccatctcgttggaagggcacctgcatgaaatcacaagacttcaattcctccaattgtaacaggcaattaattggcgcaagattttacaccgaccctactggaaacgatgacgacgaaggggacaacacgccaagggattcggtggggcacgggacccacgtggcatcgacggcggtgggtgccaccgtgactaatgcatcgtactatggtctggcggcggggagcgcaacgggtgggtcctcagaatcaagattggcagtttaca

SEQ ID NO: 182217 - DNA, 273 bp, Glycine max
gttctcttcaccattctctttcttctttgtttcaagtttcaacaacccagattcactctctctctcgtaattttctctcttattgaggctagaaaaagagagcaaaaaaactaaaaaatgcctgcggtcggaggtataaacaccggagggggcaaggagtaccctggaagcctcactctatttgtgacggtaacatgtatagttgcagccatgggtggtttaatcttcggttacgatatcggaatttcaggtggagtgacgtccatggatccg

SEQ ID NO: 182218 - DNA, 265 bp, Glycine max
gtagccaaatgcctcgtcatctaattagtgacgcgcatgaatggattatcgagattcccactgtccctatctactatctagcgaaaccacagccaagggaacgggcttggcagaatcagcggggaaagaagaccctgttgagcttgactctagtccgactttgtgaaatgtctttagaggtgtagctctaagtgggagaagtaattcgactttgaaataccactactctgaacgatattttacttatttaattgggtagagatga

SEQ ID NO: 182219 - DNA, 272 bp, Glycine max
cagagatcggaacgtggaactgcggaaaccggaatatctcacttctcagatcagatcaatccgacgtcgttgcagttataatggctccattcagcggcgatgagacggcaccgtttttcggcttccttggagccgcagctgccctcgtcttctcctgtatgggagctgcctatggcacagcgaagagtggcgtgggcgtggcttcgatgggtgtgatgagaccggagctggtgatgaagtctattgtccctgttgttatggctggagttttg

SEQ ID NO: 182220 - DNA, 274 bp, Glycine max
ctcatatccttatcctgtttctttcaatggaagtcatttctgcttctagcttgaatcccaacgctccgatgttcgtgccactcgcctatcggacggtggaggatttctccgaccagtggtgggacctcgttcactcctccccctggttccgcgactactggctccgcaagtgcttccaagatccccagttccaaaacgacgacgctttcgacttcgactttgacctagatctccaagatgaagatgaaagggaacgaaaggaagggaaggaggt

SEQ ID NO: 182221 - DNA, 279 bp, Glycine max
attcgtttgtgctgccgctctctgagaaaaacagatagtgtgggagagagaagagcggaagagaaaatgacgaccaggttcaagaagaacaggaagaagagaggtcacgtcagcgccggacacggccgtatcggaaagcaccgcaagcatcccggaggtcgcggtaacgccggtggcatgcatcaccaccgtatcctcttcgacaagtaccatcctggtttcttcgggaaggtaggcatgcgctacttccacaaacttcgcaacacattctacaatccg

SEQ ID NO: 182222 - DNA, 279 bp, Glycine max
cagggaatggagaatatttaatggagttagccattggaaccccaccagtgtcttaccctgcggttttggacactggcagtgaccttatttggacacagtgcaagccttgcacgcagtgttataaacaaccaacacccatttttgatcccaagaagtcctcttctttttccaaggtttcatgtggtagcagcttgtgcagtgctgtgccttcttcaacatgcagtgatgggtgtgagtatgtttattcatacggtgactattcaatgacacaaggcgttt

SEQ ID NO: 182223 - DNA, 263 bp, Glycine max
gtcatataccgtgattttaaagcttctaacatcctgctggatgctgagtttaattcgaaactctctgactttggtttagctaaggcgggtcctactggtgatagaactcatgtgtctactcaagtcatgggtactcaaggatatgcagcacctgaatatgttgcaactggtcggttgacggccaaaagtgatgtctacagcttcggagttgtgttgcttgaacttctatcaggaagacgcgcagttgataaaaccataaccgg

SEQ ID NO: 182224 - DNA, 257 bp, Glycine max
ctctatcctgacagtgtggttggaactctttcacatacaacaatgatagatgggcttggagttgctggatggggtgttggtggtattgaagcagaggcagcaatgcttggtcagcctatgagcatggtgttacctggtgttgttgggttcaagttatctggaaaactgcgcaatggtgttacagcaactgacttggttctaactgtgacacaaatgcttaggaaacatggtgttgtagggaaatttgttgaatttta

SEQ ID NO: 182225 - DNA, 256 bp, Glycine max
ccaattctcgccaaaacataaggaagctggttaaggatgggtttatcatcaggaagcccatcaagattcactctcgctcacgtgctcgtcgaatgaaggaagccaagaggaaaggacgtcactctggatacggtaagcgtaagggtacaagggaggcaaggcttcccactaaaattctatggatgaggagaatgcgtgtgctcagacgcttgcttcgcaactacagggaatctaagaagattgacaagcacatgta

SEQ ID NO: 182226 - DNA, 252 bp, Glycine max
ctgtcatggatcatcaccctgtacactctatggcaaatggttgagatgcatgaaatggtacctggaaaacgttttgataggtatcatgaactggggcagatgctttggggagaagctaggactttatatagtggtgcctcaacaacttgtggtggaaattggggtgaacattgtctatatggttactgggggaaaatccttgcaaaagttccatgacactgtgtgtgccagctgcaaaaagatcaagttgac

SEQ ID NO: 182227 - DNA, 259 bp, Glycine max
aacagagcatggctcctctcacattctccttcttcttcatccttatctcttacatttcttcatcatcagaagcgggatcaatcggaataaactatggaagaattgcgaacgacctacctacaccggcgaaagtggtggagcttcttaagagtcaggggctgaaccgtgtgaagctctacgacaccgacgccaccgtcttaaccgcgtttgccaactcaggaatgaaggtggtggttgccatgccaaacgagcttctcgc

SEQ ID NO: 182228 - DNA, 258 bp, Glycine max
  unsure (1)..(258): unsure at all n locations
cttggctccgctctttggtttgctcaaccgatctccgcagcaacggtgaacgttccgaagacaaagaagacctactgcaagagcacgagtgcaggaagcacacgctccacaaggtcacccaatacaagaagggcaaggacagcatcgccgctcagggaaaacgccgttatgaccgcaaacagtccggttacggtggccagaccaagcccgttttccancaaaaggcgaaaaccaccaagaaaattgtgttgaggctcc

SEQ ID NO: 182229 - DNA, 258 bp, Glycine max
tttggatgcccagagaaaaggcgagatcaacgaagacaacgtcctctacattgttgaaaacatcaacgttgctgcaattgaaacaactctatggtcgattgagtggggcattgctgagcttgtgaaccacccagagatccagcaaaagttaagggatgagattgacagagttcttggagcagggcaccaagtgactgagccagacatccaaaagctcccatacctccaagcagtggtcaaggaaactcttcgtcttag

SEQ ID NO: 182230 - DNA, 258 bp, Glycine max
cctcgagcgaattcggctcgaggggaaaccataaattgggaacacgtcaccaaatccacctccaccgtccaagccatcggatcctcgccggaaaacatgttcgtgagcttcgaatcttcccgcagaaactcgaattcgataatggtttacgatttgcataccctaacacccgtcacggagatcagtcacaacgagatcttcggcgcgaacatcgattcggcgattccggcgacgaagttgcaatggattgagggatat

SEQ ID NO: 182231 - DNA, 261 bp, Glycine max
cttgttcctctcgcccagtatccgagatcaaccctgacccctaaggccaggggtttttctcggcttcttcagattcctgaaatggcgtctgtttcagctttagtcaagtacaagctcgtcttcttgggtgaccaatccgtgggcaaaaccagcatcatcactcgcttcatgtacgataaattcgataacacctatcaggctacaattggtattgattttctatcaaaaactatgtatctcgaagatcgaactgttcgactg

SEQ ID NO: 182232 - DNA, 263 bp, Glycine max
cgatcgtgagaggggcagtagccgagattccgtgagttgcaaaaatgaagacgattctttccaccgagaccatgaacatcccggacggcgtgagcatcaaagttcatgccaaggtcatcgaagttgagggcccccgcggaaaattggtgcgagacttcaagcatttgaatctcgattttcagctcattactgacgaaaacggtaaaagaaagctgaaaatcgacgcgtggtttggttctcggaaaacatccgccgccattcgc

SEQ ID NO: 182233 - DNA, 251 bp, Glycine max
ctcgagcggcaccagctcaccgacgaccagatcgccgagttcaaggaggccttcagcctcttcgacaaggacggcgatggttgcattactaccaaggaacttgggactgttatgaggtcacttggtcaaaacccaactgaggcagaactgcaggatatgataaacgaggttgatgctgatggcaacggaaccatcgatttcccagagttcctcaacctgatggctcgcaagatgaaagacaccgactcaga

SEQ ID NO: 182234 - DNA, 255 bp, Glycine max
caaaggttggaaccgatgaggatgcactcactcgcgtggttgtgagccgggccgagaaggacctgaagataatctcagaggtttactacaagagcaacagcgttcttcttcagcatgctattgccaaggaaatctcaggggactacaagaagttccttctcactctgttggggaaagaagactaaatattttttctctgagggcatttgtgattacgagtttaggacaccaagctatacttgtgtgtgtgtgatg

SEQ ID NO: 182235 - DNA, 254 bp, Glycine max
tttctttattctctccttcctcttccttcttcttgtttcatctgccactgcttgtgatcgctgcttgtatcaatccaaggcttcctatttctccaaagcttctgctctttcatctggggcatgtgggtatggctctttggcactagacataagtggtggacaccttgcagctggtgtggattctctcttcaaaaatggagcaggttgtggtgcctgctttcagataagatgcaagaacccaactctatgtagca

SEQ ID NO: 182236 - DNA, 257 bp, Glycine max
gttgttgtaactcgttctccttcttttgttgttctgtgtttgtgtttgttttttctctcacctgaaaatgtcttgctgcggtggtaactgtggttgcggaagctcctgcaagtgcggcaacggctgcggaggctgcaagatgtacccagacttgagctacactgagtcaaccaccaccgagaccttggtcatgggagtggcacctgttaaggctcaatttgagggtgctgaaatgggtgtgcccgctgagaacgatg

SEQ ID NO: 182237 - DNA, 249 bp, Glycine max
ccgcttgttaaaccaaggtgattcctggtgaatatggtttcgttgcccagcttaacgagagtcgtcacctcaagaagaggccaactgaggtccgagttgataaggtccttcaaccctttgatgagaacaaattcaactttaccaaagtcgggcaataagaggtcctcttccaatttgaagctagcgaggatggacatgtccagttctttccaaatgctccagttgatgttgacaattctcccagctttg

SEQ ID NO: 182238 - DNA, 253 bp, Glycine max
agaaaatcctcacccattttcttcgtagccaaacactctgaaattctcagttatgtcgtggcaagcgtatgtggatgatcacctactgtgtgaaatcgaaggtaaccacctcactcacgccgctatcatcggccaagacggaagcgtttgggctcagagcaccaacttccctcagttcaaacctgaggaaataactgccatcaataatgactttaatgagcctggatcacttgctccaactggattgtatatc

SEQ ID NO: 182239 - DNA, 238 bp, Glycine max
  unsure (1)..(238): unsure at all n locations
gccgagatggcgtgcatcaggttatgatgttgaatccagtgcttcaagtgatgttattcttaaggccagtgctgctagtgtggcganagagaaagtatataagggacagacagttggcccagtcagatttcaaagtaaatttcaaaattatcttgatntgaanattgatgatggaaatattgatatataggactaaactcatgaacagatagattttcgatcaaagcctaggtttgat

SEQ ID NO: 182240 - DNA, 262 bp, Glycine max
ggcggtcgcgagagaggagtggcggaatctttctgaaaaatcgccgcaaagcgaagcgcaagtctcatattaactgcaacttgaactacgaactacgaacatcagggtagtgattaagaaaaaccctagcaatggggaagaagcagcacagcacagacagaatgttcatcaccacaacggagtgtgctacggagtgggtgaggcgctaaatccaaagaaaatcgcactcgcttcaaacgtcttcccttctattgctgctcgc

SEQ ID NO: 182241 - DNA, 260 bp, Glycine max
ggcgctgagagaattttttgacctgacgggggcgttcaatgtgtctgatgctcttccttatttgagatcgttggatttggatggtgcagagaagaaaatgaaaaagacggcgaaagagttagatgggtttgttcaagtttggctggaagaacacaaaagtaaaaggaatagtgaagctgaacccaaaagtaaccaggacttgatggacgtgcttcttagccttgttgaggagggtcaagagtttgacggccaggatgctg

SEQ ID NO: 182242 - DNA, 258 bp, Glycine max
tgcagaaataactgacaagcttggacttcattcactccgtcaacgccactggtatatccagagcacttgtgcaacttctggagagggtctctatgagggtttggactggctttctaacaacattgccagcaaagcatgagacatttgaaaaattttggtcttgtctggtgatttcatgcgagtctggcggttcttggagaaagatgcttatcttttctagcgaatgttgtaatagcagaatgcttgctagaagtattc

SEQ ID NO: 182243 - DNA, 253 bp, Glycine max
ggattccttgcagcccttgcttgatttcctccgagctcacaaatacaagggccatgctctgttgttaaatgatagaatacaaaccatttccaaacttcagtctgcattggccaaggctgaggattatctctctaagcttgcacatgatacactctattcagagtttgaatatgtattgcaaggcatgggttttgagagaggttggggtgctactgctgaacgggtattggagatgatgcatctgctattggat

SEQ ID NO: 182244 - DNA, 251 bp, Glycine max
ggtcctgctcctggtgtccctcacagccacaccaagccttatgttcgagcaaagggaaggaagtttgaaagggctagaggaaggaggaacagccgaggatttagggtttgatgtgataaatagcgtgttattctctgaaattcaaattttccttatatcttagacagttgaggcagttttcttgttatttgtgttctgataatacgattttctgtatgaagttttcattcttggctcctttattctccaat

SEQ ID NO: 182245 - DNA, 257 bp, Glycine max
ctaatatggcagccaatgttcatgatgcaaaacgcaaactcatatctaagactttccgtcgcttgcctgacgtgagtgacagacaaacattcactggtccaccagacaatgtaagagctcatgtcatggctgccacgaggtttctcagcaagggagacttccagaaggcttttgacattattgtgtctcttgatgtgtggcaatttctgagagctcgagacactgtgcttgagatgcttaaggacaaaatcaaggag

SEQ ID NO: 182246 - DNA, 277 bp, Glycine max
gtcatataccgtgattttaaagcttctaacatcctgctggatgctgagtttaattcgaaactctctgactttggtttagctaaggcgggtcctactggtgatagaactcatgtgtctactcaagtcatgggtactcaaggatatgcagcacctgaatatgctgcaactggtcggttgacggccaaaagtgatgtctacagcttcggagttgtgttgcttgaacttctatcaggaagacgcgcagttgataaaaccataaccggaatggagcagaatc

SEQ ID NO: 182247 - DNA, 273 bp, Glycine max
ctcagaatggtttcatctctgcagctgagctccgccatgtcatgacaaatcttggggagaagctgaccgatgaggaggttgatgagatgatccgcgaggccgacgtcgatggtgatggacagatcaactatgaggagttcgtcaaagtcatgatggccaagtgaggaccattcaaccataacctaaatttgaaaagcatataaagagaagagggacagtgcagataagttttgatgagaattctatttccattaggtccatcttgatttgggg

SEQ ID NO: 182248 - DNA, 274 bp, Glycine max
gcagccgctgtcattgttggatcagaccccttaccagttgaaaagcctttgtttcagcttgtctggactgcccagacaatccttccagacagtgaaggggctattgatggacaccttcgcgaagttggtctcactttccatctcctcacggatgttcctggactcatctccaagaatattgagaaggccttggttgaagccttccaacccttgggaatctccgattacaattctatcttctggattgcacaccctggtggacccgcaattttgg

SEQ ID NO: 182249 - DNA, 267 bp, Glycine max
gctctttctgtcacacactcacattccggtgcaaaatgaaggtcatcgccgcctacttgctcgccgtattgggaggcaatgcagccccttccgctgatgacttaaggaccatccttggctccgttggagctgacgcgaatgatgacaacatcagccacttcttgtctgaagttaagggcaaagacattgcggagcttatcgccgccggtagggaacagttggcctccgtgccttctgccggtggcgccgcggtttccgtggccgctg

SEQ ID NO: 182250 - DNA, 283 bp, Glycine max
cgaattcggctgacgcttggccccggtggagtgcgaattggggcccctgccatgacttctaggggttggttgaaaaggactttgagcagattggtgagttccttcaccgtgctgtgactctcacactggagatccagaaggagcatggcaaacttctcaaggatttcaacaagggcctcgtcaacaacaaggccattgaagatctcaaagctgatgttgagaagttctctgccacatttgacatgcctggcttcctggtatctgaactgaagtacaaggatta

SEQ ID NO: 182251 - DNA, 268 bp, Glycine max
ctcgaccgcgggacatgatattctgatggctaccatgctgaatggagcagcaatcatgcatggagctttgctagtcattgctgccaatgaaagctgcccacaagcggaaacctctgagcatttagctgctgtggaaattatgcggctacagcacatgataattcttcagaacaaggtagacttgattcaagaaaatgtggctatcaatcagcatgaggcaatttcgaagtttatacaaggcactgttgctgatggtgcaccagtagta

SEQ ID NO: 182252 - DNA, 266 bp, Glycine max
gttaaagcatactggaccaggacttctatcaatggcaaatgctggtcctgacaccaatggctcacaatttttcattacaaccgtgacaactagctggttggacggaaggcatgttgtttttggtagcgttctttctggattggatgttgtttacaatattgaagctgaaggaacacaaagtgccactcccacgagcaaggttgtgattgttgacagtggtgaactccctctataattgtacttccttgattctcaaccaggaatag

SEQ ID NO: 182253 - DNA, 264 bp, Glycine max
gaaaggaataccaagattaccaccacaaagcaatgggcggtatactttctgcagttcttggcggcgacgcggcggcggcggcgtcttcgccggagagttctacttctagagtctcctccttccactcgtcgccgcgctggcagctctacttcaacgagatcaaagataccgataagctcgttgtgatagatttctcggcgtcgtggtgcggtccttgcaaattcatagagccagcgattcacgccatggccgacaagttcaacg

SEQ ID NO: 182254 - DNA, 266 bp, Glycine max
ggtgtttataatggacaattgtgaggagctcattcctgagtaccttggatttgtcaaaggtgttgttgactccgatgacttgccgctcaacatctctcgtgagatgctgcaacaaaacaagatcctgaaggtgatcaggaagaatctcgtgaagaagtgcattgagatgttcaatgaaattgcggagaacaaggaagattacaacaagttctatgatgctttttcgaagaatttgaagttgggtatccacgaggatagtcagaaca

SEQ ID NO: 182255 - DNA, 266 bp, Glycine max
cacttgtcccgccacaagcccttctgtaccaatcgatcttgctaactccccaatcgcgcaaaccacgcgtgacgccgatacgccctccgtggacaccgccacgtgctcaaacgcgaaggcgagaactgccacgtcctcgtcctagaccttgtggttggtcggctttccgtggtagaggtcgtcgttgtccatatagggcaggttgtcgtggatgagcgccatggtgccgttgacgagctcgcatgtggtgatgcagagcacggggc

SEQ ID NO: 182256 - DNA, 250 bp, Glycine max
gctggttcgtgaaattgctcaggacttcaagactgatctgcgtttccagagccacgccgtgcttgcattgcaagaagctgctgaggcataccttgttgggctctttgaggacactaacctgtgtgccattcacgctaagcgggtaaccattatgcccaaggatatccagctggcaagaaggattcgcggtgaacgtgcttgaggtggtggttgtgaagatgaagatgaagatgggttgctgcgggtggtg

SEQ ID NO: 182257 - DNA, 270 bp, Glycine max
ctgaaattagttggtggaaccttagttgaccataccttcttattcctgggtgctggagaggctggaactggtatagctgagctgatagctcttgagatttcaaagcagactaaagctccagtggaagagacccgcaagaagatctggctcgtggactcaaagggacttattgttagctctcgtttggactcacttcagcagttcaaaaagccttgggcccatgagcatgaacctgttaagagtcttctggatgctgtcaaggcaatcaag

SEQ ID NO: 182258 - DNA, 277 bp, Glycine max
ccagtctataaaccaccagtgtacaagccaccagttgagaagccaccagtatacaaaccacccgtttataagccaccagtttacaagccaccagtgtacaagccaccagttgagaagccaccagtgtacaagcctccagtgtacaagccaccagtatacaaaccaccagtttataagcctccagttgagaaacctcctatttacaagccaccagtttacaagcctcctatagagaagccaccagtgtacaagccaccagtgtacaaaccaccagtgt

SEQ ID NO: 182259 - DNA, 264 bp, Glycine max
ctcgagcgctgaaaaaaaatagcttgttcacaccatcctattttttcaactcatatataccaatatatataacatggcttctaccttctctcgaagcctagcacttgtcagcttttacattgtcgtttgtgctgccggtaacttgaaccaagactttcagcttacgtggggagatggtcgtgctaaaatactcaacaacgaaaatcttctcactctctcccttgacaaggcctctggctctggcttccaatccaaaaacgaata

SEQ ID NO: 182260 - DNA, 264 bp, Glycine max
catacattgaactttactatatattcgccagtgtttggggccacagaatttacaccatctacagcatcctgttcattgtcttcatcattctcttgattgttactgctttcatcactgtggcattgacatacttccagcttgctgctgaggatcctgagtggtggtggagatcattcctatgtggtggttcaactgggttatttatctatacctactgtctgtattactactatgcacgctccgacatgtctggattcatgcaga

SEQ ID NO: 182261 - DNA, 265 bp, Glycine max
cctcgagccggctcgagcggctcgaggcaccagtttcaccgcacagctatcttgttgtttacagcgatcccagaaaaactctgtaaacatgttggtttaccaggacctccttacaggtgatgagcttctctctgactccttccgttacaaggaaattgagaatggaatgctgtgggaagttgaggggaagtgggttgttaaaggagcagttgatgtagacattggtgcaaacccttctgctgagggtggaggagaagatgaggga

SEQ ID NO: 182262 - DNA, 256 bp, Glycine max
gtgtgcttcaattccatggctaaaccgtatgctccaagacgaaccctagaatcatactcagtcaaacacataagccaaaccagtagagctcgcgattgcatcctcatgcggccctccgatccgtcgaaaccgtcgtacgtagcgaggatcgagcggatcgaagccgacgcgcgcgcgcgatacgtgaagattcacgtgcgctggtactaccggccggacgaatcaatcggcggtcgacgccagtttcactgctcca

SEQ ID NO: 182263 - DNA, 271 bp, Glycine max
acccgagcgattcggctgagtttcgctctcacttacggctttcgatttgccaccatagaatccagcctcacacatgttctctgcttctatggaagggcgattatggagcggtatcgtgcttcttccaaaggcaaagaagatatccacacaaaattgatgaccagatacaaagacataccttcttggtggtttcattcattgctgctcgtgacacttctggtttctctcgcactatgtatctttctaaaggaccaggttcagatgccctggt

SEQ ID NO: 182264 - DNA, 265 bp, Glycine max
gcttcctcgctctacagcatcggcaagatccggcgtcggaacctcgacgctcccgtcgttaaccccaccgaccaagtactcgtgtccaagcacatgctcgaggcttctcttatggggtttgtgctggttctgtctttgctgatagatagattgcccattacatccgagaacttaggttactaaggaaggccatggaggctgctaagaaacagagtcggaatttcgaagatggtaaaagtgtcagtgcagcagagcacaaggcgtt

SEQ ID NO: 182265 - DNA, 264 bp, Glycine max
tggaggatcagaatcaaacaacacccttattaccaaacttcgcttagccaaagacacttccttctcttcatgggttctattggaattgagagctcgggacctgaggttgtcaccgttgatgtacatgcaaccaaggatctgatccagaccagtcatgtttatctggatgtcaggacggtggaagagtttcagacagggcatgtggatgcagagaagatcattaacgttgcatacatgtttaatacaccagaaggcagagtgaag

SEQ ID NO: 182266 - DNA, 265 bp, Glycine max
caacaacaagttcacctacaattgcgacgcacacaccttcaattacctcgtcgacaatggctacacatattgtgttgttgcagatgaatcaattggaagacagttacccatggcttttctagagcgtgtcaaagatgaatttgtgtcaaaatatggtggtggaaaggctgccacagctcctgcaaacagccttaacaaggaatttgggccaaagttgagggaacatatgcagtactgtgttgatcatcctgaagagataagcaag

SEQ ID NO: 182267 - DNA, 263 bp, Glycine max
cgaggagctcctcgttcagtatctatgccgcaaggtcgctggccaccatttctctcttccaatcattgctgaaatcgatttgtacaagttcgacccatgggttcttccaactaaggcgattttcggtgagaaagagtggtactttttcagccctagagacaggaaataccctaacgggtcccgacccaacagagtagcccggtcgggttattggaaagccaccggaaccgacaagatcatcaccaccgaaggtagaaaagttg

SEQ ID NO: 182268 - DNA, 255 bp, Glycine max
gtcaaatctggatgttgtcagccatatttcctgtcactgttgaggtccttatagataggtatcttcaaaagccttatggcatcaatcttatggatgagctaactttgaagggtattacacaattttatgcattcgtggaagcgagacagaaagtccactgcctaaatactctatgtgctaagctgcaaataaaccagtctatcagcttctgcaattcagtgaatcgggttgaactacttgccaagaaaatcacag

SEQ ID NO: 182269 - DNA, 264 bp, Glycine max
ctgctcccaaaggttctctttgcaaccttgatgtagaagttgatcttggcctaccccctgatgcagtatataatatagtgatagatcctgacaataggagagccttcaaaaatatcaaagaagtggtatccagaaaagtgttggttgatgagggtcataggcaagtggttgatcttgaccaagcagccatttggaaatttctctggtggtctgggactatatcaatcaatgttttggtagatcagaacagaaaagaccattctt

SEQ ID NO: 182270 - DNA, 259 bp, Glycine max
cagctggctggggagtggaaccacacctctggccaatggaatggagacgctaacgacaaaggtattcaaaccagtgaggattacagattctacgctatttcagctcagtaccctgaattcagcaacaaggataagacactagtcttccaattttctgtcaagcatgaacagaagcttgactgcggtggtggctacatgaagttgctcagtggtgatgttgatcagaagacatttggtggggatactccttacagtatta

SEQ ID NO: 182271 - DNA, 262 bp, Glycine max
gaagaagcaagagctcgaattctacagattcattcaaggcagatgaatgttcacccagatgtcaactttgaagaacttgcccggtccacagatgatttcaatggcgcacaactgaaggctgtctgtgttgaggctggcatgttggctctacgccgtgatgcaactgaggtgaaccacgaggattttaatgaaggtattattcaagtccaagcaaagaagaaagcaagtctgaactattatgcataggctggattgtggaaca

SEQ ID NO: 182272 - DNA, 265 bp, Glycine max
gtcttcgccaatcgcctgcgtctctctctgaattgactagcttaaatggctggtcctaggattgcccatgctaccttgaaaggtccgagtgtggttaaggagatcataattggaataacacttggcttagctgctggtggtgtgtggaagatgcaccactggaatgaacagaggaaaaccaggaccttctacgatttactggaaaagggtgagattactgttgttgcagaggaacagtgaaaatgttcttgttttgttgcctatg

SEQ ID NO: 182273 - DNA, 261 bp, Glycine max
ctcgagccgtgcttgccgtgcttgacattaaatggtctggcattgagctggaagaatggtcgagaaatgagcagttttggctgattggagggaccagtgcccatctagctgcggtgcttcaaggtttgctcaaagtcatagcagggattgacatatcattcaccttgacttcaaaatctggtggtgatgatgtagatgatgagtttgctgatctctatattgtgaaatggacatcccttatgataccacctatcacaatta

SEQ ID NO: 182274 - DNA, 259 bp, Glycine max
cgctgtttctccattctgtataacattttccattctctgggcagtttatcgcaacgaatcctttgcctggattggtcaagatatacttggaataacactgataatcacagttctacagattgtacatgtaccaaatctcaaggttggtacagtacttcttggctgtgccttcatttacgacatcttttgggtatttgtctcaaagaagtttttcaaggaaagcgtcatgattgtcgtggcccgaggcgatcgaagtgga

SEQ ID NO: 182275 - DNA, 258 bp, Glycine max
aaaaccttgatcaagaattgcagcattaatcttcaaccatggccacacccttggcctaccaagagcaccttccggcggcacccagttggctgaacaaaggtgacaacgcatggcagttaacagcagccaccctcgttggtcttcaaagcatgccgggtctcgtgatcctctacgcaagcatagtgccgaagaaatgggcagtgaattcagctttcatggctctctatgcctttgcagcagttctaatatggtgggtgc

SEQ ID NO: 182276 - DNA, 256 bp, Glycine max
caagcattctccattacatggcatggagaaacattgcaatgtagaaatcgctgcacatgtttcacgcctgtcatcatcaaaacatgaaggggagcaccattctttccagctagaagggttaatggagagtccgtccgtggatgacgatggggactgcttctcgcctttacagttaaacgcaacatccatcaacattgaagtctactataatacagcattgaactataccttgatggttacttttatctcatttttg

SEQ ID NO: 182277 - DNA, 268 bp, Glycine max
actcaaatgaaaaaaactcatgatgacgaattagttgcagatgtccatgccctttcggcaggtctaaaggcttatgtaacatcatacactgcaaagtcactcagcatctgtagggacgcctgtggaggccatggttatgtgctgttaatcggtttggtattttgagaaacgatcatgacatttttcaaacatttgaaggagacaacacagttctgcttcaacaggttgcaggtgatcttttgaaacaatacacgggaaagttcaaagg

SEQ ID NO: 182278 - DNA, 267 bp, Glycine max
aatccctctttcttcctcttcctcagtagtgcgattttcgattctcttctctgcaactatgcctaaccctaaggtcttcttcgacatgaccatcggcggtcaacctgccggccgcatcgtgatggcgctctacgccgacggactccgagcaccgccgagaacttccgcgcgctctgcaccggcgagaagggcgccgggcggagcggcaagcccctccactacaaaggctcgtccttccaccgcgtgatcccgaacttcatgtgccag

SEQ ID NO: 182279 - DNA, 268 bp, Glycine max
ctataaccaaacactcttcttcatattcttcttcttcttcttgttcttgttctatctgtgacgagcatcatggcctcgagagcagtgctattgttggctatgtgtgtgcttccggccatggttgtcgccattcgcccagcaagaaccctttttgcgtgaagggtcgcgtctactgtgacccttgccgtgctggttttgagacctcagcaaccacctacattgccggtgctgagattatgttgcaatgcaagagcagggttagcaacga

SEQ ID NO: 182280 - DNA, 270 bp, Glycine max
cgacgagagtgttttaaaatatattgaacagtcacttgggaacattcactatggaagaaccaacctctctaacggtctcactgcgttggaattaacaggaactgaccgagttggtcttttatcggaagtgtttgctgtactgctgatcttcaatgtgatgtggttgagtctaaggtttggacacacaatggccgtattgcctccttactctatgtaaaacattctagttctgggtctgctattgaggactctcagaaaattaataagatt

SEQ ID NO: 182281 - DNA, 274 bp, Glycine max
attcattcaagattcagcaagtgcgttttggaagcagagaccgaaatacttcgagatggcccgtacaaagcaaactgctcgtaagtcaactggaggaaaagctcccaggaagcagcttgcaaccaaggctgcacgtaagtctcaccaacaactggtggtgtgaagaagcctcatcgttatcgccctggaactgttgctcttcgtgagattaggaaataccagaagagcactgagctcctaatcaggaagcttagccgccagaggttggttcgtt

SEQ ID NO: 182282 - DNA, 274 bp, Glycine max
cacaattcacaaccgaaacagtttccatccctctcacaaaatgacaacaatatcaaatcgctcccttctcttcctcttcctcttcctctccaccctccacatagcttccaccctctcaacccccaccaacttcatcaagtcctctgcagcaccacccagtacccagccctctgcatccagtccctctccgtctacgcctccaccatccagcaagacccccacgagctcgtccagacagccctctccctctccctcaaccacaccgaggccacca

SEQ ID NO: 182283 - DNA, 271 bp, Glycine max
ccagaccaagtcaagatcgttgcagcaataaaagaagctggaaacgtcaagagatttttcccatctgaatttgggctggatgtggaccgtcacgatgcggctgagcctgtaagacaagttctcgaggaaaaagcgaaaattgaagagtaattgaagctgaaggaattccttacacttacctatgttgtcatgcctttactggttatttcttacgtaacctggcacagattgacatcactgttcctcctagggacaaggtgttcatacaagg

SEQ ID NO: 182284 - DNA, 265 bp, Glycine max
cggctcgagatttccatgaactttgactattatatcagtgcgagtactgactttgtgttattagatgagacaactttaatcaatatcattaagcatccagatctgacagtaacgtctgaagagaaagtccttaatgcaatctaatgtttggcatgaatgcaaaacagttgtttgggtgggaagtggtggatcagttaatggaaaattcaaaaccagaactcctttttggtgagaggcttcagttaatctatgacttgttgccatt

SEQ ID NO: 182285 - DNA, 272 bp, Glycine max
ggaacttgatgacaatgtcaaggcaaaacttgctcaattctgtcatgtgccgttgtcaaacatacttactctccatgacgttccaaatatttggcacattcctttgctattgaaagaccagaaggcacatgaggcgatccgaaagcattaaacttgctaggtgttgctgcagagcctaatttgaaggagtggacttcaaggacaaaagtctatgacagatgtcatgaaattgttagaattgcaatggtgggaaaatacactggcctttcaga

SEQ ID NO: 182286 - DNA, 131 bp, Glycine max
ctgccgggcaaatctttcaccagtgttcaggatgaaaccaatccaatttgagaaggatgatgacacaaactaccatatggatgtgattgctgggcttgccaacatgagggcacggaattacagcattcctg

SEQ ID NO: 182287 - DNA, 209 bp, Glycine max
ccacagtcagacacaataaaaatcaaagagcataatgtcaggcatcattcacaagattggcgagacccttcatgtgggagggcacaagaatcaggaggagcataagggtgagcaccatgctggagaatacaaaggggagcacatggtgaacacagtagtgagtacaaaggagagcatcatggtgaacacaaagctggagacccccatgg

SEQ ID NO: 182288 - DNA, 256 bp, Glycine max
gtcttttatcagaaacttgtatgaattctctcattatgttgcagtgagaacatcatatggaaagcatttagccccaccaccattaacagtggacgtggagctgaatttgagggtgctgtcattgctctattccatttgttataactagaacagacaaggttcgtgcccttcgtgaagcattttaccggcaagaccttcccaatgtgacaaatctcgttgctaacgttttgatcttcctaattgtgatatacgtcca

SEQ ID NO: 182289 - DNA, 274 bp, Glycine max
ccatatttcttctcatcgagaagcttcgcgaacgaaaacaaagaaccctagacagatccattccatagccatgtcaggcgttggccctctccctcaggattgggaacccgtcgtcctccgcaagacggctcccaccgccgcgccaagaaggacgagaaagccgtcaacgccgcccggcgctccggcgcggaaattgaaaccctaaaaaagtataatgctgggacaaataaagcagcatctagcagcacttcattgaacactaagaggctggatg

SEQ ID NO: 182290 - DNA, 271 bp, Glycine max
  unsure (1)..(271): unsure at all n locations
acncaaaaccctagcggcgcctgctttcttcgttcgtcttttgcatcagccatcaggatggagtctcaggtgaagcatgctcttgttgtcaaagttatgggtcgtactggatccagaggacaggtgactcaggttagaggaagtttttggatgatcagaaccgtcatatcatgaggcatgttaaaggaccagtgagagaaggagacattctcaccctactcgagtctgaaagggaagcaagaaggttgcgctagagggtatttttttcttg

SEQ ID NO: 182291 - DNA, 224 bp, Glycine max
cctgtattcttgatattgacgttcaaggtgcaagatctgtgagggccagttctcttgaagccatattcatctttatctgtactccatcaatggaggagctggagaagcgccttcgtgaccgagggacagagaccgaggacagatccttaagcgactacgtaatgctgaggctgagattgagcaagggaaatcttctcaagtatttgatttcatcctatacaatg

SEQ ID NO: 182292 - DNA, 270 bp, Glycine max
attcaaaattacactctcattaactaattttagaacatgtatgcaagttcgttttcagctctttctgtgttgtatgctatggcatcttaattggttcgattgaataatctgttaggtctaccctagcaaaacaaacctatactttcttatttccttggtgctttttgtagctttcagataggtttctgtgtgttaatcgaatagacctgaattatttattgtatcacaggttgtgatggcagcagcaccagcagctaccttcgctattgg

SEQ ID NO: 182293 - DNA, 264 bp, Glycine max
ccgctcgagcggctcgagctaatctccatctaatagtgttaatttgtctttctctatctctaacggtcatgcgtgcttttgcttttgatgaggaaaactcctccaccgtggctccggcaacactctacaaagctctacaaaagatgctgacactatcatcccaaagattattggggccatccaaactattgaaatcgttgaaggaaatggaggacccggaaccgtcaagaagataacagctagtgaaggtgaccaaccagtttc

SEQ ID NO: 182294 - DNA, 268 bp, Glycine max
gtggagaccgagaaagatgatgaggttaaggtggagtttagtcgtaacggtcacgttcgctgttttgctgttctggattggatcgctgcaagttcaagcctctaattctgtttccgccttcgttcaaaacgccatctatccaacagaatcgccgttttctccaaatcctattgcccctactgtttgcgcgccaaacgcttgcttgctgagctcaatgagaaaccgtttgtggtggagctcgatttgcgagatgatgggtatcaaattc

SEQ ID NO: 182295 - DNA, 133 bp, Glycine max
ctcgagccgctttaaggaggaagacaaacccaacttcattggttctttctattccaaaactcaaggctatggtcgaagagctcttgaaagaatatgacaatgtgtgcaccctcagggttcgcatgccaatttc

SEQ ID NO: 182296 - DNA, 264 bp, Glycine max
cacaaacagaggtgttgagtgagttcaaatcaattttaggcagaaaaatgaggtgttttggtcttgtagtgataggtctagtggttgtgcttggagggttacccttctcttcaaatgcaggattagatcccttttttacaagaagagttgtccccaggtgcatttcattgtatttagagtcgtagagaaagtttcaagaaccgatacacgtatgcctgccagcctcgtcaggcttttctttcctgactgctttgttcaaggctg

SEQ ID NO: 182297 - DNA, 265 bp, Glycine max
  unsure (1)..(265): unsure at all n locations
ccacgcgaagaggcgcaggtnagcagtaactcgtggaattgctagcaatggcgaggatcaaggtttacgagctgaggcagaagacgaaggctgatctgttgaatcagctgaaggacctcaaggccgagcttgcttgcttcgtgttgctaaggtcaccggcggtgcacctaacaagctctctaagatcaaggtggtgaggttgaacattgcccaggttttgacggtgatttctcagaagcagaaggccgcgttgagggatgcctac

SEQ ID NO: 182298 - DNA, 108 bp, Glycine max
gacatgacttccttaagctccttagtgctgctccttgcagctctaattctattccctcaagttgttgctggctatgagaagcccccggtgtacaagcctcccattgag

SEQ ID NO: 182299 - DNA, 268 bp, Glycine max
ccaatatattccattctctctgtgtatttccctacctctcccttcaagatgcagatcttcgtcaagaccctcaccggcaagaccatcacccttgaggtggacagctctgacaccatcgacaacgtcaaggccaagatcaggacaaggaaggaatccccccggaccagcaacgtctcattttcgccggaaagcaacttgaggacggccgtacccttgctgactacaacattcagaaggagagtactcttcacctcgtcctccgtctccg

SEQ ID NO: 182300 - DNA, 162 bp, Glycine max
ctaatactaagcgaaaggcggactggttaactgaaaaaatgcgtaacaacaatttcactgtctcatcaatgcacggtgacatgcctcagcacaacagacatgctattatgggagacttcgtgctggaaaaaccgtgtgcaatacaaatgacgtttggcccgt

SEQ ID NO: 182301 - DNA, 287 bp, Glycine max
ctcatttctcacctaactttctattcttctcagtctcagatcagaaccttagccatggcagcgttccagaagatcaaggtcgccaaccccatcgtcgagatggacggagatgaaatgactagggttatctggaagtcaatcaaggacaagctcattttgcccttcttggagttggacatcaagtattatgacttaggccttccttaccgtgatgagaccgatgataaagttacaattgaaagtgcggaagcaactctcaagtataatgtggcaattaagtgcgcaac

SEQ ID NO: 182302 - DNA, 281 bp, Glycine max
gtctacaaggaagttattgctgaccttaaggcagctggtgcttcatggattcaatttgatgagcctacccttgtcttggaccttgaatctcacaagttgcaagctttcactgacgcatatgcagaacttgcacctgctttgtctgatctgaatgttcttgttgagactcactttgctgacatccctgctgaggcgtacaagaccctcacatctctgaatggcgtcactgcatatgggtttgatttggtccgtggaacccatactcttgatttgatcaaggg

SEQ ID NO: 182303 - DNA, 278 bp, Glycine max
caaacatctcaatgggttcttcttctattacaacatcgccctccaatcatgaccatggctgcgatcgtgctcctgttcacggtctttgccgtttcctccgccctagacatgtcgataatctcgtacgacagcgcccacgcggacaaggccgccacgctgcgcaccgaggaggagctgatgtccatgtacgagcagtggctcgtgatacacgggaaggtgtacaacgcgctcggcgagaaggagaagcgcttccagatcttcaacgacaactgcgattc

SEQ ID NO: 182304 - DNA, 279 bp, Glycine max
gaaactcctaattgtcaattgttgtaaagaaaagaactgaaaacactgacactgttattctctgaattttctcaccatctacaactgaagttttaaccaatatggaaactgaaaagtctaatgtttcaaaggctgaagaatttaaactccttgctaatgaagtgttcaatgctcgaaaatactcccaagccattgatctatatacacaagcaattgagctgaacagtcaaaatgcagtttacttttctaatcgtgcctttgcccatcttcggcttgagg

SEQ ID NO: 182305 - DNA, 276 bp, Glycine max
gtcgaattggcatcatctgacatcagagaacttggctcaagtgaatattatccatacttcattaaacgccttgtgtccatggcaatggacaggcacgataaggagaaagaaatggcttctgttctgctttcagcactgtatgctgatgtcatcagccctgcacagattagggatgggttttttatgcttattgaatcttctgatgatcttgctgtggatatactggatgcagttgacatccttgcattattcttagcacgagctgttgttgatgac

SEQ ID NO: 182306 - DNA, 275 bp, Glycine max
ctgagtttggaaatgatgtggaccggactcatgcagttgaaccagccaagtctgcatttgcaacaaaggccaaagttcgccgagctattgaggctgaaggaattcccttcacttatgtgtcaagcaacttctttgctggttacttcctgcccaacttgtcacagcctggagccacagctgcccccagagacagagttattatcctaggagatggaaaccccaaagctgtttttaacaaggaagaggatattggaacttatacaatcaattctgtg

SEQ ID NO: 182307 - DNA, 293 bp, Glycine max
aagacttcatgtgccatgacggtgacttcaccgccggaaacgcaccggaggcgagtcgatctacggcgccaagttcgccgacgagaacttcgtgaagaagcacactcggtacccggcatcctctcccatgcgacgaacgcagcgttcccaggacaccataccggatcatcagttacttccatctagcacgtacgcaccacggactagctcgacggaaagcacgtcgtgttcggacatgtcgtccgatgggatggacgtcgtcaaggagatagagaaggtcggatccactgcgg

SEQ ID NO: 182308 - DNA, 275 bp, Glycine max
cttaaatttctgaacattgaacaactcttcacacaacaacacttcaatctggcattgtagcatcatgactggcagagaaatcctccatatgatgaaggtgaaagcagggtttggaacaccagacacagggaatggaaaaggcaaaatatcaaaacacattacacatggctttcacttgatgaagggcaaatcagcgcatcctatggaagattatttagtttcagaatttaagcaagaaaaggacagagaattaggcttgtttgcaatatttgatg

SEQ ID NO: 182309 - DNA, 264 bp, Glycine max
agaacccatgccagtctcagctagtccagcgccactgttaggggatcgactgtgtgaaaatggatttgagtgtgttaacattctccctgccaccaatgatgcacatggaggagtcattgtggacttaaaggagcctttgcactccgaagtttttgctactttgcttagatcttcacttttacattggaagcaacagggaacagatggtgtatggaccaagtttcctattgagcttgtcaatcctgttgaaactgcagttaagga

SEQ ID NO: 182310 - DNA, 275 bp, Glycine max
gcttcttcgagtttcacagccaagtcgtaaaagggtttcaagggatggaaaacatgcagagcttctggcaattgggtgatgaactccgtgggcactcaaaagcatcggaggatcacaagtggttaatggtcgcctcgaaactggccgaacagacaagattgaagggggagcgtgtgaacaaccttgatctttcaaagggacccattgaaacaaggtcaagggataaatttgggctccaggaagagaacaaatttgattctcttaacttgagcatg

SEQ ID NO: 182311 - DNA, 200 bp, Glycine max
caaggatgccggcgttaaggggcagatagccattggattcacctccgagaccttcaagatgcgaagacaaccagggtgggacgccaatagctgcggctatcacggcgatgatggtctgctctaccgtggacatggcaaggggggagagccgtttggcccaacctatacctccggagacgttattagtgccggaattaact

SEQ ID NO: 182312 - DNA, 241 bp, Glycine max
ggtgttgtttggcttgcattcttccgtgtggagccctagacttgatccgcatagtgcacttgaacgggtacgtggaagaaatcacgcgtccaatcacggctggggaggttctgaaggcaaatccaaaccatgtcttgagcaaacctagctcccaaggcgtggttcgccggattctgatcctcgcaccggagaccgagctcaagagaggaggcatatacttcttgatcccggcggcatcgtt

SEQ ID NO: 182313 - DNA, 278 bp, Glycine max
aaagaacaagctcttacctatttgcctgcattgacaccattttgaagctttttgggctctcagaatcaacttttacaatcacaactaaggttactgaagaagatgcttctaaacgccatgagacagaaataatggagtttggaacctcctctccaatgctcactgtattagccactcttgcattgctcaatttattttgttttcttagtgtattgaaggatgcaatcctaggtgaaggtgacattggagcttatgagacaatggggttgcaagttcta

SEQ ID NO: 182314 - DNA, 220 bp, Glycine max
ggcgactaaaaaatggacttcaagcaatcaggttctggtggaaatagcctgcactaagtactctgaacaccagcatgctgcgaggaaggcttaccatgttctttataagaagtctctggaggaggatgttgctcatcacacaacaggagacttccgtaagctcatactacctctggttagttcttatcgatatgacggagatgaggtcaacttgaccctg

SEQ ID NO: 182315 - DNA, 257 bp, Glycine max
ggaacgctagggattcccatgttcctgtactggcgccacttcctattggatttgccgtgttcatggttcacttggctacaatcccaattactggtactggcattaacccagcaaggagtttcggagcagctgtaatctacaacgaagacaaaatctgggatgatcagtggatattctgggatggaccaattgttggagcagcagtgcatgcattttaccaccagtacatccttagagcagcagctatcaaggctctt

SEQ ID NO: 182316 - DNA, 275 bp, Glycine max
ggcagcgcagcgatagaagagaacgttcaagaaattcagcttcaggggcgtggatctggacgcgcttctggacatgtccaccgacgaactggtgaagatgttcagtgcgcgtgcacgtagaaggttccagagaggtctgacgaggaagcccatggccttgattaagaagctccgcaaagctaaaagggcagcaccagcaggtgagaagccagaaccagtgcgcacccatctccgcaacatgattattgtgcctgagatgattggtagcatcattg

SEQ ID NO: 182317 - DNA, 279 bp, Glycine max
ggtgtacaacatcttggtggaaaaaacaaagtctgtccctggggctaaggtagaaaataacaagttttgcttgtccgtgcactttcgctgtgttgacgaaaagagttgggtgtcattggctgaacaagtgagcttcgtgctcaacgagtacccaaaacttaagctaactcaagggagaaaactgtttgagattcgaccaaccataaaatgggacaagggcaaggctcttgaattcttgctagagtcactgggatatgctaattctgataatgtatttcc

SEQ ID NO: 182318 - DNA, 268 bp, Glycine max
gtctggtccaaaaaaatcaagaacaacaatgggtttgttggatctggagaagcacttcgcgttctacggcgcgtaccacagcaaccccatgaacgtggcgatccacacgctcttcgtgtggcctatactcttcacgggccaaatgatcctatacttcaccccacccctcttgaccaccgtaggttccttcccacggtgttggtcctcaactggggcttcttctccaccctcttctacgccctcttctacgtcgccttggattacaagg

SEQ ID NO: 182319 - DNA, 269 bp, Glycine max
attgcaaccaatggagagatttgtgtcaacacacttaaaaaggattggaaccctaaccttgggttgcgtcatgttctcattgttgttaggtgtctactaattgagccatttccagaatcagctctaaatgaacaggctgggaaactgctgcttgaaaattatgaggagtatgccagacatgccagactttacacaggaatccatgcaaaaccaaagtccaaattcaaaactggagctatatctgaatctacaactgctctgaatgttga

SEQ ID NO: 182320 - DNA, 270 bp, Glycine max
catgagtctgctgataagacaaagaagcaagttatcaaagcagtagagaaggttttggcaggatctataaggagagaaatggcccttgaagagttctgtgccaagcagacctctgagataatgcagcttaatcgcctggtgcaacagtacaagcatgagagggaatgcaatgccataattgcacagacaagggaagataaaattcttcgccttgagagccttatggatggtgttttacccactgaagagttcatggaggaagagctagtg

SEQ ID NO: 182321 - DNA, 206 bp, Glycine max
cttacatgagaatgctcatgaccaaggtggaaggcctcgacgagtttggcacctatacacctggctctccattaacagggtatggagtgtccaaagtcctagaatctggacacccagattacaagaaaggtgatttagtgtggggatctacaaaatgggaagaattcagcttggtgtccccaactcaaatacttttcaaaattgag

SEQ ID NO: 182322 - DNA, 251 bp, Glycine max
ggaagcccatttgtgtgcagggttcatattgcactcaagttgaagggagttcaatacaaatatgtcgcagaaaatttgaggaacaagagtgaactgcttctcaaatccaacccagttcacaagaacgttccagtgtttattcacaatgagaagcccatagcagagtctcttgtgattgttgaatacattgatgagacatggaagaacaaccccatcttgccttctgatccttaccaaagagccttggctcg

SEQ ID NO: 182323 - DNA, 274 bp, Glycine max
aagattttggcactatcgacatacttgagcactcgcttgctaatggaacagaggtcagcaaaccattgtctgagacatctcggaaaggatatcttgctgccctgtctgcatcaagttactcttatatttctttactcagacactttcttccaatcataaacccagatggatctgcaatttctcttacatacattgcttcagaaaggatcattcctggatatggtggtggtatgagttctgcaaaagctgctttagaaagtgatacaagagtgct

SEQ ID NO: 182324 - DNA, 263 bp, Glycine max
tgacttgatcctgcgaagtgattctgtgtattatttccatgacatgatcgttcagatgcgtaagtggtgagttgcagagggaaagacgctttttggttttggatatgattttcgccacagcaacaggttgcaggaaacaatggatcggttggctgcaaagttagaatcaatttataatgctgcagtctggaagacaataaacattataactcattctatgggcggtcttttggtgaaatgtttcctgtgcctgcaaagcgata

SEQ ID NO: 182325 - DNA, 262 bp, Glycine max
aaaaggaggggctgaaagagaagatcgaggagaaaatagagggtgatcatcatcatcacaaggatgacgacacaagtgtccctgttgagaaagttgaggttgttgaaacagcacatgctgaggaaaagaaggggttcctcgacaagattaaggagaagctaccagggcacaagaagaccgggggggccagagctaatactcatcctcaacaacaacttgttgaatcattggagcatggtgaaggtgctcatcatgaaggaga

SEQ ID NO: 182326 - DNA, 246 bp, Glycine max
ttctaagagaacactaagtcagggttcagttgatatatatgctgctcagtgcaaaaattgcttgaaatggagagagattgatacacaggaagagtttgaagagattagaagtaaagttgctgaggaaccttttctttgcagcagaaaggctaatagttcctgtgatgaacctggtgatattaaatatgattcctctcggacatgggtgattgacaagcctaacctcccaaagactccacaaggttt

SEQ ID NO: 182327 - DNA, 269 bp, Glycine max
cattttctagcttccaaaccctaacactcctcttcctcttcgatcatcacctctccacaatgccgccgaagttcgacccctcccagatagtcgacgtcttcgtccgcgttaccggcggcgaagtcggcgcggcgagttccctggccccgaagatcggtcccctcggtctctcccccaagaagatcggagaagacatcgccaaagaaaccgccaaggactggaagggcctccgcgtcaccgtcaagctcaccgttcagaatcgtcaggcg

SEQ ID NO: 182328 - DNA, 268 bp, Glycine max
ctctcgggttggaaaaaagtgagcaacggtttctgtgggtggtgaagagcccaaacgaagaaatagccaacgcgacgtacttcagcgccgagagccaagcggatcccttgcagttcttaccggaagggttcgtggagagaacaaaaggaagagggtttttggttcagtcttgggctccgcagcctcaggtattgggccatccatccacgggtgggttcttgacccatgcggctggaactctattctggagagcgtggtgaacggtgtg

SEQ ID NO: 182329 - DNA, 273 bp, Glycine max
cggctcgagggaatcatatgctgatattcgtggtttagatgctcagatacaggaaattacagaagcagtcgaacttcccctgacgcatcctgaactgtatgaagacattggtatcaagcctcctaagggagtcattttatacggcgaacctggaactgggaagacgttgctagctaaggctgtggcaaactcgacatcagcaacctttttacgtgttgttggtagtgaattaatacaaaaatacttgggagatggtccaaaacttgtaaggga

SEQ ID NO: 182330 - DNA, 274 bp, Glycine max
gaagctttagagaagtggctccagtaccttagagaagaattacctactgtggccttcaagtgcagcacacaacaacaaagatcaaacttaagtgcattgtactggtgctgatactctcatcaaattgttgaaaaattactcaagaagtcatgagctcaagaagtcgatcactgtgggtttgattggcttgcccaatgttggtaagagtagtcttattaatagcttaaagaggtcccatgttgtcaatgttggttctactcctgggttaacaaga

SEQ ID NO: 182331 - DNA, 268 bp, Glycine max
gtaattgataacaagctagctattagttcgattttgtagtaagtgaggtgccaatatggtgaagatagctcttggtactttggatgactcttttagcgctgcctctcttaaggcttatttcgcagagttccacgcaactctgatccacgtgttcgctggtgttggatcagccatcgcttacaacgagcttacaaaagatgcagccttggatccaacggggctagtggcagtagctgtggcaacatgcatttgcactgtttgtaggtgt

SEQ ID NO: 182332 - DNA, 267 bp, Glycine max
cttcgcaacacaacaaaaaaagacaacccagagagcgcgtcttaataaacgctcttctctgaaaacccccatttcttttcttctttcttcttctctttcgcttcttcgatcttcgatcttcgtcgctgaaaatgagagagtgcatttcaatccacatcggccaggccgggattcaggttggaaacgcctgctgggagctttactgcctcgaacacggcattcagcctgatgggcagatgccaagtgacaagaccgttggtggaggtg

SEQ ID NO: 182333 - DNA, 206 bp, Glycine max
cttttaagtgaagacttagaagccaagatagcagattttggcatctccagggagtttaggacagataaccaagatcaacaatctcaagtgattcacagtgatgctacaaatgaaaaatcaccagtaatgggcacaacagggtaccttgacccagagtactacaagttagggacactgaatgagaaaagtgacatctacagttttgg

SEQ ID NO: 182334 - DNA, 263 bp, Glycine max
cggaggagaatgaaactagtttggtccccagagacagcatccaaagcatacatcgaaacagttcaatcttctcggattttccgggaatcgggggtggcggactagtgtcggcaatggcggcggggtggaacgcgcagtgattgtggaaacgtggtcggaggggggagtgatggcgacgagcgtggggttggccgtggcgaggacgcacacgggagggaggcacgtgtgcgtggtgccggacgagaggtcgagatcgaagtacg

SEQ ID NO: 182335 - DNA, 250 bp, Glycine max
atattattctcctcattccttcatttttaaacctagctccatctccctccactcaccataacatgccatcagaagcaaatgctgccaacaccaacttctgtgtaaatgttagcaacaatggctacattagtgctaatgacccttgaactggggtgcggcggcggaagctatggctgggagccacctcgacgaggtcaagcgcatgctagaagagtaccggagccccgtcggtaagctcggtggagagacc

SEQ ID NO: 182336 - DNA, 283 bp, Glycine max
ggttgatgtcggagttgcgtaaaatggtctccgtgtctggtgatccaatccaacgactgggagcatacatgttggaggctcttgttgcaaggctggcctcttcaggaagcacaatctacaaagtcttgaaatgtaaagagcctactggtagtgaactcctttcacacatgcatctactttatgaaatctgtccatatctcaaatttgggtacatgtccgcaaatggagctattgctgaagccatgaaggaggaaagtgaagtccacattattgattttcagat

SEQ ID NO: 182337 - DNA, 279 bp, Glycine max
cgaaaagtatcatcggcccctgttgctattgatgccccgggaggctttctgttcgagtggtggtcggttttctgggatatatttattgcaaggacaaatgaaaagcactcagaggttgctgcatcgtatattgagacacaattaataaaggcaagcgagcaacaacagcagcagaaccagcagcagccacagccccagcaatcacagcatcagcaacaacacatgcagatgcaacagctcctgttgcagagagcacagcaacaacagcagcagcagcag

SEQ ID NO: 182338 - DNA, 272 bp, Glycine max
ggctcgagcgattcggctcgagaaagattcgattttactgctacggatactgctggacacgagaaatttggtggcctcagagatggatactatatccatggacaatgtgctattatcatgtttgatgttactgcccggctaacatacaaaaatgttcccacctggcaccgtgatctttgcagggtctgtgagaacatcccaattgttctttgcggtaacaaggttgatgtcaagaacaggcaagttaaggcaaagcaggttacattccacag

SEQ ID NO: 182339 - DNA, 270 bp, Glycine max
ctcaacttctccacctccatcccgcgccccctcctcgaagacctcgccgccggaaccctaaattcggattcgattcagcgagtctcgaaggttcacgatcaatatctggaatttgtaaccctagaggataaccttttttcactggcccacaagccttgttatgttcaactcaacgatccttccgctggggacaaggaaattgaggagcttgttgagaagatcgttggtgggttgtcttgtgtgttggccactcttgcggttgtgccggtg

SEQ ID NO: 182340 - DNA, 207 bp, Glycine max
caaagtgatgataggttcccgctgcatcactttgagtgggcttggggaaactgaaggaaaatctgacattttggaatttgaaaatgttggattgaatggatgtgttcgagccagtggcctggatcttggtggtttgagtgaatgttttgttaccctccgagcttggagattagatggacgctgtactgaactttctgttaaagctca

SEQ ID NO: 182341 - DNA, 275 bp, Glycine max
  unsure (1)..(275): unsure at all n locations
catggctttctttattctctccttcctcttccttcttcttgtttcatctgcttcntgttgtgatcgctgcttgtatcaatccaaggcttcctatttctccaaagcttctgctctttcatctggggcatgtgggtatggctctttggcactagacataagtggtggacaccttgcagctggtgtggattctctcttcaaaaatggagcaggttgtggtgcctgctttcagataagatgcaagaacccaactctatgtagcaaagaaggtaccaaag

SEQ ID NO: 182342 - DNA, 272 bp, Glycine max
acaatatattgggtgaagaagaggggggtcttggttttcaattagctcatcaattgatcaaaagggcattgaccatccctggggcaactgttcattggtatgataagccagagatgagaaagcaacgaaagatgggccatataaccattgttgggccttcccttagcaatattgaaagcaatcttgctgtattggtggaagggaaagaattagatggcaagactgcagttgcaccacatgtggggatcataatgggttctgattcagatcta

SEQ ID NO: 182343 - DNA, 270 bp, Glycine max
cttgttggtagaagaaattgggcgtgtgggagttgttgaatcgggaagcaaaaaaaatgagaatccatcacatagcatgcctccaagacaattattcctatctgatcgtagacgagagcacgaaggaagccgcggcggtggacccggtcgaaccggagaaggttcttgaagttgccagctcgcacggcctcactctcaaattcgtcctcaccacccaccatcactgggatcatgctggtggaaacgacaagataaagcagctggtgccag

SEQ ID NO: 182344 - DNA, 271 bp, Glycine max
ctcgagcggaataagctacttcatggtcccatgcagcacctaaggtgtgatgggaacaatgatagtagtctgagtgaagtacttgagaatatgcgcgcccttaacagaatgtatgatcttgagacagaaacttccttgatcgaagaaaagatcagagtcaagatggaacgggttcagaagtagattcttcttcaattggtttagttttacttgattactgtgggggctgcaatcctcgccattttgtacactacagtagttgattgaggcc

SEQ ID NO: 182345 - DNA, 160 bp, Glycine max
gaatcaaagaaaggggtggtggctgcttcgaaagcttaataatttgtttatttccagaacatcatagttttcgcagcagcaaactaacaaattactcatatcatataataagatggcccgttctctctcggaagccaaacgtattggggtccttgttgct

SEQ ID NO: 182346 - DNA, 276 bp, Glycine max
atcccctttccagcatggactgtcaaatccagctacaagaaactctacgaaggtctctcgacagcaggtactgcgattctggacgaagcggagcgcgtggggataaagagggacgaagcgtgccacaatcttgtgttcatgttatcgttcaacgcgcagggtgggttagtgaaccagtttccgattttgatcaagtggctaggactggctggggagggtttacacaagcagctcgcggaggagatcaggaccgttgttaaggacgaaggaggggtg

SEQ ID NO: 182347 - DNA, 274 bp, Glycine max
cggctcgagctcgagcgaatcggctcgaggaagattcagttcgggattttcgcgcttcgacctcaactatgcagcgcgtgagtgagggaacatggacggtgccgaattgtccaacataaagaaatggattgtgatgtatcctgtttacataaactccaaaaaaacgatggccgaaggcagacgcattggcctcgccaaagcctgcgaaaaccctacttgcgctgaaatcggtgattgctgcagctatctgaagcttccttttgcaattgagata

SEQ ID NO: 182348 - DNA, 274 bp, Glycine max
ccagaaccagatctagggtttattttccttttcttttagaatttgaacaagttttgcgtcttcaaaggaaataggatgggagaattgaaggacactgaggcttacgaggaagagctcatcgactacgaagaagaagaagaaaaagctcccgattccgctaaacccgttactgaatctggcaagaagggttatgttggcatccatagttcgggatttcgagacttcctgttgaaaccagagcttcttcgagccattgtagattcaggatttgagc

SEQ ID NO: 182349 - DNA, 273 bp, Glycine max
attttgcgggtatttgtgagtgtgtgagagagagagcgagcagtttcagacacagagagaggggtttgggattggagggattgacgctgcgtctcttcctcttctctttcgatccatccctcattcctaatcctccaatccaaccacctcagcctcacactcacatatacacatatctgaacgcgtatcgtccctcctatggcttcaaagcgcatcctcaaggagctcaaggacttgcagaaagagccaccaacttcttgcagcgctggtcca

SEQ ID NO: 182350 - DNA, 274 bp, Glycine max
ggcagtggcagcgacgatccggctcacggtgccggccggacgagctcggccggcgccaccggttggaccggcgctgggtcagtaccggctgaacctgatggcgttctgcaaggacttcaacgcccgcacccagaactacaaggcggagacacccatggccgttacgataacggcgtacaaggacaacaccttcgagttcaccgttaagtcgccgccggtgtcgtggtacctgaagaaagccgccggcgtggaatccggtagcagccggcccggt

SEQ ID NO: 182351 - DNA, 224 bp, Glycine max
cagcatccctggatcttgctggactagttgcatctctgaagttggttgggggtaacttagctgatcacagattctttctccttggtgctccagaggctggcactggcatagcagaactcatagcacttgaaacatcaaaacagacaaatgctccactggaggaagtgcgcaagaatatttggctggtggactcaaagggattgattgtcagttctcgcaaagat

SEQ ID NO: 182352 - DNA, 272 bp, Glycine max
gaaatggctaagaacagaccaattgatactaaggggaagaaaggatttaaagtacttgtgctcaatgacgttgacaaactctctagagaagcccaacattctctccgcagaaccatggagaaatacagtgcttattgcagattaattctatgttgcaatagttcttctagagttacagaagcaatccgctctcgatgtctcaatgtgcgaataaatgcaccaagtgaagaacagattgttgaagttttagaattcattggtaagaaggaagg

SEQ ID NO: 182353 - DNA, 273 bp, Glycine max
ctctgacattggcaagagagctcgcgatcttctgttcaaggattatcagaatgaccacaagttcaccatcaccacttacacttccaccggagtggaaatcacttcaactggagtcaggaaaggtgagacatatttggccgatgtcagcactaaggtgaagaacaagaacatcacaactgatgtcaaagtggacactaactcaaatctgcgtacaatcattactgtggatgaacctgcccctggactcaagacaatttttagctttaattttcc

SEQ ID NO: 182354 - DNA, 270 bp, Glycine max
acgagatccaccagatgtacgagacctccttccagaccctctcggagcctctcttcaaagacaccccctggccctccgtggacgccgtcgctcactacgtcgacaacgaccacgtcttctgcctcctctaccgcgagatgtggttccgccacctctacgcccgcctcactcccacgctccggcagcgcatcgactcgtgggataactactgcagcctcttccaggtcgtcctccacggcgtcgtcaacatgcagctccccaaccagtggc

SEQ ID NO: 182355 - DNA, 269 bp, Glycine max
ttgatacaaaggctttcaaagacaccgttgacttgtttgttgagaggtacagagatcaaaacatcaatgttgtcgcaggagttgaagcaaggggctttatatttggtccacccattgcattagctattggagcaaaatttgtccccatgaggaaacccaataaattgcctggggaggttatctcagaagagtattctttggagtatggaacagacaaaatggagatgcatgtaggggctgtacaacctggagaacgagccttaatcata

SEQ ID NO: 182356 - DNA, 267 bp, Glycine max
ggcagaagtcctaggagtgtaaaacagagacgcaaaatgaagacgatcttgtcgtctgagaccatgaatattcccgacggcgtgagcatcaaggttcacgctaaggttttcgaggttgagggccctcgtggaaaactcgtgcgagacttccaccatctgaacttggacttccaacttattaccgacgatggcggtaaaaggaagctcaagattgattcttggtttggttctcgtaaaacctccgccgccatccgcaccgccctcagc

SEQ ID NO: 182357 - DNA, 268 bp, Glycine max
cggagcatggcagatctcaagtccacattcttgaacgtctattctgttctcaaatctgaactcctccacgaccctgcttttgagttctccgatgatgctcgtaattgggtcgaccggatgctggactacaatgtgccgggaggaaagttgaaccggggactgtcagtaattgatagctacagattgttaaaagaaggacaggcattaaatgatgacgaaattcttcatgccagtgctcttggttggtgtattgaatggcttcaggcat

SEQ ID NO: 182358 - DNA, 277 bp, Glycine max
cagccctcttctccgccacttctgaatctattgaatcaacactcatgtcggacgaagagcaccattccgagtccaaggccgacgccggagcctccaaaacctaccctcagcaagccggtaccatccgcaagaacggctacatcgtcatcaaaggccgcccctgcaaggttgtggaagtttcgacttccaaaactggaaagcacggtcacgctaagtgtcactttgttggaattgatattttcactgccaagaaacttgaggatattgtgccctcttc

SEQ ID NO: 182359 - DNA, 274 bp, Glycine max
gctggaaacagcgaaagtgaaataccactacttttaacgttattttacttattccgtgaatcggaagccgggcactgcccctctttttggacccaaggtcggcttcggccggtcgatccgggcggaagacattgtcaggtggggagtttggctggggcggcacatctgttaaaagataacgcaggtgtcctaagatgagctcaacgagaacagaaatctcgtgtggaacaaaagggtaaaagctcgtttgattctgatttccagtacgaatacg

SEQ ID NO: 182360 - DNA, 274 bp, Glycine max
gaacaaacaaactagtcaatcggagggatatgggcttattgcgtttactagtcgtgctggtgctgagagagtccttcaaacatacaatggcaccattatgccaaatggcgggcagaacttcagattgaactgggcaactcttagtgcaggtgagaggcgtcacgatgatagcccagatcacaccatatttgttggagacctggctgccgatgttacggattatcttcttcaagagacatttcgggcacgatatccctcaattaagggggccaaa

SEQ ID NO: 182361 - DNA, 270 bp, Glycine max
tgacaaggagattctgcaaattgtgaaggagaatttcgacttcagacctggaatgatcaccattaacttggaccttaagaggggtggtcataggttcctcaagacagctgcttatggacactttggaagggatgatgcagacttcacctgggaagttgtgaagccactcaagtcagagaagcctcaagcttaagagtgttgttaagttaatcactcccttcagtggatgtcttgctgggtgtggatgaataatttgcgtgtttcatgact

SEQ ID NO: 182362 - DNA, 272 bp, Glycine max
ctctttattactaacatttcttccattcttagcttttgtttgtcccatcaaatttttgaagatggccaagagaagtgttgctgctaattcttcttttgagagtactagcttggcttctctggatcaaaagttggccatggccaagcgctgctctcatgacggtgcgatggcaggagccaaggcagctgttgctgctactattgccactgccattccaactctggctagtgtaaggatgctaccttgggcaagagcaaatctcaatcacactg

SEQ ID NO: 182363 - DNA, 267 bp, Glycine max
ccggaggatgaaatcctccgagaaaagatattccgacacgtggacgaggcgtgtcgggagtgggggttcttcctcgaggtgaaccatggggttagccatgagttgatgaaaagttctagggaactgtggcgcgagttcttcaaccagccacttgaggtgaaggaggagtatgccaactcccccaccacttatgagggctatggaagtcgcttgggagtgcagaaaggtgccaccttggactggagtgactacttctttctccattac

SEQ ID NO: 182364 - DNA, 267 bp, Glycine max
cagcaagatcgatctctgtccagtcgaatcttcccaacatggccgactctcaagttactctgcgcacgcgcaagttcatccgcaaccccctcctcggacgtcgtcagatggtcgtcgatgtcctccaccccaaccgcgcgaacgtttccaaggacgagctccgtggcaagctcggtgagctgtacaaggccaagaaggacgatgtctccgtcttcggtttcaagacacacttcggtggcggcaagagcaccggcttcgctctcatct

SEQ ID NO: 182365 - DNA, 266 bp, Glycine max
ggtttatcgagggtttcgttccttcctctctgcaacaccaacggcgaaacctgggcgacgtcgtcgctctccctccggttccgtttccggctcctcctctcgctcctcttccccctccgactctcgttcctcctctcgctcgcgctccctttctcggtcacgttctccctcgcgctccagatcctcttccccctcctcctcctcttcctcccgaagctcccgcagccgcagccctcccccgcagaggcgccgaagtcctgctgacg

SEQ ID NO: 182366 - DNA, 271 bp, Glycine max
ctcgagccgcaagtacagaagtcataaacgcagccggttcgttatcagatcttgctttggtggtcttgagcaatcttttattgctagtggtagtgaggattctcaggtttacatatggcacagaagctcgggggatttaatagagacattgcctggtcattctggagcagttaactgtgtgagctggaatccagctaacccacacatgttagcctccgccagtgatgaccggacaattcggatatggggcctaaagcgcctgaatgtaaag

SEQ ID NO: 182367 - DNA, 266 bp, Glycine max
gggtcttcaaaaatgcggatgagttgcaatggatgtcgagttctgagaaaaggttgcagtgaaaattgcagcatcagaccctgtttacaatggatcaaaagcccagaatcccaagccaatgctactgtgtttctcgctaagttttatggtcgtgctggtctcatgaacctcgttaacgcaggccccgaacatcttcgtccagcgatctttcgctcgttgttgtacgaggcatgcggtcggatagtgaacccgatttacgggtctgt

SEQ ID NO: 182368 - DNA, 265 bp, Glycine max
ctcgcagctcgtgacaccaccgccagtgtgctgacgtggatcgtcaagtaccttggtgaaaaccccagtgtcctagaagctgttactgaggaacaagagtgcatattgaagagcaaggaagaaagtggagaagataagggtctaaattgggaagatgcaaaaaagatgccaataacttcaagggtcattcaggagactctaagagttgcttcaattttgtcttttactttcagagaagcagtagaggatgttgaataccaagggt

SEQ ID NO: 182369 - DNA, 255 bp, Glycine max
  unsure (1)..(255): unsure at all n locations
ccacgatatggtcttgaagtaggacttacaaattatgcagcagcttattgcactggtctcctgttggcccgaagagtcctcaaaacacttgaaatggatgaggagtatgaaggaaatgttgaggctactggagaggattattcagtggaacctgccgagagcaggaggccattccgtgcactccttgatgttggtcttgttaggactacaacaggaaatcgcgtctttggtgcctntaaggcagctctggatggg

SEQ ID NO: 182370 - DNA, 261 bp, Glycine max
ttccattcataatgggtgttttcacattcgaggatgaaatcaactcccctgtggctcctgctactctttacaaggccctagttacagatgccgacaacgtcatcccaaaggctcttgattccttcaagagtgttgaaaacgttgagggaaatggtggcccaggaaccatcaagaagatcactttccttgaggatggagaaaccaagtttgtgctgcacaaaatagaaagcattgatgaggcgaacttgggatacagctaca

SEQ ID NO: 182371 - DNA, 267 bp, Glycine max
gagagatgccacccacaagacaagaaagcgttgctccaactccagaaggacctcggcaacccttatcacatcatatcctggaacgcaaaggaggattgctgcgagtggttctgctgcgttaagtgtgacgagaaaacaaaccgcgtcattagcgttgccttatcatccccttttccagacaccaatctctcggcccaaatacctccctctgtgggtgacctcccttacctcgagtccctcgtcttccacaaattccccaaactcgtg

SEQ ID NO: 182372 - DNA, 265 bp, Glycine max
ctcgagccgcgaaacagtttccatctctctcacaaaatgacaacactatcacattgctcacttctcttcctcttcctcttcctctccaccctccacatagcttccaccctctcaacccccaccaacttcatcaagtcctcctgcagcactccccagtacccagccctctgcatccagtccctctccgtctacgcctccaccatccagcaagacccccacgagctcgtccagacagccctctccctctccctcaaccacaccgagg

SEQ ID NO: 182373 - DNA, 267 bp, Glycine max
ggtacaccggagttcatggccccagagctttatgaggaggaatacaatgaacttgttgacatatattcctttggcatgtgcatcttagaaatggttacctgtgagtacccgtacagtgaatgtaaaaatcctgcacagatatataagacagttacctctggtataaagcctgccgcccttgctaaagtaaatgatcctgaagtgaagcaattcatagagaagtgtctagttccagcatctatgagattgtctgcatctgaacttctg

SEQ ID NO: 182374 - DNA, 267 bp, Glycine max
cgaaggtatcgcagtcaaagcagcagatcttgatatttctgctatcatgggcatgggttttcccccttacaggggaggcatcatattctgggctgattctcttggatccaagtacatatattcaagattggagaaatggtcagagttgtatggggaattcttcaagccttgtgcctacttggctgcaagagctgccaaaggaattcctctgagtgcctctttggagcagcaggcaaagtctcgcatgtaagaaaaaaacagctcatt

SEQ ID NO: 182375 - DNA, 260 bp, Glycine max
gctgctttgagagagggtctgccactgaggaaatcagaacaagctcactacttggactgggctgtccatgccttcagaatcaccaatgttggtgtgcaggataccactcagatccacacccacatgtgctactccaacttcaacgacatcatccactccatcatcgacatggacgctgatgttatcaccattgagaactctcgctccgatgagaagctcctgtcagtcttccgtgaaggtgtgaagtatggtgctggaat

SEQ ID NO: 182376 - DNA, 252 bp, Glycine max
gcaaggttcctgagtgggttgaaggaggaaagagttgaagctgcaaaggtctttaaatcaggtggcattggtgatattgtgactgatcaacctgtagacaagcagaagttgattgatgatgttaggaaggctctttatgcagccagaatctgtagttatgcacagggaatgaatttgatccgtgcaaagagtattgaaaagggttgggatttgaagttgggtgaactggcccggatttggaaagggggttgc

SEQ ID NO: 182377 - DNA, 251 bp, Glycine max
cgtgagagcatacctgtcgggacccgaaagatggtgaactatgcctgagcggggcgaagcagaggaaactctggtggaggcccgcagcgatactgacgtgcaaatcgttcgtctgacttgggtataggggcgaaagactaatcgaaccgtctagtagctggttccctccgaagtttccctcaggatagctggagcccgcgggcgagttctatcgggtaaagccaatgattagaggcatcgggggcgcaacg

SEQ ID NO: 182378 - DNA, 254 bp, Glycine max
gaatgatttaccaggattgactgatgttgagaagccaaggatgagaggcccaaagagagcatccaaaatccgtaaactgttcaacctgtctaaggaggatgatgttaggaagtatgtcaacacctaccgtcgtacatttacgacaaaagctgggaaaaaggtgagcaaagctcccaagatacaaagactggtcactcctcttacgctccaaagaaagcgggcaagaattgctgataagaagaagaggattgcca

SEQ ID NO: 182379 - DNA, 257 bp, Glycine max
gtcgcttggcgcagagctttgagtataactatggtgattttattcccatcttgagacccttcttgaagggttacttgaagatttgcaaggaggtgaaggagacgaggttgaagcttttcaaggattacttcgttgacgagaggaagaagcttggaagcaccaagagcaccaacaacaataatgaacttaaatgcgctattgaccacattttggatgcccagagaaaaggcgagatcaacgaagacaacgtcctctac

SEQ ID NO: 182380 - DNA, 253 bp, Glycine max
tggtgatggatgggttgaacaatcttcccaaccatttctttttggcttattgcagaaggttgatgctccttcagcatatgtgtgtgctggtagcaggatatatgatgccaccgaatggtatatctgtcagggcatgagatgtccagcgagtactcataagccaagttttcatgtgaacacaaatttaatgtccaagcataattctggcaaaggaactagttcaggtcaaagaggtgggcgtatccaacaccta

SEQ ID NO: 182381 - DNA, 259 bp, Glycine max
ccacaattcacaaccgaaacagtgtccatctctctcacaaaatgacaacaatatcacattgctcccttctcttcctcttcctcttcctgtccaccctccacatagcttccaccctctcaacccccaccaacttcatcaagtcctcctgcagcaccacccagtacccaggcctctgcatccagtccctctccgtctacgcctccaccatccagcaagacccccacgagctcgtccagacagccctctcgctctccctcaa

SEQ ID NO: 182382 - DNA, 194 bp, Glycine max
ccgggtactgctttaccggtgtcggcaaaaaatccaaagatcttttgactaaggactacaactccgatcagaaactcaccatttcctcatacagcatctccggagtggccctcacttcaacatctgtcaagaaaggaggactctccactggggatgtggcagcactgtacaagtataagaacactattattgat

SEQ ID NO: 182383 - DNA, 256 bp, Glycine max
gcagatcttcgtcaagaccctcaccggaaagaccatcaaccttgaggtggaaagctctgacaccatcgacaacgtcaaggccacgatccaggacaaggaaggaattcgcccggatcagcaacgtctcatcttcgccggaaagcagctcgaggatggccgtaccctcgccgactacaacatccagaaggagtccaacccttcacctcgtccttcgtctccgtggtcgcatgcagatcttcgtcaagactctcactgg

SEQ ID NO: 182384 - DNA, 251 bp, Glycine max
gttttctttgaaacgcacagcttcaatcaccgaccacaccacacatcaacgacatgcttcctctttcccttctcaagactgcccaaggccaccctatgtaggtggaactgaaaaatggggagacatataacgggcatttggttaattgcgacacatggatgaacatccatctgcgagaagtcatttgtacatctaaagacggagatagattttggaggatgcctgaatgctacatacgaggcaatacaatc

SEQ ID NO: 182385 - DNA, 250 bp, Glycine max
cttttgtttgttcttcagtactttagtgtgtgatttaattccaagattttgagaatgtctagctgtgggtgtggaagtagctgcaactgtggcagcaactgcggttgcaacaagtactcttttgacttgagctatgttgagaagacaaccacagagactcttgctttgggtgttgggtctgtgaaggcccaattggagggtgctgaaatgggtgttgcagctgagaacggtggctgcaactgtggatcaa

SEQ ID NO: 182386 - DNA, 248 bp, Glycine max
gtccgtcaaacccttggccctgatcaggccctctgccgccgccgacgtcgccagagtggtgaagcacgcggcggcgtcttctagcctcacggtggcggcgcgcgggaacggccactccatcaacggccaggccatggcggagcagggcctggtcctcgacatgcgcgccatccaggacccgtttgagattctctggatagaaggttctccctacgtcgacgtttcgggaggggcattatgggaagacg

SEQ ID NO: 182387 - DNA, 249 bp, Glycine max
ctcgagcgcgcttttggattaaatttggagaggattcgattgcatctattaccgatttgtttcttggaccctctaaagatgaacaagaaagagcaagtgcaaagaaaaaggcagaagaaactatcatggtaatggaagagcaaggcctaggagacaagaagttctttggaggcaacaatattggaatggtggatatagctcatggatgcctgagtcattggttagaaggcttggaggaaattgtgggga

SEQ ID NO: 182388 - DNA, 253 bp, Glycine max
cgcagtcgcagtgagtgaaaaggaaaaccctaattgcggtattctcagtgccttcgagagacagaaaaaatggcagataatcttgttctccgtggcaccatgcgcgcccacaccgacgttgtgacggcgattgccactcccatcgacaactccgacatgatcgtcaccgcctcacgcgacaaatccatcatcctctggcatcttaccaaggaggacaagacttacggtgtcccccgccgccgcctcaccggcc

SEQ ID NO: 182389 - DNA, 259 bp, Glycine max
gcatatggacactttggcagagatgaccctgacttcacatgggaagtggtgaagccactcaagggggagaaggtacctgcttaactaaaaggggttccaacactcttggcaagggacttttgcactactactggcttcttattatctgattgctagaattttctctatgtttccttccctcttactcaattctgtttttcattttctgtatttatttatgaatttcccccttttttttgtgtacttgtaagagtgcttt

SEQ ID NO: 182390 - DNA, 254 bp, Glycine max
caggtctgtgatgcccttagatgttctgggccgcacgcgcgctacactgatgtattcaacgagtctatagccttggccgacatgtccgggtaatctttgaaatttcatcgtgatggggatatatcattgcaattgttggtcttcaacgaggaattcctagtaagcgcgagtcatcagctcgcgttgactacgtccctgccctttgtacacaccgcccgtcgctcctaccgattgaatggtccggtgaagtgttc

SEQ ID NO: 182391 - DNA, 251 bp, Glycine max
tggaggtattggaactgtgccagtgggacgtgttgagaccggtgtcttgaagcctggaatggtggtgacttttgcaccaactggactgacaagtgaagtcaagtctgtggagatgcaccatgaatctcttacagatgcacatcctggtgacaatgtgggattcaatgtgaagaatgttgctgttaaggatttgaagcgtggttatgttgcctcaaactcaaaggatgaccctgcaaaggaggctgctaact

SEQ ID NO: 182392 - DNA, 251 bp, Glycine max
ctcacaacacaacccctttctcttctcttccaattacaaatcccttcttctctctctctctctttattctcatttcacaactcatcaatcccctctctctctctcccaaacgcaaaacctaagcatggctcagaaggcccagaaaaacgacactgagtttaaggtccccgaacccatcatcaacccctgcaccaccaacaccaccaccaccacctcgatttccgaaccttctagattcttcgatgcgacca

SEQ ID NO: 182393 - DNA, 251 bp, Glycine max
gcgtacaatactagtggctaacacttcaaacatgctagtggctagtcgtgaagcttcaatttatacaggagtcacattagctgagtatttcagagatatgggttataatgtcagtatgatggcagattctacatgtagatgggcacaagcattgcgtgaaatctgtggacgagtggcagaaatgcctgcagatagtggatatcgtgcataccttgctgcacgtttagcctcgttctatgaacgtgctggga

SEQ ID NO: 182394 - DNA, 255 bp, Glycine max
cccctcctgtccgccacttctgaatctattgagtcaacaatcatgtcggacgaagacgcaccattacgagtccaaggccgacgccggagcctccaaaacctaccctcagcaagccggtaccatccgcaagaacggctacatcgtcatcaaaggccgcccctgcaaggttgtggaagtttcgacttccaaaactggaaagcacggtcacgctaagtgtcactttgttggaattgatattttcactgccaagaaact

SEQ ID NO: 182395 - DNA, 262 bp, Glycine max
tgaagttcctggtcaaaatgtctatgcatacttttatccaccaactaatcctgatttccaagctagtgaagaagaaaagcctccattattattgaagagccacggtggactaactgctgaaacacgtggaattttaaacttgagtattcagtactggactagtcggggttgggcattcgttgatgttaattatggtggaagcacaggttatggcagggagttccgagaacggcttttgggacgatggggaatagttgatgtc

SEQ ID NO: 182396 - DNA, 253 bp, Glycine max
tcgagcttgaggtggaaagctctgacaccatcgacaacgtcaaggccaagatccaggacaaggaaggaatccccccggaccagcaacgtctcattttcgccggaaagcaacttgaggacggccgtacccttgctgactacaacattcagaaggagagtactcttcacctcgtcctccgtctccgtggtggcatgcagatcttcgttaagacactcaccggcaagaccataaccctagaggttgaaagctccga

SEQ ID NO: 182397 - DNA, 250 bp, Glycine max
gtggaggaattgaaattgaagacaactgggataaggttaagactgcatttgttccaacaggagtgtctcttacgtcagaaattgttgccccacttgttgcaacccttcccttggagatcaagggagaaattgaggagtttctcaaagtggttttcactctgtttcaagacctggattttactttcttagagatgaatcctttcacattggttgatggaaagccttatcctttggatatgagaggcgagct

SEQ ID NO: 182398 - DNA, 247 bp, Glycine max
tttaccagctatacttgttccttttgaaggttagaagtgctacaatacaaacaatggcagctactcaggaagatgtgaagcttttgggtattgtgggaagcccatttgtgtgcagggtccagattgcccttaagttgaagggagttgaatacaaatttttggaagaaaatttgggcaacaagagtgatttgcttctcaaatacaaccctgttcacaagaaggttccagtgtttgttcacaatgagca

SEQ ID NO: 182399 - DNA, 252 bp, Glycine max
ggttgacctccctggtggaggcttccgagcccactgcaaaggtgcttctgaaataattctggctgcttgtgacaaagttctcaactcaaacggtgaggttgtaccccttgatgaagaatcaactaaccatcttaaggatacaataaaccagtttgcaagtcaggcccttagaactctatgccttgcctatgtggaattggaaaacgggttctctactgaagaccctattcctgtttctggatatacatgcat

SEQ ID NO: 182400 - DNA, 253 bp, Glycine max
gcctcagactatcaagattaaccaacctgaccaggcaaccagtggtggtcaacctgcgcaaaagtcggcttgctgtggttcatgaaacgaatcagtatctgtagaaagaggtgcacaggtttctgcaatagcactcatctgggtgctaatgttattctgatgacattataagtgggagcatgtatttgtccctctgtatctcccaactgcagatgtcttattttaaagttaatattttaaattctttgctcac

SEQ ID NO: 182401 - DNA, 247 bp, Glycine max
tcgagccctaaacaactctttctcttcttccttcgctcgttgttctccctcgcgtagatcgacaatggcggagacagagacgtttgctttccaggctgagatcaaccagctcctcagtctcatcatcaacaccttctactccaacaaggagattttccttcgtgaactcatcagcaacgcctccgatgctttggacaagattcgatttgagagtttgacagataagagcaagctcgatgctcagcca

SEQ ID NO: 182402 - DNA, 251 bp, Glycine max
aaaaaaaaaatacactcaaacatggagggctatgagatcctcaaagatattggttctggaaattttgctgtggccaagcttgttagagacaactgcaacaatgagctttttgctgtcaagtttattgagagaggccagaagattgacgagcatgtccagagggaaatcatgaaccacagatcattgaaacaccccaatattattagattcaaagaggttctgttgacaccaactcatttagccatagtaat

SEQ ID NO: 182403 - DNA, 250 bp, Glycine max
tgagactgcaaatgctgcaattctccggctcaccaaagagattgcatggtatgaagataatctggcagcagaatcttccatgagaactggcccaccatctacatgtgcagatcgcgtgtttgccaatgagattaacattgctgtccagacaactgaccacccgtacaccaagtagatgtttcgagaagctctcaagactggcttttatggtcttcaggctgctagggatgagtatagattctcatgtggg

SEQ ID NO: 182404 - DNA, 245 bp, Glycine max
ctctcaccctcctcttcacacattttctgtgcgctctaacaaacattctcgttcacactttcagattgtgtgaagatgggggcgggtggccgaactgatgttcctcctgccaacatgaagtcagaggttgaccctttgaagcgggtgccatttgaaaaactcccatttagtctcagccaaatcaggaaggtcattccacctcactgtttccagcgttctgttttccgctcattctcctatgttgt

SEQ ID NO: 182405 - DNA, 246 bp, Glycine max
tagaaacctctcagcccctctccgatcaaatggccaccgtaatcgacggcaaagcgttgcgcaaaccatccgatctgaaatcgccgacgaggtgcgccagtctctcaaaaatacggcaaggttccgggattagcggtggtgatagtagggaacagaaaagattcacagagctatgttggaatgaagagaaaggcatgcgctgaattgggaatcaaatccttcgatgtggaccttcccgaacaagtc

SEQ ID NO: 182406 - DNA, 247 bp, Glycine max
tccactcacacctcatcgtttctctctctagatctctgtttcttctttttctccaaccttcgtttcaccaccacacttacattactttgtcgaaatggctccaccaattgagaccccaaacaaggtttccagctatcaacagtccccaaaccctcgtcttaacgagaggattctttcatccatttccaggagacacgttgctgcacacccgtggcacgatcttgagataggacccgaagctccaaag

SEQ ID NO: 182407 - DNA, 272 bp, Glycine max
gggcttctttcattcatgatggacaacagtccaaccactggcagtgtaaacaccaccactgctgagaagcagcgtctagcaaaatcttccctttctttcaactgtaagaatgctacattcaggaagatgttccctgagtatgttgagaagtacaaccagcaacagctttctgagcaggctgctccagagagggtctcatcggatacgtctcccgacaagagttcaaggccagttttggaaaagaaattagaatccaatggagaagacatgag

SEQ ID NO: 182408 - DNA, 264 bp, Glycine max
agagtcttttcgggaagcaagagagggttctctccgttttcaatagatctctcactgtcttcttttgagggggaagccggggcctcggcctcggcggctttcaaagcccccaccttcacagccctatcaacaaaaccctaaccctatttttttcttcttcattttctaattcaattttgatcgtcgccgtcactagagatgcctgtcctggcttgttgcgtggatgctgcagcacctcccggctatgcatttgccggtgacatc

SEQ ID NO: 182409 - DNA, 132 bp, Glycine max
ctctttgacacaaggaagaagcctaacaacattaagctctatgtccgccgtgtctttattatggacaactgtgaggagttgattcctgagtatttgggctttgtcaagggtattgttgattctgaagatctc

SEQ ID NO: 182410 - DNA, 258 bp, Glycine max
cggaacctcaacatgacatgaaaggtaagaagctctggtgaactcaactcactcgtggtaagacagaagaagaatatcgtttcgctcttaccttcttcaccttcattctctctctagagaatggaaccggaatccggaacttccacttctcggaatccttcgcagttgtcatgggtgaatctgtctagaaatctgttattagcgtatcaaagctttggtgtggtgtatggagatctgagcacttcacctctctatgtc

SEQ ID NO: 182411 - DNA, 258 bp, Glycine max
cggctcgagaagcaaacgataagaaatgttatcagaaacattggccatccctgcagtactccttgtaatactcattttgattctatcctctgtcttgttccatcttcaagatgaaagaacaaatccaccaggtcctaaacccctcccaattattggtaaccttcacatgctggggaaactcccacatcgttcccttcaagcccttgccaaaaattatggacccataatgttcataaagttgggacaagtcccaaccgt

SEQ ID NO: 182412 - DNA, 257 bp, Glycine max
caaagtttgggattgtcaaaatggaaaatggtaatgtgatagtgaacggttcccctgaatatgttcggtcctgttgcgagggtagcctccaacgccttggtgtcagctacattgatctctattatcagcaccgtgttgacacaactgtacccattgaagacaccatgggagagcttaaaaggctggtccaagagggaaaaataaggtacataggattgtcggaagctagccctgacacaattaggagggcacatgct

SEQ ID NO: 182413 - DNA, 258 bp, Glycine max
ctcgagcgcgcgaatggcgaacacagaaggcgtcactagcctttggagaggctcatcgcttacggtgaaccgcgccatgctcgtgacggcgtcgcagctcgcgtcgtacgaccagttcaaagaaacgatcttggagaacggcatgatgcgcgacgggctcgggacccatgtcacggcgagcttcgcggcggggttcgtggcggcggtggcgtcgaaccccgtcgacgtgatcaagacgagggtgatgaacatgagggt

SEQ ID NO: 182414 - DNA, 267 bp, Glycine max
caatttaccagctatacttgttccttttgaaggttagaagtgctacaatacaaacaatggcagctactcaggaagatgtgaagcttttgggtattgtgggaagcccatttgtgtgcagggtccagattgcccttaagttgaagggagttgaatacaaatttttggaagaaaatttgggcaacaagagtgatttgcttctcaaatacaaccctgttcacaagaaggttccagtgtttgttcacaatgagcagcccatagcagagtctc

SEQ ID NO: 182415 - DNA, 258 bp, Glycine max
ggaggatggaaagaaagtgaataaccttctggaaatgaatagaggggaaggagtccatgatggtttttctggacctggaccaaatgattcgcttcttcctggtcttattgatgatgttgccttgaattgtcttgcttggcttagtggatccgattatgccgcactatcgtgtatcaataaaaagttcaataaactgatcaatagtgggtatctatatgggttgaggaaacaattgggggctgtggagcatttggtgta

SEQ ID NO: 182416 - DNA, 256 bp, Glycine max
gctagatacacaagcctacggtgatcatacctgtataataacaaaacaacatttggaacctaacttgggtgggctcactgttgagcaggctatccagagcaagaagctgttcatcttagatcaccatgactatctcattccatatttgaggaaaataaatgcaactaccacaaagacttatgctaccagaaccatatttttcttgaaaagtgatggaactttgacgccattggccattgagttaagtaagccgcat

SEQ ID NO: 182417 - DNA, 270 bp, Glycine max
gccactgctaggtgacagcacatcatctggaaggtcgaagatttctgcataaacagcgaatgggtgaaaccaatttggttacaggagtccaagaggaagaccaggagggcatttattgggaaaccccagagcacttagaaggttgaggactgcttgtaagagggccaagagaacactttcatggactgctcagaccaccattgaaattgattctctatacgagggaattgatttctactccactgttactcgtgccagatttgaggagct

SEQ ID NO: 182418 - DNA, 256 bp, Glycine max
gctgcactctcttttatccctcaaaaaccaaaaccctaatggcagatcgcggaggtggcgaccgtggcagcgaccgtggcggtttcggacgcggctttggtgggcgagggcgcggaggtgacaggggccgaggccggcgccgaggtccccgccgcgaggaagaggagaaatgggtcccagtgaccaaactgggccgcctggtgaaggagggaagaatccgaagccttgaacagatctacctccactcgctcccgat

SEQ ID NO: 182419 - DNA, 254 bp, Glycine max
cctttctccttctaacgagtgaggaaaaatggcgcgtaagaagatcagagagtatgactcacagaggttgttgaaggagcactttaagagactctctggcaaggagttgccgatcaagtctgcacaaattaccgcaccaactgattccactgagctacaacagcaggaaccctggctttcatcttctaaattggttgttaaacctgacatgttatttggaaagcgtggcaaaagtggtttggctgccttgaatt

SEQ ID NO: 182420 - DNA, 256 bp, Glycine max
gaagcctccaggtttccttcttctaaaggaagtaaatatataataaatcagcaggaggaaatatctcaacagcatgctaatggcaatagcttggcagataaattagggttttccaattcaagctacagggaggacccatcttctggaagctttttgaatgctctggcaaagccttgggagaggccaattgggagtgctgaccagcgtattaacagtggtcaagagggccttacttatgatgacaactctagacatg

SEQ ID NO: 182421 - DNA, 267 bp, Glycine max
ctttatccaataataataactccattttccctctgtcttccccccctcctctacacaaaaatatattattagcatggagaaggtgaattttgtgaagaatggagagcttagattgcctccggggttccgtttccacccgactgatgaggagctggttctgcaatacttgaagcgcaaggtcttctcctgccctttgccagcctctatcattcctgagcttcatgtttgcaagtctgatccttgggatttgccaggtgatttggagca

SEQ ID NO: 182422 - DNA, 256 bp, Glycine max
cgtttctctctctagatctctgtttcttctttttctccaaccttcgtttcaccaccacacttacattacttcgtcgaaatggctccaccaattgagaccccaaacaaggtttccagctatcaacagtccccaaaccctcgtcttaacgagaggattctttcatccatttccaggagacacgttgctgcacacccgtggcacgatcttgagataggacccgaagctccaaaagattccaactgtgtggccgaaatag

SEQ ID NO: 182423 - DNA, 257 bp, Glycine max
attccttctctctctctctctctcccctccgccatggctgaggataaggagatgtctacctctgtcatcaatgggaatgattccctaactggacacatcatatctacaactattcggaggcaaaaatggggaacccaaacagactattagttacatggcagaacgggttgtaggaactggatcatttggaattgttttccaggcaaaatgcttggaaactggggaggcagtggcaattaaaaaggttttacaagaca

SEQ ID NO: 182424 - DNA, 251 bp, Glycine max
cacgacttgttcaccgatcagagctgattttcgcggctgttaccggtcaccggagattctatccgaaatcgttttccgatgacgataaaaactgttaaagtcagtaacgtttccttgggagcaactgagcaagacattaaggagttcttttcattttctggtgatattgaatatgttgaactacggagccatgatgaacgatctcaaattgcttatattaccttcaaggattcacagggagctgagactgc

SEQ ID NO: 182425 - DNA, 255 bp, Glycine max
ggacggccgcaccctcgccgactacaacatccagaaggaatcaacccttcacctcgtcctccgtctccgtggtggcatgcagatcttcgttaagaccctcaccggcaagactattaccctagaagtcgaaagctccgacaccatcgacaacgtcaaggctaagattcaggacaaggagggaatccccccagaccagcagaggctgatcttcgccgggaagcagctcgaggacggacgcacccttgctgactacaa

SEQ ID NO: 182426 - DNA, 256 bp, Glycine max
ctaaaccttcttcaataagaataataatattctctctttgttcctctctctaaaattaatggctgaagcacaaagtggccaagctagtgaagggattaaactgtttggaacaacgattacgttgcatggaagagaaagaaaagaagatagaaatgatagtgaagatgggacagaggagataaagagacctgataagatcataccatgcccaagatgcaagagcatggaaaccaagttttgctacttcaataactac

SEQ ID NO: 182427 - DNA, 255 bp, Glycine max
ggccttctttgaggaaccaattatgctagttgcatttgtcttgttaggaaggactctcgaacagagagctacgattaaggcagccagtgatatgacaggacttcttagtttattgccaccaaaagctcgccttcttttgaacaatggggaaacagaggttggctcggttgttgaagttccttctgacagtctttctgttggagaccaaattattgtattacctggagatcgtatttccagctgatggagttgtga

SEQ ID NO: 182428 - DNA, 265 bp, Glycine max
cggctcgagcggctcgaggaatgaaggaggagttggtggttgaagaagggtaccttttcaaagaagagactcacttcacagtgctcaaaacctctctcttcttcaacggtgatggcttcgctgtctacgattgcaaaggccaactcgttttccgcttcgactcctacggtccccgcgcgcgtgacaaggacgagctcgttctcatggatccccatggccgttctcttctcactctccgccgaaagaaaccgagtcttcatcaacg

SEQ ID NO: 182429 - DNA, 201 bp, Glycine max
cttttgtgtggggaattatggtaattgattttgagggtttgactactcatggattatgatggtatgagaaaaccttccaaaaacttatttcactctcgcttcttcctttttgggttctattgctgggattgggagttcttgaccgctctcctccttttaagttcttcccctaaatcttctttctccaaatttttaaccccc

SEQ ID NO: 182430 - DNA, 254 bp, Glycine max
ctgcaattacgatggcgcccagggacaagactagtgccgttaagcctagcggtaacgccggggtgaaggacctgcattttcgtggagtcaggaagagaccgtgggggacgttcgccgccgagatcagagatcccgccaagaagacccgcgtctggctcggaaccttcgacaccgcggaggaggcggcccgtgcctacgacgccgccgcgcgggagtttcgcggccctaaggcgaagacaaacttccctctccct

SEQ ID NO: 182431 - DNA, 253 bp, Glycine max
ctcagttctcaaccttcactcaaaccctccaagcaaagaacccttcagtgaagacccttttgtccataggcggcggtttcggtccttctttggctgcaaatttctccagaatggcaagacaagccaacaccagaaaatcattcatagactcttcgatccaacaagccagatcgaacaacttcctcggacttgacctagattgggagtacccttcctcggacacagacaagaccaactttgcatcactcatcaa

SEQ ID NO: 182432 - DNA, 253 bp, Glycine max
cttggagaaggaaaagaaggagagaagcttagcattgactgagaaccaaccattacctcagttgtgtagcagtaccgacattcgtcccttaaagatggaagattttatatatgcacatgagcaggtttgtgttagtgtatcatcggagtcaacaaacatgaatgaactactccaatggaacgacctttacggagaaggtggatcaagaaaaatgagatctttgagctatttcatgtaaagcttcctgtatagc

SEQ ID NO: 182433 - DNA, 252 bp, Glycine max
cgccaagcgaacacttgactcggccacccaattcatatggaggatctttcagcaaaacaacccttctgacagaaaaaatgtgcagaaggtaagcttattcgttgatgacatggatggtgttgcatatactagcaacaatcaaatccatctcagtgcaagatacgttggaaacaataaaggggacgtgaaaacagagataacaggtgtgctgtaccatgaaatggtgcacgtttggcagtggagtgggaatgg

SEQ ID NO: 182434 - DNA, 254 bp, Glycine max
ccagcaccgcctccaggccttaatcgagggcgcccgagagacctggacctacgccatcttctggcagtcctcttacgactattccggctccactctcctcggttggggcgacggttactacaaaggcgacgacgacaaagccaaggcaaaggccaagtccaaagccacctccgccgccgagcaggaccaccgcaaaaaggttctccgggaacttaactccctcatctccggctcctcctccgcttccgcctccg

SEQ ID NO: 182435 - DNA, 259 bp, Glycine max
gagagaagagcggaagagaaaatgacgaccaggttcaagaagaacaggaagaagagaggtcacgtcagcgccggacacggccgtatcggaaagcaccgcaagcatcccggaggtcgcggtaacgccggtggcatgcatcaccaccgtatcctcttcgacaagtaccatcctggtttcttcgggaaggtaggcatgcgctacttccacaaacttcgcaacaaattctacaatccgatcatcaacatcgacaagctgtggt

SEQ ID NO: 182436 - DNA, 247 bp, Glycine max
  unsure (1)..(247): unsure at all n locations
tcaaattggtctcttgtcttcctcctcatctctacactactccacatatccnncagcctctcaagcccaagcccaagcccaagcccaagcccgttcataaaatcctcctgcagaagcacccagtacccagccctctgcgtctcatccttttcgtctaggcctcaagcatccaacaggaccctcaccaattggttaagcaagaattctccctttccttgaacggcacccaagccacaaaaccttcgtg

SEQ ID NO: 182437 - DNA, 239 bp, Glycine max
ctcgagcggtttttgcctctgttatggcgacacttggactgcagataatcttggagtctacccgcacattaatatcttctgaaaatgcattcaacttgaccaaggaacaagagcgctgggttgtgggcattatgctttcagtgactttggtgaaattcctgctgatgatttactgtcgttcttttaccaatgagataattaaagcctatgcccaggatcacttttttgatgtgatcact

SEQ ID NO: 182438 - DNA, 251 bp, Glycine max
tcgaaatcggaagaaggattagggtttgtggagatgcaagggcaaggcgttgatgaagtgagcatagaagagttggcgtcgaatctttccctctacaaagatcaactgaaccaggttagagaactcttaaacgatgaccctgcaaattctgaatatgttgacatggagagggaactttccgaggtcattgccttgaccgaggaactccttgcaactgcaaagcagaatgaaatctctgctcctcctaataa

SEQ ID NO: 182439 - DNA, 258 bp, Glycine max
gcggcggcaacagggagagaagatgaagttcaatccacgtgtgtcgagcagccgccgcaagagccgaaaggtcatttcacggcgccgtcgagcgtgcggcgggtgcttatgagcgcacctctgtcggcggactgcggtccaagtacaacgtgaggtcgatcccagtacggaaggaggacgaggtgcaggtggtgcgaggaacatacaagggtcgcgaggggaaggtgactcaggtctaccgtcgaaagtgggtgattc

SEQ ID NO: 182440 - DNA, 244 bp, Glycine max
cgttcgcaaccaccggccatactcactgttgttctcaagggattcgattctctctgcactcacttctagggttttctctgcgctataagcaatcatggcggatgaaacaccaaatgagatgaaggaggaggttccagaaattgttccttttgatcctaccaagaagaagaagaagaagaaaattacaattgtagatcctgctgatgaacctgtggagaaattggctgagaagacagaaaacctc

SEQ ID NO: 182441 - DNA, 255 bp, Glycine max
gttcctctcgcccagaatccgagatcaaccccgacgaaggcaaggcctttttctcggcttcttcagatttctgaaatggcgcctgtttcagctttagccaagtacaagctcgtcttcctgggtgaccaatccgtgggcaaaaccagcatcatcactcgcttcatgtatgataaattcgataacacctatcaggctacaattggtattgattttctatcaaaaactatgtatcttgaagatcgaactgttcgactg

SEQ ID NO: 182442 - DNA, 232 bp, Glycine max
gtcaaatggcggcgagtagaagcatttttactctgatgaaatacttgagagtgcgcgtcgaagctcttccccgaaacactccctttaccctcgctccaaacttttctgattcgccgcttctgtgaagaggttaggggttattttctcgacaagtctgacgtcacagatcgcgtcatttcctgggtaaaaaacttccagaaagttgatccttcaaaggttaaccctaatgatc

SEQ ID NO: 182443 - DNA, 252 bp, Glycine max
gaaagaccaaggcatatgcaggtggaatcatgccttaagatcagctcaacaccatctcaaaaaccatgttggctcattctctcaggctaacaagctttcttcttctgctatgatatccacaacactaaaacatgagaaggcaaatcaatcagaagagtctttgagaactgtcatgtacttaagctgctggggtcccaactagatatcataagcccaacaacaaaatattcttttctcttttcaatcctagga

SEQ ID NO: 182444 - DNA, 127 bp, Glycine max
gcggaggaaaagaaactaacaaggattcccttagtaacggcgagcgaaccgggaaaagcccaccatgaaaatcggtcgccctcggcgtccgaattgtagtctggagaagcgtcctcagtgggggacc

SEQ ID NO: 182445 - DNA, 250 bp, Glycine max
agaaaagagaattagggtcacgagggtttcatcctgcggcatcagacatgggaggaggcaatgggcaaaaggcaaagatggctcgcgagaagaacatcgagaagcagaaggccgcctcaaagggaagccagctggattcaaacaagaaagcaatgtcgatccagtgcaaggtgtgcatgcaaacatttatgtgcaacacatcgggagtgcagtgtagggagcatgctgaagccaaacaccctaaatctga

SEQ ID NO: 182446 - DNA, 248 bp, Glycine max
gcccttgctggcacagtggacattgactttgacactgaacccattgggatagggaaggatggaacagagatctccttcaaggatatttggccatccagtgaagaaatagcaaatgttgtacaatcaagtgtgctgcctgatatgtttagggacacatataatgcaatcacccaagggaatcccatgtggaataatttatctgttccaacgggcactctttatgcttgggaccctacatcgacttatat

SEQ ID NO: 182447 - DNA, 271 bp, Glycine max
gcttaacgttgttggaactactaaggtaacgcaagctgttcttcccgggatgctgaagagaaagaagggtgcgattgttaacatgggttctggagctgctattgttattccttcggatcctctttatgctgtttatgctgccaccaaagcgtacatcgatcagttttcgagatgtctctatgttgaatacaagaggagtggaattgacgttcagtgtcaggttccattatatgtggcaaccaagatggcatcaatcaggaaatcttcattc

SEQ ID NO: 182448 - DNA, 270 bp, Glycine max
cagagggagtagcggcattaaaaatgcagatcttcgtgaaaactctgacagggaagactataaccctcgaggtcgagagcagcgacaccatcgacaatgtcaaggccaagattcaagacaaggaaggtactacacataaattccaaactccattcaacgaatcgcgttttcaattttccataacctaaaaaatctctcgtttgaatttttcaggcattcctccggatcagcagcgtttgattttcgccggaaagcagcttgaagatggac

SEQ ID NO: 182449 - DNA, 269 bp, Glycine max
gctaatattcatatgagaactttgaaggccgaagacgggaaatgttccatgtgaacggcacttgcacatgggttagtcgatcctaagggacgggggaagcccgtctgatagcgctctgtgcgcgtactccgaaagggaatcgggttaaaattcctgaaccgggacgtggcggctgactgcaacgttagggagtccggagacgtcggcgggggccccggaaagagttatcttttctgtttaacagcctgcccaccctggaaacggctcag

SEQ ID NO: 182450 - DNA, 251 bp, Glycine max
atctcgagcgtatcggctcgaggcttcgttgaaggagatgagactcggtggtgaggatactagcaatggtcatggtgacggtggtgtgagggacttgtatggagaggattgtgccactgaggaccagcttatcactccatggactttctctgtggccagtggatgcagtttactgagagatccacgctacaacaaagggctggcctttaccgagggagagagagatgctcattacttgcgtggccttttgc

SEQ ID NO: 182451 - DNA, 275 bp, Glycine max
caagaaaagaccatcaaagtttcacttcagccttatccggtttagggtttcggtttttgacccaacctttgacgtatcgaaaccttaagtttcggatcaggtctgagcaatctggttggtagaacctttggtcttagagagtcaagttttatgtctgaattagacgatcaaattcctactgccttcgatccttttgctgatgcaaatgctgatgactcgggtgctgggtcaaaggagtatgtgcatattcgcgtacagcagcgaaatggaaggaa

SEQ ID NO: 182452 - DNA, 282 bp, Glycine max
tcggagctctacaggaatgagataacaggaaagattcctaaggaacttggtaacttgaaatcacttattagcatggatttgtatgataacaagttggagggtaaaattccaaaatcatttggaaagttgaagtcacttaaattcttgcggctaaacaacaacaagttgacaggatccatcccaagagaactcactcgtctcactgatctcaaaatctttgatgtttctaataatgatctctgtggaacaataccagttgagggaaactttgaatctttccca

SEQ ID NO: 182453 - DNA, 276 bp, Glycine max
aggcgctgttctctcgtcttctacaaaattttctgttcgatctcaaccaaggttgttccttccaccgccatgagtttcatcttcggaaagcgaaaaacacccgcagagcttctgcgggaaaataagaggatgctggacaaatcaatcagagatattgagcgcgagcggcaaggcttgcaaacgcaagagaagaaattgattgcggagataaagaaaagtgccaaacagggccagatgggagctgttagagttatggcaaagctcttgttagaacaa

SEQ ID NO: 182454 - DNA, 268 bp, Glycine max
tcattcaaaaggcccaagcatagcaccgagccaaaggtttccaaagttcttacacggacagatgcatctgatactggcttatatgtgagggacggatatcagtggagaaaatacggtcagaaagtcactagagataacccttctcctagggcttacttcaagtgttcatatgcccctagctgtccagtaaaaaagaaggtgcaaagaagtgtagaagatccaagtgtgttggtaacaacttacgaaggggagcacaaccatgggcaac

SEQ ID NO: 182455 - DNA, 268 bp, Glycine max
cattcacacactcaatgaagggagttacagtgaaagttgaagaaacaatggcgtatgctaatgctgcttcaactagcccaacaacatcttcaaacctctccccgcaacccatggaagggttgcacgaggtgggtccccctccgtttctcaccaaaaccttcgccgtggtggaagacccatccaccaacgacatcgtttcgtggagcagatcccgcaacagtttcgtcgtttgggactctcacaagttctctaccaccatcctgcctcg

SEQ ID NO: 182456 - DNA, 269 bp, Glycine max
gtctgatttgaggttggagcgtagttagcttctcttttctgccgaaagctgcagaattgtgttgttttctctcctttgggggtcaaacaagcggttctcttcatgatgccaagtgttaaccctgacaaagattccgagccatttgttgagaccgatccaaccggtcgctatggtagatacagtgagttgctcggatgtggtgctgtgaagaaagtgtaccgtgcatttgatcaagaagaaggaatagaggtggcatggcaccaggttaa

SEQ ID NO: 182457 - DNA, 273 bp, Glycine max
ctgctccttatgttgttaagcctcaagggtctcaggttcctttggttcccattcctaggttgacgcctcagcaacctgcttcagcccccaagggtaaaaagagtgagaacaagaagagtgaggggaaaactacgaaggttgctagcattagtttgctgggtttgttcttctttatcatgcttttcggtgggcttcttcctcttgttgattttaggtttgggggtttagtggagaatgttcctggtactggtaggtctaattacgttagtgata

SEQ ID NO: 182458 - DNA, 279 bp, Glycine max
catcttctcacccagtttcactttctcattctcccctctcccattcctacagaaacagagagacagcgaaacaaatgcctgcggtaggaggtattaccaacggaggcggcaacgagtaccctggaagcctcactccttttgtgacggtaacatgtatagttgcagccatgggtgggttaatcttcggttacgatatcggaatttcaggtggggtgacatccatggatccgtttctgctcaagtttttcccgtcggtgttccgcaagaagaattccgaca

SEQ ID NO: 182459 - DNA, 283 bp, Glycine max
cctgtttctccggcctcgcttcttctctcagattcagataccaattcggtttcttctgaaccaaacttggtttgagaaattcggccgttaattttccatggccaacaatccatcacagcttctcccatcagagttgattgaccggtgtataggttcaaaaatttgggtgataatgaagggtgacaaggagcttgttggtactcttagaggctttgatgtttatgtcaacatggtccttgaagatgtcactgaatatgaaatcactgctgaagggagacggata

SEQ ID NO: 182460 - DNA, 255 bp, Glycine max
tagggaaggaagaaggaacaactatactactattatccttattattgttattattgtaattaatctttttattatagttattgttgttgttattattcctcaaatatggattcgttgtgcctctccaacgactcagttgtttctggattcaaagacaaggagtcaatggttgacccctttttggtcgaggctctccagaaccctcgtcaccgcctcaccattttgaggatggagctggacatccagaagtttttg

SEQ ID NO: 182461 - DNA, 211 bp, Glycine max
ccttgatgctgccggaaacacgactgccgctattgggaacggacttgccattggttctgctgcccttgtatcactggccctctgtggtgcctttgtgagccgagctgctattacaactgttgatgtcgttgactccaaaggttttcattggtttgattgtgggtgcaatgcttccttactggttgtctgctatgactatgaagagtgtcgg

SEQ ID NO: 182462 - DNA, 271 bp, Glycine max
gcataagccatgcttctgtggctacctcaaaaaccctagcttgaagcagtatgttaactctcctaatgccaaaaaaaccgttagttcttgtggtattgcctatccaacttgttaagcacctcttatatatatatataaaatgtgtgaacaatatatatatattgattaaaaaatatagtttaatttatatacacactttgatcctataaaaacatcttgacacaagcattcaatagaatttcaccactttatcatgacattttactataat

SEQ ID NO: 182463 - DNA, 274 bp, Glycine max
caattcacaaccgaaacagtttccatctctctcacaaaatgacaacaatatcaaattgctcccttctcttcctcttcctcttcctctccaccctccacatagcttccaccctctcaacccccaccaacttcatcaagtcctcctgcagcaccacccagtacccagccctctgcatccagtccctctccgtctacgcctccaccatccagcaagacccccacgagctcgtccagacagccctctccctctccctcaaccacaccgaggccacaaa

SEQ ID NO: 182464 - DNA, 265 bp, Glycine max
cggctcgagctagaacgaaaaaaaaaaagaagagcaattttccctcaccaaagatgaagaagccaacaatggccgatcaacttaccgatgaacagatctccgagttcaaggaagccttcagcttgttcgacaaggacggcgatggttgcatcacaaccaaggagcttggaactgttatgcgttcattggggcaaaacccaactgaggcagagctccaggacatgatcaatgaagtggatgctgatgggaatggtaccattgactt

SEQ ID NO: 182465 - DNA, 246 bp, Glycine max
gccactaagaatgacctattaggtatacttttggagtccaatcacaaggaaattcaagaacacggaaacagaaacagtaagaatgttggaatgagtcttgaagatgtaatcgaggaatgcaagctattctactttgcagggcaggaaaccacgtcagttttgcttgtttggacaatggtgttattgagtaggtaccctgattggcaagcacgtgcaagggaggaagcctttcaagtcttgggatac

SEQ ID NO: 182466 - DNA, 269 bp, Glycine max
cgacacagtttccatctctctcacaaaatgacaacaatatcaaatcgctcccttctcttcctcttcctcttcctctccaccctccacatagcttccaccctctcaacccccaccaacttcatcaagtcctcctgcagcaccacccagtacccagccctctgcatccagtccctctccgtctacgcctccaccatccagcaagacccccacgagctcgtccagacagccctctccctctccctcaaccacaccgaggccaccaaaacctt

SEQ ID NO: 182467 - DNA, 270 bp, Glycine max
gttcctccgctcaacaactataataacatctttctctctccgaacagatcacactatggccacctcaagcgccaaatcagtccatgatttcaccgttaaagatgccaagggaaatgatattaatcttggtgactacaaaggaaaggtccttatcattgtcaatgttgcctcacaatgtggcttgactaattcaaattacactgagctcagtcagttgtatgagaaatacaaacagaaaggtctggaaattctggcatttccatgcaatca

SEQ ID NO: 182468 - DNA, 269 bp, Glycine max
tgcgttggtactgaattccttaatcgagtccagtattcataatctttgagttgatatgggcaactgcgagcagtgaacgtcatcaaaccactcaacaaagtgatctcggtgcagttttgcgtgatggaaaagaagtacttcttcaagcattcaactgggagtccaacaaatacaactggtggaataatttagaaggcaaagtttctgacatagctaaagcaggatttacttcagtctggttgccaccaccaacccactccttctcacct

SEQ ID NO: 182469 - DNA, 267 bp, Glycine max
caccggtttatgtcctcctatgaacagagggtgcaaccctttgataaaaggtatcagtacctcttgtttgctgctgaaccatatgaaatcgttgctttcaaggtgcccagcacggagattgacaagtccactccaaatttcttctcgcactgggatcctgactccaagatgttcacgctacaattgtattttaaatccaagccgccagaggcgaacaaaccgcagcctgcctctactgccaatggcacagcaccatctggtgtacca

SEQ ID NO: 182470 - DNA, 271 bp, Glycine max
caaagctgaagtgtctgcttcttccgattccggcacgcccccatcaccatggtgaacgttccgaaaacaaagaagacatactgcaagagtaaggagtgcaggaagcacaccctgcacaaggttacccaatacaagaagggtaaagatagcattgctgcccaaggaaaacgccgttacgatcgcaaacaatctggttatggcggacaaactaagcccgtcttccacaagaaggctaagaccaccaagaagattgttctgaggttgcaatgcc

SEQ ID NO: 182471 - DNA, 263 bp, Glycine max
gcgttggtactgaactccttaatcgagtccactattcataatctttgagttgatatgggcaactggagcagtgaacgtcatcaaaccactcaacaaagtgatctcggtgcagttttgcgtgatggaaaagaagtacttcttcaagcattcaactgggagtccaacaaatacaactggtggaataatttagaaggcaaagtttctgacatagctaaagcaggatttacttcagtctggttgccaccaccaacccactccttctc

SEQ ID NO: 182472 - DNA, 260 bp, Glycine max
ctccatggtatctttgaggctgcaagttttggaggatctaatattgatccaacggcttgggaggataagaagtgccctggtgaatctcgtttccctgctcaggttcaagtgattactaggaaagtttgtgagccactagaggaagattccttcagaccaattcttcaccactacgacggccctaagttccgtcttgagctgagtgtgcctgaggcactgtctcttctggatatttttgcaaaccagaacagtttcgatga

SEQ ID NO: 182473 - DNA, 264 bp, Glycine max
aacaaagatggctaggtctagtgcttatcctttgttcttgatttcttccattctgtttatttcacacatttatgccttcaaagtagaagccaagcccccagtagtgaagggactatcatattctttctattccaaaacatgccccaagcttgagtccattgtgaggaaacatctcaagaaggtgttcaaggatgacaatggccaagctcctgccttactccgcattttcttccatgattgttttgttcagggatgtgatggatc

SEQ ID NO: 182474 - DNA, 257 bp, Glycine max
  unsure (1)..(257): unsure at all n locations
ctcgagccgatcacacttttgtgttgtgttgggaaaccctaaaccccgttttcggtgagaccgagatcgatcgaacatggatgacgagtacgatgtgatcgtgttgggcacgggtctcaaggcgtgcattctcagcggtcttctctccgtcgatcgnctcaaggttctgcatatggctcggaacgactattacggaggagaatccacttcgctcaatcttattcagctttggaagagattcaggggagatgacaagc

SEQ ID NO: 182475 - DNA, 266 bp, Glycine max
ctaacggctacttggtagttggagtggtagcttttgctctactttgctcattcagagtttctttgacagattcagttccattattttcgcctgttcatgacgctgcttctttgactcgcaactctttccctgctggcttcatctttggggctggatcctcagcctaccagttcgaaggagcagcaaaggaaggtggaagaggaccaagcatatgggataccttcacacataaccatccagaaaagataagagatggagccaatgga

SEQ ID NO: 182476 - DNA, 270 bp, Glycine max
cttcaaaggtgtgcatcccaagtttccaaatggaggactcatgtctcaacatttggactctctacccattggatccatgttggacgtgaagggcccattaggtcacatagaatacaccggaagaggcaacttcatggttcatggaaaaccaagattcgccaagaggttggccatgttggctggtggaactgggatcacgcccatttaccaagtggcgcaacgattttgaaggacccagaggaccacaccgaaatgcatgtagtgtatgcg

SEQ ID NO: 182477 - DNA, 277 bp, Glycine max
ctcaacttgaccctggcaaaaactgaggcaaaattgctgcatgagaagatttcaaacaaggcttataatgatgacgacttcatcaggattttggccacaaggagcagagcacagattaatgctactttgaatcactacaaagatgcatttggacaagatatcaacaaggacctgaaggctgatccaaaggacgagttcctgtctttactaagagcaactgtgaagtgcttgatccgtcccgagaagtacttcgagaaggttgttcgcttggcgatca

SEQ ID NO: 182478 - DNA, 256 bp, Glycine max
aacaactactatgggtatggcagatgctaagcaaagatatgctgttgtcacaggtgcaaacaaagggataggattggagacagtgaaaggtttagcctctaatggaatcaaggtggtgctcacggccagggatgtgaagaggggttaccaagctgttgaggacttgaagagagaatttggtttctctgaccttgttgtgtttcaccagcttgatgtcactgacccttctagtattgcttctttagttgagtttgtg

SEQ ID NO: 182479 - DNA, 257 bp, Glycine max
ccagggttacctagacccagaatatttgttgactcataagctgactgacaaatgtgatgtctatagcctgggaattgtgtatctggagcttttgacaggcatgcaaccaatatcacatgggaaaaacattgtccgcgaggttaatacggctcgtcaatctggcacaatatattccatcatagacagcagaatggggttatatccatccgattgcttggacaagtttttaactctggccctcagatgttgccaagaca

SEQ ID NO: 182480 - DNA, 263 bp, Glycine max
aaacaagagagagctagcagtgcaagctttcaacatccaaaacaacagagagtttttggctttagaagctgaaggaatatagttatcacaatggggagagctccatgctgtgagaaaatggggttgaagagagggccatggactccagaagaagatcaaattctcatcaattacatcaacacttatggccatgctaattggcgtgcactgcccaaactagctgggctattaaggtgtggaaagagttgtagactccggtggat

SEQ ID NO: 182481 - DNA, 264 bp, Glycine max
ctttgtatgagcttgtttggactgcacaaacaattgctccagacacgtgaaggtgctattgatggacaccttcgtgaagttggactcacatttcacctcctcaaggatgttcccgggattgtctcaaagaacattgataaggcactttttgaggctttcaacccattgaacatctctgattacaactccatcttttggattgcacaccctggtgggcctgcgattttagaccaagttgagcaaaagttgggtctcaaacctgag

SEQ ID NO: 182482 - DNA, 264 bp, Glycine max
cttcgatcttcgtcgctgaaaatgagagagtgcatttcaatccaactcggccaggccgggattcaggttggaaacgcctgctgggagctttactgcctcgaacacggcattcagcctgatgggcagatgccaagtgacaagaccgttggtggaggtgatgatgctttcaacaccttcttcagtgaaactggggcaggaaagcacgtgccccgtgcgatttttgtagatcttgagcccactgtgattgatgaggttaggactggg

SEQ ID NO: 182483 - DNA, 270 bp, Glycine max
gccacaagatcatcaacgtgctgaacccggtgtttaagggtcagcaattggtgccactcaacgctgaccaatccgcggaactgaagaaggagaacgccactggggtgtacgagatcgatgtgaacatgtaccttagggtcaggttcaagttgggtgtcttcaagaccaagacgcttaagcccaaagtatcatgcgacttacgtgttcctttgaaaggaagcgccggtgctggtgtctttcagaccaccaagtgcgactgggatcgctgat

SEQ ID NO: 182484 - DNA, 191 bp, Glycine max
acatattcgtcgaacacgtggttgatgtcgaactctccgaccgtctcgtccacgtcctcgcttcagcagcacaacaagaccaaaccctcgatttccaagacatcatcaaacgtttcgcgttcgacaacatctgcaaaatcgcgtacgggtatgacgcagagtaactgacgccgtcaactgaacagagtaag

SEQ ID NO: 182485 - DNA, 272 bp, Glycine max
cggcattaaaaatgcagatcttcgtgaaaactctgacagggaagactataaccctcgaggtcgagagcagcgacaccatcgacaatgtcaaggccaagattcaagacaaggaaggtactacacataaattccaactccattcaacgaatcgcgttttcaattttccataacctaaaaaatctctcgtctgaatttgtcaggcattcctccggatcagcagcgtttgatttccgccggaaagcagcttgaagatggaaggaccctggccgatt

SEQ ID NO: 182486 - DNA, 270 bp, Glycine max
ctcgagcgcttgcatatcctatctacctgtggagcatgagtcccgggaagactggatctcactttaatccagacagtgacttgtttgttcccagtgagagaaaagatgttattacttcaacaatttgttggacagctatggctgctttgcttgttggtctgggatttgtgatgggtccagttcaattgcttaagctttatggcattccctatgcgatttttgttatgtggttggatttggtgacttatttgcatcaccatggccatgaag

SEQ ID NO: 182487 - DNA, 262 bp, Glycine max
caaatatgcactcatggcttaccactatgaccctcaagtctctctacctgagctctcatccatttcactctacactccaaaacttgttgaagttgtcaaagagaggccaaaatggaatgccacagaattcttcaaacaatccaccccaacacgccttaccttcaccaactaccttgcagctggggagcagtgttcttcccaaagcattggagagagttctatgtgtacatgaacatgaggttcactgaggatgccaagtcca

SEQ ID NO: 182488 - DNA, 271 bp, Glycine max
gcagctttggagaactgggaagaaagattatgagactattctcggctttctgcgtcggtgatttcttcccttcgttgggttgggttgactatctgactggccttattccggaaatgaaggccacgtttcttgcagttgatgctttccttgacgaggtaattgcagaacgcgagagcagtaacaggaagaatgatcactctttcatgggaattctccttcaacttcaagagtgtgggaggcttgactttcagctcagccgagataacctcaa

SEQ ID NO: 182489 - DNA, 272 bp, Glycine max
cacgtttctctcttgaggttaattattattattattgagtattgagcatggaggcgccatctctcaccaaacccaacgacccaacaaaaccttccaacacttccagcacccttagtctggagggggggccgggcgaacgcgcccactccgaaaaatgtttgcggtggcgtccatcgccgccggcatacagttcgggtgggctctgcagctgtctctcttaaccccctacgttcagctcttaggagtcccccacgcggcggcctccttcatct

SEQ ID NO: 182490 - DNA, 267 bp, Glycine max
aataactccgtcaggggatgtatttttgctagaggccaaccctcgagcttctcgtacagttccattcgtatccaaagcaattggccatcccttggctaaatatgcttcccttgtcatgtctggaaagaccctctgtgatttacatttacaaaagaagttatccctaaatatgtgtctgtaaaggaagcagttcttccgttttcaaagtttccaggctgcgatgtgtttttaagtcctgagatgcgaagactgtgtgaggtcatgggt

SEQ ID NO: 182491 - DNA, 265 bp, Glycine max
cttctttctccaatttcctctctcacatcacgtcacatcacatataaacatcctctccttgaaacccttaattgtgctcaaaaatactatatagttaattaaggttgtgtgaaaatgcgaatgagttgtaacggatgtcgtgttctgcgcaaagggtgtagcgaagattgtagtataagaccgtgtttgcaatggatcaagaacccggagtcacaagctaatgcaactgtttttcttgccaagttctatggtcgtgctggcctca

SEQ ID NO: 182492 - DNA, 267 bp, Glycine max
tacccacccaaagctgttgctaagatggccgctgttgctgcactgtgtgtgcaatatgaagctgatttcagaccaaacatgagcattgtagtcaaagctcttcaacctttgttgactgcacgacctggacctgccggtgaaacaccaaattaatctttgtatcactttctctctatatttgtgagtatgtgcacaagtgtgcatgcaaaatataagagactgcttcagaagctggtggtttgctttgcaccggttgtacggtgagga

SEQ ID NO: 182493 - DNA, 273 bp, Glycine max
gtttcttcttcttctctgttctctgttctcttcctcacaacataagacagacatagtttcgtggctgtggctctgtttgcgctgttgttgggctttgttgatgcgaggtttgtggtggagaagagcagtataactgttctgtcacctcataagctgagggcgaatgcgatggcgccatcggaaacttcggtcttcctcactacggaggattcatcgttggctctgtgctgcatctcaccaaaggctcccacgggtgtcaggtcttcgagggcg

SEQ ID NO: 182494 - DNA, 271 bp, Glycine max
gatgagcacaagagtttgtgcagcaaatatggagtctctgggtacccaacaattcagtggtttccaaaaggatctcttgaacccaaaaagtatgaagggccacgcactgctgattcacttgctgagtttgtaaatacggaaggaggaacaaatgtgaagattgctacagctccttccaatgtagtggtgcttacatctgaaaattttaatgaggttgtcttagatgaaaccaaagatgtcttggttgagttttatgcaccctggtgtggac

SEQ ID NO: 182495 - DNA, 268 bp, Glycine max
agaccataaccttggaggtggagagttcagataccatagacaatgtgaaagctaagattcaggacaaggaaggtatcccaccagaccaacagaggcttatctttgccgggaaacagcttgaagatggaagaaccctgctgactataacatccagaaggaatctaccctgcacttggtgttgcggcttcgtggtggcatgcaaatctttgttaagactttgactggaaaaaccataactttggaggttgaaagttctgataccattgat

SEQ ID NO: 182496 - DNA, 266 bp, Glycine max
aggcgaattccaactgataaaaagaatattcagagaattccaaagacagagatgaatgtcattaaggaagagcaacaaccagaccaaatagctggccacaaagaacttggtcacaaaagtctccttcagagagatgcactctaacagtacatacttgagaccagtgtgtacccaagagagcatgagagcttgaaggagctacgagagttgacggagaaacacccttgagaactgatggctacaccaactgacgaagctcaacttct

SEQ ID NO: 182497 - DNA, 192 bp, Glycine max
actagcttgctaggtctcaaacagagagagccatactgcagtctctggaccatccacatctacccattttatatacacactttgagaccgacacattctcctgcttggtgatggagtgttgacctcgtggggactgcatgtacaaatgtaattacctactgcgaagtactcttctgagatttctgccaggat

SEQ ID NO: 182498 - DNA, 275 bp, Glycine max
cacggttctctctctgaggttaattgttataacgatagagtattgagcacgaggaggctatgacacagcagagtaccgatggatactggaacctgcagatcgtgatgctgttttggccaatgttgccatcaagagtggcaaaactacaatgtcattgtggaaattgccactatcctctccccggaagagcttttggcggttagacgcgcctatctcaaccgctacaagcactccttggaagaagatgttgcagctcatacctctggccatctacg

SEQ ID NO: 182499 - DNA, 268 bp, Glycine max
gcttctcactgatctccattcccattccatggcttccactgaatcatcccctttcaagaaaattcagattcaaagggatgacactacatttgacgcatatgtggttggaaaagaggatgctcctggaattgttgtgattcggagtggtggggtgtggattacgaaattaagaaccatgccgtgaagatttctcagcttggtagtgggtttaaagctcttattccagatttatacagaggaaaggttggtctggatgttgctgaagctc

SEQ ID NO: 182500 - DNA, 274 bp, Glycine max
gtccatcacaccaaaccaccaagtggcatcaatctttgcagcagcattctatggactctttaatctcttctctggtttctttatcccaagaccgaaaattcctaaatggtgggtgtggtattactggatttgtccagtggcatggacagtgtatggattaattgtctctcaatatagagatatagaggaccatctttttgtgcctgggagtactactcaaaatttcactgtcaaaggatatattgaagaccactacgggtttaaatccgacttc

SEQ ID NO: 182501 - DNA, 260 bp, Glycine max
ctcgagccgcggcacttgacaccttttatgagcaatttgatccagattttatcaacatacaggacaaaggctcgtgaagttctgctaagggcagatgacctgaatgacattgttcagcttgtgggcaacgctgcgttactgaaggagataagatcaccttagagactgcgaagcttttgagagaggattatcttgctcgtaatgcctttacagcatatgacaagttctgcccctactactagtctggttggatgatgcgc

SEQ ID NO: 182502 - DNA, 272 bp, Glycine max
cgccgagcaggccgagcgctacgaagagatggtggagttcatggagaaggtctccgccgccgccgacaacgaggaacttaccgtggaggagaggaacctcctctccgtcgcctacaagaacgtgatcggagcgcgcgcgcctcgtggcgcatcatctcctcgatcgagcagaaggaggagagccgcggcaacgaggatcacgtctccgtcatccgcgactaccgatccaagatcgagtccgagctctccaacatctgcgacggtatcctcaa

SEQ ID NO: 182503 - DNA, 270 bp, Glycine max
ctagaactcacaaaggacagaagaaacgcgaatgccaggagaactccaattaccacccgggttcagattccaccccactgacgatgtgcttgtgaatcactacttgtgtagaaagtgtgctgcacaaaccattgctgttcccatcatcaaagaaatcgatttgtacaagtttgatccatggcagcttccagagatggctctttacggtgagaaagagtggtacttttgctctcctcgagaccgaaaatacccaaacggttcgagaccgaa

SEQ ID NO: 182504 - DNA, 266 bp, Glycine max
gagtcttcttccccaatatcgttagccgttagggtttacggacagagagagagggctgcgctgcagctgcagctgcacctgcagaatcttttatcagcgatagcagcaatgtcttcgtcgaaagctgcagacccagcctgggttacctgactcgcaaggacacggaggtgaagcttccgcgtccaaccagggtcaagaacaaaacccccgctcccattcaaatcaccgccgagcagattctccgcgaagcacgtgagcgtcaagag

SEQ ID NO: 182505 - DNA, 266 bp, Glycine max
gttttgcaaaaatgggagttccagagaaagaccctctttcccaattgagtttgcctcctggttttcggttttaccccaccgacgaggagcttctcgttcagtatctgtgccgcaaggtcgctggccaccatttctctcttccaatcattgccgaaattgacttgtacaagttcgacccatgggttcttccaagtaaagcgattttcggtgaaaaagagtggtactttttcagccccagagacaggaaatacccgaacgggtctcga

SEQ ID NO: 182506 - DNA, 267 bp, Glycine max
atcattctcatatcctcaatcaccccccctcgcactcgctcttcccttcctctggtggcgacaatgtcgactcctgctaggaagaggctgatgagagacttcaagacgctgcaacaagacccgcctgcagggatcagttgtgctccccaggataacaacataatgctgtggaatgcactcaacttttgtcctgatgatactccatgggatggaggcacgttcaagttgacactccaatttactgaggactatccaaataaaccaccg

SEQ ID NO: 182507 - DNA, 270 bp, Glycine max
cattcttcttctgcgttgaattgggacaacgagaaattggatctcagtttacggcaggaaataaaaattgcatttgagtgtaaaataacagagtatagtgtagggccttgttcttgatactgtgctaaatttgttggatggcggagaaatcatgcatcaagcgccttcagaaggaatatagagccctttgtaaagagccagtttctcatgttgtggctcgtccttctccaagtgatattcttgagtggcattatgtgttggagggaagtg

SEQ ID NO: 182508 - DNA, 239 bp, Glycine max
  unsure (1)..(239): unsure at all n locations
gcgacttacagcattggtgtatatggtttcaagggaattactaagtataaaatatcagtcatggtccaggataatttcaaccaaaatgttggtcagcaagcatcatcttccatgtcatctatggaactggatacgaacaatgtaggaactgcaagcattatatacccggcaggactattgcactacatgaagcttactgtagcangcacaatgttgtctgtcagcatgcaggctgtgga

SEQ ID NO: 182509 - DNA, 262 bp, Glycine max
tggcaagactggttctcactttgaccctagcagtgacttgttcgttcccaatgaaagaaaagatgttattacttccacagcttgttgggctgctatgttgggattgcttgttggattggggtttgtaatgggtccaattcaacttcttaagacttatggtgttccctatgttatattcgtcatgtggttggatttggtgacttatttgcaccatcatggccatgaagacaaattgccttggtatcgtggaaaggaatggagc

SEQ ID NO: 182510 - DNA, 268 bp, Glycine max
ctagaatatcaaattggtctcttgtcttcctcctcatctctacactactccacatagagcccagcctctcaagcccaagcccaagcccaagcccaagcccgttcataaaatcctcctgcagcagcacccagtacccagccctctgcgtctcatccctctccgtctacgcctccagcatccaacaggaccctcaccaactggttcagacagcactctccctctccctgaaccgcacccaagccaccaaaaccttcgtggctaactgcaa

SEQ ID NO: 182511 - DNA, 265 bp, Glycine max
cagtaatttacataccctagttctcgtatatattcttcttctttgcatcaatcctttgtctcaaattaaaatcatgggaattgtcactactgaatgcgagcaagtttgtgccgtggctcctgcaaggctatacaaagccatggccttcgattttaacaacgttatgccaaaagctatcccaaattttgttaagagtgctgaaatcattggagacggagggccgggatctattaagaagctcgttcttgttaacggatatgtgaat

SEQ ID NO: 182512 - DNA, 269 bp, Glycine max
tgtacgtttgggactgtgtaccatggaaaatggagaggatcggatgttgcaattaaaagaataaagaaaagctgcttcgctggtcgatcttcagaacaagaaaggctgaccatagagttctggcgggaagctgcatactttccaagcttcaccatccaaatgtggtggcattttatggtgtagttcaggatggaccaggagcaacactagcgactgttgccgagtacatggtggatggttctcttaggaatgttttgcttcgtaaggat

SEQ ID NO: 182513 - DNA, 271 bp, Glycine max
tgaatttcatcgacggaacaaccacgtttaagactgccactgttgctgctgtgggtgatggatttatagctcaagacatatggtttcaaaacacagcaggcccacagaagcaccaagcagtggctcttcgtgtaggcgctgaccaatccgtcataaaccgctgtcgcattgatgccttccaagacactctctacgctcactccaacaggcagttctaccgagactcttttattactggcactgttgactttatatttggaaatgcagctgt

SEQ ID NO: 182514 - DNA, 267 bp, Glycine max
ccgtttttctcttcttcttcttcttcgcataatagcagcacaaatggtgaagcactacagacccccggggaagaaaaaggagggaaatgctgccaaatttgtcattaggtcacaagcaatcaagcagcttcaaatcagtctaccccttttcaggaaactatgtattttgaaaggtgtaactccaagggagcctaagataaagttcaagggaactcatcagacttattaccatgtcaaggatgtttccttccttcatcacgagccttt

SEQ ID NO: 182515 - DNA, 266 bp, Glycine max
atcactttatgactccctcagaaacgcaaatcataaaccgccaaaactcgttgacctagactacaacggcgttgaagaccaatcctcaacacaagaacaaatatcaaccaatctcaacaccatgtaccggcactggtgtcaagttcaaagactccaacgctcttcttcggtagcccttaccgtgcaggagaagatagtgatcccggtggtggcactgtggagaacattcctcacggtccggtccatatatggaccggtgataacac

SEQ ID NO: 182516 - DNA, 264 bp, Glycine max
gtcaattccaacaacaccacaatgggaagaagaccggcgaggtgttaccggcagataaagaacaaaccgtacccgaaatcccgtttctgccgcggcgtgccggagccgaagatccgaatctacgacgtgggaatgaagaagaaaggcgtggacgagttcccgttctgcgtgcacctggtctcgtgggagaaggagaacgtctccagcgaggctttggaggcggcgcgcatcgcatgcaacaagtacatggccaagttcgccgga

SEQ ID NO: 182517 - DNA, 265 bp, Glycine max
ttcaaggaacttttggatacatggaccctgaatatttccatactagtcaattaacagataaaagtgatgtctacagctttggagtggttcttattgaacttttaactgggaaagagccaatatcttctgcacaacaacaagatcttagatgtttggcttcatatttcctccatacagagaaggacatatgaagccaaacttctaagctcttgtcgtttggcttcatatttccttctctgtatggaggaaaatcgtctttttgata

SEQ ID NO: 182518 - DNA, 253 bp, Glycine max
ggcaaaccctactagccaggtgtcggttatagggaacttggtgtctgctcaagttgttgcagaaattggctggaaagagactgcagttttaatgttctcactcggattggtatattatctaattatatttgtaacgctgtatcagcgtctgacaagtggcagccagttccccacagtgctaaggccaacttacttgtggttttttgctgcaccaagcatagcaagtctagcctggaaatccatcacaggtgtt

SEQ ID NO: 182519 - DNA, 265 bp, Glycine max
cagaagctagtttccacgattttcggatcgacaagtcaaaagagcgatatttcactcaccagagaagaaccacaacaatggcggatcaactcaccgatgaacagatctccgagttcaaggaagccttcagcttgttcgataaggacggcgatggttgcatcacaaccaaggagcttggaactgttatgcgttcattggggcaaaacccaactgaggcagaactccaggacatgatcaatgaagtggatgctatgggaatggtacc

SEQ ID NO: 182520 - DNA, 264 bp, Glycine max
acatggcggaagctcaaccagcttccgctcttccctcaggtggccaatgttgtgttgtccaaggctgcctattgcaccgagaagtacaacatcccggttgtttcctctgctgagaaaggttacagggtttctgcttatcttcctttggtgcctactgagaagatcgccaaagtcttcggtggaaactgatctcgatctattgcggttttgaatttcttattgtttttactttctctacaaagtgttgtgctagttgctactgtt

SEQ ID NO: 182521 - DNA, 257 bp, Glycine max
gcttgtgctgccttcgtttgcgtttttatcacagaggaattaacatatatatagcaagcatggcagtcacactctacgaccttagctcttcctctgggttgaacaaacttgatgagtaccttctcccacgcagttacatcaccgggtaccaagctacaaaggatgatcttactgtttatgcagctttgccaactgctccatcagatgaatatggaaatgtttccaggtggtacaagcacattgatctttgttgagaa

SEQ ID NO: 182522 - DNA, 255 bp, Glycine max
gttgtaagactttgtaattgaggtgctgcaatggcttcaagtcaggaagaggtgactcttttgggagtaattggaagcccatttgcttgcagggtgaagattgcccttaagttgaagggagttgaatacaaatatgtggaagaaaatttggccaacaagagtgatttgcttctcaaatccaacccagttcacaagaaagttccagtttttattcacaatgagaagcccatagcagagtctctgtgattgttgagt

SEQ ID NO: 182523 - DNA, 257 bp, Glycine max
ggtgaatttgtctgccctagagcgccttgttagtaggtgtcccaacctgcagactctccgcctcaaccgtgctgtgacgctagacaggcttgccaaccttcttcgcggagctcctcaattggttgagttaggcacgggaacctacacgactgagatgcgaccggaggtcttcacaaacctggcggaggcattttctgggtgcaagcaattgaagggcttgtctggattttgggacgttctccatcctaccttccagc

SEQ ID NO: 182524 - DNA, 262 bp, Glycine max
atttggttttggtttctccgaccttgaacgcttcccatcttggtgagtaacacgaatctgaggaaaaaaaatgtcgattatgcaactttacgggcgcagaagagcgtggtgaagcggtcgaagaagtacttggaagaagcgctttacatgaagctcttcagagatggaagctcccagctcatcgttcgccagagcctcaacaacttcgtcaagagccggaagcgcgtttacagatgggacgtaggcgacactcaagaagctt

SEQ ID NO: 182525 - DNA, 247 bp, Glycine max
caaattcttattagaacgaaaaaagaaaagaaaagaaaaaagagcgatttttccctcaccaaagaagaaccaaaacaatggcggatcaactcaccgatgaacagatctccgagttcaaggaagccttcagcttgttcgataaggacggcgatggttgcatcacaaccaaggagcttggaactgttatgcgttcattggggcaaaacccaactgaggcagaactccaggacatgatcaatgaagtgga

SEQ ID NO: 182526 - DNA, 259 bp, Glycine max
cggctcgagcggctcgagaaaaactacatcttagctgagagagctgagactttgttgttttgattgaagcaacgatatcctgaactttcacaaacatcattggacacatgcaaaattcaatacaaccaggatgcaggaaaagcgatattagaaagctactcaagagtattagaaggcttagcattcaacattgtagcttggattgaagatgttcttcttgctgataaatcaatgacgaaccaaaattataggaatcgcg

SEQ ID NO: 182527 - DNA, 257 bp, Glycine max
cgcagataactccattaccttattttctccatacaagatggggaaattcaacctctctcatagggtggtattggctcccatgaccagatgcagagccctcaatgggattccattgccagcgcatgatcaatactatactcaaagatcaacactaggtggattcctcatcactgaaggcaccttgatctctcccacttcttctggatttcctcatgttcccgggatatattcagatgaacaagtaaggcatggagaaa

SEQ ID NO: 182528 - DNA, 257 bp, Glycine max
actgcatattgattacccaatgttgtttgaactccgtaatgatgctgccgagcgggtttctcattgtggggttctggagttcattgctgaggaaggcatgatatacatgccatactgggtaggcattcaaaaatgatggagaacatgcttttacaagagggggacattgtcaaagtgaaaaatgtgacacttccaaaggggacatatgttaagttacagccccacacaaaagactttccagaatttccaatccaaaa

SEQ ID NO: 182529 - DNA, 263 bp, Glycine max
ctctctactactgctagctgtgacttgttttgagttcgatccaattgcattggtatgtggaatcaggaaagatggttagcgtagctgagatcaggcaggcacaaagggcagaaggcccagcaaccatccttgccattggaactgcaaacccaccaaaccgtgttgatcagagcacctatcccgattactacttcagaatcaccaacagtgaccacatgaccgagctcaaagagaaatttcagcgcattgtgacaagtctatga

SEQ ID NO: 182530 - DNA, 260 bp, Glycine max
  unsure (1)..(260): unsure at all n locations
cgctgatctcagcaggaacaatagcagcgagagcagaatcgacagcgactcaagnctgcttccgaggcttgacacgtggtacaaatccaaggacgtatcgcagaggatccttctctcacttgaatgccaaatgaggaggtgttcctacacgcaggttttgggtgagccgaacctaccgggcaaaccgtccctgctctacgacctcgtgtgtaagccgaacgtgatccacgcgctgaacgacgagcgtcgatgtagcgcgt

SEQ ID NO: 182531 - DNA, 258 bp, Glycine max
cacagatcaattgcaacggttgaattttcactgaagacaaagttacaaaaaaaaaacatgtcttgctccgtcgcggtttccaattcgccggtgttctctcattcttcttccctcttctgctcgaagccctccatcatctcttcttcgccggaatccctctccctctctctgtcgcatctcaaaccttcgaactcttctacgtcgtcgtcttgttcttcgccttctgctgctgctggttcttcttcgcctcttctccgt

SEQ ID NO: 182532 - DNA, 260 bp, Glycine max
cggaagagcatttggctgtcaagcacttctcagttgagggacagttggagtttaaggctatcctctttgttcctaagagggcaccttttgacctctttgacacaaggaagaagcctaacaatattaagctttatgtccgccgtgtctttatcatggacaactgtgaggagttgattcctgagtatttgggctttgacaagggtattgtggattccgaagatctaccactcaacatttcaagagaaattgcaacagaacaa

SEQ ID NO: 182533 - DNA, 254 bp, Glycine max
ctctcactgatagccagaaggtttatgtagattcattggtgaagcaagcatatgaaaattgggatcaggttgtggattatgatggcaaatcactcgtgaatgctaaaatttcttctgaaaatgaacttcatgtggagtcaattgattatggtagtggtttagatcatcaactgcaactgccggtccttccagtgtctgttccttctgaacagcaaatcaattcagggatacctgttggagttacaacgataata

SEQ ID NO: 182534 - DNA, 258 bp, Glycine max
ctctactgctgatgacagctacgaattgaagaacaagcttagagaactcgagatttcgttgttggggcctgattcagacattgttgacagttgccactgctcctacaacggtggtttccacggagcatctccaatggctaaatacaattgggatcagattgtggaaatgattccaaaattaaacttgaaagaagtcctcattcggtgtgcacaagccgtggctgatgatgatattgaaacagcagtggatttatgaac

SEQ ID NO: 182535 - DNA, 261 bp, Glycine max
cggaagccttcccgtcaaatggacagccagaagtgacttcagcctggcaaaccccggcagcagagcctgggaaagctgattggcaattggcattggtagagactgctagcaatttgtcaaagcagaaggcagctttaggtggtgggttggatcctctattgttgactggtatgtatgatcaaggaatggtgaggcagcatgtcagcactacccaactgagtggtgggagtgcaagcagtgtggcatgccgggaccagggaa

SEQ ID NO: 182536 - DNA, 261 bp, Glycine max
cggctcgagggaggaagctttgagagagagagacggaggagggagagtgttgacgctccatcaacgatgggtatttctagggattccatgcacaagaggcgtgccactggtggcaagaagaaggcatggagaaagaagagacagtatgagcttgggcgtcaggccgcaaacaccaagttatcaagcaacaaaactatccggaggattcgtgttcgaggtggcaatgttaaatggagggcattgaggttgataccggcaatt

SEQ ID NO: 182537 - DNA, 258 bp, Glycine max
  unsure (1)..(258): unsure at all n locations
ggtggtgcaaagaaggttattatttctgcccccagtaaggatgcccccatgtttgttgttggtgttaacgagcacgagtacaagccagagcttgacattatttccaatgctagctgcacaaccaactgccttgccccgctcgccaaggttatcantgacaggtttggcattgttgagggtttgatgaccactgttcattccatcactgctacccagaagactgttgatgggccatcagccaaagctggagaagtggaa

SEQ ID NO: 182538 - DNA, 256 bp, Glycine max
gaccgtgatcatagcttctggagtttgtcgtggatgcagagatgctatttactttggccttgctctcttatcactctcatggtgtagcaagaacatgaataacttggtcctatctcttgttcctaaattcgcaaaactgcaaactctaatcctccgtcaagacaagcctcaactagaggataatgctgttgagactattgcaaaatgctgtcatgaactgcagatcctggacctcagcaaaagttcaagctaactg

SEQ ID NO: 182539 - DNA, 253 bp, Glycine max
ctaaagtttggcaagcttattgaggcaaaggtggttgttgacaagttctctgggcgttctcgtggttttggatttgtcacatttgatgacaagaaagcaatggacgaggctattgatgctatgaatgggatagatttagacgggcgaactattactgttgatagagctcagcctcaacaaggatcaactagagatgatggtgatcgttaccgggagcgtggtcgtgatcgtgatcgtaacgagattatggagg

SEQ ID NO: 182540 - DNA, 262 bp, Glycine max
ctctctactactgctagctgtgacttgttttgagttcaatccaattgcattggtatctgaaatcaggaaagatggttagcgtactcgagatcaggcaggcacaaagggcagaagggccagcaaccatccttgccattggaactgcaaacccaccaaaccgtgttgatcagagcacctatcctgattactacttcagaatcaccaacagtgaccacatgaccgagctcaaagaggaatttcagcgcatggtgacaagtctatg

SEQ ID NO: 182541 - DNA, 202 bp, Glycine max
  unsure (1)..(202): unsure at all n locations
tgcgcttcagcacaatggggtgctacaagtatgtttcggagctatggcgcaagaagcagtctgatgttatgagattcttgcagcgggtgacgtgctnggagtatcgccagcaccattctatgtcgtttgacacgtcactcgccagataagtcgtcgcatggttcaagctagcaggtacgtgatacgtgtcgctacgaggtgc

SEQ ID NO: 182542 - DNA, 257 bp, Glycine max
agcagcagcgacagttttctacaatttgaagcaaaaacatccaacacttgacatgccagtgatcgactacgacttggcacttcttttccaaccagtgctggtgcttggaatcagcattggagttgccttcaatgtgatttttgctgattggatgatcacagtcttgctactaataattttcgtaggaattgcaaccaaggcattcttaaaaggagttgagacatggaaaaaagaaaccattataagcaggaaactgc

SEQ ID NO: 182543 - DNA, 252 bp, Glycine max
caaattctaaacgctattgatagtaaaatggcggattcagtgtcggtggacatggaagccatctctcctccacccgaggaacatgttgttagaactcgtcatggttgtgtctcagttgctgtgtatggggaccaggacaagccagcgcttatcacgtatcctgatttggctttaaattatgtctcctgctttcaggggacattattttgtccagaagcctgttcattgctgctccacaatctgcatatatca

SEQ ID NO: 182544 - DNA, 257 bp, Glycine max
cccataggttactactcttcgccttttcctttgcaattgttaccaaacaattcttgcttagcccttacaagcaagcattaacaacaatgaagaaagtagtgttaaaggtgggcttacatgatgatagaatcaagcgaaaagttatcagaacagcatctggtctttcaggggttgaatcagtttctattgacatgaaagacgagaaaatgaccttattagggaacattgatccagtgaatgcatgtgcaagctacgaa

SEQ ID NO: 182545 - DNA, 254 bp, Glycine max
ttccttttgaaggttagaagtgctacaatacaaacaatgggaggtactcagggagatgtgaagttttgggtaatgtggggagcccattttgtgtgaagggtcaagattgcccttaagttgaagggagttgaatacaaatttttggaagaaaatttgggcaacaaagagtgatttgcttctcaaatacaaccctgttcacaagaaaggttccagtgtttgttcaaaatgagaagcccatagcgagtctcttgtga

SEQ ID NO: 182546 - DNA, 261 bp, Glycine max
atttatatctcttgagaaatggcacaagaaacctttctattcacatcttcatctgtaaacgagggtcaccccgacaagctgtgcgaccagatctctgatgcagtacttgatgcgtgccttgaacaggaccctgacagcaaggttgcctgtgagacatgcaccaagaccaacatggtcatggtcttcggagagatcacaaccaaggccaacgtagactatgaaaagattgtccgcgacacatgccgcgaattggattcatct

SEQ ID NO: 182547 - DNA, 260 bp, Glycine max
aagtgggtctatatcacctgaccttaggaagctagagaatctgagggttcttgctcttcataacaacaacttctatgggacaattccatcagaattgggaaattgcactgaattggagggaatatttttacagggtaattaccttagtggagtgattccaattgaaataggaaacctttcacagcttcaaaatttggatatatcaagcaattccctcagtgggaatattcctgcatcacttgggagttgtataatctcaa

SEQ ID NO: 182548 - DNA, 256 bp, Glycine max
ggcgtgagttcttcaaccagccacttgagatgaaggaagagtatgcaaactcccccaccacttatgagggatatggtagtcgcttgggagtgcagaaaggtgccaccttggattggagtgactacttctttctccattacatgcctccttcacttaggaaccaagctaagtggcctgcatttccagaatccttgaggaaagtgattgctgaatatggtgaaggagtggttaagctaggaggaggatactcaagatg

SEQ ID NO: 182549 - DNA, 255 bp, Glycine max
gcctcacagaggttaggaagaatggcacctgtgcttggttgaggccagatggtaagacacaagtaaccgtcgagtactacaatgacaatggtgccatggttccagttcgtgtccacactgtcctaatttccacccaacatgacgtagatgtgagccatgatcaaattgctgcggaccttaaagagcatgttatcaagcctgtcattcctgagaagtaccttgatgagaagaccatcttccacttaacccttctgg

SEQ ID NO: 182550 - DNA, 249 bp, Glycine max
cagagatagaccaataatctgaatctgaaacctccgtgttggtgttgcatatccaaaccctaatttggaaattgaattgttgaagggaagaagatcaagatggttctggcggagttaggtgggagcatttcgcgtgctctccagctgatgagcaatgcgacagtaatcgacgagaaggtgctcaacgattgcctcaacgacatcactcgcgctcttcttcaatccgatgttcaattcacttgtccgcga

SEQ ID NO: 182551 - DNA, 252 bp, Glycine max
gccgttgaggtcaccggtggacctgaagttcccttccatcctggaagagaggacaaacctgagccaccaccagacggtcgcttgcccgatgccactaagggttctgaccatttgagagatgtgtttggcaaagctatcgggcttagtgaccgagatatcgttgctctgtctgggggtcacactattggagctgcgcacaaggagcgttctggattcgagggtccctggacctctaatccttattttcgacaa

SEQ ID NO: 182552 - DNA, 264 bp, Glycine max
cgcaaaccctactagccaggtgtcggttatagggaacttggtgtctgctcaagttgttgcagaaattggttggaaagagagtgcagttttaatgttctcactcggattggtatattatctaattatatttgtaacgctgatcagcgactgacaagtggcagccagttccccacagtgctaaggccaacttacttgttgttttttgctgcaccaagcatagcaagtctagcctggaaatccatcacaggtgcttttgtcacccca

SEQ ID NO: 182553 - DNA, 104 bp, Glycine max
gttccttaagctccttagtgctgctccttgcagctctaattctatacgcctcaagttcttgcaaactatgagcatcccccagtgtacaagcctcccactgagaa

SEQ ID NO: 182554 - DNA, 255 bp, Glycine max
ctttcactggaatcacaatcctgaaacaacaacatcttagcatttatcatactactagacaacatgaacaccacattggaaagcggtttctcggcagagcgagaagctctggtggtgaagtcatcggatgtctgacgagattactggagagttgggtctcaagatgttcttgcagatgatttgagattgctccatcagctcagaaattgttctcattacatgagagattcaacggttcctttggagcaaaatccc

SEQ ID NO: 182555 - DNA, 250 bp, Glycine max
atctgagagtctttcttagctgatatggcggttgatcgctcccttacgaggtgctgtagccacgtactgtggtcgtggatgttgctgaggatgatgatggtgcaaggtgcagacgcgagggataaccggaagggtgggactcggtcataaagttaacggctgaacaggtcgatgctgactcggatcatgaagtgggaacacgattggcggttcttgtggctggttcaaacggctatggaaactacaggca

SEQ ID NO: 182556 - DNA, 244 bp, Glycine max
ccattttctagggtttatacaattctcgatggcttcttcagatgttgagtaccgttgctttgtcggtgggctcgcttgggccactgacgaccaagctctcgagagagccttctctcagtacggcgaaatcgcttaaacgaagattatcaacgatcgtgagactggaagatccaggggttttggatttgtgaccttcgcctcggagccgtccatgaaagacgccatcgaagggatgaacggccaa

SEQ ID NO: 182557 - DNA, 258 bp, Glycine max
ctaaagactatgattttcaccttcttgatggccgttcaatcagggttcccttcatgacgagcaggaagaatcagtttattagggcttttgatggtttcaaagtccttggtcttccctacaagcaaggtgaagataacgccaattccaccatgtactttttccttccagaaacagaagatgggctgttagctttggctgagaagttggcttcccaatctgggttcttggaacgcgagcttcctcctagcaaattggaag

SEQ ID NO: 182558 - DNA, 259 bp, Glycine max
ccgctcgagctcgagccgctctttcgaatttcgatactttgatcagatccacaacacttcttcatccataccgcttggatcttcaggatccagtgtcgtggttccaaggaacttcagattgctggaggagcttgagaaggagaaaaaggaataggagatggcacagttagttatggaatggatgatggtgatgacatttacatgcgctcttggactggacccattattggtcactataatactgtacatgaaggaagaa

SEQ ID NO: 182559 - DNA, 252 bp, Glycine max
cctggaacatgattctgctgcaaaggttacaggcatgcttctggagatggaccagcctgaagttttacatctgattgagtcaccagatgctctgaaggcaaaagttgctgaagccatgacatgtgttgagaatgttgctcaacagcaaaccaacccagctgatcaactagcctcactctctctcaatgacaatcttgtgtcttagattccgcctagtcatttgacaagaatctgtacaccagttatttctat

SEQ ID NO: 182560 - DNA, 252 bp, Glycine max
gctgatgtggagcctagcatagcaccagtgcaaattgatcaaagtcagcttctaattgatgggaaatttgttgatgcagcttctggttaatatcttaccttcatgaaaaacttttccaacttttgatcctagactggagatgtaattgccaatgttgctgaaggagatgctgaagatgtaaatcgcgctgtccatgctgctcgcaaggcttttgatgagggaccatggccaaagatgacagcttatgaaaga

SEQ ID NO: 182561 - DNA, 249 bp, Glycine max
ccttgctgagtaagttacggatgacgtatacgcacagatcacgttggtgccggaatctaatcttgatgatccgatgaaccctgacccgtgcactgctgttcctccaagtgcaccagttcactcgttcatcaagacttgacagcttcagataccagcacccatggtggcttctctgttctcaggcaacatgccatggaatgccttcctgcgttggacatgtcacaaccaggcccatctctggaattggtt

SEQ ID NO: 182562 - DNA, 255 bp, Glycine max
accgcaaacaacggtttgcggcgttttgaggggaaccgcaaggccaccgttgggaacgaatataaatttgggttgcttctacctagtgggaatgcccgttgcggtgaggttgagtttctttgccggctttgatttcaaggcttgtggcttggtttattggcagctcaacctcttgtatgttcaccatgttaattgtgttggctcgaaccaattgggagggtcaagttcaaagagccaaagaactcacatcatcgt

SEQ ID NO: 182563 - DNA, 263 bp, Glycine max
cgccgctgccaagaagaagtgattgcatttgggcaattttgctagcacatgtgatcatcatcgtggttactcctttatagtagttttatccttgcagagtcttaggtgttttgtttaagttatatttttaagtttctgcgatttcatgtagccgtaactttcaaaactaggttcttgatcggcggtggtcaattttcattgctgtttgtttttgatgagtactgttttttgttttgatggtaagaagagtctgagatatttcg

SEQ ID NO: 182564 - DNA, 252 bp, Glycine max
ggaacagaggaagaggaagagaatgttgtccaatagggaatcggcacgtagatcgaggataaggaaacagcagcacctggaaggtctgagtgcccaattggatcagcttaaaaaggagaacgcacaaatcacacaaacataagcatcacgacgcagatgtacctcaacgtggaagctgagaacgcgattctgagggctcaaatgggggaactgagcaacagattgaactctctgaacgaaatgataagtttc

SEQ ID NO: 182565 - DNA, 247 bp, Glycine max
ctacagtgtaaaaagcaatgcctcaagtcttcccacaccaaggtctgcttttgatatcttgtcttctcccaatcttaagcccttcacattcaatgagctaaagaatgccacccgaaattttcggcccgatgtcttctcggtgaagggggatttggatatgtctataagggatggattgatgaacacacatttacggcttcaaaacccggatcaggaatggttgttgctgtgaagaggctgcaacctg

SEQ ID NO: 182566 - DNA, 221 bp, Glycine max
atcacattgattccgaagagaaaagaaaagatgtttgagccacaacagctatacactcgcgcgaagaccgaggaattcgacctcgaatcaggagaaaccctctacccagggctgagcgtcggcgagaaccagctccgatgggtttcatccgcaatgtctacggcatcctctccgcgcagatcgtcctcaccaacctcgtctccgtcaacaccgttttctat

SEQ ID NO: 182567 - DNA, 249 bp, Glycine max
tggcagcatcacgatgtcaccgttaaggacgagaagacccttctcttcggtgacaaggcagtcactgtttttggacacagaaaccctgaagagatcccatgggggtcaactggagctgacatcattgttgagtcaccggagttttcaccgataaggacaaggctgccgcacatttgaagggtggtgccaagaaggttattatttctgcccccagtaaggatgcccccatgtttgttgttggtgttaatg

SEQ ID NO: 182568 - DNA, 256 bp, Glycine max
cgtccatctggtttcacaaatgctcccgtcacaagggccttcatcatcgcttcggcgcttttcactatcttctttgggatccaaggccgtttcggcactctggggttgtcgtatcaggatatttttggaaagatcgcctttggaagttgatcatgtccatattttccttctcgtccacaccagagttgatgtttggactgtatcttctatattacttcagggtctttgagcgacagataggttccaataaatactc

SEQ ID NO: 182569 - DNA, 253 bp, Glycine max
cacaaggactgggttttcactgatcaagcattacctaatgatcttgtaaagagaggagttgctgttaaggacccatctgctccccatggagttcgtcttttgattgtcgactatccttatgcttctgatgggctaggatatgggatgccatcaagtcctgggtgcaagaatatgtctcattctactacaagtcagatgaggaactccaaaaagaccctgaactccaagctttgtggaaagaacttgtagaggt

SEQ ID NO: 182570 - DNA, 274 bp, Glycine max
  unsure (1)..(274): unsure at all n locations
gtatgtacggtattcggctcgagcttagctcgatctcttgggctcgtcgaattcgaaatctgatctccgacgattggtcccggtagtgngtagtacactctccaatctgcaaaaatgcctctcagactcgaaatcaagcgcaagcttgcgcaaagatcgagagagtgaaatgtgtggatctacatccaacagagccatggattctggctagtttatactctggaactgtctgtattggganataccagtctcagaccatggcaaaatcttttga

SEQ ID NO: 182571 - DNA, 251 bp, Glycine max
cgacagaaatcaagcattgggtcgaactcttctttgatgtcaaagtaatagctatgaatagtcatcgactcccggtaaacggtagaagagtacgacctattatgggacatacaatgcattacagacgtagattattacgcttcaaccgggttattctattccacctcttagaaagaccaacccttaaatcacaatacttaatagcatggcgatacatttatacaaaacttctaccccaagcacacgcaatg

SEQ ID NO: 182572 - DNA, 251 bp, Glycine max
cttcttcaaaatgatattgatttgctaaatcctccggttgagcttgagaagaggaaacacaagctcaagcgtcttgttcagtcaccaaactctttcttcatggatgttaagtgccagggttgcttcaacataccactgtctttagccactctcagactgttgtaacatgcggaaactgccagactgtcttgtgtcaaccaaccggtggccgggcaaggctaactgagggatgctcctttaggaagaaggga

SEQ ID NO: 182573 - DNA, 233 bp, Glycine max
cgtgagtgttgaagagattcgtaaggcgcaacgtgcagaaggccctgccactgtcatggctattggcaccgccactcctcccaactgcgtggatcagagtacctatcctgactattatttccgcatcaccaacagcggcacatgaccgagctcaaagaaaaattcaagcgcatgtgtgataagtcgatgattacgaaccgatacatgtacttaaacgaagagatcctgaaagg

SEQ ID NO: 182574 - DNA, 281 bp, Glycine max
atgagtatgtacggtagggatccgtggggagggccgttggagatccacgccacagactccgccaccgacgacgagcgcaccggaatctccaggagctggaccgaggcgctttagacgagacacaacagagctggctcttgggcgccggagaacagaaaaagaagaagaaaaggtacgtagatcttggctgcatcatcgtcagccgcaagctcttcatctggacactcggcactctcgccgtctgcgacttcctcgccggcttcatcaccctcatcgtcaaa

SEQ ID NO: 182575 - DNA, 278 bp, Glycine max
atcacattttgttcatcatcgccttcaacgccctgaccttgaagacgatgagaaccaacaagaccaagacaacaaccttaacgatcacgaagggcttgacctaattacaccaaatccaggtcctggcgatgttgttggtcgcaggccaagaggaagacccccaggttcaaagaacaagccaaaaccaccagttatcatcacaagagagagtgcaaacacccttagggctcacatccttgaagttagtactggttgtgacgtctttgaatcggtcgcta

SEQ ID NO: 182576 - DNA, 278 bp, Glycine max
cgacgccaagctcttggcaaagctcttcgatgtggtcgctttcacccacgtgatgcacctcgcggcgcaggccggggttcgctacgccatggagaatccccactcctacgtccacagcaacatcgcggtcctcgtcacgcttctcgaggcctgcaaatcggcgaaccctcagcccgcggtcgtttgggcctcgtccagctccgtctacgggctcaacgagaaggttccattttccgaatcggaccagaccgaccggcccgctagcctctacgccgcaa

SEQ ID NO: 182577 - DNA, 279 bp, Glycine max
actcgagccgctcgagccgctcgagcggtgaggttccggttaaacctgtggttgcagatgaaactagtactgagagcacaaacaatgatgaacttgaaccacacgaagagggttatggcgaaaaccccctcagtgaagaggcaatcttgtgggaaatacaaaggtgttcggatgcggaaatggggcaaatgggccgcggagattcgtgaccctttcaagggcacgcgaatctggttgggcactttcagcactgcagaagaggcttctcaagcctatgag

SEQ ID NO: 182578 - DNA, 280 bp, Glycine max
gcagttccacacaagcaccttcatctaaaattcaagtatcgaagaagaagatggctttaggtgttcctgctcttccgttgacatacgtggctcacgttctggcagttgttgccagcgtcttggtcgtggtctgggtcgtcaatttcaggggtggcttggcttgggattctgataacaagtccctcatcttcaacattcatccagttcttattgttattggcttactagttcatgggggtgaagctattataagttacaaagcttttcccctaaagaagga

SEQ ID NO: 182579 - DNA, 256 bp, Glycine max
ttcgagccgcaagagagagctagcagtgcaagctttcaacatccaaaacaacagagagtttttggatttagaagctgaaggaatatagttatcacaatggggagagctccatgctgtgagaagatgcggttgaagagagggcaatggtctccagaatcagatcaaattctcatcaattacatcaacacttatgggcatgctaattggcgtgcactgcccaaactagctgggctattaaggtgtggaaagagtgtta

SEQ ID NO: 182580 - DNA, 283 bp, Glycine max
gtttctgatggtgtcatgaccttcactcttgatgctgctgaagaattgggtgtccccgaggtgctgttttggaccactagtgcatgtggatttatgtgttacgtgcaataccaacaactcattgaaaaggacctaacacctctcaaagactctagttatatcacaaatggttatttggagactaccatcgattggataccaggcattaaggaaattcgattgaaggatattcccagtttcgttaggaccacaaatccagatgagttcatgcttgatttcatac

SEQ ID NO: 182581 - DNA, 285 bp, Glycine max
ctgatttgcactgcagctgttttgggtcgtttgccagggacaactgtttataggaatgttaaacagtaccctgaagcatatacatataatggaattgtaatcgttcgtgttgatgctccaatttattttgcaaacacaagttacataaaggacaggttgcgtgaatacgaagttgatgttgattgttctaaaagacatggacctgaggttgaaagaatttattttgtgattctagagatggcacctgtgacctacatagattctagtgctgttcaggctttgaaa

SEQ ID NO: 182582 - DNA, 280 bp, Glycine max
tgtcactggagccaacgttcaggtttgctgggagaaatttgcaaggtactttgaggtggagttgaaggaggtgaagctccgtgatgattactatgtgatggaccctgaaaaggccgtggaattggtggatgagaacactatttgtgttgctgctatccttggttcaacactaaatggagaatttgaagatgtcaaacgcttaaatgatctcctaattgaaaagaataaaataactgggtgggacactcctattcatgttgatgcagcaagtggtggcttc

SEQ ID NO: 182583 - DNA, 285 bp, Glycine max
ctcttgatgatgtgctggccaatttcgataccaatcttggaattcctttcggttctgtgctcaatgatgctgttcgtataagctacgccgcacacctgatgcttgtatttccagttgtcttctttccattgcgtctcaacatagatggcctcctcttctctaaatcaaggcctctggttctggataacttcagatttgcatcactcactattgcccttattggtgttatcttcctgggagcaaatttcatacctagcatttgggatgctttccagtttactggag

SEQ ID NO: 182584 - DNA, 308 bp, Glycine max
caagcgaacgtcagaactcggctcgagacattaatttgtgatagctcaccatggccattgctacttgtgatcatgataagaacgcaaaggctttgcagttcattgaggatatgacccaaaacactgaaagtgtccaagagagggtccttgctgagattctcagccaaaactcccagaccgaatacctgaaacggtttgagctgaatggagccacagaccgcgacactttcaagtcaaaggttcctgtcgtttcctatgatgatttgaagcatgatatccatcgcattgctaatggtgaccgctctcct

SEQ ID NO: 182585 - DNA, 275 bp, Glycine max
ctggaagttcaagcaatagttatactcccttccgtggtcctcctacttcatctgaatcaaggggactgtcatctggggtaaacccgttcgagaggcaaggtgatagtgaatttggaattccatattcgttacaatctttggttgttgctggtgaaggaagtagtagacttgtatctgagctgcgcaatgtgttgggcctcatgcgtaggggtgggaacctgcgatttgaggatgttatgatccttgacccttcagtgttctctggaattgctgat

SEQ ID NO: 182586 - DNA, 280 bp, Glycine max
ctaatctccatctaatagtgtttatttgtctttctctatctctatcggtcatgggtgcttttgcttttgatgaggaaaactcctccaccgtggctccggcaacactctacaaagctctgacaaaagatgctgacactatcatcccaaagattattggggccatccaaactattgaaatcgttgaaggaaatggaggacccggaaccgtcaagaagataacagctagtgaaggtgaccaaaccagtttcgtgctgcaaaaagtggatgcaattgacgaggc

SEQ ID NO: 182587 - DNA, 281 bp, Glycine max
caacataatgatgggaaaaagtttttcaaacccaatttggaagctgatcacatctccaacctggttgaatgcatacaaggatggtcatgttgcaccatttgttaagtctgaacccattcccgagactaacgatgaacctgttaaagtgctagttggggccagtcttgaggacattgttttcaaatctgggaagaatgttctgctggagttttatgctccctggtgtggtcattgcaaacagttggctccaatattggatgaagttgctatctcatatcaaa

SEQ ID NO: 182588 - DNA, 279 bp, Glycine max
cctcactaagcttctcactgatgagaataggggagaggatctgcgcagcttcttactcagttgaggccattcttctccttgatacctaaggcaaaaactgcaaagattgttaggggaataattgactcggttgctaaaattccagggacatctgatctacaaattgcactctgcaaagaaatggtgctgtggactcgtgctgaaaagcgtacctttctgagacagcgagttgaggcaaggcttgcagcacttctgatggaaagtaaggagtattcagaa

SEQ ID NO: 182589 - DNA, 282 bp, Glycine max
aggtaattatatacaagactgtccaagagatgccacctaaccccaaggagccttgggaccttgaaatggactatgatgacactttgacgttggaaattcctattgaacagctaccagatggtgatggtgcagatatagcaatttctcccaatcaggttggaactcatactgttcaaggggtggcctccacttcttcaaccggtgtggctactgctgagcctgatttagaattgcttgctgtactgctaaaaaatccggagttggtatttgccttaacttctg

SEQ ID NO: 182590 - DNA, 282 bp, Glycine max
aaaatgcccactttttttcttccaacgctcctcctccttctcatagccttcgccacctctgtctccggccgccgtgacctcgtcggagactttctccggctgccctccgaaactgataacgacgacaacttcaagggcacccggtgggccgtcctcctcgccggttccaatggttactggaattacagacatcaggctgatgtttgacacgcctatcaaatattgaggaaaggtggtctgaaagaagaaaatattattgtctttatgtatgatgacattgca

SEQ ID NO: 182591 - DNA, 278 bp, Glycine max
agagagcaaactggtaacatgtacaagaatgtgaagaggaagattgagagaggtgttgccttcccgacatgtgtgtctgtgaacaacactgtctgtcacttctctcctcttgccagtgatgaaacagtgttggaagacggtgatatagtgaaaattgacatggcttgtcatatagatgggttcattgctgctgtggctcacacccatgttcttcatcaggggccagttacaggacgggcagctgatgctattgcagcagcaaacaccgccgccgaagt

SEQ ID NO: 182592 - DNA, 281 bp, Glycine max
cagagcacctactcactcgtaaatggcgaggaagaagatcagagagtaccactccaagaggcttctcaaggagcatctcaaacgtctcgcctctatcgacctccaaatcctctcagctcaggtgacagaatctacggatttcactgagctgacagaccagcatccatggctttcgtcaaccagattggtcgtcaagccagacatgctgttcgggaagcgcggcaagagtggcttagttgctctcaatttagacatagctcaagtcgccgagttcgtcaaag

SEQ ID NO: 182593 - DNA, 281 bp, Glycine max
accgttcgcaacacgatcactattctgcgacgatggtggcacattcgagttcttggggaagggcactcgtcgcgatctcgccctacaccttctccgccatcggcatcgccgtcgctatcggcgtctccgtcctcggcgccgcctgggggatctacatcaccggaagcagcttgatcggcgctgcaatcagggctcctcgaatcacttccaaaaatctcattagtgtaatcttctgtgaagctgttgctatatatggtgttattgtggctattattcttcaa

SEQ ID NO: 182594 - DNA, 278 bp, Glycine max
ggttgtttgggaatgcagccccaatcgggcggtaaattccgtccaaggctaaatactggcgagagaccgatagcgaacaagtaccgcgagggaaagatgaaaaggaaaaggaaaaggagagtggtgctcattgatatttaagattgagacaaggcttttttgttggttggagatgcatgattgtggtgtgctttgttttcatttcatcatatgacagccttgtgggtttctttggtgtttcttgatgcatacttaatttactttattattgtgtattt

SEQ ID NO: 182595 - DNA, 278 bp, Glycine max
cgaggatatatcaagctcctctgaagccgttatctgacaatggggttgttgtaaccatttggtatcgtgcacctgagctgcttcttggagcaaaacattataccagtgctgttgatatgtgggctatgggatgcatttttgctgagttgttgaccttgaagccactatttcaaggggcagaagtcaaagctacatcaaatccctttcagcttgaccaacttgacaagatatttaaggttttaggccatcccacattagaaaagtggccttccttagca

SEQ ID NO: 182596 - DNA, 283 bp, Glycine max
cggctcgagtagttaaatccttctgctctgcgtcttcttgttcctctcgcccagaatccgagatcaaccctgacccctaaggccaggggtttttctcggcttcttcagattcctgaaatggcgtctgtttcagctttagccaagtacaagctcgtcttcttgggtgaccaatccgtgggcaaaaccagcatcatcactcgcttcatgtacgataaattcgataacacctatcaggctacaattggtattgattttctatcaaaaactatgtatctcgaagatc

SEQ ID NO: 182597 - DNA, 284 bp, Glycine max
ctaaaccaaacctctcactcgccgtcgtagggtttctcctttcgtttagcaacaacaacaatggttgcagccaagaaaaccaagaagacccatgagagcatcaacaacaggctcgctcttgtcatgaagagtggaaaattcaccctcggttacaagatggttctcaaatcacttaggagctccaaagggaaattgattatcattgctaacaactgcccccctttgaggaaatcagagattgaatactatgctatgttggccaaggttggagttcatcattacaa

SEQ ID NO: 182598 - DNA, 281 bp, Glycine max
gtctgatatatctgattttgaatttgacccttgcggatattcaatgaatggaatagaagggagtgctatatccaccatccatgtcactcctgaagatggtttcagttacgcaagttttgaagctgttggttatgactttaatgacatggctctaggtgaacttgtggaaaggattttagcttgcttttgtccagcagagttttctgttgctttgcacattgacatgcagtctgagaaacttaataaatttcccttagacatcaaaggatactactgtggtg

SEQ ID NO: 182599 - DNA, 280 bp, Glycine max
gcgcagttccctacctctcctttcaagatgcagatcttcgtcaagaccctcaccggaaagaccatcacccttgaggtggaaagctctgacaccatcgacaacgtcaaggccaagatccaggacaaggaaggaattcccccggatcagcaacgtctcatcttcgccggaaagcagctcgaggacggccgtaccctcgccgactacaacatccagaaggagtcaacccttcaccttgtccttcgtctccgtggtggcatgcagatcttcgtcaagactctca

SEQ ID NO: 182600 - DNA, 275 bp, Glycine max
ctcttttaaccaggccgtcggcgccaccactcccttcttcaccgccgttttcgcttacgtcatgaccttcaagcgcgaggcctggctcacctatctcaccctcgtccccgtcgtcaccggcgtcgtcattgccagcgggggtgagccgagcttccatttatttgggttcatagtatgcattgcagctactgccgcacgtgccttaaaatccgtgttacaaggaattttgctttcttctgaaggagagaagttgtattctatgaaccttcttcttt

SEQ ID NO: 182601 - DNA, 277 bp, Glycine max
atttttcagtattttgttatggatgattttcgtggtcctccccaccttcagggtccttcccccaccctcagggtgaacgtaacgcttgggcctcaggtggacagaatgatgatatctggactgcacaccgttgaagacatattttgttgcagctgtggacaacctcttggatggaaatatgttctgacacatgaaaagaatgaaatatacaaagaagggaagtttgtgcttgagaggtggacgatagttgacaatgaagaggaggaattgaattctg

SEQ ID NO: 182602 - DNA, 280 bp, Glycine max
cggctcgagccgccctttttttttttttttattattccattttccccctctagtagtcagtgctacgaagctgctcgtgggtgtggctgatgaagaaaacctcgtagataagcccagcaattccacctccgatgagagggccggcccattagatccagtggttggtcaaggtcaagttcacgaaagcaggcccaaatttcaaagcagggttaatggttgctccggaaaaggccccacccaaaaaaatgttagcgccaaaaatgaaaccaatggcgatggg

SEQ ID NO: 182603 - DNA, 278 bp, Glycine max
gagaacctgcttggccttttgagggttcgcgtgaagcgtggtgtcaaccttgccgttcgtgatgttcgaagcagcgacccctatgttgtcatcaagatgtaccgccagaaactaaagactcgtgtgattaaaaaggatgtgaatcctgagtggaatgaagaccttactctttctgttataaatccgaatcacaaagttaaactgactgtgtatgatcatgacacttttagcaaagatgacaaaatgggagatgcagaatttgacatcttgccctttat

SEQ ID NO: 182604 - DNA, 276 bp, Glycine max
aaacagcagtgatagagctccaaaatagattgaaagcaagtaccatggaggtaaagatcttcaatctaaaggttaagaccttacagtctgagaattggagattgaaggaacaggttgctggtcatgcaaaagtgctggctgagctggagactgccaaagcgcaagtcaaattgctcaataagaaaattaggcacgaagctgaacataatagggagcagatcataactcttacgcagaaagtttccaggttgcaagaccaagaatgtaaagatgttg

SEQ ID NO: 182605 - DNA, 279 bp, Glycine max
gaaggattgaagtttctgtctttttctgatctccgcgtgcgtggtttggttttgttgttgaagatgttggtagctaatagctttgatctatggcgaaaggacgcttttttctctgcggcggaagaggtgcaggaatcagctgatatgtacgttccccgattcgtctctttgattcacggttcctgttttggacccctttcagttgtttttcattggcttaatttaatcacaagattagaatggaatctgcatacagggcatggttgagagagaagagag

SEQ ID NO: 182606 - DNA, 279 bp, Glycine max
cacaatatcttaaggagttatctgtgaaggatccccaagcattcatttgccatttttacaatatctactttgctcattcagctggtggtcgaatgattgggaaaaaggttgctgaaaagttacttaacaacaaggcgttggagttctacaaatgggatgatgaccttccacgattgttgcagaatgtgagagacaagttgaataaagttgctgaaccttggagtcgggaagaaaaggaccactgtctggaagaaacagaaaaatcattcaagctctctg

SEQ ID NO: 182607 - DNA, 226 bp, Glycine max
  unsure (1)..(226): unsure at all n locations
ttctcgctgtttgcggtccttcactcgccttttctcacttgtccccgtctnctccgatcttgtacgatcatcatctgccggcccttgagatggtcctgctttcggattcgatctcggttccacctacccccccgtcggattgtggcaccactaccgtgtcgacatcatcgcccatgaccagggttacagaaccacgccgtcttacgtcgctttcactgcttccgag

SEQ ID NO: 182608 - DNA, 270 bp, Glycine max
gctcgagacaagccaagtgaaagtgagaaaaaataaaaatcaaagagcataatgtcagggatcattcacaagattggggagacccttcatgtgggagggcacaagaaggaggaggagcataagggtgagcaccatgctggagaatacaaaggggagcaccatggtgaacacagtagtgagtacaaaggagagcatcatggtgaacacaaagctggagagtaccatggtgagcacaagccagagcacaaagaggggttcctagacaaagtc

SEQ ID NO: 182609 - DNA, 276 bp, Glycine max
tctcgagccgaatcggctcgaggttgtgttgtgttgagcagagagactgatcaagaaaggatacgaagaaagagggaatagggctagggttagggttagggttaggttgaggatgccgaagaacaagggaaagggaggtaagaacaggaagaggggaaagaacgaggcggacgacgagaagcgagagctggtgttcaaggaggacgggcaggagtacgcgcaggtgctccggatgctgggtaacgggcggtgcgaggcgatgtgcatcgacgggac

SEQ ID NO: 182610 - DNA, 275 bp, Glycine max
ggagcatgaacccaaggttgggtgattttggtttggcaaagcttatggatcatgacaagagtcctgtttcaacactaactgcagggacaatggggtacttagctcctgagtatcttcagtgtggaatggcaaatgagaagactgatgtgttcagctatggtgtggtggttcttgaggtggcttgtggaaggaggccaattgaaagagaggggcagaagatggtaaatttggtggattgggtttgggggttgcactctcaagggacgatcattgag

SEQ ID NO: 182611 - DNA, 274 bp, Glycine max
ttcgcaccttcgaaaatcaattttctgtcttctctgcgtcttcttcctctatcaatcgttttccatggctcgtaccaagcaaaccgctcgcaaatccaccggtggaaaggctcctaggaagcaactcgccaccaaggctgcaaggaaatctgcaccgacaaccggtggagtcaagaagcctcatcgctatcgccctggaactgttgctcttcgtgagatccgaaaataccaaaagagcacagagcttctgatccgcaagctccccttccagcgt

SEQ ID NO: 182612 - DNA, 272 bp, Glycine max
cggctgaagatctcgattagccgaaaattgcaagaacggcttcaggctcttgcgatcaacaaacgcagcgttttgatctcagatttgagggggagagaatggcaacaacagtgagaagtctgaagataaagacaagtacgtgcaaacgtatagtgaaggagctgcattcttatgagaaggaagttgagagagaagctgccaaaacagctgatatgaaggaaaaaggagccgatccctatgatctcaagcaacaggaaatgtcttggctgagt

SEQ ID NO: 182613 - DNA, 274 bp, Glycine max
tctttttcttctctctcaacaacttcaccttcttcctcctcgatcatgtctcacttcaagggcaagtaccatgatgagcttatcgccaatgctgcgtacattggcactcctggaaagggtattcttgctgctgatgagtcaacagggacaattggcaagcgtttggccagcatcagtgtagagaacattgaatccaacaggcgagctcttagggagctgcttttcactgctcctggtgttcttcaatatctcagtggtgtcatcctctttgagg

SEQ ID NO: 182614 - DNA, 276 bp, Glycine max
cggaggtaaaaaaatacgacaaggagcgaagagtgtgggttaccattgggagactacctgagcgagcagtgtcaatgaatggttggggtcttgccttcagggcatgtggagatatgcttattgtcatcagtggaccaaggactcatggtgagggttttattgaactcaattcatgggtgcccagtgaaggacctccacagtggaatctactcgccagaaaacggtctggcaactttgtctataattgtgctgtgatgggatgttgaagaattgaat

SEQ ID NO: 182615 - DNA, 276 bp, Glycine max
cggctcgagcaaacattcaacactcacttgttgctctattcgtaattcagacctcaaactatctcagactcagagacttgtccatcacttcaatcccaaaactcccatagaggaagccgttactcccccaacatcatggtacactcatccctctttcttccaccttgagctcgatcttgtcttctacagaggctggcaagttgtgggatccacagagcagataaaggatccccgtgactatttcactggaagactaggagatgtggaatatgtggt

SEQ ID NO: 182616 - DNA, 274 bp, Glycine max
ttctgaatggctttttcaagagttgcattgttaatatgcacggtaattgggtattttgtgcttgcctctgcgggcaatttttaccaagattttgatatcacttggggagatgggcgtgctaagatactcaacaatggcgagcttctcactctgtctcttgacaaagcctctggctcgggtttccaatccaagaacgaatacctttttggtaaaattgatatgcaactcaaactagttccaggcaactctgctggcaccgtcacagcctactact

SEQ ID NO: 182617 - DNA, 274 bp, Glycine max
gtgagatttgcgaatctgagaaatggcggattcttctcgggaggagaacgtttacatggcgaaattggcggagaggccgagcgttacgaggagatggttgagttcatggagaaggttgcaaagactgtggaggttgaggagttgacggtggaggagaggaatctcctctctgtggcttacaagaacgtgattggtgcgaggagggcttcgtggaggatcatatcctccattgagcagaaggaggagagcaggggcaatgaggaccacgtggcca

SEQ ID NO: 182618 - DNA, 272 bp, Glycine max
gaggaggtggacctactcatcttgctattctgtctcaacctccagacacaatccatggatcacttcgtgtgacagtccaaggtgaagtcattgagcaatcatttggagaacaacacttgtgttttagaacactacaacgtttcactgctgccactctagaacatggcatgcaccccccgatttctccaaaaccagaatggcgtgctttgatggatcagatggctgtcattgctactgaggaataccgttccattgtattcaaggaaccacgc

SEQ ID NO: 182619 - DNA, 276 bp, Glycine max
cttccgcgctaattttagggtctgagcaatctggttggtagaacctcttggtcttagagagtcaagttttatgtctggattagacgatcaaattcctactgccttcgatccttttgctgatgcaaatgctgatgactcgggtgctgggtcaaaggagtatgtgcatattcgcgttcagcagcgaaatggtaggaaaagcctgacaaccgttcagggattgaaaaaagaattcagctataacaagatacttaaagacgttaagaaagagttctgttg

SEQ ID NO: 182620 - DNA, 275 bp, Glycine max
aggagatggaactcagaagggtgcatctgcaatttttgaggaagtcagaaggcgtggtctcaaagtttcagttgtaggtatccccaaaaccatagataatgatatcccggttactgataagtcctttggctttgacactgctgttgaggaggctcaacgagctataaatgcagcacatgttgaagctgaaagtgttgaaaatggcataggtgttgtcaagttgatgggtagaaacagcggatttattgcaatgtatgctacacttgcaagtcgag

SEQ ID NO: 182621 - DNA, 273 bp, Glycine max
gaaatgtgatgttgatattagaaaggatctgtatggaaacatcgtgcttagtggagggtctactatgtttccgggaattgctgatcgtatgagcaaggaaattggtgctcttgcacccagcagcatgaaaatcaaggtggttgcacctcctgagagaaagtacagtgtctggattggtggctctatcttggcatcacttagcaccttccaacagatgtggatctctaagggcgaatatgatgaatctgggccagctatcgttcatcggaagtg

SEQ ID NO: 182622 - DNA, 274 bp, Glycine max
  unsure (1)..(274): unsure at all n locations
ctctattagtctgcatgctctgcaaactgagcatggctcctctcgcattttccttcttcttcatccttatcacattcttttcttcatcatctgaagcgggatccgttggaataaactatggaagggttgcgaacgatctacctacaccagcccgagttgtggagcttctgaaggcacaaggtctgaaccgtgtgaagctctacgacaccgacgccaccgtcttaaccgcgtttgcaactcgagatnccaaggtcgtagttgccatgccaaacga

SEQ ID NO: 182623 - DNA, 278 bp, Glycine max
gagcaggaccaccgcaaaaaagttctccgcgaactcaactccctgatctccggctcctcctcctcctccgccgcctccgacgacgtcgacgaggaggtcaccgacaccgagtggttcttcctcggtctccatgacgcagtccttcgtcaacggcggaggacttcccggacaggccttcttcaactccgctccggtgtgggtcaccgggggcgaccgtctctctgcctcggcctgcgagagggcgaggcagggacacgtgttcgggctgcaaaccctgg

SEQ ID NO: 182624 - DNA, 278 bp, Glycine max
aaacctcttctttcaggtccaattcactcgcttattcttttctttccatacacatgcagacaccaagttcgaacaagttcaggactggcatggacttctttcaccgcgcgaaggcggtgcgcctccgcagccaccacgacaagtacctcctcgcgtgaggacgacgaggattcggtgacgcaggaccgcaaaggctcctcgaaaagcgcgcggtggacggtagaatacgtggctgaatacgataacataattcgcctgaagagctgttacggcaagta

SEQ ID NO: 182625 - DNA, 279 bp, Glycine max
attctcttcaacctaacgcagcatcgctatactcttcattccatggctttgcccaatcagcaaaccgtggattaccctagtttcaaactcgttatcgtcggtgatggtggcacaggaaagacaacctttgtgaaaaggcatctcaccggagaattcgagaagaaatatgagccaaccatcggtgtggaggttcacccattggattttttcacaaactgtggaaagattcgattctactgctgggatactgctggacaggagaatttggtggcctcagag

SEQ ID NO: 182626 - DNA, 280 bp, Glycine max
gttgggaatcgatgattttgatatggaagaagaggtgagacccgatttcccttgcccctattgttatgaagactttgacatcgcgtctttgtgttctcatcttgaagatgaacattcttgtgaatcaagagtcacgatttgtcctatatgctccgataaagttgcacggaacatgttaagtcacataacgctgcaacatgggcatttattaaagttacagagaaggcgcaggttaagaagagttgctattccaaacagtcagacattgtcccttttgggt

SEQ ID NO: 182627 - DNA, 266 bp, Glycine max
ctcattcacaatcccaaattcccaattctctcttccttctccacaccaattgacacctccctaacccccaaattctccttcagcgattcatctctcttgaatcgaatcgatggcacggatgggcccagggttccgattccaccccaccgacgacctgctggtggtgttctacctgaagcgcaagatgaccggaaacctctcccgctacgaccacatcgccgttgtcgacgtctacaagctcgagccctgggaccttccccctctgt

SEQ ID NO: 182628 - DNA, 267 bp, Glycine max
gagagagagagcgagcagtttcagacacagagagaggggtttgggattggagggattgacgctgcgtctcttcctcttctctttcgatccatccctcattcctaatcctccaatccaaccacctcagcctcacactcacatatacacatatctgaacgcgtatcgtccctcctatggcttcaaagcgcatcctcaaggagctcaaggacttgcagaaagacccaccaacttcttgcagcgctggtccagtagctgaggacatgttcc

SEQ ID NO: 182629 - DNA, 245 bp, Glycine max
cttacaagttacatccattgagaaacatgaaggtctcccccttagcattttcaatcctttttttgtccttcaccatagaactcttcattggcattgcttcagcagcacaagaaccagtgcttgacacctcaggccagaagctgagaacaggtgtcaagtactacattctaccagtcttcagaggcagaggtggaggcctaacagtttcaagcagtggcaacaacacatgccccctctttgtggtg

SEQ ID NO: 182630 - DNA, 146 bp, Glycine max
gaaacagcgaaagtgaaataccactacttttaacgttattttacttattccgtgaatcggaagcggggcactgcccctctttttggacccaaggtcggcttcggccggtcgatccgggcggaagacattgtcaggtggggattttg

SEQ ID NO: 182631 - DNA, 185 bp, Glycine max
ctttgttcactcttcttctcttgcggctagggttttagcgcagttcttctagatttaaggaagatgggtaaggaaaaggttcacatcagtattgtggtcattggccatgtcgactctgggaaatccactaccactggtcacctgatttacaagcttggaggcattgacaagcgtgttattgagca

SEQ ID NO: 182632 - DNA, 210 bp, Glycine max
ggctgagctatattatgctggaagctatggcatggatattcaagggccaacaagagactgcaaatacagcaaagacaaaggagagccagttctttttcaacctgccagtgaatttcttcccatgattgatgaggtgcaccatcaattagttgagaaaatgaaatcaattcctggagccaaggtggagaacaataagttctgctgttctgt

SEQ ID NO: 182633 - DNA, 257 bp, Glycine max
acgcgaacgcaggcattcggctcgagaatttaacagttttagggcacaaattggcaatgcttcctgtggagcccaaacttggcaagatgctcattttgggagcaatcttcaagtgtttggatcccataatgacagttgttgctggtcttagtgtaagagctccatttgtgatgccgtctgacaagaaggatcttgcagagtctgccaaagcccaattagctgctcgtggctatagtgatcatctggcactcatccgg

SEQ ID NO: 182634 - DNA, 246 bp, Glycine max
gcgccacctcccagtttgccgccgtccctctcaacctctgctcctcccccgactccgccgtcgactacgtcgtcaccggctcctggagcgacaaggccgccaaggaggcgcagaagtactgcaagcccaccgtgatctggtctgggaaacccgaaaagtacacaaagatcccatcttttcacgatttggagcagaacaacaattctgggtatcttcatatctgtgccatgagcacctccatggggt

SEQ ID NO: 182635 - DNA, 266 bp, Glycine max
atcaccctcgcgccctcgctcttcccttcctggtggcgacaatgtcgactcctgctaggaagaggctgatgagagacttcaagaggctgcaacaagacccgcctgcagggatcagcggtgccccccaggataacaacataatgctgtggaatgctgtcatatttggtcctgatgatactccatgggatggaggcacgttcaagttgactctccagtttactgaggattatccaaataaaccaccaactgtgcgatttgtgtctcgc

SEQ ID NO: 182636 - DNA, 210 bp, Glycine max
ccaatcctgacacggggaggtagtgacaataaataacaataccgggctcattgagtctggtaattggaatgagtacaatctaaatcccttaacgaggatccattggagggcaagtctggtgccagcagccgcggtaattccagctccaatagcgtatatttagttgttgcagtcaaaactcgtattggacttgggtgggcgatcggtcgc

SEQ ID NO: 182637 - DNA, 221 bp, Glycine max
gccaaatcattcccacaactagagtgtacggtgtttgatcttccacatgttgttgccactttacaaggaagtgagaacttgaaatatgttggaggggacatgtttgagtcaattccttctgctgatgccattctcttgaagtggatattgcatgactggacatgatgagcagtgtgtgaacatactgaagaaatgcacagaggcaataaagagccaggtga

SEQ ID NO: 182638 - DNA, 125 bp, Glycine max
cttatggtggatacctaggcacccagagacgaggaagggcgtagtaagcgacgaaatgcttcggggagttgaaaataagcgtagatccggggattcccgatataggtcaacctttcgaactggtg

SEQ ID NO: 182639 - DNA, 254 bp, Glycine max
ctcgaccccagaagtggtttctgcagctccaattcaatcttctacagcaagcgtaaccgcctcccactccctcccaacaacgccccccccgtcaccaccttcatctcctcccgcgcccaccgcgccaccacagccttcgtcgacgccgccaccgcccgccgcctcacctacacccagctatggcgttccgtggagggcgtggcagcctctctctccgtggacatggggatccgccagggcaacgtggtcctcat

SEQ ID NO: 182640 - DNA, 216 bp, Glycine max
ctcgagccgctcactcacaaacacacactgaactaaaaaacatcaaaagagacatggctgagcaaaccttcatcatgatcaagcctgatggcgtccaaagaggccttattggcgagatcattagcagatttgagaagaaaggtttctacttgaaaggtttgaaacttgttactgtggaccgtccttttgctgagaagcactatgctgatttgtctg

SEQ ID NO: 182641 - DNA, 220 bp, Glycine max
attaaagataagattatattgctaagaagacaaaatatgaaggttgtctacttgcttgttgccctcttggctttgacatcaactgttgtctctgcctatgaccctagtcctctgcaagatttttgtgtggcagccaaagaaaaagatggtgtatttgtgaacgggaaattctgcaaggaccccaagcttgtcaaagcagaagatttcttcagacatgtgg

SEQ ID NO: 182642 - DNA, 206 bp, Glycine max
ctctcgagccgaatcggctcgaggaaagatgtcaagaattggcagcacttcttgtgtgttgcagttggtctttgggcaggtcttattattggatttgtaactgagtactatactagcaatgcatatagtccggtgcaagatgttgcagactcctgcaggactggtgctgcaactactgttatatttggccttgccttgggatacaa

SEQ ID NO: 182643 - DNA, 265 bp, Glycine max
tttccctacctctcccttcaagatgcagatcttcgtcaagaccctcaccggcaagaccatcacccttgaggtggaaagctctgacaccatcgacaacgtcaaggccaagatccaggacaaggaaggaatccccccggaccagcaacgtctcattttcgccggaaagcaacttgaggacggccgtacccttgctgactacaacattcagaaggagagtactcttcacctcgtcctccgtctccgtggtggcatgcagatcttcgtt

SEQ ID NO: 182644 - DNA, 259 bp, Glycine max
tggtgatgttgttgtcaagaatcaggatttcatcgaggctacccgagaacgaagtctttcctttgtgttagctaagtttgatggattacttgggcttgggtttcaggagatctcagttgaaaatgctgtgccagtatggtacaatatggtgaagcaaaatcttgtaagcgaacaggtgttctctttttggctcaatggtgatccaaaagcgaaagatggtggtgaactaatttttggaggtattgatcctaaacacttc

SEQ ID NO: 182645 - DNA, 267 bp, Glycine max
gtcgctgctcatcctccataacctccgagctctacaccgaagaacgaagccatggggaagacacatggaatgggagctgctcgcaagctcaagtctcaccgcaggaggcaaaggtgggctgataagtcatacaagaaatcccatcttgggaatgaatggaagaaaccttttgccggttcatcccatgccaagggaattgtccttgaaaagataggtcattgaagctaagcagcccaactctgctattcgtaagtgtgccagagttca

SEQ ID NO: 182646 - DNA, 217 bp, Glycine max
cgcaaatatgtttttcgtggacatgttgctgcctatatgaagatcttggcagaagatgaaacagagaaataccagtcacacttcagcgaatacatcaaacgtgggatagaggctgatggtattgaggcactttacaagaaggttcatgctgccatccgtgctgatcctactctcaggaaatctgataaggagcccccgaaggagcacaagaggtaca

SEQ ID NO: 182647 - DNA, 260 bp, Glycine max
ctcgagccgatcaagtaatcattcacacaattcctaccctactgtcccaccagttgaccattctagcacggtggatctttctggtcagacttctgttacattgacaagggcttggagccaaatgaacatatctccagctaatggaagggtgttattatcagatacaggtgcttttggtcttgaaacaagtcacttccttgttggaagtggtgctactgctagcaatgctgcttctgtagatgttgggggattccatcatg

SEQ ID NO: 182648 - DNA, 252 bp, Glycine max
aagcaacgaggcttccatggttaagtcccttgtagcagacaggctctctttattagttcaaaccacttctgctgtcatcattgcaatgatcataggccttgctgtggcttggaagctagctcttgttatgatagcagtgcaaccactcacaatcctttgcttttatacaagacaagtgttgctctctacactctcaacaaaatttgttaaggcacagaatcaagttccccaattgccatggaggcagtttat

SEQ ID NO: 182649 - DNA, 262 bp, Glycine max
gaggagttgcggttaaggatccatctgctccccatggagttcggcttttgattgaggactatccttatgcttctgatgggctagagatatgggatgccatcaagtcctgggtgcatgaatatgtctcattctactacaagtcagatgcagcaattcaacaagatcccgagctccaagcttggtggaaagaacttgtccaagtgggtcatggtgatttgacagataagccatggtggcaaaagatgcaaactcgtgaagagtt

SEQ ID NO: 182650 - DNA, 241 bp, Glycine max
aaaatataacaaataatttgtactttcatcaaaacaaaatcccgttgtatttttctcagatggctcgaacgaagcaaacggcccgcaagtccaccggcggcaaggcgccgcggaagcagctggcgactaaggcggctcgcaagtcggctccggcgaccggcggcgtgaagaagccgcacagattcaggccgggaaccgtggcgctgcgcgagatccggaagtatcagaagagcacggagct

SEQ ID NO: 182651 - DNA, 266 bp, Glycine max
ctatcgagccgaatcggctcgagcgtgcatgattacagagacagagattataggagaagaagtcgcagcagaagttatgataggtatgaacgtgacaggcatcgtgggagagacaaagattatcgtcgcagaagtaggagccgtagtgccagtcttgattacaagggtcgtggtagaggacgctatgatgatgagcgtacatagtagaagccggagcagatcagttgatagccgctcccctgcacgacgcagtctagtcctcgaag

SEQ ID NO: 182652 - DNA, 256 bp, Glycine max
cttccctcgagcccaaaaccgcgtcgttcactcacaacgacggccgttccgtcaacctcctccaggacgacggcaccatccccatgacgttccaaggcgtcacctacatcatccccgtcgtcatctggctcatggagtcctaccctcgccacccgccctgcgtctacgtcaatcccacgcgcgacatgatcatcaagcgccctcatcctcacgttaacccttctggcttggtttccgtcccttacttgcagaattg

SEQ ID NO: 182653 - DNA, 259 bp, Glycine max
aagcgagaagcgagaagcgacatggatccagacgcgttggcaaaggcattcgtggagcactactactccaccttcgacaccaaccgcaacaatctcgccaatctctaccaggaaggttccatgctctctttcgagggtcagaagatccagggctcccacaacatcgtcgccaaactcacctcccttcccttccaacagtgccagcactccatcaccaccgtcgattctcagccctcaggcgtcaaacgcgccatgctcg

SEQ ID NO: 182654 - DNA, 222 bp, Glycine max
cggacacaaacgttgtcactacgaaggtaacggtaacggaaataacaacaacagtaacagcgttgtcaccgtcgcctcggaaggcgtggggtccacccacactgtcagtcacggccaccaccgcgacttcgatctcaacatcccggcctttccggatttttcgaccacaggtcggagaagacgaggttgagagccctcaccctgtcatgaagaagctcgctc

SEQ ID NO: 182655 - DNA, 209 bp, Glycine max
cctcagccatgtccttgcaaccaaacttggtgctcgcctcacagaggttaggaagaatggcacctgtgcttggttgaggccagatggtaagacacaagtaaccgtcgagtactacaatgacaatggtgccatggttccagttcgtgtccacactgtcctaatttccacccaacatgatgactctgtgagcaatgatcaaattgctgcgg

SEQ ID NO: 182656 - DNA, 259 bp, Glycine max
gatttgtaagcggtcgccagagaagttgtttcgcattttggacatgtatgaggctttgagggatgctatgcctgatttgcaggcaatggtttctgatgagtttgtgattggtgaggccaatggagtgctgagtgggcttggtgaggctgcaaaagggacttttgctgagtttgagaattgtattaggaatgagacttccaagaagccggtcataaccggggatgttcatcctttgcctcgttatgttatgaattatctc

SEQ ID NO: 182657 - DNA, 263 bp, Glycine max
cagaattctctaaaagagatctttttctgctctttgaagaaagaagggtctttgctagattttggagatgtctctgctctcagatctcatcaaccttaacctctccgataccaccgcgaaggtgatcgcagagtacatatggatcggtggatcaggaatggacctgaggagcaaagcaaggactctcccaggaccagttagcgacccttcagagcttcccaagtggacatatgatggttccagcacaggtcaagctcctggtg

SEQ ID NO: 182658 - DNA, 181 bp, Glycine max
ctcgagccgtcggctgcagctggtgaatcgactgtgttttactatacgatgaaaggagattattatcgttatcttgccgaatttaaggcaggcaatgagaagaaggaagctgctgatcagtctatgaaagcatatgagtctgctaccactgcagcagaggctgatttacctccaacacatc

SEQ ID NO: 182659 - DNA, 260 bp, Glycine max
gttttctggtcagagattctatgatgattggtttcagtcattatataatgttatcttcacagcacttcctgtaatcattgttggattatttgacaaggatgtcagttcatctctatccaagaaatatcctgaactatacatggaaggaataagaaatgttttcttcaaatggaaagttgtggccatatgggctttcttttctgtataccagtctctaatattcttctattttgtgagtactacaaatttaagtgctaaaa

SEQ ID NO: 182660 - DNA, 234 bp, Glycine max
atagtttccaaaggcacgcagcgagtttaggcgcggcgggatcatcacgagattgcaaaatgaagttcaacattgcaaatcccaccactgggtgccagaagaagctggaaatcgatgacgacctgaagcttcgggcattttgggacaagaggatctcccaggaggtccttggtgacgccctgggtgaggagtttaaaggatatgttttcaaaatcactggtgggtgtgacaaac

SEQ ID NO: 182661 - DNA, 133 bp, Glycine max
tgccagtagtcatatgcttgtctcaaagattaagccattcatgtgtaagtatgaactaattcagactgtgaaactgcgaatggctcattaaatcagttatagtttgtttgatggtatcttctactcggataac

SEQ ID NO: 182662 - DNA, 298 bp, Glycine max
tgcagactcagcctgtggaggaattttaccgttcgagaggaaaattattggagtttaacctgcctggaggaatcccggaatcttggcctaagttgctacatgctcttaatcttgatgattacgaggacaaacgatctgctgcagcataaagatataataatgtatcataacagtaagtatttcattctttgcgtgcttatattgcatgcttggcaattttgcaggacagagaaccacagcaagggaacttctctgctagtattattttggaccaatgatgatatttgtaagtgttgta

SEQ ID NO: 182663 - DNA, 299 bp, Glycine max
attaacacacacaaacagaggctacgtacgatcaaattaattaagatggcggaagtgaggaacaaacaagtggttctgagggactatgtgagtggttttcctaaggaatccgacatgaacatagttgaaggaaccacaatattgaagcttccacaaggttccaatgatgtgcttctaaaaatctctacctttcctgtgacacttacatgagaatgctcatgaccaaggtggaaggcctcgacgtgtttggcacctatacacctggctcctcattaacagggtatggagtgtccaaagtc

SEQ ID NO: 182664 - DNA, 299 bp, Glycine max
aaacatttctcattcctttgaagcatgccggggttaacgtgcaacgcttgtaacaccgaattcaaagatgacacagagcaaaagctccattacaaatccgagtggcatcgatacaatctcaagcgcaaggtggctggggttcctggggtgactgaagctctatttctggctagacaatctgtgcttgctcaagagaaaaataaactgggtgaaactcccatgctctactgctgtggtctttgtggaaaggattataaaagttccaaggctcatgctgagcaccttaaatcacgtggtca

SEQ ID NO: 182665 - DNA, 298 bp, Glycine max
cgagccatttgggagttaggttctgcacgctctgcttccagcgagtgttctttcttcgtttcaacaccttaatttgcacacgctgcttcttcagcttgagaaatggcacaagaaacctttctattcacatctgaatctgtaaacgagggtcaccccgacaagctgtgcgaccagatctctgatgcagtgctcgatgcgtgccttgaacaggaccctgacagcaaggttgcctgtgagacatgcaccaagaccaacatggtcatggtctttggagagatcacaaccaaggccaacgtag

SEQ ID NO: 182666 - DNA, 295 bp, Glycine max
ctttgtgttcccaaaaggtttggtgcactatcagaagaacaatgcggataagcctgcttctgtgctttctgccttcaacagccaactccctggcacagtgtctatagctgcaactcttttcacttcaacaccaactgtgcctcataatgttctttctcaggccttccagattgatgctaaactggttgatgacatcaaggccaagcttgctcctaagaagacttaatttatgttgagcttatgatattccagagaggaagattatgataatagtttcataattaagactactttc

SEQ ID NO: 182667 - DNA, 286 bp, Glycine max
gatagcttgaggctcagatgtcgtattgctccatcaatatgcttgtcaccggcagctttaagtggaagtcaaggtgtgtatcctcttgtggttgctgctcatcctctagaacccaaccagtttgcggttgggttgacggatggatctgtcaaagtgatagaaccgaacgagtcagagggtaagtggggaacctgcccaccaacggacaatggaatattgaatggtagaacaggatcatcatctacaacaagcaaccacactgctgatcaggctcaaagataaacga

SEQ ID NO: 182668 - DNA, 284 bp, Glycine max
gagacattgaaactgagctgtccactgctgctcttagtccacagccgtttggggtgccaggcattccttttaagcctggatgctcaagtgatattgccatcaatgatcctggggttttgaataatggcttgtgggctaatcagactcaacgaatgcgaacatatactaaggttcaaaaatgtggctctgttggaagatgtattgatgtcacccgttacaaggggtatgatgaactccggcatgatttggctcggatgtttgggattgaagggcagctagaagat

SEQ ID NO: 182669 - DNA, 151 bp, Glycine max
attttgaggaatcaatgaaatatgctcgaaggagtgttagcgatgctgacattcgcaagtaccaggcattcgcccaaacattacagcagtctagaggatttggaagtgagttcaggtttgcagattccacctccgccggtggtacagctgc

SEQ ID NO: 182670 - DNA, 294 bp, Glycine max
ctcggcgtcgccatggacgaagaagaggtgcgcaagatcttcagcaagttcgacaagaacggcgacggcaagatctcgtgcgcggagccgaaggagatgatggcggcgctgggatccaaaacgacgtcggacgaggtgaagcgcatgatggcggagctggaccggaacggcgacggctacattgatttgaaggagttcggcgagttccactgcggcggcggtggcgacgggagggagctccgggaggcgttcgagctgtacgatctggacaagaaaggctgatctcggcgaaga

SEQ ID NO: 182671 - DNA, 285 bp, Glycine max
cgccacctctggttgccgttgtaaatgcccaactctatgctgctgattatgctgacatggaggtaagcaaatacgacaaggagcgaagagtgtgggttaccattgggagactacctgagcgagcagtgtcgatgaatggttggggtcttgcattcagggcgtgcggagatatgcttattgtcatcggtggacccaggactcatggtgagggttttattgaactccattcatgggttcccagtgaaggactccacagtggaatctactcgccagaaacggtctggc

SEQ ID NO: 182672 - DNA, 254 bp, Glycine max
  unsure (1)..(254): unsure at all n locations
caacccacaagaatccctccctttctggctttctctctctaaaactatcatgtcctccaccgcggctcccgtccttcccatatccaacccccaaaccaccgccgcacgcnggcgccatcgaggctccggcgaacaacccggccttccgcgccttcatcaacaacctctccgcgtccctccgacacggcctcgaccagcgccgcccgtggtcggacctcggggaccgctccgagttctcgaagcccgagtccttc

SEQ ID NO: 182673 - DNA, 294 bp, Glycine max
caatttaccagctatacttgttccttttgaaggttagaagtgctacaatacaaacaatggcagctactcaggaagatgtgaagcttttgggtattgtgggaagccatttgtgtgcagggtccagattgcccttaagttgaagggagttgaatacaaatttttggaagaaaatttgggcaacaagagtgatttgcttctcaaatacaaccctgttcacaagaaggttccagtgtttgttcacaatgagcagcccatagcagagtctcttgtgattgttgaatacattgatgagac

SEQ ID NO: 182674 - DNA, 277 bp, Glycine max
ctgctggggactctaacgagattggagccagtcccgacaatgcggcgtcgtataacggaaacttggttaaacgcgtgttgagtgggagtgggacccccttgaagcaaaatgagtcactcgatgttttcctcttcgcgcttttcaatgagaaccagaaaacgggtcccacgtcggagagaaactacgggctgttctaccccactgagaagaaggtttacgatattccgctcacggcggaggaaatcaaggaggcgccgccgtcaggagtagggaagag

SEQ ID NO: 182675 - DNA, 295 bp, Glycine max
cacatagcactcagcaataagaaggtccctattgtgattttccttcacggtggaggcttttgcttcggttcgcgcacctggccccatattcacaactgttgcatgcgcctcgcgtcggggctccaagcggcggtggtttcgccggactaccgtctcgcgccggagcaccgtcttcctgctgcggtggacgacgccgtggaggcggtgaggtggctccagaggcagggcctgagcttgagggaggacgcgtggttgagtgggggcgttgactttgaccgcgtcttcgtcgtgggtg

SEQ ID NO: 182676 - DNA, 295 bp, Glycine max
cacgcacgtctctctctctctctcgccatggctatggctatgcaaagcggaatcggagtctccaagatcctcatcatagcaggagcaggttacaccggcaccgtcctcatcaaaaacggaaaactctcggatttaatcggcgagcttcagttgctggtgaagggattggaaaaatctggggagcatgctgaaggtgaaggtgaatatgctgatgccatagctgctcaggtgcgtcgcctggcgaatgaagttcggcagctagcatcaaacaggccaatcacagtactgaatgggg

SEQ ID NO: 182677 - DNA, 283 bp, Glycine max
ggacttttatgctcctcttttcttctctgaagtagctacaattcagcctggagaattctgccacaaggtcaatctctgtcagaaaattgcatatattgccttgaaagttcaagatgatagctgtgagttttgccaagatactgtttcaactctattggaaaagttgaaggagagtgatactaagctagagataattgagacgttactaaaggtgtgcaattcagtggagaagtatgcaattaagtgccagagattggtttccaagattggcactggtttttga

SEQ ID NO: 182678 - DNA, 291 bp, Glycine max
ctttctgattgccttcaaatcacacactctcttcaatttctagggttttgctattgctttgcctccgttccccctttctcacaaaaacaacgccttttctcttctccttcgtatctattctttgcgcttcgtcttcggttgattgaaggcattcacagcgtaatttgttgctgcattttaatcgatttatctaaccaggactgattgagctaatggagtctaaatctgggaaaaagaagtctagtagtagtagtagtaaatcaattttttacgaactcccctcggatacag

SEQ ID NO: 182679 - DNA, 290 bp, Glycine max
cttcttcccaaccactactactcactcactgcagatctcaattgaatcgctgtccatggctaccatcgttagcatcaaggcccgccagatcttcgacagtcgtggcaatccaactgtcgaggtggatttgacttgctccgatggtacttttgccagagctgctgttccaagtggtgcatccactgggatttatgagggccttgaattgagagatggaggatctgactaccttggaaagggtgtatcaaaggctgttgacaatgtgaacaccgtcattggccctgctttga

SEQ ID NO: 182680 - DNA, 292 bp, Glycine max
  unsure (1)..(292): unsure at all n locations
caggttctgaccttggaggatgttgtttctgaggctgatatctttgtcaccaccaccggtaacaaggacatcatcatggttgaccacatgaggaaaatgaagaacaatgccattgtttgcaacattggtcactttgacaatgagatcgacatgcttgggctggagaactaccccggcgtgaagcgcatcaccatcaagccccaaactgacagatgggtcttccctgagaccaacaccggtatcattgtcttggctgagggtcgattgatgaacttnggatgcgccactggac

SEQ ID NO: 182681 - DNA, 274 bp, Glycine max
actcgagccgaatcggctcgagggcaatacttagcccaccacgggtacttgtcactcgaagagtagcgacccatattttgatcaaattggctgttctcatcctggttgtgagccagcttaccggactcccaagtgtgttaaaaagtgtgtaagtgggaaccaagtttggaagaagtcaaaacactatagtgtcaatgcatacagagtgagctctgatcccatgatatcatgacggcagtttacaagaatgggccagttgaagttgcattcactg

SEQ ID NO: 182682 - DNA, 288 bp, Glycine max
gccagaggactttcttttcttcataatgccaaatcacaagttatataccgtgattttaaagcatccaatatcctactagacgcagagttcaatgctaaactctctgattttggcttagcaaaggctggccctacgggtgatagaactcatgtctctactcaagtcatgggaactcaaggatacgcagcacctgaatatgttgcaacaggtcggctgacagctaaaagtgatgtatacagctttggggttgtgttgcttgaactattgtccagtagacgtgccgttgac

SEQ ID NO: 182683 - DNA, 160 bp, Glycine max
attcggaagagcttcaaagtcatgatttagctgatgctgtgaagcaaatgaaagaaaagcgcaggtttaaggagcttctgataatggtggacacctgccaagcctctactctgttctcccagcttcattcaccaggtgttttggcaattggaagtagtaa

SEQ ID NO: 182684 - DNA, 291 bp, Glycine max
attcggtgctccgaatctcagattctagggttagggttcccaatttctccaccgatcagaaaatgagttcaactggaggttctaccaagggcggaaggggcaagcccaaagcctccaaatccgtttcaagatcgcagaaagctggtctccaattccccgttggaagaatcgctcgattccttaaggctgggaaatacgccgagcgtgttggtgctggtgctcctgtgtacctctctgcagtgctcgaatatctcgctgctgaagttttggaattagctgggcatgctgcta

SEQ ID NO: 182685 - DNA, 277 bp, Glycine max
tgggaacatgctacccattaatatggtcgattgacatgctataacacatgatccacttgtggtgattgtcaatgagggaagcgcagtgccagtgagattttagccggggcattacatgataacggtcgagctattcttgtggggcacaaaacatttggtaaaggaaagattcagagtgtcactcagcttcatgatgggtcagcatctttgttacagtggcaaaatatctatcaccagccctcatgacatagatcaggttgggataacccagatgtgc

SEQ ID NO: 182686 - DNA, 288 bp, Glycine max
attgaattcaaggataaagttaagaatgttggtgccagtcttgtaaagcaggttgctaatgctactaatgatgtggctggtgatgaatattgagggagggagcatttcaattgtcttgcaggaaccacatgtgctacagtccttacacgagcaatatttactgaaggctgcaaatcaatcgcggctggaatgaatgcacatggacctgaggcggggtataagtatggctgtcgatgctgtggtcacaaatttgaaaagcagagctaggatgattagcacatctgaaga

SEQ ID NO: 182687 - DNA, 286 bp, Glycine max
tgagaaatttgtgttcaaggtagaatatcctacactgagtaattcatacaagattatcttaaaaatcatggacaaggatcttttatctgcagatgactttgttggtcaagccatagtctatgtggaagatttattagccataggggtagaggatggtgcggctgagctacaacctctaaagtacagagtaattcgtgcagatcaatcttattgtggagaaattgatcttggtataacttttaaggtggaagaagagttcaatggagaagctaaacgaggatcgaag

SEQ ID NO: 182688 - DNA, 286 bp, Glycine max
cattccataaatctctgtagcccctcctcgattttaccgcaacatgacacaagaaggaaatggcaacaccaacttctgtatgagtgttaacaacaacggctacattagcgctaatgacccgttgaactggggcgcggcggcggaggcgatggccgggagccacctcgacgaggtcaagcgcatggtggaggagtaccggaggccggtcgtgaagctcggcggcgagaccctgacgatctcgcaggtggcggcgatcgcggcgcacgtaccaggggtgacagtggac

SEQ ID NO: 182689 - DNA, 122 bp, Glycine max
gagaaaggcactgtcctgaagaacctcctacctgccttgttcctgttcctgaaggttataaacgcccaattgagtggcctaagagcagagagaagatatggtattacaatgtttcacacaac

SEQ ID NO: 182690 - DNA, 281 bp, Glycine max
cgctgttcctacaatcattccaaatgtgcccttccggtcgcaccctcctcccttcctccgtctccgatttccgaccggcattcgacgtcctcgatgccgaccgcgacggcaaaatcagccgcgacgacctccgcgccttctacgccggagtcggcggcggaggagatgacgtgatcggggcaatgatgacagtggctgacaccaataaggacgggttcgtggagtacgaggagttcgagcgcgtggtctcggcggagagaaagccgtggggtactgtgggg

SEQ ID NO: 182691 - DNA, 275 bp, Glycine max
ggcctatcttcacaatgaaccaaatgttataattcatcgagacttaaagccaaggaatgttcttttagtcaattctagtgccgaccatttaaaagttggagattttggattgagtaagcttatcacggtccagagttctcatgatgtatacaagatgactggtgaaactgggagctaccgctacatggctcctgaagttttcaaacatcggagatatgataagaaggttgatgtgtactctttgcaatgattttatatgagatattgaaggtgaa

SEQ ID NO: 182692 - DNA, 279 bp, Glycine max
gcgagtgagtgagcgagccaggtagggttttcggtgttcccctctttgtgttcgttcgcgacgatggggtccatccccgatccaggcgagttgagcgagtaggactcagccgagcttcgacgagttccagcgccaaacctctctcatgaccagctgcaccctcctctggaaggagctctccgaccacttctcctccctcgagcaagacctcaaccacaaatccgaagccctcaagcgcaagattcacaccctcgacaactccacctcggactccctccg

SEQ ID NO: 182693 - DNA, 286 bp, Glycine max
  unsure (1)..(286): unsure at all n locations
gtccactcctcatcctccctactactacaaatcccctccaccaccaacgtcgcctcagtnnancttaccactatgtgagccctccaccaccttctccatctcctcctccaccataccattacacatcaccacctcctccttccccagctcccgctcccaagtacatttacaattcacctccacctccagtttacatatatgcttccccacctccacctatctacaagtacgtgcgaattgcggaacaccattcacgataaatcatgtactagtttttatcgaggaa

SEQ ID NO: 182694 - DNA, 278 bp, Glycine max
atttagaggggaaggcggctatgggaatgggatgaggaagacgagatcgtatggggacatgagtgaatcggtggggagaggggaagagaagagggttgtgagtgtgactccgctgagggatatgacgccagagagggttttcgggaagatgggacatttgcagaagttgttggatcggtttttggcttgtaggcctactgggttggctaagaatagcaggatggttttgattgcgctgtatcctgtggttaaggagagttttaagttgtatgctgata

SEQ ID NO: 182695 - DNA, 279 bp, Glycine max
gtttgacaacctctgcaaggtgatcaaggatgttttgggtgacaaggttgagaaggttgtggtctctgaccgcgttgtagattcaccatgctgtcttgtgactggcgaatacggttggaccgcaaacatggaaaggataatgaaggcccaagctctaagggacaacagcatggcagggtacatgtcaagcaagaagaccatggagatcaaccctgagaacccaatcatggaggagctccagaagcgtgctgatgcagacaagaatgacaaatccgtgaa

SEQ ID NO: 182696 - DNA, 278 bp, Glycine max
gcaaatatgtattcagagttgcgggaagaggctcgtgatcatgcatgcttacgtaatgcatattttgagcaggcacagcaagcctatcttattggtaataaagccctagcaaaggaactaagtgctaaagggcaactgcacaacatgcatatgaaggttgctcatggacaagctcaagaatccatttacctccagaggtttgttgttctccatgctttgattcctgctctccatgtaagtttggaataaacaagtttatatggcagatgatgttatca

SEQ ID NO: 182697 - DNA, 269 bp, Glycine max
agtttgttgtgagctataagctagtttatcgtgaggagaatatgaagttgtttgttttctttgttgctgcagtagttttggtagcatggccatgccatggcgcaggctaccaaaggttccctctccgaatgaaaactggctatggtgagcgttcttcggaggtaaaatgcgcaagttttaggcttgctgtggaagcacacaacatccgagcctttaaaaccattcctgaagagtgcgttgaaccaacaacggactacattaatggcgaa

SEQ ID NO: 182698 - DNA, 265 bp, Glycine max
tatacttgaaaccagtgtgtacccaagagagcatgagagcttgaaggagctacgagagttgacggaaaaacacccttggaacctgatggctacaccacctgacgaaggacaacttctaggcatgctccttaagcttatcaatgccaagaacaccatggaaataggcgtcttcactggttactccttgctttccactgcccttgccctcccttctgacggaaagatcttagctatggatgttaaccgggaatattatgaattgggg

SEQ ID NO: 182699 - DNA, 271 bp, Glycine max
ctcgagccgtgctgtcaccaccccacgatctaaaagaagaaagaaccagcttaagaaagtttaccaagtaccagttgagaatctctcttcagacatatgggcatggaggaaatatggccagaaacccataaaggggtctccatatccaagggggtactatagatgtagcagctcaaaggggtgtttggcaaggcaacaggttgaaagaacaagatcagacccaacaatgttcatagtgacttacactgctgagcacaaccaccctgaacct

SEQ ID NO: 182700 - DNA, 281 bp, Glycine max
cttatgcaactatagtgaggctaagagattggtccataattaatcaaaatgttggctatattccacaaagcttttgctcatccacctgaagagctcaacagccctgcatcttacaaaggttccaagaagcctaaggttcccgaggaaactctcaaagatttcctttcccaccatcctcacaacacttgctctatgagctttggtgatgctgctgttctagcttatgtccgtcctgatcaatctttctctcgtcatcaaaggctattttgtgggatcgatga

SEQ ID NO: 182701 - DNA, 280 bp, Glycine max
agagaacctcttttcctttacatttacctttcattcatacaagctcataagtcaattttggtttatcattcctagaagaaggaacctttaaccattgacatggccatggcatatgttgctagatcatcggagtcatctcaagtgcttaatttccattccactgctaaatggaatgctcactttgatgccttgaaacaaactaacaaactgatggtggttgatttcactgcttcatggtgtggaccttgcaaactcatggaccacattatccaagagtttg

SEQ ID NO: 182702 - DNA, 283 bp, Glycine max
gatgcccccggggcaaaggagtatgtgcacatacgaattcagcagaggaatggaaagaagagtctgacaacagtgcaagggctgaagaaggagttcagctacgagaagatcctcaaggacctcaagaaggacttctgctgcaacgggactgtggtgcaggacaaggagcttggcaagattatccaactccaaggcgaccagcgcaagaacgtatcccatttcctcgttcaggccggtcttgtccggaaggaccaggtcaagatacatggtttttgatttaacg

SEQ ID NO: 182703 - DNA, 272 bp, Glycine max
aacaagaattcatctattcatttcagcccatcagcatggcgaaggagaagaaaaacttgtccaacaagaacaagaagccaagcaatgtccacgaggttcacttccgcggagtccggaagcgcccctggggccgctatgccgccgagatccgcgaccctggaaagaagacccgcgtctggctcggcaccttcgacaccgccgaggatgccgcccgcgcctacgacgtacgcgcccgaaattccgtggccccaagccaaaccaaatccccttct

SEQ ID NO: 182704 - DNA, 272 bp, Glycine max
gctgttcctacaatcattccaaatgtgcccttccggtcgcaccctcctcccttcctccgtctccgatttccgaccggcattcgacgtcctcgatgccgaccgcgacggcaaaatcagccgcgacgacctccgcgccttctacgccggagtcggcggcggaggagatgacgtgatcggggcaatgatgacagtggctgacaccaataaggacgggttcgtggagtacgaggagttcgagcgcgtggtctcggcggagagaaagcccgtggggt

SEQ ID NO: 182705 - DNA, 265 bp, Glycine max
gaagaattaaaggaagcctaactggtgtaactattgggactgtgacagaatcccaaaaaatttggagaactttccaagcgcttggaaacatagcctttgcttactcctactcaatgatccttattgaaattcagaaaacaacacaaacaacaaattgaagtctaaattaaaatggtggttgttatggaacaggacacaatcaaatcccctccagcagagtcagagacaatgtccaaggctactttaataagtgttttggtcacaa

SEQ ID NO: 182706 - DNA, 267 bp, Glycine max
caaatccgcagcaactattgagggattggcagcgcagcttcgccaagagtcgtcgcaacattgagcgccaaattcgcgatatacagagagaagaaaaaaatgtgcagaaggctattagagaagctgcaaagaggaatgacatgggctctgcaaaggcacttgccaaggaacttgtgagatctaggcaaactgtgaaccgcctttatgaaaacaaagcacaaatgaattcaatatcaatgcaccttggagagagtgttgcaattgctc

SEQ ID NO: 182707 - DNA, 264 bp, Glycine max
agaggaggatgatgatgacgacgagtgaagatggtgatacaagatgaagcgtaggaggatgtgggaaaagaaaattgttttgcatagtagttgttgggtttagaatttcataggatggttcccaacccacatccctttatgataattagtttctgaatttttattttgtcctcccttactagggttagattagcgcacaatcgtaattagggttcagtatcatgatcatgtacttaaaagtcaatgctatgatacgtttcaatt

SEQ ID NO: 182708 - DNA, 278 bp, Glycine max
cgtaggttgggaattcggctcgagcacgaatatcttgttgtttggagcgatccgagaaaaactctgtaaacatgttggtttaccaggacctccttacaggtgatgagcttctctctgactccttccgttacaaggaaattgagaatggaatgctgtgggaagttgaggggaagtgggttgttaaaggagcagttgatgtagacattggtgcaaacccttctgctgagggtggaggagaagatgagggagttgatgatgcagctgttaaggttgttgac

SEQ ID NO: 182709 - DNA, 266 bp, Glycine max
accgctgaagctcgctcttcctggacggagcaaccgagaccttcctatctgaactcctcttgctcttcgctttacgatatcctcggcatccccgctggcgcctctaaccaagaaatcaaggccgcgtaccggcgactagccagagtctgccaccccgacgtggcggccatcgaccggaaaaattcgtccgctgacgaattcatgaagatccacgccgcgtactctactctttctgatcccgacaagcgcgctaactacgatcggag

SEQ ID NO: 182710 - DNA, 277 bp, Glycine max
tcggaacccagttatcatggaagacacacagcagtaactgctcctcggactataaattttcaacctattgctgtcccttccatcacagtagatgaattgaagtctttgacagataattttggctcaaaatatttcattggtgagggtgcatatgggaaagtatatcaagccacattgaaaaatgggcatgcagtagtaataaaacagttagattccagtaatcagccagagcaggaatttctttctcaggtctccatcgtatcaaggctaaagcatg

SEQ ID NO: 182711 - DNA, 266 bp, Glycine max
acccaccgcggcggcggctgggcctcctccgacgagatcacgaccgtctggctcggcgacctccaccattggatacccgagaactacctccacaactgctttgctcacaccggcgaggttgtgtcggccaaggtcattcgaaataagcaaactggtcagtctgagggatatggattcgtggagttctattcacgagcgacggctgagaaagtcttgcagaactataatggcacgatgatgcccaatacagatcaggcattccgtct

SEQ ID NO: 182712 - DNA, 263 bp, Glycine max
atggaatgaaaagtttgattcttcgataacaaaagactatgattttcaccttcttgatggccgttcaatcagggttcccttcatgacgagcaggaagaatcagtttattagggcttttgatggtttcaaagtccttggtcttccctacaagcaaggtgaagataagcgccaattcaccatgtactttttccttccagaaacaaaagatgggctgttagctttggctgagaagttggcttctgaatctgggttcttggaacgca

SEQ ID NO: 182713 - DNA, 258 bp, Glycine max
cggctcgaggagaaaagttagggttcacaacttttccttttccttttgcttgcgaatctgaatcaaataatcaatcatccattcattattcatcatgtcgaccggcgaagaaaatcacgctgaagagttcggacggcgaggctttcgaggtggaggaggcggtggcgctggagtcgcagacgataaagcacatgatcgaggacgactgcgccgacagcggcatccctctgccgaacgtgacgagcaagatcctggcga

SEQ ID NO: 182714 - DNA, 260 bp, Glycine max
aaaagacttctgcatacccgttgatggaggaatggatgtattagcatttgaagatttcttgcttgaggagaaacgtaaagaattagaagaacttgcttgggcacaacctgaaagggaaagacaagctgaagatcaaaggcgagtggaggcagacagagctgcaaaggaagaggacagggcacgggcgaaggcggaggttggaagaatgcgagacacattgccacaattgttgaaaaatgctgtaaagtccattgataatg

SEQ ID NO: 182715 - DNA, 260 bp, Glycine max
agagggagtcagagaaaccctaggtaagaagaaaagatgccggctggtcatggtttgagatcccgcaccagagattccttctctcgtcctttcaggaagaagggaaccatcgccctcaccacatacctgagaacctaccacgtcggcgactaggttgacgtcaaggttaacggtgccgttcacaagggaatgccccacaaattctaccatggccgcaccggacgcgtctggaatgtcaccaaacgtgctgttggcgtcga

SEQ ID NO: 182716 - DNA, 139 bp, Glycine max
cataacctaacctaacccttgcgacttgcgacttgcgagtgagagtgaggttgggtttggaaggcaagggcttgtgttgtcacaatccaagagagaagtaatggcgaacatagacatcgaaggcatcttgaagcagcag

SEQ ID NO: 182717 - DNA, 263 bp, Glycine max
gttctacagtcaagttgttcaaacacatggctcagcaaagaatttgcctatatcctgcacttcaagactcagttcagggctgtgctttttctctcaaaatgtcgtgtcccaaatcagtaccccaatcttctttgtaaatgcagcctatgactcatggcagatcaaaaacattttggcaccaggtgctgctgatccccgtggccaatggcgtgaatgcaagcttgatatcaaaaactgctcacctaatcaactcagtgtaatgc

SEQ ID NO: 182718 - DNA, 263 bp, Glycine max
ctcgaccgctcgagccgtcgtgaagttggactcacatttcacctcctcaaggatgaccccgggaacctctcaaagaacattgataaggcactttttgaggctttcaacccattgaacatctctgattacaactccatcttttggattgcacaccctggtgggcctgcgattttagaccaagttgagcaaaagttgggtctcaaacctgagaagatgaaggccactagagatgtgcttagtgaatatgggaacatgtcaagtgc

SEQ ID NO: 182719 - DNA, 263 bp, Glycine max
cggggctaccgtgagtttaagcatatcaataagcggaggaaaagaaactaacaaggattcccttagacaacggcgagcgaaccgggaaaagcccaccatgaaaatcggtcgccctcggcgtccgaattgtagtctggagaagcgtcctcagtggcggaccgggcccaagtcccctggaagggggcgccagagagggtgagagccccgtcgtgcccggaccctgtcgcaccacgaggcgctgtcggcgagtcgggttgtttggg

SEQ ID NO: 182720 - DNA, 258 bp, Glycine max
gtccaacctacccctttttcttctcccaccaacttcaccgtcttcttcctcgatcatgtctcacttcaagggcaagtaccatgatgagcttattgccaatgctgcttacattggcactcctggaaagggtattcttgctgctgatgagtcaacagggacaattggcaagcgtttggccagcatcagtgtagagaatgttgaatccaacaggcgtgctcttagggagctgcttttcaccgctcccggtgctcttaaata

SEQ ID NO: 182721 - DNA, 263 bp, Glycine max
ccaatatattccattctctctgtgtatttccctacctctcccttcaagatcttcgtcaagaccctcaccggcaagaccatcacccttgaggtggaaagctctgacaccatcgacaacgtcaaggccaagatccaggacaaggaaggaatccccccggaccagcaacgtctcattttcgccggaaagcaacttgaggacggccgtacccttgctgactacaacattcagaaggagagtactcttcacctcgtcctccgtctccg

SEQ ID NO: 182722 - DNA, 259 bp, Glycine max
ccacgatatggtcttgaagtaggacttactagttatgcagcagcttattgcactggtctcctgttggcccgaagagtcctcaaaacacttgaaatggatgaggagtatgaaggaaatgttgaggctactggagaggattattcagtggaacctgccgagagcaggaggccattccgtgcactccttgatgttggtcttgttaggactacaacaggaaatcgcgtctttggtgcccttaagggagctctggatgggggtt

SEQ ID NO: 182723 - DNA, 251 bp, Glycine max
attttgcaaaccaggcgctacttgcttatggtttatctagctcgaggcgtgcaccagatgctattcatccctatggctattccaaggaaagatttgtctcgtccttgatatctggtgttgggatcttttgtcttggttctggtgccaccgttgttaatggagtacagaacttgtggattgcacagccccctgagaatatgcagtatgcagctttggtgatatgcggttcattcatcattgaaggtgcttct

SEQ ID NO: 182724 - DNA, 262 bp, Glycine max
ctctaagcatccatggccatggcgtctgcaaagctcaacaccttgtcttcccagtggatcgcccacaattccttctctcctcgccgtggatcttcttctcgctgagttctgtcttccgatccgcgcttcttcttaccaacacgaactcgtccaaaccgccagatctattgcatctcccggtcgtggaattcttgcaattgatgaatcaaatgccacatgtgggaagcgtttagcatccattggattggacaatactgaggtg

SEQ ID NO: 182725 - DNA, 264 bp, Glycine max
ttgtgctgccggtaacttgaaccaagactttcagcttacgtggggagatggtcgtgctaaaatactcaacaacgaaaatcttctcactctctcccttgacaaggcctctggctctggcttccaatccaaaaacgaatacttatatggcaagattgacatgcagctcaagctcgttcctggaaactctgctggcactgtcaccgcctattatctgtcttcaaaaggatcaacatgggatgagattgacttcgagttcttggggaa

SEQ ID NO: 182726 - DNA, 259 bp, Glycine max
gatatttctatagttaaagagctgcctaaagagttcagctggagcacaagagagtactatggcttggctattcgagaaacccgaatcaaggctgcgcctgtgcatgcatcagcccattggtatctggagaatgttttgcctgttctacagagttatggtattgctgcaatctctccattttctcacagactgagttttgacaacttgcctatggatattcaacacctacgctgtaaagtcaacttccaagctttaacct

SEQ ID NO: 182727 - DNA, 258 bp, Glycine max
gtgctctgctcgtgcctctagggttatcatatctccatttccatttcctctctctcagtttccaagactcttaagctatgggaaagtcttacccaaccgtgagcgctgattaccagaaggccgttgagaaggcgaagaagaagctcagaggcttcatcgctgagaagagatgcgctcctctaatgctccgtttggcatggcactctgctggaacttacgacgtgagctcgaagaccggtggtcccttcggaaccataa

SEQ ID NO: 182728 - DNA, 258 bp, Glycine max
gtgatttggagtttggagcgactgaactaatcattaatttgcactcgctgtttcagcttcatcacccttcttttgcatcatttatatctcttgagaaatggcacaagaaacctttctattcacatctgaatctgtaaacgacggtcaccccgacaagctgtgcgaccagatctctgatgcagtacttgatgcgtgccttgatcaggaccctgatcactaggtagcctgtgagacatgcaccaagaccaacatggtcat

SEQ ID NO: 182729 - DNA, 258 bp, Glycine max
aatccctctttcttcctcttcctcagtagtgcgattttcgattctcttctctgcaactatgcctaaccctaaggtcttcttcgacatgaccatcggcggtcaacctgccggccgcatcgtgatggagctctacgccgacgtgactccgagcaccgccgagaacttccgcgcgctctgcaccggcgagaagggcgccgggcggagcggcaagcccctccactacaaaggctcgtccttccaccgcgtgatcccgaactt

SEQ ID NO: 182730 - DNA, 265 bp, Glycine max
aaacgacattcattcatctatggctacccttattgctcccaccagtcactctccccaagaagacgctgaggctctcagaaaggcttttgaaggatgggggactgatgataaaactgtcatagtaatattgggtcatagaactgtttatcagaggcagcagatcagaagagtctatgaggaaattttccaggaggatcttgtgaaacgcctagagtctgagatcaaaggagactttgagaaagccgtgtaccgatggatactagaa

SEQ ID NO: 182731 - DNA, 260 bp, Glycine max
attggctttcctcttctacaattctaaaatcacgcaaatggcatccaagagaatactgaaggagctcaaggacttacagagagatccaccaacttcatgcagtgcaggacctgtgggtgaggacatgttccattggcaagcaaccatcattggtccaaatgacagtccctatgctggtggtgttttccttgtgaccatccatttccctccccgttatcccttcaaacctcccaaggttgcattcaggaccaaggttttcc

SEQ ID NO: 182732 - DNA, 259 bp, Glycine max
cgagccatttgggagttaggttctgcacgctctgcttccagcgagtgttctttcttcgtttcaacaccttaatttgcacacgctgcttcttcagcttgagaaatggcacaagaaacctttctattcacatctgaatctgtaaacgagggtcaccccgacaagctgtgcgaccagatctctgatgcagtgctcgatgcgtgccttgaacaggaccctgacagcaaggttgcctgtgagacatgcaccaagaccaacatgg

SEQ ID NO: 182733 - DNA, 256 bp, Glycine max
cagaatggcagcacttggtggcaatcgtgatgtggcaggaagccagaacagccttgagatcgatggtttagctcgctttgctgttgaagaacacaacaaaaaacagaatgcccttttggagtttgaaaaggtagtaagtgcaaaacagcaagtggtttctggtaccttgtacaccatcactttggaggcaaaagatggtgggcaaaagaaggtttatgaagccaaagtttgggagaaggcatggttgaacttcaag

SEQ ID NO: 182734 - DNA, 252 bp, Glycine max
ctgagccttttgctcaaggagcttttgggaaactctacagaggtacttacaatggtgacgatgtgctattagaatcttggagaggcctgaaaatgatccagcaaaggctcaattgatggagcaacagttccagcaggaggtcatgatgttggccacactaaagcatcctaacatagttcgtttcattggtgcgtgccgcaagccagtggtatggtgcattgtaactgagtatgccataggtggttcggttcg

SEQ ID NO: 182735 - DNA, 245 bp, Glycine max
gtgaacttctttaagcatgcctctgcactggaagagttttgtggaggcacctacaatgaagaaccagaaaaatactctgctatatcattaccagcaaagttatgtcgattgggtttaacatatcttggaaagaatgagttgcccatagtgttcatgtttgcagccgtactaaaaaaattggatctctctatgcaatgctagacacggaggatcattgcatgttaatccaaaagtgtccaatctgg

SEQ ID NO: 182736 - DNA, 259 bp, Glycine max
gctactggaaatggtttgctggcaacttggcctctggtggtgctgctggtgcatcatcccttttgtttgtttactctcttgactatgcccgtacccgtcttgccaatgatgcaaaggctgcaaaaaagggtggagagagacaattcaatggtctcgttgatgtctacaggaagacattggcatctgatggtgttgccgggctctaccgtggtttcaacatctcatgtgttggaatcatcgtgtatcgtggtctgtactt

SEQ ID NO: 182737 - DNA, 258 bp, Glycine max
tttcacttaggggaagaagagaggatcaagcttcgtagaggaagggttttttcccttcagaatgaacctgatgtggctcgagtttggctgcctaactctgatttccctggtcttgctatggctcgggcatttggagatttttgccttaaggcactttggattgattgctgttccagatatctcatatcaccgccttaccgagaaggatgaatttgctgtgttagcaacagatgggatttgggatgttctgtcaaatga

SEQ ID NO: 182738 - DNA, 250 bp, Glycine max
tgaaaagcaacaactaccaccaccgagtggggtccgcaaaattgaatgttccgaaatggaggacgagaagccggagattctgccgccagatccgccgtatacggcggcgacggtggcggattgcctgtacttcgaggcttccgactcggtgccccggctgcacacgacggactcgagctgctccgagcaggtggtgtcggcggagtttgcgagcgaggtgcagagcgagccgaagacaggcagcaacaac

SEQ ID NO: 182739 - DNA, 255 bp, Glycine max
cacgaatatcttgttgtttggagcgatccgagaaaaactctgtaaacatgttggtttaccaggacctccttacaggtgatgagcttctctctgactccttccgttacaaggaaattgagaatggaatgctgtgggaagttgaggggaagtgggttgttaaaggagcagttgatgtagacattggtgcaaacccttctgctgagggtggaggagaagatgagggagttgatgatgcagctgttaaggttgttgaca

SEQ ID NO: 182740 - DNA, 269 bp, Glycine max
cttgaactcgaatattcactatggcagatgaggtggttctgctagatttctggccaagtccatttgggatgagggtcaggattgcacctgctgaaaagggtatcaaatatgagtccaaagaagaggacttgcagaacaagagccctttgctcctcaaaatgaacccggttcacaagaaaatcccggttctcatccacaatggcaaacccatttgggaatctctcgttgctgttcagtacattgaggaggtctggaatgacagacatccc

SEQ ID NO: 182741 - DNA, 274 bp, Glycine max
aaacacaacaacactctctcttctcgctcttggcttttcgctcttcactcactctcattcattcatttccaccgttcatggatcccgtaagcgtgtggggtaacacgcccttggcgacggtggatcccgagatccatgacctcatcgagaaggagaagcgccgtcaatgccgcggaatcgagctcatcgcctccgagaacttcacctccttcgccgtcatcgaggccctcggcagcgctctcacgaacaaatactccgagggcatgccgggcaa

SEQ ID NO: 182742 - DNA, 274 bp, Glycine max
cagaagccaccgtggtttgaggcactactggggccttcgtgtccgtggtcagcacaccaagactactggccgcaggggaaagactgttggggtctctaagaagcgttaagctattatgttttggcttggatattagattttgtttaggaggcatgtttgaagtacactacatgttttgcatcataccaactttgtatccgttgttaaatggcttgacaatttcaattttgtttgttatttgcatctgagattccgattagttaaatgatgttgg

SEQ ID NO: 182743 - DNA, 268 bp, Glycine max
gctcaccattattggctacaaaaggcagactgatacaacggtaggtggcaccgactgtgatggggttggcattttgggcatcgcttgggcctttggtggcatgatcttcatccttgtttactgcaccgccggtatttcaggaggacacataaacccggcggtgacattcgggttgttcctaggacgcaaggtgtcgttgataagggcgttgttgtacatggtggcacagtgtgccggtgctatctgtggtactggattggccaagggg

SEQ ID NO: 182744 - DNA, 182 bp, Glycine max
gttgcggaagtcctgcaagtgcggcaacggctgcggatgctgcaagatgtacccagacttgagctacactgagtcaaccaccaccgagaccttggtcatgggagtggcacctgttaaggctcaatttgagggtgctgaaatgggtgtgcccgctgagaacgatggctgcaaatgtggaccaa

SEQ ID NO: 182745 - DNA, 272 bp, Glycine max
atgatctcctccatgctgatcatttgttttcaaagcttaagaaaaggtgcaatttggctgctgtagtggctgaggctgatcggattcttaggcctgaaggaaaacttattgttcgcgatactgttgagatcattgaagagcttgagagcatggctaggtctatgcagtggaaggttcgcatgacttactccaaggataaggagggtttgttatgtgtggagaagtccaagtggcgacctaaggagcaggaaaagctcgagtatgctattgct

SEQ ID NO: 182746 - DNA, 270 bp, Glycine max
gagaaagtagcagatcctccatggcctccaccaaggaacgtgaaaacttcgtctacgtcgccaagctcgccgaacaagccgaaacctatgaagaaatggtggaagcaatgaagaatgtggcgaactaaacgtggaattgacggtagaggagcggaaccttctgtcggttgggtacaagaacgtggtgggtgctcgtagggcttcgtggaggattctttcctcgattgcacagaaagaagaagctaaagggaacgatgtgagcgtgaagag

SEQ ID NO: 182747 - DNA, 253 bp, Glycine max
cgataacgtgaaagctaagattcaagacaaggaagggatcccacctgaccagcagagacttatctttgcgggtaaacagcttgaggatggtcgaacccttgccgactacaacatccaaaaggaatccactctccacctcgtgcttcgcctcaggggtggcatgcaaatctttgtcaagcactttgactggcaagaccatcacctcgaggtcgaatctccgacaaccattgatatgtcaggcccagatcaggac

SEQ ID NO: 182748 - DNA, 279 bp, Glycine max
gtttttaaactgcgcaatatttggctaccagacagagttatctcacacactgcctaaatcagcaacaagagcagcaatgcttgtgagggttaatacccttcttcaaggctactcaggaatcagatttgaaatcctagaagctatcacgaaactactgaaccacaatgtcacccccatcttgccattacgtggtacagttactgcgtctggtgatctaattcctctgtcctacattgttgcattgctaactggtaggcgaaatagtaaagctgttggacc

SEQ ID NO: 182749 - DNA, 265 bp, Glycine max
caccaaacgccccaagcacgacaacaacggctcttccttcgactccatcgatgtgaattcgtattcggtaccgtcgatttcgccgtcagcggtgtcgtactcgcaccaggtcggcggtgcgagcaagaagattgatatccccaatgggagggttggtgttatcattggaaaaggtggtgacaccatcaagtaccttcagctgcagtctggtgccaaaattcaagttactcgtgatatggatgctgatccgaattcggctactagg

SEQ ID NO: 182750 - DNA, 265 bp, Glycine max
ctttattcacaatgagaagcccatagcagagtctcttgtgattgttgaatacattgatgagacatggaagaacaaccccatcttgccttctgatccttaccaaagagccttggctcgtttctggtccaaattcattgatgataaggtttttggtgctgcatggaaatccgttttcacagctgatgagaaagagcgtgagaagaatgttgaggaagcaattgaggctctgcagtttcttgagaatgagataaaggacaagaagttc

SEQ ID NO: 182751 - DNA, 266 bp, Glycine max
aaatcgcactctgcttttcagaaagcacagagatgcgttgaagagtgttcgggttccctccatctcctcgccgccattcaccgcttccggcgccggcggtggccccgtcatcgaattggccaccacctcgtttctcaatcccaatcgctcttacgcaccgctaagtaccgaggatcccggcaattccagtaggggtccaaatgcaattacagtggggctacctccggcgtgggtggatttatcagaagaaatatcagcaaatgtgc

SEQ ID NO: 182752 - DNA, 270 bp, Glycine max
gttttgagttttgatcaatgagactagccatgtctactccttccaagagcataatctgttcaagtgaagatgattatgaacttagaagagggccatggagtgttgaagaggattatcttctcacccattacattgccaatcatggtgaagggagatggaatttgctagctatacgttcaggactaaggagaacaggtaagagttgcagattgagatggctcaattatctaaagccaaatgttaagagaggaaatttaacctcggaagagc

SEQ ID NO: 182753 - DNA, 271 bp, Glycine max
cttgtttgttgttgttgttggaagccaaaaccctagcagccggcccgaatggcagacgttgaggttgatgtggcggcggcggcggcggcggcggctgcagggcagccaaagaagagaacgttcaagaagttcagcttcaggggggtggatctggacgcgcttctggacatgtccactgacgaactcgtgaagatgttcagtgctcgcgcacgcagaaggttccagagaggtctcaccagaaagcccatggccttgattaaaaagctccgca

SEQ ID NO: 182754 - DNA, 254 bp, Glycine max
cgaggctttagataagcatgaccggataaaggctgtagaaatattagtgaaggatttgaaagtgtttgccacatttaatgaagaattgttcaaggaaatcacacagcttcttacattggaaaatttcagggaaaatgagcaattgtctaagtatggtgatacaaaatctgcacgagcaatcatgttggttgagctcaaaaagctaattgaagcgaatcccttatttcgtgacaaactgcaatttcccaacctta

SEQ ID NO: 182755 - DNA, 261 bp, Glycine max
atgagatctgctggttgggatattgatgcatcagtcaaggccattatggagcagaatgtggtttactggaaagaagatcacaagtgttttgcaattgagtcctttgtgtgtagggagatgtttgattcattcaacttccccaacttctccctaccaaatgagtccctaccagataggaacaggaggcaactgttctttgggaggttcaacgagctaaaaccagagaaagcaaaggactttcttgcagggaaaccaagatca

SEQ ID NO: 182756 - DNA, 172 bp, Glycine max
ctgctgttggagccctttggggttgtggccatgatgccggtcaagctatctttggcttaatatttttgctcttaaaagatcgacttcacattgaaattatccaaacttggggcacccgtgtggttggccttaccctgctagtaattggtgctatgggaattaaggaaccttc

SEQ ID NO: 182757 - DNA, 268 bp, Glycine max
gaggcagaccactatcagtaggaaagaccatagggaggaggggaatgaggctgatggattttatggtggaataagaaagattaagagtgaggcggagattaccacttggaaacacctttggccattggaagtcttggaatagtaagcactggcactggatcggatcaaattctctacaacttagcatgatttcaatatagaagctttgtttcagcaactgaagcattgactggttctgcattatacaacctgaagtggactttcagat

SEQ ID NO: 182758 - DNA, 274 bp, Glycine max
ctcgccgcgagtcgcttcaacgagatccgtcagattttccgtcagccttctagggctttctcaaccgacctgaactaccaccttgacacaccggacaacaaccctaaacttccatgggaattcaccgaggccaatcaagcaaaggttaaggagattttgtctcactatccatccaactataagcaatctgctacaattcctcttttagatcttgcccagcagcagcatggaggttggctacctgtttctgcaatggatgcggtagctaagattg

SEQ ID NO: 182759 - DNA, 272 bp, Glycine max
cgctgtttcgacggtcacacgcagttgtattgtagaactgaccaagggtttctctttctctttctctgtctgcttcttcactttctctcgtttcaatcgaaaaaaatcatgggcagaaaattcttcgtcggtggcaactggaaatgcaatgggaccactgatgaggtgaagaagattgttactactttaaatgaagctaaagtccctggagaagatgttgtagaagttgttgtgagccctccttttgtgttccttccttttgtaaaaagttt

SEQ ID NO: 182760 - DNA, 191 bp, Glycine max
gtttggagcgatccgagaaaaactctgtaaacatgttggttcaccaggacctccttacaggtgatgagcatctctctgactccttccgttacaaggaaattgagaatggaatgctgtgggaagttgagggcaagtgggttgttaaaggagcagttgatgtagacattggtgcaaacccttctgctgagggt

SEQ ID NO: 182761 - DNA, 265 bp, Glycine max
cggctcgaggaacaatggcagatgagggtgctatttctctatggagaggaaacactgctaatgttatccgttatttccccaaccaggtattgaactctgcatttaaggattacttcaagaggcttttcaactttaagaaggatagagatggctactggaaatggtttgctggcaacttggcctctggtggtgctgctggtgcatcatcccttttgtttgtttactctcttgactatgcccgtacccgtcttgccaatgatgcaaa

SEQ ID NO: 182762 - DNA, 267 bp, Glycine max
actcgagccgattcggctcgagcaattcaataccatttaccaaactcactcatcaattctcatacttcttctcactaactattacttcatcatgtcgagcacagctggccaagtcatcaaatgcaaagctgcggtttcatgggaggcagggaagccacttgtgattgaagaagtagaggttgcgccaccacaagctggtgaagtgcgtttgaagatcctctacacctctctttgccacactgatgtttacttctgggaagctaaggg

SEQ ID NO: 182763 - DNA, 269 bp, Glycine max
gctccatagctgcagcattagggtttttcatctgcttcaatggggaagggaacagggagttttggtaagagaaggaacaagactcacactctctgtgtgaggtgtggccgccgcagcttccatctccagaagagtcgttgcgccgcttgtgctttccccgccgcacgcactaggaaatataactggagcgtcaaggcaatccgcagaaagaccaccggaactggcaggatgaggtacttgcgtcacgtgcctcgccgattcaagagtgg

SEQ ID NO: 182764 - DNA, 268 bp, Glycine max
agcagcttgaggatggccgtacccttgccgattacaacattcagaaagagtcgaccctccacctggtgctccgtcttcgtggtggcatgcaaatctttgtcaagaccctcactggaaagaccatcacccttgaggtggagagctctgacactattgacaatgtcaaagctaagattcaagactaagaaggtatcccaccagaccaacagatgctcatttttgctggaaaacagcttgatagatggccgaaccttgggagattacaaca

SEQ ID NO: 182765 - DNA, 273 bp, Glycine max
caaacaaataaagcaaaaggcctttttattccaaagcaaggcaggaagaaataaaccgaatgagagcattaacctcttcttcttccactttcattccaaagcgttattccttcttcttcttcctctccattctcttcgctcttcgatcctcgtccggcggctgctccgaataccaccaccaccaggggccgatggccacgttaggaggcttacgcgtctcccaaggctctcagaacagcgtccaaaccgaggccctcgctcggttcgccgtcg

SEQ ID NO: 182766 - DNA, 279 bp, Glycine max
gagaaagtagcagatcctccatggcctccaccaaggaacgtgaaaacttcgtctacgtcgccaagctcgccgaacaagccgaacgctatgaagaaatggtggaagcaatgaagaatgtggcgaagtaaacgtggaattgacggtagaggagcggaaccttctgtcggttgggtacaagaacgtggtgggtgctcgtagggcttcgtggaggattctttcctcgattgaacagaaagaagaagctaaagggaacgatgtgagcgtgaagaggataaagga

SEQ ID NO: 182767 - DNA, 273 bp, Glycine max
aaaagagctccctcgtgaagttgtgactgaaatcaaattgctccgactcccatttcagccagaatccacacctaatgcaatggaagtggagtccttgaatgaaaagagtataaggagaatccacaaggcattggactctgatgatgttgagctactgaagcttcttctaaatgagtctagtgtcactctagatgatgcacatgccctgcactatgcttgtgcctatagcgattctaaggttattcaagaagttcttagtctaggcatggctga

SEQ ID NO: 182768 - DNA, 266 bp, Glycine max
gcagaggctcacttatcgcaagcggcatagttatgctaccaaatccacccagcaccgggttgttaagacccctggagggaagttggtgtaccagaccactaagaagagagcaagtggacctaagtgccctgtcactggcaagaggatccaagggattccacacttgagacctgctgaatacaagaggtctagattgcctcggaaccgcaggaccgtaaaccgagcctacggaggtgttttatcaggaggagctgttagagaaagga

SEQ ID NO: 182769 - DNA, 263 bp, Glycine max
ctcgagccgcttcaacttcacccattcatacgtggtgttgttactgctgctcttttctcttttcttttctctttagttctcccttcccctttctttttctttttcttcttcttctgagcttgtttaagcttttcttccattaacatattatcacaatgtgtggtattcttgctgttcttggttgttctgatgactctcgagccaaaagggtccgcgtgcttgagctctctcgcagattgaagcaccgtggccctgactggagt

SEQ ID NO: 182770 - DNA, 264 bp, Glycine max
ctcgagccgcagcaactgcggttgcaacaagtactcttttgacttgacttacgttgagaagaacaccacagagactctagttttgggtgtcgggcctgtgaaggcccaattggagggtgctgaaatgggtgttgcatctgagaacggtggctgcaactgtggatcaagctgcacctgtgacccatgcaactgcaagtaaggtcaagatgtataaccttgaagcagagatagctgtaatatatgtatcaacagctactaagaagt

SEQ ID NO: 182771 - DNA, 268 bp, Glycine max
cattccttcatttttaaacctagctccatctccctccactcaccataacatgccatcagaagcaactgctgccaacaccaacttctgtgtaaatgttagcaacaatggctacattagtgctaatgaccccttgaactggggtgcggcggcggaggctatggctgggagccacctcgacgaggtcaagcgcatgctagaggagtaccggaggcccgtcgtcaagctcggtggagagaccctgaccatctcgcaggtcgcggcgatcgcg

SEQ ID NO: 182772 - DNA, 267 bp, Glycine max
cgcgtgtactttcttgcgaaacagaagggcgaaggggcacacacaacttttttgtttttttgtagagcgagagagaaaaaaatgttggggatcttcagcagttccgtggtgtcgccgccggaggagctggtggctgcccgcagcagaacgccgtcgccgaagacgacggcggggaagctgctgaaccggttcgtggagaacaaggcgtcggcggtgtcgctgcaggtgggagaacacgtgcagttggcttacacgcaccacaacgag

SEQ ID NO: 182773 - DNA, 266 bp, Glycine max
ctcatgccctcaggtgcagagagcctgaaggtgaagagttactcacttacatgcaactgtagtgcgaaatctgcccctacttaaaatttggttacatggctgccaatggagccattgcgcaagatgcagaaacgaggatcacatacacatcatagactacgaaattgctcagggaactcaatggatgactcttcttcaagcccttgctgcaagacctggtggtgctccccatgctcggatcacagggcttgatgatcctgtttcca

SEQ ID NO: 182774 - DNA, 268 bp, Glycine max
gcaagcttaaagttatgtaaaaaaataagggggtgtgaggaaatggtgcacagcgcgtacgattgtctggaactggtgcgcgagtgcccagccaagatcgaatccatcgaatcctacggttcgaagcttctcgtgggctgctccgatggatcgctccgaatattcgcgccggaaacggaatcttcctccgacggctccaagtcctacgccttggagaagaacctcgccgggttcgcgaagaagcccgtgctctcaatgacggtggtgg

SEQ ID NO: 182775 - DNA, 284 bp, Glycine max
ctaccattaacattaccctctcttttttttctccctcacgaaccttcatttcttctcccgccatggatccttgccctttcgtgaggctcacagtcggcaacctcgccctcaacattcccgttgcttctaaacccgcgctctccgttgttcatccttcttcttctccttgtttctgcaaaatcacgctcaagaattttcctcttcaatccgccgtcgttcctttcattcctccggaaagccacttccccgactcgcaggtgcatcctattgccgccacgttccac

SEQ ID NO: 182776 - DNA, 169 bp, Glycine max
ctcttcttcttttgttgttctgtgtttgtgtttgttttttctctcacctgaaaatgtcttgctgcggtggtaactgtggttgcggaagctcctgcaagtgcggcaacggctgcggaggctgcaagatgtacccagacttgagctacactgagtcaaccaccagcgagac

SEQ ID NO: 182777 - DNA, 268 bp, Glycine max
gtgatttggagtttggagcgactgaactaatcattaatttgcactcgctgtttcagcttcatcacccttcttttacatcatttatatctcttgagaaatggcacaagaaacctttctattcacatctgaatctgtaaacgagggtcaccccgacaagctgtgcgaccagatctctgatgcagtacttgatgcgtgccttgaacaggaccctgacagcaaggttgcctgtgagacatgcaccaagaccaacatggtcatggtcttcgga

SEQ ID NO: 182778 - DNA, 171 bp, Glycine max
acagaatgttgaagcttggactgagcattgacgaggatgcaggtgaagctgatgctgaaatgcccccactggaggaggccgaggctgatgctgagggcagcaagatggaggaggttgattaaaattaaatatgatgcgtttcttgttagtagcgtctctaatgcctttttg

SEQ ID NO: 182779 - DNA, 212 bp, Glycine max
gagagaacaagaacataagggaaccacagcggcggtaacagaagaacaagcagagaatgggtcgagtgagaacgaagacggtgaagaaatcctctcggcaggtgatagagcgtcactactcgcgcatgaccctggacttccacacgaacaagaagcttctggaggaagtggcgataatcccgtcgaagaggctagggaacaagatcgggggg

SEQ ID NO: 182780 - DNA, 269 bp, Glycine max
cagacattgaatcccagctgaagttctttgagaccccttcttttcttgatgaagcctgggctgatgctgcattggcgtctttgctcagtgaagatgcatctcaggatgctgctggaaaccctatgaacctttggagcttcgacgacctgccttccatggcaggagtcttctgaacaccttcatatcccttttaatgtaaataaagctacaagaattgtgatcgtgatgttggtgatggaatccacagcaggaaaaccaacctgcttaag

SEQ ID NO: 182781 - DNA, 259 bp, Glycine max
gccgtgcaagaagttggtgttttatttccacgacataatttacaacggccacaattccaagaatgccacttccgccattgttggaacacccgcatcgggaaacaggaccatactagcggggcagaaccacttcggtgacttggttgtgttcgatgaccccatcaccttggacaacaacttgcactcgccaccggttggacgtgcccaagggttttacgtttacgataagaaggagattttcaccgcttggcttggcttc

SEQ ID NO: 182782 - DNA, 267 bp, Glycine max
ccacaggagagactgcacctttttaaggcagatcttttgggtgaaaattcttttgactccattgttgagggctgtgatggcgtctttcatactgcttctccttttattatcaacgtcaaagacccacaggctgacctacttgacccagcagtgaagggaactcttaacgttcttaaatcatgtgtaaaatcgccatctgtgaaacgagtcatcttaacatcttctgtggctgcagttgcatataataaaaggcctaaaagtcctgaa

SEQ ID NO: 182783 - DNA, 226 bp, Glycine max
ctccctcatgggaatgaagaagaatgttacttggctgttaatcctccatccgatcgtattccagatatagaaatgcacccaactgagccacactggttgaatgacttcagcggggtgataaaaagtgtttatggacctgttacagctgcaaaaactatttatgaggatgaacaaggttacttgattattatcagttctgccctttgtagatcttcaaggtgtgaaa

SEQ ID NO: 182784 - DNA, 166 bp, Glycine max
cattggtgtccctgagcccttgtcagtgtttgtggacacttatggaactgggaagattcctgacaaggagattctgcaaattgtgaaggagaatttcgacttcagacctggaatgatcaccattaacttggaccttaagaggggtggtcataggttcctcaagaca

SEQ ID NO: 182785 - DNA, 211 bp, Glycine max
caaccttcttgccctctctcatcagagaaggaaagcttttgataaagaaaagaaacagaaagaaccttgtaattttggcttgaaaagccatggccagggagcaaattcaggtgctgaacgcgcttgatgtggcgaaaacacaatggtaccatttcactgcaatcatcattgctggaatgggcttcttcaccgatgcatatgatctattctg

SEQ ID NO: 182786 - DNA, 267 bp, Glycine max
gcctcagactatcaagattaaccaacctgaccaggcaaccagtggtggtcaacctgcgcaaaagtcggcttgctgtggttcatgaaaagaatcagtatctgtagaaagaggtgcacaggtttctgcaatagcactcatctgggtgctaatgttattctgatgacattataagtgggagcatgtatttgtccctctgtatctcccaactgcagatgtcttattttaaagttaatattttaaattctttgctcactgacttggtggaat

SEQ ID NO: 182787 - DNA, 259 bp, Glycine max
tctttccctttgacaactgcaatctaaggtagaaataacaaacacaacatgggttctttgggcacaatcaacaagccacatgctgtgtgcataccgtacccagcacaaggccacataaacccaatgctaaaactagcaaaactccttcacttcaaaggctttcacataacctttgtaaacactgagtatcaccacaaacgccttctcaaagcaagaggccctgattcccttaatggcctctcttcatttcgctttgaga

SEQ ID NO: 182788 - DNA, 259 bp, Glycine max
ggtagggatcccaatcactgggagaacccttttgagtttaggccagagaggtttatcagagatgggcagaatcaattggatgttaggggacaacattatcattttattccatttgggagtggaagaagaacgtgtcctggtgcttctctagcttggcaggttgttcctgtgaatctggctataattattcaatgtttccaatggaagcttgttggtggcaatggcaaagtggacatggaagaaaagtctggctcactct

SEQ ID NO: 182789 - DNA, 170 bp, Glycine max
cttttgatttttggtgacaagtcaattaaaattgctgactttggagttgcccgtattgaggtgcaaactgaaggaatgacacctgagactggaacataccgttggatggctccggagatgatccagcataggccttacacacaaaaagtggatgtatatagctttgggat

SEQ ID NO: 182790 - DNA, 254 bp, Glycine max
ctgatcacaacctttgtggttgcagcctctgctggtaacttcaaccaagactttgagataacatggggtgatggtcgtgccaaaatcctcaatagtggggaacttctcaccttgtccctagacaagacctctggctctggatttcgttctaggaatgagtacttgtttggaaaaattgacatgcaactaaaactcgtgcctggtaactctgcaggcacagtcacagcttattatctatcttctctgggggatac

SEQ ID NO: 182791 - DNA, 189 bp, Glycine max
cttgaggccaggcaagccccactcaaccaccacacctctcctcgttcacgctacccctttctgctcttcttctacctttcaagttttaaaagtataaagatggcagagacattcctatttacctcagagtcggtgaacgagggacaccctgacaagctctgggaccaaatctccgatgctgtcctcgac

SEQ ID NO: 182792 - DNA, 169 bp, Glycine max
catggtgaatgggaagccccaaagattgagaacccaaaatgtgaagcagcccccggttgtggtgagtggaagaggccaatgaagaggaatccagcttacaaaggaaaatggcatgccccactaattgaaaatcctgcttataagggaatttggaagcctcagggcattc

SEQ ID NO: 182793 - DNA, 236 bp, Glycine max
ctctctgctcctaggggttctccttcgagttgaccgaaacgatcctccaaccgcgtttgtttatgggacagggaaatggctcccaaaccgccagtacggggctggttggtggacttgaccaaggtgaagttgttaaccaggagggatttgccccaaggctctcagatcgtaagggggaaacaagccagaaggtgcactttgtgaggaacctcataagagaagttgctggttttgca

SEQ ID NO: 182794 - DNA, 244 bp, Glycine max
ctcgcaagcaaaaagaaagaatcccaggcgaggagaaagatggaggggaaggagcaggatgtgtcgttgggagcgaacaagttccccgagagacagccgattgggacggcggcgcagagccaagacgacggcaaggactaccaggagccggcgccggcgccgctggttgacccgacggagtttacgtcatggtcgttttacagagcagggatagcagagtttgtggccacttttctgtgtctct

SEQ ID NO: 182795 - DNA, 255 bp, Glycine max
ggagaaatagaaagagaggagatgtcgtcgacaaggtgggagaaggaggaggaagaagaagaagaagaggcccaaatggatatctggaagtacatatttgggtttgtggaactggcagtgataaaatgtgcgattgagcttggcatagctgaagccatagagaagcatggaagtcccatgacactatcggagatatcatcaagtttagggtgtgatacttcacatctgaagcgcatcatgaggttcctggtgaaa

SEQ ID NO: 182796 - DNA, 161 bp, Glycine max
cgcgcttttgatttgcaacggcttcaaggacgcggagtacatttctcttgccctggttgccaacaaacttgccctcaacaccgtgattgttgtggagcaggaggaggaggttgatttgatcgttgaattgagcaagaagctctgtgttaagcccgtaattg

SEQ ID NO: 182797 - DNA, 209 bp, Glycine max
ctgctcgagctcgagccgaatcggctcgaggaaggaacacgtcgtcttctttcaccccgaactacgcatacccggggcggacgcctggtcatcgatgccgcagtcggcctccagaatcgcgggcacaaggtcaccatcttcacatcgcactgcgacccgcaacactgcttcgatgaggcgcgcgacggtaagcctctactacaacacct

SEQ ID NO: 182798 - DNA, 155 bp, Glycine max
gttagatatagcaagagtggttcctgctgttaaccaagtggaattgcacccaggatggcagcagccaaagttgcgcgcattttgtgaatctaaagaaattcatctatctggatattctccactaggttcaccagcagctctcaaaagtcatattc

SEQ ID NO: 182799 - DNA, 264 bp, Glycine max
cgaggcgagagaatcggatgcccccggagcaaaggactatgtgcatattcgaattcagcagaggaatgggaagaagagtctgaccacagtgcaagggctgaagaaggagttcagctacgagaagatcctcaaggacctcaagaaggagttctgctgcaacggaaccgtggtgcaggacaaggagcttggcaagatcatccaactccaaggcgaccagcgtaagaacgtctcccacttcctcgttcaggctggccttgtcaggaa

SEQ ID NO: 182800 - DNA, 250 bp, Glycine max
ctttcaacaaaaaatcgaatcccattttaattctcaaatccaagcactcgggagacagagaaagagaaagagaatggacgccattgattctgtgttcgatccgctgagagaattcgcaaaggacagcgtgaggctcgtgaagcgctgccacaaacccgatcgcaaagaattctccaaggttgccgtccgtactgcaattggtttcgtcgtgatgggattcgtggttttcttcgtaaagctcatttgcatt

SEQ ID NO: 182801 - DNA, 258 bp, Glycine max
ctattattctcgttttcaatatgcagatcttcgtcaaaaccctaaccggtaaaacgattacgctagaggtcgagtcctccgacacaatcgataacgtgaaagctaaaatccaatacaaggaaggcattccaccggatcagcagcgtttgatcttcgccggtaaacaactcgaagacggcagaactctcgccgattacaatatccagaaagaatcgacgctccaactcgtcctccggcttcgcgggggcatacaaatct

SEQ ID NO: 182802 - DNA, 248 bp, Glycine max
gcagtgtcccgatggggagttgcagaagaggaaggaggtcgtgcattgcgttacgcttcatgagattgatgttattaatagcagaacacagggatttctggctcttttcacaggggatacgggtgaaattcgtgctgaggtcagagagcaaattgacaccaaagtggcagagtggagagaagaaggaaaggcagagattgtgcctggtgttcttttcattgatgaggtgcacatgcttgacatagagt

SEQ ID NO: 182803 - DNA, 260 bp, Glycine max
gtttcgaatagattatcctaagtctttgggaatagtgctgcaatggcttcaagtcaggaggaggtgacccttttgggagctactggaagcccatttgtgtgcagggttcatattgccctcaagttgaagggagttcaatacaaatatgtcgaagaaaatttgaggaacaagagtgaactgcttctcaaatccaacccagttcacaagaaggttccagtgtttattcacaatgagaagcccatagcagagtctcttgtgat

SEQ ID NO: 182804 - DNA, 257 bp, Glycine max
ctggaatccaacctgtcgatattcctgggatccaaaatctcgatgcgacagaacacatcgaaggccattcgtcttatctgtgggctacacaaaagatcttagaccaacttcaattggatacatactatcctgtatataactacatttcttgcatacccatacagtgacctttaatggaggtgttctgtttctctgcttacgttcttctgccagccgttgaagtgggatgaccctattcagaaattatgtatgaaata

SEQ ID NO: 182805 - DNA, 79 bp, Glycine max
caaaaaggcaaatttcttgtcttctgaggactttgagcctcctcttatcccttccaagacaatccctgatcctgatgat

SEQ ID NO: 182806 - DNA, 219 bp, Glycine max
caagtctggtgcttcgatgaagtgtgctggttgtcaaggaactggtatgaaggtttctataagacatcttggcgcatccatgattcagcagatgcagcatgcctgcaatgaatgtaagggtactggagaaactatcaatgacagagatcgctgcccacagtgcaatggagagaatgttgtgcaggagaagaaagtccttgaagttattgtagaaaaggg

SEQ ID NO: 182807 - DNA, 234 bp, Glycine max
cgaaatttctgcagaggattgcttacctcaatgttggaatctatccattcacttccatcttccttattgtgtattgcttcgttcctgctctttcacttttcactggccagttcattgttcaaacccttgaagtcaccttcctagtttacctcttgggcataaccttgacccttgtcatcctcgctgctttggaaatcaagtggtctggcattgagcttgaagagtggtggagga

SEQ ID NO: 182808 - DNA, 275 bp, Glycine max
cttccttctcatcattctcatattattgtcgccacttcgagctcaatcagcctcgcgccctcgctcttcccttcctggtggcgacaatgtcggctcctgctaggaataggatgattagagacttcaacaggctgcaacaagatacgtttgccgggatcagcggtgcaccccaccataagcacatcatgtacgaggtctgctggcatatttggtgctgatgagaatccctgggatggaggccgttcattttgattgcccagtttactgaggattat

SEQ ID NO: 182809 - DNA, 274 bp, Glycine max
cctcctcgttcttcttcttccgccctttctctctctagaaccgtacggtcgtttcttcctctctcctcaaccggagacagcgtcgccttcttttctgaatctcgcggtgttgttagttctgcggcggttgtagttccggcggcgatgggacagcaatcgttgatctacagcttcgtcgctcgcggcaccgtgatcctagcggagtacaccgagttcaccggaaacttcaccagcgtggcggcgcagtgcctccagaaactcccttccttccaac

SEQ ID NO: 182810 - DNA, 273 bp, Glycine max
aagacataagggaacttttctctgagcttggagagttgaagcgttttgctgttcattatgacaaaaatggacatccaagtggttcagctgaagtcgtttatactagaagaagtgatgcatttgctgctcttaaacgatataataatgtacttttggatggaaagcccatgaagattgagattgttggttccaattcagaattgcctataagtgctcgggtgaatgtcactggggtgaatgggcgcaggaagaggactgttgtaatgacgctag

SEQ ID NO: 182811 - DNA, 272 bp, Glycine max
tttgaaccaatgacaatgcttcagaaaatggctgagcttatggagtactcttacctgttagatatggcggacaagactgaggatccatacatgagactagtatatgcttcatcattctttatatctgtctactatgcctatcaacgaacgtggaagccattcaatccaattcttggtgagacttatgaaatggttaaccatggtggcattacatttatatcagagcaggtcagtcatcaccctccaatgagtgctgggcatgctgaaactga

SEQ ID NO: 182812 - DNA, 271 bp, Glycine max
aggacatgcgtcaaactgtggctttcggagtcatcaacagtgttgagaagaaagaccccaccggagctaagttcaccaaggccgctgccaagaagatgtgattgcatatggccaatttgtgtagcacatgtgatcatcatcgtggttactcctttatagtagtattatccttggagagtcttaggtggcatgtgtacgtgatatgtttaagattctgacgatttcactgaagccgaaacttgcagaactaggttcttgatcggcggtggtc

SEQ ID NO: 182813 - DNA, 273 bp, Glycine max
aataggagccctgaaattattatggctccacttcttcctcctgagaattgtatgtcaaagctcattactcgatcagatgatactgaatcagtggtcaaagaaaggcttcgaatatacaatgaaatgactcagcctgtggaggaattttaccgttcgagaggaaaattattggagtttaacctgcctggaggaatcccggaatcttggcctaagttgctacacgctcttaatcttgatgattacgaggacaaacgatctgctgcagcataaaga

SEQ ID NO: 182814 - DNA, 274 bp, Glycine max
cagagagagagagagagagagaagggtttgagagagatggggaggaggatactgaatgatgccttgaggagtatggtgaatgcagagaggagagggaaatctatggtggaactcaagccaatctccactgttatgtcttcctttctccaaatcatgaaacaccacgggtatatcaaggactttcaagtctatgatccgcatagagtggggaggatatcggttgaactacaaggtaggattaatgattgcaaggcccttatgcacagaaaggacc

SEQ ID NO: 182815 - DNA, 274 bp, Glycine max
agcgatgagcgtggcagcggagaagatagcgacggcggcgcgacgccaagccgtgtcgctaacggacgccgccgcctcgcgaatacggcagctgctacagcagcgtcagaggcccttcttgaagctgggagtcaaggctcgaggctgcaacggcttatcatacaccctcaattacgcagatgaaaaagggaagtttgatgagttggttgaggataagggtgttaagatattgattgatccaaaggcgcttatgcatgtcattggaactacaatg

SEQ ID NO: 182816 - DNA, 233 bp, Glycine max
aaaggctagaacctgcccctttttttttggcaatatctttcttttttatttatttatattattggtttctcacgtgtaatttgcgtatcaatgcttcactgcattaagtcaaagtccgagaagcagttgcacttacacataatcattgtatttttgtgtccattgcccaccaccatgcctgtattgtgattttagatcactaattttcgagaccttgtattattcgtgttatc

SEQ ID NO: 182817 - DNA, 270 bp, Glycine max
cggcgacttctcgatattattttttctgacagagccaccgacagagccggcggttcccgtggcggtttgagaatggccgacaagtacaacctgaagaaccccgccgtgaagcggatcctccaggaggttaaggagatgcagtccaacccttccgacgatttcatgagcctccctctcgaggaaaatatatttgagtggcaatttgcgattagagggcctcgtgatacggaatttgagggtggtatttatcatggaaggatccagttgcct

SEQ ID NO: 182818 - DNA, 262 bp, Glycine max
catcgtgaatgcgtataaaaggaaaataaagacattagcgtcaaaatgttgggtgtgttcagcagctccatactctcgctgcccatgacgctcgtggcgccggccccgtagtacgtcgccgaagatgacggcggcggcgctgcggaagcggttcgaggagaagaacccctccgccgtgtcggtggaggtcggagaccatgtccagctcgcttatacccactacaacgagtcaaatattcagcacaggtaaactaattgacat

SEQ ID NO: 182819 - DNA, 269 bp, Glycine max
cgagccgctcgagccgcgccagaatccgttgagaatggcgttgccggtagtcgtcgatccagagtaactcaaggaggtcgacaaggctcgccgcgatctccgcgcactcatcgctaacaggaactgcgctcctctcatgctccgattagcctggcacgatgccggaacttacgatgctaagaccaagaccggtggacctaacggttcgatccggaacgaggaagagtattctcacggagccaataatggcttgaagaaagctattgatt

SEQ ID NO: 182820 - DNA, 276 bp, Glycine max
cgattttctgatgggtggagtatccgctgctgtatcgaagacagctgctgctccaattgaacgagtcaaattgcttatccaaaatcaggatgaaatgataaaaagtggtcggctatctgagccatacaagggaattggtgattgtcttgctcgaacaatgaaggatgagggtgtgattgctctttggagaggaaatactgctaatgttatcagatatttccctactcaggctctgaactttgcctttaaggattactttaagaggcttttcaactt

SEQ ID NO: 182821 - DNA, 283 bp, Glycine max
cagaaacacaaaatggctgagcagaggcaaaacaacgtccacgttcttgttctgccataccctgcccaaggccacatcaaccccctcctccaattcgcaaaaagattagcttcaaagggcgttaaagccacagttgccaccactcactacactgccaactccatcaatgcacccaacatcacgattcatgccatcttcgatggcttcgaccaagcgggcttcgcccaaacaaacaacaacatgcagctcatcctggcctccttcagaacaaacggttccagga

SEQ ID NO: 182822 - DNA, 270 bp, Glycine max
gagttccagagagagaccctcttgcacaattgagcttgcctcctggatttagattttatcccactgatgaggagcttttggttcagtacctttgccgcaaggttgctggccatcatttctctcttccaatcattgctgaagttgatttgtacaagtttgatccatgggttcttccaggtaaggcagcgtttggagagaaggagtggtacttcttcagtccaagagacaggaagtacccgaatggttcacgaccaaacagagttgcgggtt

SEQ ID NO: 182823 - DNA, 266 bp, Glycine max
acgaaatcgcgaacagaacagcaacgttaacaatgggttctcgctacgaggtggaactgaagctctcatcggcacgcgctctcaagaacgtgaactggcgccatggcccgaaccgcccatacgtcgtcgtttgggtcgacccaagcaacaagctctcgacgcgcgtggacgaaagcggcgacactgacgcgaattgggaccaaacgctcacaattccgttgccaccaaagcctctcgaggatcaaacgttgtacatcgacgtggtc

SEQ ID NO: 182824 - DNA, 266 bp, Glycine max
cttttgatttttggtgacaagtcaattaaaattgctgactttggacgttgcccgtattgaggtgcaaactgaaggaatgacacctgagactggaacataccgttggaccgctccggagatgatccagcataggccttacacacaaaaagtggatgtatatagctttgggattgttctatgggaactcatcactggtatgcttccatttcagaacatgacagcagtacaggccgcatttgcagttgtcaacagaaatgttcgcccaa

SEQ ID NO: 182825 - DNA, 263 bp, Glycine max
  unsure (1)..(263): unsure at all n locations
cgctgttctttcaaatcgtaaccgaagaatgaagatggtgcgctgctgtcggtgcttcgcctgagtctcattccgtttgcgcccactatcacaggttgtgctgaggcttaactggttcttgaagcatatttcagagttttatcagagaacaaatgggttatattgggactcaccctgntgcagctctgcacagatataaatatagtggagtagatcattcctatgtggccaaatatgtactacaacccttttggagtcgcttg

SEQ ID NO: 182826 - DNA, 271 bp, Glycine max
cgaaatgcagctgttgttttccaaaagtgcgacttggtggcccgaaagcccatggataaacagaacaacatggtcactgcccaaggacgagaagatccaaaccagaacacaggaacttcaattcaacaatgtaacctaacaccaagttcggatcttaagcctgtcgtgggctccatcaaaacttttctagggcgcccatggaagaagtactccagaactgttgtgatgcagtcgacattggacagccacattgacccaacaggatgggctg

SEQ ID NO: 182827 - DNA, 264 bp, Glycine max
ctaccataaatgctatagctgttgaagcttacaaaaagtatataacggtttctctcattcgtcatggacagttctcaaccagtcttcctaagtattcttcttcgactgctcaaaggaacctgaagaacttttgtcagccttacgtcgaattggctaatagttatggcactggacaaattgaagaactagaggcatatgccagggcaaatgcagagaagtttgaatctgacaacaaccttggactggttaatcaggttgtatcat

SEQ ID NO: 182828 - DNA, 267 bp, Glycine max
ctcatatccttatcctgtttctttcaatggaagtcatttctgcttctagcttgaatcccaacgctccgatgttcgtaccactcgcctatcggacggtggaggatttctccgaccagtggtgggacctcgttcactcctccccctggttccgcgactactggctccgcgagtgcttccaagatccccagttccaaaacgacgacgctttcgacttcgactttgacctagatctccaagatgaagatgaaagggaacgaaaggaaggga

SEQ ID NO: 182829 - DNA, 261 bp, Glycine max
tggggttcaacacgcggaacgaccttctctcgcggttcacgggatccataaacgacgacgtttatttaagagacattgtggtgagttttctcttagcgggccgtgacaccatcgcctccgggttaatcggcttttttatgttgttgtctaaaagcccggaggtggaggagttgattacagaggaggcgggccgggtggtgggcccgggccaggagtttccttcgtttgaacaaatccgcgaaatgcattacctgaacgcgg

SEQ ID NO: 182830 - DNA, 265 bp, Glycine max
cgcatccgttgcctgaaaaattgttcagaagcttggacactgtaactcgtatgttaagattcacagcaccttttccacttcttgcatttcctgtgtacctttttagtaggagtcctgggaagactggttctcactttgaccccagcagtgacttgttcgttcccaatgaaagaaaagatgttattacttccacagcttgttgggctgctatgttgggattgcttgttggattggggtttgtaatgggtccaattcaacttcttaa

SEQ ID NO: 182831 - DNA, 260 bp, Glycine max
ctttcttccaacctctcaagtccaaactacccctttttcttctcccaccaacttcaccgtcctcttcctcgatcatgtctcacttcaagggcaagtaccatgatgagcttattgccaatgctgcttacattggcactcctggaaagggtattcttgctgctgatgagtcaacagggacaattggcaagcgtttggccagcatcagtgtagagaatgttgaatccaacaggcgtgctcttagggagctgcttttcaccgct

SEQ ID NO: 182832 - DNA, 265 bp, Glycine max
actcgagccgaatcggctcgagcatctgcatatctttctgcaagtaccagttctaacgtacacccacttgttattgctgcaactcctcaagaaccaaaccagtttgctgtaggactgtcggatggcggagttcatgtctttgagccccatgagtctgaaggaaaatggggtgtgcctccacccattgagaatgggtcaacgagcaatatggcagctacttcagttggagcttcttcagatgaagctcagagatgatccatgtcag

SEQ ID NO: 182833 - DNA, 264 bp, Glycine max
ctgtactttatccctttctgtgagggaattatggtaattgatatcgaggttttgactcatggattctgatcgccccagaaaaccttccaaaaatttagttcactctcgcttcttccttttcggcttctattgctgggattgggagttcttaaccgctctcctcctttttagttgttccccttaatcttgttccttcatattttttttttttcttattagatcagattgaacaaaagggttgctctttattttttaatcttgggg

SEQ ID NO: 182834 - DNA, 266 bp, Glycine max
cttttgagtcttccaagttttcaccatcgtaatgggttccgaaggatccagcgtcgtggttcctaggaatttcagattattggaagagcttgagagaggtgagaagggaattggggatggaactgttagctatggaatggatgatgctgatgacatatacatgcaatcttggactgggactatcatcggtccccctagtactgttcatgaagggcgtatctaccagttgaaattgttttgcagcagggattatccagacaatcctc

SEQ ID NO: 182835 - DNA, 269 bp, Glycine max
ccataagaagacagatgaaataaacagattaaatggactttacaagcggatgttatccaattggggggttaaattatttgaaggtgagggaaagatagttggtccaaatgaagttgaggtgacacaattggatggcactaaactgtcctactcagcaaagcacatattgattgcaactggcggtagagctcaacgtccaaatattccaggacaggagttgggtataacatcagatgaggcgctaagtttagacgatcttcctaaacgtg

SEQ ID NO: 182836 - DNA, 281 bp, Glycine max
agtcgcacttgatggcatactataccgcaatgttagatctgtgaattacaccaggggaagtttcatctttcccggtgctcagccctatccccatcgcaacttttctgaggaagttgctattcttgatggctagtttggcaagcttagtgcaggaagcaatgcttatattttgggtactcaagaccaatcacagaactggcatgtctactctgcttctgcagattctgcaactccatgcgacaatgtttacactctagacatgtgaatgactgggctggata

SEQ ID NO: 182837 - DNA, 269 bp, Glycine max
tcaatcctagaactcaacctggcttcagcaaaggatctcaaagacttgaatatattctcaaagatggatgtatatgctgcgctttcactctccggcgatcaaaagaccaagactcccgtccacagaaacggcggcaccaacccaacatggaattttccggtcaagttcacttttgatgaatcggtggcgcggcagaaccgtttggccctcgaaatcaagatccgctccgagcgcgccctcgccaccgataaggacatcggccaggtcca

SEQ ID NO: 182838 - DNA, 261 bp, Glycine max
cgaattcaaggatgaaggagcaagcttatgaacaatcaccaacactcttcttgtcagatattcaacaggtttggagaaagcttcaagacgctggtaatgagattgttgctcttgccaagagcctctctaacatgtcaagaacttcctactctgagctggtgggaattccagcacagagcacatttcaagatgagaagcaagtcgaatttgactgttgcatgaaaccagaacagacacaagcatgtgctatgtacaaaattt

SEQ ID NO: 182839 - DNA, 257 bp, Glycine max
cttgaaggtcattgctgagaatatgtctgcagaagagatccaaggcttgaaggcaatgtttacaaatatggacactgacaagagtggtacaatcacctatgaagaacttaagtcaggattgcatagacttggctcaaagcttacagaggctgaagtgaagcaacttatggaagctgctgatgtagatggaaatggctcaattgactacatagaattcatcactgctacaatgcatagacacaaattagaaagagatg

SEQ ID NO: 182840 - DNA, 258 bp, Glycine max
gttaattgttaaatcatggtaggtatagaaagaaaactcaatttggcttcttacaattgcaggctgttttgtgggatcgatgacatatattgtctcttcttggggagcttgaacaacttgtccctactcaacaagcaatatggattgtcaaagagtactgatgaggccatgtttgttattgaagcttacaagacactccgtgaccggggtccataccctgcagatcaagttgtcaaggagcttgatggcagttttgcc

SEQ ID NO: 182841 - DNA, 259 bp, Glycine max
catgagcctcttcggtataggcagaaaccagagaacattccgcccgaaaaaaagtactccttctggaagtaagggagctcaacttagagaacatattgatgccacgttgggtagtggaaatctgagggaagcagtaaagctacctcctggggaggatttaaatgagtggctagctgtcaacactgttgatttcttcaaccaggtgaatctgctttatggtacccttacagagttctgtactcctgagaattgtcggacg

SEQ ID NO: 182842 - DNA, 261 bp, Glycine max
aatatattccattctctctgtgtatgtcgctacctctcgcttcaagatgcagatcttcgtcaaaacctcaccggcaagaccatcacccttgaggtggaaagctctgaaaccatcgacaacgtcaaggccaagatccaggacaaggaaggaatccccccggaccagcaacgtctcattttcgccggaaagcaacttgaggacggccgtacccttgctgactacaacattcagaaggagagtactcttcacctcgtcctccgt

SEQ ID NO: 182843 - DNA, 261 bp, Glycine max
cctcgagccgaatcggctcgaggcaattttcatttttctctctcccctagtcaaagggattcaccgttcttcttcccaggttatttagaaaagcaaaatggtgaagatttgctgcattggtgctggatatgtggggggtcctactatggcagtcattgcacttaagtgcccatccattgaagtcgctgttgttgatatctctaaatcccgcattgcagcctggaacagcgaccagcttcctatctatgaacctggccttga

SEQ ID NO: 182844 - DNA, 268 bp, Glycine max
cctcgagccgctcgagccgaatcggctcgaggaaggaacacgtcgtcttctttcaccccgacatgggcattgccggggcggacgcctggtcatcgatgccgcagtcggcctccagaatcgcgggcacaaggtcaccatcttcacatcgcactgcgacccgcaacactgcttcgatgaggcgcgcgatggtaagcctctactacaacacctcggaccacccgccgcctatgcctggccacgcagctgagacctgacgcgcgcacaaagg

SEQ ID NO: 182845 - DNA, 260 bp, Glycine max
ccttgatcttccttcctctgaaacaagaaccacaatggagaattcgaccgaagaatcccatctccgatcggaaaactccgtcacttacgagtccccttaccctatctacggcatgtcattctccccctcccacccccaccgcctcgccctcggcagcttcatcgaagaatacaacaaccgcgtcgacatcctctctttccaccctgacaccctttcggtaactccccacccttctctctccttcgaccacccttaccctc

SEQ ID NO: 182846 - DNA, 258 bp, Glycine max
cggctcgagcttgtatgttactttaataggcgtcgttcctcttggctgagaaaacaagtaacagtaaagcgcctattacgcgaactgcaggagactcaactgtccctctatatccctacaaagaaatagaaagagccacaagttttttctctgaaaaacataggcagggaactggagctttcggcacagtttatgctggacaccttcacaatgatgagtgtgttgctataaaaaagatcaagtatagagacaccaaca

SEQ ID NO: 182847 - DNA, 267 bp, Glycine max
ctcacgcatttcctcgttttcttcttcttcccttttctctcttctcactctttctccggcgacgatctcagattccggtcactcctctcgccggcgatcccttattcctccgtcctccgtcgagtcctttccgattcgaatcgttcccagccttgtgccaccatgaatcccgaatacgattatttgttcaagcttttgctgattggagattctcgtgtaggcaagtcatgtcttctcctgaggtttgctgatgattcataccttgac

SEQ ID NO: 182848 - DNA, 289 bp, Glycine max
attctgggcacctaaaagttgcagactttggggttagcaagttgctggcagttaaagaagacaagcctctaacttgccaagatacttcctgccgctatgtggctcctgaagttttcagacaagaagaatatgacactaaagtggatgtattttcatttgcactaattctgcaagagatgattgaaggctgccctcctttttctgcaaagcaagacgatgaagttcccaaggtatatgctgcaaaagagcgtccacctttccaagcaccagccaagcgttactcccatgg

SEQ ID NO: 182849 - DNA, 276 bp, Glycine max
aaagcagatgagcagcaactcaggaaaagtggtgtgtgtgactggtgcttctggtttcattgcttcatggatcatcaaactgcttctccaacgtggttacactgtcagggccactgttcgcgacccatctaaacccgaaaaggttgatcacttgctcaaacttgatggtgcaaaggagaggctacatctctttaaggcagatctgctggaagaaggttcctttgactctgcttttgagggttgtgatggtgtctttcatactgcttaccccgttca

SEQ ID NO: 182850 - DNA, 274 bp, Glycine max
ctcgagccgctcattcacacattcacagttatactctctctctctttgtcgcttggatcaatgatctcatctcaattttcagatatgtcgacatctgataagccagaagtggtggaaaggggtagcaaggatgaaaaacacaaggaagatgatcaagaggaggggaagggtggattcattgagaaggtgaaggatttcattcatgacattggtgagaagattgaggaagctattgggtttgggaagccaactgctgacgttactgcgattcaca

SEQ ID NO: 182851 - DNA, 276 bp, Glycine max
ataatttgttcatgtttgttcctccacattaacaattttcaaaaaaatcactatatattatgatgagaaatttatacattcaaaattgtcaggtcatctctatgttaaaagtgatgtatatggatttggcgttgttctgctagaaatgctaacaggtagggcagctctagacacaaatcagcccgcgggtatgcagaatttggtggagtgcactatgtcatgtctacatgacaaaaagagactgaaagagataatagacccaaggatgaacgagca

SEQ ID NO: 182852 - DNA, 275 bp, Glycine max
catggtcatagtctacacctaattagccaaacacaccacagcaccaaactagttggctcaattctctttgaatggctttggaggctttgaattcaccaacagcagccaccactcccttccgtggttaccaagaagaggaggaggaggttgaccttcacctacgcgagccttgggccaagagaaaacgctccaaacgacctcgttttgagtcggaggaagagtacttggctctttgcctcatcatgcttgcacaaagcggtaactacaacaacacc

SEQ ID NO: 182853 - DNA, 274 bp, Glycine max
ctcgagccgctccgatggctaatccctcactcttgttcttcagtctcctcctattatccgacaccgtagccgccgccgaacggatcgacgatgaagacgaccttctgatccgtcaagtggtgccggatgcggaggaccaccacctgctcaacgcggagcaccacttctccgccttcaagacaaagttcggcaagacctacgccacgcaggaggagcacgaccaccgcttccgtatcttcaagaacaacttgctccgcgccaagtcacaccagaa

SEQ ID NO: 182854 - DNA, 275 bp, Glycine max
agaagccgcttctggtctagagagcgtcgagaagctcatcagactcctctcccaaacccaagcccaagcccaagcccaccatcaattcaacaacaacaatatctctagtaatgaaatcgccatcgccatggactgcaaagccgtcgctgacgtggcagtctccaagttccagaaggtcatttccctcctcggccgaacccgtaccggccacgccaggttccgacgcgcccctctccccaaccaacaccaacacacccaacctccctccgaaccgc

SEQ ID NO: 182855 - DNA, 237 bp, Glycine max
  unsure (1)..(237): unsure at all n locations
agcacatctggagtggaaccttgatggtcttctggagaaaatttgggaatatctcaacttaactcgtatttatactaaacctaaagggatgaatcctgattatgaagaccctgtaatattatcctctaagaagaggacagttgaggacttctgcgatcgcattcacaaggacatgcttaaacagtttaagtatgctttggtctggggttcaagtgcaaaacacaagcctcanagagt

SEQ ID NO: 182856 - DNA, 273 bp, Glycine max
ttcacattttagaagaataccccctcttttgctgcatcagaggagttgtaaattaagagcatggctgcacaagctcttgtatcatcatcttctcttaccttctcagcggaggctgcaagacaaagtcttggaccaagatcactccaatctccatttggcttctccagaaaagcctcctttcttgttaaggcagctgctaccccccctgtcaagcaaggatcagacagacctttgtggtttgcatcaaagcaaagtctttcttacttggatggc

SEQ ID NO: 182857 - DNA, 280 bp, Glycine max
tattgcttcttcccttttgtcttcaaaggaagagaattcgcaatttgcaattttgcattggcgggcactgaaatcgagagagacatccgaggtccaatttgtcagaaccaatagctcgaagcttctcgtgggctgctccgatggatcgctccgaatattcgctccggaaacggaatcttcctccgacggctccaagtcctacgccttggagaagaacctcgccgggttcgcgaagaagcccgtgctctcaatgacggtggtggagtcgcgagacttcctc

SEQ ID NO: 182858 - DNA, 270 bp, Glycine max
tggcaggaagcagcattaacagaggagaaagatggtctctcaatggaatgactgctcttgtcaccggcggcactcgtgggatcgggcactccatagtgagtgacttggctgcgtttggcgctgcagtgcacacctgttccaggacccaaacagagctcaacaaatgcttacaagagtggcagagtcaggggtttcaggtaactgggtcgctctgtgacgtgtcctcaccaccccagagagagaagctcattcaggaagttgcatccacct

SEQ ID NO: 182859 - DNA, 269 bp, Glycine max
ctcattggtacttctcatatatttgtggtgctccctcttcagtttttggtaaactaaacttcttcaattcaagggggtatcaaaatctgctggttggtttcatcaatctgatggaggaaaatctgcctcccggatttaggttccaccctacagatgaaagactcatcacatgttatcttacaaggtaggtttctgattctagcttcacatccaaagctatagcagttgttgatctcaacaagtgtgaacttggggacctcccaggtaag

SEQ ID NO: 182860 - DNA, 259 bp, Glycine max
aagaaagtagcagatcctccatggcctccaccaaggaacgtgaaaacttcgtctacgtcgccaagctcgccgaacaagccgaacgctatgaagaaatggtggaagcaatgaagaatgtggcgaactaaacgtggaattgacggtagaggagcggaaccttctgtcggttgggtacaagaacgtggtgggtgctcgtagggcttcgtggaggattctttcctcgattgaacagaaagaagaagctaaagggaacgatgtg

SEQ ID NO: 182861 - DNA, 271 bp, Glycine max
ggaataatgggtatctgcatatccgttgcagaagaagctcatgatgatgataatgtgacaatatttgaagcaagaaaggttctaaatgggagtcagagactttgctctgtttactccaaacagggtagcaaaggactcaaccaagatgctgcctctgttcatgagggttatgggatggaggatggaacattttgtggagtttatgatgggcatggagggaatggacacaaagtgagcaaaatagtaagcagtcgtttatcttccctcatac

SEQ ID NO: 182862 - DNA, 274 bp, Glycine max
gccggggagcggaggtgcggcgtcggcgcagaacgaagccatagaccggcgagaccgtctccggcgactggctctggagaccatagacttggcgaaggatccctatttcatgcgcaaccacctcggaagctacgaatgcaaactctgtctcactctccacaacaacgagggtaactacttggcccacactcagggcaagcgccaccaaaccaacttggccaaacgtgccgctcgcgaggccaaggacgcccccgcccagccccaaccccacaag

SEQ ID NO: 182863 - DNA, 275 bp, Glycine max
cggctcgaggcaagctggtgctgtgaggcaccttgtggacttaatggacccagcagctggaatggttgacaaggcggttgccgtcttagcaaatcttgccacaattccagaaggaagaaatgcaattggtgatgaaggtggtattcctgttctggttgaggttgtggagttgggttctgcgagaggaaaggagaatgcagctgcagctcttctacatctttgctcacatagtcccaaattttcaagcaaggtgcttcaacaaggagctgtcccgc

SEQ ID NO: 182864 - DNA, 266 bp, Glycine max
gtcttatcattattagggtttggcgattcacagagaaagagaaatgggagaacgaaaaggaatcccaattgctctggggctcttggcgatgctcctcttcttcattgcttcttcctcttcctctcacctcgttcgtccttccgatgacgccgacgacgcgatcttctacgagtcattcgacgaggattttgacggacggtggattgtgtccgacaaggaggattacaacggtgtctggaagcatgctaagagtgatgggcatgatg

SEQ ID NO: 182865 - DNA, 270 bp, Glycine max
tttcaaattattctgtggcaaggagagaagaaaagatcatagaaagtggtgattcttcgaatattgaagagagaaatatggggttgagattgaaggagacattctacttgtcccatggagcaccaactcttgccgtagatgattcaatccctgcgtggaacttcttcaattcgtggaaggagcagtttccgacgagaccctcttccattcttattatctccgcccactgggacacccatgttcccaccgtcaacgtcgttcaccagaatg

SEQ ID NO: 182866 - DNA, 269 bp, Glycine max
caacaaactcacaaaatggataagcaaattttctttcttcttccccttctcatcatgtccctcttcactgtttcaatagccgctgaatcttccagctcatgccccatggatctcaactatgttgagacctttccatgggactcttcatcctgcagagaccctgttgacaagaaccactgctgccaagtcttgctaagtgtaattggcataggactttcccaacatctcaaacaaacttccttgtttcaacttcccaatgaaaccatttc

SEQ ID NO: 182867 - DNA, 270 bp, Glycine max
caagcactcctggtgttagtgcctcccttttcaatgcattggctaaggccaatataaatgtccgtgctatagcgcaaggttgttctgagtacaatattactgttgttgttaagcgagaggattgtataaaggctttacgagctgtccattccagattttatctctcaagaaccaccatagcaatgggcattattggacctggattaattgggagcacactacttgaccagctaagggatcaggcctcaaccctgaaagaagaattcaaca

SEQ ID NO: 182868 - DNA, 270 bp, Glycine max
tgtgacatggtgtaaccaacttgaattgctggctcaccaagccactggctgctttgtgacacattgtggctggaattccaccctcgaaagccttagcctcggtgttccggtggtgtgtttgccacagtgggctgaccagttgcctgatgctaagtttttggatgaaatctgggatgttggtgtgtggcctaaggaggatgagaaaggaattgtgaggaagcaagagtttgtcaagagtttgaaggttgtgatggagggtgaaagaagccg

SEQ ID NO: 182869 - DNA, 278 bp, Glycine max
gtttcagtttcggatctctctcttctttcacaccaatttccagcatttgaaacatggcagattcaaaatcaggattgaggaaaccagtgttcaccaaggttgatcagctttgcccggggaccagtgggcacactttaactgtgaaggtggtcaatgctaagatggtgatgcagagaggtcgctctgatggtcctcaatctcgtcaaatgcgaattgctgagtgcttcgttggtgatgagactggaatgatcatattcaccgccagacatgatcaagtg

SEQ ID NO: 182870 - DNA, 270 bp, Glycine max
ccgatgggtgcctacaagtatgtttcagagctatggcgcaagaagcagtctgatgtcatgcgcttcttgcagcgggtgaggtgctgggagtataggcagcaaccttccattgttcgtctgacaaggtctacccgccctgacaaggctcgtcgcttgggcttcaaggctaagcagggctatgtgatttaccgtgttcgtgttaggaggggtggccgaaagagaccagttcccaaaggtattgtttatgggaagcccacaaaccacggagtt

SEQ ID NO: 182871 - DNA, 270 bp, Glycine max
cctcgagccgaatcggctcgagctcaatcaccccccctcgcactcactcttcccttcctctggcggcgacaatgtcgactcatgctaggaagaggctgatgagagacttcaagacgctgcaacacgacccgcctgcagggatcagtggtgccccccaggataacaacataatgctgtggaatgctgtcatatttggtcctgatgatactccatgggatggaggcacgttcaagttgacactccaatttactgaggactatccaaataaac

SEQ ID NO: 182872 - DNA, 263 bp, Glycine max
tgatttttgagtatcttgaacgggaccctccttacagccgtgagcctttggctgataagataatggatcttgcttttcaattccctgaactggtgacccttagaagttgtgatatactaccatcaagttggatatctgtagcctggtatccaatttacaggataccaactggtccaacattaaaagatctcgatgcttgttttctgacataccattctctttatatgcccatgggaggttcacaaagagtccaggctcccatg

SEQ ID NO: 182873 - DNA, 267 bp, Glycine max
gctgaaactgacatccaagactatctccaactcttcttcctctggttactctccatcatcgccgttagagccatactcaccaaactccgccacaagcctcgccgtccaccgggcccacggtccctccccatcatcggccacctccatctcatctccgccctgcctcaccagtctttccacgcgctctccacgcgctacggccccgccgtgcaagtcttcctcggctccgtccccgccgtggtcgtttcgtgcccggaactcgcgaag

SEQ ID NO: 182874 - DNA, 267 bp, Glycine max
gggaagaggtcgagtttcacagcagcaatagtgtacgtcaaggctcagaaatcaaaagcctacttcaagagatatcaagtcaagttcaagagaagaagagagggaaaaaccgattaccgtgccaggattcggttgattaatcaggacaagaacaaatataacactccgaaataccgatttgttgttcgctttagcaacaaggacattgttgcacaaataatatctgctagcattgctggcgatattgttcttgctgcagcatatgca

SEQ ID NO: 182875 - DNA, 265 bp, Glycine max
cactttgcgttttctgcgtcatctccgattccccgacaatggccacccaaatgagcaagaagagaaagttcgtagctgatggagtgttcttcgctgaactgaacgaggttctgacaagggagttagccgaggacggatactccggcgtggaagttagggttacgccgatgcgcaccgaaatcatcatcagagccaccagaacccaagccgttctcggtgagaagggaaggagaatcagggaacttacctcggtggttcagaagag

SEQ ID NO: 182876 - DNA, 261 bp, Glycine max
cgcctccggaggtaggacccacgagtgctccatctgccacaagtccttccccaccggacaggccctcggcggacacaaacgttgtcactacgaaggtaacagtaatggaaataacaacaacagtaacagctctgtcaccgccgcctcggaaggcgtggggtccacccacaccgtgagtcacggccaccaccgagacttcgatctcaacatcccggcttttccggatttttcgaccaaggtcggagaagacgaggttgagag

SEQ ID NO: 182877 - DNA, 221 bp, Glycine max
cgtactcggaatcgcgttttcgccgcggcgtgccggagccgaagatgccgatctacgacgtgcgaatgaacgtgaacagggaggacgagttcccgttctacgtgcagctggtctcgtgggacaaggagaacgtctccagcgaggcttaggaggcggcgcgcatcgcatgcgacaagtacatggccaagttcggcggcaaagatgccttccagctgcgcgtg

SEQ ID NO: 182878 - DNA, 265 bp, Glycine max
gggatagaagcagttatacaccctcgagaatggtgaaattccaggcaaaattataaacgcatttttttctctccgtccaaacggcagatccgatccgccctacaatcccctctcagtttttctctcgaggatccggtgaaacgacatggcgatggtggaccagcctctgtatccgattgccgttttgatcgacgagttgaagaacgaggacattcagctgcgcctgaactcgatccggaggctctccacgatcgcgcgcgcgctc

SEQ ID NO: 182879 - DNA, 265 bp, Glycine max
agaagaaccaacaagaggggtattgagactgagattcaagtaatggggaagagcaaggttcttgtggtgaggggaactgggtacatagggaggaggatactgagggcaagcctggcactgggccatgagacctacgtggttcagaggccagagttgagacctccagatagagaagctgcagaggctcctctccgtcaagaagcaaggtgctcatctcattgaggcctctatcaatgatcacaagagccttgttgatgctgtgaag

SEQ ID NO: 182880 - DNA, 268 bp, Glycine max
ctttgttgctgatgctgctatcataactgttcctattggaatcctaaaagccaatttaattcaatttgaaccaaaacttcctgattggaaggtttcagcaatttcagaccttggtgtgggcaatgaaaataagattgccctaagatttgacaaagtattttggcctaatgtagaactcttgggcactgttgctccgacctcttatacctgtggctattttctcaatcttcacaaagcaacaggccatcctgttcttgtctacatggta

SEQ ID NO: 182881 - DNA, 264 bp, Glycine max
aaactcccaagtgataaacagaagaggtttcactttttcaattgctttttctttcctaagcttgttgatttaagcacagataatcgttcaattgcttgtgatggtaaagcagcatttcagcgtgtaagcaattggacaagaaaagtgaacctttttgaaaaggattatatcttcattcccataaactatagtcttcattggagtttgattgtcatttgtcaccctgctgaagtcatgacatgctacagagatgaagaaactaag

SEQ ID NO: 182882 - DNA, 264 bp, Glycine max
gaaaacagagagcgaagaaggagaagagatcagaaaaatggcgtccaaagctccaaagaaggccaatctcctcgatcaccactccatcaagcacatcctcgacgagtcagtctccgaggtggtaacgagtcgtgggtttgtggaagacgtgagattgagcaatgtgaggcttctcattggggcaatcatcatcgtcattgctctcttcgcccaattctacaagaagaagttccctgaaaatagggattttctcatcgcctgcat

SEQ ID NO: 182883 - DNA, 261 bp, Glycine max
ctgctatttgccattgtcactctcattctcgatggcggcgaagatttcattggcaattggtttgagaactctcttcactgttttgggacttcttatgcttgctatcgttctttacactgtcttcaccgatggtcttccgtttcgcaaagaacttctcacaccgtggatggcagcaactttgattgatttttatatcaacgttgtagctttggcggtctggattgcttacaaggaatcaaacttaatcagctcaattctgtg

SEQ ID NO: 182884 - DNA, 267 bp, Glycine max
  unsure (1)..(267): unsure at all n locations
actcgagncgaatcggctcgagcggctcgagctggtcgtctttaaataccaagagatctgaaaacctaaatgtatcagggcatgtagctccgtgtgagaaacatcctggaagccttttggaaggatttactcagacacagattagtacactggctgtgcgggataagttgttgattgccgggggttttcaaggagaacttatttgcaagtatgtagatcgacctggtgttagcttttgttctagaactacttatgatgacaatgcaa

SEQ ID NO: 182885 - DNA, 259 bp, Glycine max
tcgagctttattggcaggtttatctgagcttagctttgacccaagacctgagattaggaagagtgccttggaagtcctgtttgaaaccttacgtaatcatgggcatctcttttcactacctttatgggaaagagtatttgagtctatcctatttcctatattcgattatgttcgacattctattgatccttcagggagtagttcaccgatcaatgaagtagaggctgatggtgagcttgatcaagatgcttggctttac

SEQ ID NO: 182886 - DNA, 266 bp, Glycine max
cctcgagccgattcggctcgagagcaaatacccctttattaatcttaaaggttttattgtagggaacccagaaactgatgattactatgactataaaggccttcttgaatatgcatggagccatgcggttatatcagaccagcaatacgacaaagcaaaacaagtatgtgattttaaacaatttgattggtcaaatgaatgcaacaaggccatgaacgaagtcttccaagattactcagaaattgacatatacaacatttatgccc

SEQ ID NO: 182887 - DNA, 268 bp, Glycine max
ctggatcttctgggtgggacctttcattggcgctgcacttgcagcactctaccaccaggtcgtaatcagggccattcccttcaagtccaagtgattcaatcaaaccgttcatgcttaatcaagttgggaacaacaaaaaaaatcaaaacaatgtttctgggtttcggtttcatttcatcaagatgatctgtttacctttttttttttaattttaatttaaagtctttgtattttgtatgtaaagatgtaaaattatgattattaggtg

SEQ ID NO: 182888 - DNA, 269 bp, Glycine max
agctggaaggttcggccagcattggcctgtggtaacaccattgttctcaaaacagctgagcagactccattatctgctttgtatgcatcaaagttgcttcatgaggctggacttcctcctggcgttctgaatgtaatatctggctttggtcctaccgctggtgctgccattgctagtcacatggacatagataagcttgctttcactggttcaaccgaaactggaaaagttgtccttgaattggcagctagaagtaatcttaagcctgt

SEQ ID NO: 182889 - DNA, 269 bp, Glycine max
cttcgccactctctttctcatgcccgttgtgtccgacgcaagggttgtgtgacggagagcaatccttcgccgcacggcgggcgtggcgctctgccttccgaaggtggcagcccctccgacctcctcttcctcgctggcggtggttcttcccattaacattctaaagtagtattagccattaacattacatcctacaccttcaaaagttctctctattagcggtttctggtttcttttgttcttcttctttggtagttgttaggtttggt

SEQ ID NO: 182890 - DNA, 275 bp, Glycine max
cccaatcaaacaatggcaatgataaataggcttcaagaagagaaagcagcaatgcagatggacagccttgcagtatcaaagaatgatggaagaacaatctgagtatgatcaggaggctttgcaactcttgaatgagctcatgatgaagagggagaaagagaagctagagctagaaaaggagcttgaagtatatagaaagaaggttcatgaatatgaggcaagagaaaagatgatgatgtcaagaagagatggtagcatgagaagcagaacttcat

SEQ ID NO: 182891 - DNA, 280 bp, Glycine max
cactcgagccgattcggctcgagcatcaaccccatcacaacttccatcaccagcacgaagcagaccaatgtctcacaccagaaacgcacactccttttctgttcccccatgttgattccactgttgtccctgaaccctccaatttcttctcctcaaaccttgtctcaaatccactccccacaaactccttcttccaaaactttgtcctcaaaaacggtgaccaacctgaatacattcacccttacctcatcaaatcctcaaactcttgtctttccctctc

SEQ ID NO: 182892 - DNA, 178 bp, Glycine max
cagccgggttcagattccaccccactgacgatccgcttgtgaatcactacttgtgtagaaagtgtgctgcacaaaccattgctgttcccatcatcaaagaaatcgatttgtacaagtttgatccatggcagcttccagagatggctctgtacggggagaaagactgggactttttctc

SEQ ID NO: 182893 - DNA, 265 bp, Glycine max
cgtggttgagatcgctagggtgatgagcccgcgctccatggcgaaggatcttagtgggaccatcaaggagattctcgggacttgtgtttcggttgggtgcaccgtggatgggaaggaccccaaggatctgcagcaggaaatttctgatggagatgttgaggttcctcttcattgacgttagtgaaatttcagtgtttttttttatttgtttcgattatgttgtttttgttttcggcaattttggttttttttttacaaggataaa

SEQ ID NO: 182894 - DNA, 267 bp, Glycine max
cctcaaggtactgcacaaatccccagatctacctgaaagtttgtcttcagagggacaggatttccttcagcagtgtttcagaaggaatccagcagaacgaccatcagcagcagtgcttcttacacatgcctttgtacaaaatttgcatgatcaagatgttcaagttcattcccaagggcaaaactgtcccagaggagaccctggaccaggagatgattcacgtagacatagccccggtaacagttcaagaaatagccgtggtgtagg

SEQ ID NO: 182895 - DNA, 265 bp, Glycine max
aattgttccattttcatttctttcgcaaaaatagcaactacttcctcagaaaaaaagtttctaagttaaggaaatccagagagacaaaaattgtcggttacggttcagctacatgcatagacatcctccttaccatcattctccctcctcttggagtctttctcaaatatggctgccaggcggagttctggatttgtttggtgctgaccctttttggttatatacctggaattatctatgctgtctatgctatcaccaagtgatc

SEQ ID NO: 182896 - DNA, 213 bp, Glycine max
caattacatatagcacaattctttaagagtgtattactaaggaaaaacaatgaaagttctgtacttccttgttgccatcttggctttgacatcctctcttgtctctgcctatgatcctagtcctctgcaagatttctgtgtggcatccaaagaaaaagatggtgtgtttgtgaacgggaaattttgcaaggaccctaagcttgccaaagttga

SEQ ID NO: 182897 - DNA, 269 bp, Glycine max
cctgcactcaccactgccacacttcaatcgcactaatggctgtcaccttctcagatctacacaccgaatagggcagcgaatccctcgatcaattcctgtctgggaaaacctatatttctggggatcagttgacaaaggatgatattaaagtgtatgcagctgttgttgaaaagcgaggggacacttgtcctaatgctgccaagtggtacgatgctgtctcttctcaacttgctccaagctttcctggccacgctcaaggggtaagattc

SEQ ID NO: 182898 - DNA, 270 bp, Glycine max
actccctgctatctcaacaattgctgaaagttcaagcacggtaacaagaagaacggcgaatacagtatacgattacgaatacagaacagagaacgtgaaagtcgtggaggaacgaaccgaggagaaaatacagaggagtgagacagaggccatggggaaaatgggctgcggaaataagagaccctttcaaagctactagggtgtggttaggaacatttgaaaccgctgaggacgcagccagagcctacgatcaagcttcattgcgtttca

SEQ ID NO: 182899 - DNA, 273 bp, Glycine max
attcttacaagttacatccattgagaaacatgaaggtctcccccttagcattttcaatccttctttttgtccttcaccatagaactcttcattggcattgcttcagcagcacaagaaccagtgcttgacacctcaggccagacgctgagaacaggtgtcaagtactacattctaccagtcttcagaggcagaggtggaggcctaacagtttcaagcagtggcaacaacacatgccccctctttgtggtgcaagagaagcttgaagtctcaaag

SEQ ID NO: 182900 - DNA, 214 bp, Glycine max
agacgagtcaaagacaatgtcagggatcattcacaagattgacgagacccttcatgtgggaggcacaagaaggaggaggagcacaagggtgagcagcaccatggtggagaatacaaaggggagcatcatggtgaacacagtactgaatacaaaggagagcatcatgttggtgagcacaacccggagcaccatggaggagaagagcacaaggagg

SEQ ID NO: 182901 - DNA, 264 bp, Glycine max
acgcactctaactcaggcaaaagccactgttactgttgctaaagtgtttggaggaatggaccgtggagattttcttacattggtggcttctgctgaggctagcagtgaacacccactggcaaaagcaatatcgcaatacgctcgccattttcatttctttgatgagtcttctcccaccagtgataccaagagtgcttctgaggactacaagtcagggtggctttatgatgtctcagacttctctgctcttccaggaaggggcat

SEQ ID NO: 182902 - DNA, 263 bp, Glycine max
aggattccgaggatgttaatggttgcctcatggataaacataaacctgtggtggcaccttctttggtttgtgaaaaggttgaagatcatgtaaacggagaagatgatagtgattccaattctttgttgcctcctcggagaggtggcatgtccagaaactgtgaaaagactcgccggaaagtgcagtggaatgataggaatggaaacaagcttgctgaggtgttggaatatgagccaagtgatgtcagtgattcagaagatgag

SEQ ID NO: 182903 - DNA, 259 bp, Glycine max
cgaacggcaattaatttacaatggccgtcacgaaaagcctctcaatcttcctcttcatcgcaatgagctgcgtcgccgcagctcaggcagcgaacttcaacatcacaaataactgcacctacacggtgtgggccgctgccgtgcccggcggcggcgcaaggcttaaccctggcgaatcgtggaacatcagcgtgacgaacggcacaacaggaggacgcatctggggtcgaacaaactgcaccttcgacaacgcgggacg

SEQ ID NO: 182904 - DNA, 267 bp, Glycine max
cctcctccctcaatccggcgtcgtttcttggctccaacgctaaacgaggcgtcgttaccatggttattccttttcaacgaggaagtgcatgggagcaacctccaccggacttagcttcttacttatacaaaaatcgaattgtttatttgggcatgtctcttgttccatctgttactgagttgatactagctgaatttctttaccttcaatatgaagatgatgataagcctatttacctatacataaactccactgggacaactaagg

SEQ ID NO: 182905 - DNA, 267 bp, Glycine max
atttctccctcaccttctcgctccccacacgcccctctctctcctcccatggccgaccagctcaccgacgaccagatcgccgagttcaaggaggccttcagcctcttcgacaaggacggcgatcgttgcattactaccaaggaacttgggactgttatgaggtcacttggtcaaaacccaactgaggcagaactgcaggatatgataaacgaggttgatgctgatggcaacggaaccatcgatttcccagagttcctcaacctgatg

SEQ ID NO: 182906 - DNA, 271 bp, Glycine max
ttccagttcctttcgatgatcctgccggtgattacactgtcctcattggagactggtactagctcgaccacacggatttgaagtctcagcttgatagcggtaggaagctgcctttacctgatggaatcctaatcaatggtcgtggctctaatggagcatatttaaatgtggaacaaggaaagacttacaggcttagaatatcaaatgtggggttggcaaattcgctgaacttgcgcatacaaaaccacaaattaaagctggtggaagtgga

SEQ ID NO: 182907 - DNA, 262 bp, Glycine max
cgcaaatgcaggcacagaagacacgtgatttttccggtggctggaagttgaggattgcattagcgcgagtcctatttatgaagccaaccattcttctacttgatgaaccaaccaatcaccttgatttggaagcttgtgtgtggctggaggagagtttgaagaagtttgaacgtattctggttgtgatttcacactctcaggactttcttaatggtgtctgcacaaatattatccacatgcaaagcaaaacactgaagctcta

SEQ ID NO: 182908 - DNA, 261 bp, Glycine max
cagacatattggcattcgcagcacgagacagtgtttccaaagtgggtggcataagctacgacgttccatcgggacgaagagatgggcgtgtctcgatcggcgatgaagtgctagacaatcttcctagaccatccttgagcgctgatgatcttattagtaactttgagcgaaagggtttgtcagcagatgaaatggtgacactctcaggagcgcattcaatcggtgtgtcccattgtggtgccttctcgaatcgcttatact

SEQ ID NO: 182909 - DNA, 262 bp, Glycine max
ctttctctctctccaaatcaaaacccatcacaattcacaacaacatacaaattgcaaatcctatcttttctcttctcatataaaagaacccttctttcgaatccttcccgctcttttccctctgatttaattcatgcgcagatccaaaccctaatccatctctccgagaaatattgtgtccacagtcaatttggactgtaagttggacctcaaaacaattgcacttcaagctcgtaatgcagagtacaatcccaagcgtttt

SEQ ID NO: 182910 - DNA, 266 bp, Glycine max
ctaaacctaaacctaaacataaactgaatttcccaaatccccttcacaattttcaccgaacctaatactcccaaaccaatcttcgatcatggccgccgaatcacaacctcaactaatcgaagagagaagagaggagcaagaacttaagtacctggaatttgtgcaattcgcgaccatccaggccctgatgcgctgcgccatcctctactcctacgccaaggagcgcgcgggtcctctgaagcccggcgtcaacaccgtcgaggagg

SEQ ID NO: 182911 - DNA, 269 bp, Glycine max
gcttcccgcactcctccccgcctctttcttccgccagccttatgccgccacccccgcctagcatccacacgtgtcgcgagtgcaacatcgcaggatgcctgggatgcaactttttccccgaggaacaaaggaagaaatacagaggagttaggcagaggccttcgggaaagtgggccgccgagattcgcgatcgtcatcgttcggcccgggtctggctcggtacattcgaaaccgccgaggacgccgcccgggcctatgacaaagcctcg

SEQ ID NO: 182912 - DNA, 260 bp, Glycine max
cagcagagagcccgtcttaacaaacgctcttctctggaaactccccgttcttttccttctttcttcttctctgtctggtcttcgatcttcgatcttcgtccctgaaaatgacagagtgcatttcaatccagatcggccaggccgccattcaggttcgaaacgcctgctgggagctttactgcctcgaacacggcattcagcctgatgggcagatgccaagtgactagaccgttggtggaggtgatgatgctttcaacacc

SEQ ID NO: 182913 - DNA, 253 bp, Glycine max
gtcaggatgtccaaaaaagctggatggggtgtcatggcgagtcacagaagtggagagactgaggataccttcattgctgacctttctgttggtttggcaacgggtcaaattaagactggagctccatgcaggtcagagcgtcttgctaaatataaccagctcttgagaattgaggaggagcttggtgcggaagcagtgtatgctggagctaacttccgtacccctgttgagccctactaaagttttcaagtgg

SEQ ID NO: 182914 - DNA, 259 bp, Glycine max
cccttatctctctctctctctatctctcccgaattcttgtccgttcgacccttttacttagtattcctcgtttccggtattcgctcccttttttctgcattctggttttacttagatctctgtcccgcaccagatctggtgcagggtgagagtgttgggttcattaattttgtatcaatcttccttctgagcggtaggcgtggggataccagagtcttttcgggaagcaagagagggttctctccgttttcaatagatc

SEQ ID NO: 182915 - DNA, 262 bp, Glycine max
acggaggagaacaagattgttgatttcatcaaatttgatgttgggaatgtagtcatggtgacgggtggaacgaataggggtcgtgttggagtgatcaagaacagagagaagcataagggaagctttgacactatccatgttcaggatgctactgggcatgaatttgcaactcgaatgggcaatgtgttcaccattggcaagggaacaaaaccgtggatgcctcttcccaagggtaaaggtattaagctatcaatcattgagg

SEQ ID NO: 182916 - DNA, 224 bp, Glycine max
ccttgaactcaccaacaatcttctcctactaccaataacaatgattgttctcctaatagccaaaactgttggagacagtttcaacccaagcatctatgagattatactgcacttgaaaggccttcctttcattgatgcaaatcctgagccatggatgagaaatctcactgtgggtgagcttgttgatgtatagccaccagtggtcaccctcaatggagtagaaa

SEQ ID NO: 182917 - DNA, 204 bp, Glycine max
cggctcgaggaaaatgtgtggaatatttgcgtatctgcattacgacgtgaacagagacagacgatacatcttgcaggtcctcttcaatggcctcagcagattggagtaccgtggatacgattccgcaggcatcgcgatccacgattccaatttctctccccttgttttccgtcaagaaggaaacattgaatcgctcgtcaaatc

SEQ ID NO: 182918 - DNA, 261 bp, Glycine max
cttcaacgagctcaaagaaaccaataagctcgttgtgatagatttctcggcgtcgtggtgcggccttgcaaattcatagagccagcgattcacgccatgtccgaaaagttcaccgacgttgacttcgtcaagatcgacgtcgacgaattgccggatgtggcgaaggagtttaatgtggaggcgatgccgacgttcgtgttgtgtaagaaagggaaggaagtcgacaaggttgtacgggcaaagaaggacgagctcgaaaag

SEQ ID NO: 182919 - DNA, 252 bp, Glycine max
cctttctttattctctccttcctcttccttcttcttgcctcatctgccactgcttgtgatcgctgcttgtatcaatccaaggcttcctatttctccaaagcttctgctctttcatctggggcatgtgggtatggctctttgacactagacataagtagtggacaccttgcagctggtgtggattctctcttcaaaaatggagcaggttgtggtgcctgctttcagataagatgcaagaacccaactctatgt

SEQ ID NO: 182920 - DNA, 251 bp, Glycine max
cgcatttgcactgtttgtaggtgtctccgtcgcagccaagatctcgggtggccatttggacccagctgttacttcttgattggccatttgaggcaacatcaccctcatgactggtttcttatactggatcgcccagttgtcgggttccattcgggcatgcctccctctcaatttcatcagcgccgagagcattccaagccatgcaccggccactggtgtgaacgatgttcaagctgtagtgttccagattg

SEQ ID NO: 182921 - DNA, 177 bp, Glycine max
acgcaggcggattctactgggatgtttatttgcccccacaccggggttgctttaactgcattggttaaaggccaggaccagcggggttattaaggccactgataggactgtggtggttagcactgctcatggcttgaagttcactcagtccaagattgattaccattctaaggacat

SEQ ID NO: 182922 - DNA, 291 bp, Glycine max
ggaaagttctgggaaaacatgccaagaacattatgctcatgtctaaggttgaaaaccaagaaggggttgcaaattttgatgaaatccttgcaaattcagatgcatttatggtggcacgtggtgaccttggaatggaaattccaatagagaagatatttcttgcacagaaagtgatgatttacaagtgcaacatccaaggaaaaccagttgtcactgcaacccagatgttggagtcaatgatcaaatctcccaggccaaccagggctgaagctactgatgttgccaatgcag

SEQ ID NO: 182923 - DNA, 283 bp, Glycine max
ctcgagccgaacaaccttctttctttttctgtgagcctttctttcaggttcttaacttgatcagtgtgcagtgtccaaatcataagggtagttgcaaattgcaatggctaagcatgatgttgagggtggttccttctctgcaaaggactaccatgatcctcctccagcaccgttgattgatgctgaggaactcacacagtggtccttctacagggctttgattgctgagttcattgccacaatgctcttcctttacatcacagtgctcactgtgattggttac

SEQ ID NO: 182924 - DNA, 290 bp, Glycine max
ccaaggccgagcccgagaaaaagaaggacggtggcggcgagaagcccaaggccgagcccgagaaaaagaaggacggtggcggcgagaaacccaaggccgagcccgagaaaaagaaggatggtggggagaagcccaaaggggatgctccgaaaaaggaagcgagaagcccaagcccgggcccgagaagcccaaggacaagcccgcgccagctcccttacccgtgcagccacatatggctgcacctatggcggttccagttgggatgctctatgctcctcctccgtgctacg

SEQ ID NO: 182925 - DNA, 284 bp, Glycine max
tgtggaatcgatgacttccggaaaatgcctaatggtgtcaatggtattgaagacagaatgcatttggtatgggatatcatggtggaatctggccaaatatctgtcactgactatgtcaggataacaagcactgaatgtgctaaaatcttcaatatatatccaaggaaaggagctgttctcccaggatctgatgcagatattatcatcctgaatccaaattcgagctttgagatgagtgcaaagtcctcacactccagactggacacaaatgtctacgagggaag

SEQ ID NO: 182926 - DNA, 286 bp, Glycine max
taacaagctagctattagttcgattttgtagtaagtgaggtgccaatatggtgaagatagctcttggtactttggatgactcttttagcgctgcctctcttaaggcttatttcgcagagttccacgcaactctgattttcgtgttcgctggtgttggacagccatcgcttacaacgagcttacaaaagatgcagccttggatccaacggggctggtggcagtagctgtggcacatgcatttgcactgtttgtaggtgtctccgtcgccgccaacatctcaggtggc

SEQ ID NO: 182927 - DNA, 291 bp, Glycine max
atcgggaagcaaaaaaaatgagaatccatcacatagcatgcctccaagacaattattcctatctgatcgtagacgagagcacgaaggaagccgcggcggtggacccggtcgaaccggagaaggttcttgaagttgccagctcgcacggcctcactctcaattcgtcctcaccacccaccatcactgggatcatgctggtggaaacgacaagataaagcagctggtgccaggaatcaaagtctatggtggttccattgaaaacgtcaagggttgcactgacaaagttgaaaa

SEQ ID NO: 182928 - DNA, 287 bp, Glycine max
cagagcaccatttcgagtccaaggcagacgccggtgcctccaaaacctaccctcagcaagccggtacccttcgcaagaacggctacatcgtcatcaaaggacgcccctgcaaggttgtggaagtctcgacttccaaaactggaaagcacggtcacgcaagtgccactttgttggaattgatattttcactgccaagaaacttgaggatattgtgccctcttctcacaactgtgatgttcctcatgtgaatcgtactgattaccagctcattgatattgctgaggatg

SEQ ID NO: 182929 - DNA, 182 bp, Glycine max
cctcgagccgaatcggctcgagggcaagctacaattatgggtcctgcagacagtccctatgctggaggtgttttcctagtgactattcatttccctccagattatccctttaagccacccaaggttgcattcaagacaaagtgttccaccaaatataatagcatggaagcatttgcttgata

SEQ ID NO: 182930 - DNA, 281 bp, Glycine max
gttgtgcgcgacaaattaagtgagttacaacaactgggggccacagaaaaggaaattaaagaggttatgaaggacttgggcattagcagggcaaagttatatggatggccaaatacatatgtattcaccaaggcaatgggagagatgcttgtggacaactaaaaggaaacttatccgttgtgatcattcgtcccagcattgttaccagcacattaaaagaacctttccctggttgggctgaaggtgtaagaaccattgacagtttagctgtagcttatggg

SEQ ID NO: 182931 - DNA, 284 bp, Glycine max
caatctctcttcttacccatttcctccccccctctttctcttttcttgttctgtttttattttcactgttctctgataacaacgttgttagttgtcaccatggttgttctgtctcagccagcattaaaccagtttttccttctgaaaacatgcaagcccacgcccttgttcgcggggattcctgtggtcgacctcacggaccccgatgccaagacccacatagtcaatgcctgcagggacttcggcttcttcaagctcgtgaaccacggtgttccgttacagtt

SEQ ID NO: 182932 - DNA, 288 bp, Glycine max
tttctccatttccattttctctctcacttttcaagaatcgtaagctatgggaaagtcttacccaactgtgagtgctgattaccagaaggccgttgagaaggcgaagaagaagctcagaggcttcatcgctgagaagagatgcgctcctctaatgctcgtttggcatggcactctgctggaacctttgacaagggcacgaagaccggtggacccttcggaaccatcaagcaccctgccgaactggctcacagcgctaacaacggtcttgacatcgctgttaggcttttg

SEQ ID NO: 182933 - DNA, 287 bp, Glycine max
caaaatttggcatacgttcttttgcaacacgtttaggtaaaaaaaaggtattttggatttgtgtttccctattcgaagtggcttttggagttgtcctcctcgcaggagcatcatcttcttctcccctctggattaaaattattacgggtctaggaagtttattcctgctacaattctctggtaccagaccaaatatgtagatttgtcaagtccagattcgaccagatccttctatatgctgaactggaagttgttgaacgtagcattcttgttcctgcctttaatta

SEQ ID NO: 182934 - DNA, 284 bp, Glycine max
cctcgagccgcggctcgaggtattttgaacgtctctgccgaagataagaccactggccagacaaataagatcactatcaccaatgacaagggtagactgtcaaaggaagatatcgagaagatggttcaagaggctgagaagtacaaatctgaggatgaagagcacaaaaagaaggttgaggccaagaatgctttggaaaactatgcatacaacatgaggaacactgtgaaggatgacaaaattggtgagaaacttgatcctactgacaagaagaagattgagga

SEQ ID NO: 182935 - DNA, 280 bp, Glycine max
cctcgagccgctcgagcggctcaagcgctcgaggactgatattcagcggaacagcatccgtagttcttgcacgactagttgcatctctgaagctggttgggggtaacttagctgatcacagattcttattccttggtgctggagaggctggcatggcatagcagaactcatagcacttgaaacatcaaaacagacaaatgctccactggaggaagtgcgcaagaatatttggctggtggactcaaagggattgattgtcagttctcgcaaagattcgctc

SEQ ID NO: 182936 - DNA, 251 bp, Glycine max
cgctcacactcactcatttgcaaagaaagagagagaaatggcactgagggcagccgtgctccgccacgttcgtgtgccactccaagccgctccaaaactgcagccatggcgtgccatgtcatcacacggcgacgatcatctctccaaagaggaggtcgtcgaaagagtcctcgccgtcgtcaaagatttccccaaagtcgatccttccagggtgagtccagatgtacatttccagaaggatttgggtttgg

SEQ ID NO: 182937 - DNA, 285 bp, Glycine max
gctgcacgcgcttcgttcacatacaagaacagaacgacgtcgtttgcccgcgctgccacggcggcttcgtcgaaaaggtcaccgccccccaatcgtcaaggcaaggcttccgccgccgacgccgcaacgccgggaaccactcggcgttcaacccggtgatcgtgctccgcggaccgggagaggacgaggagagcagctttgagttatactacgacggcttcgacggcgaggggctccgccgctgccatccaccatgtcggagttcttgcttggatcgggattcga

SEQ ID NO: 182938 - DNA, 283 bp, Glycine max
gcataattcaagagctgcatgctaggtggggaaacaggtggtcaacaattggaagaagcttgccaggaagaactgacaatgagataaagaattattggaggactcacttcaagaaaaagatgaaaactccatctgatgctgctgagaaggcgagatccactcctcgaggagacagcattttcagcagcaacaacagcagttgaagcagcagcagcaacaattccaattcaacttggacatgaaagggatcataaacttgcttgaggaaaatgaccatagagtg

SEQ ID NO: 182939 - DNA, 281 bp, Glycine max
ctcaaatccaagctcgggaacagagaaggagaaagagaatggacgccattgattctgtgttcgatccgttgagagaattcgcaaaggacagcgtgaggctcgtgaagcgctgccacaaacccgatcgcaaagaattctccaaggttgccgtgcgtaccgcaattggtttcgttgtgatgggattcgtgggtttcttcgtgaagcttattttcattccaattaacaacatcatcgtcggatctggttaggatgaagggtactacaatcgcctcaggaattca

SEQ ID NO: 182940 - DNA, 276 bp, Glycine max
gttgagtacttcggtgaacaattgtcaggctttgccttcaccgttaatgggtgggtgcaatcctatggttcccgttgcgtgaagccaccgatcatctatggtgatgtgagccgcccaaagccaatgaccgtcttctggtcatctctggctcaagctttaccaagcgcccaatgaagggaatgcttaccggtcctgttaccattctcaactggtcctttgttagaaatgaccaacctagatctgagacaactaccagatgctttgtctatcaggacg

SEQ ID NO: 182941 - DNA, 280 bp, Glycine max
ctcgagccgtgatgatgaccttgatctctttggcgatgagactgaggaagacaaaaaggcagcagaggaaagggaggctgctaagaagtctaccaagaagaaagagagtggcaaatcttctgttctgcttgacgttaagccttgggatgataaacagacatgaagaagctggaagaggctgttcgcagtgttgagatgcctggtctattgtggggagcatccaaactggttcctgttggttatgggatcaagaagttgcagatcatgttaactattgtcg

SEQ ID NO: 182942 - DNA, 282 bp, Glycine max
gtcacacacggaaggtccgaaaatctataccatagcaatacctccttctagcattggtcagaaatttggacaactgctggaaagtggtaaaggcagtgatgtaaattttgaagttaatggtgatatttttgctgcacataaattggtactacagctcgttcacctgttttcagagcacagctttttggtcctcatgaaagatcagaatacccagcgtattaaagttgaagacatggaggctccagttttcaaggcattgcttcattttatatactgggactc

SEQ ID NO: 182943 - DNA, 274 bp, Glycine max
ccctcgagccgaatcggctcgagcatcaaacaaggtgccatcatgagcagaaatataggcaataatggatttgtggttcccacagcttcaattttcactcttgcagccgttgggatgatactttcagtgaccatctatgacaagctcctgtgccagtgctaagaaaactaacaggaaatgacagaggaatcagcatcctccaaaggattggtattggaatggtcttctcagtcatcacaatgatagtggcagctttggtggaaaaaacgaggct

SEQ ID NO: 182944 - DNA, 276 bp, Glycine max
gcagaccagttagggtcagtctctgtaacaaatgaggtcctggagaggagtcaattaacaagagattatgttctggaaccaattattatgaattccaacatcaaaattccactggtgatccaagacctaattaagagcacttcggagggattatagaaaggctgtagacctattcaatcttcagagggatcaggaggagcttatctcatgcaagattcttctggcttgaagtatgtgtctgttttcaagcccatagatgaggagccaatggcaata

SEQ ID NO: 182945 - DNA, 278 bp, Glycine max
tggattcaaatgcttgtctaccacacttgctagtgttagcagtaacattggtattggttagttatgcaatgggagattcagctcaagacaaacagagatgtgcagaatccctggcaggtgcagcaacgtgtctgccatatttgggtgggacacgaaagcacccacagcagattgttgcagtcgtctcacacaagctatgaagaccaacaagaagtgtgtctgccttattctcaaagacagggatgatcctgatcttggcttaaagattaacatgacaa

SEQ ID NO: 182946 - DNA, 222 bp, Glycine max
gacaatagtttggttttgtagtaagtgaggtgaggtgccaaaatggtgaagataactcttggtactttcgatgactcttttggtgttgcctctcttaaggctaatttggcagagttccatgcaactctgattttcgtgttcgcgggtgtggttcagcctcgcttacaacgagtttacaaaagatgcagccttggatccaagggggctgtggaatattgtggc

SEQ ID NO: 182947 - DNA, 281 bp, Glycine max
gaggagggttgccacttgcatgcaccatgtacgcttcatcagagtgttactttggactcaaccttaatccgatgtgcaagccctctgaggtttcatacaccattatgccaaacatggcatatttcgaattccttccccacgatcctaagccggctccaccagttcaaaactagtggagttggcggacgttgaagtggggaaggaatacgaactggtgatcacaacctatgcgggactctatcggtaccgtgtgggcgacatcctccgagtcaccggtttcc

SEQ ID NO: 182948 - DNA, 271 bp, Glycine max
caagaagagcttgatattgatgttcttgttcatggagaaccagagagaaatgatatggttgagtacttcggtgaacaattgtcaggctttgccttcaccgttaatgggtgggtgcaatcctatggttcccgttgcgtgaagccacgatcatctatggtgatgtgagccgcccaaagccaatgaccgtcttctggtcatctctggctcagagctttaccaagcgcccaatgaagggaatgcttaccggtcctgttaccattctcaactggtc

SEQ ID NO: 182949 - DNA, 272 bp, Glycine max
acacggtgagggggtcgcaccggttcaagatcacggggtattcgctgtcgaaggggattgggattgggaagtacatagcgtcggatatattctcggtgggagggtacgattgggcgatctatttttaccccgatgggaagagcgtgaggacaatgcaacgtacgtttcgctcttcatcgcgctcgctagcgaagggaccgatgttagggcgctttttgagttgacgcttttggatcagagtgggaaggagaggcacaaggtgcatagccatt

SEQ ID NO: 182950 - DNA, 270 bp, Glycine max
agaagttctatccatctgagtttggaaatgatgtggaccggactcatgcagttgaaccagccaagtctgcatttgcaacaaaggccaaagttcgccgagctattgaggctgaaggaattcccttcacttatgtgtcaagcaacttcttgctgggtacctccctgcccaacttgtcaaagcctggagccacagctgcccccagagacagagttattatcctaggagatggaaccccaaagctgtttttaacaaggaagaggatattggaac

SEQ ID NO: 182951 - DNA, 268 bp, Glycine max
  unsure (1)..(268): unsure at all n locations
cttaaacaacacaagcttgttgaaaattttcacgttgttccagcagtgagaacaacaacctctcttcccctcacattccttgatttgcctttagcaggtcctatttatgtgagacgccaattcttctatcacttccccaattccacactccatttctgccaaancatacttccttgtctcaaaacctctctctctcaaacccttcaacacttcttccctctcgctggaaatctcatctgtccaccaacgacccacaaacccttcattc

SEQ ID NO: 182952 - DNA, 277 bp, Glycine max
ccctcgagccgattcggctcgagcaatttctctctttctttttgtgaccaaaatggctcctagctctactcacaatactgggccctatgtgcttatgctagttgggatagtgattagcactatggttgctacctgtgctggtagcttctaccaagactttgatctaacatggggtggtgaccgtgctaagatattcaatggtggccagcttctatctctttcccttgacaaagtctctggctctggcttcaaatcaaagaaagaatacctatttggg

SEQ ID NO: 182953 - DNA, 284 bp, Glycine max
aggctagtacacaaaatggcaacaagaagcttgatgctgcatatcaggaggcacagcagaaacctggcggcacccctgttttgctctttgtctcagttaataccagtgggcaatttgtggggcttgctgagatgattggtcctgttgattttaacaagagtgttgattattggcatcaagacaagtggaatcggtgctttcctcgtaagtggcacattgttaaggatgttcctaacaatttgttgaggcacattaccgtggacaacgatggtgaacaaacctgt

SEQ ID NO: 182954 - DNA, 287 bp, Glycine max
gcttcgtggtggcatgcaaatctttgttaagactttgaccggaaaaacaataactttagaagttgaaagttctgataccatcgataacgtgaaggcaaagatacaggacaaagaggggattccaccagaccagcagaggcttatctttgctgggaagcagctggaagatggtcgtactcttgctgattataatatccagaaggagtccactctgcatttggtgttgaggcttcgtggaggtatgcagatatttgtgaagactctgacagggaagaccattaccttgg

SEQ ID NO: 182955 - DNA, 285 bp, Glycine max
aatcgctgcccacagtgcaagggagagaaggttgtgcaggagaagaaagtccttgaagttattgtagaaaaggggatgcagaatgggcagaagataacattccctggcgaagtgatgaagcgccggacacaattactggggatatcgtctttgtccttcagcagaaggaacatcccaaattcaaaagaaaggctgaagatctttttgtagagcacactttgtcccttaccgaggccttgtgtggcttccaatttgtgctgactcacttggatagccgtcagcttc

SEQ ID NO: 182956 - DNA, 285 bp, Glycine max
caaagaacttccttataaccaaaaccaacaacaactatggcaagttatcagaagcactacgatgatcagggtcgcaaggtcgacgagtatggcaatgttgagaggcaaactgacgaatatggcaacccggttcatgccactagtgtcacttatgtagccaccaaaagtgttggtggctacaatgatgacgctaataagcaacatgatattactggtgtctatcccgagaaagacaccggtagacatcattttggtcgtggttacgacggtgacactaacaagcaa

SEQ ID NO: 182957 - DNA, 282 bp, Glycine max
cacaatttcaaaatggctaggggactaaagaagcatttgaaaaggctcaatgctcctaagcattggatgcttgacaaactgggtggtgcatttgcgcctaaaccctcatctggaccacacaaatcgagggagtgcctccccctcattcttattctgcgaaaccggctgaagtatgctctgacataccgtgaagtcattgctattctgatgcagcgccatgttcttgttgatggcaaagtcaggactgacaagacttaccctgctggtttcatggatgttgtt

SEQ ID NO: 182958 - DNA, 284 bp, Glycine max
cctcgagccgaatcggctcgagattcaccttcttctccttctataccaacctgtttctccgacaatcacattcaacgcttactgtcatggaagaagttaatgtcgtggaaactaaggatggaactgtctcagtagctgctgcgtttgctggtcaccaggaagccgtgcaggatagagaccacaaatttttaagcaaagctgttgaagaagcatataaaggggtagattgtaaagatggaggcccttttggtgccgttatagttcataatgatgaaatagttgct

SEQ ID NO: 182959 - DNA, 282 bp, Glycine max
caaacaaataaagcaaaaggcctttttattccaaagcaaggaaggaagaaataaaccgaatgagagcattaacctcttcttcttccactttcattccaaagcgttattccttcttcttcttcctctccattctcttcgctcttcgatcctcgtccgggggctgctccgaataccaccaccaccacgcgccgatggccacgataggaggcttacgcgactcccaaggctctcagaacagcgtccaaaccgaggccctcgctcggttcgccgtcgatgaacaca

SEQ ID NO: 182960 - DNA, 286 bp, Glycine max
aattgctaacggttttttctcgtttttcatggccgtgggcaacgtgctaggttacgcagcagggtcctacaaaggtctccacaagatgtttcccttcacggagaccaaggcctgcgacgtgttctgcgcaaatctcaagagctgcttctttttctcaatcctcttgctgctgtttttagcaacggttgctctgctctacgtaaaggacaagcaagtggaagcacgggccttggatgacgccacgcaaccctcgtgcttctttcagcttttcggtgctctgaaagag

SEQ ID NO: 182961 - DNA, 286 bp, Glycine max
cttagaagttgaaggagtagtctaagtcatcaaaatggggagagctccatgctgcgagaaaatggggttgaagagagggccatggactccagaagaagatcaaattctcatcaattatatcaacacttatgaccatgctaattggcgtgcattgcccaaactagctgggctgttaaggtgtggaaagagttgcagactccggtggataaattatctgagaccggacatcaaacggggcaactttaccagagaagaagaggacaccataatcagtttgcatgaaatg

SEQ ID NO: 182962 - DNA, 286 bp, Glycine max
caagagatagcccaaattgtagcaaagcaccccaggcttctggttctctctgatgaaaattatgaacacataatttatgcaccggcaactcatacaagctttgcatcgttaccgggaatgtgggacagaactctaattgtgaatggactttccaagacatttgcaatgactggttggcggcttgggtatattgctggtccaaaacattttgttgctgcatgtgaaaagattcaaagccagtttacttcaggggcaagtagtatatctcagaaagctggggttgctg

SEQ ID NO: 182963 - DNA, 288 bp, Glycine max
ggcggattgcctgtacttcgaggcttccgactcggtgccccggctgcacacgacggactcgagctgctccgagcaggcggtgtcggcggagtttgcgagcgaggtgcagagcgagccgaagaggggcagcaacaacaacaacgagtttgcatataattacgtggatgccactctcgggaataatcagatgtcgccgctgcaggatattttcatgtacctctccaagtccttctgcaattaacacgcaccaccaccacgacgagacgacgtcgttctgtgttgtgtgta

SEQ ID NO: 182964 - DNA, 283 bp, Glycine max
ctcagaacctgattaaggagagtatggcacagtttagtggcaaaactttggtgcagtggttggtagcaacactgctgattgccttgttgggtggtgcacaagctgttgtgttatgtaacatcgactcaagtcaactaaacttgtgtcgtgctgcagttactggtcaaaaccctccaccaccagatgagaaatgttgtgcagttattcgccaagccaatttaccttgcctctgcagatacaagtctattcttcctttaattggaataaaacccgaaaaggcttt

SEQ ID NO: 182965 - DNA, 283 bp, Glycine max
gccgagtgcagcctcctcgccggcgacgacgacaccgagtatctgatggagtcggagagcaaccggcgcattctagcacaaaggagctacataagctacggtgcgctgagaaggaacactgtcccttgctcccgacgtggcgcctcctactacaattgccgccctggcgctcaggccaacccctacagccgtggatgcagtgctatcacccgatgcaggcgttgaaaaagttattcttctcttttaatttcatttttttttatatatatatatctttgcaatt

SEQ ID NO: 182966 - DNA, 280 bp, Glycine max
cgcggccggttcgtgccgcgcgcggttctcatggacctcgaaccgggcaccatggacagcgtccggtccgggccgtacgggcagatcttcaggcccgacaactttgtgttcgggcagtccggggcaggaaacaactgggccaaggggcactacactgagggtgctgaactcattgattctgttctcgatgtggtgcgcaaggaggctgagaactgcgattgcttgcaaggttttcaagtgtgccattctctgggaggaggaactggatcaggaatgggta

SEQ ID NO: 182967 - DNA, 244 bp, Glycine max
tgtccttggccgtgggctgcgaactgttggtcttcggtcgttaattgatggagtttgccatttggaagtatagcatgatttgtcgtggttgggtgaagtgccaggagatgaaccaaccccgttgtttgtctggatctagtagtcttggttcgattgctattgttgctgggggaagtgataagtatggacatgttctaaaatcagctgagttgtatgactcttcaacaggtatgtgggaacttta

SEQ ID NO: 182968 - DNA, 285 bp, Glycine max
tcaagactttgacatcgcgtctttgtcttctcatcttgaacatgaacattctctgtgaatcaagagtcacgatttgtcctatatgctccgttaaagttgcacgggacatgttaaatcacataacgctgcaacatgggcatttatttaagttacagagaaggcgcaggttaagaagagtcgctattccaaacagtcagacattgtcacttttgggtcgagatcttcgtgaggctcatctacaggtgcttcttggtggtggtggtggatatcggtcaaacagtgcag

SEQ ID NO: 182969 - DNA, 285 bp, Glycine max
caatatcaccttgggtgctgagaatgaattaaaacatgcagttgcatttgttcggccggttagtgtggcctttcaggtggtgaatgggttccatttctacgagaatggagtttacactagtgacatttgcggtagcacttcccaggatgtgaaccatgccgtccttgctgtggggtatggagttgaaaatggcgtcccatattggctcataaaaaattcatggggagaaagttggggtgagaatggctacttcaaaatggaattggggaagaacatgtgtggtgt

SEQ ID NO: 182970 - DNA, 285 bp, Glycine max
gcaatctgccatatctaaggagacccgcatgggtgcttctctccttcgcttgttcttccacgattgctttgtcaatggatgtgatggttcaattctattggatgacacatcaagcttcaccggagagaagaacgcaaaccccaacaggaactctgctcgtggattcgaggttattgacaacattaaatcagccgtggagaaagtgtgtccaggagttgtttcctgcgcagatatccttgccatcgctgccagagactctgttcagattcttggaggccctacatg

SEQ ID NO: 182971 - DNA, 280 bp, Glycine max
gagggagtagcggcattaaaaatgcagatcttcgtgaaaactctgacagggaagactataaccctcgaggtcgagagcagcgacaccatcgacaatgtcaaggccaagattcaagacaaggaaggcattcctccggatcagcagcgtttgattttcgccggaaagcagcttgaagatggaaggaccctggccgattacaacatccagaaggaatcaacccttcatctcgtcctcaggcttcgtggtggcatcattgagccttccctcatggctttggctc

SEQ ID NO: 182972 - DNA, 269 bp, Glycine max
ggcttacctaggctccacagttcagaatgcctgtgtcaccgtccctgcttacttcaatgattctcagcgtcaagataccacagacgtcggtgtcattgccggtctaaatgtgatgcgaattatcaatgatcctactgcagctgccattgcatatggtcttgataagaaggccacgagtgttggtgagaagaatgtggtgatctttgaccttggtggtgggacagttgatgtgtcgttactcaccattgaggacggtatctttgaggtga

SEQ ID NO: 182973 - DNA, 280 bp, Glycine max
ataattttctattccccaaatctcctccttagactgccaacccaatatagccattggatcgaattcagtttggattcggtctgatggtttgggagttctaataagtctaaggaacagaaattctgtacatatatatttagaagatcacaggtgcttgatcagtggtgtatcaatatggacaaggtgatgaggctggcctctgaaaagggtgtggtgattttcacaaagagttcttgttgcctctgctatgcagttaacattctgtttcaagaacttgggg

SEQ ID NO: 182974 - DNA, 282 bp, Glycine max
tccattttcaagctctcaacgccatctccagctgcttccttatcataagcgcttcgccccagagattctcgcttcctctccttcaatccttcttccaacgctattaattacacaattaacctctccgcttccctccgatccattcactccctccctcttaaaacctccttgcggatcaaatgctcccaaacagatgggaatggaagtcctgcaaagaggacagtgcttcatgatctttatgagaaagaagggcagagtccatggtatgataatctctgcaga

SEQ ID NO: 182975 - DNA, 281 bp, Glycine max
gttttgcaaaattatgctggaattttgatgcccaatactgagcaaccattccgtctgaactgggcaacatttagcacaggagacaagggttcagataatgttcctgacctttctatttttgtaggagatttagctgcagatgttacagatagtttgttgcatgaaacttttgctagtgtatatccttctgttaaagctgcaaaagttgtttttgatgccaatactggccgttcaaagggctatggtttcgtcaggtttggagatgacaatcagagaaccca

SEQ ID NO: 182976 - DNA, 286 bp, Glycine max
atgatattaatcttggtgactacaaaggaaaggtccttatcattgtcaatgttgcctcacaatgtggcttgactaattcaaattacactgagctcagtcagttgtatgagaaatacaaacagaaaggtctggaaattctggcatttccatgcaatcagtttggggcacaggagcctggatctaatgaacagatacaagagtttgtttgtactcgcttcaaggctgagtttcccgtttttgacaaggttgatgtgaatggtgacaaagctgctccactgtacaagta

SEQ ID NO: 182977 - DNA, 272 bp, Glycine max
ggcgttccaatccgcgtcctgacagacgtaacgtcacggagcctcatcggcgacaagtacgtgataggccgggagctaggtcgcggtgagttcgggataacgtacctctgcacggaccgcgagatcaagcaggaactcgcgtgcaagtcgatctcgaagcggaagctgaggaccgcgatcgacgtggaggacgtgcggcgcgaggtggcgatcatgtccaccttaccggagcacgctaacgtggtgaagctgaaggcgacttacgaggacga

SEQ ID NO: 182978 - DNA, 278 bp, Glycine max
atcgagccgcgcgagtacaccagtgatatcattaagactttgaacgacaacgggtatgaatatacatggggtactgtcacagtgaagcttgctgaagcctatggattctgttggggagtcgagagggctgttcaaattgcttatgaggcgagaaaacagtttcctactgagacaatttggattaccaatgaaatcatccacaaccccactgttaataagcggctagaggagatgaatgttcaaaatattcctctggaagaaagtggaaaacaatttga

SEQ ID NO: 182979 - DNA, 283 bp, Glycine max
atctccatcatcatatcatagccttttctttcatagctactacactactttatcactttcattctttaattgggttcaaagaagcttaattaattggttgcagagattgaaaattaggaaaatggtgagtgttgaagagattcgtaaggcacaacgtgcggaaggccctgccaccgtgatggctattggcacggccactcctcccaactgcgtagaccagagtacctatcctgactattatttcagaatcaccaacagtgatcacatgaccgagctcaaagaa

SEQ ID NO: 182980 - DNA, 279 bp, Glycine max
gtaccctacacttagttgttgtgttgctgtgcacccggtgagcggtgacctcttccgctttgatcttcttctgtccagggtaaccaatctggttacttgggtcaaagatttctggcatctctgtcatggcaactagacttcagtttgagaataattgtgaagttggagtcttctcaaaacttaccaatgcctattgtttggttgctattggaggttccgaaaacttctacagtgcatttgaggctgagttagcagatgttatccctgtggtcaagacct

SEQ ID NO: 182981 - DNA, 279 bp, Glycine max
  unsure (1)..(279): unsure at all n locations
aactgaaccagatcatcacacacacatactactctccaanaattcttctanaatggatctcctccttctggaaaagaccctcataggtctcttcctcgctgcggtggtcgccatcgccgtctccaccctccgcggccggttattcaagctcccaccgggcccactccccgtcccaatcttcggcaactggctccaagtcggcgacgacctcaaccgccgctacctcaccgatttggacgaataattcggcgacatcttcctcctccgcatggggcagcg

SEQ ID NO: 182982 - DNA, 280 bp, Glycine max
aatgcctgccttgcctcatagtggtagttcttcgaagcctttaatgatgtttagcacagatggcactggaacccttacgtcaccatctaaccagttggctgatgtggatcgctttgtggaggatggatctctagatgaaaatgttgagtcttttttgtcccatgatgacacggaccctagagatactgttggccgttgtatggatgtaagcaaaggcttcacattttctgatgtaaattctgtacgggcaagcacaagcaaagtttcctgttgccatttc

SEQ ID NO: 182983 - DNA, 277 bp, Glycine max
ctgagctgagaaaacccccaaccccaacctcaaccttaacctctactcactttcttttcaaccagaactatgattaagctttttaaagtaaaggaaaaacagagagaactggcacatcatgcgagtggcggaccacccgttaagaagcaaagtaccggcgagttgcgtcttcacaaagatataagcgagctgaatctaccaaaatcatgtaccatgcaattccccaatggcaaagatgacctgatgaactttgaagtttcaattcgacctgatgatg

SEQ ID NO: 182984 - DNA, 277 bp, Glycine max
ctcgagccgtcacaaccgaaacagtttccatctctctcacaaaatcacaacaatatcaaatcgctcccttctcttcctcttcctcttcctctccaccctccacatagcttccaccctctcaacccccaccaacttcatcaagtcctcctgcagcaccacccagtacccagccctctgcatccagtccctctccgtctacgcctccaccatccagcaagacccccacgagctcgtccagacagccctctccctctccctcaaccacaccgaggccacc

SEQ ID NO: 182985 - DNA, 279 bp, Glycine max
aaaaaaaacaaaaacagaaacaaaagatggatcatcagaggcaaaacaacatccatgttcttgctcttccatactctgcccaagctaccctcaacccccttgtccaattcgcaaaaagattagcttcaaagggtgtcaaagccacagttgccaccacccactacactgccaactccatcaatgcacccaacatcacggtcgaagccatctccgatggtttcgaccaagccggcttcgcccagaccaacaacaacgtgcaactcttccttgcctccttca

SEQ ID NO: 182986 - DNA, 272 bp, Glycine max
ctctctcaccaaagccttcctagaacgaaaataaaaagaagagcaattttccctcaccaaagaagaagaagcaaacaatggccgatcaacttaccgatgaacagatctccgagttcaaggaagccttcagcttgttcgacaaggacggcgatggttgcatcacaaccaaggagcttggaactgttatgcgttcattggggcaaaacccaactgaggcagagctccaggacatgatcaatgaagtggatgctgatgggaatggtaccattgac

SEQ ID NO: 182987 - DNA, 280 bp, Glycine max
ggaaaggatcacgccttggacatgattcacttgttgatgggatgttgaaagatggtttgtgggatgtctataaggatgttggcatgggagtgtgtgctgagctatgtgcagataaccatgcattaacaagagacgaccaggataactatgcaattcagagttttgaacgtggaattgctgcccaagaaagtggtgccttttcatgggaaattgctccagttgaagtctctggtggaagaggaagaccatcaacagttgttgataaggatgaaggcctagg

SEQ ID NO: 182988 - DNA, 284 bp, Glycine max
ctctttcaccaatcaacacaaactaagttcttccttctgttgaaagcgatagccatggccacgaatccaatcgaagcggggaacggcgacgctgctcccaaccctaacgcgactaccaaatcctccgtgtacctgcaagactcggaggagctgaagcgagtcttcagccgcttcgacgccaacggcgacggcaagatctccgtctcggagttggacaacgtcctccgctccctcggatccggcgtcccgccggaggagctccagcgtgtcatggaagaccttga

SEQ ID NO: 182989 - DNA, 285 bp, Glycine max
aaaaaaaacaaaaacagaaacaaaagatggttcatcagaggcaaaacaacatccatgttcttgttcttccataccctgcccaaggacacatcaacccccttgtccaattcgcaaaaagattagcttcaaagggtgtcaaagccacagttgccaccacccactacactgccaactccatcaatgcacccaacatcacggtcgaagccatctccgatggtttcgaccaagccggcttcgcccagaccaacaacaacgtgcaactcttccttgcctccttcagaacaa

SEQ ID NO: 182990 - DNA, 284 bp, Glycine max
tctgcagattgaagccacaggtctgctccttttctttggcttcaatttgtaaaggtttgattttgaagaggaagcatacagtggtattatagtggagatctgggacttgttttgcctcttatgccctatgaggactttcttcaccgcagaatcgtgtaaagaagcacaccatagtgctttgaatccacagtcctggctccaagttgaaagagggaagcttcccagattgtcatcacagtcctcttctgcatcaatagaatccctaatcaaggtcccacagtcat

SEQ ID NO: 182991 - DNA, 272 bp, Glycine max
aataataaccccctttttccctctccatacccttttgctttctttatccaataataagaacttcccacgagtggctttaactggtctggtctgctctggtcggacacacaaaaatattagtatggagaaggtgagttttgtgaagaatggagagcttagattgcctccggggtttcgtttcgacccgactgatgaggagctggttttgcagtacctgaagcgcaaggtcttctcctgccctctgccagcctctatcattcctgagggtgatg

SEQ ID NO: 182992 - DNA, 277 bp, Glycine max
atttttggctcaatggtgatccaaaagcgaaagatggtggttaaactaatttttggaggtattgatcctaaacacttcaaaggagatcacatttatgtcccagttactaaaaagaagtactggcagattgaaatgggagatttttttattggaggtctctcaacaggtgtttgtgagggtggctgtgctgctattgtggattcaggaacatctttgcttgctggtccaactactgttgtaactgaaatcaatcatgctattggagctgaaggagttc

SEQ ID NO: 182993 - DNA, 276 bp, Glycine max
caagtgttggatgcatttctatttctaactaattattgtgcttattattattgttgagaaagaaaagaatggcaaagttactaaaattctttgagttgaacacaggggccaagattccttctgttgggttaggcacttggcaagctgagcctggtgttgtagccaaagctgtcaccacagccattctggtttgatacaggcatattgattgtgctcaagcgtataacaatcaagcagagattggttctgctcttaagaagctttttgatgatggtg

SEQ ID NO: 182994 - DNA, 278 bp, Glycine max
cagatcttcgtcaagaccctcaccggaaagaccatcacccttgaggtggaaagctctgacaccatcgacaacgtcaaggccaagatccaggacaaggaaggaattcccccggatcagcaacgtctcatcttcgccggaaagcagctcgaggacggccgtaccctcgccgactacaacatccagaaggagtcaacccttcaccttgtccttcgtctccgtggtggcatgcagatcttcgtcaagactctcactggcaaaaccataaccctagaggtcga

SEQ ID NO: 182995 - DNA, 280 bp, Glycine max
gaggctgccgccgtcgtcgaggacgtcaagaaaaaccccgacgccgccgtctccggcaccgtcatccgccgccgccttcagctcatgatgtacaacaacatgtaccgcataatgttcgaccggaggttcgagagcgaggaggatcccatcttccagaggctaagagccttgaacggagagaggagtcgcttggcgcagagctttgagtataactatggtgattttattcccatcttgagacccttcttgaagggttacttgaagatttgcaaggaggtga

SEQ ID NO: 182996 - DNA, 277 bp, Glycine max
aagaaagattcgaaacgaagaaagaaagcgttgtgaagaatggcggaagagggacaagtgatcggtgtccacagcgtagaggagtggaaggaacatctcaagaagggagaagagtccaagaaattgattgtggtggattttactgcttcttggtgcggtccatgccgtttcattgccccaattcttgcagagtttgctaaaaagttgccgaatgtcaccttcctcaaggtggatgtggatgaattggagactgtttccaaggagtggggaattgagg

SEQ ID NO: 182997 - DNA, 279 bp, Glycine max
agttcatcatcgccttcaacgccctgaccttgaagacgatgagaagcaacaagaccaagacaacaaccttaacgatcacgaagggcttgacctaattacaccaaatccaggtcctggtgatgttgttggtcgcaggccaagaggaagacccccaggttcaaagaacaagccaaaaccaccagttatcatcacaagagagagtgcaaacacccttagggctcacatccttgaagttagtactggttgtgacgtctttgaatcggtcgctacctatgcaag

SEQ ID NO: 182998 - DNA, 279 bp, Glycine max
ctctgaatatggtgagcaagttgttatgctaggaggaaggatacttgagatattgtccataaatcttgggcttagagaggattttctcctaaatgcatttggtggggaaaatgaccttggtgcttgcttaagggtgaatttctaccctaaatgcccacaacctgacctcactcttggcttgtcccctcactcagaccctggtggcatgaccattcttctccctgatgaaaatgtgtcaggacttcaagtacgcagaggagaagattggatcactgttaa

SEQ ID NO: 182999 - DNA, 277 bp, Glycine max
aaaataggtcaaggtggttttgggtcagtctattatgcagaactgaggggagagaaagccgcaatcaagaagatggatatgcaagcatcaaaagaatttcttgctgaattgaacgtcttgacacgtgttcaccatcttaatctggtgcggttgattggatatagtattgagggctctcttttccttgtctatgaatacattgagaatggaaacttaagtcaacatctgcgtggttcaggtagtagagaacctctgccatgggctactcgggtgcaga

SEQ ID NO: 183000 - DNA, 278 bp, Glycine max
gattttaactatggcccatatatgctcagggaagaagttgaaaaatacaagaggtatgccgagaggttggagccctttattgctgatactgtgcttgtcatgaatgacgccatagaacaaaagaagaagattttggttgaaggaggacaagctaccatgttggacattgattttggaacttatccctttgttacttcttctagcccatcagctggtgggatatgcactggtcttggtattgctccaagggtacttggtgatttaataggagtggtgaa

SEQ ID NO: 183001 - DNA, 276 bp, Glycine max
gccggcgattccacgtcactctccggctagctcccggcaataacgggcacggcggcaggagtgccttcgagctgggcgcggcggtgcgcggatctgtcctacagcgggaagcttctgatgcagagcgatttggacttgacattgggaaagttggaagctcacgtgatgaagctatctgagatattcaagaagggcgtgtcgatgcatggctactccgtagtagtttcaaggcctggttttggagcttgcaaagatgacatgaggttctacttaagg

SEQ ID NO: 183002 - DNA, 275 bp, Glycine max
acttgatgtgtcaacatcatcaaggtctcaagaggatgcctagaagactattaggctatatctacattatgatgctgttagccactcccctgacaggtaatgtcgagcaattggcgatattgtcaaacttggggagactcccatgacttctcctggttttccttcttgcaatcctcatgctattcctccaatctttagtgcttgatggtataactgcacttctgaagatatctcagaagatgacaaaaaatgtcgccttcgtaaggcattaggtt

SEQ ID NO: 183003 - DNA, 276 bp, Glycine max
gtaccgtgccagtgggacgtgttgagactggtgtcgtgaagcccggtatggtggtgacttttggtcacactgggctgacaactgaggttaagtctgttgagatgcaccatgaggctctcacagaggctcttccaggtgacaatgttggctttaatgtgaagaatgttgcagtcaaggatctcaagcgtggttttgttgcatccaactccaaggatgaccctgccaaggaagctgccaacttcacatctcaagtcattatcatgaactcacctggcc

SEQ ID NO: 183004 - DNA, 275 bp, Glycine max
gggaaaccaggtgttggcgcactctttgtgaaggtcagcatggatggtgctccgtatcttaggaaggtagatctaagaagttatacaacttatcaggaactatcatctgcccttgagaagatgttcctaagctgttttaccctaggtcagtgtggttcccatggagctccaggaagagaaatgttgagtgagagcaagttgagggatcttctgcatggttctgagtatgttctcacttatgaagataaagatggagattggatgcttgtagggga

SEQ ID NO: 183005 - DNA, 277 bp, Glycine max
ccaaaacccccagtgtacaagcccccagttgaaaaaccaccagtgtacaagcccccagttgagaagcccccagtttacaagcccccagttgagaagccaccagtttacaagcccccagttgagaagccaccagtatacaagccaccagttgagaagcctccagtgtacaagccaccagtagagaagcctccagtttacaagccaccagtagagaaacctccagtttacaagcccccagtggagaaacctcctatttacaagccacctgttgagaagc

SEQ ID NO: 183006 - DNA, 275 bp, Glycine max
gtcgacatgctgcgaaagcacacgtacaatgacgagctggagcagagcaagcgcagcgcggcgtcgtccggcggcgaggctccgccgtcgccggcaccgcaaactcaatttccggcgcgtgctttactaaggcacgtgagcagctattcgagaaggctgttacgccgagcgacgttgggaaattgaaccgtttggtgataccgaagcagcacgcggagaagcactttccgttacagagctctaacggcgttacgcgacgacgatagcggcggtga

SEQ ID NO: 183007 - DNA, 144 bp, Glycine max
tgaaacccctgagtacatgcccctcagccatgtccttgcaaccaaactcggtgctcgcctcaccgaggttaggaaaaatggtacctgtgcttggctgaggccagatggcaagacacaagtaactgttgagtactacaatgacaa

SEQ ID NO: 183008 - DNA, 274 bp, Glycine max
caaaagggaaagatggtgtgcataaggaaggcgacggtgaaggaccttctggcgatgcaggcgtgcaacctgttctgcctccctgagaactaccagatgaagtactacctctatcacatcctctcctggccccagctcctctacgtcgccgaagactacaacggccgcatcgtcggctacgtcctcgccaagatggaggaagagaccactgactgccacggccacatcacctccctcgccgtcctccgcacccaccgcaagctaggcctcgcca

SEQ ID NO: 183009 - DNA, 277 bp, Glycine max
gctatttgtggcgctggcgtggtgaagggtttcgaggggaaaacaaaatacggtacgttgaatggtggtgccaactttgttgcccctggttacaccaagggtgatggtcttggtgctgagattgttggcactttcgtccttgtttacaccgttttctccgccaccgatgccaaacgtaacgccagagactctcacgtccccattttggcacctttgcctattgggttcgcggtgttcttggttcacttggcaaccatccctatcaccggcactggta

SEQ ID NO: 183010 - DNA, 273 bp, Glycine max
gctgagcttatggacattattctccccaagagatctggggggcaagtggcttcatcaccgccatttttctgtggatctccacctagcagggcttcaaaccctgtgatccaagatgagcaatttggtagtaatggtaatgagagttttggttcattttccttggcacccccttcaccatcttcctcagcaagaggctgtgttaggatgaagtttggtcacaccccagcagcagtgaggattgaaggttttgattgcctcagcagggataggcgc

SEQ ID NO: 183011 - DNA, 276 bp, Glycine max
ttgaaatctccctttcaaaccttacactcctcatttcgtttccgtagcagttttctcacacttcaccgctgcttccccttcacctccgatttcgtatcagtagtcagagatcaaaatgtctcgaagatatgacagccgtacaacaatcttctcccctgaaggacgtctttaccaagtggaatatgcaatggaggctattggtaacgctggtaccgcaatagggatcttatcaaaagatggggttgtgctggttggtgaaaagaaagtcacatccaa

SEQ ID NO: 183012 - DNA, 278 bp, Glycine max
gcttaatcgaactattcagattctaaaaaatgagttggtggtgggctggagcaatcggtgctgccaagacgaaattcgaggaagaggaaccgccgcgaagcttccagagcgtgggcctggtgatcggcgtgacgggcatcgtgggcaacagcctcgccgagatcctccctctcgccgacacccccgccggtccatggaaggtctacggcgtcgcacgccgcccccgtccgccgtggaacgccgaccatcctgtcgagtacatccagtgcgacgtctcc

SEQ ID NO: 183013 - DNA, 279 bp, Glycine max
aaaaaggtcttgcaagacaggcggtacaaaaatcgtgaattgcagttaatgcgcttaatggatcacccaaatgtaatttccctgaagcactgtttcttttccacaacaagcaaagatataactttttctaaacttggtaatggaatatgtccctgagtcaatgtaccgagttataaagcattacactactatgaaccagagaatgcctctcatctacgtgaaactgtatacatatcaaatcttcaggggattagcatatatccataccgccctgcgagt

SEQ ID NO: 183014 - DNA, 276 bp, Glycine max
caataacatagcatagagtgagaagtgagaacagaaaaatggcaatctccatacgcagtagacaacttttcatagatggagagtggaaagtccctcttctcaacaatcggtttccgatcatcaaccccgctactgaagacatcatagggcatattccagccgctactaaggaagatgttgaccttgcggtggatgctgctaaaagagccttttcccataacaaaggcaaagattggtcttcagctcctggctctgttcgtgctcgctatcttcgag

SEQ ID NO: 183015 - DNA, 270 bp, Glycine max
agtctttctagtacttttcttgtttcatgttggggataggcacttttatactgtcttcccgggaatattcctttttagccttgataaactgatccgaatcatacaatcaagtccaaaaacttgcatggtttcagctagaatttttccaggcagagctctggtgctaattctgcccaaagatccagggatgaaatataaccctactagtgttatatttttgaagattccaaccatatctcatcttcaatggcactctttcagtatcatatc

SEQ ID NO: 183016 - DNA, 271 bp, Glycine max
gataggcaaacactattatggagtgctacatggccaagggaggttgagactctggcaaggcagtttctgcgcaacccatacaatgtaattattggctcaccatacctgaaggcaaatcaatccataaatcaagttgttgaagttttaacagacatggagaaatacaatagattaatcaggctgctgaaagaagtgatggacgggagccgaattctaatatttatggagacaaaaaagggatgtgatcaagttaccagacaaatgagagtgg

SEQ ID NO: 183017 - DNA, 270 bp, Glycine max
gatgtttctcacaaggactgagtatgaccgaggagtcaacaccttttctcccgaagccgtttgtttcaggttgagtatgcaatcgaagccatcaagctgggatcaactgcgattgggttgaagaccaaagaaggagttgtccttgcagttgaaaagcgcatcacatcgccgctcctggagcctagtagtgttgagaaaattatggaaattgatgagcacatcggttgtgcaatgagtgggttgattgcagatgctcgaacacttgttgag

SEQ ID NO: 183018 - DNA, 273 bp, Glycine max
atggagaggcgacttcttagtaggaaccagggtagagaagatgacaatattgaaacaataaggaagcggtttaaggttttcttggagtctagtcttcccgtgattaattattatgatgcaaagggaaaagttcgcaagattgatgctgcaagacctatcgaagaggtatttgagacagtcaaagcaatttttggtccaaagaatgacaaggctgattgagcatgttcatcttgactccatggtggaaatttagaggtcatatcagtattggtg

SEQ ID NO: 183019 - DNA, 275 bp, Glycine max
agaagaaggacaagaagaagaaggagcatggacatgaccatcatggtcatagcagcagcagtgacagtgattagatcttatatgttaaggtgtacggtacgatggtagtgaggagccagaatccctcttcctgctttatgatataatacaaataaaatagcgattccggaaatcatgtctgtagctgctctttttatttatgtgataaatgtaaaacgctttggtttggcttggccgttgtgcattaggttgaaaaaataaatgttataattact

SEQ ID NO: 183020 - DNA, 278 bp, Glycine max
cgaagacggcagaactctcgccgattacaatatccagaaagaatcgacgctccacctcgtcctccgccttcgcggtggcatgcaaatcttcgtcaaaaccctaaccggtaaaacgattacgctagaggtcgagtcctctgacaccatcgataacgtgaaagctaagatccaggacaaggaaggcattccaccagaccagcagcgcttgatcttcgccggaaaacagctcgaagacggcagaaccctcgccgattacaatattcagaaagaatcgacgc

SEQ ID NO: 183021 - DNA, 273 bp, Glycine max
gcggtgcggcgatcctagcactctcttctgcagctttcgccgacacgttcattcaccatggctgagcaaaccgagaaggcttttttgaaacaaccaaaagtgtttctcagctcgaagaaaactgggaagggaaagagacccggaaagggtgggaaccgcttttggaaatccattgggcttggatttaagactcccagggaagccatcgaaggaacctacattgacaagaagtgccccttcactggcaatgtttccatccgtggccgtatcttg

SEQ ID NO: 183022 - DNA, 268 bp, Glycine max
tgagagtttccgtagtctgtttcgatccatcattcaaaaattcatggaggtttatcaacctgaggcagttgttctacaatgtggagctgattcattgtctggtgacagattgggttgcttcaacttgtctgtgagaggtcatgcagattgccttcgttttcttagatcgttcaatgttcctttaatggtcttgggtgggggtggatatacatctcggaatgttgcccgttgttggtgttatgagacagcagtggcagtaggagtggag

SEQ ID NO: 183023 - DNA, 271 bp, Glycine max
ctttatttcagggtgttgatttttgctcctcaatcactcgtgcaaagtttgaggaaatcaatatggagctctttgaagagtgtatggaaacagttgataggtgtctttctgatgctaacatggacaagagcagtgtacatgatgttgtccttgttggtggttcttctaggattcccaaagtgcaggagctattgcagggcttcttcgatgggaaggttctgtgcaagagcatcaaccctgacgaggctgttgcttatggtgcagctgtgca

SEQ ID NO: 183024 - DNA, 272 bp, Glycine max
gtttgttgttgtaactcgttcttcttcttttgttgttctgtgtttgtgtttgttttttctctcacctgaaaatgtcttgctgcggtggtaactgtggttgcggaagctcctgcaagtgcggcaacggctgcggaggctgcaagatgtacccagacttgagctacactgagtcaaccaccaccgagaccttggtcatgggagtggcacctgttaaggctcaatttgagggtgctgaaatgggtgtgcccgctgagaacgatggctgcaaatgt

SEQ ID NO: 183025 - DNA, 276 bp, Glycine max
gtttcagtgagtgatcggtgttcacttgatccttcataagtcgtcatcatcatcatcatcatcaccgttgattgaagaagatgccgatcagaaacatcgccatcggaaggcctgaagaggctactcaccccgacacgttgaaggcggggttggctgagttcatctccaccttgatcttcgtgttcgccggttcaggttccggcatcgcctacaacaagctcaccgacaacggcgccgccactcccgccggcctcatctccgcttccatcgcccatg

SEQ ID NO: 183026 - DNA, 273 bp, Glycine max
gttgattagggacgaggtgggccgggtgatgggcccgggccaggagtttccttcgtttgatgaaatccgcgaaatgcattacctgaacgcggcgattcacgacagcatgaggctgttcccaccgattcagttcgattcgaagttcgccacggaggatgacgtgttgccagatggcactttcgtgagaaagggcagtagggtaacttaccacccttacgcgatgggccgaatggaaaatatttgggggcccgattgtcttgacttcaggcccga

SEQ ID NO: 183027 - DNA, 273 bp, Glycine max
gatcgctgcccacagtgcaagggagagaaggttgtgcaggagaagaaagtccttgaagttattgtagaaaaggggatgcagaatgggcagaagataacattccctggcgaactgatgaagcgccggacacaattactggggatatcgtctttgtccttcagcagaaggaacatcccaaattcaaaagaaaggctgaagatctttttgtagagcacactttgtcccttaccgaggccttgtgtggcttccaatttgtgctgactcacttggata

SEQ ID NO: 183028 - DNA, 274 bp, Glycine max
ctcgagccgcaagaaggccactagctctggggagaagaatgttctcatcttcgacctcggtggtgggacttttgatgtctcccttctcaccattgaggagggtattttcgaagtgaaagccactgctggtgatactcacttgggaggtgaagattttgataacagaatggtgaaccattttgttcaggaattcaagaggaagaacaagaaggatattagtggaaatgccagagcattgaggaggttgagaacagcatgtgagagggccaagagg

SEQ ID NO: 183029 - DNA, 272 bp, Glycine max
aaggcattccaccagaccagcagcgcttgatcttcgccggaaaacagctcgaagacggcagaaccctcgccgattacaatattcagaaagaatcgacgcttcatctggtgcttcgactccgcggagggatgcagatcttcgtgaagacgctcaccgggaaaactattactctggaggtggagagttctgatacgatcgataacgtgaaggcgaagattcaggataaggaagggattccaccggatcagcagcgtcttatcttcgctgggaag

SEQ ID NO: 183030 - DNA, 274 bp, Glycine max
gttggcgttgttcagttcttctacctctctttgaacaacatctcacaattcattcaccttttaattcttctcactcacaaatcacaatgctcttccttttttccttaataataataccataataatctgttacgttacggggcccaaatgtctgttacggagctcaaggagcgtcactctgctgccaccgacaccgtcaacaatctcagacaccgtttaaagcagaagcgcctttcgttgctcgacacagatatttctgggtatgcaaggtctc

SEQ ID NO: 183031 - DNA, 269 bp, Glycine max
gggagcaattgtttgttggtggctaccatgtttcctatgaaggacaactgttacattagtcttgtggatttcagggacaagaagatggtgtggtgttggtctgatgtgggggctccttttgccgtggatgagaaacgggtcagggatgctattgccatggaggataataactccatttgtgtggtcaatgagtttgaggatttggggttcatggatttgagaagttctgctgccaatagcattaggtggagctccaggagtaggttgat

SEQ ID NO: 183032 - DNA, 273 bp, Glycine max
gtacccttgccgattacaacattcagaaagagtccaccctccacctggtgctccgtcttcgtgggtggcatgcaaatctttgtcaagaccctcactggaaagaccatcacccttgaggtggagagctctgacactattgacaatgtcaaagctaagagtcaagacaaagaaggtatcccaccagaccaacagaggctcatttttgctggaaaacagcttgaagatggccgaaccttggcagattacaacatccagaaagaatctaccctccac

SEQ ID NO: 183033 - DNA, 271 bp, Glycine max
cctccttacactccccacccagtttatcactctcctccaccacctcctaccaacaagccttacatctatgcgtcacctccccctccttaccactattagctagcatagctctatggatatgaagaatatgtgcaacgaataaaagaaagcgatagaaaaggaagaagaagcgcttcgcgatgcacgaaagagaagaattggaagcaaagtttcggcgttttgtcttttataaaaaaaatgttaaatcattataattttctatgatagggat

SEQ ID NO: 183034 - DNA, 272 bp, Glycine max
ccagagagtacgtgagggaaacatttgcgtggatgcactattactggttcctcaccaacgatggaattgagttccttaggacttacctcaaccttccatccgaaattgtccctgccactctcaagaagcaggccaagcccgccggaagaccattcggtggcccacccggtgatcgccccaggggcccacctcgctttgacggagagaggagattcggcggtgaccgtgatggataccgtggaggtccacgcggacctggcggtgatttcggt

SEQ ID NO: 183035 - DNA, 272 bp, Glycine max
gtgatgctggttttgttaagatgattccaaccaaacccatggttgttgaaactttctccgagtatcctccacttggtaggtttgctgttagggacatgcgtcaaactgttgctgtgggagtcatcaagaacgttgagaagaaggatcctaccggagccaaggtcaccaaggctgcccagaagaagaagtgaatcgtgcgggctggttcatcaggggatgttggttacaataaatgttggtttcttttctgtactcttgtgtcttcttttcta

SEQ ID NO: 183036 - DNA, 273 bp, Glycine max
gttttcacctcctccaggggatccaccaagacccttggcaacttcgttaaggctacttttgattgcttgatgaaaacctatggattcctgacaccagaattctggaaggagactcgcttctccaaatctccattccaagagtacacagatctattggcaaaaccaacagggaagactctaatcttggaggaggaaagggtggatgcttgatttgctagttttggttttatggatgttttagagacattgttatttacctttgttggttctgtg

SEQ ID NO: 183037 - DNA, 290 bp, Glycine max
agaattcggctcaaggaaagagagtgattctacattacaacacctcaaggggaagaatgctgatgattatcaagaagccactgaaatcagagatcatacagaagcctttcaaaagcaaacaggagctagcatcattggcttatttcaaatgcaatatttgaagtcacttaccgtaggcgttggcttgatgatactgcaacagtttggagggattaatggcattgttttttatgcgaactctatatttatatcttctgggttttacagaagtattggagcaatagcaattg

SEQ ID NO: 183038 - DNA, 271 bp, Glycine max
ctcgagccgccaatatattccattctctctgtgtatttccctacctctcccttcaagatgcagatcttcgtcaagaccctcaccggcaagaccatcacccttgaggtggaaagctctgacaccatcgacaacgtcaaggccaagatccaggacaaggaaggaatccccccggaccagcaacgtctcattttcgccggaaagcaacttgaggacggccgtacccttgctgactacaacattcagaaggagagtactcttcacctcgtcctcc

SEQ ID NO: 183039 - DNA, 270 bp, Glycine max
gaattctctaaaagagatctttttctgctctttgaagaaagaagggtctttgcttgattttcgagatgtctctgctctcagatctcatcaaccttaacctctccgataccaccgagaaggtgatcgcagagtacatatggatcggtggatcaggaatggacctgaggagcaaagcaaggactctcccaggaccagttagcgacccttcagagcttcccaagtggaactatgatggttccagcacaggtcaagctcctggtgaagacagtg

SEQ ID NO: 183040 - DNA, 271 bp, Glycine max
tctccacctccggccgccgtggatgccgacgccgccgggagctccggcatctcaccgtcggaggattgcgacggcgagggcggcgacgaggaggagccgctgatccagatggcagagtgccgcatctgccaggaggaggatggcgtttccaacttggagaccccctgcgcctgtagcggcagtcttaagtatgctcacagaaagtgtgtccagcattggtgtgatgagaaaggagacataacttgtgagatatgtcatcagccatatcaac

SEQ ID NO: 183041 - DNA, 289 bp, Glycine max
cgaaagggaatcgggttaaaattcctgaaccgggacgtggcggctgaggcatccatcggcagttagagacagagagagagagaaacaaaaccctaattggtgagtggcgaaaatggcgcagcaggcggcggcagcagcagcaacaggagcagcagtaatcgagcaagtgcagtgcttcgggcggaagaagacagcggtggcagtgacctactgcaagcgtggtcgaggcctcatcaagatcaatggctgcccgatcgagctggtggagccggagatcctccgtttcaag

SEQ ID NO: 183042 - DNA, 288 bp, Glycine max
cttctttttactctctctctgtctctctctacgctttctcgttcgagatccctcaagggatccactaactgaaggagaaatggggttgacattcaccaagcttttcagccggcttttcgccaagaaggaaatgcgaattctgatggtgggtctcgatgcagctggtaagaccaccatcctgtacaagctcaaacttggagagatcgttaccacaattcccaccattgggttcaatgtggagactgtggaatacaagaacattagtttcactgtctgggatgttggtgg

SEQ ID NO: 183043 - DNA, 291 bp, Glycine max
atcttttccaaggtgctgaacctgatcctcccttcactacaggagatcatcttattgaaaacgctggtaaaatggttcttttggataagttacttcctaaattgaaagagcgcgattctagggtccttatattttcacagatgactaggctactagacatactcgaagattatttaatgtttcgtggatatcaatattgtcgcattgatggaaatactggtggggatgatcgagatgcttccattgatgctttcaacaaaccaggaagtgagaaatttgtcttcttgttat

SEQ ID NO: 183044 - DNA, 289 bp, Glycine max
atcagaataaaaaagataattttggtagtgatgcaccacattttcagagtggagttctccgtaccaactgcattgactgcttggaccgtacaaatgttgcccagtatgcttatggtcttcaagctttaggacgccagctccatgcaatgggtttgactgatgttccaaaagtggatcctgatagtagtattgctgcagctctaatggatatgtatcaaagtatgggagatgctcttgcccagcaatacggtggctctgctgctcacaatactgtgtttccagagaggca

SEQ ID NO: 183045 - DNA, 289 bp, Glycine max
aagaaagtcacgctggcggtgaagaacgtttctgcggcggccgaggaggaggaacacatgacgctgatttccgatgttgagaaccttgcggatgccgaaatccccgacaccgcacatcaaattagcaccgattcatggtttcaagtggggttcgtgctgacgacgggaatcaacagcgcgtatgtgcttggatattctgggaccatcatggttcccctgggttgggcagggggtgtggttggtttgattctcgccactgcaatatcgctctacgcgaatgctcttattg

SEQ ID NO: 183046 - DNA, 288 bp, Glycine max
cttgctttgcctgcaccaccaatgcctggaatgggaggcccaggaggtatgggaggaggctttgctcctccccctccaatgggtggactggggatgcccccaatgcctccttatggcatgcctcccatgggcagcagtttttgacaagtttagcatgaacttggcccctgtgaagaccaatgtaggaacttcgaagttttgtgtagaagaatatcttgtgtgatttggatgcagcattcattctttgcttcgggtggcggtgggagatcccaatttccagtaatgtga

SEQ ID NO: 183047 - DNA, 291 bp, Glycine max
tgcagtgacaaacaacaagatcttttcaatgccatgggctccatgtatgctgctgttctccttattggcattaagaatgctaatgcagtgcagccagtggttgctgttgagcgaacagtcttttatagggaaaaagcagccggaatgtattcagctttaccgtatgcttttgctcaggcaagcaaatcctcattctaaaaatcttgtctttgtagtgttactatatcctcacaaatcatcatcgttgttggaaagtctcacattgtctgtctcaatttctggggtgtagct

SEQ ID NO: 183048 - DNA, 288 bp, Glycine max
cctctagctctcacacacactttctctctctctctctctcacccagatcttgtagcaatggcgagcgctcccactccacgcgaagagttcgtgtacatggcgaactggcggagaggccgagcgctacgaggagatggtggagttcatggagaaggtctccgcctccgccgagagcgaggagctgaccgtggaggagcgtaacctcctctccgtcgcctacaagaacgtgatcggcgctcgccgcgcctcctggcgcatcatctcctcaatcgagcagaaggaggagag

SEQ ID NO: 183049 - DNA, 289 bp, Glycine max
ctcccacgacaacgtatcacaagctcccaatatagcaagcagcaaacatgatttcttccgtgtcctttccagcgtctcttcccgccgttaacttctccggcaacgccatggcttcgccgtcgtgccgcgtcaaatcccggccaatagtcgccttcgccaccgccactgccaccgctgaagctcgctcttcctggacggagcaaccgagaccttcctatctgaactcctcttgctcttcgctttacgatatcctcggcatccccgctggcgcctctaaccaagaaatcaa

SEQ ID NO: 183050 - DNA, 290 bp, Glycine max
gaataatactcaagtgcaatcgcctcccgtactgaacgaaagaccatatttgagtcacccacacccacaaaacttattgccccttttacactaggcttgtcagactctcggcgatctaagttaacagcagagaggcagcaggataactatgaatttctctctaaatgcataaaagaaaatttgggattcaaaaatggtaaacctattgcagctcgtattatatacaaatgtctacttcattggcattcatttgaatctgagcgcacaaccatttttgattccataatcga

SEQ ID NO: 183051 - DNA, 292 bp, Glycine max
atagatttggtatttggttacaagcaacgtggaaaacctgctgtagaggcagcaaacatcttctactacttgacttatgaaggtgctgttgatctggaaacaatggaagatgatttgcaaagagcagctatcgaagaccagatagccaactttggtcagactccaatccagatatttcgtaagaaacacccgagaagagggccacctattccaattgcacatcctttgtactttgctcctgattctattagtttgacttccattgtttgtaatacaagtcaatattcatctg

SEQ ID NO: 183052 - DNA, 291 bp, Glycine max
tggcgccagtccttccacttctccccctccatccccggcaagtcccaccgcgacgccacgcgcctccacgaggagatggccgtcgatctcatcgaggccaagcccggcaacagaatcctggatgtgggctgtggcgtgggcggtcccatgcgggccatcgcggcccactcgcgggccaacgtagtcggcatcaccatcaacgagtaccaggtcaaccgcgcaaggatgcacaacaagaaggcagggttggagtccctctgcgaggtcgtgtgcgggaattttctcaagatg

SEQ ID NO: 183053 - DNA, 290 bp, Glycine max
caaagctcctcctgttatttcttggtggttggaggaggttcagaggaagaagaagatgagttaggagaaattaatattaactcttcaattttgtagtccaatacgatccatccatggtgggggaatcaagaaagtggctgatacttttggcatcaatatgggtgcaggcattcacagggacaaactttgacttctcatcatactcatctgagctcaaatctgtgcttgacataactcagcttcagctcaattacctctctgtggcctcagacatgggaaaggcctttggg

SEQ ID NO: 183054 - DNA, 263 bp, Glycine max
gcaaaaggccatataattctctcttatttgaaataatgtccgggatcatccacaagattgaggagaatctcaatgtgggagggcacaagacagaggagcacaaaggagaacaccatggtgagcacaaaggtgaacacaaaggagaacaccatggtgagcacaaaggtgaacacaaaggagaacaacaccatggggagcacaaggagggacttgtggataagatcaaggacaagatccatggtgatggccatgacaagggtgag

SEQ ID NO: 183055 - DNA, 289 bp, Glycine max
ctgaaacggagtccctagcaaatgttacagagatacatgatggttcggatttttcatcaaatgatgatggaggatactcctttggaattttctgtgtgaaattctcaaaagatgggaaagaattagttgcaggaagtagtggtgattctatatatgtatacgatcttgaagcaaataagctctcacttcgaattttagctcacacgtgtgatgtgaacactgtatgttttgctgatgaaactacccactctatttactctgggagtgatgatagtttctgcaaggtctg

SEQ ID NO: 183056 - DNA, 291 bp, Glycine max
gcacattccattgcagcagatccacaccttcgctttcatcatggccgaatttctggatctcgaatcccaagacggcgttcgaatgccgtggaacgtgatccccggcacgaagcaggacgcccaaaacgccgtcgtccccatctccgtcgtctacactccgataaagcacttcccctcgatgccggtcctcaactactcccctctccggtgccgcacgtgccgctccgtcctcaaccccttctgcatcgtcgacttcgccgtcaagatctggatctgccccttctgcttcca

SEQ ID NO: 183057 - DNA, 290 bp, Glycine max
tcctcgtctatgctgaaaaacgagaaggagatactcgattgccttggagcttccccttatgtcatcaaatgttcggccatgatcacactgttgaaaacggagaagagtattacaacattttcctcgaatacgccgccggtggttctctcgccgatcaggtcaaaagacacggcgggaggcttccggagtcttacgttcggaggtgtacgaggtcgatcgtcgaaggtctaaaacatattcacgacaacggttatgttcactgcgatgtgaagcttcaaaacattctcgtt

SEQ ID NO: 183058 - DNA, 288 bp, Glycine max
ctttgcaatctacacaatattcagtattcaccatgggagccacaacttttacacatgattattcatcccctgttgctccatcacgcatgttcaaggccttgatcactgactctagaactttgctgccaaagctcttaccacagatcaaaaaagaggtcaatctgatccaaggagatggggaagctggaagcattgagcaagttaactttgctgaagctttccccttcaagtatgtgaaacacaggattgatgaggttgataaggacaactttgtgtgcaaatacacta

SEQ ID NO: 183059 - DNA, 286 bp, Glycine max
tacagagcactatacattctcaactggatctaccgctactttaccgagcctcactttgtccattggataacatggatttccggccttgttcaaacactactctatgctgatttcttctattactatttccaaagctggaagaacaacaaaaagcttcatttgccagcatgagtgtattcttctgttcttaaaaacaagggtctatgtggacaattaacagtgagcagagaggatccacaaatttgtctggacatagtggtttctgatttacaattgcctatttgtt

SEQ ID NO: 183060 - DNA, 285 bp, Glycine max
gaatggcaaagttaataaaattctttgagttgaacacaggggccaagattccttctgttgggttaggcacatggcaagctgagcctggtgttgtagccaaagctgtcaccacagccattctggttggatacaggcatattgattgtgctcaagcgtataacaatcaagcagagattggttctgctcttaagaagctttttgatgatggtgtggtgaagcgtgaggacttatggatcacctccaaactctggtgttcacatcatgcttcagaagatgtgcccaaag

SEQ ID NO: 183061 - DNA, 286 bp, Glycine max
ttttggtcccactgggctgacaactgaggttaagtctgttgagatgcaccatgaggctctcacagaggctcttccaggtgacaatgttggctttaatgtgaagaatgttgcagtcaaggatctcaagcgtggttttgttgcatccaactccaaggatgaccctgccaaggaagctgccaacttcacatctcaagtcattatcatgaaccaccctggccagattggaaatggatacgcaccggtgcttgattgccacacttctcacattgctgtcaagttttctgaa

SEQ ID NO: 183062 - DNA, 148 bp, Glycine max
atctatgctattaagaggtggaacgaaagcaccaagtacttcctgcaggataattggcagagaacttgggtattgctactgtggattggcgtgaagttaggtctatttgcctacaaatttgtgcagtatagaagacaacctgcatatg

SEQ ID NO: 183063 - DNA, 280 bp, Glycine max
gacgaaaggaaagaagaagaagaagcgttctttcggagagttcgaagatgtcgggcgttaccaacaacaacgaggaagacaagaagccaaccgaacagggagcacacatcaaccttaaggttaaggggcaggatgggaatgaagtttttttcaggatcaagagaagcactcaattgaagaagcttatgaatgcttactgtgaccgacagtcggtggatttcaactccattgcttttctgtttgatggacgccgcctccgagctgagcagactccagatga

SEQ ID NO: 183064 - DNA, 288 bp, Glycine max
cttcgaactgttggaaatattgtcactggagatgatatgcagacacaggttatcatcaatcaccaggctcttccttgccttctgaatctgttgaccaataattataaaaaaagcatcaagaaggaagcttgttggaccatatcaaacatcacagctggtaataaacagcagattcaggctgtgattgaggctaatctaattgctcctttggtcaatctgcttcaaaatgctgagtttgatatcaagaaagaagctgcttgggctatctcaaatgctacatccggtggt

SEQ ID NO: 183065 - DNA, 282 bp, Glycine max
cttgtatatgagcctccaagggatggtcccacattgtgggaaattagtattcctgatagatccgctgcagaattttatgctcctgatcccagtccacaacatattaataagctttttatcaaccatccagacaggttcaggcagtatggattgtgggataggtattcagaattgtatcctgatgcagatttggtttacacaattggtgttagtgactatacgaaggattggttttatgcacaggctccgaggaaaaaagtggataacactcttcaaggaaca

SEQ ID NO: 183066 - DNA, 287 bp, Glycine max
tttaggttgggatttgggaattagggttattcgcgtggcgaagatgattgaggtggttttgaacgatcgattggggaagaaggtgcgcgtgaagtgcaacgacgatgataccatcggcgacctgaagaagcttgtggcggctcagactggcacaagagccgacaagatccgcatccagaagtggtacaccatctacaaggatcacatcactctcaaggattacgagatccatgacggcatgggtctcgaactctactacaactaaacacaacaaggtgtgttttatg

SEQ ID NO: 183067 - DNA, 285 bp, Glycine max
cgatcaatcattaaaggcttacttcttcttcttcttcttcttcttcttcttcttctaacaacaataagatcccatctttcccactcatgaagagacttaacagctcagattcttccactgccctcatgacaatttttccatcatcatcaacagaggaacatagtccgaggaacagccaccacatgtatggcagggagttccgatcgatgttggacggactcgacgaggaagggtgtgttgaagaaccggggcatcaatctgagaagaagcgtcgactaagtgtgg

SEQ ID NO: 183068 - DNA, 281 bp, Glycine max
ttacaagcctccccaattggacgggctttatcaatatctttcaacagtgtttgcaactgatttgcattctcgtgcatttttacggcttcctaaatctgtgggtgtggattttcgtgcctcgtgtttctgccataaacaaacaattgacatgggctatgtgtgttctgtatgcttatccatattctgtgagcaccatgataagtgttcaacctgtgggggttagcatgtcaagaaaagctatgagatgaaggcaatcccagctgattaagatgaagttttca

SEQ ID NO: 183069 - DNA, 281 bp, Glycine max
atggcaaagcttcatgaggctgccagttctaacagtgtcgatgcatataaacaatatgccatagccagtcatgaattgaacaaggcttgcaatttgcgtgggcttcttaaatttaaagagacagcagttaagattcctattgatgaagtggagcctgctagtgaaatagttaaacggttttgcactggggccatgagttatgggtcaatatcattggaggcacacacagcattagcaatggctatgaataaaatgggagggaaatccaacacaggtgaggg

SEQ ID NO: 183070 - DNA, 281 bp, Glycine max
gccaaattgcacaacatataccgttgtcatcagcaaagataaaagaaatagttgagatgctttttgtgaacccagagccagagaatgttaagattctagaggaaaccattagtatgtgtgaagtgcctgcaataactggagaagaaagatattgtgcaacttcattagagtccatggtagattttgtcacttctaagcttgggaagaatgctcgagttatttctacaggagcaggtaaggatagtaagtcccaaaaattctcggtgaaagatggagtgaag

SEQ ID NO: 183071 - DNA, 285 bp, Glycine max
gtgaggtttggtggtgtggtttagtgtcaaaatggcggcgagtagaagcactttacctctgatgaagtacttgagagtgcgcgtggacgctcttccccgcaacactcccttgaccctcacttccaacttgttgattcgccgcttctccgaagaggttaggggttgttttctcgacaagtccgaggtcacagatcgcgtcatttcctgcgtcaaaaacttccagaaagtcgatccttctaaggttaaccctaatgctcacttccagaatgaccttggattggatag

SEQ ID NO: 183072 - DNA, 287 bp, Glycine max
cccttgccgactacaacatccaaaaggaatccactctccacctcgtgcttcgcctcaggggtggcatgcaaatctttgtcaagactttgactggcaagaccatcaccctcgaggtcgaatcctcggacaccattgataatgtcaaggccaagatccaggacaaggagggtatccctccagatcagcagaggttgatatttgctggtaaacaacttgaggatggaagaacccttgctgattacaatattcagaaggagtctaccttacacttggttcttcgtttaaga

SEQ ID NO: 183073 - DNA, 287 bp, Glycine max
atttggagtttggagcgactgaactaatcattaatttgcactcgctgtttcagcttcatcacccttcttttgcatcatttatatctcttgagaaatggcacaagaaacctttctattcacatctgaatctgtaaacgagggtcaccccgacaagctgttgtaccagatctctgatgcagtacttgatgcgtgccttgaacaggaccctgacagcaaggttgcctgtgagacatgcaccaagaccaacatggtcatggtcttcggagagatcacaaccaaggccaacg

SEQ ID NO: 183074 - DNA, 286 bp, Glycine max
ctgctggcgaagacaggagtgcatgtgcctgtgtttccaagcgctggcttatgcatctaagcagtatttgcaaaagtgaaatctctgttaacaaaaataccacagtagagaaccctgaaaaggagggtgatgatgtagaatttggaggtaagggatacctctctcgaagcttggaaggaaagaaggcaacagatgttagactggctgccatagctgttgggacttcatctcgaggaggattggggaagctctcaatccgtggaagcaacattgtttgtggggtgac

SEQ ID NO: 183075 - DNA, 283 bp, Glycine max
cgttactcacatggggggtgcacctacagtgttaaacatgataatcaattcatcacctaaagtccagaagccgcttccgggaaaggtccaagtgatgacaggtggtgcaccacctcctccggatgtgattttcaggatggaagaactaggatttaatgtgactcattcatatggtttgacagaaacttttggtccggcatcaatttgcacttggaaaccagaatgggacaatctgcctcaagatgcacaagcaaaactcaaggcacgtcaaggagtggcccat

SEQ ID NO: 183076 - DNA, 283 bp, Glycine max
agactcccttacccaagcagatcttttgagctcgctcattgttctcgttgtcgaattgattggcttcaaagagatggaattctacttcttgaactagaccggttgctcaggccaggaggttattttgcatactcatctcctgaagcatatgctcaggatgaagaggatctaaggatatggaaagaaatgagtgaccttgtggggcgtatgtgttggaaaatagctgcaaagaggaaccaaactgttgtctggcaaaaacctccgacaaatgactgctatatgg

SEQ ID NO: 183077 - DNA, 274 bp, Glycine max
cgagaaggagtggtacttttttagcccaagagacaggaagtacccgaatggttcacgaccaaacagagtcgcgggttctgggtattggaaagcaactggaacagacaagatcatcaccactgaaggtagaaaagttggcataaaaaaagcacttgttttctacattggcaaagcacccaaaggctccaaaaccaattggatcatgcacgagtatcgccttctcgattcttcccgcaaacacaacctcggaaccgcaaagcttgatgattgggtt

SEQ ID NO: 183078 - DNA, 271 bp, Glycine max
gtggtatgctccaggcattgatgaatctgttctcgctgtgttggaagccatttggccgcgatgctgctgatcgaatcgattccatcggagttaccggaagagaaggcaaagacggcttgctttggttccgcgacggcggaaaatatggctctggcgatttctccatggccgtcgttcaggccaaccaggttctcgaagaccagagccagatcgagtctggtcctctcggcaccttcgtcggcatctacgacggtcacggaggacccgacgc

SEQ ID NO: 183079 - DNA, 270 bp, Glycine max
ggggggagttccatcaggcaacaacggttctgcctgaccctacttaagcatgcatattatgtcagtgaagacttggtgtgaagccttggagcttacgttagaagagcaaaaggcccggggctagggtgagctgaggggggacagcgtaagtgagcgaatgtgtgtaagcccagtcaaacatgactgttctaggcggggcgggccacccaccttcgaatggtgttggtcctacggaccgtgaatggattcgcctctggcctctgggcacgt

SEQ ID NO: 183080 - DNA, 257 bp, Glycine max
catggatggggtaacagtagaagaggcacttaatggtcagagattattcatattagcctatcaagacgcattcatgccatatttgacaaggataaacgcactaccttctgcaaaggcttatgccacaaggacaatcctgctcttgaacgatgatgggactttgaagccacttgctatcgaattgagcaagccacatccacgtggagataatttgggcgccgagagcaaagtggtcttgcctgcagaccaccgtgttg

SEQ ID NO: 183081 - DNA, 218 bp, Glycine max
cggtgcggggtattctctcggacttgacttgtgacagcgacgggaagattgacaagttcatcaacggagagtccagcctgccgcttcatgagatggacggaggacgcacttactatctgggaatgtttttgggtggggcttacgaggaggcgctcggtggagtccacaacttgttcggcggacccagcgtggtccgggtgtcgcagagcgatggccct

SEQ ID NO: 183082 - DNA, 268 bp, Glycine max
gagctatcttttatacgcaaggctaaagaatctggagttgtttatcttcttggtcacggggatataagagcaagaaaagactcatggtttatcaagaagctaattataaactatttttatgcctttctgagaaagaactgccgaagtgggatcacaaatttaagtgtaccccattcacatatgatgcaggttggcatgacctacatggtttgaccatgaattttccaacccaaacaattgacaggtaatatggaattatagtttggta

SEQ ID NO: 183083 - DNA, 267 bp, Glycine max
ctcgagcgaatcggctcgagacctcaccaaaggaactaagaacttcattgaggctagagaaagtggtgatcaatatatcaaagaatccaaaagttttctttgatattctaattggaaagatgaaagctggacgagtagtgatggagttgtttgccgatgcaaccccaaaaacagctgaaaacttcagggctctctgcactggggaaaaggggattggacgatctgggcaacctttacactacaaaggttctgtatttcatcgtatta

SEQ ID NO: 183084 - DNA, 269 bp, Glycine max
atccgctcaaatgttttttctttccatcatcatcatcatcatcatcattcagaatcgctttccatgcttcccatagccttcaaccctcttggtctcttcttgttacttttcttctccctaacttcatatctttcttggcacatatcagacaaccacgccccaggactcaccaaaagtaagcttctttggatgattttggctctctttttgggtcgctgaggaagcttacaacccttcatggcgagaacgtctcgctctttctccttgct

SEQ ID NO: 183085 - DNA, 267 bp, Glycine max
caaaatggtttcagttgagagaataaagcagttctccagccttccctcagaagctccatggaaaattgctgacaaaactcctcctcagaattggcccagtcaaggcattattgagttaaccaatttgcaggttcggtatcgaccaaatactcctctggttctcaagggaatctctctcaccattgaagcaggagaaaagattggtgttgttggtcgtacaggaagtgggaaatcaaccctcattcaggtgttatttaggttgattga

SEQ ID NO: 183086 - DNA, 255 bp, Glycine max
gcaaatgattgacatacttctgaatttgcagctgttagctcctttcttccttttcttcatctttccagtgtttttacttctctttctcacgtcctcatgtcctactaaacgaagcatcactatcccaaaaccatacccactgattggtcactacttagacctcaaaggcatcggcaaccgccgtatccagtggctatccgacatcgtcaaaatctcaccggctaccacgttcaccctccaccgccccttaggccg

SEQ ID NO: 183087 - DNA, 145 bp, Glycine max
aagagtccatgctctctgctgataaattatgctactgggtgcatatttgagtatgatgcagctcatccagagggttctggcattggctttaaggaggaagacagacccaacttctttagttctttctattccaaaactaacgcta

SEQ ID NO: 183088 - DNA, 255 bp, Glycine max
atcactagtagtgttggatgtatttctatttctaactaattattgtgcttattattattgttgagaaagaaaagaatggcaaagttaataaaattctttgagttgaacacaggggccaagattccttctgttgggttaggcacttggcaagctgaacctggtgttgtagccaaagctgtcaccaagcccttctggttggatacaggcatattgattgtgctcaagcgtataacaatcaagcagagattggttctg

SEQ ID NO: 183089 - DNA, 264 bp, Glycine max
ctctactactgctagctgtgacttgttttgagttcaatcaaatcgcattggtatctgaaatcaggaaagatggttagcgtagctgagatcaggcaggcacaaagggcagaaggcccagcaaccatccttgccattggaactgcaaacccaccaaaccgtgttgatcagagcacctatcctgattactacttcagaatcaccaacagtgaccacatgaccgagctcaaagagaaatttcagcgcatgtgtgacaagtctatgatc

SEQ ID NO: 183090 - DNA, 263 bp, Glycine max
tatgcctgcaatatatagcttggaggaataaattctctgttggcaatagagcattctgggcatcttcccctgattaaagataccccaacgatgattttggggatggatgtctctcacaattcacttggtcgattagatagtccatcaatagcagctgtaagactagtttggttttgtatttcttgtacctctatatttttggatttttggttatctctgcagcatatcgttctgttgcctaatgttggattgtaggttgttgg

SEQ ID NO: 183091 - DNA, 255 bp, Glycine max
gagagagctagacactgagcgaaattcgcaaaccctaatttcggaaagatcggcgatggctgcctccaaggatcgcgagaacttcgtctacatcgccaagctacgccgaacaggccgagcgatacgaagagatggtggaatcaatgaagaacgttgcgaatctcgacgttgaactgactgtggaggagcggaatttactttctgttgggtacaagaatgtgattggtgctcggagagcatcgtggaggatcctgt

SEQ ID NO: 183092 - DNA, 264 bp, Glycine max
gaaatttattacatgttgaaggctcggggagcgaaagtgccgaaaaccaggaagactccaatgactgttgcaaatcctcgtgaagttccggaatatgaactcaacccgttagagctacaggttcggaagagtgatggtatttcaaagggaacataccaagtagctaaatggaatggcaccaaggttgcagtgaagatacttgataaggacagttattcagatcctgataccataaatgctttcaaacatgaactcacattatta

SEQ ID NO: 183093 - DNA, 260 bp, Glycine max
atgcgaaaagacattatgctcatgtggactgacctggacacgcagattatgttaaaaatatgattacaggagctgcccagatggatggaggtatacttgttgtatccgcacctgatggacctatgcctcaaaccaaggagcacattcttcttgctcgccaagttggtgtgccatctctggtgtgttttctaaataaagttgatgcagttgatgatccagagttgttagagcttgtagaaatggagctccgtgagcttctg

SEQ ID NO: 183094 - DNA, 263 bp, Glycine max
cacatagcactcagcaataagacggtccctattgtgcctttacttcacggtggcggcttttgcttcggttcgcgcacctggccccatattcacaactgttgcatgcgcctcgcgtcggggctccaagcggcggtggtttcgccggactaccgtctcgcgccggagcaccgtcttcctgctgcggtggacgacgccgtggaggcggtgaggtggctccagaggcacggcctgagcttgagggaggccgcgtggttgagtggggg

SEQ ID NO: 183095 - DNA, 265 bp, Glycine max
ggaggatgctgaagagaagaaagaaaagaagaaaaaggaaaagaaagacaaggatgacaaaactgatgtagagaaggtcaaggggaaagaagacaaagagaagaagaaaaaggaaaagaaagtcaaggatgacaaaactgatgctgagaaggtcaaggggaaagaagatgatggggaggacaatgaagagaaggaggaaaagacaaaaaagaaaaagaaggaaaaggatgacaaaattgatgtagagaaggtcaaggggaaagaa

SEQ ID NO: 183096 - DNA, 259 bp, Glycine max
cgagggcaaggagtaccctggaagcctcactctatttgtgacggtaacatgtatagttgcagccatgggtggtttactcttcggttacgatatcggaatttcaggtggagtgacgtccatggatccgtttctgctcaagttttttccgtcagtagttcggaagacaaactccgacaaaacggtgaaccagtactgccaatacgacagacagacactgccgatgttcacgtcgtccttgtaccggccgctttgctgtcgt

SEQ ID NO: 183097 - DNA, 252 bp, Glycine max
tgcggtcatcgataccaccaagtatgggcaggttcatgcccgggtacgcaaagcacgtgttgggcccaatgctgaagtttctgagggagacgagaacacccttgatggtgaacccgtacccgtacttcggttacaacgggaaaaacgtgaactttcttctgttcaggcccaaccgaggcttgtacgacaggtccccgaagaggagttacacgaaccagttcgacgctctaatggacgcggtgcactcggcga

SEQ ID NO: 183098 - DNA, 263 bp, Glycine max
gaaaaagttagggtttgtaactttgtcttttgcttgcgaatctgaatcgaataataatcaatcaatcatcatgtcgtcggcgaagaacatcacactgaagagttcggacggcgaggctttcgaggtggacgaggcggtggcgctggactaccagacgataaagcacatgatcgaggacgactgcgccgacagcggcatccctctgccgaacgtgacgagcaagatcctggcgaaggtgatcgagtactgcaagaagcacgtcg

SEQ ID NO: 183099 - DNA, 257 bp, Glycine max
ctggtcccacacatgctggaggctgaagcaggcgagtagagcctgaaagaacactgactgatgcacagagggatgaatttgaggatatgctgcgtgctttaacattagagaggagccagataaaagaggctatgggattttctttagataatgccgatgctgctggcgaggtagttgaagttttgactgaatccttgacacttaaagaaacccctattccaactaaaattgcacggcttatgcttgtctctgatatt

SEQ ID NO: 183100 - DNA, 262 bp, Glycine max
ggttatgtcaaacgaagaagcagtggaatctattcgacaaataaaggatgctcaagctgcagcaaagcaattgattgaagaggcagtttgcaagaaaagtaaggatgacatatcttgcatagttgtgaggttccaatgacatgtttttggttaagcacaggaatcctttccgaaacccaagaatgaaggccctgctggacatttagctagcactgattgcatgtataaatgattcaataataacttttgctttttcacgaga

SEQ ID NO: 183101 - DNA, 262 bp, Glycine max
atccattcactaatcactaccaattgctaaagatatttcactcactgtccacactactaatacagttttctggagatggcttcaactgtctcttacatgcttctacttcccgctctagtgatggttgcctctgctggggacttaaacaaagactttgacatcacatggggagatggccgctccaagatactaaaccatggagagttactcactctttcattggacaaagcatctggctcaggttttcaatcaaagaatgagt

SEQ ID NO: 183102 - DNA, 262 bp, Glycine max
cagcactcaaatcctctgagagaaaaaaaaattagggttttgcatttcgggtcagacagactcagacatgggaggaggcaatgcccagaagtcaaagatggctcgcgagaagaacctcgagaagcagagggctgccgctaagggaagccagttggattcaaacaagaaagccatgtctattcagtgcaaggtgtgcatgcaaacatttatatgcaccacatcagaagtgcagtgcaaggagcatgctgaagccaaacacccc

SEQ ID NO: 183103 - DNA, 257 bp, Glycine max
cactgaagcccttgctgctgtttccgactctagtgacagctcgaaagacaaatcagatcagaagactctccgcaggcttgctcagaaccgtgaagctgccagacaaagccgcttgcgaaagacagcgtatgtccaacagttggaaagtagtcgtttgaagctgacccaactagagcaagagcttcagcgagctaggcagcatgggattttcatatctagctcgggtgatcaagcacatacattgagtggaaatgggg

SEQ ID NO: 183104 - DNA, 259 bp, Glycine max
ctctgctaaggcgtgttcaacaatcggcggcgaaaatgccttcccacaagaccttcaggatcaagaagaaactcgccaagaagatgaggcagaacaggcccatcccttactggatccgcatgagaaccgacaataccatcaggtacaatgctaagcgcaggcactggcgccgcaccaagcttggattttaaggtcgatgccaacctccgactcgagatttttgttttggttttggttttctagaatgtcacgagcgatg

SEQ ID NO: 183105 - DNA, 250 bp, Glycine max
gttggacgagagcctcctcattcattggtctgggattcagcaaaggaggacttcgtggcaagatgacgttcttggcacaaactgtcctattcctgcaaagtggaactggacttaccagtttcaggtgaaggatcaaattggacgctttttctacttcccttcccttcatcttcagagcgctgctggtggatttaggggtttcatcataaacaacagacccatcattccgattccttttgatacccccatg

SEQ ID NO: 183106 - DNA, 258 bp, Glycine max
ttatggtggatacctaggcacccagagacgaggtgtgggcagctcgttacatcttggagaggatcactgagattgctggtgtggtggtttcctttgatcccaagccaattcagggtgattggactggtgctggtgctcacacaaactacagcactaagtccatgagaaatgatggtggctatgaagtgatcaaaaccgccattgagaagttggggaagagacacaaggagcacattgctgcttatggagaaggcaacg

SEQ ID NO: 183107 - DNA, 252 bp, Glycine max
ttacactatgtctcttccaattcctagcaggttcgtattcaacgacattcacgattgtgaacaagtgcagctacacagtttggcccggcattttatccggcgccggaacctcgccgctccccaccaccggcttcgtattacaaccaggcgagtccaacgtgatcgccgtgccggccgcctggtccggccgcctctgggggcggaccttctgcacccaagatgccacaggaaaattctcctgcgtcaccggcg

SEQ ID NO: 183108 - DNA, 266 bp, Glycine max
cagaaacgttcactctccaaaaaggagagtgaacccttcaagatataacacacacaaaaagaaccagctaatagggaactgcatcgacactatggcactagatgacatatatacacaagatgggaccattaccatctccaaaaaacctgccaacaagacaaagactcggaaattggaaagcttgctattttattcttggaaatgaatgttctgagagattggcatactatggtatgagtacaaacctggtgaactatcttcgggag

SEQ ID NO: 183109 - DNA, 259 bp, Glycine max
gtttctcgtggcagtgcaaaggcaagagacggccaccgtagaagacgcgcaagccatcatcgacagcttcaggcatttccctcgcagaggcgctggcctcaatctcgaaactttcttcaagtacctcttcagtgacgataacccccctcttcttccttctcatggggtgcatcatgatatgactttacccttgtcacattatttcatatatacaggccataattcctatttaactgggaatcagctgagcagcgactgc

SEQ ID NO: 183110 - DNA, 256 bp, Glycine max
catctccttctcaaactagtagtattattcttccattcataatgggtgttttcacattcgaggatgaaatcaactcccctgtggctcctgctactctttacaaggccctagttacagatgccgacaacgtcatcccaaaggctcttgattccttcaagagtgttgaaaacgttgagggaaatggtggcccaggaaccatcaagaagatcactttccttgaggatggagaaaccaagtttgtgctgcacaaaataga

SEQ ID NO: 183111 - DNA, 160 bp, Glycine max
atttgtcttcaaaaggagcgacatgggatgagattgactttgaattcttgggcaatttgagcggcgacccatacatccttcacaccaacgtgtttagccaaggcaagggaaatagggagcaacaattctacctctggtttgacccaactgcagattttca

SEQ ID NO: 183112 - DNA, 153 bp, Glycine max
ctagtcctgattcctagctctataaaaggagaataccataggcatctctcacagacaaacaaaccatttaccagctatccttgttccttttgaaggttagaagtgctacaataaaaaccatggcagctaatcaggaagatgtgaagcttttgg

SEQ ID NO: 183113 - DNA, 154 bp, Glycine max
gttaatttgttgagagagagcaatcaagaacattcatggagtcttcacaggagagagcagacaacaccaattaaccaccacctgataggctgatacaatacagtctcctatcctttttcgacaaccagactggctgcgaaatctagttcgagtt

SEQ ID NO: 183114 - DNA, 153 bp, Glycine max
aggacgaagagcaccatttcgagtccaaggcagacgccggtgcctccaaaacctaccctcagcaagccggtaccattcgcaagaacggatacatcgtcatcaaaggacgcccctgcaaggttgtggaagtttcgacttccaaaactggaaagc

SEQ ID NO: 183115 - DNA, 160 bp, Glycine max
cgaaccgattcaagaagaaccgcaagacgcgcggccacgtgagcgacggtcatggccgtatcggaaagcaccgtaagccccccggcggccggggaaacgccggtggcatgcatcaccacaggatcctgttcgacaagtaccatccgggcttcttcggtaa

SEQ ID NO: 183116 - DNA, 157 bp, Glycine max
gtttcaggatcaaattcgtctgaatatggtgttccaggggggtttgaacacattaagaagaatttatctggagataatgtattggacttgttcacatatcatagaatgggagcatcattcatctctccagagcattttccttagttcactgagtttg

SEQ ID NO: 183117 - DNA, 156 bp, Glycine max
ggccattgctggtcttagtagccaaaaccctggagttattaccattgcaaatgctgtgtttggatctaaacctcctatctctgatgaagttcttgccaaagcttttcaagtgggcaaaaacgtaatcgactaccttcagaagcaattctggtacaa

SEQ ID NO: 183118 - DNA, 152 bp, Glycine max
tacgagcgcctatagtccttgccagtcatcccaccagctcgccaaggccaagcatatcgagccactcaaggcatgcaatataatcgaaggggatgccgaggatctcccctttcgaactgattatgtcgatagatatgtatccgcaggaagta

SEQ ID NO: 183119 - DNA, 158 bp, Glycine max
gtgcgttgaagtctgctaggttcgtgagcaggttcgaggaaccttaccaaagcgaggaagagatgaaggagaggtacgagatattctcgcagaatctcaggttcatccgctcccacaacaagaagcgtttgccctatactctctctgttaatcatttt

SEQ ID NO: 183120 - DNA, 150 bp, Glycine max
ccatgatgttgttcttggaagacggaacactaggactcacaatggtcatcagttgaggctatgattcatcaacggatatgcactttgcaagagtattaacccatatgaagctgctgcttatggtgctgcagtgcaggctgcgattctcag

SEQ ID NO: 183121 - DNA, 155 bp, Glycine max
ctctcaccttctacattactctctcttctcctacacatttctaaaggttccattgcatcatctgactcactcctcagtagctctgagactgaaccctatccccatacaaaccttatccctcccccaaatgcccagcctcagatcaaccagattcc

SEQ ID NO: 183122 - DNA, 152 bp, Glycine max
gacaacttctgagcatgcttgttaagctcacgaattcaaagaacgccttggaaattggtgtattcactggttactctctgctctccactgccctggctcttccccctgatggaaagatcttggctttggatgtgaatcgcgaatactatgag

SEQ ID NO: 183123 - DNA, 151 bp, Glycine max
ttctttttctctaagtctaaggggtgccctgagatcactttgagcaatggtgaaggctgtggcagttcttggcagcagcgagggtgtcactggaactattttcttcactcaggagggaaatggtccaaccaccgtaactggatctcttgct

SEQ ID NO: 183124 - DNA, 150 bp, Glycine max
ggacgatgcggccgtggtgtctctagattcgctgccgttagggttccgattccgacctaccgacgaggaactcgtcaattactacctgcgacagaagatcaacggtaatggtcgcgaggtttgggttatccgagaaattgatgtctgcaa

SEQ ID NO: 183125 - DNA, 193 bp, Glycine max
tctctgtgttgtgttgtgtacttgtgttaattgtgttgttgttgtaggacatttaagtgaagagagaatgatgatgaagtctgctatgtgtgcattggtgcttgaggcactggttgtggttgaagtggggcccatggctgaggctgcggtgacttgcaacccaacacagttgactccttgtcttccggcaatt

SEQ ID NO: 183126 - DNA, 203 bp, Glycine max
gttaactataatgctggagcacagacaacagtttcaaatataatcatggctgcagctgttctagtgacacttctgtttctcatgcctcttttctactatacaccaaatgttgtcttagcggccattatcatcactgctgtgattggtctaatagattatcaatctgcatataaattgtggaaggttgacaaacttgatttctt

SEQ ID NO: 183127 - DNA, 202 bp, Glycine max
ctgatacagattatatcagagctcaggaggcccggcgcttcatgatttatgttcatgccaagatgatgatagttgatgatgaatacataatcgttggatctgccaacataaaccagagatcaatggatggtgccagagattctgagattgccatgggtgcttatcaaccatttcatttggctgccaggcagcctgccagggg

SEQ ID NO: 183128 - DNA, 201 bp, Glycine max
ctcgagccgttcggaacaagttggatgagagcctcctcattcattggtctgggattcagaccaggaggagttcgtggcaagatggtgttcttggcacaaactgtcctattcctgcaaagtggaactggacttaccagtttcaggtgaaggatcaaattggaagctttttctacttcccttcccttcatcttcagagagctg

SEQ ID NO: 183129 - DNA, 199 bp, Glycine max
gggagctcgaggtgcttcggggctttgtattggacatggtggtggacagagatgtcagaaacctggatgcaacaaaggtgctgagagccgaactgcttattgcaaggcccatggtggagggaagaggtgccaacacttgggatgtactaaaagtgctgaggggaagacggattattgcattgctcatggcggtggtagg

SEQ ID NO: 183130 - DNA, 200 bp, Glycine max
cacaagccaagtgaaagtgagaaaaaataaaaatcaaagagcataatgtcagggatcattcacaagattggggagacccttcatgtgggagggcacaagaaggaggaggagcataagggtgagcaccatgctggagaatacaaaggggagcaccatggtgaacacagtagtgagtacaaaggagagcatcatggtgaaca

SEQ ID NO: 183131 - DNA, 202 bp, Glycine max
ggcaacagaggagagaagatgaagttcaatccacgagtgtcgagcagccgccgcaagagccgaaaggctcacttcacggcgccgtcgagcgtgcggagggtgctgatgagcgcccctctgtcggcggactccggtcgaagtacaacgtgcggtcgatcccagtccgcaaggaggacgaggtgcaggtggtgcgcggaacata

SEQ ID NO: 183132 - DNA, 210 bp, Glycine max
attaacatatacaaattctctgtgttgtgctgtgtacttgtgttaattgtgttgttgttgtaggaaatttaagtgaagagagaatgatgatgaagtctgctatgtgtgcattggtgcttgtggcactggttgtggttgaagtggggcccatggctgaggctgcggtgacttgcaacccaacacagttgactccttgtcttccggcaatta

SEQ ID NO: 183133 - DNA, 206 bp, Glycine max
ctttgtcttttttctattatagaatgactcttatatttgttcaaatcaatatatatgctgactttcctctattgctctgttcagcaatggaattagctttgtctttggagaagttagtgaatgagaaacttctgaatgtgcacagtgtggcagatcgcaacaatgaccctcaattggcagacttcattgaaagcgagtttttgtct

SEQ ID NO: 183134 - DNA, 204 bp, Glycine max
ggctgatcccaagcctcgtcttcgttggactcaggacttgcatgaacggttcgttgatgcggtaacgagcttgggggagcaagtaaagctacaccaaaagcaatcatgcggaccatgaatgtcaagggtttgactctgtttcatttgaagagtcatcttcagaaatacaggcttggtaagcaatctgggaaggatgtgggtgaa

SEQ ID NO: 183135 - DNA, 202 bp, Glycine max
cagcattcgttgcggcattttaatcgatttatccaagcaggactgaatgaactaatggagtctaaagtcgcgaaaaagaagtctagtagtagtagtagtaaatcattgttctacgaagctcccctcggatacagcattgaagacgttagaccaaacggtggaatcaagaaattcagatctgctgcttactccaactgcgctc

SEQ ID NO: 183136 - DNA, 202 bp, Glycine max
cgatgtctggtgagattccatgtgccacacctgatactcaatctgtgcgaactacttcaggttctctgggcccatctgaaaaggttcactcacttccctatgttgatccaaggcaaccagttccagtaagaattgtggacccatcaaaggacttgaattcttatggtctgggaaatgttgactggacagacagggttgaagg

SEQ ID NO: 183137 - DNA, 197 bp, Glycine max
ctcgagccgattcggctcgaggcgccactggacaccccagttttgcgatgtcctgctccatcaccaaccaggtcattgaccagcttgagttgtggaaggagaagagtaccggcaagtacgagaagaaggtttacgttttgcccaagcaccttgatgagaaggtggctgcacttcacctgggcaaacttggagctaag

SEQ ID NO: 183138 - DNA, 201 bp, Glycine max
ctcgagccgctcgagccgattcggctcgagggaggatttaggcctgggcccagaagctaccactcccaacagcttctatcagtacccaatcttcagcttttgtgaccccaacacctggcatgccggtaagtcatatatggattcagaaatcatctcttgcagctgatcatgcagctgctggaaattttgatactgcaatga

SEQ ID NO: 183139 - DNA, 206 bp, Glycine max
caaaaaaggacattcattcatctatggctacccttattgctcccagcaaccactctccccaagaagatgctgaagctctcagaaaggcttttgaaggatggggaactgatgagaacactgtcatagtaattttgggtcatagaactgtgtatcagaggcagcaaatcagaagagtttatgaggaaatttaccaggaggatcttgtg

SEQ ID NO: 183140 - DNA, 203 bp, Glycine max
cagatgactgatgcagaactgagaaatatggttagcaagaccctcacttgtagaattgataagagagaaaactgcaatgagaagatggaccaatttctaaaaagatgtttctatcattctggtcaatatgattctcaggaaaactttgcagcgctagacaagaagctgaaggaacatgagggtgggagaacttctaatcgcct

SEQ ID NO: 183141 - DNA, 200 bp, Glycine max
gtttcgttactcgtattggaacagtagccagagttacgtcttaaccaaaggttggagccggttcgttaaggagaagaatctgaaagctggtgacacggtttgttttcaccggtccactggaccggacaagcagctttacatcgattggaagacgaggaatgttgttaacaacgaggtcgcgttgttcggaccggtcggac

SEQ ID NO: 183142 - DNA, 201 bp, Glycine max
ggaagaggttttggtgattgaagggattgagtttgagagaaacacacctgtgaaatttgatgtgtttatcaatgatgaagatgataagcagattcgaccagataatacagaatttgcaggaagctttgtgagtgtgcctcattcacatatgcacaaaaacaaggacatcattacttgtttgaggctgggacttacggattt

SEQ ID NO: 183143 - DNA, 196 bp, Glycine max
cacaagtctccctgttgagacagttgaggttgttgacacagcacatgctgaggaaaagacggggttcctcgacaagattaaggagaagctaccagggcacaagaacacagaggaggccacagctactactcctcctccaccaccacctgttgcatcattggagcatggtgaaggtgctcatcatgaaggagaggcc

SEQ ID NO: 183144 - DNA, 199 bp, Glycine max
cttctgactctcttgactcaccaatcatgtcggacgaagagcaccctttccagtccaaggccgacgccggagcctccaaaacctaccctcagcaagccggtaccatccgccagaccggctacatcgtcatcaaaggccgcccctgccaggctgtggaagtctcgacttccaaaactggacagcacggtcacgctaagtg

SEQ ID NO: 183145 - DNA, 205 bp, Glycine max
gtccaacaaagtggcaatccttaccgatcatttgacagtgatgtgctgcttttcaaatctggctcttcagttccatctgggggtggtgctattgaatttgcttcagctgttaggaagttggcttttcaggattctggtggtatttggaagtatgaaaaaaatggctctggtgatgctgctatcggctcaagtaggacttcaaatg

SEQ ID NO: 183146 - DNA, 155 bp, Glycine max
cttctctctggctttcctttgacgcttctgacactgctccttttgcttctctccgtgtcctaatggctctccccgactcttcttcctgccgcaactccctgttcccctccttcatctactcctcttcctccaaaacgctcccttcacacaacata

SEQ ID NO: 183147 - DNA, 198 bp, Glycine max
  unsure (1)..(198): unsure at all n locations
tagcctttgtttactcttcttctcttgcggctatggttttagcgcagttcttctagatttaagtatgatgggtaagtaaaaggttcacatcagtattgtggtcattggccatgttgactctgggaaatccattaccactggtcacttgatttacaagctttgaggcanngacaagcgtgttattgagaggtttgagaa

SEQ ID NO: 183148 - DNA, 196 bp, Glycine max
gtttgcttgtcaatgacactgtcttacatcttgtcgttgatactttgccatttgggggagctggggagagtggaatgggtgcataccatgggaagttctcttttgatgcttttacacacaaaaaggcagttctttatcgcagttttgctggtgattcatcattaaggtacccaccatacacggatacaaagctgag

SEQ ID NO: 183149 - DNA, 196 bp, Glycine max
attccattctctctgtgtatttccctacctctcccttcaagatgcagatcttcgtcaagaccctcaccggcaagaccatcacccttgaggtggaaagctctgacaccatcgacaacgtcaaggccaagatccaggacaaggaaggaatccccccggaccagcaacgtctcattttcgccggaaagcaacttgagga

SEQ ID NO: 183150 - DNA, 242 bp, Glycine max
cttcaattcagtaaaccgcaccaattccgatggcggcgtcgcggcggctccgggacctccaatcccaaccggcgaacaagatctgcgtcgactgttcccagaagaacccgcaatgggcctcggtttcctacggcgtcttcatgtgcctggagtgctccggcaagcaccgcggcctcggcgtgcacatctccttcgtgcgatccgtgacgatcgattcgtggtctgaactccagatcaagaag

SEQ ID NO: 183151 - DNA, 261 bp, Glycine max
cttccatacatggatatacaatgggattaaaacttgaacagtttatatttgatgcatttccatatgctcctacgactgcactttttgaggtgttacgggaggaggaatttgcaccagtgaaaaatgcaaatggatccaatgttgacactccagacagtgcgaaactacttgttcttcgactccatactcgttgggtagttgctgcaggtggcttcttaacacattcagtgcccttatatgcaacaggtgttgaagtgtcac

SEQ ID NO: 183152 - DNA, 262 bp, Glycine max
cctaatcaaaccaaaacaaaagaaaacgaaaatccccaatcctgcgttgtgttgcgacttgcgagccatgagaggggtcgtgaaagcgtttgcggggaatctgttgttccatggaagaaagactcagactcagtgcattcgctcctacagtctgatcccaatggtgatagagcactcttcccgaggtgagaaggcatacgacatcttctcgcgccttctgaaggagcgcattatctgcatcaacggacccatctccgacgac

SEQ ID NO: 183153 - DNA, 265 bp, Glycine max
tttgggagttaggttctgcacgctctgcttccagcgagtgttctcacttcgtttcaacaccttaatttgcacacgctgcttcttcagcttgagaaatggcacaagaaacctttctattcacatctgaatctgtaaacgagggtcaccccgacaagctgtgcgaccagatctctgatgcagtgctcgatgcgtgccttgaacaggaccctgacagcaaggttgcctgtgagacatgcaccaagaccaacatggtcatggtctttgg

SEQ ID NO: 183154 - DNA, 263 bp, Glycine max
aatttaccagctatacttgttccttttgaaggttagaagtgctacaatacaaacaatggcagctactcaggaagatgtgaagcttttgggtattgtgggaagcccatttgtgtgcagggtccagattgcccttaagttgaagggagttgaatacaaatttttggaagaaaatttgggcaacaagagtgatttgcttctcaaatacaaccctgttcacaagaaggttccagtgtttgttcacaatgagaagcccatagcagagt

SEQ ID NO: 183155 - DNA, 259 bp, Glycine max
tagagaagcactcttcgttcttcgactgtctacgatctgctttctctgaattgtgaaaatgtcgctcggagaaactgcttgttcatacgcagctctcatccttcatgaagatggaattagtgtaactgctgacaagatcagcaccttgttgaaaactgcaaaggttccagtagactcttattggccaaccttgtttgctaaacttgctgagaagaaaaatcttggcgatttgatagcaaatgcggcaggcggtggtgca

SEQ ID NO: 183156 - DNA, 257 bp, Glycine max
atgggagcattgcttcacagggaaacacaaaacctgacatggagattgtaacaagggttatgggacctgaagttggatatctgaccacaccaataattcttattcagtgtgctcttgttcttctctgccaacgtgacaaccttccaaaaggaggagtttaccctcctgggatcatctttggtccaactgatctccaggaaagacttcaacaaaatggaatatcctttgatgtcatctcaaaaagcaccatttcttga

SEQ ID NO: 183157 - DNA, 257 bp, Glycine max
ctttgagagagagagagggaggagggagagtgttgacgctccatcaagatgggtatttctagggattccatgcacaagaggcgtgccactggtggcaagaagaaggcatggagaaagaagagaaagtatgagcttgggcgtcaggccgcaaacaccaagttatcaagcaacaaaactatccggaggattcgtgttcgaggtggcaatgttaaatggagggcattgaggttggataccggcaattactcatggggtag

SEQ ID NO: 183158 - DNA, 261 bp, Glycine max
ggccaagacaaatcacagaactggcatgtctactctgcttctgcagattctgtaactccatgcgacaatgtttacactctagagatgtgcatgactggcctggatagagagaaagcacaggttttctacaaagaacaatctgcttcagctgccattatgactgttaattctggcattagaaaaattcttccagattctgagatttgtgactttgactttgagccatgtggttattcaatgaactctgttgaaggtgctgct

SEQ ID NO: 183159 - DNA, 238 bp, Glycine max
catttgggagttaggttatgcacgctctgcttccagcgagtgttctttcttcgtttcaacaccttaatttgcaactgatgattgtgccgcttgagcactggcacaagaaaactttctattcacatctgaatctgtcaacgagggtcaccccgaaaagctgtgcgaccagatctgtgatgcagtgctcgacgcgtgccttgagcaggacacatgacgcaaggttgactgtgaaacatgc

SEQ ID NO: 183160 - DNA, 252 bp, Glycine max
ccctcgagccgaatcggctcgagctttctccgagaacaacaaaaacctcgtgcttcgctcttaccttcgaataacccacaaaaccaacaaacgagaagaggagtgacagcagatggggttgtcgttcacgaagctgttcagcaggttgtttccgaagaaggaaatgaggattctgctggtaggtctcgatgctgctggtaagacaaccatcttgtacaagctcaagcttggcgaaatcgtcaccaccatccc

SEQ ID NO: 183161 - DNA, 266 bp, Glycine max
ggagcttcaagactgaccattttgttagtgacacgggggatgttgtgtactatcaaaccgactctaagattaatggctcttccaaattagagtgaatattaaaattcttttctatatagacaagagaggcttatacacaattcttattgctttaaagattgtcttgagtttctccgaaagttactgcacttacttggagttgaatccttcattaataaagggatggatggatcatataatttcaattgtaactgcatgatagaatg

SEQ ID NO: 183162 - DNA, 261 bp, Glycine max
ctcgtaacgaggagaaggcccagtcgatgctcaaccgcttcatcaccatgaaggcggcggagaagaagaagccgaaggagcgccgccccttcctcgcctcagagtgccgcgacctctcggaggccgacaagtggcggctacagatgctgcgggagatcggccggaaagttgccgagatccagaacgagggtctcggcgaacaccgcctccgcgatctcaacgacgagatcaacaagctcatccgcgaaaactcccactggg

SEQ ID NO: 183163 - DNA, 258 bp, Glycine max
cagaaattgttgtccctgactggcgtgggcgtctgtgtatgaatgtgtttgtgagaaaatggaagctgcgatgggcatgatgcggaggattcctccgaaacacacagaaacagctctgtcagcgcttctgagacttatgcctgacaactcctccgatctcctctctcaagtcgatcagcccctccaggttctgtgcgatgtggaatgcggcaaggagttcattttgtgcgaatacaatagagatgccgactcttacag

SEQ ID NO: 183164 - DNA, 254 bp, Glycine max
acttcacccattcatacgtggtgttgttactgctgctcttttctcttttcttttctctttagttctctcttcccctttctttttctttttcttcttcttctgagcttgtttaagcttttcttccattaacatattatcagaatgtgtggtattcttgctgttcttggttgttctgatgactctcgagccaaaagggtccgcgtgcttgagctctctcgcagattgaagcaccgtggccctgactggagtgggct

SEQ ID NO: 183165 - DNA, 255 bp, Glycine max
tgagaaataaggggaaaaaatggtgtcgctgaaactgcagaagcggctggccgcaagcgtgctcaagtgtggcagaggaaaggtgtggcttgaccgcaatgaagtcaacgaaatctccatggccaattctcggcaaaacatcaggaagttggttaaggatgggtttatcatcaggaagccaaccaagattcactcacgctcgcgtgctcgtaggatgaaggaggcaaagaagcagggccggcactctggttatgg

SEQ ID NO: 183166 - DNA, 259 bp, Glycine max
ctcgagccggttttgcttttgccacttcgaaaccaaattttcttcgttcgtccttctgtgaactcttcttccaccatgagcaggtcagggcaaccaccggatttgaagaagtacatggataagaagcttcagatcaagctgaacgcaaatcgcatggttgttggtactctccgtggctttgaccagtttatgaatttagttgttgacaacactgtggaagtgaatggcaatgagaaaactgacatagggatggtggtaa

SEQ ID NO: 183167 - DNA, 258 bp, Glycine max
ccaggtccagacatagtaaggattgacagactgagagctctttcttgattctatgggtggtggtgcatggccgttcttagttggtggagcgatttgtctggttaattccgttaacgaacgagacctcagcctgctaaatagctatgtggaggtaaccctccacggccagcttcttagagggactatggccgcttaggccacggaagtttgatgcaataacaggtctgtgatgcccttagatgttctgggccgcacgcg

SEQ ID NO: 183168 - DNA, 265 bp, Glycine max
gtggcggtggccatgatccatttgatatcttcagttcattctttggtggaagtccgtttgggtcaggtggtagcagtagaggacggaggcagaggcggggagaagatgtggttcatcccctgaaggtctctctggaggatctttacctcggaacttcaaagaaactctctctttcacgaaacgtgttgtgctcaaaatgcaatgggaagggctcacagtctggggcttcaatgacctgtgctggttgccagggtactggcatgaa

SEQ ID NO: 183169 - DNA, 255 bp, Glycine max
gtgattgttgaatacattgatgagacattgaagaacaaccccatcttaccttctgatccttaccaaagagccttggctcgtttctggtccaaattcattgatgataagattgtgggtgctgtatcgaaatctgttttcacggttgatgagaaagagcgtgagaagaatgttgaagaaacatatgaggctcttcagtttcttgagaatgagctgaaggacaagaagttttttggaggagaggaatttgggttggta

SEQ ID NO: 183170 - DNA, 256 bp, Glycine max
cccaaacaaaaacaacacatcacggagcccccaaccatggcttccaagctctgcgactcatgcaaatccgccactgctaccttgtactgccgccctcacgccgcgttcctctgcggcgcctgcgattctaaggtccacgccgccaacaagctcgcgtcgcgccatccgcgcgtggcgctctgccaagtgtgcgagcaggccccggcgcacgtaacctgcacagctgatgccgccgcgctctgccttgcctgcgacc

SEQ ID NO: 183171 - DNA, 256 bp, Glycine max
ttcccctgttgatgagactgttttcgatgtggataacgatgttgatgaccttctgccagttgaagttaaagaacagcgcctcagcaatctgctgcaggcattgatggttgccgcttgtgttgctgctatgcctcttttgaagaagataccaacttcagtgctttggggttactttgcttttatggcaattgacagcttgcccggaaatcagttttgcgagagactattatatcttttcactgctccaagtcgaaga

SEQ ID NO: 183172 - DNA, 231 bp, Glycine max
tcgagccgctcgagccgatctttctctcttctctctccccgcccaaaccctaactccctaacctattccaccttctctcatccaacacgaaaggaggaaagtccacgaccgaatctaagagagccgatgccaaacttgctgtgaatcagaagggcgccgccaccaagactaggaaacccgccggacaggggaaagcagcgaaagatcctaacaagccaaagaggcctccaa

SEQ ID NO: 183173 - DNA, 259 bp, Glycine max
atttttggcagaaaatttgggcaacaagagtgatttgcttctcaaatacaaccctgttcacaagaaggttccagtgtttgttcacaatgagcagcccatagcagagtctcttgtgattgttgaatacattgatgagacatggaagaacaaccccatcttaccttctgatccttaccaaagagccttggctcgtttctggtccaaattcattgatgataagattgtgggtgctgtatcgaaatctgttttcacggtggat

SEQ ID NO: 183174 - DNA, 264 bp, Glycine max
cgggcgtggagagcgatgaggacatagaagatgttacggaggagcaagagaaggtagaagaagaagaagaagatgatgaaataattgaatctgatgttgagctcgagggtgaaacctgtcagtctgatgatgatcctccacagaagatgggagacccctctgtcgaggtcactgaagagaatcgcgacgcttcgcagatggccaaaattaaagccatggatgctatttctgaaggtaagttggaggaggcgattgagaacttaa

SEQ ID NO: 183175 - DNA, 254 bp, Glycine max
gcaagcattactactcttatatgggcaacaagtttgatattgaataatcctagtgtactagaaaaacttaaagcagaactagacatccaagttggaaaagagagatacatatgtgagtctgatttaagtaagttaacatatcttcaagctgtagtcaaagaaactttaagattgtaccctccagctcctctctcaagacctcgtgagtttgaagaggattgcactataggtggctacactgtcaaaaagggaac

SEQ ID NO: 183176 - DNA, 251 bp, Glycine max
cttggaattgcgccccatgctgacaattctgggatcactcttctgcttgactgtgctgattttccagggttgcagttcctcaaagataaaaaatgggtcaatgttgaacctatagaaggggcaattgttgtaaacattggccaaattattgaggtgatgagcaatgggatatacaaagcgccagagcatagagctgtagtaaataagttaaaggagaggttttcaatagtgacattctgctatccaagccc

SEQ ID NO: 183177 - DNA, 255 bp, Glycine max
acaaagcattgaattcaaaaactaagttcatttcttgtgctttgctttattcctcaaaaccaaacatgtcgaacacatgcggcaactgtgactgcgctgacaagactaactgcaccaagggaaacagctatggtgttatagtagagactgagaagagctacatcgagactgttgacatggatgttccagcagctgagcatgatgggaagtgcaagtgtggcactaactgcacttgcacggactgcacttgtggcc

SEQ ID NO: 183178 - DNA, 261 bp, Glycine max
gtggacttcagggagtaacagatgcagggtttcttccactgctggagagctctgaggctggtctggttaaagttaatctaagtggttgtgtaaatctgacggacagagtagttttatccatggtgaactcacatggatggactctcgaggtgctaagccttgatggttgtaaaagagtcagtgatgctagcttgatggctattgcaggtagttgcccagtgctcgatgatctcgatgtatccaggtgtgcaatcactgata

SEQ ID NO: 183179 - DNA, 260 bp, Glycine max
ttcaggcttagatcgcttaccacaccataccatatggctgttactgtggccatgttacctcgttggtcggtgtttcttctttttctgtttgtcttgtgtagctcaggagcaaaggttgtcgccattgatgtacatgcagcaaagcgtctcatccagaccggttccatttatcttgatgttaggacggtggaagagttcaagaaagggcatgtggatgcagttaatgtccttaacattccatacatgttgaatacacccaa

SEQ ID NO: 183180 - DNA, 259 bp, Glycine max
tctctttctcttccttctcatcattctcatattattgtcgccacttcgacctcaatcaccctcgcgccctcgctcttcccttcctggtggcgacaatgtcgactcctgctaggaagaggctgatgagagacttcaagaggctgcaacaagacccgcctgcagggatcagcggtgccccccaggataacaacataatgctgtggaatgctgtcatatttggtcctgatgatactccatgggatggaggcacgttcaagtt

SEQ ID NO: 183181 - DNA, 255 bp, Glycine max
ttttgaggttccaatacaaatggacatatctgctcaaaaaatgatatttggtgtgcctgggattgatcctcaaagaagagccgagctaatcaaggtattagatatcgatctttcctggagattgcataaagtatctgatggtcaaagaagaagggtgcagatttgtatgggtctcctcaaaccattcaaggttcttcttctcgatgagacaacagttgaccttgatgttctagcaagagctgaccttctgagatt

SEQ ID NO: 183182 - DNA, 254 bp, Glycine max
actcgagccgattcggctcgagtatacttgttccttttgaaggttagcagtgctacaatacaaacaatggcagctactcaggacgatgtgaagcttttgggtattgtgggaagcccatttgtgtgcagggtccagattgcccttaagttgaagggagttgaatacaaatttttggaagaaaatttgggcaacaagagtgatttgcttctcaaatacaaccctgttcacaagaaggttccagtgtttgttcacaa

SEQ ID NO: 183183 - DNA, 254 bp, Glycine max
cttgcaactgcttggcatgccatcttgaccgggaccatcttcactgtttattacaaacctaggaccagtcccgccgaatttattgttccgtatgatcaatatatggagtctttaaaaaatagttatagcatcgggatgcggttcaaaatgaggtttgaaggtgaagaggctccagagcagaggtttactggtaccgttgttggaatagaagatttcgatcccaaaaggtggagagattccaaatggagatgcct

SEQ ID NO: 183184 - DNA, 255 bp, Glycine max
gtttgttccatctcttgcttcttgcttctattacttgcttctttcttcaccatgtcacttgctgggaaaatcaccactgaaattggggttcatgcaaccgctgcaaagtggttcaacctctttgcaacacaacttcatcatgttcaaaaccttactgatagagtacatggaaccaagctgcatcaaggtgaagactggcatcacaacgagacagtcaaacactggacttataccatagatggtaaggctacaaca

SEQ ID NO: 183185 - DNA, 260 bp, Glycine max
gcaagccccactcaagcaccacacctctcctcgttcacgctacccctttctgctcttcttctacctttcaagttttaaaagtataaagatggcagagacattcctatttacctcagagtcggtgaacgagggacaccctgacaagctctgcgaccaaatctccgatgctgtcctcgaaaaccaactcgagcaggacccagacagcaaagttgcctgcgagacatgcaccaaaaccaacttggtcatggtcttcggagaaa

SEQ ID NO: 183186 - DNA, 258 bp, Glycine max
gtggtgctggtccagatagctaatcctgcgagggggcgagggaaagatgtgaaagaagtgcaagccgagacgaaggccacggtgaaacgaattaatgaaacatttgggaaacccgggtatgatcccgtcattctgatcgaggagcctctcaagttttatgagagagttgcttactatgttgtcgcggagtgttgtttagtcactgcagtaagggatggaatgaatctcataccgtatgaatatatcatcagtcgtcaa

SEQ ID NO: 183187 - DNA, 266 bp, Glycine max
cacaaaccctcccctcacactctccaaaccctagcggcactacacacgttatctctctctctctctctctctctccctctctccttccccaagatgtcgagcgccgatcccgagcaccgagaagaggaggaggcacccgccgtcggcgacgacgaggacaccggagcacacgtcgctcccatcgtcaagctcgaggaggttgctgtcaccaacggcgaggaggacgaagatgcaatcctagatctcaaatcgaagctttaccggtt

SEQ ID NO: 183188 - DNA, 231 bp, Glycine max
aattaagttagtagcgagagcgggagaaatgaaggttgtttacttcttcgttgtgctattggctttggcatcctccattgcctttgcttatgatccaagccccctgcacgacttttgtgtggctatcaatgataccaaaactggtgtgttcgtgaatggaaaattttgcaaggatccaaagcttgctaaggctgaagatttcttctttcctggattgggacccggcaacac

SEQ ID NO: 183189 - DNA, 230 bp, Glycine max
ggaaaaaatggtgtcgctgaaactgcagaagcggctggccgcaagcgtgctcaagtgtggcagaggaaaggtgtggcttgaccccaatgaagtcaacgaaatctccatggccaattctcggcaaaacatcaggaagttggttaaggatgggtttatcatcaggaagccaaccaagattcactcacgctcgcgtgctcgtaggatgaaggaggcaaagaagaagggccggc

SEQ ID NO: 183190 - DNA, 231 bp, Glycine max
gttccttttgaaggttagaagtgctacaatacaaacaatggcagctactcaggaagatgtgaagcttttgggtattgtgggaagcccatttgtgtgcagggtccagattgcccttaagttgaagggagttgaatacaaatttttggaagaaaatttgggcaacaagagtgatttgcttctcaaatacaaccctgttcacaagaaggttccagtgtttgttcacaatgagca

SEQ ID NO: 183191 - DNA, 231 bp, Glycine max
cgagagggtggaacgacatgaggtgctcggcaagtggaggtcaagatttgcaatggccggtttcactccttaccctttaagttcattggtgaatggtaccatcaagaagttgctcgagcactacagtgatagatatagacttcacgagagagatggagctctttatctgggttggatgactagcgatttggttgcttcttgcgcttggaaatgaaagttctgcaataaggc

SEQ ID NO: 183192 - DNA, 232 bp, Glycine max
cgagagggtggaacgacatgaggtgctcggcaagtggaggtcaagatttgcaatggccggtttcactccttaccctttaagttcattggtgaatggtaccatcaagaagttgctcgagaactacagtgatagatatagacttcaagagagcgatggagctctttatctgggtacgatgaatagagatttggttgcttcttgcgcttggaaatgaaagttctgcaataaggca

SEQ ID NO: 183193 - DNA, 237 bp, Glycine max
gtggttttaacggcgaaggacgttgccgttgagggcttctgcatgagccgctgtggcacccacggctctacccggaacgttaaaagtaatgcccgaaccgcatatatctgggttggaaactccgaaacacagtgccccgggcaatgcgcgtggccattccaccaaccgatttacgggccccagacgccgccgttagtttctcctaacggcgacgccggggttgacggaatggttatt

SEQ ID NO: 183194 - DNA, 236 bp, Glycine max
gcagaagtgaagctgttgagcttttttgcgagtccctttggcaaaagggttgaatgggcattgaaactgaagggtgtggagtatgagtacatagaacaagatatcttcaacaagactagtctccttctccagttgaacccggttcacaagaaggttccggttcttgttcatgcccacaaacccatcgctgagtcattcgtcatcgttgaatacgttgatgaaacatggaagcagta

SEQ ID NO: 183195 - DNA, 230 bp, Glycine max
gggagtcagagaaaccctaggtaagaagaaaagatgccggctggtcatggtttgagatcccgcaccagagattccttctctcgtcctttcaggaagaagggaaccatcgccctcaccacatacctgagaacctaccacgtcggcgactatgttgacgtcaaggttaacggtgccgttcacaagggaatgccccacaaattctaccatggccgcaccggacgcgtctggaa

SEQ ID NO: 183196 - DNA, 229 bp, Glycine max
gtgatttggagtttggagcgactgaactaatcattaatttgcactcgctgtttcagcttcatcacccttcttttgcatcatttatatctcttgagaaatggcacaagaaacctttctattcacatctgaatctgtaaacgagggtcaccccgacatgctgttcgaccagatctctgatgcagtacttgatgcgtgccttgaacaggaccctgacagcaaggttgcctgt

SEQ ID NO: 183197 - DNA, 231 bp, Glycine max
taatcactataaaaaaaaatctacactatctatccttccacaacacaacacaatccacataccacttaccaaactcactcatcaattctcatctttcttctcactaactattaattcatcatgtcgagcacagctggccaagtcatcaaatgcaaagctgcggtttcatgggaggcagggaagccacttgtgattgaagaagtagaggttgcgccaccacaagctggtgaa

SEQ ID NO: 183198 - DNA, 228 bp, Glycine max
ttcacagagagaatggctgcggaaaacgttgttgagttcacagacttacccgtcaagcggccaagagaagaagaagaaggaaccactggcgtctccaacgacgccgtttcagcgctccccaatgaccctcaataccctggcatctctgcggttattcccggttggttctccgaactcagcccaatgtggcccggggaggcacattccttgaagatggaaaagattttg

SEQ ID NO: 183199 - DNA, 233 bp, Glycine max
ctcaccgatgaagaggtcgatgagatgattcgtgaggctgatgttgatggagatggccaaataaactacgaggagttcgttaaggtgatgatggccaagtgagtgatcatcacattatggccacaagaacctaaatgaagaagtgttgattaaaaggaaatgaccaaaaacacagaggtaaggggaaggacaagggtttgggctgtataacagtgatgtagtagtccttgtcc

SEQ ID NO: 183200 - DNA, 231 bp, Glycine max
ataaacgccgcccaaaaccatttatagggtgttcttttctttgccaagaaaatgagagcgtgcatttcaatccacattggtcaggccggtatccaggtcggaaacacctgctgggaactctattaccttgaacacggcattcagcccgatgggcagatgccgagtgacaagaccgttggaggaggagacgacgccttcaacacattcttcagcgagaccggcgccggaaag

SEQ ID NO: 183201 - DNA, 240 bp, Glycine max
gcgaaatcatttaagataagagtgcattactactaagaggagaaaaaatgaaagttgtatacttccttgttgctatcttggctttgacatccactgtggtctctgcctatgaccctagtcctctgcaagatttttgtgtggcggccaaagacaaagatggtgtatttgtgaatggaaaattctgcaaagatcccaagcttgtgacagctgaagatttcttcaaacatgtggaacctgcga

SEQ ID NO: 183202 - DNA, 231 bp, Glycine max
tttttgccctaaaaccctcgctgccgtcgtggtggccgcccaagaaaagagaatagagagcgcaaacgactcttcatcttcgactcaccatgaagctcgtcaggtttttaatgaagttgaacaatgaaaccgtgtcaattgagctcaagaatggcactattgttcatggcaccattacaggtgttgatatcagtatgaacacacatttgaaaacagttaaactaactctga

SEQ ID NO: 183203 - DNA, 229 bp, Glycine max
ccagtgtataaacctccagttgacaaaccaccggtttacaagcctccagtttataaaccacctgtttacaagcctccagtgtataaacccccaattgacaaaccacccgtttataagccaccagtttacaagccaccagtgtacaagcctccagtgtataagccaccagtgtacaagccaccagtgtacaagccaccagttgagaagccaccagtatacaaagcacccg

SEQ ID NO: 183204 - DNA, 228 bp, Glycine max
cagcatttggaggcatctgtatcggtgctctgacagtgttggcagacttcatgggggccatcggttcaggaaccggaatattgcttgcagtaacaatcatctatcagtactttgagacatttgagaaggagagagctagtgagcttggcttcttcggtttctaagttctgccaagcaaataatgttggttggtgactccaacgagctctcccacaccccttgtttgag

SEQ ID NO: 183205 - DNA, 233 bp, Glycine max
gtgatttggagtttggagcgactgaactaatcattaatttgcactcgctgtttcagcttcatcacccttcttttgcatcatttatatctcttgagaaatggcacaagaaacctttctattcacatctgaatctgtaaacgagggtcaccccgacaagctgtgcgaccagatctctgatgcagtacttgatgcgtgccttgaacaggaccctgacagccaggttgcctgtgaga

SEQ ID NO: 183206 - DNA, 237 bp, Glycine max
ggatagaaaaccctaaaggattcaagcttgactttttctttgataccaacccttattttaccaattctgtcttgacaaaaacatatcatatgattgatgaggatgaaccaatattggagaaagcaattgggactgaaattcaatggcacccaggaaaatgtctgacacagaagattcttaagaaaaaacctaagaagggttcgaagaatgctaaaccaattaccaaaactgaaaatt

SEQ ID NO: 183207 - DNA, 229 bp, Glycine max
aaagaatcaaagacaggggtggtggctgcttcgaaagcttaataatttgttgatttccagaacatcatagttttcgcagcagcaaactaacaaattactcatatcatataataagatggcccgttctctctcgcaagccaaacgtattggtgtccttgttgctcaatctatctccctaattcccgttcatcggcgatgttacgcagtggcatccgatgtatcggtaaga

SEQ ID NO: 183208 - DNA, 224 bp, Glycine max
caaatattcagtgaagatcaacctcaatggcatctcttggcgtgcgaccagttcttccccctccattaacttccatctccgacccacctcctcttttcgatggcaccaccaggctgtacatcagttattcttgcccctatgcacaacgtgtgtggatcgctaggcactacacggggctacaagataatatcaatttggtccctattacccttcacgacaggcca

SEQ ID NO: 183209 - DNA, 224 bp, Glycine max
tcgagctttctctctctcattctcttctccatcgcgcgtaagaaacacattttagttgctactaatgggaactgttgaagctgcaaacaaggatgcaaatggaagtctcctagagaaaaatccttcagttgtttttgtgttaggtggcccaggaagtggaaagggtacccaatgtgcaaatattgtccaaaattttgggtatactcatctcagcgctggtgatc

SEQ ID NO: 183210 - DNA, 229 bp, Glycine max
gtgagaagtgagaagagaaaaatggcaatctccatacccagtagacaacttttcatagatggagagtggaaagtccctcttctcaataatcggtttccgatcatcaaccccgctactgaagacatcatagggcatatcccagccgctactaaggcagatgttgaccttgcggtggatgctgctaaaagagccttttcccataacaaaggcaaagattggtcttcagctc

SEQ ID NO: 183211 - DNA, 227 bp, Glycine max
gctagctattagttcgattttgtagtaagtgaggtgccaatatggtgaagatagctcttggtactttggatgactcttttagcgctgcctctcttaaggcttatttcgcagagttccacgcaactctgattttcgtgttcgctggtgttggatcagccatcgcttacaacgagcttacaaaagatgcagccttggatccaacggggctggtggcagtagctgtggca

SEQ ID NO: 183212 - DNA, 232 bp, Glycine max
caagaatccctccctttctggctttctctctctaaaactatcatgtcctccaccgcggctcccgtccttcccatatccaacccccaaaccaccgccgcacgcgaggcgccatcgaggctccggcgaacaacccggccttccgcgccttgctcaacaacctctccgcgtccctccgacacggcctcgaccagcgccgcccgtggtcggagctcggggaccgctccgcgttctc

SEQ ID NO: 183213 - DNA, 222 bp, Glycine max
ttcttctcttgcggctagggttttagcgcacttcttctagatttaaggaagatgggtaaggcaaaggttcacatcagtattgtggtcattggccatgtcgactctgggaaatccactaccactggtcacctgatttacaagcttggaggcattgacaagcgtgttattgagaggtttgagaaggaagctgctgagatgaacaagaggtctttcaagtatgcc

SEQ ID NO: 183214 - DNA, 228 bp, Glycine max
ggactttaggttgggatttgggaattagggttattcgcgtggcgaagatgattgaggtgctcttgaacgatcgattggggaagaaggtgcgcgtgaagtgcaacgaccgatgataccatcggcgacctgaagaagcttgtggcggctcagactggcacaagagccgacaagatccgcatccagaagtggtacaccatctacaaggatcacatcactctcaaggattac

SEQ ID NO: 183215 - DNA, 239 bp, Glycine max
ctcgaggagaagtgcagctgttgagcttctttgcgagtccccttggcaaaagggttgaatcggcattgaaactgaagggtgtggagtatgagtatatatgacaagatatcttcaacaagactagtctcctcctccagttgagcccggttcacaagacggttccggttctagttcatgcccacaaacccatcgctgaatcattcgtcatcgttggatacgtcgatgaaacatggcagcag

SEQ ID NO: 183216 - DNA, 224 bp, Glycine max
cctcctttgactttgtggctggtgctgccttttctcgtgttgctagcggcggcaacaacgtctccaatacgcgccacgacggtcgcctcgtcgttccacggtcaacgagagtttgactatttcgctttcgcgttgcaatggcccggtacttactgcaaacgcacccgcagtttctgccccatcatcggttgctgcagaggctccaattttccaacagtgttcac

SEQ ID NO: 183217 - DNA, 223 bp, Glycine max
acagaaccgagcttgcagcagcgatttctcatttcatttttcacacttgcacaatggcgaaaaccttcaaatacatcatcctcggtggaggagtttccgctggttatgcggcgagggagtttgccaaacagggcgttaagccatgggagttggctatcatttcgaaagaagcggtagcaccttatgaacgtcctgctctgagcaaggcttacctttttccaga

SEQ ID NO: 183218 - DNA, 225 bp, Glycine max
gtgccgccattttgggcagagacccagcagggtatatttgatgcagtattgaagggacttatagattttgactcagatccttggcctctaatatctgacagtgcaaaagatctgattagaaagatgctgtgttctcggccttcagaacggttgactgctcatcaagtgttatgtcatccttggatatgtgaaaatggagttgcccctgacaggtcactggaccct

SEQ ID NO: 183219 - DNA, 223 bp, Glycine max
cggctcgagtgataatcaaacaagcgttttgatcaaagttttcgaaggggagcgagcgaagacagaggataacttccttcttgggaagtttgagctttctggtttcactccatcgccaaggggagttccacagatcaatgttgggtttgatgttgatgttgatggcattgtggaagtcactgctagagataggagcacggggctgaagaagaagatcacgatc

SEQ ID NO: 183220 - DNA, 228 bp, Glycine max
actcgagccgaatcggctcgagatcgagaagttgattactctgacaactcagttacagaaaataactcgtgcagcttatcctatacagtacattccaaatgcaaagttaccttgtgttggccctcacccaaagaatgtcatacttttggcatgtgacgcatttggtgtactcccacccgttagcaagctaaacctggcacagaccatgtaccatttcatcagtggata

SEQ ID NO: 183221 - DNA, 228 bp, Glycine max
cactaacaataatgaagccaccaagactgctgcagagaagaaattcaaaacactgccaccatcagagtctctgcctaagaatgaaaccattggaggctacatctttgtttgcaacaacgataccatggcagagaatctccaaagacagctctttggtctgcctccacggtacagagattcagttagaacaataactccagggttgcccctttttctgtacaactactc

SEQ ID NO: 183222 - DNA, 233 bp, Glycine max
gggtggtgtgtgtttatggagttccattgctagtggtcaatggatttttggtgttgattacattcttgcagcatactcaccctgcattgccacattacacttcctctgagtgggactggttgagaggagctttagcaacagtggatagagattatggaatcctgaacaaggtcttccataatattacagacactcatgtagcacatcacttgttctccacaatgccacattat

SEQ ID NO: 183223 - DNA, 172 bp, Glycine max
gctccacgatgcgaaatatatggatccattggaaatccaagtctcctggctattcgacccgtttgacgaagcgagagcattggatgccgccggagcaaaggagtatgtgcatattcgaattcagcagacgactcggaagaagagtctgaccacagtgcaagggctgaagaag

SEQ ID NO: 183224 - DNA, 225 bp, Glycine max
ctcttcctctcccagacaaacacatggctttgcccaatcagcaaaccgtcgattaccccagcttcaagctcgtcatcgtcggtgacggtggcacaggaaagacaaccttcgtgaaaaggcatctcactggtgaattcgagaagaaatatgaaccgaccattggtgtggaggttcatccgttggattttttcactaactgcggaaagattcgattctattgttggg

SEQ ID NO: 183225 - DNA, 223 bp, Glycine max
ttcacaagcaccttcaaggggaagttgcagaatcaccatgacgaggaaactatattcggcacgttttcgttgattttttggacccttactttgattccgttgcttaagtatgtattcatcctattgagtgctgatgacaacggggaaggtggaacattcgctctttattcgctgctctgtaggcatgccaagtttaatttgctccccaatcaacaagcagctg

SEQ ID NO: 183226 - DNA, 228 bp, Glycine max
aagcaagtgcttctaaatgactatgttaccggttttcccatagaatccgacatagtatattgtcgtaagtaccataacattgaagcttccacaaagttccaatgatatcttgctcaaaaatttgtacttatcttatgatccgtatatagagaatctcatgaacaagcccgaaggccctcccaatagtcgtgcttacactcctggctctccattaataggatatggtgt

SEQ ID NO: 183227 - DNA, 232 bp, Glycine max
cgctcttgcaattattcctcttctcgcaatccgcactaaaattctagggttccgaaatggacgctgacggaaagatcaagaagggcgccggcggaagatagggcggcggcccaaagatgaagccggtttcaaggtccgtcaaagccggtctccaattccccgtcggaagaattggccgttatctgaagaaaggaaggtacgctcagcgtgtcggtaccggtgctcccgtata

SEQ ID NO: 183228 - DNA, 274 bp, Glycine max
caagcttggggtttgactcgaatcgaatcgaagcgattcatcgatcgatcgatggctcttgtaggagttgaactgaagcatgcggcggagggcgtaccggaggcgaattgccccgccaagcccaccaagcagggcgagggcctccgccactactattctctcaacatccacgagcatcagctccttcttcgccaaaagactcataacctcaaccgtctcgaggctcagagaaacgacctcaattctagggtgaggatgctgcgcgaagaattac

SEQ ID NO: 183229 - DNA, 275 bp, Glycine max
ctcagaacctggtggagaagattctccgatcgaagatctaccagaacacgtactggaaggagcaatgtttcgggttaacggcggagacgttggtggacaaggccatggagctcgaccacctcggcggcacctacggcggcaaccgcaaacccacgccgttcatgtgcctcgtcatgaagatgctccagattcagcccgagaaagaaatcatcatcgagttcatcaagaacgaggattacaagtacgttaggattctcggtgctttttacttgcgt

SEQ ID NO: 183230 - DNA, 271 bp, Glycine max
cggctcgagggatgatgctagcagagcactggaagctacaaatatgagcaagttactggatcgacttatttctgttgaatttgctgttaaagatgatgatgataggagaaatggatatagccctgagagaggccgtgatcgtcaccgtgatagaagccgtgatggaatgcgatctcctagtccttatcgtagagaaaggggtagtcctgattatggccgtgggcccagtccatatcagagagagaggggcagccctgactatggccgtgac

SEQ ID NO: 183231 - DNA, 271 bp, Glycine max
ccttaattcaacaatggcagataactcaattagcttattttctccatacaacaagatggcccacttcaacctctctcatagggtggtattggctcccatgaccagatgcagagcgctcaatgggactccactggcagcacatgctgaatactacgctcagagatcaacaccgggtggatttctcatcactgaaggcaccttgatctctccaacttcttctgggtttcctcatgttcctggaatatactcagatgaacaggtagaggcatgg

SEQ ID NO: 183232 - DNA, 267 bp, Glycine max
tcgagctgacatgaacctcatcactgatgatgatttcagggaatttgttgatggggtgcacagaggttgcacgatcacaattgtgtctgattctcgccacagtggtggcctacttgaagaagctaaggagcagataggagagagcacaaagggagaggaggaacaatctggctctggctttggattttcaagttttctacaccggaccgtggaagatgccatcgagtctcgcggattccatatcccttcagcattgcgccacaacag

SEQ ID NO: 183233 - DNA, 272 bp, Glycine max
ctttgctcaacaaactgctgagaacattgctgcgctcctcgctcaccagtctggtttctactatgatatttgggtggatggggaaaagattttgacatcagaaccacctgaagtagttcaggcacgaaatgacaattctcatggtacaaacttcccggattcccccgagcccatctatggaactcagttcttgccaaggaaattcaaaattgctgttactgtgccaactgataactccgtggacattctcacaaatgatattggtgttgttg

SEQ ID NO: 183234 - DNA, 269 bp, Glycine max
gttctcaggaaactgaaccattgggaacagcaggtcctctggctcttgccagggataagctgatagatgactctggagaaccctttttttgttctcaacagtgatgttatcagtgagtatccactcaaagaaatgattgaattccatacaaaccatggaggagaggcttccataatggtaaccaaggttgacgagccatcaaagtacggcgtggttgtgatggaagagagcacagggcaggttgataaatttgttgaaaaaccgaaatt

SEQ ID NO: 183235 - DNA, 269 bp, Glycine max
cctcgagccgaatcggctcgagttttggagttggtaactgggaagacccctcttgacccagactatggagaaaatgatctaaccaaatgggttcagtccacattagatcagaaaggactggatgaggtgattgatcccactttggatattcaatttagggaagaaatcagtaaggtactcagcgtggggcttcattgcactaactctcttcctataacccgcccttcaatgcgtggtgtggttaaaaagctgaaggaagtaactgacct

SEQ ID NO: 183236 - DNA, 269 bp, Glycine max
atttcacccaaatataaatagcaatggaagcatttgccttgacatattgaaggagcagtggagccctgcgctaactatttcaaaggtgttgctctcgatttgttccctgttgacggaccctaatcctgatgatcctttggtccccgaaatagcccacatctacaagacagacagaaacaagtacgagtcaactgccagaagctggacccagaaatatgccatgggttaagtgacctgtggtatgtgtgaggaagagcctttctactccc

SEQ ID NO: 183237 - DNA, 267 bp, Glycine max
cttctttttactctctctctgtctctctctacgctttctcgttcgagatccctcaagggatccactaactgaaggagaaatggggttgacattcaccaagcttttcagccggcttttcgccaagcaggaaatgcgaattctgatggtgggtctcgatgcagctggtaagaccaccatcctgtacaagctcaaacttggagagatcgttaccacaattcccaccattgggttcaatgtggagactgtggaatacaagaacattagttt

SEQ ID NO: 183238 - DNA, 268 bp, Glycine max
cggaaccatttatattggcggctcataggcaattaagtgctatgcatccaattttcaagttgttggacccccacatgaggtacaccttggagatcaataccttggctagacagagtttgatccatgctgatggaatcattgaaaattgcttcactcctggtcgctatgccatggagattagttctgctgcttacaagaacttgtggcgctttgacatggatagcctccctgcagatcttatccgcaggggaatggcagtagctgaccc

SEQ ID NO: 183239 - DNA, 267 bp, Glycine max
cctttctaccccatgatgtccacaagacgtcttattatggcttttgcaaacagcagctttggcctctctttcattacatgctacctatgttccctgatcatggtgatcggtttgaccgctcgttgtggcaggcttatgtttctgcaaacaaaatatttgcggacaaggttatggaaataatcaatcctgatgacgattttgtttgggttcaagactatcacttgatgggtcttgccgacatttctgaggaagcggtataaatcgggt

SEQ ID NO: 183240 - DNA, 269 bp, Glycine max
ccagcatatgcaatgatcacagatgctgaggaaaagaatctgataactcctggacagacaactttgatagagcctacatcaggcaatatgggtatcagcatggcatttatggccgccatgacgggatataagatggttttgaccatgccctcttacacaagcttggaaagaagggtgaccatgagagcgtttggagctgaattaatcctcactgatccagccaaaggaatgggaggaacagtaaagaaggcttatgaacttttggaaaa

SEQ ID NO: 183241 - DNA, 271 bp, Glycine max
cggctatccaacaatctctgttagacaggcctagaaaatctgtttccaaaactatctgcttaatcttttctatagctgctgtcatgatctcatcagcctttgttggttcttatctcatcaaatccacctccttcttcaaccaatcctctcctcaacatctctgtgatcatgcacttgatagggcaacatgtttaacccatgtctcagaagtggtacaaggtccgatcttgacccccacaaaagaccacaaattcaatttgttacagtcatt

SEQ ID NO: 183242 - DNA, 268 bp, Glycine max
ctcgagccgcgggtaacaaggacatcatcatggttgaccacatgaagaaaatgaagaacaacgccattgtttgcaacattggtcactttgacaatgagatcgacatgctggggctggagaactaccccggcgtgaagcgcatcaccatcaagccccaaaccgacagatgggtcttccccgagaccaatgtcggcatcattgtcttggccgagggtcgtttgatgaacttgggatgcgccacaggacaccctagttttgtgatgtcctg

SEQ ID NO: 183243 - DNA, 268 bp, Glycine max
cgtgaaagacgaatcaccattgatattgctttgtggaagtttgacacaacaaagtattattgcacagttactgatgcgcctggacatagggatttcattaagaatatgattactgggacatcccaagctgactgtgctgttcttatcattgattcgaccactggtggttttgaagctggtatttccaaggatggacagactcgtgaacatgctctgctttcattcacccttggtgtgaaacagatgatttgctgctgtaacacaatgg

SEQ ID NO: 183244 - DNA, 259 bp, Glycine max
tgagcagttggctcggaagtttgaggaagaaacgggacttgagggagttattgtgtgcactcgaagtcctttgaatggaaaactctaccctcttcgcttgcagcttcctccaaacaatgtcaccatgcaggttgttttggttcttccctcgtctaaagtggcaagagaatttgaggagcaaggtatactatgacaagttagattattgtgggagtcttgaattgaatctactgaaatgcaacttgtgattcaagcgtgt

SEQ ID NO: 183245 - DNA, 241 bp, Glycine max
ctctttttctctaagtctaaggggtgccctgagatcactttgagcaatggtgaaggctgtggcagttcttggcagcagcgatggtgtcactggaactattttcttcactcaggagtgaaatggtccaaccaccgtaactggatctcttgctggtcttaaggctggtctccatggcttccatgtccatgccttgggggacactaccaatggtggcctgtcaactggagcgcatttcaatcct

SEQ ID NO: 183246 - DNA, 269 bp, Glycine max
ctcgagccgattctcataagataactaactcactttgtgtgatagcgttctcattctcatggctattaccggcgatattttccggcagagcataacggaaatgcttgcggagtccccttccggtgcgccagaacttcacgttctcgccgtcgatgacagcctcgttgatcgcaaggtgatcgaacggttgctgaagatttcttcctgcaaagtgacggttgtggagagtggaacgcgcgctcttcagtatcttgggttggagggagaga

SEQ ID NO: 183247 - DNA, 267 bp, Glycine max
cagatggtgaggacccatttggtgattcaaggcgaattgcctgcaaaaggtgtggtggctttcatgtctggatacacaccaagaaacaaaagtctcgggcaagatggtgccaggattgccaagattttcatcaagctaaggatggtgatggatgggttgaacaatcttcccaaccatttctttttggcttattgcagaaggttgatgctccttcagcatatgtgtgtgctggtagcaggatatatgatgccaccgaatggtatatct

SEQ ID NO: 183248 - DNA, 256 bp, Glycine max
cagatgggcaaattcaatctgtcccatagagttgttttggcaccgctgaccagacagacgtcttacgacaacgtcccacaaccccatgccatcctctactactcccagagaacttccaacggaggccttctcattactgaagccactggcgtctctgacacggctcaaggctatccgcaaacccctggcatatggactaaagaccatgttcaagcttggaaacccattgtcgatgccgtccacgccaaaggggtgt

SEQ ID NO: 183249 - DNA, 267 bp, Glycine max
cgttggagctatagctgctgggaatgctgtggttctaaaaccatcagaaattgctcctgcctcatcatcattattattaaaattgatagagaagtattgtgataactcatttataagagttgtggagggggcagttgatgaaacaaccgcactattgcagcaaaagtgggacaagattttctacacaggcaatggaaaagtgggaagaatagtgatgactgctgctgcaaaacaccttacaccagttgtgctggagcttggaggaaa

SEQ ID NO: 183250 - DNA, 265 bp, Glycine max
ggccagttggggtccttatgtgatactttaggtaataatgagcattatagaatttttatggaaatgcattttaaggaaacaagttgagaaaggcttggctgttatacttggtatcatgtctgtagcaattcttttagctgaggcaactcttctgcctagcattgatctatcgcttttttccattcttataaaatcggttggaacacaggaggtccttgtgcaggtgtttgcttttgttcctctcatgtacatgtgcatctgcaca

SEQ ID NO: 183251 - DNA, 268 bp, Glycine max
atgtcctgtctggtggtcatggactcatggtgcaaggatatgatccagttataaaagttcttgcaaaagatattgacatacgcttgaaccacagggtgaaaaagatatctagtggttacaacaaggtaatggtgacggtcgaggatggcaggaactttgttgctgatgctgctatcataactgttcctattggaatcctaaaagcgaatttgattgaatttgaaccaaaacttcctgattggaaggtttcagcaatttcagatcttgg

SEQ ID NO: 183252 - DNA, 268 bp, Glycine max
caatgatcacattcaaacccacaccaacaacagcaccagcaacatggttcgaaacccgaagaaacggtcaagagcttctaggcgtgcacctaccactgtgctaaccacagacaccaccaatttccgagccatggttcaggaatttactggcatcccagcacaacccctcacatcctcgtctttcccgagaaccaggttggatctctttgcttccgccgcaacaccaactttgatgagatccaacgttaacgttaaccctttggaccct

SEQ ID NO: 183253 - DNA, 269 bp, Glycine max
caacaattgggcctgatgtcgagtccaaacagataggtaaggcccaagggttttacctatccgcaacccaaaggcccggtttggagttggagatagtcatggggatggccttgaccttcttagaaggcgaatttaacggtagcagtttaaacgtgttggggagaaacaaaatcttcaatgaggtgagggagttgcctattattggtggcacgggtgagtttcgcttcgcacgtggctatatcctagctaggagtgtcaaggtcgattac

SEQ ID NO: 183254 - DNA, 269 bp, Glycine max
cattgtttaaacctaattctcatttcttcatcgttcgattcttctcctcctaaagatgcagatcttcgtgaaaactttgaccggtaagaccatcacccttgaggtggagtcctccgacaccatcgataacgtgaaagctaagattcaagacaaggaagggatcccacctgaccagcagagacttatctttgcgggtaaacagcttgaggatggtcgaacccttgccgactacaacatccaaaaggaatccactctccacctcgtgcttc

SEQ ID NO: 183255 - DNA, 266 bp, Glycine max
ccaacggcatcctcgtctcatacgcctacaccggcggcctgcggttgccgcccaacgtctccgactcggctaagcagccgtaccggttcgagtcgacggtgacggttctcaacaacggcctcgacgagctcaagtcgtggaaggtcttcgttgggttcgaccacgacgagttgttggtctccgcctccaatgctgtgctcgccgacggcaccaccctccccgccgccgtcggaaacggcaccgtcttcgccggtttccccatgact

SEQ ID NO: 183256 - DNA, 264 bp, Glycine max
gttccgagaacaacaagcgccttatccatttctccacttgcgaagtgtacgggaaaacgattggagcctttctccctaaagatagtcctcttcgcaaggatccggcatactatgttcttaaagaagacgaatctccttgcatttttggttctatcgagaagcagaggtggtcttatgcatgtgcaaaacagttgattgacaggctgatttttgctgagggtgctgaaaatggcttggagttcacaattgtaaggccatttaact

SEQ ID NO: 183257 - DNA, 264 bp, Glycine max
aattgctttgctgtaagtttctgattcctttcttcagaattccaagttttcatttcgttagggacaaaagattgtgagatagagtatggctggaaaaggcgagggtcctgctatcggaatcgatttgggaacgacgtactcttgcgtcggcgtgtggcaacacgatcgtgttgaaatcatagccaacgatcagggtaatagaactaccccatcctacgtggctttcaccgatacagaacggttgatcggcgatgcggcgaagaa

SEQ ID NO: 183258 - DNA, 265 bp, Glycine max
cttaggaactgtatggagccggtggagaaatgtttgacggatgctagaatcgacaaaagaagtgttgatgatgttgtccttgttggtggttctaccagaattcccaaggttcaacaactgctgcaggacttctttaatggaaaggagctgtgcaagagcatcaatcctgatgaagctgttgcatatggtgctgctgttcaggctgcaattttaagtggtgagggcaatgagaaggttcaggatctactcctcctaaatgtcaccc

SEQ ID NO: 183259 - DNA, 268 bp, Glycine max
atgctctgtagctggtcctgggtttgtgaatattgtcttgtcgaagaagtggatagcgcagaggttagagatgttgctgattgatggtattgataagtgggcacctcgacttcccgtgaagacagttctggttgatttttcctcacctaacatagcagtcgaaatgcatgttggacacctgagatctaccattattggggacacattagctcgcatgtttgaattttcacgtgtggaaactcttatccgcagaaatcatcttggtgac

SEQ ID NO: 183260 - DNA, 244 bp, Glycine max
ctcatggtgatgctggtctcactggaagaaagatcatcattgatacctatggtgggtggggtgctcatggtggaggtgccttttcagggaaggaccctaccaaggttgacagaagtggtgcctatatcgtgaggcaggctgcaaagagtgttgtggcaaatggccttgccagaaggtgcattgtccaagtttcctatgccattggtgtccctgagcccttgtcagtgttggtggacacttatgg

SEQ ID NO: 183261 - DNA, 260 bp, Glycine max
ctcacttttcatccttcgatcatacacttagttgcttccaattaagatggttctgctagagaagctctgggatgatgttgtggctggccctcaacctgagcgtggccttggcaagctcagaaaactcaccaccctcaaaactattgatgaaggagaaagtagcaagctgcagaagacgttgtcgatgccgtcgacaccaacaaccccgatgactccgacgactcgaacgacaccgggatcggcccgtaaagctgacaacg

SEQ ID NO: 183262 - DNA, 265 bp, Glycine max
cacacaacagccatggagttttcaggaggccacgaaacaggataatttttcctcaggaaagggtatgatgaaaactgaaaactcttcttccatgcagagtttttcccctgagattgctagtgtccaaactaaccatagcaatgggtttcaatccgatcatggcacttaccccccacaatctcagactttaagtagaaggtcagatgatgggtacaattggaggaaatatggtcaaaacccagtgaagggaagtgaaaatccaaga

SEQ ID NO: 183263 - DNA, 266 bp, Glycine max
gacaatcctattaagaggtggtacaaaagcagcaagtacttcctgcaggataattggcagagaacttgggtattgctactgtggattggcgtgatgttaggtctatttgcctacaaatttgtgcagtatagaagacaacctgcatatgaggtgatgggccattgtgtatgcatggccaaaggtgcagccgaaacacttaaattgaacatggctattatcttgctaccggtttgccgaaacaccatcacttggctaaggaataagac

SEQ ID NO: 183264 - DNA, 262 bp, Glycine max
attgccttcaaatcacacactctcttcaatttctagggttttgctattgctttgcctccgttccccctttctcacaaaaacaacgccttttctcttctccttcgtatctattctttgcgtttcgtctttggttgattgatggcattcacagcgtaattcgttgctgcattttaatcgatttatctaaccaggactgaatgacctaatggtgcctaaaggtgggaaacagaagtctagtagtagtagtagtaaatcaattttt

SEQ ID NO: 183265 - DNA, 267 bp, Glycine max
cctaaacctaaacctaaacctaaacataaactgaatttcccaaatccccttcccaattttcaccaaaacctaatactcccaaaccaatcttcgatcatggccgccgaatcagaacctcaactactcgaagagagaagagaggagcaagaacttaagtacctggaatttgtgcaattcgcgaccatccaggccctgatgcgctgcgccatcctctactcctacgccaaggagcgcgcgggtcctctgaagcccggcgtcaacaccgtc

SEQ ID NO: 183266 - DNA, 267 bp, Glycine max
gaacagtgaagagtgagagagagagagagagagaggcccttggaatccaaaaatgagagaaatcatcagcattcacataggtcaggccgggatccaggttggcaactcctgctgggaactctactgcctggaacatggcatccagcccgatggcatgatgccaagtgactcctccttcggtgtagcccacgacgccttcaacaccttcttcagcgaaaccggatccggcaagcacgtccctcgcgccgtcttcgtcgatctcgagcc

SEQ ID NO: 183267 - DNA, 264 bp, Glycine max
ctgatggtgtgagccacacagttcccatatatgaagggtatgctcttcctcatgcaattcttcggttggaccttgctggccgtgatttaacggagtacttggtgaaaatccttactgagagaggatactccttcagcacctctgctgaaaaggaaattgtccgtgatgtgaaggagaaattggcatatgtggcccttgattttgaacaagaaatggagactactaagagtagttctgcagtggaaaagagctatgaattgcctg

SEQ ID NO: 183268 - DNA, 266 bp, Glycine max
cctcgagccgcttccgcaaatcgcttctcacgacagcatctccgcttctccaacctccgcttcaccttccgtcttcaatcacctcgttcgtgctcccgaagatcctatcctcggggtaactgtcgcttataacaaagatccaagtccagttaagctcaacttgggagttggtgcttaccgaactgaggaaggaaaacctcttgttttgaatgtagtgaggcgagttgaacagcaactcataaatgacgtgtcacgcaacaaggatt

SEQ ID NO: 183269 - DNA, 265 bp, Glycine max
cggctcgagccggcgtgtccctcgcggaggctccgggattcctcaaggcccccggcggcgccccccgcaacgttgccatcgccgtcgcgagactcggcgccaaagcggcgttcgtcgggaagctcggcgacgacgagttcgggcacatgctggcccgaatcctgaaggagaacgacgtgcgatccgacgggatcaacttcgaaaagggcgcgcgcaccgcgctggcgttcgtgaccctacgcgccgacggggagcgtgagttcat

SEQ ID NO: 183270 - DNA, 264 bp, Glycine max
ctcgagccgcgatcttgttattgtaaaatataataacttttttatatcgtgatcaagattcgccgagggagagccaccgccgccgtcgtggatccgacggcggagcaggcgaaggagactctgttccgcggcgtcaggaagcggccgtgggggcgattcgcggcggagattcgagatccgtggaagaagcatcgcgtgtggctggggacgttcgattccgccgaggatgccgcgcgggcttacgacaaggctgcccgatccttc

SEQ ID NO: 183271 - DNA, 262 bp, Glycine max
cttcattttgactctctctctctctctgattgcttccttttcccttttattttgctctcttctctgcacaacaattccttctcattccagatattccaaccatcgacctatctcaattctcaaccttaacctctcagaatgtcttacgcttatctcttcaaatacatcatcatcggtgacaccggagttgggaagtcttgtcttctacttcaattcacagacaagcgctttcagcccgtccatgacttgaccatcggtgttg

SEQ ID NO: 183272 - DNA, 264 bp, Glycine max
caagtttggaaactctactttcctcattgactcaattccagtggcagagtttcaaggtcgaccactagccgatcaccctgctgtgaaaaatggacgtccacctggtgctctcaccatagcccgcgatcttcttgatgcatcaactgttgcggaagccatcagtgtcatctcctgttggtatgaggacaagactgagtggggaaatcgcgttggatggatctatggatctgtgacagaggatgtggtcactgggtataggatgca

SEQ ID NO: 183273 - DNA, 267 bp, Glycine max
ctcaccctctctgggctctccctctgctgctccaccgtctccgccgccgcctctgccaccggtggtggttagcccttgtgctgcctgcaagatcctccgccgtaggtgtgtggagaagtgtgtgttggctccatatttccctcccactgatcctctcaagttcaccattgctcatagagtctttggagccagcaacatcatcaagttcttgcaggaactgccagaatcccagagagaagatgctgtgagcagcatggtttatgaggc

SEQ ID NO: 183274 - DNA, 264 bp, Glycine max
gtctgatatatctgattttgaatttgacccttgcggatattcaatgaatggcctagaagggagtgctatatccaccatccatgtcactcctgaagatgggttcagttacgcaagttttgaagctgttggttatgactttaatgacatggctctaggtgaacttgtggaaaggactttagcttgcttttgtccagcagagttttctgttgctttgcacattgacatgcatggtgagaaacttaatagatttcccttagacatcaa

SEQ ID NO: 183275 - DNA, 264 bp, Glycine max
ctttcattcgtgaaggattccagtttgattatgtctttgattggaccattttgaactatcagcaatctcaaattgccacacctcctgctcgtgctattggtcctgctgctggaccaagttctgggctgccaccagctgttgtaaatgctgatagacagacaggtggggaaaacagtaggcatactggttggtcttcatctgatcctgctcgaagaagaaactctggacctattgcaaatgatggaatgttgtcaagacaaaaag

SEQ ID NO: 183276 - DNA, 266 bp, Glycine max
tggtggtggacgcgattctggcatgagttctgagactatcaattcctccactcaaagaacttcaatgagcaacgagagcgtttgcagcaccagcttcagccgtctctccttcgatctccctcctccttcttcttcccctgagacccgcttcgtcaaaccccaccgctcctccgacttcgcctactccgccatcctccgccgcaagtccgccctcaccttccgcgacttccacctcctccgccgcattggcgccggcgacatcggca

SEQ ID NO: 183277 - DNA, 267 bp, Glycine max
ctcaccccagtttcactttctcattattttctctcctattgataaagaaacagagagagagagaaaaaaatgcctgcggtaggaggtattagcaacggagggggcaaggagtaccctggaagcctcactccttttgtgacggtaacatgtatagttgccgccatgggtgggttaatcttcggttacgatatcggaatttcaggtggggtgacatccatggatccgtttctgctcaagtttttcccgtcggtgttccggaagaagaat

SEQ ID NO: 183278 - DNA, 251 bp, Glycine max
cggatcttgacatggttgatgctgccatagtagaagggaaaacaaaagtgctttacttcgaatctgtttccaaccccacccttacggttgcgaacatacctgaactgtgccacatggcacaccggaagggagtgacggtggtggtggacaacacgttcgcgcccatggtgctttcgccagcgcgtcttggtgctgatgttgtcgttcacagtatctccaagttcatcagcggtggggccgatatcattgca

SEQ ID NO: 183279 - DNA, 262 bp, Glycine max
gtaccctacacttagttgttgtgttgctgtgcacccggtgagcggtgacctcttccgctttgatcttcttctgtccagggtaaccaatctggttacttgggtcaaagatttctggcatctctgtcatggcaactagacttcagtttgagaataattgtgaagttggagtcttctcaaaacttaccaatgcctattgtttggttgctattggaggttccgaaaacttctacagtgcatttgaggctgagttagcagatgttat

SEQ ID NO: 183280 - DNA, 273 bp, Glycine max
acaatatccagaaggaatctaccctccacttggtgctccgtcttcgtggtgggatgcaaatctttgtcaagaccttgactggaaagacaattacccttgaggtggagagttctgacaccattgacaatgtcaaggctaagattcaagacaaagagggtatcccaccagaccaacagaggctgatctttgctggaaagcagcttgaggatggccgtacccttgccgattacaacattcagaaagagtccaccctccacctggtgctccgtcttc

SEQ ID NO: 183281 - DNA, 276 bp, Glycine max
gcgtcatgggcagctccaccgcctaccccgccaccaaacgcggccttaaaacccttctcctggaacagttcgacttcctccaccactgtggctcctcccacggcgaatcccgcaccatccgcctcacctatccccaccactactactaccctttagtcatggactcttaccgcctctggcaagaggcgcaggcccaagtcggctaccagatctacttcaaggcccatcacatggacatggcccatcacaacgagcccgccatgcgcgccctcatcg

SEQ ID NO: 183282 - DNA, 279 bp, Glycine max
gacgccataagtaagagcaagtcgaaaagttcctctctctctcacacacacacatcccagccatgagcctcttcggtataggcagaaaccagagaacattccgcccgaaaaaaagtactccttctggaagtaagggagctcaacttcgaaaacatattgatgccacgttaggtagtggaaatctgagggaagcagtaaagctacctcctggggaggatttaaatgagtggctagctgtcaacactgttgatttcttcaatcaggtgaatctgctttatg

SEQ ID NO: 183283 - DNA, 274 bp, Glycine max
tctggaacaatggcttgaagtggaagctcataactttcacccaccactctacaacttggttattaatgttctgtttgcgccattaacgggggctccttcggaccaaaaagtgatagaagaaagtgataaaaagattgagaaggtgctggatgtttatgaggagaggctgtcaaagagcaagtacttggctggtgacttcttcagccttgctgatcttagccacctcccatttggtcactatttggtgaaccaaaccgggagaggaaatttggtc

SEQ ID NO: 183284 - DNA, 268 bp, Glycine max
caaattcccaattacccttcccaattctcaccaaaacctaatactcccacaccaatcttcgaccctggacgccgattcacaacctcaacaactcgaagagagaacagaggagcaagaactgaagtacctggaattcgtgcaattcgcgaccatacaggctctgatgcgctgcgccatcctctactcatacgccaaggagcgcgcgggtactctgaagcccggtgtcgacacgtggaggaggcgtgaagaccgtcgtggctcggtctac

SEQ ID NO: 183285 - DNA, 275 bp, Glycine max
aaaaaacaacagtggtacgtgatgccaccgaagttcgatccctcgcaggtggtggacgtgttcgtccgagtcaccggcggcgaagtcggcgcggcgagttctctcgccccgaagatcggtcccttgggactctccccaaagaagatcggagaggatattgcgaaggaaaccgcgaacgactggaagggcctccgcgtgacggtgaagctaaccgtgcagaaccggcaggcgaaagtgacggtggtgccatccgccgccgcgctggtcatcaaggc

SEQ ID NO: 183286 - DNA, 277 bp, Glycine max
ggcagctcaaacccttgagtcaattttggtgtctgacgttcaagattttgtcattgggaaagatggggtgaagattccagtgtcagaattgaaggggaaggttgtcctcctctacttctcagctcactggtgtcctccatgccgtgcattccttccaaaacttattgatgcatataataagattaaggaaaagggcaatgcattagaagttgttttcatctcaagtgacagagatcaaacctcctttgatgaattctttgcgggaatgccatggttg

SEQ ID NO: 183287 - DNA, 277 bp, Glycine max
tggctttctttattctctccttcctcttccttcttcttgtttcatctgccactgcttgtgatcgctgcttgtatcaatccaaggcttcctatttctccaaagcttctgctctttcatctggggcatgtgggtatggctctttggcactagacataagtggtggacaccttgcagctggtgtggattctctcttcaaaaatggagcaggttgtggtgcctgctttcagataagatgcaagaacccaactctatgtagcaaagaaggtaccaaagtggt

SEQ ID NO: 183288 - DNA, 256 bp, Glycine max
cttctctttgttcttctaccttattttctttccctagtcaaggagattcatctctgcagcaggttgttttagaaaagaaaaaatgctgaagatttgctgcattggggctggatatgtggggggtccaacaatggcagtcattgcactgaaatggccctcaattgaagtggctgttgttgacatctctaaatccaggattgcagcatggaacagtgaccagctccctatctatgagccatgccttgatgatgtggtg

SEQ ID NO: 183289 - DNA, 268 bp, Glycine max
ggttgggagaaagcaaaggcctccaagcctccaatgttgcctgatgactttgacaaaccggagtttgccacggtcaacattcagcgtgatctgttctatggttacgatactctcatggagaatgtctctgatccttctcacattgagtttgctcatcacaaggtcacaggaaggagagacagagccaagcctctgccattcaagatggattctcgtggttcatggggcttctctggagctaatgaagggaacccacagatcagtgcca

SEQ ID NO: 183290 - DNA, 265 bp, Glycine max
tgagaaaaaaggtggtggaaactggcaatcgtgtgataccagagagctgttttatagtttccaccgtgacgatgatcctgcagaggctgttatgcacaagtgtgtggtgcattttgttcccagacacaaacagcttccaaagcgtaaggatcaccccgggtttattgtacagaaggtgtatgacactgtggaaagaaaactctggaggctgactgataaggattatgaggaatttaagcagcaagagattgatgtgcttgttgag

SEQ ID NO: 183291 - DNA, 266 bp, Glycine max
atcagaatcattaaagataagattatattgctaagaagaaaaaatatgaaggttgtctacttgcttgttgccctcttggctttgacatcaactgttgtctctgcctatgaccctagtcctctgcaagatttttgtgtggcagccaaagaaaaagatggtgtatttgtgaacgggaaattctgcaaggaccccaagcttgtcaaagcagaagatttcttcagacatgtggaacctggggaaactgacaacccactaggttcaaacgt

SEQ ID NO: 183292 - DNA, 271 bp, Glycine max
atatattccattctctctgtgtatttccctacctctcccttcaagatgcagatcttcgtcaagaccctcaccggcaagaccatcacccttgaggtggaaagctctgacaccatcgacaacgtcaaggccaagatccaggacaaggaaggaatccccccggaccagcaacgtctcattttcgccggaaagcaacttgaggacggccgtacccttgctgactacaacattcagaaggagagtactcttcacctcgtcctccgtctccgtggtg

SEQ ID NO: 183293 - DNA, 270 bp, Glycine max
ttctgcaccgagattcattcttcaccaaaacttcgcaaagaaacactacacatccatggcaactgctggcgtgcaagaagttcgtgttccccctctaacttccacctctgagccaccttctctctttgacggaaccaccaggttgtacatcagttatatttgtccctatgcgcaggggtttggatcactcggaactataatggactacaagacaagatcaaactcgttcctattgacctacgaaacaggcctgcttggtataaggagaaa

SEQ ID NO: 183294 - DNA, 271 bp, Glycine max
ctcgagccgctttcagctccggcaacctctcttccggcgccgccgccatctcggccgcgcaccaatcttcaatttgattacttgggtcaacgatttctgtcattctcaatcatggcaactagacttcagtttgaaaataattgtgaagttggagtcttctctaaacttaccaatgcctactgtttggttgccattggtggttctgaaagcttctacagtgtatttgaagccgagttagcaggtgttatcgctgtggtcaagacatccattg

SEQ ID NO: 183295 - DNA, 269 bp, Glycine max
ctttcttcctcttcctcagtagtgcgattttcgactctcttctccgcaactatgcctaaccctaaggtcttcttcgacatgaccatcggcggtcaacctgccggccgcatcgtgatggagctctacgccgacgtgactccgagcaccgccgagaacttccgcgcgctctgcaccggcgagaagggcgccgggcggagcggcaagcccctccactacaaaggctcgtccttccaccgcgtgatcccgaacttcatgtgccagggcggcga

SEQ ID NO: 183296 - DNA, 273 bp, Glycine max
cagcagttgtcgtattgcattgcgcagtttgtggagaaggattacaaactcgcggacacggttattaggggtttgttgaagtattggccagtcactaattgccagaaggaggtgctcttccttggggaactacaggaggtgctggaggccacgcagaccgcggagttccaacgctgcatggtccctctttttagacaggttgcccgctgcctcaatagttctcactttcaggttgcagaacgagctctctttttgtggaataatgagcatatt

SEQ ID NO: 183297 - DNA, 276 bp, Glycine max
atggcttcttcgtcttcagaatcggcggtgtcggagcgaagaggaataccaggggctcagttcgtagaggatgtccaaacttacctcactcaatcgggtctcgatgttcgttcagccctggcttttctccaagagagacttcagcagtacaaggtagtagaaatgaagcttcttgctcagcaaagggatcttcaggcaaagataccagatattgaaaagtgcttagacgttgttgctacattgaaagctaagaagggtactggtgaggaacttatt

SEQ ID NO: 183298 - DNA, 266 bp, Glycine max
gcaacgtctcatcttcgccggaaagcaacttgaggacgggcgcaccctcgccgactacaacatccagaaggaatcaacccttcacctcgtcctccgtctccgtggtggcatgcagatcttcgttaagaccctcaccggcaagactataaccctagaagtcgagagctccgacaccatcgacaacgtcaaggctaagatccaggacaaggagggtatccccccagaccagcagaggctgatcttcgccggcaagcagctcgaggacg

SEQ ID NO: 183299 - DNA, 266 bp, Glycine max
gacacttcaggttcttctgaagggtacacttctgcagcttttcatcctgatggtcttattcttggaaccggcaccacagaatctctcgtcaagatttgggacgtaaaaagtcaggcaaatgttgctaggtttgatggacatgctgggccagtaactgccatatctttctctgagaatggatacttccttgcgactgctgctcatgatggtgttaagctttgggatctacgtaaattgaagaacttcaggaattttgctccatatga

SEQ ID NO: 183300 - DNA, 268 bp, Glycine max
gaaagatgggacgcgaagacggaagaagaagaagatgaagaagaatgcaaaatctgggggttttgaatcacttggtctgaatcccaatgtgttcaaaggaatcaagcgcaaagggtacaaagtgcccactccaattcagcggaagaccatgcccctcatcctttctggctccgacgtcgttgccatggctcgcacgggctctggcaaaacggcagcgtttcttgtccccatgcttcaccgcctcaatcagcatatccctcagtctggt

SEQ ID NO: 183301 - DNA, 267 bp, Glycine max
attgcaggatatcagtcaacctaaaacagaatatgacttacctgctggtgtactgtctgtctctcttctgagacatcagaaaattgcattggcttggatgcttcagaaggaaaccaagagtttgcattgcttgggggggattttggctgatgatcagggccttggaaagacaatttcgatgatttccctcatcctggcacagaggacattacagtcaaaatcgaaaatagatgatacatgcagtcataaaactgaagctttgaattt

SEQ ID NO: 183302 - DNA, 266 bp, Glycine max
ctgcacttggccattagattctcctgttcctcaatggttgactctgatgcaacagtatttcaagcctcacttgccaaaaatgcactataagaggccacttaacttaatggaacaggaaaagctgcgacaccaagcggtcaatgttgttgctgctcgacttagtagggcggaacccccgcttagaaaggaggtacttgaatacacgtgtgacacagagtctcatctctggagtatgaggcgcacaaggcgagcttctaccgtctgat

SEQ ID NO: 183303 - DNA, 272 bp, Glycine max
  unsure (1)..(272): unsure at all n locations
cctccttacactccccacccagtttatcactctcctccaccacctcctaccaacaagccttacatctatgcgtcacctccccctccttaccactattagctagcatagctctatggatatgaagaatatgtgcaacgaataaaagaaagcgatagacaaggaagaagaagcgcttcgcgatgcacgaaagagaagaattggaagcaaagtttcggcgttttgtcttttataaaaaaaatgttanatcattataattttctatgatagggatg

SEQ ID NO: 183304 - DNA, 188 bp, Glycine max
tcagattcttgactggttatctcacagtcctactgatatggagagctacatacggcctggttgtattgttttcaccatttatctgcgtcaggctgaggctttgtgggatgaactttgctatgatctgacttccagtttgaataggctgttggatgtctcagatgatactttttggagaaacggatggg

SEQ ID NO: 183305 - DNA, 265 bp, Glycine max
caaatttctcattctcccatttcctctcagaaccctcgatcactcccacgcgctcctatatcctctccttcaccgtcgctctctccaacgatcacaacaacatcgtcatcccatggcaaacgccgcatctggtatggcagtccatgatgactgcaagttaaggtttttggagctgaagacaaagaggacacaccgtttcatagtttttaagattgaggagcagcagaagcaggtcattgtggagaagcttggtgagccagcccaa

SEQ ID NO: 183306 - DNA, 240 bp, Glycine max
agatgagtgaggctgcagctacgacgacttcgtcttccatgatgcgcaattaccctctcatttccgccatcgttgctttcgccatcgcacaattcatcaagtttttcaccgcctggtttaaggaaaaaagatgggatcccaagcaacttgttggatctggtggaatgccttcatcccattcggctactgtcactgctcttgccgcgggaatcgggttccatgaaggctttggaggactct

SEQ ID NO: 183307 - DNA, 238 bp, Glycine max
cgaaagcgattttgacggaagaagaacctgaggccgatttttgctgggaacttggagtacgatagtcgtcaatcagaggttgagcgcttgtactcagagtattgaaggattgaccgcgtggacatgaaatctggttttgcttgtgtctattatgacgatgagcgtgatgcagaataagcaattcgtgcacttgacaatgttccatgtgtggcatgaagagcgcagctgttagttgagt

SEQ ID NO: 183308 - DNA, 265 bp, Glycine max
gttgaagcctctgatgaggcttgcttatattaacaccattgtctacccgtttacctcaatcccattgattgcttactgtacgcttcactgcattttgtcttctcacaaataaatttattattcctgagataagcaactttgccagtatgtggttcattcttctctttgtctccatttttaccacttcaattcttgagcttaggtggagtggggtcagtatagaagactggtggagaaatgaacagttctgggttatcggtgggac

SEQ ID NO: 183309 - DNA, 267 bp, Glycine max
  unsure (1)..(267): unsure at all n locations
ctcattccttcatttttaaacctagctccatctccctccactcaccataacatgggatcagaagcaaatgctgccaacaccaacttctgtgtaaatgttagcaacaatggctacattagtgctaatgacnccttgaactggggtgcggcggcggaggctatggctgggagccacctcgacgaggtcaagcgcatgctagaggagtaccggaggcccgtcgtcaagctcggtggagagaccctgaccatctcgcaggtcgcggcgatc

SEQ ID NO: 183310 - DNA, 268 bp, Glycine max
agttaaacttggaacccaaggctttgaggtttcaaaattgggattcggatgtatgggccttactggagcgtacaatgaccctctccaagaacaggatggcatatctgttatcaagtatgcgttcagtaagggaatcacattttttgatattgcggatgtttatggagccaatgctaatgaacttttggttggaaaggctttgaagcagctgcccagagaaaagattcagatagccacaaaatttggtattgcttcacgaggttttcct

SEQ ID NO: 183311 - DNA, 270 bp, Glycine max
ttcgtagatcgaaagggaatcttcttccatggcctccaagcggattctgaaggagcttaaggacctccagaaagaccctccaacctcttgcagcgccggtcctgtagcggaagatatgtttcattggcaagcgactataatgggtccccctgatagcccttatgctgggggtgtttttctagttactattcattttcctccggattatccattcaagccacccaaggttgcatttaggactaaagttttccacccaaatatcaacagcaa

SEQ ID NO: 183312 - DNA, 279 bp, Glycine max
caagaagatgactggggggggtatcactatgcaatcgacgccgggaagctcaggatacttggatttgtatccagagcggaagatgtcctttttcaaaaatccttacattctcggactggctgctgtcgccggcatcggtggtctcctcttcggctacgacactggtgtgatatcaggggcacatttatacattaaggatgattttgaggaggttagaaacagcaatcttctccaggaaacaatagtcagcatggctcatcgcggggcaatcgtgggagc

SEQ ID NO: 183313 - DNA, 205 bp, Glycine max
ccaatccggtggctttgacgattaactatcagcaggcggataccgggaccaagatgatacacaaagggaagaacacgaggagtaggattatatccaaaggaatatcggttgggcattccaggaactgttatagagggcttgttcaggttctgtccaaggctgacaatgcccgaaactcgtcacagtgtgattctatgcttattgg

SEQ ID NO: 183314 - DNA, 245 bp, Glycine max
cgaattgttgcaactttttgattcctaaattctctaaaattcgaaattctaatttcgttaggggaaagagattgtttgtgtgtgagtgagtatggctggaaaaggcgagggtcctgctatcggaatcgatttgggaacgacgtactcttgcgtcgacgtgtggcaacacgatcgtgttgaaatcatatccagcgatcagggtaacagaactaccccatcctacgtgggtttcactgacacagaac

SEQ ID NO: 183315 - DNA, 261 bp, Glycine max
ccaagagtgaaaaccttctcttacccttctctcaagtttcaagagatttcatcatggctccaaagaaggacaaggctccaccaaattcctccaagctcgccaaatctggcggtggcaagcagaagaagaagaactggagcaagggaaagcaagacgagaaggtgaacaatatggtgctgtttgatcagggcagctatgacaagctccttgtctgaagctcccaaatacaagcgaatcactccttccattctctctgatcgt

SEQ ID NO: 183316 - DNA, 189 bp, Glycine max
caacgatcccaccaccgataaactcatcacgtggggcacagccaacaacagcttcatcgtcctcgatcccctcgacttctcccactcactcctccctactttcttcaagcacaataacttctccagcttcgttcgccaactcaacacctatggtttcagaaaggtggatccggatcggtgggagttcgc

SEQ ID NO: 183317 - DNA, 195 bp, Glycine max
ctccgatggcttcgaccaagcaggcttcgcccaaacaaacaacaacatgcagctcttcctgggctccttcagaacaaacggttacaggaccttgtctctgctcatcaaaaaacaccaacagactccctctaccgtcacctgcattgtctacgactcctttttcccgtgggatctcgacgtggccaagcagcatgg

SEQ ID NO: 183318 - DNA, 259 bp, Glycine max
ccggtctaattattcaggtaccgagggaatcaatgttttttgttattcctgcttttggtggcattgtttcctgggagggagaaggggcaccttttggggaatctgaccagagcatttctcatcagattgttgacagggaagcacaaggacatcggttcctctcaagagcatatgttccacccacagtgggtatatgactgtgtgaatgcacggattatcccgccaactgagaattatttggtgggaacgcctcctccac

SEQ ID NO: 183319 - DNA, 184 bp, Glycine max
cagggaatcaaagaagacatccatgatgacattgtctcagccctttctaaacgatgttgagagcctagattcatcatcaataactacaacagagtcatatttttatgggaagctgattgcaagggctgcaaggttggtattgattgctgaggagttgaactaccctgatgtgatttcaaaggtt

SEQ ID NO: 183320 - DNA, 275 bp, Glycine max
cgcaccggtgcttgattgccacacttctcacattgctgtcaagttttctgaaatcttgaccaagattgacaggcgatctggtaaggagcttgagaaggagcccaaatttttgaagaatggtgatgcaggtatggttaagatgattccaaccaagcccatggtggttgaaactttctctgagtatcctccccttggtcgttttgctgtgagggacatgcgtcaaactgtggctgtcggagtcatcaagagtgttgagaagaaagaccccaccggag

SEQ ID NO: 183321 - DNA, 264 bp, Glycine max
cgacatgtagtactagtgctccagctatgtggcttccaccagacgcacttcttgttccctttgtgaaccgaactgccaaggctgttgcttgggcaagtctgaaacatctccgggtgccaaacccattgccgtgtagcgataactgtggtgtgagcatcaattggcatttgtacacagcctacactaaaggatggcgtgcaagggtgacactttttaactggcgtgacactaattttgcagactggtttgccgcagtacaaatgg

SEQ ID NO: 183322 - DNA, 280 bp, Glycine max
gccatggtggactctcctgtgggtcaaaacctatgtgtttccaacatatttcacaagtcatttattgaagtaaatgaagaaggcactgaagctgcagcggccacctctgcaactatacgattgaggagtgcgatgcttccaactaaaatagacttcgtagctgaccatcctttcttgttactgatcagagaagatttaactggaacagtactctttattgggcaggtgctcgatcctcgtgcgggatgattttagtggccatacactggacaacattggt

SEQ ID NO: 183323 - DNA, 166 bp, Glycine max
ccttggtgtgggtagccacatgcaggagcttaggagggttacgtacgggatcatgggggagaaggataacatggtcagcatgcatgatgtcatggatgctcagtgggtttatgctaattatagggatgagacttatttgacgagggttgtcatgcccttggagatt

SEQ ID NO: 183324 - DNA, 274 bp, Glycine max
cgcctctccctctctctcaaaaatcgttctcttcgattttagggttttgttttgctgctgcctccgttccccccttctcataaacaacgcgttttctcttctgcttcgtatctattctacgcttttggttttggttgattcaaggccttcacagcattcgttgcggcattttaatcgatttatccaagcaggactgaatgaactcatggagtctaaacgtgggaaaaagcagtctagtacccgtagctagtcactcattgttctccgtagctcc

SEQ ID NO: 183325 - DNA, 288 bp, Glycine max
cgacgaccctttggtgtttggatcttcaagaaagagagacccttgggatttcgtcaccatgagtctcttcggtcttggaaacagaaaccataaaacatttcgtccaaaaaagagtgctccatctggaagtaagggtgctcaacttcaaaaacacatcgataccacgctcggtagtgggaacttgagggaggctgttagactgcctcccggtgaagatattaatgaatggctagctgtaaacaccgtggacttctttaatcaagtgactatcctgtttggtactcttac

SEQ ID NO: 183326 - DNA, 199 bp, Glycine max
gtttgaaggtgaggattatgggacctaattatgtccctggggagaaaaaggatttgtatgttaaaagtgtgcaacgaactgtcatttggatgggaaagaggcaagaaactgtagaggatgtcccctgtggtaatacagtggctatggttggtcttgaccagttcatcacaaagaatgcaacattgacaaatgagaagga

SEQ ID NO: 183327 - DNA, 117 bp, Glycine max
cttttatgtctgaattagacgatcaaacacctactgccttcgatccttttgctgatgcaaatgctgatgactcgggtgctgggtcaaaggagtatgtgcatattcgcgtacagcagc

SEQ ID NO: 183328 - DNA, 185 bp, Glycine max
gtgatttggagtttggagcgactgaactaatcattaatttgcactcgctgtttcagcttcatcacccttcttttgcatcatttatatctcttgagaaatggcacaagaaacctttctattcacatctgaatctgtaaacgagggtcaccccgacaagctgtgcgaccagatctctgatgcagtac

SEQ ID NO: 183329 - DNA, 220 bp, Glycine max
ctcttcttgacaatgctttgccacatgaagttcggcttgttcctcttctttgccttcttcgtgttgatcatgacattcttcgtctacttcttcttgcccgaaacaaagggcattccaattgaagaaatggggcaggtttggcaggcacaccccttctggtccagattcgtggagcatgatgattatggcaatggtgttgagatgggaaagggagctatta

SEQ ID NO: 183330 - DNA, 274 bp, Glycine max
tcgaactgccactgaggcacccacagttattcaagtctattggtgttaagccaccaaaaggaattctgctgtacggacccccagggtctggtaagactttaattgctcgagcagttgcaaatgaaactggtgccttctttttctgcatcaatggcactgagatcatgtcacagctggctggtgaaagtgaaagcaatctgaggaaggcatttgaggacgcagagacaaatgcgccatccattatcttcattgatgagatagattcaatagctcc

SEQ ID NO: 183331 - DNA, 149 bp, Glycine max
ctcgcagctccgccacctccacctcgtatctctcataggttattgcaacgagaacaacgagatgatcctcgtctacgacttcatggcgcgtggaacgctacgcgatcatctatacaacaccgacaacccccctttgacgtggaagcagc

SEQ ID NO: 183332 - DNA, 207 bp, Glycine max
cctgaatgtggatgtgactgaattccagaccaacttggtcccatatcccagaatccatttcatgctttcctcctacgctccagttatctctgctgagaaggcctaccatgaacagctttcagtggctgaacttaccaacagtgctttcgagccatcgtccatgatggccaagtgtgaccctcgccacggaaagtacatggcatgttg

SEQ ID NO: 183333 - DNA, 150 bp, Glycine max
cttttccttctctctggctttcctttgacgcttctgacactgctcactttctttctctccgtgtcctaatggctctccccgactcttcttcctgccgcaactccctgatcccctccttcatctactcctcttcctccaaaacgctccctc

SEQ ID NO: 183334 - DNA, 225 bp, Glycine max
cttttgttggtcatgtttgtataggtggctgcatctgcattcggatgcgaaggaatgtccagtttgtaagcgagatgtgacacttacaagtgttaccccaatatatggccgtgcgaacaatgtccgtcgtcctgaggacgattctgcacttaagatccctcccaggcaccaagcgaagagagttgagagtctgagacaaaccactcagagaaatgcatttgcact

SEQ ID NO: 183335 - DNA, 283 bp, Glycine max
ctctaacctacctctttttcttctctctcaacaacttcaccttctacctcctcgatcatgtctcacttcaagggcaagtaccatgatgagcttatcgccaatgctgcgtacattggcactcctggaaagggtattcttgctgctgatgagtcaacagggacaattggcaagcgtttggccagcatcagtgtagagaacatcgaatccaacaggcgagctcttagggagctgcttttcactgctcctggtgttcttcaatatctcagtactgtcatcctctttg

SEQ ID NO: 183336 - DNA, 198 bp, Glycine max
gccggcgcgcgctgaagtttgctaggttcatgagcaggttcgggaagagttaccgaagcgaggaagagatgagggagaggtacgagatattctcgcaaaacctcaggttcatccgctcccacaacaagaaccgcttgccctacactctctctactaatcattttgctgattggacttgggaggagttcaaaagacaca

SEQ ID NO: 183337 - DNA, 274 bp, Glycine max
gcattttaactccaattggcctgttcccagagcagataagtatggtgtccagccactttccatatggctaccaagcagaaattatggctctggacatcctcatgaaaattctaccaaccataacctgtctgttccaaagggatggcgcaatggggactggatctgtaactgtggcttccacaattactcatcccgctctcagtgtaaaaaatgcaatgcttttccacctgcaattgatgttaaacttcatgctgtttccactttttggtggtga

SEQ ID NO: 183338 - DNA, 196 bp, Glycine max
ctgaactctctctctcatctataagtcaacatggctcatcatgaagcattcaagtgcatcgaattcgagtagacctcaccctaagctcaatgaaagaattctgtcatctctgtcacggagaactgttgctgctcacccctggcacgacttagagattgggccaggagttccagcagttttcaactgtgtggttgaa

SEQ ID NO: 183339 - DNA, 254 bp, Glycine max
gtcggagttcatcagcttcataacaggagaggcttccgataagtgccagaaggagaagaggaagacgatcaacggcgacgatcttctctgggccatgactaccctgggcttcgaggactacgtggatcctctcaagatttacctgcacaagtatagggagatggagggggagaaaaccgctatgatgggaaggccacatgagagggatgagggttatggccatggccatggtcatgcaactcctatgatgacga

SEQ ID NO: 183340 - DNA, 276 bp, Glycine max
cccccgagattccgtgagttgcaaaaatgaagacgattctttccaccgagaccatgaatatcccggacggcgtgagcatcaaagttcatgccaaggtcatcgaagttgagggcccccgcggaaaattggtgcgagacttcaagcatttgaatctcgattttcagctcattactgacgcaaacggtaaaagaaagctgacaatcgacgcgtggtttcgttctcaggaaacatccgccgccattcgcaccgccttgagccacgtggagaatcttatca

SEQ ID NO: 183341 - DNA, 261 bp, Glycine max
cgcgtcgctccgcaccagtttcaccgcacgaatatcttgctgtttggcgcgatccgagaaaaactctgtaaacatgttggtttaccaggacctccttacaggtgatgagcttctctctgactccttccgttacaaggacattgagaatggaatgctgtgggaagttgaggggcagtgggttgttaaaggcgcagttgatgtagacattggtgcaaacccttctgctgagggtggaggcgaagatgcgggcattgatgatgc

SEQ ID NO: 183342 - DNA, 246 bp, Glycine max
ctcgagccgcgcgcactctctctttttctctctgttttttgttctctcttcgcttaaaccctctcgttcttctcgttttcgccgattctcgccatgccgaaagctaaatccgacgccaaagccgccgatagcaggttgacgcggccgggcgctggtgctgggcggccgcaatcgaggcaagctgctaaggaccctaacaagccgaagagacctccaagcgctttcttcgttttcatgtccgagttc

SEQ ID NO: 183343 - DNA, 258 bp, Glycine max
cggcatgtcaccattcttgaccagtcaccccaccagctcgccacggccaagcagacggcgccactcacggcatgcaaaatcatcgccggggctgccgcggctctcccctttcgaactgattatgccgatagatatgtatccgcaggcagtattgcgtactggccggctccacagcgtggcatcacggcggcatacagggttttgatccttggaggcaacgcgtgtctaattggtccggtctacccaacattttggttg

SEQ ID NO: 183344 - DNA, 254 bp, Glycine max
gcgaaatggctaaagatgttgaggttcaagagcaaggcggcgagtactctgccaaagactaccatgaccctcctccagcacctttgttcgacccagaggcgctcacacagtggtccttctatagagccctcatcgctgagttcatagcaacccttctcttcctttatgtcactgtgctcaccattattggctacaaaaggcagactgatacaacggtaggtggcaccgactgtgatggggttggcattttgggc

SEQ ID NO: 183345 - DNA, 247 bp, Glycine max
ggatgccttggcgattacaggcgacgaaggacgtgatagcctgcgataagcttcggggagctggcaaattagctttgatccggagatttccgaatggggaaacccgaccgtaaggtcatcgcatactgaatacataggtatgcgaagcgaaccgggtgcactgaaacatctcagtagctcgaggaaaagacatcaaccgagattccgaaagtcgtggcgagcgaaatcggagtagccctcgcgtttt

SEQ ID NO: 183346 - DNA, 249 bp, Glycine max
ctgctatcttgtgcagtgcagagtttgttgtgaaacacaatttgccatcacaagctgttgacattcttgctctgacaatggccacagacactgaaacttctttcaaggacagctgtatcaagatggctggttttgacatgcgcaaattggctgcagataaagcttacaagattgctggcgtcaccgctaacgatgttcaagttattgaacttcacgattgtttcagtgcaaacgaactcgttacatacg

SEQ ID NO: 183347 - DNA, 254 bp, Glycine max
gtcactgctttgtttagatcagaaccagatcgtgttctcttcttccattggcaaacatggcaactcaaatgcgcaagaagcgcaagtttgtggcggatggagtgttcttcgccgaactgaacgaggttctgacacgtgagttggcggaggacggttactccggcgtggaggttagggttacgacgatgcgcaccgagattatcatcagagccaccagaacccaagccgttctcggtgagacgggacggcgaatt

SEQ ID NO: 183348 - DNA, 250 bp, Glycine max
gcaacatggttttgtcatggacaaaagggagagtgttccggcgtgccagacaggggcaagagttgaaaaatttcggtggcgacttggagatagacattgcgatccccacccacttccggtgcccggtaacattggacatgatgaaggaccccgtgaccgtttccacgggcataacctaccaccgcgacagcatcgagacgtggatcgagtccgggaaccgcacgtgcccggtcaccaaaacggagttgac

SEQ ID NO: 183349 - DNA, 258 bp, Glycine max
cgtcacaaccgaaacagtttccatctctctcacaaaatgacaacaatatcaaattgctcccttctcttcctcttcctcttcctctccaccctccacatagcttccaccctctcaacccccaccaacttcctcacgtcctcctgcagcaccacccagtacccagccctctgcatccagtccctctccgtctacgcctccaccatccagcacgacccccacgagctcgtccagacagccctctccctctccctcaaccac

SEQ ID NO: 183350 - DNA, 252 bp, Glycine max
cgccggcccgcatcgggcggccgccggtgcctgcgcggtcctggcccttgagcgtgtccccgccgacatccgtgcccagggcggcgtggcccgcatgagcgacccgcagctcatcaaggccatcacgcgggccgtcaccatccccgtcatggccacggcccgcatcggccacttcgtcgaggcccagatcctcgaggccctcggcatcgactacgtcgacgcgcgcgaggtcctcaccctcgccgacgacgc

SEQ ID NO: 183351 - DNA, 254 bp, Glycine max
cgcggttttccaattcacagagcaacacaacgaaccaacaatggcgcacctcagccgcagtcgcagccgcagcacgggcaagcagcgctggcgccggtgcagtgcttcggtcgcaagacgaccgccgtggccgtgacctactgcaagcgcgggcgcggtctcatcaagatcaacggctgccccattgagctcgtggcgccggagatcctccgcttcaaggccttcgagcctatcctcctgttgggtaagagccg

SEQ ID NO: 183352 - DNA, 261 bp, Glycine max
cgccggcatctggcttccttaagctcctcattagtcctgctccttgccgctctaattctatcccctcaagttcttgctgactatgagacgcccccaatttacaagccacctgtttacacaccgccagtttatcagcccccagttcctcaaccaccagtgtacaaacctccagtttacaagcctccagttgcacaaccacctgtttataagcctccagtttataagccacccatttacaagcctccagtgtatacacctcca

SEQ ID NO: 183353 - DNA, 254 bp, Glycine max
ctttcttgcacctaaggtaagcaatcaagaaggattagcagcagcagtggaagcaacggctgctttactgaacaacgctgtgaagccagtgattgtgggtgggccaaaactaagggtagcaaaggcacaaaaggcctttctggagtttgcagaagcaagtggatctccaatagcagttatgccgtccgggaagggactagtaccagagcatcatccacatttcattgggacatactggggtgctgtcagctcta

SEQ ID NO: 183354 - DNA, 249 bp, Glycine max
caaaagcaaaaggcaagaatatcaacaaggtaaagtagattccttactagacatggcgttgaaggacacattctacatatctcatggatcaccaactttgtccatagatgaatccattcaggccaggcagttccttcagtcatggaagacggacgtgtttcctcaaagaccctcttcaattcttgtcatctctggtcattgggaaaccgcagttcccacggtcaacgtcgttgactccatcaacgacac

SEQ ID NO: 183355 - DNA, 250 bp, Glycine max
cgggaatcgcttgggccttcggtggcatgatcttcgccctcgtttactgcaccgctggcatctcagggggccacataaacccggcggtgacatttgggctgtttttggcgcggaagttgtcgttgcccagggcgattttctacatcgtgatgcaatgcttgggtgctatttgtggcgctggcgtggtgccgggtttcgcggggacaacaaaatacggtgcgttgaatggtggtgccaactttgttgcccc

SEQ ID NO: 183356 - DNA, 246 bp, Glycine max
gcgatccgcgacaaactctgtaaacatgttggtttaccaggacctccttacaggtgctgcgcttctctctgactccttccgttacacggcaattgcgcatggcatgctgtgggccgctgcggggccgtgggttgttaacggcgcagttgctgtcgacattggtgcaaacccttctgctgcgggtggcggcgcagatgcgggcgttgatgatgcagctgttacggttgttgacattgttgacacatt

SEQ ID NO: 183357 - DNA, 258 bp, Glycine max
catcagtgcttgaagatatcattagttgctgtgttagtaaaggatatgtctttcaaatggaaatgatagtacgggcatccagaaaagggtaccatattgaagaggtcccaatcacatttgttgatagagtatttggaagttcaaagcttggtggatcagagattgttgaatacctaaagggcctagcttatctcttggtgacaacataaaaggataaatcataacaactcgatataccttacattttggggaagaaaa

SEQ ID NO: 183358 - DNA, 257 bp, Glycine max
ccgtcgagccgaatcggctcgagccgaccgatagcgaacgagtaccgcgcgggacaggtgcagaccagtatttcatgcaggaaaccgacaaggctttggagacatatcgggcggggttgcaatatgactctaacaaccaggagttgcttgacggcatcagaacatgcatacaacaaattaacaaggctcgccgtggagacttaagtcctgacgaattgacggcgcgacaggccaaggcaatgcaggatccagaaatt

SEQ ID NO: 183359 - DNA, 259 bp, Glycine max
cgctgagttactacaatcagcagcaaccacccgtcggtgttcctcctccccaaggttacccaccgccggattcttacggaaaggacgcgtaccctccgccagggtacccgccgcaaggcggataccctccgcaggcgtatccagcacaggggtaccctccaccctacgcgcctcctcagtacgctcagcctccgccgcaacaacaccagaattcatctggcccaggttgcttagacggatgtttggctactctctgctg

SEQ ID NO: 183360 - DNA, 249 bp, Glycine max
  unsure (1)..(249): unsure at all n locations
cgcacagttcctcaagtatccaccacccanagtgctccaggtggataagtctgnatagatgactgatgaagtctttgcaagaccaacgattgctggtttaaatccaaatgtcattaagattatcgaggagttcccactaagtagcaagccagatactcaagcctatggtgatcatacctgtataatagcaaaagaacatttggagcctaacttaggtgggctcactgttgagccggctatccaaaacaa

SEQ ID NO: 183361 - DNA, 253 bp, Glycine max
cgcgccgcgatggcggtggccgcgtccgacgccgacgacatcctgatccgtcaggtggtgccagatgttggcgaaccggcgcggcggacaacctgctgaacgccgagcaccacttcgcgagcttcaaggccaagttcgccaagacctacgccaccacggcggcgcacgatcatcgcttcggcgtcttcaagtccaacctccgcagagccaggctgcacgccaagctcgacccctccgccgtccacggcgtcac

SEQ ID NO: 183362 - DNA, 250 bp, Glycine max
  unsure (1)..(250): unsure at all n locations
cgctaaaacatctcaatgggttcttcttctattacaacatcgcccccaancatgaccatggctgcgatcgtgctcctgttcacggtctttgccgtttcctccgccctagacatgtcgatcatctcgtacgacagcgcccacgcggacaaggccgccacgttgcgcaccgcggcggagctgatgtccatgtccgcgccgtggctcgtgaagcccgggacggtgtaccacgcgctcggcgcgacggcgaagc

SEQ ID NO: 183363 - DNA, 249 bp, Glycine max
cggcgccgaagtggatggtggcggctgcggcgacaacggcggcgaagcataatgagaatttgagcagcgaggggcgtttggaggacgatgattcgtggagagtcagaatcttcaatgggcgcaggggccagtaggggcggatcgtgttcgtgtcgtggtgtttgaggaacacgattgggtttttgtggggacctatgatggtttcagtggacctgatgtacttgattaccttctctccaatctccacac

SEQ ID NO: 183364 - DNA, 248 bp, Glycine max
gtgacggcgttggtgaagctcgtcaactaccagcacctcatgcccacgcgctacacgcttgacgtggacttgacggacgcggttaaccccgacgttctcaacgctaaggctaagacggccactgctctcaaggcgaccaagaagctgctcgaggcgcggttcaaaaccgggaagaaccggtggttctgagcggccagcatacatgttcaccaatgaccaaaggcaacaagaacgaactgggcgatatg

SEQ ID NO: 183365 - DNA, 251 bp, Glycine max
cggttcttccacgtaacgcgattttcggtgcacccgcgtggtactttttcagccccagcgacaggcaatacccgaacgggtctcgacccaacagcgtagctgggtcgggttattggcaagccaccggaaccgacaagatcctcaccaccgacggtcgaaacgttggcataaaacaagccctcgttttctacgttggcaaagcccccaagggcaccaaaaccaattggctcatgcacgagtatcgcctcctc

SEQ ID NO: 183366 - DNA, 257 bp, Glycine max
cgcacgtctctctctctctctcgccatggctatggctatgcaaagcggaatcggagtctccaagatcctcatcatagcaggcgcaggttacaccggcaccgtcctcatcaaaaacggaaaactctcggatttaatcggcgagcttcagttgctggtgaagggcttggcaaaatctggggcgcatgctgaaggtgaaggtgaatatgctgatgccatagctgctcaggtgcgtcgcctggcgaatgaagttcggcagc

SEQ ID NO: 183367 - DNA, 253 bp, Glycine max
cggctcgagattggactgggaagcaattgggaaaattcttgcacgaggtcatagtcgtgttcctgtatacagtggaaaccccaaaaatataattggcctcttactagtaaaaaaccttcttactgtaagagctgaaacagagactccagttagtgctgtttccatccggagaattcctagggttccagcagatatgcctctatatgatatcctcaatgagtttcaaaaaggcagcagtcatatggcagctgta

SEQ ID NO: 183368 - DNA, 250 bp, Glycine max
cgcacactactctttgtctctgtcttgtgtgtgtgcgagacatggcgatggcaatggcgcttcgcaggctttcatcttcaattgataagcctcttcgccctctcttcaatgcgggttccctctactacaagtcgtctttgcctgatgaagctgtttacgacaaggagcgacccggagttacatggccgaagcagttgaatgcttcacttgaggtcgttgatcctgagattgctgatcttattgagcttga

SEQ ID NO: 183369 - DNA, 249 bp, Glycine max
cttgaatatctctcacaacaacctgtcaggttctatccctgactcccttagtgaaatggtgagtttgtcagccatcaacctctcctacaataatttggcgggtccagttcctgacggtggcgtattcaattcttctcatcccctggatttgagcaacaacaaagatttatgcgggcatattcaaggtttgcgtccatgtaatgtttctctcactaaacctaatggtggatcaagtaacaaaacgacggt

SEQ ID NO: 183370 - DNA, 245 bp, Glycine max
ctcgagccgctaacctccagcatcctttggtttgcattgatgttattgaagcaggaatagtagctggtcctcgtgcaggactttggaaggcagctgaagcatttgacggacttgtaaggtcagatacttgcaaaagcttagttcacgtattttttgctcaaagaggaacatccaaggtacctggggttcaggattgtggtctggctccaagacaagtcaagacggttgccatcattggtggcgga

SEQ ID NO: 183371 - DNA, 247 bp, Glycine max
cgggacagaggagctctcgttgagttctatgctccttggtgtggacactgcaaaaagcttgctccagaatatgaaaagcttggtagcagcttcaagaaagccaaatctgttttaattggcaaggttgactgtgatgagcataagcgtttgtgcagcaagtatggcgtctctgggtacccaacaattcagtggtttccaaaaggatctcttgaagccaaacagtatgaagggccacgcactgctgaat

SEQ ID NO: 183372 - DNA, 248 bp, Glycine max
ccctcctctcactttcatttctacatccctggctctgttccgtcgatgccgatggcgtttcgggtgcgaaaccctgacctccgctttctcattcttctctctctcttgtccatcacttccgccaaggtcttcttcgcggcgcgtttcgatgacggatggggcaatcgttgggttaaatcagattggcaaacagatgagcacctggctggggcgtggaaccacacctctggccaatggcatggcgacgc

SEQ ID NO: 183373 - DNA, 244 bp, Glycine max
cttcttggacgctacgcggcgccggcgccggcgccgattggtggtggcgtggcggcgtttgtttacacgtctatgcttgaaaaccctaagcatccttatttttataccgttagcttaatcggaatcgccgtcgggaaacggactattccggcgccggagctgctacggcgggtgcacaatcgaggtgacggcggcgtggttgtggcctccggcacgacgttcacgatgttgccggcggggtttt

SEQ ID NO: 183374 - DNA, 246 bp, Glycine max
caagaaaaacacactcacacacagtgcttgtttagactagtgatcttccatggctgtgaaggatagaatcctggtcttgggacccacaggcgccattggccggcacatagtttgggcaagtttaacggcagggcatcccacttttatattggttagggccacccctgcctctgttcacaagccaaggcttgtcactgctgctaatcctgaaaccagggccgcactcattcagagcttccaaaattc

SEQ ID NO: 183375 - DNA, 253 bp, Glycine max
gtttattccttctttcatccattctactttcttttcctctcgctagtgtttagtgctaggtgattgattaacttagaaggactttgtgtgttacaagaaaacaagggcaagtttcatgtctgaatttgacacgaacatcccaactgcttttgatccctttgctgaggcaaatgctgaggactcaggtgccgggacaaaagagtatgttcatgttcgtgtacaacagcgcaacggcaggcaaagcctaacaact

SEQ ID NO: 183376 - DNA, 252 bp, Glycine max
tgaaatctgaagctaagtttcgttgccactgaggaatgaaatggccaatggtaacaacattagtcatttcttcaagctcttgcttttccttctaactttccactcttgtctcgctgagattttcttccaagagcgattcgaagatggatggcagagccgttgggtgctatccgattggcaaaggcgcgcgggaaaagcgggtaccttcaagcacacagcagggaaatggtctggggatcctgatgacaaagg

SEQ ID NO: 183377 - DNA, 250 bp, Glycine max
ctttaagagtagctctaagaagaagaaaaacaaatatgaaggttgtgtacttccttgttgccatcttggctttgacatcctctcttgtctctgcctctgaccctagtcctcttcaagatttttgtgtggcagccaaagaaaaagctggtgtatttgtgaacggaaaattttgcaaagaccctaagcttgtcaaacctgaagatttcttcctacatgtggcaaccgggaacactgacaacccaaataatgc

SEQ ID NO: 183378 - DNA, 247 bp, Glycine max
cgccttatcgctgtggttatcatcttcttcttcctctttcttagatctcttctttctctacgccgcacgccgaaaccatggccggacacggcgcgggtcctgctctcggcatcgatctcggaaccacctactcttgcgtcggtgtgtggcaacatgaccgcgttgaaatcatcgccaacgaccacgggaacagaaccacgccgtcttacgtcggattcactgacaccgagcgtctcatcggtgatgc

SEQ ID NO: 183379 - DNA, 229 bp, Glycine max
gtcgcactttgcgttttctgcgtcatctccgattccccgacaatggccacccaaatgagcaagaagagaaagttcgtagctgatggcgtgttcttcgctgaactgaacgaggttctgacaagggcgttagccgaggacggatactccggcgtggaagttagggttacgccgatgcgcaccgaaatcatcatcagagccaccagaacccaagccgttctcggtgagacgg

SEQ ID NO: 183380 - DNA, 249 bp, Glycine max
cggcttgagctctgcgagatcttgagtcgccgatttgaaaagatgcgtaagcttcagagtgatgctttgcgtgaagccatctcaggaatcatggccgattgcaaggcgaagaatcgcaaatttgtggagaccatcgaactccaaatcggtttgaagaactacgatccacagacggacaagcgtttcagtggctccgtcaagttgccccacatccctcgccccaagatgaaaatttgcatgcctggtgat

SEQ ID NO: 183381 - DNA, 270 bp, Glycine max
aagtgaatgctaagggtaaacccgaatatgttctaaagcgagctgaagatctcgcagctgccggccaaaaggcagaagcagtcgatttcctctatgaacaggttacgtcaaagagaaatcgtacttggagcaagatgagcgagaagattatggtcaagttcatcgagctttgcgttgctctccaacgcggcaagcaagccaaggacggcttgcaccaatacagaatcatcacacaacagattccctcgtcgttggaagttgtgttgaaga

SEQ ID NO: 183382 - DNA, 267 bp, Glycine max
cgagccgtgccatttggcacaatgtttgctctgatctttttatggactgggatctcggttccacttgtttttgtgggtagctatgttggattcaagaagcctgcaattgagaatcctgtgaaaacgaacaagatcccaagacagatcccggagcaggcatggtacatgaacccagtgttctcagttctgattggtggaatactcccatttggagctgttttcattgagcttttcttcatcctcaccccaatctggttgaatcagttt

SEQ ID NO: 183383 - DNA, 270 bp, Glycine max
cacatcttttctcctggatgttttaaagccgaatctaccagaacatgggttccttcagacaaaggtgttggagataaatctggtgactttccccaatgttgctgatgcaatattggctaatggcatgttcagccattatgaccgtcctcgtattgcccaactttgtgaaaaagctggcctttatgtgcgagctttgcaacattacacagaattaccagacatcaaacgcgtgattgttaatacacatgcaactgaactcagtcactcgta

SEQ ID NO: 183384 - DNA, 274 bp, Glycine max
  unsure (1)..(274): unsure at all n locations
cgaaagccatagtttgttacttctcttcgccttttgctttgcaattgtcaccaaacaattcttgcttagctctcacaagcaagcattatcaacaatgaagaaaattgtgttaaaggtggacttacatgatgacaggatcaagcgaaaagctatgaagacagcatctggcctttcgggggttcaatcagttactgttgacattaatgacaagaaaatgaccttattgggggatgttgatccagtgagtgcagtgtcanagctacgacagtggtgt

SEQ ID NO: 183385 - DNA, 267 bp, Glycine max
ggacatgcatctatggtggggttcctaagggactcaggtgcgtgatctccagaaaggtgtcgaaattgtaattgccactccaggaaggttaattgatatgcttgagtcaaatcataccaacttgcagagggtcacataccttgtattggatgaagctgataggatgttggatatggggtttgatcctcagctacggaagattgtctctcagattcgtccagatcgtcaaactttgtattggagtgctacctggccaaaggaggttga

SEQ ID NO: 183386 - DNA, 273 bp, Glycine max
  unsure (1)..(273): unsure at all n locations
cactagttctagatcgcgagcgatctagaactagtttctgcttgatcngtttccttttcaagagcttgtctggtttcatagtcttcttctacgctgggtgaactactgatttttgtcactcaggctcctgtaaattatgtttctctccgttgtgtaaaacctagtttgaggccactgtctatggctatatctactgtttcaatccatgtctttggtgatgtgccttcctcaccacttgttggggtcctgcaggatcatatcaacgactggagg

SEQ ID NO: 183387 - DNA, 273 bp, Glycine max
acagcacggtggtgacgaccatggttagagacgatctatgcatcaccgttcccagcttcttccgctgccctatctccctcgacgtcatgaaatcccctgtcagcctctgcaccggcgttacctacgaccgttccagcatccaacgctggctcgacaacggcaacaacacctgtcccgccaccatgcaggttctccaaaccactgatttcgttcccaaccgaaccttacagaggctcatccagatctggtctgactcggtcactcaccgagtcg

SEQ ID NO: 183388 - DNA, 271 bp, Glycine max
ctattctctcgcattccgtggagatctagtgctcctgctgcaagacctcgctgaaaattagggtttcgattcggaggtagacgaagatgttcggaagggctccgaagaaaagcgacagaccaggtactacgaaatcctcggcgtttccaagaacgcttcgccggatgacttaaagaaggcttacaagaaagccgccattaagaaccatcctgacaaaggcggggatcccgagaagtttaaagagcttgctcaagcctatgaggttctgagt

SEQ ID NO: 183389 - DNA, 270 bp, Glycine max
tgtgagccatcaagtcatccatataacaaccttggtccaagagatgtgtgcacccaaagtcaccaagagcttgcccttgaagccgcaagacaagggattgtgcttcttaaaaacaaaggtccttctttgcctctctccactaggcgtggccgcactgtagctgttattgggcccaattctaatgtcactttcacaatgattggcaactatgctggtattgcttgtggatacactagtcccttacaaggaatagggacatacaccaagaca

SEQ ID NO: 183390 - DNA, 266 bp, Glycine max
tggaaatgcaatcggcagctgaaaaccctaattacccggcgctggactacaagcgaccttccatcttgtcatttcctcggaggcccgccctcagagttacatccgagttcgatagtgaaagcgcagtcttcttccataagatttcctgcaagttgttggacagccttgccaagttcaagttttcgttcaaccacagcggtaaggccggcgacatctccgaacctcaattcagctttgtctccaagcaccttagcctccactacgac

SEQ ID NO: 183391 - DNA, 262 bp, Glycine max
atttccatggcggcggcgacgaacttgttagcaacactgggggatctggagacggactccatcgtggctcttctttcgaagctgatcgctgaatcgaagtacgtccagaacaacccgccggagctcattccccaagaggacagagtggtgaagcacgtcttggacgttctgttaccgttcagcaccaccaccggcggtggacccttgctcgtaaaccacgtcacctaccacgccggcagagggaacctcatcgtggagtacc

SEQ ID NO: 183392 - DNA, 265 bp, Glycine max
gttgttgaaaagaaaccctagcaagtggagcaatggcagacgttgaagtcgatgtggcggcagcagcagcagcagggctgccgaagaagagaacgttcaagaagttcagttttcgaggcgtggatctcgatgcacttctcgacatgtccaccgatgaactcgtcaagatgttcagtgcccgcgctcgtagcaggttccagagaggcctcaccagaaagcccatggccttgatcaagaagctccgtaaagcgaaaagggaagctcc

SEQ ID NO: 183393 - DNA, 254 bp, Glycine max
ttcaaagattgcagtatgttgcatttacttcattgttaggatttgcattgtgcatcacatggaatattgtagctggtcacttcagcttggattaagggagaaggagtgaaaatatggtttcttgctattatctacttcatagcaggaattcctggagcatatgtcttgtggtatcgcccattatatcgtgcttttaggactgacagtgctttgaattttggatggtttttcttgttttacctgcttcacctagg

SEQ ID NO: 183394 - DNA, 258 bp, Glycine max
cgcttgctcccacaagagcttagagagcgtgtgagacgatatgatcaatacaagtggttggcaacacgtggtgtagatgaagaaagtttggttcagagtttcccaaagggtcttcgaagagacattaagcgtcacctttgtctggctctagtgagaagggttccactatttgagagtatggatgagagattgcttgatgccatatgtgagagactgaagccatggttatttacagagagtacttacattgttcgtgaa

SEQ ID NO: 183395 - DNA, 262 bp, Glycine max
ccccacggggcaaattgagttgggtgttggaaaggcagagcaagcctagtaacataatcaaacatggcggttaggcaaagagccgtgtctggacttccaactcttctacgcactctccgcaaagaacctttgaagcctcgcaaccacgcacacgtcaatgccttggcctctcttcgacgcgacttctctttgtacgatcagctcaacctcatcgatcaagtccccgcagaccagctccgatttcaagggttcctaccaaccc

SEQ ID NO: 183396 - DNA, 263 bp, Glycine max
cttgtttcttttaagatatttttggtcacatagtttatggtctgcctctgcgtagtgcttcaacagccccctgctcgctcgatcatcttgattattttttaagccttttaaatgcccaacatcttgttcttgatgtttgagattgatgtatccaattcttagtgaaatcttcttttccgggtgtatgatcaattctactgtgagacgacgcaggacccatttagttcaatccttctccgttgcttttctttactggctctact

SEQ ID NO: 183397 - DNA, 259 bp, Glycine max
ttaaggatgctgctatggggaagaggagcaagattacgcgcgatagggatcgtgatatcagtgaaaaagttgctcttggtatggcttctaccaagccgggtactgaggttatgtatgatgagaggctgtttaaccaggataagggaattgcgtctgggtttgccactgatgatcagtacaatgtgtatgagcatgggttgtttactgcgcacccacaatttccacattgtataggccgaagaagaatattgatgatgag

SEQ ID NO: 183398 - DNA, 245 bp, Glycine max
ctcgttttgttcgcttcagtctgcaacgtcgctatgtcggactccaccgccacacccctcgaccagcacgccaccacgggctctgaccctagtgcgccacggttcacatcgtgtacaccgagagaccacagaacgaggagcctgaggcctaccacatcagaaccctcacttcagtccttggcagtgaggaggctgcaaaggaagctttgttgtatagttacaagtctgcagccagtgggttctca

SEQ ID NO: 183399 - DNA, 260 bp, Glycine max
cctttctacaacactggtgctttgtgctgggttaagtccaacgccaatctgaagcagcaagtgggtttggcaccaagacccatttgttcatttgaggggaataatcagaggaagtttgtggcaatggcttctaccgttcctgtggagcaagtcaacaatggccccctgcaggtgacaggtgactccttcatcagacagcatctgaggaagttggctccttatcagcccattttgccctttgaggttttatcagctcgcct

SEQ ID NO: 183400 - DNA, 255 bp, Glycine max
atccttcggttgtggatgcttctgattgtctctttggtaagcaaggaactttctatagggatcttgactttgcccttgtgttgaattgtgagagaaggccaaccataattgatctccctcccaccaagttcaatgattccgaccttgggaagattccttttgttgccggaatggtactattttgcctccgtccatggatcctagcatgtctgcttcgagattccaaatgcaggtcttcaagatgccgccggcgct

SEQ ID NO: 183401 - DNA, 255 bp, Glycine max
ggttgccgtgccaccatcttctccaaagttatcatattcgaagagaaaaaaggagtgactgtccaggttgggcaattagggacggaaaaggagaaacacgaaaatgtttttccacatagtactggagcgaaatatgcagcttcatccacgctactttggtcgtaaccttcgcgataatctcgtttccaagcttatgaaagacgtggaaggcacttgcagtggccgacatggatttgtggtggcagttacagggat

SEQ ID NO: 183402 - DNA, 240 bp, Glycine max
ggggacacataaacccggcggtgacatttgggctgtttttggcgaggaagttgtcgttgcccagggcgattttctacatcgtgatgcaatgcttgggtgctatttgtggcgctggcgtggtgaagggtttcgaggggaaaacaaaatacggtgcgttgaatggcggtgccaactttgttgcccctggttacaccaagggtgatggtcttggtgctgagattcttggcactttcatccttg

SEQ ID NO: 183403 - DNA, 247 bp, Glycine max
cgcggagttcagcggcaccaccaccaacgccagcgcaatcgcgcgtcagatccttgaaaaaatccccggcaacaacgacacgcacgtttcttactctcaggatcgctacatcttccatgttaaacgcaccgatggactcaccgttctctgcatggccgacgacaccgccggaaggcgaattccttttgcgtttcttgaggatattcatcagaagttcgtgcggacttacggacgcgccgttcactcc

SEQ ID NO: 183404 - DNA, 246 bp, Glycine max
ggatttcaatcgttgttctctccgaaaacttcgcttcttcctcgtggtgccttgaagaacttgtgaagatccttgagtgcagggaaacaaagaagcaactcgttattccaatcttttaccgcatggatccctccgacgtaaggagacagactggttgttatggggagagcctggctcaacatcaatatgagttcagaagcgactccgagaaagtacgcaattggcaggaagctttgactcatgtcg

SEQ ID NO: 183405 - DNA, 246 bp, Glycine max
gtacgcggtgatatttgcggaaatgttcgtgatcgtcagcctcctcttcaaaactccggcgaggaagctggtgatcgtcacattggatcggctcaagcgcggtcgcggccccgttgtcgtcaagaccgtcgccgccacgctgctggtggtgctcgcttcctacctctacagcatcgcaaaaatccggcatcggaacctcgatgctcccgtcgctaaccccaccgaccaagtcctcgtgtacaagca

SEQ ID NO: 183406 - DNA, 249 bp, Glycine max
cataaatggctactgaacatgaagacgatttcaaggatgagaagaatccccgccccctcgacgaggatgacatcgcccttctcaaaacctatggtttggggccttattccacaagcataaaaaaagtcgagaaggaaatcaaagacatggcaaaaaaggtcaatgatttatgtggtatcaaggagtctgatactggtttagctgcaccaagccagtgggatcttgtttctgataaacaaatgatgcagg

SEQ ID NO: 183407 - DNA, 247 bp, Glycine max
cgcaaggcgtgcaccaacggcgagtgtggtgacgggacttccatggccaatcacttcgagcgacactattgcggcaagtgtggcgtgacctatgtctagcagaaggccgatgcttaaattcgttggaagtgaatccactgtggtgctaaatacattgtagttattcaaaagttctggttaatgtaattgtgcaattagcgttatgagtgtctgggcgtagactagacctttatgaatactgtttcgc

SEQ ID NO: 183408 - DNA, 248 bp, Glycine max
cggctcgagataagctacgacgttccatcgggacgaagagatgggcgtgtctcgatcggcgatgaagtgctagacaatcttcctagaccatccttgagcgctgatgatcttattagtaactttgagcgaaagggtttgtcagcagatgaaatggtgacactctcaggagcgcattcaatcggtgtgtcccattgtggtgccttctcgaatcgcttatactctttcagtgacacagtcacacaagatcc

SEQ ID NO: 183409 - DNA, 255 bp, Glycine max
agattattaatttgctttataagaatgggtactatgttaaaatagaagaagtggctcaatttctccttaaaagaggaaagctgtcagaagcatgcaaattgttgctttttagtttggaaaatcaccagaatgttgatattgatttgtgtaatgcaactattttgaatctttgtaaaattaacaaggtttcagaagcatttagtttatgctatgaattagtggagaacggtttacatcagaaattgacatgtctag

SEQ ID NO: 183410 - DNA, 246 bp, Glycine max
tcaagattcaggtactgcgtttcggaagcagacacagatggctcgtacgaagcaaaccgctcgtaagtccacaggaggaaaggctcctaggaagcagcttgcaaccaaggctgcacgtaagtctgcaccaactactggtggtgtgaagaagccccaccgttatcgtcctggtaccgttgctcttcgtgagattaggaaataccagaagagtaccgagcttttgatccggaagctccccttccagag

SEQ ID NO: 183411 - DNA, 243 bp, Glycine max
gagaatttgaaaaactcggtcaagaacactgtgagccaagtttccaaaaggattcttaccacaggtgtcaatggagaactccatccttcaagattttgtgaaaaggatctgctaaaagtggttgatagggagtacgtattttcctacattgatgacccctgcagtgctacatacccattgatgcaaaaacttaggcaagtgcttgtagatcatgccttggtaaatgcagagaatgagaaggat

SEQ ID NO: 183412 - DNA, 241 bp, Glycine max
attttcatggaactgatggatcgaaagcctttgtttcctggcagagatcacgtgcatcagttgcgtctacttatggagctgattggcaccccatcagaggctgatttggggtttctgaatgaaaatgctaagagatacattaggcaactgcccctttaccgccgtcaatctttccaggaaaagtttccacatgtccatcctgaagctatagatcttgtagacaaaatgttaacttttgatc

SEQ ID NO: 183413 - DNA, 247 bp, Glycine max
cttcttacaagttacatccattgagaaacatgaaggtctcccccttagcattttcaatcctttttttgtccttcaccatagaactcttcattggcattgcttcagcagcacaagaaccagtgcttgacacctcaggccagacgctgagaacaggtgtcaagtactacattctaccagtcttcagaggcagaggtggaggcctaacagtttcaagcagtggcaacaacacatgccccctctttgtggt

SEQ ID NO: 183414 - DNA, 248 bp, Glycine max
aagatgaaatcctctcttatcttgttatttatgatctgtggtggagtgattgcaactcctccagaggatccaattccgtgttcttcaaagaacacagactgcaccatcacaaacacctatggcgtctttccggaccgaagcatttgccacgccggtgaggttatgtacccaaacacagaggaggagctcatatccgcggtggcctcagcttcgaagaacaaaagaaaagtgaaagccgccacgcgctt

SEQ ID NO: 183415 - DNA, 251 bp, Glycine max
cacacaattcctacacatttctactctttagtttctccaattttctttctcaattctcaacaatggccactacaacacaacttcacttaccccctggattcagattccatccaacagatgaagcactcgtcatccactacctttgtcgcaaatgcgcttcgcaacatatcgcggttcccataatcgccgaaattgatctgtacaagtacgacccttgggaccttccaggaatggccttgtacggagagaaa

SEQ ID NO: 183416 - DNA, 254 bp, Glycine max
ggagtcatctcactgctgagggcgatgtcgagttcaaggcagtcctgtttgtaccacctaaggcacctcaagatttatacgagagctattataacgcaaacaaatccaacctgaagttgtatgttagacgtgtgttcatttcagatgaatttaatgaactgttgcctaagtacctaaactttttgctgggtcttgttgattctgacacattgccacttaatgtatcgcgcgacatgcttcagcaacatagtagt

SEQ ID NO: 183417 - DNA, 240 bp, Glycine max
gcgatcacctttctgcttattcaaaagaaccccttagtttttctctgaggttgaagattgctctaggatcagccaaaggtcttttatatctacacacagaagctaatcctccaatattccaccgagatgtgaaggccagcaatatattattggactctaggtacacagcaaaagttgctgattttggactttcacgacttgccccagttccagatactgaaggaaatgtacctggtcatg

SEQ ID NO: 183418 - DNA, 243 bp, Glycine max
gttccttttgaaggttagaagtgctacaatacaaacaatggcagctactcaggaagatgtgaagcttttgggtattgtgggaagcccatttgtgtgcagggtccagattgcccttaagttgaagggagttgaatacaaatttttggaagacaatttgggcaacaagagtgatttgcttctcaaatacaaccctgttcacaagaaggttccagtgtttgttcacaatgagaagcccatagcaga

SEQ ID NO: 183419 - DNA, 245 bp, Glycine max
  unsure (1)..(245): unsure at all n locations
gaaggactttaggttgggatttgggaattagggttattcgcgtggcgaagatgattgaggtggttttgaacgatcgattggggaagaaggtgcgcgtgaagtgcaacgncgatgataccatcggcgacctgaagaagcttgtcgcggctcagactggcacaagagccgacaagatccgcatccagaagtggtacaccatctacaaggatcacatcactctcaaggattacgagatccatgacggc

SEQ ID NO: 183420 - DNA, 240 bp, Glycine max
ccgcccccaacggcgacatcgccgccttaaccaaaatcgactcggcgaggcagtgggtggcgacgcacatcaaaccctttcaccctcagaccaaaattaattacatcctcgtcggcagcgaggttctccactggggcgacaccaacatgatccgccgcctcgtccctgccatgagaacccttcactcagccctcctagccgagggcataaccgacattaaggtaaccactgctcactctc

SEQ ID NO: 183421 - DNA, 241 bp, Glycine max
ctaagaagagctataatgcgacttttggaggacagcatggctgagaagatgcttgctagagagattaaagagggtgactcagttatagttgatgctgactccgatggtaatgtgattgtgctcaacggtagtagtggtgccccagattcattagaagaagctcttcctgtgtaacgtggttgtcttagttagttgagttgtatttttttctctcttttatttgttaaaagaaacatagcaa

SEQ ID NO: 183422 - DNA, 247 bp, Glycine max
gcagacttctcccgggaaaaaaagtaggtaaaaaaatatgctaagtataaattgtctactgatgaaatacgaaagctgatgatattgaaaaaaaaagaattgtaaataaggttcaggttcgacttccatagagaatatagatgatattgtctataatgatagacaaaaaataaaaaactttcgaaagattttatccaattgaaattttaaaaatgactgggataaacttaagacttcaattattgaa

SEQ ID NO: 183423 - DNA, 243 bp, Glycine max
accaacctcagttgtgcctcgagcccaccagaaacataacaaagaagcactacagaggagttcggcgccgcccctggggaccatacgccgctgagattcgcgactctgcccgccacggcgccagaatatggctcggcaccttccaaaccgctgaagaggctgccatggcttatgaccgagccgcgttcaagatgaggggctccaaggctttgctcaatttcccagctgaaattgttgctgcaa

SEQ ID NO: 183424 - DNA, 250 bp, Glycine max
cgccacttctgaatctattgaatcaacaatcatgtcggacgaagagcaccatttcgagtccaaggccgacgccggagcctccaaaacctaccctcagcaagccggtaccatccgcaagaacggctacatcgtcatcaaaggccgcccctgcaaggttgtggaagtttcgacttccaaaactggaaagcacggtcacgctaagtgtcactttgttggaattgatattttcactgccaagaaacttgaggat

SEQ ID NO: 183425 - DNA, 233 bp, Glycine max
cggatcgaggcaggagcgttctggatttgaagggacctggacctgtaatcctcttattttcgacgactcatacttcacggagttgttgagtggtgagaacggaggtctccttcagctaccttctgacaaggctctctttgtctgaccctgtattccgccctctcgttgataaatatgcagcggacgaagatgccttctttgctgaatgcgctgagggctcacaaaagctttcc

SEQ ID NO: 183426 - DNA, 213 bp, Glycine max
ggcatctacaaatatgttaacgatgttgtggaagggctacttgcaccagaccacaaaatcgggagatttatatcagatgctgtaggttcccttcccaaattgtccccatcagtttttgataagcttgtgaatgacagtttgcaggatcacttgcttttgctgtatttatctagtattacaagaacgcagcttagcttggctgaaaaattgaac

SEQ ID NO: 183427 - DNA, 238 bp, Glycine max
ctaatttctcgaaaggtagggttttgcagagcctcgtcctcctctcacggtttcttctttttatcttctcacctttcttcttccactgctctaatctaagatgggcaagtcaagcaagaaatcagctctcaaggtcgacgctgttccagctgtggttccgccatccaagtctgccaagaagggaggcaagagacaagctcaagatgaaattgagaagcaattgagtgccaaaaaacag

SEQ ID NO: 183428 - DNA, 239 bp, Glycine max
ctaacgcgtgcatagcagagtcagagacagagacgcagccatgcggcggagacctgcgaggtgttataggcaaattaagaacaagccataccccaagtcacgtttctgccgtggtgttcctgatcccaagatcaggatttatgatgttggtatgaagaagaagggtgttgatgagtttcctttctgtgtccatctggttagttgggagaaggaaaatgtttcaagtgaggccctggaag

SEQ ID NO: 183429 - DNA, 249 bp, Glycine max
ccgagtttttggctttagaagctgaaggcatatagttatcacaatggggagagctccatgctgtgagacaatggggttgaagagagggccatggactccagaagaagatcaaattctcatcagttacatcaacacttatggccatgctaattggcgtgcactgcccaaactagctgggctattaaggtgtggaaagacttgtagactccggtggataaattatctgcacaccggacatcaaacggggca

SEQ ID NO: 183430 - DNA, 230 bp, Glycine max
tagaacccttccacggtggtgactgcgcgatgggtgcctacaagtatgtttcagagctatggcgcaagaagcagtctgatgtcatgcgcttcttgcagcgggtgaggtgctgggagtataggcagcaaccttccattgttcgcttgacaaggtcgacccgccctgacaaggctcgtcgcttgggcttcaaggctaagcagggctatgtgatacggcgtgttcgtgttaag

SEQ ID NO: 183431 - DNA, 242 bp, Glycine max
ctcgagccgtgacattatagatcgtgtgcctaaaattgatcctgatgatacctcagcattgaagccacccaatgtatatggaagcctcgagttaaaaaatgttgatttttgttacccatctcgtcctgaagtgttggtattgagcaattttagcctcaaagtcactgggggccaaacagttgctattgtgggagtttctgggtcaggaaagagcactataatatctttgatcgagaggtttt

SEQ ID NO: 183432 - DNA, 281 bp, Glycine max
ctcgagcgcgctaaccaagaaggaactagggttttacagaatacaagctctctctctctctcgtcggttttcgtcaatcaaatccaatccaatatcaaatatgagtcgtcatcccgaggttaagtgggctcagaggcttgacaaggtctatatcacggtgcaattggctgattcaaaaaatgcaaaagtggatcttacgccagatggtatttttaccttctccggtagtgctggtgctgaagaccatcagtatgagctaaaactggagctctttgataagg

SEQ ID NO: 183433 - DNA, 276 bp, Glycine max
ctcgagccggtctacacctaattagccaaacacaccacagcaccaaactagttggctcaattctctttgaatggctttggaggctttgaattcaccaacagcagccaccactcccttccgtggttaccaagaagaggaggaggaggttgaccttcacctacgcgagccttgggccaagagaaaacgctccaaacgacctcgttttgagtcggaggaagagtacttggctctttgcctcatcatgcttgcacaaagcggtaacaacaacaacaccca

SEQ ID NO: 183434 - DNA, 274 bp, Glycine max
caaaaacttaagttcattccttgtgttttgctttcttcctcaaaaccaaacatgtcgaacacatgcggcaactgcgactgcgctgacaagactagctgcaccaagggaaacagctatggtgttattgtagagactgagaagagttacatcgagactgttgtcatggatgttccagcagctgagcatgatgggaagtgcaagtgtggcactaactgcacttgcacggactgcacctgtggccattaaggaatatgtatgacaatgtaattgccat

SEQ ID NO: 183435 - DNA, 272 bp, Glycine max
cgaagagccggaaaaggactccgcctcgtcggactacgatcttaaggctattccggggaaagcaatttatggagctagcgacgcgctaccaaaccctaagcgcgtgaaagccgacgagtcaaggcgcgcggtggtggtcgttgactcgcaggagaacgggatccgcctcgtgcacagcctcatggcgtgcgcggaggccgtggagaacaacaacctcgccgtggcggaggcgctggtgaagcagatcggcttcctcgctgtgtcgcaggttg

SEQ ID NO: 183436 - DNA, 273 bp, Glycine max
gctgcaatggcttcaagtcaggaggaggtgacccttttgggagctactggaagcccatttgtgtgcagggttcatattgccctcaagttgaagggagttcaatacaaatatgtcgaagaaaatttgaggaacaagagtgaactgcttctcaaatccaacccagttcacaagaaggttccagtgtttattcacaatgagaagcccatagcagagtctcttgtgattgttgaatacattgatgagacatggaagaacaaccccatcttgccttct

SEQ ID NO: 183437 - DNA, 272 bp, Glycine max
cgtgattatggattgatcaataacattcaccatgacattggaactcatgtcattcatcacctatttcctcaaattccacactatcacttagttgaggctactgaggcagctaagccagtgtttggaaaatattatagagaaccaaagaaatcatctcctcttccttttcaccttattggggaattaataaagagcttcaagactgaccattttgttagtgacaagggggatgttgtgtactatcaaactgactctgagattaatggctcgtc

SEQ ID NO: 183438 - DNA, 268 bp, Glycine max
aaacaaggcatttcaattatcgtgtcttcttggctctctgtttaggatcgacatggatttcttttttccattggcaatacttgtgatgatattaggcacaccatactctagtgcttctggaaagagtgaaagtaatgtgaaaacagctgtttttctgtctcctaagtttgaacttggaccgggatcggttgcaaataaatatgattatgatattgattttccaagaggtcatatagcacttaagagtttcaatgcagaggtagttgat

SEQ ID NO: 183439 - DNA, 269 bp, Glycine max
cggagatgaaggatggagcccaagttgtgctgaatgataatggtaactacggcaaattctcacacctacttgcttcccaagatcgtgattatcttctctctccaactggggctcaggtgaaagtttctgatcttgaagggagagtagtgggtctattattcgctgcgaattggtacccaccatgccgtggattcacccaaatcctagttggaatctacgaggagctgaaaagcagagtccctcaattggagattgtgtatgtgtcctct

SEQ ID NO: 183440 - DNA, 280 bp, Glycine max
cggaagacagagaccgagagagagatatcgagagaagacatatacactgccaagaagaagaacatgaaaattcagtgcgatgtgtgtgagaaagccccggcaaccgtgatttgctgcgcagatgaggcagctttgtgtgccaaatgtgacgttgaagttactgctgcaaacaagcttgcaagcaagcagcagaggcttctccttcaatctttatgtaacaagcttcccagatgtgacatatgtcaagataagccagctatcacatattgtgttgaggaca

SEQ ID NO: 183441 - DNA, 275 bp, Glycine max
ctccctttcctctccgaaccctcgatcactctcacgcgctcctatattcgctcctccaccgtcgctctctcgaacaaccacaacaccatcttcatcacatggcaaacgcagcatctggtatggcagtccatgatgactgcaagttgaggtttttggagctgaaggcaaaaaggacacaccgtttcatagtttttaagattgaggagcagcagaagcaggtcattgtggagaagcttggtgagcctgcccagggctatgaagatttcactgccagc

SEQ ID NO: 183442 - DNA, 273 bp, Glycine max
ctaatctattaggcgctgttctctcgtcttctacaaaattttctgttcgatctcaaccaaggttgttccttccaccgccatgagtttcatcttcggaaagcgaaaaacacccgcagagcttctgcgggaaaataagaggatgctggacaaatcaatcagagaaattgagcgcgagcgtcaaggcttgcaaacgcaagagaaaaattgattgcggagataaagaaaagtgccaaacagggccagatgggagctgttagagttatggcaaaagat

SEQ ID NO: 183443 - DNA, 270 bp, Glycine max
gttcacagagagaatggctgcggaaaacgttgttgagttcacagacttacccgtcaagaggccaagagaagaagaagaaggaaccaatggcgtctccaacgacgccgtttcagcgctccccaatgaccctcaataccctggcatctctgcggttattcccggttggttctccgaaatcagcccaatgtggcccggtcaggcacattccttgaagatggaaaagattttgtttcaagggaagtctgactatcagaatgtcatggtcttcca

SEQ ID NO: 183444 - DNA, 265 bp, Glycine max
gaagaaaccaaatgctgctatacgtgatgctgacactgccttgaagattaacccagactcagctaaaggctacaaaatacgaggaatgtcaagggctatgttgggactatgggaagaagcagcaagtgaccttcacgtggcttcaaagttagattacgatgaagagattagtatggcacttaaaaaggttgaacctaatgcctctaaaatcgaggagcataggagacaatatgaacgcttaagacagcaaaagcaacagaaaaga

SEQ ID NO: 183445 - DNA, 264 bp, Glycine max
cgcagatccaccaaccgttatggctgccttcagcggtgatgaaacggctccgtttttcggcttccttggagccgcagctgccctcgtcttctcctgtatgggagctgcctatggcacagcaaagagtggtgtgggcgtggcttccatgggtgtgatgagacctgagctggtgatgaagtctattgtccctgttgtcatggctggagttttgggtatttatggccttattattgctgttattatcagtaccggtattaatccaaa

SEQ ID NO: 183446 - DNA, 266 bp, Glycine max
cggctcgagttcagatgctcctccagtgagttgcatagtttctgatggtgtcatgaccttcactcttgatgctgctgaagaattgggtgtccccgaggtgctgttttggaccactagtgcatgtggatttatgtgttacgtgcaataccaacaactcattgaaaaggacctaacacctctcaaagactctagttatatcacaaatggttatttggagactaccatcgattggataccaggcattaaggaaattcgattgaaggata

SEQ ID NO: 183447 - DNA, 267 bp, Glycine max
ctcagatatcggctgaggagcaggatgaaatgatgacgaacttggagcgccgagaaactgagtacatgaggcttcagagacgtaaaattggaatggatgacttcgagcagttaacggtgattgggaaaggtgctttcggtgaggtgaggttatgtcgtgctaaaggtacgggagagatttttgccatgaagaaattgaagaagtcagagatgcttagtcgtggacaggtggaacatgttcgatctgagaggaacttgctggcagagg

SEQ ID NO: 183448 - DNA, 275 bp, Glycine max
ctctcagattcagcaattttctattttctcctctcatggcttcagattccaaaaaggatttccctgctgatgacaaagctggaacagaagagagtaaaacatccaaagatgagacttcatctaaagattctccagcagaacaaagagcgacagtacttttggacctagacctggacctgctgggcatccaggcaacccttttgatctctcagcaatgtctggtctgctcaatgatccaagtatcaaggaattggctgaacagatagcaaaagatc

SEQ ID NO: 183449 - DNA, 271 bp, Glycine max
gctaccaaagctttagagtgtacaaatatgagtaagatcctggacagggtggtatctgtggagtatgctctgagggatgatggtgagaggggtgacaattatgacagtcctagaagaagagggggttatgagagatcacccagtccttatcacaggcgaccaagtcctgactatggtcgtccacgcagccctgtctatgataggtacaatggtggtggaccagacatgcggaggagtcctgattatggcaggcacaggagtcctgactatg

SEQ ID NO: 183450 - DNA, 272 bp, Glycine max
ctcgagccgtccgagttgggcagcttgttattctcagtgtacctggagaatttacaacaacggctgggaggcgtcttcgtgatgcagtgaagacagtgctaagtggtaacaaaggctttggtagcaacattcatgttgttatagcggggttgactaatacttattcacagtatgtgactacatacgaagagtaccaggtgcagagatatgagggtgcttccacactgtatggtccacacacactgagtgttctacattcaggagtttacgac

SEQ ID NO: 183451 - DNA, 265 bp, Glycine max
cctcgagccgctcgagccgattcggctgagttgacatttatgatggtttacgtgtggagcaaacaaaaccccttcattcacatgagcttcctgggtctctttactttcactgctgcctaccttccatgggttctcttggggttctctgtactcgttggtgctagtgcttgggtggatctactggggatgattgctggtcatgcatattattttcttgaagatgtttatcctcggatgacgggtcgtaggccgctaaaaacaccat

SEQ ID NO: 183452 - DNA, 260 bp, Glycine max
ccaaacatccatatcaaactcatcatcatcctagctttcttaatttccctctctttaacaaacgtcgtcgtttcagctcgactctttcccaacgtctcctcctggctcaacgcccacgcccctactggaggcgcgtgggatgcctttctcaactttaccggttgtcaccgcggcgacaagtacgacggcctcgccaatttaaaatcatactttgaacgattcggttacttccctcacgcgccgccctcctcgaatttctc

SEQ ID NO: 183453 - DNA, 269 bp, Glycine max
ctcgagcgaatcggctcgagggcgagtcagagaaaccctaggtcagaagaacagatgcccgctggtcatggtttgagatcccgcaccagagattccttctctcgtcctttcaggaagaagggaaccatcgccctcaccacatacctgagaacctaccacgtcggcgactatgttgacgtcaaggttaacggtgccgttcacaagggaatgccccacaaattctaccatggccgcaccggacgcgtctggaatgtcaccaaacgtgctgt

SEQ ID NO: 183454 - DNA, 267 bp, Glycine max
gagaatgctaatgttatcatggctacatatgaagatccactacttggtgatgttcaggtctacccagagaaaggaacagttgctttttctgctggtttgcatggctgggcttttaccctgactaactttgccaagatgtatgcatccaagtttggagttgatgaaggacagatgatggaaaggctctggggtgaaaacttttttgatgcagccacaaagaaatggaccagcaagaatagtggttctgctacctgcaagcgtgggttt

SEQ ID NO: 183455 - DNA, 268 bp, Glycine max
tggcgatccatacattctacacaccaatgtgttcagccaaggcaagggcaacagagagcaacaattctatctctggtttgacccaactgcagatttccacacttattcaattctttggaatccccaacgcattgttttttctgtggatggcacccccatcagggaattcaagaatttggaatcaataggagttccttttccaaagagccaaccgatgaggatatactcaagcctatggaacgctgatgattgggccacaaggggtgga

SEQ ID NO: 183456 - DNA, 142 bp, Glycine max
cgctgctccttgcagctctaattctatcccctcaagttcttgcaaactatgagaatcccccagtgtacaagcctcccactgagaaaccaccagtttataagcccccagttgagaagcctcctgtttacaagcctccagttga

SEQ ID NO: 183457 - DNA, 262 bp, Glycine max
tgaagtgttcggattgcggcggaggagaagaaggttgttccggcgaaggggaagcactaccgcggcgtgcggcagcggccgtgggggaagttcgcggcggagatccgcgacccggcgaagaacggagcaagggtttggctggggacgtttgacacggcggaggacgcggcgttggcgtacgaccgcgccgcctaccgggtggggacggtgcaagagcaagtggggagtcaagtggcagagtgtacacgtggcgagcagttat

SEQ ID NO: 183458 - DNA, 265 bp, Glycine max
gaccaaatggtagtattgatcgctataaggctcacttggtggacaaaggatacactcagatttttggccctgactacagggacaccttttccccaatggccacaattgctcatgtccatcctcttcttgctatggctgccattcaacattggtctcttcaccagctaggcataaaaaatgccttcttgcatggtgagttgcaagaattttatatgtctcaaactccaggttttatagtttcaggtgactctcggttaatttgttg

SEQ ID NO: 183459 - DNA, 279 bp, Glycine max
cggcattcggctcgactcgagcgaatcggctcagaaaaaaagggggggaaatttcaacggcgtcaagggtttctctgaaggcgaagggtaagagttcaaagggatcgaaggccgcggaagatcgatctgcgagcgagtgcctgaaggagtggacgacatgggcaatgcgaaaagcgaaggtcatcactcactatggtttcatccctttggtcatcatcatcggtatgaactctgaccccaagcccccactttcccagcttctcagccccgtctgatcta

SEQ ID NO: 183460 - DNA, 267 bp, Glycine max
gggaatcttcttccatggcctccaagcggattctgaaggagcttaaggacctccagaaagactctccaacctcttgcagcgccggtcctgtagcggaagatatgtttcattggcaagcgactataatgggtccccctgatagcccttatgctgggggtgtttttctagttactattcattttcctccggattatccattcaagccacccaaggttgcatttaggactaaagttttccacccaaatatcaacagcaatggtagtattt

SEQ ID NO: 183461 - DNA, 269 bp, Glycine max
ctataataaagccatggaagctcaaacctggttcttggttattgccttattcctcttccttctactcaatcggcttgcaaaatatctcaagccaaaacctaatgctggtcacaaacttccccctggtccaaaaaagctacctctcgtaggaaacatgcatcaactagcagcagcaggtccactcccacatcgtgcactccgagaacttgctcataaatatggacctctgatgcacctccaacttggtgagatttctgcagtggtagtat

SEQ ID NO: 183462 - DNA, 270 bp, Glycine max
ttcggctcgagtctcatcccagtttcactttctcattattttctctcctattgataaagaaacagagagagagagcaaaaaatgcctgcggtacgaggtattagcaacggagggggcaatgagtaccctggaagcctcactccttttgtgacggtaacatgtatacttgcagccatgggtgggttactcttcggttacgatatcggaatttcaggtggggtgacatccatggatccgtttctgctcaagtttttcccgtcggtgttccgg

SEQ ID NO: 183463 - DNA, 271 bp, Glycine max
atcgatgttccttcattctttctctgccccatttcgttagaaatcatgaaggatccagtgacggtctcaacaggcatcacctacgaccgtgaaagcatcgaaacatggctgttctcgaagaaaaacacgacatgccccatgaccaaacagcccttgatagattacaccgatctcacaccaaaccacacccttcggagactcatccaagcgtggtgtaccatgaacacttctcacggcatcgaaaggatcccaacccccaaaccccccatta

SEQ ID NO: 183464 - DNA, 264 bp, Glycine max
ctgggagatgccgttgctttaatcaaaggggtgggaaagaatttgcggaggaaagaaaggagggtacggatagagcagattagagctagtcttggcttgtcagattcacagagaacaccctcgccaggagaatccttgaaggatttctacaggcgtacaaatatgtattggcaaatggcagcccatgaacatactcaacacactggaaaagaactccgcaaggatggttttgatcttgctgaagctcggtacagggagctaaaa

SEQ ID NO: 183465 - DNA, 264 bp, Glycine max
ggcaagaatatcaaattggtctcttgtcttcctcctcatctctacactactccacatacagcccagcctctcaagcccaagcccaagcccaagcccaagcccgttcataaaatcctcctgcagcagcacccagtacccagccctctgcgtctcatccctctccgtctacgcctccagcatccaacaggaccctcaccaactggttcagacagcactctccctctccctgaaccgcacccaagccaccaaaaccttcggtggcta

SEQ ID NO: 183466 - DNA, 261 bp, Glycine max
cggctcgagtttacagagaagctaagaggcgcacgtcagcaaaagctcgtggaattgctagcaatggcgaggatcaaggtttacgagctgaggcagaagacgaaggctgatctgctgaatcaactgaaggacctgaaggcggagttgccttgcttcgtgttgctaaggtcaccggtggtgcccctaacaagctttccaagataaaggtggtgaggttgaacattgcccaggttttgacggtgatttctcagaagcagaagg

SEQ ID NO: 183467 - DNA, 261 bp, Glycine max
acgaggtggaactgaagctctcatcggcacgcgctctcaagaacgtgaactggcgccatggcccgaaccgcccatacgtcgtcgtttgggtcgacccaagcaacaagctctcgacgcgcgtggacgaaagcggcgacactgacgcgaattgggaccaaacgctcacaattccgttgccaccaaagcctctcgaggatcaaacgttgtcactcgacgtggtccacgccggctcggaggaggacaccaagccgcttatcggct

SEQ ID NO: 183468 - DNA, 266 bp, Glycine max
ctcgagccggactaattgggttaggaacttattgctgacaggatcgcctcttttgtggcaccctattccttatgttctgtttccttaacacagttgcgattgcttatagtgcaactgctgccctgccatttggcacaattgtggtgattgtcctaatatggacattggtaacttcaccattgcttgtgttgggtggtattgctggtaaaaatagcaaaactgagttccaagcacctgtccgcactacaaactatccccgagagatt

SEQ ID NO: 183469 - DNA, 267 bp, Glycine max
cggctcgagaaacaatgcgcttgtgggaagttttatggacacattatccgtctgagcatctgcacctgtatgtatgtgtggcaatcttgaaacgatatcgtggtaaaataattggagaggaaatggacttcgacacccttttgaagtttattaatgagctaagtggtcacatcaaccttgatgcaaccctcagagatgcagaggctctatgcatatgtgctggtgagaacggtgctgctcgcatacctcccggaaccccaccatcgt

SEQ ID NO: 183470 - DNA, 265 bp, Glycine max
cggctctgatgctcggtgtcgccgtcgtttgcctccacggcgcgttccgcgtgccggaggatctgttcctcgacgatcaggagaattctcaggctaccggattcctctccttcctcaccggccctgcctccgccgctgccgccgccgccgccgccgccgccgcttttcccagcgttgcctcacgcgtttaggtaagaaataaaaaatctcagtgagatcgtcagatctggtgctgtttctccccgatctgatgagttttgacgcc

SEQ ID NO: 183471 - DNA, 266 bp, Glycine max
gcagaaggagcaaaagcaatggcgccgaagaagccgagaaccacgacaaggaaccctgatttggttagggggattggcaagtattcgaggtcgcagatgtaccacaagacgggcatctgggccatcaaggccaaaaaccgtggcgttttgccccgccacgatcccaagcccaagcccgaggccccggcccagaagccgcccaagttctaccccgcggacgatgttaagaagcccctcgtcaacaagcacaagcccaaacccgcgaa

SEQ ID NO: 183472 - DNA, 151 bp, Glycine max
ctctctactactgctagctgtgacttgttttgagttcaatcaaatcgcattggtatctgaaatcaggaaagatggttagcgtagctgagatcaggcaggcacaaagggcagaaggcccagcaaccatccttgccattgaattgaaaaccca

SEQ ID NO: 183473 - DNA, 260 bp, Glycine max
ggagagcgcaccatggccttcaatttcagctgctgcaaaagatttgatcaggaaaatgttgaataatgaccctaagaaacgcattacagctgccgaagcccttgaacacccgtggatgaaggaaggtggtgaagctctgacaagcctttagacaatgctgttttgactagaatgaaacagttcagagcaatgaacaagatgaagacacttgctttaaaggttatagcagaaaacctttcagaggaagaaataaagggttt

SEQ ID NO: 183474 - DNA, 241 bp, Glycine max
cctcgagccgctcgagccgctcgagcggtgagttgaatctcaaacttctaagagagatttcgctgctctctgaagaagggtgtttgcttgactttggagatgtcgctgctctcagatctcatcaaccttaacctctcagacactactgagaaggtgatcgcagagtacatatggatcggtggttcaggaatggacctgaggagcaaagcaaggactctcccaggaccagttagcgaccttc

SEQ ID NO: 183475 - DNA, 263 bp, Glycine max
cgaagtcctaaatttcctggagttccctatactttcttctcacagaggcaaggatgtaaggtatctctgtaccaagatgctcatgtgcctgataattttgtacctaaaatacctcttgctggaggcaagaattagaggctcataggtgttgggaggatatatttgatgcaatcactgatgctaaacacttcatatacattactggttggtctgtttatactgaaatctccttggtaagggcttctaggaggcctaagcctggg

SEQ ID NO: 183476 - DNA, 268 bp, Glycine max
gatggctaatccctcactcttgttcttcagtctcctcctattatccgccaccgtagccgccgccgaacggatcgacgatgaagacgaccttctgatccgtcaagtggtgccggatgcggaggaccaccacctgctcaacgcggagcaccacttctccgccttcaagacaaagttcggcaagacctacgccacgcaggaggagcacgaccaccgcttccgtatcttcaagaacaacttgctccgcgccaagtcacaccagaaattggat

SEQ ID NO: 183477 - DNA, 265 bp, Glycine max
atcaaaacaaccttctttctttcaggttcttgatcagtgtcaaaaccaaaagggtggttgcaaattgcaatggctaagcatgatgttgagggtggttccttcgctgcaaaggactaccatgatcctcctccagaccattgattgatgctgaggaactcacacagtggtccttctacagggctttgattgctgagttcattgccacaatgctcttcctttacatcacagtgctcactgtgattggttacaagagccagagtgatgt

SEQ ID NO: 183478 - DNA, 249 bp, Glycine max
gaggattttgacaatgccttgttggattttctggtgaatgaattcaaaagaactgagagtattgaccttgcaaaggacaggcttgcactgcagaagcttcgtgaagctgctgagaaagctaagatcgagctgcttcaacatctcaaactgagatcaacctgcctttcatcactgctgatgcatctggtgcaaagcatctgaacataacattgacaagatcgaagtttgaggctttggtgaatcacttga

SEQ ID NO: 183479 - DNA, 265 bp, Glycine max
aaaaccggtgcgaatgcctccatttagaactcctcaggctaacagctcaggctcaggctctaaatatccgagaccaagggatgtagggtccaattcaccctttgatttgccattgaaggatgatgacagcctcacaagctgcccaccattttcagtgccaaactacatggctccaaccctttcagcccgggccaaagcacgtgctagtagtaatcctagagaaaggcttggtggaactccaactagtactgattcaaagaggagg

SEQ ID NO: 183480 - DNA, 261 bp, Glycine max
taaagacttgcttccaagatggttctgctagagaagctctgggatgacgttgttgctggccctcaacctgagcgtggccttggcaagctcagaaaactcaccaccctcaaaactattgatgaaggagacatagcaagctgcagaagacgttgtcgatgccgtcgacaccgacaaccccgatgactcccacgactccaacgacaccgggatccgcgcgtaaagctgacaacgtttggaggagcgtcttccatcctgggagca

SEQ ID NO: 183481 - DNA, 258 bp, Glycine max
tcaaagttggtatgtcatgtgaaggatgtgttggagcagtgaagagagttctaggaaaattggatggtgtggaatcatatgacattgatttgaaggaacaaaaggtggtagtgaaaggaaatgtccagcagacacagttctgcagaccgtttccaaaactgggaagaagactaccttctgggaaggtgaagcagcaacatctgaaactagcacagcaactgcctaaaacatttgcctctattctgtgcagaagaagta

SEQ ID NO: 183482 - DNA, 175 bp, Glycine max
ctcgagccgaacaaacaccaccacccattgatcggtttttgcttcatccaaactcaatgggcgccgacgaagactacgattacttgttcaagctggtcctcatcggagattcgggtgttggcaagtccacctcttgtcccgattcacccgaaacgagttcagcttggagaccaaa

SEQ ID NO: 183483 - DNA, 233 bp, Glycine max
atcttattgtgttcaagtgacagacaaatcagaacagggaagagagatttgaaatgtaaatgccaagtgaaagtgaaaagtacagtccagttttagtgatctctttaatttatttgttcatagattaattgatggtgtatgattgctctttctatttattgtggcatttttgtgttgtaccctgttgttgtgtttgcaataagtattagtaataaagcagcaaattcaatttc

SEQ ID NO: 183484 - DNA, 283 bp, Glycine max
gcattcggctcgaggcagcactgtccccagaagatctcacagatgctgagtggtattacttggtttgcatgtccttcatattcaacattggccaagggttaccaggcagaactctagcaaagggtcaacccatttagctgaacaatgcccatcttctgattgtaaaatttttagccgttctcttctggcaaagagtgcatccattgagacggttgtgtgctttccgtttagggaaggggttattgagttaggtactactgaacaggtcccaaagatttgagtg

SEQ ID NO: 183485 - DNA, 206 bp, Glycine max
ggaaagccggcacatgcagatttcgggcacttctatggatccagttatgtttcagcacctgatgcatcgtgcacgccatctctatcccgcaatagggacggcttgttagtaacagacatggatcttaacctgtgcaggcaggtgaaagacaagtggggtttcagaatgacttcacggtacgagttatatgccgacacactcggccg

SEQ ID NO: 183486 - DNA, 267 bp, Glycine max
ggccacttttctgtttctctacatcaccgtcttaaccgttatgggagtcgccggggctaagtctaagtgtagtaccgttgggattcaaggaatcgcttgggccttcggtggcatgatcttcgccctcgtttactcaccgctggcatctcagggggacacataaacccggcggtgacatttgggctgtttttggcgaggaagttgtcgttgcccagggcgattttctacatcgtgatgcaatgcttgggtgctatttgtggcgctggc

SEQ ID NO: 183487 - DNA, 264 bp, Glycine max
ctcgagccgcgcgtcgctccgcaccagtttcaccgcacgaatatcttgttgtttggagcgacccgagaaaaactctgtaaacatgttggtttaccaggacctccttacaggtgatgagcttctctctgactcctccgttacaaggaaattgagaatggaatgctgtgggaagttgaggggaagtgggttgttaaaggagcagttgatgtagacattggtgcaaacccttctgctgagggtggaggagaagatgagggagttgat

SEQ ID NO: 183488 - DNA, 268 bp, Glycine max
gaatctattgaatcaacaatcatgtcggacgaagagcaccatttcgagtccaaggccgacgccggagcctccaaaacctaccctcagcaagccggtaccatccgcacgaacggctacatcgtcatcaaaggccgccctgcaaggttgtggaagtttcgacttccaaaactggaaagcacggtcacgctaagtgtcactctgttggaattgatattttcactgccaagaaacttgaggatattgtgccctcttctcacaactgtgatgt

SEQ ID NO: 183489 - DNA, 263 bp, Glycine max
gtggtgccttatcgctgtggttatcatcttcttcttcctctttcttagatctcttctttctctacgccgcacgccgaaaccatggccggaaaaggagaggtccctgctatcggaatcgatctcggaaccaccactcttgcgtcggtgtgtggcaacatgaccgcgttgaaatcatcgccactgaccaagggaacagaaccacgccgtcttacgtcggattcactgacaccgagcgtctcatcggtgatgcggccaagaatcaa

SEQ ID NO: 183490 - DNA, 254 bp, Glycine max
ttttgttctcattctgtgactctgtgcttagttaacgttaacactgacttaagatggcggattctgcagatgtcccccacgatgttgtgtccctcctctcttctcctcaaagggactttcttcttcgaaacacggcgatcacgttaaaattgacagcttgaagggtaagaaacttggtttgtatttttcggcatcctggtgtggtccatgtcaaacatttacgccaactttggtggatgtgtacaatgaggttg

SEQ ID NO: 183491 - DNA, 259 bp, Glycine max
cctcagccgaatcggctcgagggcagatcttgtggcgggtgaaaacgctgttttacctccacagtttgtgaaacaaaccgacaatagaggcctattgtctagttggtcgctcccaggagcaagtgttggctacccttcagttcggggatttttgacacacagtggttggaattcaacgttggaaagtatgtgtggaggtgttccaatgatttggtggcctttctttgcagagcaacagaccaattgtcggttttgttgc

SEQ ID NO: 183492 - DNA, 260 bp, Glycine max
ctcctccaccgtggctccggcaacactctacaaagctctgacaaacagatgctgacactatcatcccaaagattattggggccatccaaactattgaaatcgttgaaggaaatggaggacccggaaccgtcaagaagataacagctagtgaaggtgaccaaaccagtttcgtgctgcaaaaagtggccgcaattgacgaggctaacttggtatacgactacagcatagtgggagggacggggttgcatgaaagtttggag

SEQ ID NO: 183493 - DNA, 258 bp, Glycine max
cagtcaaacactctgtaactctttattttattttctttctttctttctccgatcgcatagctcgctcgcaaccaccatgccttcccgaagaagaactctcttgaaggtcatcattctcggtgacagtgggtggggaagacatctttgatgaaccaatatgtgaataagaagtttagtaatcagtacaaggcaaccattggagcggattttttaaccaaagaagtgcaattcgaagataggcttttcaccttacagatt

SEQ ID NO: 183494 - DNA, 259 bp, Glycine max
aatctccatctaatagtgttaatttgtctttctctatctctatcggtcatgggtgcttttgcttttgatgaggaaaactcctccaccgtggctccggcaacactctacaaagctctgacaaaagatgctgacactatcatcccaaagattattggggccatccaaactattgaaatcgttgaacgaaatggaggacccggaaccgtcaagaagataacagctagtgaaggtgaccaaaccagtttcgtgctgcaaaaag

SEQ ID NO: 183495 - DNA, 264 bp, Glycine max
gatggatgccactacccccaagtactctaaggctaggtatgatgaaatcgtgaaggaagtctcttcttacttgaagaaggttggttacaacccagacaagattccctttgttcccatctctggttttgaggggacaacatgattgagaggtccaccaaccttgactggtacaagggaccaactctccttgaggctcttgaccaaatcaatgagcccaagaggccctccgacaagcctctaaggcttccattgcaggatgtctac

SEQ ID NO: 183496 - DNA, 260 bp, Glycine max
ctcgagccgcatatctactccatttcaccctgcctatatcaccgcagaaagaattaagaaagccaaaaatttggagctgcttttgactgctggcattggttctgatcacgttgatctcaaggcagcagctgctctggtttaactgtggcagagatcacaggaagcaacgtagtctcggtcgcggaggatgaactcctcagaatccttgttctggtgaggaatttcttgccagggtaccatcaggctgttaatggggaatg

SEQ ID NO: 183497 - DNA, 239 bp, Glycine max
agattttataacatgaaattgattctttctagattgtcctaattttaattgtacattccggagaagaggcagagcataaacgcatgcattcatacaaagaagaaataaaaaataaaaacacaaaggaatgcgttttgtttcaaaaaaaaaaaaaaaaaaaaaaaaaaaaaaaaaaaaaaaacaaaaaaaaaaaaaaaaaaaaaaaaaaaaaaaaaaaaagaaaaaaaaaaagggggggc

SEQ ID NO: 183498 - DNA, 265 bp, Glycine max
cctcgagccgattcggctcgaggtttctatggcttctgaagtaatacagtaccgatgctttgccggtgggcttgcttgggccaccgacagcgatgctctcgagaaagccttctctcattatggtgagatcgtcgaatcgaaggttatcatcgatcgtgaaactggaagatcgagagggtttggatttgtgaccttcgcctcggaccaggcgatgaaagacgcaatcgaaggaatgaacggtcagaacctcgacggtcgtagtatc

SEQ ID NO: 183499 - DNA, 262 bp, Glycine max
ctgccagtagtcatatgcttgtctcaaagattaagccatgcatgtgtaagtatgaactaattcagactgtgaaactgcgaatggctcattaaatcagttatagtttgtttgatggtatctactcggataacgtagtaattctagagctaatacgtgcaacaaaccccgacttctggaagggatgcatttattagataaaaggtcaacacaggctctgcctgttgctttgatgattcatgataactcgtcggatcgcacggcc

SEQ ID NO: 183500 - DNA, 258 bp, Glycine max
gtgatttggagtttggagcgactgaactaatcattaatttgcactcgctgtttcagcttcatcacccttcttttgcatcatttatatctcttgagaaatggcacaagaaacctttctattcacatctaatctgtaaacgagggtcaccccgacaagctgtgcgatcagatctctgatgcagtacttgatgcgtgccttgaacaggaccctgacagcaaggttgcctgtcagacatgcaccaagaccaacatggtcatg

SEQ ID NO: 183501 - DNA, 257 bp, Glycine max
cgaaaccaccgaacttgttcacgagaacaggaatggcacctatcagtggattgtcaaacccaaatctgtcaaatacgaatttaaaaccaacatccatgttcctaaattaggggtaatgcttgtgcggtggggtggaaacaacggctcaaccctcaccggtggtgttattgctaaccgagagggcatttcatgggctacaaaggacaagattcaacaagccaattactttggctccctcacccaagcctcagctatcc

SEQ ID NO: 183502 - DNA, 258 bp, Glycine max
ggcactccaaattatgttgctcctgaggtccttaacgatagaggctatgatggggcaactgcagacttgtggtcatgtggggttattctctttgtattggttgcaggttacttgcctttcgacgacccaatcttatgaacctgtataaaaagatctcagctgctgaatttacttgccccccatggctttctttcactgccaggaaattgattacacgaatcttggatccagatcccaccactcgtatcactatacctg

SEQ ID NO: 183503 - DNA, 228 bp, Glycine max
gggaatgtccctaaaagcagaatttttttcattgcgtggtcccctgacacatcaagggtgaggagcaagatgatttatgcaagctccaaagacagattcaagagggagctggatggaattcaagtagagttgcagcaactgatcctactgagatgggtcttgatgtgttcaaaagccgtgccaactagaatgattatataaactagtaggctttctggtggggagcag

SEQ ID NO: 183504 - DNA, 264 bp, Glycine max
gttacagatgccgacaacgtcatcccaaaggctgtcgaagccttcaggagtgttgaaaaccttgaggggaacggtggccctggaaccatcaagaagatcactttcgttgaggatggagaaagcaagtttgtgtgcacaaaatagaatcagttgatgaggcaaacttgggatacagctataccgtagttggtggagttgggttgccagacacagtggagaagatcacattcgaatgcaaattggctgctggcgccaacggagggt

SEQ ID NO: 183505 - DNA, 265 bp, Glycine max
cattattttcattcctactaacactccatctatcactatcaggggtaatttcaaccactttcactctagttaacaaatgtgagtacacggtgtggccgggaattctttccaatgctggtgttcctcctctttcaccacaggcttcgttctccaaaccggcgcgtccactacaatcgccgcacccgcgtcttggggtggccgtttctggggcagaacattatgctcccaggactcaaccagcggcaagttctcctgcgtcaccggc

SEQ ID NO: 183506 - DNA, 263 bp, Glycine max
tgaagatggagttgatgttatacgcgaatacggtgttgaaggatacccgtttacatcagcaaggatccaagagttgagagatcaagaagaggaagctaggaggaaccagtccgtgagatctctcttggtctctccatctcgggacttcgtaatatcatctgatggaaagaaaacacttgtctctgagcttgagggcaagacagttggtctgtatttctgcgtgaagtcattcggatcatgcagtgactttaccccaaagcttg

SEQ ID NO: 183507 - DNA, 178 bp, Glycine max
ccggttcagcggcatgccataccgatatcccttgcggggcgggatttgatggcttgtgcgcagactggttctggaaagactgccgcattctgtttcccaatcatcagtgggattatgagaggccaacccaagtcctccagaggccgcctcctcgcggtgtccgcacagtctacccact

SEQ ID NO: 183508 - DNA, 255 bp, Glycine max
caaattgtgaaggagaatttcgacttcagacctggaatgatcaccattaacttggaccttaagaggggtggtcataggttcctcaagacagctgcttatggacactttggaagggatgatgcagactcacctgggaagttgtgaagccactcaagtcagagaagcctcaagcttaagagtgttgttaagttaatcactcccttcagtggatgtcttgctgggtgtggatgaataatttgcgtgtttcatgactac

SEQ ID NO: 183509 - DNA, 256 bp, Glycine max
agaatcgtaagctatgggaaagtcttacccaactgtgagtgctgattaccagaaggccgttgagaaggcgaagaagaagctcagaggcttcatcgctgagaagagatgcgctcctctaatgctccgtttggctggcactctgctggaacctttgacaagggcacgaagaccggtggacccttcggaaccatcaagcaccctgccgaactggctcacagcgctaacaacggtcttgacatcgctgttaggcttttgg

SEQ ID NO: 183510 - DNA, 264 bp, Glycine max
gaaaaagaaatgagattgaagattattgaagaagctgaggagtataaggtggctttctatgagaagaggaagcttaatgttgagactaacaaggttcagattagagaaagggagaagttattcgtggccatcaagagaagtttcacaaagaggcagacaaagcttattggaaaaccattgcagagctcattcctcgtgaggttcccaacattgaaaagaaaagaggcaaaaaggatcaggacaagaagccatcaattacggtca

SEQ ID NO: 183511 - DNA, 263 bp, Glycine max
gctcgagccgctcgagcggctcgagcaaatcctttgtggcaattgcatgactgggataagcattgcatggtggaagtggactcacaatgctcaccacatctcatgcaatagtcttgactatgatcctgattccagcacatacctgtctttgccgtgtcgacacggttcttcaattcaatcaaatcttgtttctatggaaggaaattggtgttcgattcattatcaaggtttctcatcagctaccagcacttcacattctaccc

SEQ ID NO: 183512 - DNA, 261 bp, Glycine max
tgggatcaagaaagcgttggttttttacgctggaaaagcgcccaagggatagaaaactaactggatcatgcacgagtatcgtcttgcagacgtggatcgttccgttcgcaaaaagaacagcttaaggcggatgactgggtgctgtgccgaatttacaacaagaacaggtgcaattgaacagcaacaactaccaccaccgagtggggtccgcaaaattgaatgttccgaaatggaggacgagaagccggagattctgccgcc

SEQ ID NO: 183513 - DNA, 254 bp, Glycine max
aaggagtccttggccgtgggctgcgaactgttggtcttcggtcgagaattgatggagtttgccatttggaagtatagcatgatttgtcgtggttgggtgaagtgccaggagatgaaccaaccccgttgtttgtttggatctagtagtcttggttcgattgctattgttgctgggggaagtgataagtatggaaatgttctaaaatcagctgagttgtatgactcttcaacaggtatgtgggaacttttaccaaa

SEQ ID NO: 183514 - DNA, 247 bp, Glycine max
tcgagctcatcttcttctgaattctattgttgcagggtaacacatggctctgttattcaaggatccgtcgaagatttcggcgtatcgagatagaaggttccccgggacgcaagaggagttgagcacgcgcttctgacctcaaccaccgtttacgtggggaacatgtcgttttacacgacggaggagcaagtttacgagctcttctcgcgtgctggggaaatcaaaaagatcatcatgggcttggaca

SEQ ID NO: 183515 - DNA, 254 bp, Glycine max
gaatattgcttagttttgtcttatctgaatttggaaacagcttttgaatggctttttcaagagttgcactgctaatatgcacggtcgggtattttgtgattgcctctgccggcaatttccaccaaattttgatatcacatggggagatggtcgggctaagatactcaacaatggagagcttctcactctgtcacttgacaaagcctctggctcgggtttccaatccaagaacgaatacctttttggcaaaattg

SEQ ID NO: 183516 - DNA, 263 bp, Glycine max
tgaacatagttgaaggaaccacaatattgaagcttccacaaggttccaatgacgtgcttctaaaaaatctctacctttcctgtgacccttacatgagaatgctcatgaccaaggtggaaggcctcgacggtttggcacctatacacctggctctccattaacagggtatggagtgtccaaagtcctagaatctggacacccagattacaagaaaggtgatttagtgtggggatctacaaaatgggaagaattcagcttggtgt

SEQ ID NO: 183517 - DNA, 261 bp, Glycine max
catcaccacataaaactaacttgggtagtgccttttttctttctctctatcgattctcgcaacaaaccctacccttttttagtcttcgaatttttcataatcgtaatgggttccgaaggatccagcgtttcgttcctaggaatttcagattattgcaagagcttgagagaggtgagaagggaattggggatggcaatgttagctatggaatggatgacgctgacgacatatacatgcaatcttggactgggactatcattg

SEQ ID NO: 183518 - DNA, 260 bp, Glycine max
cgacctcgtcatgcagaccaaacagctcggccgcctccccgtcgtccacttcgccgccggcggagtcgccacccccgccgacgccgcgctcatgatgcagctcggatgcgacggcgtcttcgtcggctcggcgtcttcaagagcggcgatcccgcgaagcgtgcgagggcaattgttcaggccgtgactcacaccagtgaccccgaggttttggcagaggttagttgtggattgggggaagccatggttggtatcaattt

SEQ ID NO: 183519 - DNA, 259 bp, Glycine max
tgggagtgctgctgattggagatatgctgcagagcagtttgtgaagaagcttccagataaagtgattgtacacctgaatgcaattcttcaaaattgacgtttgatggtgttgatacaatgggcgagagctagctgaagagaggtgcagaagatatcctttgtggcgcattctctaggaggcttggtggcaagatatgctattgggagactttatgattattcttcaacattggcacttgttggtaccagtagagactat

SEQ ID NO: 183520 - DNA, 254 bp, Glycine max
ccgcactccaccgctttacgccggttatcagggaaggagcagagggcgtagagcgccgtggcggcttcttttctttcccttcccttcccgtcgcggaggagtgtcacgagggcattgatggagcccggcacgctccgatggtggccttgttgacgtggaggacggcgaggctggtgagcagggtggcggcgagggcgcggcagtcggagggggcggcggaggagaggaggagagagattaaaggggagaggagg

SEQ ID NO: 183521 - DNA, 257 bp, Glycine max
ggaaccgccatcgccgcaacagcctccgcaaccgccatcgcgcactgccaccatcctcggaaagtaccagctgacgcgcttcctcggccgtggcagcttcgccaaggtctaccaggggcgatccctcgtcgacggtgccgccgtggccgtgaaaatcatcgacaaatcgaaaaccgttgacgccggcatggagccacgcataatccgcgagatcgacgccatgcgccgcctccaccaccaccctaacatcctcaaaa

SEQ ID NO: 183522 - DNA, 255 bp, Glycine max
ctctgcttcaatggggaagggaacagggagcttcgctaagaggagggacaagacccacactctctgtctgacgtgtggccgccgcagcttccaactccagaagactcgctgcgccgcttgtgcttcccccgctgcacgcacgcggaaatataactggagcgtcaaggcaattcgcagatagaccaccggaactggcaggatgagatacttgcgtaacgtgcctcgccgtttcaagagtggcttcagagaagcgta

SEQ ID NO: 183523 - DNA, 255 bp, Glycine max
ctgatgctcagatttgtgtttggaatactgatggatgggaaaagcagaagtctagattcttgcagcttcctcctgggagaacaccaccagcacagtcagatacccgtgtacaatttcatcaagatcaaatacagttcttggttgtacatgaaactcagctcgccatttatgaagcaactaaattagaaggactaaagcagtggttcccgcgagactcatctgcaccaatatcgtatgcaactttctcatgtgata

SEQ ID NO: 183524 - DNA, 255 bp, Glycine max
ggagtttggagcgactgaactaatcattaatttgcactcgctgtttcagcttcatcacccttcttttgcatcatttatatctcttgagaaatggcacaagaaacctttctattcacatctgaatctgtaaacgacggtcaccccgacaagctgttctatcagatctctgatgcagtacttgatgcgtgccttgaacaggaccctgacagctaggttgcctgtgagacttgcaccaagaccaacatggtcatggtc

SEQ ID NO: 183525 - DNA, 258 bp, Glycine max
ccctcgagccgattcggctcgagcggctcgagctcccttcttccttgtctctttctcttctcaacaacatgcagatcttcgtcacgactttgactggcaagaccatcaccctcgaggtcgagagtagcgcaccatcgacaacgtcaaggccaagatccaggacaaggaaggtatccctcctgaccagcagaggttgatttttgctggtaagcagctggaagatggtcgcactcttgctgattataacatacaaaagga

SEQ ID NO: 183526 - DNA, 258 bp, Glycine max
gcttggttgcagcttcagcagcagcggcaagcaactccatccgcaatgggaatcgatttgaaggcaggaggtaagtccaagaagaccaaacgtacagcccccaaatccaatgatatttacctcaagctctcgtcaagctgtaccgttttcttgttcggaggactggtagtaacttcaatgccgtcatcctcaaacgccttttcatgagcaaggtcaacaagcccccgctatccctctctagattgattcgttacacca

SEQ ID NO: 183527 - DNA, 275 bp, Glycine max
cctcgagcgaatcggctcgagggcatgttatgattcaaccagcattagaaattcctcacctggactagttgtgccaactattgatctagtgctgcgaggtggagtgcagtggactatttatggagccaattcaatggttatggcaaagaaaaacccagcacgtcttgcaattgttgatggagggacagagcctagaatgtcgttcgttaaagcttcaattgtcatcggtggatatcagttggaggacaatcctccggagtttgatgtggctcccc

SEQ ID NO: 183528 - DNA, 273 bp, Glycine max
ctgtgacatacggtttaattgtttatgccatgatcggatttgactggactgcagagaaattcttttggtatctatttttcagtttcttctcattgttgtactttactttctacggcatgatggctgtgggagtgacgccaaaccaccatgttgctgccattgtggctgctgcattttatgcaatttggaatctcttctcaggatttatcgtcgtaagacctaaaatgcccgtgtggtggagatggtactattgggcatgtcctgtggcttgga

SEQ ID NO: 183529 - DNA, 238 bp, Glycine max
tttcgattccagggttcctctgggaatatagtccctggactatcatgggattactatttgttgacatgtcacaagcttggagaggattataaggaagcatcttgaggatgtcttcgagaaggacagtggagtagctcctggcatacttcgactcttcttccatgactgctttcctaatggatgcgatgcgtctatattgttgaactgagacggtgacgagaagcaacaccgtgctaac

SEQ ID NO: 183530 - DNA, 229 bp, Glycine max
atccaggcttgtttcttgacaggatatcttcaaccatctctaatgctttcaagcttctttctggagcaacatttcttggtgcaatcttatgcttgatcgatttccttctcaagagatagtctggtttcatagtcttcttcactataggtgaactacccctatggctcactcaggctcctacaaatcatgtttcactacgttgtgtaaaacatagtctatggccactgtc

SEQ ID NO: 183531 - DNA, 267 bp, Glycine max
  unsure (1)..(267): unsure at all n locations
cagcattcaccctnntgtggaactgtgaacagggtgacaatactgacagaccaatttggtcaaccaaaagggtttgcttatgtagagtttgttgagattgatgctgtgcagaatgctctcctgttaaatgaatcagaattacatggtcgacaactgaaggtgtctgccaagcgtacaaatgttcctggaatgaagcagtattttggaagaagacctgctggtttccgatctaggaggcctttcatgcctgctccattctttccacca

SEQ ID NO: 183532 - DNA, 267 bp, Glycine max
aacaagagagagctagcagtgcaagctttcaacatccaaaacaacagagagtttttggctttagaagctgaaggaatatagttatcacaatggggagagctccatgctgtgagaaaatggggttgaagagagggccatggactccagaagaagatcaaattctcatcaattacatcaacacttatggccatgctaattggcgtgcactgcccaaactagctgggctattaaggtgtggaaagagttgtagactccggtggataaatt

SEQ ID NO: 183533 - DNA, 263 bp, Glycine max
gagaacctcttttcctttcgatttaccttcgattcatacaagctcacctctcaattttggtttatcattcctagaagaaggaaccatcaatcattgacatggccatggcatatgttgctaggtcatcagagtcatctcaagtgcttactttccattccactgctaaatggaatgctcaccttgatgccttgaaacaaactaacaaactgatggtggttgatttcactgcatcatggtgtggaccttgcaaactcatggatcca

SEQ ID NO: 183534 - DNA, 265 bp, Glycine max
cattaatcactttctttaaggaaactaattaacatgggaggaaggggtcacatggggtggttcctcttctgttgttgttcttcttctctcctttttttttgttgcttcttcttcttctgtgtcacccagaagaaacttgcccatcatagcctttgaggatggctacacacccttgtttggtgaccataatttggccatccatagagatggcaaatcagttcacctttcacttgatgaaagaacaggttctggatttgtgtctcat

SEQ ID NO: 183535 - DNA, 265 bp, Glycine max
actcgagccgctcgagccgattcggctcgagcaaaacatacaccacttctctctgtttctactcactctacctctccctccctcttcaactaacattccaattgaaaaccaagacaccgctgtcagagaaatcacgcccaagaacaggagcatcatgggtgctggagggcctgatgatgaggccaataggtggccaccgtggttgacgccactgctgaaagagagcttctttgttcaatgcacgttgcacgctgattctcacaag

SEQ ID NO: 183536 - DNA, 267 bp, Glycine max
caaaatttagaaacaaaaacatgttggtgaaggtgtacggtccaacctatggagcccccaagagggtgctggtgtgtctgattgagaaggaaattgagtttgaaacagtacatattgatctcttcaagggagagaataaggaacctgagttcctaaagctgcagccatttggatcacttcctgttattcaagatggtgattatactctctatgaatctcgtgcaataatcagatactttgcagagaagtataaagaccaagggacag

SEQ ID NO: 183537 - DNA, 270 bp, Glycine max
gttcacaagaagattccggttctcatccacaatggcaaacccatttgtgaatccctcattgctgttcagtacattgaggaggtttggaatgacagaaatcccttgttgccttctgacccttaccagagagctcaggctagattctgggctgattatgttgataagaagatatatgatcttggaaggaagatttggacatcaaaaggagaagaaaaagaagctgccaagaaggagttcatagaagcccttaaattgttggaggaacagctg

SEQ ID NO: 183538 - DNA, 269 bp, Glycine max
cagctatacttgttccttttgaaggttagaagtgctacaatacaaacaatggcagctactcaggaagatgtgaagcttttgggtattgtgggaagcccatttgtgtgcagggtccagattgcccttaagttgaagggagttgaatacaaatttttggaagaaaatttgggcaacaagagtgatttgcttctcaaatacaaccctgttcacaagaaggttccagtgtttgttcacaatgagaagcccatagcagagtctcttgtgattgt

SEQ ID NO: 183539 - DNA, 266 bp, Glycine max
caagtttgaagtttcagacggacaagccgtggatgacacagctcgctgctgttgcttgtttgtcccttgctgcgaaaacagaagagacccatgtgccactcctcttggaccttcaagtggaggagtcaaggtttgtgtttgaggcaaagactattcagagaatggagctgctggtgctgtcaactcttaagtggaggatgcttccggtgaccccaatttccttctttgaacacattgtgagaaggcttggtttgaaaagtcgcttg

SEQ ID NO: 183540 - DNA, 265 bp, Glycine max
aaaagcttgatggtgatgctgctttgaataaattgttccgtgatatttaccaaaatgcagatgaggacatgaggagagcaatgagcaagtctttcttggagtcaaatggaacagtgctatcaactgattggaaagaagtgggatcaaagaaggtggaaggcagtcccccagaaggtatggagttgaaaaaatgggagtattgattcggtacttaaatattcatttgagctgatgcttgtgagagttcaagtttgtctcctcccaa

SEQ ID NO: 183541 - DNA, 263 bp, Glycine max
cgcgagataatgatcgcgatcttgatccctcctctcggagtttgctttcgccacggttgttgcagcgtcgaattcatcatctgcttgctcctcacaattctaggttatattcctggtataatctatgctctctatgctattatcttcgtcgatcgtgaccagtactttgatgaatacaggcgtcctctctatgcacaatactgatgataattttagtttgtatgcctatgagtgatgctcatgttgatcgtgtgcttaattac

SEQ ID NO: 183542 - DNA, 264 bp, Glycine max
gaagaaccgtgtcaagggtttgttcccatccgcaagttacagataacagactcggaagttgatgattatgattctgatgggaagatggggaatggtttctactgtcaagagatgtatcctggtgaggatggacaactctcatggttcaatgctggtgttagagttggtgttggaatcggccttgggatgtgcgtagggcttgggattggtgttggactgctcatgcgatcgtaccaaacaacaactagaaacttcaggaggaga

SEQ ID NO: 183543 - DNA, 264 bp, Glycine max
ggaggatggaaagaaagtgaataactttctggaaatggataggggggaaggagtgaatgatggtttttctggacctggaccaaatgattcacttattcatggtcttattgatgatgtagccttgaattgtcttgcttgggttagtggatctgattatgccgtgctatcgtgtattaataaaaggttcaataaactgatcaatagtgggtatctatatgggttgaggaaacaattgggggctgtggagcatttggtgtatatggt

SEQ ID NO: 183544 - DNA, 271 bp, Glycine max
gccagtagtcatatgcttgtctcaaacactaagccatgcatgtgtaagtatgaactaattcagactgtgaaactgcgaatggctcattaaatcagttatagtctgtttgatggtatctactactcggataaccgtagtaattctagagctcatatctgcaacaaaccccgacttctggaagggatgcatttattagataaaaggtcaacacaggctctgcctgttgctttgatgattcatgataactcgtcggatcgcacggcctttgtgc

SEQ ID NO: 183545 - DNA, 198 bp, Glycine max
ctcgagattcggaagagctcaaagtcatgatttagctgatgctgtgaagaaatgaaagaaaagcgcaggtttaaggagcttctgataatggtggatacctgccaagcctctactctgttctcccagcttcattcaccaggtgttgtggcaattggaagtagtaagaaaggaggaaattcatattcacatcatgtggac

SEQ ID NO: 183546 - DNA, 266 bp, Glycine max
gggcaaggattttagcttccttggcccaatattgttcacctccctcattactctcatcctcactggcatgatgcagatgttcttccctcttggacctactgcccatgctatctatggtgcaattggtgctatgatattctctggctacattgtgtatgacactgacaacctgatcaagcgtttcacttatgatgagtacattggagcctctgttactctttatcttgacatactcaacctcttcctttccatcttaaggatcctca

SEQ ID NO: 183547 - DNA, 265 bp, Glycine max
gagaattgttcctctcttctcttccattcgtgtacgcgcaaaagaatcatgacgagttcctctgctgccgctcgcaagaatctgagtaagattgcctgcaataggctccagaaagagctcgtggagtggcaggtcaatccccccactggtttcaagcacaaagtcacagacaatctccagaggtgggtggttgaagtcactggagctcctgggacactttacgctaatgagacctaccagcttcaggttgattttcctgagaatt

SEQ ID NO: 183548 - DNA, 263 bp, Glycine max
caagaattcatctattcatttcagtccatcagcatggcgaaggagaagaaaaacttgtccaacaagaacaaacagccaagcaatgcagacgaggttcacttccgcggagtccggaagcgcccctggggccgctatgccgccgagatccgcgaccctggaaagaagacccgcgtctggctcggcaccttcgacaccgccgaggatgccgcccgcgcctacgacgtcgccgcccgaaacttccgtggccccaaagccaaaaccaa

SEQ ID NO: 183549 - DNA, 264 bp, Glycine max
tcgaccagaggagtttgagaatggcaacgatcagcgcggttcaggtggagttcctggagtttccagcggtggttacttcaccagcctccggcaagacctatttcctcggcggcgcaggggagagaggattgacgattgaggggaagttcataaagttcacaggcataggagtatacttggaggataaggcggtgccatcactcgccgctaagtggaagggtaaaacttcagaggagttagttcacaccctccacttctacaggg

SEQ ID NO: 183550 - DNA, 261 bp, Glycine max
gtcgctccgcaccagtttcaccgcacgaatatcttgttgtttggagcgatccgagaaaaactctgtaaacatgttggtttaccaggacctccttacaggtgatgagcttctctctgactccttccgttacaaggaaattgagaatggaatgctgtgggaagttgaggggaagtgggttgttaaaggagcagttgatgtagacattggtgcaaacccttctgctgagggtggaggagaagatgagggagttgatgatgcagc

SEQ ID NO: 183551 - DNA, 264 bp, Glycine max
taaaatcaaccatgggttcagcagctgagactcagattactccaacccatgtatctgatgaagaggcaaacctttttgccatgcaactagccagtgcctctgtactccctatggttctcaaatcagctcttgagcttgatctgttggaaatcatagccaaggctggccctggtgttcatctttcccccactgacatttcttctcagcttccaacacagaaccctgatgcacccgttatgttggaccgcattttgcggctcttgg

SEQ ID NO: 183552 - DNA, 270 bp, Glycine max
ctctgccgaagataaaaccactggccagaaaaataagatcactatcaccaatgacaagggtagattgtcaaaggaagatattgagaagatggttcaagaggctgagaagtacaagtctgaggatgaagagcacaagaagaaggttgaggccaaaaacgctttggaaaactatgcatacaacatgaggaacaccgtgaaggatgacaagattggtgagaaacttgacccggctgacaagaagaagattgaggatgcaattgagcaagcaat

SEQ ID NO: 183553 - DNA, 268 bp, Glycine max
caaacacgctgttcctacaatcattccaaatgtgcccttccggtcgcaccctcctcccttcctccgtctccgatttccgaccggcattcgacgtcctcgatgccgaccgcgacggcaaaatcagccgcgacgacctccgcgccttctacgccggagtcggcggcggaggagatgacgtgatcggggcaatgatgacagtggctgacaccaataaggacgggttcgtggagtacgaggagttcgagcgcgtggtctcggcggagagaaa

SEQ ID NO: 183554 - DNA, 267 bp, Glycine max
gtcgctccgcaccagtttcaccgcacgaatatcttgttgtttggagcgatccgagaaaaactctgtaaacatgttggtttaccaggacctccttacaggtgatgagcttctctctgactccttccgttacaaggaaattgagaatggaatgctgtgggaagttgaggggaagtgggttgttaaaggagcagttgatgtagacattggtgcaaacccttctgctgagggtggaggagaagatgagggagttgatgatgcagctgttaa

SEQ ID NO: 183555 - DNA, 265 bp, Glycine max
cttcttctttttcatcaatcatcaccagtggttcttttccttctgagaagatcgaattgtgttttgcaaaaatgggagttccagagaaagaccctctttcccaattgagtttgcctcctggttttcggttttaccccaccgacgaggagcttctcgttcagtatctgtgccgcaaggtcgctggccaccatttctctcttccaatcattgccgaaattgacttgtacaagttcgacccatgggttcttccaagtaaagcgatttt

SEQ ID NO: 183556 - DNA, 140 bp, Glycine max
aaaagactccgcgtttccccttcccctcaaccacaatcaccagacactgcaccaaacaccaacaacgctttagctctctctcttctctccataaccgccatcgtcgatctggcactaacagatcgccgctggtacatctg

SEQ ID NO: 183557 - DNA, 261 bp, Glycine max
ttcagattatcagagagcccaagaggcccgacgattcatgatttatgttcataccaagatgatgatagttgatgacgaatacataatcgttggatctgccaatatcaaccaaaggtcaatggatggtgctagggactctgagattgccatgggtgcttatcagccctatcatttggctaccaggcagccagcacgtggtcagattcacggtttccgcatgtcattgtggtatgagcaccttggcatgcttcatgactcctt

SEQ ID NO: 183558 - DNA, 258 bp, Glycine max
gatcagagtacatcctaaaagccttggagaaaactgcaagtggttggagatgtttgaagagaccgatgttgtaatgttctcagttgccttatctgactatgatgagtacactacagacagtaaaggagtttctaccaacaaaatgttggtagctaagaatctctttgaaaacataatttctcatcgaagcttccataacaaaaaatttctcctagtattgactaaatttgatctgcttgaggagaagattgaacacat

SEQ ID NO: 183559 - DNA, 262 bp, Glycine max
gtcgccgttcagggcttttgcatgacccgctgcgggacccacggctctacccgcaacgtcaaaaacgctgcccggacagcttatatttgggttggaaactccgaaactcagtgccccgggcaatgcgcgtggccattccaccaacccatttacgcgccccagacgccgccgttagtcgcgcctaacggcgacgtcggagttgacggaatggttattaacttggccactcttctcgctggcaccgttacgaaccctttcaaca

SEQ ID NO: 183560 - DNA, 266 bp, Glycine max
tgccaatgagctgggaggtgcaaagttggcaagaagaaccttatccacgatgataatccaggcgttgtcacaggtgtcattagggctaaagatgttgactatttatccagggtagcagatgataaatggacaggagatgccattatttattcccatcttggtggagaagtggtttaccttccaaaggatgcatccatcccagttaccttgaaaaccagagaatatgaagttttcacaatagttcccgtgaaggaattgagcaatgg

SEQ ID NO: 183561 - DNA, 257 bp, Glycine max
gcaacttttggtctctctgcagaatctcattccaattggagttcatcctctaaaaggaaaggtggtgtttggactctgggaaaatgggtttgttttctgggatttttatgggggtgttgttcggcatcgcattgatggctggatgggcacgcatgatgaggtaccgaagtgccaaacgaattgcaaaggcagctgacattaaactccttggatcccttaacagagatgatttaaagaaaatttgtggtgataatttg

SEQ ID NO: 183562 - DNA, 260 bp, Glycine max
atacaaagcattgaattcaaaaacttaagttcattccttgtgttttgctttcttcctcaaaaccaaacatgtcgaacacatgcggcaactgcgactgcgctgacaagactagctgcaccaagggaaacagctatggtgttattgtagagactgagaagagttacatcgagactgttgtcatggatgttccagcagctgagcatgatgggaagtgcaagtgtggcactaactgcacttgcacggactgcacctgtggccat

SEQ ID NO: 183563 - DNA, 255 bp, Glycine max
aagcggtgagattcgtgaatctgagaaatgtcggattcttctcgggaggagaatgtttacatggcgaaattggcggacaggccgagcgttacgaggagatggttgagttcatggagaaggtagcaaagactgtggaggttgaggagttgacggtggaggagagaaatcttctctctgtggcttacaagaacgtgattggtgcgaggagggcttcgtggaggatcatatcctccattgagcagaaggaggagagca

SEQ ID NO: 183564 - DNA, 258 bp, Glycine max
tgctcgttgaatccatcctaagtgacttgcttgctgaaggcgacacgaggtagaaactaagaatgggggaagagaatgaagaaacaaaaacatttaaggatttgggcttatccgagtcattggtggaagcttgcgaaaaattgggttggaaaaatccattaaagatacagacagaagcaattcctcttgcattggaaggaaaagatgtgataggacttgcccaaactggttccggtaagactggagcttttgctcttc

SEQ ID NO: 183565 - DNA, 256 bp, Glycine max
ctggtttatagatctctgtgaagtcgctttataacactcaacctaagatgcagaacgaggaaggacagatcaccgagctttacattcctaggaagtgctctgccacaaaccgattgattaccgctaaggaccatgcttcggttcaggttaacattgggcatgtggatgagaatggcgtctacaatggccatttctccacttttgctctctgcggcttcatacgtgctcagggtgatgctgacagtgccctagatcg

SEQ ID NO: 183566 - DNA, 260 bp, Glycine max
atcctaatcagaaaaaaaaaaccctagtaatgccgccgatggggaggaagcgaaaggtagcacccaaatcttctctatccaccgagccacctctcaagcagcaacaaccaaaacccgaaaatccccctcaagaatacgaagaagtcgaagaggaagttgaggaagaagaggtagaggaagaggtcgaagaggaagaagaagaagaagaggaggacgaggaagaagaggaggaggaagaagaagaagaagaagaaaacgac

SEQ ID NO: 183567 - DNA, 259 bp, Glycine max
ccttctcaaactagtagtattattcttccattccgttctacatataatcattcataatgggtgttttcacattcgaggatgaaatcaactcccctgtggctcctgctactctttacaaggccctagttacagatgccgacaacgtcatcccaaaggctcttgattccttcaagagtgttgaaaacgttgagggaaatggtggcccaggaaccatcaagaagatcactttccttgaggatggagaaaccaagtttgtgct

SEQ ID NO: 183568 - DNA, 257 bp, Glycine max
cgggattttgatgcccgttggtgccataatagcaaggtatttgaaggtgttcaaatctgcagaccctgcttggttttaccttcatgttacatgccaaacctctgcctacatagttggtgttgctgggtggggaactggtctcaaactcggaagtgactcggttggtattaagtataacacccatagagcactcgggatcaccctcttctgccttggaacccttcaggtttttgctctgcttttgaggcccaacaaag

SEQ ID NO: 183569 - DNA, 256 bp, Glycine max
gaagatcaacctcctctttggtacggtgttaagaaaacctatgttgcaaaaagaagtctttcacaagaagatgtaacgattcttgtagataatcatcatgatcatggcgtgcaccacttctccgccttcaagacaaagttcggcaagacctacgccacgcaggaggagcacgaccaccgcttccgtatcttcaagaacaacttgctccgcgccaagtcacaccagaaattggatccatcgccgtccacggcgtcac

SEQ ID NO: 183570 - DNA, 256 bp, Glycine max
gccagagtgatgtaaaggctgggggtgatgtgtgtggtcgagttggcattcttggcattgcttgggcctttggtggcatgatcttcattctggtgtactgcactgctggaatctcagggggtcacataaacccagcagtgacatttgggctcttcttggctcgcaaggtgtctttgattagagcaataatgtacatggtggctcagtgcttgggagccatatgtggagttgggttggttaaggccttccaaaaggc

SEQ ID NO: 183571 - DNA, 255 bp, Glycine max
cagaatcattaaagataagattatattgctaagaagaaaaaatatgaaggttgtctacttgcttgttgccctcttggctttgacatcaactgttgtctctgcctatgaccctagtcctctgcaagatttttgtgtggcagccaaagaaaaagatggtgtatttgtgaacgggaaattctgcaaggaccccaagcttgtcaaagcagaagatttcttcagacatgtggaacctgggaaaactgacaacccactagg

SEQ ID NO: 183572 - DNA, 254 bp, Glycine max
ctcagattccggccactcctctcgccggcgagcccttactcttccctcctccgtcgagccctctccgattcgaatcgttcccagcctcgcaccaccatgaatcccgaatacgattatttgttcaagcttttgctgattggagattctggtgtaggcaagtcatgtcttctcctgaggtttgctgatgattcataccttgacagctatatcagtaccattggagtggactttaaaatccgcactgtggagcagga

SEQ ID NO: 183573 - DNA, 244 bp, Glycine max
ctcagaaggacagctagctatactgttaacacatgcaactcgaacgttcttctcggggacctcggcagaaggataagaggctcctagcgtgacggctgcttgtctcgcccaggaggcgggaacagctgaacacacagtggcgaccggctgcgtaatgcgtgggaatctggcgaatcctccggcgccaatcctgaacacagctcaatagcgctctttgatcaccatgcgtagtaccccgtagttg

SEQ ID NO: 183574 - DNA, 259 bp, Glycine max
actgaatacaaaggagagcatcatgtcggtgagcacaagccggagcaccatggaggagcagagcacaaagaggggttcctagacaagatcaaggacaagatccacggcgaggagggtggcgccaccgccgagggcgagaagaagaagaagaagaaggagaagaagaagcatgcacatggccatgacagcagcagcagcagtgacagtgattagattatctcccactgctgcatcacctatatatcttataaggtgtatg

SEQ ID NO: 183575 - DNA, 272 bp, Glycine max
tctagatcgccagccgccgctcctcgagccgctcgaatcgcttaattttgatttagttttccaccgcaacgcggaacctctttctcgaactggctaactctcaggcaagtcgctcggacgctgattccagcaacacgcggctggtgttgcactgtatgacgccctaaactccggcgcctccaacgccgtcgtcaagatcgtcgccgccgatctcgagtggtggttccatggtccgccctctcaccagtttttgatgcgcatgctcaccggcg

SEQ ID NO: 183576 - DNA, 271 bp, Glycine max
gttgatgataaattttggagaatatggtaccattactagtgctttaataatgagagatgctgatggtaaatcaaggtgttttggctttgtcaattttgaaaacccagacgatgctgccaaagctgttgagggacttaatgggaagaatttgatgataaggaatggtatgttggaaaagcccagaaaaaatctgagcgtgaacaagaactgaaaggacgatttgagcagagcataaaggaagctgctgacaaatatccaggtttgaacttgt

SEQ ID NO: 183577 - DNA, 275 bp, Glycine max
ttcaactctgcttcccctggcaaccttcttcttagttctctccgcttcttatctccagattgctggggcgaaagcacaaccgttgactagtctcaagcttaactctccgatccttcaggagtctattgctaaagagatcaatgaaaacctgaggcaggatgggaggctgctataaatcctcatttctccaattatacagttgaacaatttaagcgccttcttggagtcaaaccaacgcctaagaaggaactgagaagtacacctgctatatctca

SEQ ID NO: 183578 - DNA, 276 bp, Glycine max
ctttctctctaggcgcaaaacctcgtactgtttgtggcggctaaggatgtcagggaaaggggcgaaggggttgatcacaggcaaaacctccgccgccaacaacaaagacaaggacaagaagaaacccatctcgcgttcttcacgtgcggccttcagttcccagttggccgtatccaccggcttttgaagtcaaggacaaccgccaacggtagagttggggccacagctgctgtctactctgctgctatcttggagtatctcactgctgaagtattg

SEQ ID NO: 183579 - DNA, 274 bp, Glycine max
taactttttgattcctaaattctctaaaattcgaaattgcaatttcgttaggggaaagagattgttctgtgtgtgagtgagtatggctggaaaaggcgagggtcctgctatcggaatcgatttgggaacgacgtactcttgcgtcgggtgtggcaacacgatcgtgttgaaatcatagccaacgatcagggtaacagaactaccccatcctacgtggctttcaccgacacagaacggttgatcggcgatgcggcgaagaaccaggtcgctatga

SEQ ID NO: 183580 - DNA, 275 bp, Glycine max
gagaagaagaaacttaatcgatcatcacttcacttcactaatacatcatggcagacgagacccagaacaagtatgagagctctgaggttgaggtccaggatcgtggtgtttttgactttctcggtaagaaaaaggatgaagaagacagcctcatcctcaggaggaggtcatcgccaccgagtttcaaaaagtcactgtctcagaccaaggagagaacaagcacagcctcttagaaaagcttcaccgatctgacagcagctctagctcttcaagtg

SEQ ID NO: 183581 - DNA, 273 bp, Glycine max
atttgaaggatacaattgtgaagggatttgggttcacggcggaagatgatgttacgattacggggttcgatcctcgagacgccgaggtagggcattccgtggagtaccaattcgacctcgaaatcgatcacaaggttattcccttcagctcctcgaagacgtcaaacactgggattacgtcgatcttcccattttccgggccgaggcccaatccggtttggtccctaaacgggcttcggctgacgggcttcccgttttgggctccttcgttct

SEQ ID NO: 183582 - DNA, 276 bp, Glycine max
gttgaggcagagctgaaggaggcatctgtgatatctatgggaactgaaattggtgagcttgatttggcaaatattcgagaactctgtgaccaggttttgtctctctcggaatacagggcgcaactctatgattatctgaagagtagaagaacaccattgcacccaatttgactgcaatggttggggagcttgttggtgctcgcctcattgcccatggtggtagcttattaaatcttgcaaagcagcctggtagtactgtgcaaattcttggtgctg

SEQ ID NO: 183583 - DNA, 271 bp, Glycine max
cactcttccctctcttctttctttcatccccaaatcaaaacctaaattcccaccttcaactttctcccccaaatcgagcaccaccactgtcacgcccattcatttatatttcattcgtatatatacatacagagagtgagtgaagagagagtgggaagaatggattcggatcaaggcaagcttttcatcggtgggatttcatgggatacgacggaggacaagctcaaggagcatttcggtaactacggcgacgttttgagcacttccgtcc

SEQ ID NO: 183584 - DNA, 267 bp, Glycine max
atttgattttgcacccttcatggtgttgattattgccatactaaacgatggtaccatcatgacaatatccaaggatcgagtgaaaccatctccaatgccagacagctggaagctgagggagatatttgccactggtattgtgtaggaagttacatggcactaatgacagtagtatttttctggatcatgaaggataccgacttcttctcggacaagttcggtgtgaggtctataaggaacagccccggagaaatgatggcagccctg

SEQ ID NO: 183585 - DNA, 269 bp, Glycine max
gtcagagttcagtccttgtccgaaaggtgcacagattcaatccctgagaggtatatcaaacccctcagtgaccgtccatctgatgatgccgttgctgttgatgatgccaacatcccaatcattgaccttgcagggctttatgtggtgacccagatgctcgagcctccacactgaagaaaatatctgaggcttgtaatgagtggggtttcttccagatcgtgaaccatggtgttagccctcagctgatggacatggctagggaaacttgg

SEQ ID NO: 183586 - DNA, 268 bp, Glycine max
cttttacaaactgaagtgaatcggaggatctgttctgttccataagatggctggacttttgggatataggagccttccacctaaggcaaagaatttggtagttgctgggggtttgacagcttttgtctttggtgcctacttcacaccatgagggctgttggaggcactgatgaactgcaggtagcaattgataagtttgaagctgacaagaacaagaatgcgggcgatgccaacatgccatcaaaggtctaaagcttgtacaataaag

SEQ ID NO: 183587 - DNA, 274 bp, Glycine max
attttcaagctctcaacgccatctccagctgcttccttatcagaagcgcttcgccccagagattctcgcttcctctccttcaatccttcttccaacgctattaattacaaaattaacctctccgcttccctccgatccattcactcctccctcttaaaacctccttgcggatcaaatgctcccaaacagatgggaatggaagtcctgcaaagaggacagtgcttcatgatctttatgagaaagaagggcagagtccatggtatgataatctctg

SEQ ID NO: 183588 - DNA, 271 bp, Glycine max
aaaacgcattgtgtttctctctttccgcggcgtagatctgagcagtttgggaaaccctaactgctctcaccactctcactgctttttttcctctccgatcaacgacctctttcgtcgccctaagtcatggcaggacttgcacccagggatcacagtttgatcctcgtcaatatgataccaagatgaatgagttgcttacatctgatggacaggattttttcacatcttatgatgaggtttatgacagttttgatgctatgggcttgcagga

SEQ ID NO: 183589 - DNA, 277 bp, Glycine max
gttcaagttctcttcttggaaatttcccctctaatggaggctagaaaaagagagcaaaaaaactaaaaaatgcctgcggtcggaggtataaacaccggagggggcaaggagtaccctggaagcctcactctatttgtgacggtaacatgtaagttgcagccatgggtggtttaatcttcggttacgatatcggaatttcaggtggagtgacgtccatggatccgtttctgctcaagttttttccgtcagtgttccggaagaaaaactccgacaaaac

SEQ ID NO: 183590 - DNA, 276 bp, Glycine max
gtgacgtgccctagccccatatctagtctccctctctcaatctcacatctctcgtcgccaccgccgcgccgcacggaggcacccacggaaccaatctagccatcagttgaaacagtgagcttacaaaaaatggcaactgcacctgcacaattcctacaagctttggccatgagttgagggcttgtcttcgttgccgccttgtcaaaacctatgatcaggtcttagtaccctactaccctttatttttcatcattgttttttgtttacaatttctgt

SEQ ID NO: 183591 - DNA, 266 bp, Glycine max
aggccaaacaccaacagaagatatcatgttggagaaacaacttttgaatgatgaaaagcaatgtgcagagcacataatgctagttgatttggggagaaatgatgttggaaaggtctccaaaccgggttctgttcaagttcaaagcttatgaatattgagcgctattcccatgttatgcacatcagctcaacagtcacaggggagttattagatcacttaacaagctgggatgcattgcgtgctgctttacctgttggtacagttag

SEQ ID NO: 183592 - DNA, 266 bp, Glycine max
agaacagaggcatcagttgcaatggctcgttacggatgaggcgcgacaagcggtggatcgtggaggagcgccccgacggaaccaatgtccacaactggcattggtccgagaccaactgcctcgcatggtccacgacggtcttaccagcctcctcaataacctccctatcctcgacggcgagggtaacctcttcctcggaacgacgtcgcttcgctccctcgacggcgaggcctacatcaatgtccgacaggggacgatcatccccg

SEQ ID NO: 183593 - DNA, 267 bp, Glycine max
ctctaacctacctctctatcttctctctcaacaacttcaccttcttcctacgcgatcctgtctgcacttcaagggcaagtaccatgatgagcttatcgccaatgctgcgtacattggcactcctggacagggtattcttgcgctgctgagtcaacagggacaattggcaagcgtttggccagcatcagtgtagagaacattgaatgcaacaggcgagctcatagggagctgcttttcactgatcctggtgttacttcaatatctcag

SEQ ID NO: 183594 - DNA, 266 bp, Glycine max
cagagagagagagagagagacactgagagaaattcgcaaaccctaatttcggacagatcggcgatggctgcctccaaggatcgcgagaacttcgtctacatcgccaagctcgccgaacaggccgagcgatacgaagagatgtggaatcaatgaagaacgttgcgaatctcgacgttgaactgactgtggaggagcggaatttactttctgttgggtacaagaatgtgattggtgctcggagagcatcgtggaggatcctgtcttcc

SEQ ID NO: 183595 - DNA, 267 bp, Glycine max
gcaaacttctcattaatcgctatagtgctagtgattcattgcaattttgcataataatgactttctattcactacgtttatcacgtgtttcgcttctctattctgttttctctacgtatcgccatagcctctgctgatctatctcagatttctatgcatcaacatgacccaatggcctctctaccataaaatctgtagtgaaaagtgcagttgctatagagcgtcgcatgggggcatcattgttccgtcttcatctccatgattgct

SEQ ID NO: 183596 - DNA, 268 bp, Glycine max
cagcactaatttatatagcaagctagctaggttgaaaatagtttggttttgtagtaagtgaggtgaggtgccaaaatggtgaagataactcttggtactttcgatgactcttttggtgttgcctctcttaaggcttatttgcagagttccatgcaactctgattttcgtgttcgctggtgttggttcagccatcgcttacaacgagcttacaaaagatgcagccttggatccaacggggctggtggcagtagctgtggcccatgcatt

SEQ ID NO: 183597 - DNA, 264 bp, Glycine max
gagactttcagtactccagtgttaactgttttggtgtttacatctgtggcagtattccccaccctacttttgccttctaccccttccatgtgggtggctggaatgacatttggttatggctttgggttcttgctaattatactgcagcagctattggtgtatcactcccttttgtcattggcaaactcttccaccataaaattgaagggtggctggagaagtatccgaaaaaggcttctattctaagatctgctggtggaggga

SEQ ID NO: 183598 - DNA, 269 bp, Glycine max
attctacggcatcgagtccctcctcgtcaattccctttccaacccttctcaattggaaccttttaatctccaaaaatcgcttcttttacccttgaacggacgcgattccccctccgccctcgccgccaccgcttccggcgcctccacgtcgcgcacggcagcaagatcacctccttcgactggtccctccgccgcaaatccaccgtcctgactcaatttaccgccgtggattccctcctcgccctctcgccggccctcgccgccgccgg

SEQ ID NO: 183599 - DNA, 267 bp, Glycine max
attacaacaaccaagaagggctcaattacctctgtccaagctatctatgtgcctgctgatgacttgacagatcctgctcctgctaccacttttgctcacttggatgccacaacagtgttatcacgacagatctccgagcttggatctatcctgctgttgaccccttggattctacatctcgtatgctttccccccttattttgggtgcggatcactatgaaactgctcgtggtgtacagaaagtacttcagaactacaagaatcttc

SEQ ID NO: 183600 - DNA, 265 bp, Glycine max
cttcccctatggctcgtcactccttgctcttagccctcctcctcttcgccgccgtcgccaccgccgcgatggcggtggccgcgtccgacgccgacgacatcctgatccgtcaggtggtgccagatgttggcgaacccagaggaggacaacctgctgaacgccgagcaccacttcgcgagcttcaaggccaagttcgccaagacctacgccaccaaggaggagcacgatcatcgcttcggcgtcttcaactccaacctccgcagag

SEQ ID NO: 183601 - DNA, 265 bp, Glycine max
  unsure (1)..(265): unsure at all n locations
ctcgagccgctcgagccgattcggctcgagcaaaacatacacctcttctctctgtttctctaccctctctacctcnctccctcttcaactaacatggcacttgaaaaccaagacaccgctgtcagagaaatcaagcccagaacaggagaatcatgggtgctggagggcctgatgatgaggacaataggtggccaccgtggttgaagccactgctgaaagagagcttctttgttcaatgcaagttgcatgctgattctcacaagag

SEQ ID NO: 183602 - DNA, 261 bp, Glycine max
gagagtgacatcaagtggccatctagatgggatgcttactcgaagatggagggagctaaagtgcattggttttctatccttaattcgcttatggtgatcacttttcttgctggcattgttcttgtgatcttcctaagactgttaggagggatctgacccgttatgaggagcttgataaggaggctcaagcacagatgaatgaagaattatctggttggaagcttgtagtgggagatgttttccgtgctccatcgaatcctg

SEQ ID NO: 183603 - DNA, 263 bp, Glycine max
ctgatattctctcttgcaagatatgaagctgtaatagatgcttacttggatggtcttgaggcatctgggttaaatgacctctctagagttacaagtgttgcctctttctttgtcagtagagtggacactctcattgaaaggcccttgagaaaattggcaccccagaggctcttaatctacgtgggaaggcagcagtagcccaagcagcattggcttaccagctctaccaaaggaaattttctggtccaaggtgggaagctcta

SEQ ID NO: 183604 - DNA, 267 bp, Glycine max
ggccgccgaatcacaacctcaactaatcgaagagagaagagaggagcaagaacttaagtacctggaatttgtgcaattcgcgaccatccaggccctgatgcgctgcgccatcctctactcctacgccaaggagcgcgcggtcctctgaagcccggcgtcaacaccgtcgaggaggccgtgaagaccgtcgtggctccggtctacgacaggttccacctcgtccccggcgaggtcctcaaatacgccgatcgcaaggtcgccgaattg

SEQ ID NO: 183605 - DNA, 256 bp, Glycine max
cccctctcggaggatgaaatcctccgagaaaagatattccgacacgtggacgaggcgtgtcgggagtgggggttcttccaggtggtgaaccatcgggttagccatgagttgatgaaaagttctagggaactgtggcgcgagtcttcaaccagccactacaggtgaaggaggagtatgccaactcacccaccacttatgagggctatggaagtcgcttgggagtgcagaaaggtgccaccttggactggagtgacta

SEQ ID NO: 183606 - DNA, 269 bp, Glycine max
cctaaccctaggccaagatttacctgatggaaaccttggtgccttgcagaagaagggtaatgttgccaaagacaaattctccaaggtgctatggtatgccataacaaattacaggacatgggtttttgccctcctatatgggtaccgatgggagttgaattaaccactgacaatgtcattgctgagtatttctatgacaggtctaatctcaagctacacactgctggaatcatggctgcttcatttggaatggcaatctcctagctcgt

SEQ ID NO: 183607 - DNA, 275 bp, Glycine max
cgctatggcttccttaagctcctcattagtgatgctccttgcagctctaattctatcccctcaagttcttgctgactatgagaagcccccaatttacaagccacctgtttacacaccgccagtttataagcccccagttgaaaaaccacagtgtacaaacctccagtttacaagcctccagttgacaaaccacctgtttataagcctccagtttataagccaccagtttacaagccaccagtgtacaagcctccagtgtatcaaccaccagttta

SEQ ID NO: 183608 - DNA, 263 bp, Glycine max
ctattcttacaagttacatccattgagaaacatgaaggtctcccccttagcattttcaatcctttttttgtccttcaccatagaactcttcattggcattgcttcagcagcacaagaaccagtgcttgacacctcagccagaagctgagaacaggtgtcaagtactacattctaccagtcttcagaggcagaggtggaggcctaacagtttcaagcagtggcaacaacacatgccccctctttgtggtgcaagagaagcttga

SEQ ID NO: 183609 - DNA, 261 bp, Glycine max
cgtagatatggctgaaactgacatccaagactatctccaactcttcttcctctggttactctccatcatcgccgttagagccatactcaccaaactccgccacaagcctcgccgtccaccgggcccacggtccctcccatcatcggccacctccatctcatctccgccctgcctcaccagtctttccacgcgctctccacgcgctacggccccgccgtgcaagtcttcctcggctccgtccccgccgtggtcgtttcgtgc

SEQ ID NO: 183610 - DNA, 260 bp, Glycine max
agttgccggatttcgcacttgtggttggcacgaatgattgtcacagagagtgttttagcaatgattctcgtactgcgtatgctaatgtcaatggattagggtgcatggtgtggcatggggacttggttgatattcaacatttggaaagtggaggaaatacattgtacatacgcctcgctcattctgatttagatgatggtggaaaaacgaacagaattgtgataatatcaactgttgtggcggggttaatctgcctagga

SEQ ID NO: 183611 - DNA, 140 bp, Glycine max
gaaattcctaacatgtcccctggacgcagtgccaggggagctgaaatgcctgcaacagctgaggcgccacctctggttgccgttgtaaatgatgaattatatgctgctgattatgctgacatggaggtaaaaaaatcgac

SEQ ID NO: 183612 - DNA, 262 bp, Glycine max
cttactgcttacaacacatgttggtgggcttggtttgaacctgacatctgcagatacccttgtttttgtggagcatgactggaatccgatgcgagaccttcaggctatggatagagcacacaggttaggtcagaaaaagtagttaatgtccatcggctaataatgcgtggtactttggaagagaaagttatgagtctacaaaggttcaaagtctcagtggctaatgctgtcattaattctgaaaatgctagtatgaaaacaa

SEQ ID NO: 183613 - DNA, 263 bp, Glycine max
aatccatgtacttgttgacatgcaaaatatggttgttcttgaatttgaagatcgtaaacttgtcccccttccacctgctgatccactcagaaattatacttctggtgaaacccaaggaggagttgaccgaagtgatggaaacccttgcagattattcagcctgaaggtccaagttttcgtgttaatgggcacttcattgaatggcagaagtggaattttcgtattggattcactcctagggagggtttggttattcattcagt

SEQ ID NO: 183614 - DNA, 262 bp, Glycine max
cgtttatttaagagacattgtggtgagttttctattagcgggtcgtgacaccatcgctgccgggttaacgggcttttttatgttgttatcgaaaagcccggaggtggaggagttgattagggaggaggtgggccggtgatgggcccgggccaggagtttccttcgtttgagcaaatccgcgaaatgcattacctgaacgcggcgattcacgacagcatgaggctgttcccaccgattcagttcgattcgaagttcgccacgg

SEQ ID NO: 183615 - DNA, 256 bp, Glycine max
cagaaggtagttgaaataataaacccagaggatgattacatttggattcatgattatcatttgatggtgctaccaacttttataagaaggcgttttaacagggttaaaatgggatttttcctgcatagccctttccatcgtcagacatatataggactcttccagtcagggaagagatactgaaagctttactaaactctgatatcatcggattccatacctttgactatgctcgtcatttcctttcctgttgcag

SEQ ID NO: 183616 - DNA, 259 bp, Glycine max
cctgccagtagtcatatgcttgtctcaaagattaagccatgcatgtgtaagtatgaactaattcagactgtgaaactgcgaatggctcattaaatcagttatagtttgtttgatggtatcttctactcggataccgtagtaattctagagctaatacgtgcaacaaaccccgacttctggaagggatgcatttattagataaaaggtcaacacaggctctgcctgttgctttgatgattcatgataactcgtcggatcg

SEQ ID NO: 183617 - DNA, 257 bp, Glycine max
cttaaccgctctcctcctttttagttgttccccttaatcttgttcctctcatatttttcttttttcttattagatcagattgaacaaaagggttgctctttattttttaatcttgggggaataatagaaatagaataagaaaagattagtgaggttgaaatgttgcaacaacgatcggtgccggcaccgttcttgacgaagacgtatcagttggtggaggatccggggacggacgaggtaatatcgtggggtgaaag

SEQ ID NO: 183618 - DNA, 258 bp, Glycine max
gagaaggctgtgcttgaatttggagaacagaatgggttggaagttgcaactgttattgctcctttcattgttggtcgttttgtttgtcccaagcttcctgactccattgagaaagctctgcttatggtgttggcaaaaaggaagaaattggtgtcattcgttaccatatggtacatgtggatgatgtcgctagagcacatatcttcctgcttgagcatcctaatccaaaagggaggtataactgctcaccattcattg

SEQ ID NO: 183619 - DNA, 260 bp, Glycine max
gcagcagtgcagggaagttggtgtgtgtcaccggtgctgccggttatattgcttcatggattgtcaagttcctacttgaacgtggttacactgtcagggccactgttcgaaacccaaatgatcacacgaaggtaaacatttgctaaaacttgaaggtgcaaaggagagactgcacctttttaaggcagatcttttgggtgaaaattcttttgactccattgttgagggctgtgatggcgtctttcatactgcttctcctt

SEQ ID NO: 183620 - DNA, 241 bp, Glycine max
tcgagcctctaacctacctctttttcttctctctcaacaacttcaccttcttcctcctcgatcatgtctcacttcaagggcaagtaccatgatgagcttatcgccaatgctgcgtacattggcactcctgaaagggtattcttgctgctgatgagtcaacagggacaattggcaagcgtttggccagcatcagtgtagagaacattgaatccaacaggcgagctcttagggagctgctttt

SEQ ID NO: 183621 - DNA, 260 bp, Glycine max
gtggaacaattggacatatagcaccagaatacctctcaactggaaagtcttcagagaagactgatgtttttggatatggtgtgatgcttcttgaactaataactggacaaagggcttttgatctagctcgacttccaatgatgatgatgtcatgttgcttgattgggttaaaggacttctcaaagacaggaaattggaaacactagtagatgcagatttacatggtaactacaatgatgaggaggtagagcagttaatcc

SEQ ID NO: 183622 - DNA, 235 bp, Glycine max
attctaatcatctgggttttgctggatcagtaaattcaggaattacaacctttgagatggagtatggacactgggtgaatgagcaaaatagacaaatcacagaactgagaaatgctttaaatgctcatattggtgagtagagctcaggatgttagtagatggtatgatgagccactaatgccgaaatgtttcgcatgaactctgctgctgcaaaagcagatgttttctatgttat

SEQ ID NO: 183623 - DNA, 265 bp, Glycine max
acatctgcagagcctgcttggttttaccgtcatgttacatgccaaacctctgcctacatagttggtgttgctgggtggggaactggtctcaaactcggaagtgactcggttggtattaagtataacacccatagagcattgggatcaccctcttctgacttggacaccttcaggtttttgctctgctcttgaggcccaacaaagaccaaaaatcagaatctactggaacatttaccataagccgttggatatcccacataatcat

SEQ ID NO: 183624 - DNA, 178 bp, Glycine max
ccgtgttcccactgtggatgtctctgttgttgacctcacagtgaggctggagaaggaagcctcctacgatgaaattaaaaatgctatcaaggaggaatcagagggcaagttgaagggaattcttggttacactgaagatgatgtggtctccaccgactttgtgggcgatacagatcaa

SEQ ID NO: 183625 - DNA, 175 bp, Glycine max
ggaagtggcaagtttaagactgtggctgaggctgtagcatccgcacctgacaacggtaagacaaggtatgttatttacgtgaaaaagggaacttataaagaaaatgttgaaatcggcaagaagaagaccaacgtgatgcttgtaggagatggtaaggatgcaactgtaatcaccg

SEQ ID NO: 183626 - DNA, 174 bp, Glycine max
cagcaacgatggtgcagaggctcacttatcgcaagcgccatagctatgctaccaaatccaaccagcaccgggttgttaagacccctggtgggaagttggtgtaccagaccactaagaagagagcaagtggacctaagtgccctgtcactggcaagaggatccaagggattccac

SEQ ID NO: 183627 - DNA, 173 bp, Glycine max
cgggttgattgacccagaaggaatcgaaacactttgtgctgatatggaggtggatcatacagatgtgagggttttgatgcttgcatggaaaatgaaagctgaggagcaaggatattttaccttggatgagtggaggagaggcttaaaagcattaagggccgatacagtaagta

SEQ ID NO: 183628 - DNA, 178 bp, Glycine max
gtttggaggatccagggatctcttgctgtgtctaggggaattggagatagacacctgaaacaatgggtgacagcagagcctgagaccaaagttctcagaattgaacctgaacatgacttgttaatcttagcttcagatggattatgggataaggttagtaatcaggaagcagtagata

SEQ ID NO: 183629 - DNA, 176 bp, Glycine max
gaagaagagaaagaagcatgaaagcacagatagcctggtcagcatgcatgatgtcatggatgctcagtgggtttatgataattatagggatgagacttatttgaggagggttgttatgcccttggagattctcttgactagctataagaggcttgttgttaaggactctgctgtca

SEQ ID NO: 183630 - DNA, 176 bp, Glycine max
caaatcctctgagagaaaaaaaaattagggttttgcatttcgggtcagacagactcagacatgggaggaggcaatgcccagaagtcaaagatggctcgcgagaagaacctcgagaagcagagggctgccgctaagggaagccagttggattcaaacaagaaagccatgtctattca

SEQ ID NO: 183631 - DNA, 175 bp, Glycine max
ctgagaaagagatggcaattgggttcatggaggtgcagcttgtgaaagcaaaggagttgtgtgacactgatttctttggtagtatggacccgtatgttgtgatacaatacaacggccaagagcaaaggagtagtgttgctaagggacagggcaataatccggtatggaatgagaa

SEQ ID NO: 183632 - DNA, 169 bp, Glycine max
cttcgcctttctctctcttctttttactctctctctgtctctctctacgctttctcgttcgagatccctcaagggatccactaactgaaggagaaatggggttgacattcaccaagcttttcagccggcttttcgccaagaaggaaatgcgaattctgatggtgggtct

SEQ ID NO: 183633 - DNA, 166 bp, Glycine max
ggacttttgatgtctctcttctcaccatcgaggagggtattttcgaggtgaaggccactgctggtgatactcacttgggaggtgaagattttgataacagaatggtgaaccattttgttcaggaattcaagaggaagaacaagaaggatattagtggaaatgccag

SEQ ID NO: 183634 - DNA, 174 bp, Glycine max
ctctacagtgcaattgatggcagcaaagggttctataaatgccctgttgagaagtctgtgagatctttgatgaatgtgcctttcactttggagaaatcagagctggagggtgagtttatcaaggaggctgctaaagagaagatggtgcagctcaagggacatagatcagtggga

SEQ ID NO: 183635 - DNA, 173 bp, Glycine max
caatcttgcaattgtggtaccacagatggtggtgtctgcattaagtggtccttgggattccttgtttggtggtggcaacttgccggctttcatggtgggtgctgcggcagccgcgttgagcgccataatggcgattgtcttgctgccaactccaaagccagctgatgaggcca

SEQ ID NO: 183636 - DNA, 172 bp, Glycine max
cggctcgaggttgtaggctaggtcctattgttagtgaaggacagtataaaaaagtgttgaattgtatctcaactgctaagagtgagggtgcaacaattttgattggagggtctcgcccagagcatttgaaaaaggggtactttgttgaaccaaccatcataactgatgtgac

SEQ ID NO: 183637 - DNA, 170 bp, Glycine max
ctccgatcaccccctcggatccggtatcggcttcaaagaaaccgactctcccaatttcaccggttctttttactccaagaccaaggcaatggtagaggatctgctgaagaactatgataatgtgtgcacattgcgagtgaggatgcctatctcatccgatttattgaacc

SEQ ID NO: 183638 - DNA, 167 bp, Glycine max
caatatattccattctctctgtgtatttccctacctctcccttcaagatgcagatcttcgtcaagaccctcaccggcaagaccatcacccttgaggtggaaagctctgacaccatcgacaacgtcaaggccaagatccaggacaaggaaggaatccccccggaccag

SEQ ID NO: 183639 - DNA, 167 bp, Glycine max
gtgatccgtgcgcagcgtaagggagcaggctcggtcttcaagtcccacacgcaccaccgcaagggccctgcccgcttccggagcctggatttcggagagcgcaacggctacctgaagggtgtcgtcactgacgtcatccacgatcctggccgtggcgcgcctctcgc

SEQ ID NO: 183640 - DNA, 167 bp, Glycine max
aatttgcactgagggcattggctagcacacttaatgaagaagagttggctgatataaaagatcaatttgatgctatagatgtagacaaaaatggttcgattagcctggaagagatgagacaggctcttgccaaagatcttccttggaaattgaaagaatcacgtgta

SEQ ID NO: 183641 - DNA, 168 bp, Glycine max
cattaagagcgtagaaaccattgaaggagatggagggccaggaaccattaagaagcttactcttgctgaaggtttaggttatgtgaagcaccacgtagatgcaattgacacagaaaactatgtgtacaactatagtgtgattgaaggcagtgcattgtcggagccatt

SEQ ID NO: 183642 - DNA, 163 bp, Glycine max
gtactcataaccgcatcaggtctccaaggtgaacagcctctggtcgatggaacaatgtaggcaagggaagtcggcaaaatggatccgtaacctcgggaaaaggattggctctgagggctgggcacgggggtcccagtcccgaacccgtcggctgtcggtggac

SEQ ID NO: 183643 - DNA, 163 bp, Glycine max
atactttgatattcaatgcatttgttctctgtcaaatctttaatgaatttaatgctcgaaagccagatgaattcaacatattcaaaggagtcacaagaaactacctctttatgggtatcattggattaactgttgtgcttcagattgtcatcattttatttct

SEQ ID NO: 183644 - DNA, 166 bp, Glycine max
cgcaagcctctcattgtaatgtcccctaagaacctgcttcgtagcaaggcttgcagatcaaatttatctgagtttgatgatgtccaaggccacccaggctttgacaaacagggaaccagattcaagcgcctcataaaagatcaaaatgagcacaaagatgttgagg

SEQ ID NO: 183645 - DNA, 167 bp, Glycine max
ctcgagccgaccactaccacctttccgccttcagccgtttcaaccaccagcaaatggctgggcttcgtggcggccgtgtggattcaatgcatctccggcaacaactacactttctcaaactactccgacgccctcaaatccctcatgcacctcactcagctccaact

SEQ ID NO: 183646 - DNA, 162 bp, Glycine max
gaacgaacggatccgaaaggcgctgagagaattttttgacctgacgggggcgttcaatgtgtctgatgctcttccttatttgagatggttggatttggatggtgcagagaagaaaatgaaaaagacggcgaaagagttagatgggtttgttcaagtttggct

SEQ ID NO: 183647 - DNA, 160 bp, Glycine max
gttgagaggaggcactgtggcagaagtcctaggagtgtaaaacagagacgcaaaatgaagacgatcttgtcgtctgagaccatgaatattcccgacggcgtgagcatcaaggttcacgctaaggttatcgaggttgagggccctcgtggaaaactcgtgc

SEQ ID NO: 183648 - DNA, 160 bp, Glycine max
cgcatataacaataagaatttcttacagaccgggttaattgttggtggttgggataaatatgaaggtggacaaatttatggagttcctctgggtggaacaatagtacagcaaccttttgctatcggaggatctgggtccagttacttgtatggtttcttt

SEQ ID NO: 183649 - DNA, 163 bp, Glycine max
caatcacaattgaatttctgggattctcacctccatcaacaaaccctaagcacataacatcgtcgctcacctgcaccatagagtttcttccgtatatgctccacttcaccatctcgctctgcagcaccagatcaatgatcggcacgttgggccccacttggga

SEQ ID NO: 183650 - DNA, 162 bp, Glycine max
gtgaagttgcagtcaattgtgatgccgctttctgagtttgatcatgcagataagggagatgcgctgcacgcaatggaactcgctctctcattagagaagctaacgaacgaaaagctccttaacttgcacagtgttgccacaaaaaatggtgacgtgcagttg

SEQ ID NO: 183651 - DNA, 159 bp, Glycine max
ccaaagtggggcataaaatggataggcctacaaatgcttagtgttgcatgctttgtaattactagattagctgcagcaggttccattgctggggttattgatgatctttaagtttacaagccatttgttaccagctactaattcaataggataattact

SEQ ID NO: 183652 - DNA, 163 bp, Glycine max
gtttctgaggaaaccaccactggagttaagaggctctatcagatgcaggcgaatgggactcttctcttccctgctattaatgtcaatgactctgtcaccaagagcaagtttgacaacttgtatgggtgccgtcactctctccctgatggtctcatgagggcta

SEQ ID NO: 183653 - DNA, 160 bp, Glycine max
ctctctctcaccaaagccttcctagaacgaaaaaaaaaagaagagcaattttccctcaccaaagaagaagaagcaaacaatggccgatcaacttaccgatgaacagatctccgagttcaaggaagccttcagcttgttcgacaaggacggcgatggttgc

SEQ ID NO: 183654 - DNA, 161 bp, Glycine max
gaaagctcgacatgtcagggaaaggcgcaaagggtttgataactgctaaggacaaagataagaaaaaaccaatttctcgctcctcaagagccggtcttcagtttcctgttggacgcattcatcgtcttctgaagtcaagggtgacagcacatggaagagtt

SEQ ID NO: 183655 - DNA, 211 bp, Glycine max
cgagattgcaaaattctcttccgtttcaggattagcgtttcaccgttacagtgaaacatggcaaaaccaaagcgaatctctctgcgtatctttgcgctgctcctcttgatttccacctcttcgtttcagcttctccgcgcttccgatgacgccgatgatgatgcgatcttctatgattcgttcgacgaggattttgaagaccgttgggttg

SEQ ID NO: 183656 - DNA, 207 bp, Glycine max
atttggtgaagcattggataagacccagaccgtcatttggaatggaccaatgggtgtttttgagtttgataagtttgccacaggaacagaggccatagccaagaaactggcagagctgagtgggaagggagtaacgaccatcattggaggaggtgactctgttgccgctgtggagaaggttggtcttgcagacaagatgagccacat

SEQ ID NO: 183657 - DNA, 210 bp, Glycine max
gaaatatgggatgctattaagtcatgggtccaagagtatgtttccttgtattacccaacagatttggcaattcaacaagatactgaactccaagcatggtggaaggaagttgttgagaagggtcatggtgacttaaaagacaagccttggtggcctaaaatgcagactcgtcaagagcttattcaatcatgttctactatcatatggatt

SEQ ID NO: 183658 - DNA, 207 bp, Glycine max
aaaaattacccaattgagactaccaggcttgaatttggcaggacaactgtcttcggcaattcagtctttatccgaactagatactttggatctttcttacaacacaggcttgacaggaacaattccacaagacattgggaatatgaaaaagctaaaatccctatcattggttggttgtggtttctctggtcctattccggattcaat

SEQ ID NO: 183659 - DNA, 213 bp, Glycine max
ctgctagctgtgacttgttttgagttcaatcaaatcgcattggtctctgaaatcaggaaagatggttagcgtagtgacgatcaggcaggcacaaagggcagaaggcccagcaaccatccttgccattggaactgcaaacccaccaaaccgtgttgatcagagcacctatcctgattactacttcagaatcaccaacagtgaccacatgaccga

SEQ ID NO: 183660 - DNA, 214 bp, Glycine max
ctcttggactttcctctcactcagatcctggtggcatgaccattcttctccctgatgaaaatgtggcaggacttcaagtacgcagaggagaagattgggtcactgttaagccagtcccaaatgctttcatcatcaacatgggtgaccaaattcaggtgctgagcaatgcaacttacaagagtatagagcacagggtgatcgtgaactcagacaa

SEQ ID NO: 183661 - DNA, 215 bp, Glycine max
tctgcactcagggctgtgattaaatgcattgaagaatacaaacttgaggatgagttccctccagaaaatctgaagaagcgacttgaccagttagagaaggtgaagaccgagaaaaggaaaccagtggcagttcctgccaataagagaactagagcaagcaacggcaatggaggtccaatgccaccagccaaagctgggcgtttgactaatgcgta

SEQ ID NO: 183662 - DNA, 209 bp, Glycine max
gagagagagagagagagagagagagagatatggcttgcaggcaattgtgggcttcaagagctgtctcttacctgaggctctctgtgtttcacagaggcttttctaatgttgttaaagatttgaagtatgctgattctcatgagtgggctgaagttgatgaaaattctgcaaccgtcggcataactgatcatgcccaagatcatttaggt

SEQ ID NO: 183663 - DNA, 209 bp, Glycine max
gtgatttggagtttggagcgactgaactaatcattaatttgcactcgctgtttcagcttcatcacccttcttttgcatcatttatatctcttgagaaatggcacaagaaacctttctattcacatctgaatctgtaaacgacggtcaccccgacatgctgtgcgaccagatctctgatgcagtacttgatgcgtgccttgaacaggacc

SEQ ID NO: 183664 - DNA, 208 bp, Glycine max
ccaccacacaattcctacacatttctactctttagtttctccaattttctttctcaattctcaacaatggccactacaacacaacttcacttaccccctggattcagattccatccaacagatgaactactcgtcatccactacctttgtcgcaaatgcgcttcgcaacatatcgcggttcccataatcgccgaaattgatctgtaca

SEQ ID NO: 183665 - DNA, 208 bp, Glycine max
gtagaggctgctgtgaagagctataaacaagcattgattcttcgtccagacttccctgaagcaacttgcaatctccttcatacataccagtgtgtatgctgttgggaggatcgtgataaaatgttcaaggaagttgaagcgataatcaggaggcagattaatatgtccgttattcctagtgtccagccattccatgcaatagcatatc

SEQ ID NO: 183666 - DNA, 210 bp, Glycine max
ggcgatgatgcaaggtgtgcagaagaacacgctatacgtgggaggcttagcggaagaagtgaacgagttgatcctccacgcggcgttcattcccttcggcgacatcaaggacgtgaagacgccgctggaccaggcctcgcagaagcaccgctccttcggcttcgtcaccttcctcgaacgggaagatgcctccgccgccatggacaacat

SEQ ID NO: 183667 - DNA, 218 bp, Glycine max
cggtgattgtttgttgttgtaactcgttcttcttcttttgttgttctgtgtttgtgcttgttttttctctcacctgaaaatgtcttgctgcggtggtaactgtggttgcggaagctcctgcaagtgcggcaacggctgcggaggctgcaagatgtacccagacttgagctacactgagtcaaccaccaccgagaccttggtcatgggagtggcacctg

SEQ ID NO: 183668 - DNA, 204 bp, Glycine max
ccgaaaccctaaccctaacggagagatggcggacacttggcatcgatattcgggacggagaaggacagggtgaactgtccgttctacttcaagatcggcgcgtgcaggcacggcgaccggtgctcccggcttcacaccaagccgacaattagcccaacattggttctgtcgaacatgtaccagaggcccgacatgaacatgagc

SEQ ID NO: 183669 - DNA, 205 bp, Glycine max
gcaaatgtctatttgtggagattttggccgtgtttttgagattggtcctgtgtttagagcagaagattcctacactcacaggcatctgtgtgagtttacaggtcttgatgttgaaatggagattaagaagcattactttgaggttatggatatagtcgatagattgtttgtcgcaatgtttgacagtttgaaccagatttgtaag

SEQ ID NO: 183670 - DNA, 205 bp, Glycine max
gtggcttccagtttgctgtcaaacatcttgatggtaggcaactattgatcaaatcaaaccctggggaagtcatcaaaccaggtcaatataaagcaataaatgatgagggaatgccacaacacaataggccattcatgaagggtcgcctttacatccagtttaatgttgatttcccagactcagggtttctttcccctgaccaatg

SEQ ID NO: 183671 - DNA, 209 bp, Glycine max
caaatttcagattgacacagagactcatgacccccttgatattggaatgtaccagatccgggaggccaatcaaatggtggaggagtttatgcttgctgctaatgtttccgttgcacaacaaattcttaatagttttccattggtctcattattaaggcgtcatccaacaccaactagagagatgcttgaacccttgttacagactgctg

SEQ ID NO: 183672 - DNA, 213 bp, Glycine max
cggaatcagaggctccccctaacttctggggccacaccccggaagaagaatactacacctcccaaggcgttcgcaacaccaagtcccacttcgaaacccccaacggcaaaatcttcacccagtccatcctccctctcaacctccaaccccaccaagtcaaagccaccgtctttatgacccacggctacggctccgacaccggctggctcttcc

SEQ ID NO: 183673 - DNA, 213 bp, Glycine max
catttgggagttaggttctgcacgctctgcttccagcgagtgttctttcttcgtttcaacaccttaatttgcacacgctgcttcttcagcttgagaaatggcacaagaaacctttctattcacatctgaatctgtaaacgagggtcaccccgacaagctgtgcgaccagatctctgatgcagtgctcgatgcgtgccttgaacaggaccctga

SEQ ID NO: 183674 - DNA, 202 bp, Glycine max
gattgttgtgactcgttcttcttcgtcgttatcttcttcttttgttgtttgtgtgtttgttttttctctcacctgacaatgtcttgctgcggtcgtaactgtggttgcggaagcgcctgcaagtgcggctacggctgcggacgctgcaagatgtacccagacttgagctacaccgagtcaatcaccaccgagaccttggtca

SEQ ID NO: 183675 - DNA, 204 bp, Glycine max
tgcaatcatcaataagtattcagagcaacctttcctaaaagaggatagtgtttatcacaggatggatgtgatcaataagtgcttctctaaaaaggctgttgaggaaatattatcttctctcgaggtggaagctacgagaaaggctgatccttggatttctgcaactattcaatccttaaagaaagcatctccaacaagccttaa

SEQ ID NO: 183676 - DNA, 208 bp, Glycine max
aatttatatagcaagctagctaggttgaaaatagtttggttttgtagtaagtgaggtgaggtgccaaaatggtgaagataactcttggtactttcgatgactcttttggtgttgcctctcttaaggcttatttggcagagttccatgcaactctgattttcgtgttcgctggtgttggttcagccatcgcttacaacgagcttacaaa

SEQ ID NO: 183677 - DNA, 213 bp, Glycine max
aggggctttcctcttgcttctggccaatctaaagccaagtttcaaatggagcccaatactggagtgacatttgatgatgttgctggagtggatgaagccaagcaggattttatggaggtggtggaatttcttaagaagcctgagaggttcactgctgttggggctcgcataccaaaaggtgttcttcttgttggtcctcctggaactgggaag

SEQ ID NO: 183678 - DNA, 207 bp, Glycine max
gggttatttaagcctttctcgtgaaaaccgtcgcaagttgctccttgtccttgctagagagtatgatctcaataggtcacaagtgcgtgaactgataaagcagtaccttggacttgaacttcctgctgacaaagctcaagtgagtggctctgaagacgaaggcttgttctcttctttctatcgcgttgagaggaatttgaggcatgc

SEQ ID NO: 183679 - DNA, 206 bp, Glycine max
ccctcgagccgaatcggctcgagcggctcgaggtgagatttgcgaatctgagaaatggcggattcttctcgggaggagaacgtttacatggcgaaattggcggacaggccgagcgttacgaggagatggttgagttcatggagaaggttgcaaagactgtggaggttgaggagttgacggtggaggagaggaatctcctctctgtg

SEQ ID NO: 183680 - DNA, 204 bp, Glycine max
ctgcgtttgcttctcctccacccatccacaaacgaacacacactttgattgagaatggggcgtgttcgcacaaagacagtgaagaagtcctcgcggcaagtgatcgagaggtactactctcgcatgacgctggacttccacacgaacaagaaggttctggaagaggtggccatcattccctccaagaggctccgcaacaagatc

SEQ ID NO: 183681 - DNA, 207 bp, Glycine max
gccaccacctccgcattcctcctccttcccctcctcctgctgctccacctcgccatcgccgctcacggcatcggcatcaactacggcacgctcggcgacaaccttccaccgcccgcggcggtgaccgaacttcctgaagacgaagacgaccatcgaccgcgtgaagatctacgacgtgaacccggacatcctgcgggccttcgccgg

SEQ ID NO: 183682 - DNA, 205 bp, Glycine max
ctcactcatacctcttcaatctaacaaacttaatttcttttgttttgagtttcttagagaatggatgcaaaaggagcaagaagtagcaacacccttttaagttgtgaggacgagatggaccttcgaagaggcccttggaccgtcgatgaagacctcactcttatcaattacattgccactcatggcgaaggtcgctggaacacgc

SEQ ID NO: 183683 - DNA, 204 bp, Glycine max
tcttcttcccaaccactactactcactcactgcagatctcaattgcatcgctgtccatggctaccatcgttagcatcaaggcccgccagatcttcgacagtcgtggcaatccaactgtcgaggtggatttgacttgctccgatggtacttttgccagagctgctgttccaagtggtgcatccactgggatttatgaggcccttg

SEQ ID NO: 183684 - DNA, 214 bp, Glycine max
ctcgaactctcattcgccatttcctcacctccttcaaccgctgctaaattctagggttccgaaatggacgctggcggaaagatcaagaagggcgccggaggtagaaagggcggcggcccaaagaagaagccggtttcaaggtccgtcaaagccggtctccaattccccgtcggaagaattggccgttatttgaagaaaggaaggtacgctcagc

SEQ ID NO: 183685 - DNA, 205 bp, Glycine max
cagctgccaagcttgctgaacttgccttgattgaccccaaacgtgcaaaaaggatatgggcaaataggcagtctgctgcaaggtcaaaagagagaaagatgcgatacattgctgagcttgaaaggaaggtgcaaacattgcaaacggaagcaacatctttgtctgcacaattaactctcttgcagagagatacaaatggcttaaa

SEQ ID NO: 183686 - DNA, 201 bp, Glycine max
ggaccctcgagagtggaccctacacgttaaaataccgtggtagcatgtggggttacaagcggttacttaagagaacagcactagagacatcagattaccttaaagatgattgccttagtgttaattgtagtgttggtgttgtgaagtcacacacagagggccctaaaatatataaaatcccaattccgtcttctaacatgg

SEQ ID NO: 183687 - DNA, 203 bp, Glycine max
cgtggctctgccaacatggatgtgctcattgcgctgggaacaaacgcagcgtatttttactctgtttactctgttttgagagctgccacctctccgcatttcgaggggaatgatttctttgagacgagtgcgatgcttatttcgttcattctgcttgggaagtatcttgagattctggccaaggggatgacttctgatgcgat

SEQ ID NO: 183688 - DNA, 207 bp, Glycine max
cctcgagccgaatcggctcgaggttgatattgtcattggcacaccaacgccgtgtgaaggatactattgagaagggaaataacgacctgagccaactaaagtttcgtgtccttgatgaagccgatgaaatgctgaggatgggttttgttgaagatgttgaaatgattctaggcaaggtagaaaatgttaataaagttcagacacttc

SEQ ID NO: 183689 - DNA, 207 bp, Glycine max
tggccaccggtggcgatttgtgggtcagagttggcggcggacgagagattggtggcggtttcagccacgagagcgagcatgatttggcgctcatggttagcgattttttagaaaatggaagtagtggcgcagagtcttggtgtagcagtgatagcgatactggacattctgatttcgctcaactcgccgagaggattcagatctgta

SEQ ID NO: 183690 - DNA, 287 bp, Glycine max
gccctcttggagccaccaatgctagaagcaactaagcctaagcactttgttggggagagtagtactagcactacgaaagtaaccaagcacttcgaaaacgagaagaatccttcgaagctagaggtgctgcctctgtcagaagggcctagggatgtttttcagtttcaagctagactttggcaagctgttaccaaagctgtgaagaagatcaagcgaaaaaatgggccccatagaggagaggatttcaccttgtcacaggcaatggccaaggctgatttttgggtcat

SEQ ID NO: 183691 - DNA, 282 bp, Glycine max
gccagtggcctggtacaattgatcaatcatggagtgatgcagttcctcaacctattccagcagtacctggtgtcaactggggggcacctgcagaagcacctgctgctgcaggaggagattggggggaagctgttccaccaccacaacaaatccctgtacctccctctggaattgatactgtccaaccatctggctgggattaaactagtgacttttgatgctatgattttgccccgtccctcaattttagcttacctgtctttctttgaagtaaaatatgga

SEQ ID NO: 183692 - DNA, 283 bp, Glycine max
actgtactttatccttttgtgtggggaattatggtaattgattttgagggtttgactactcatggattatgatggtatgagaaaaccttccaaaaacttatttcactctcgcttcttcctttttgggttctattgctgggattgggagttcttgaccgctctcctcctttttagttcttccccttaatcttctttcttcacaatttttatttccttccttattagacgtattagatcagattgaacaaaagggtttttctttctttctttcttggggaataat

SEQ ID NO: 183693 - DNA, 283 bp, Glycine max
aagaaaatcacattacctgtctctgaaatcagattcactttgttcttcatcaatggaaagagaacaactatcccttcacatgaatggtggcaagggacaaaggagttatgcaaacaactcctcactacaaagaacaataatacgtaaaaccagatccatacttgaagaaactataacgaggttgtactgtgatacttttcctaataattgcttaaaagtggcagacttgggttgctctgtaggatcaaacacacttcttgtgacatcaaatattatcgacatt

SEQ ID NO: 183694 - DNA, 281 bp, Glycine max
gctgatgaagctcctgacacaatcacaggagacattgtttttgtattgcaagtaaaggatcacccaaagttcagaagggagcaggatgacctctatattgatcacaatctcagcttaaccgaggcactctgtggcttccagtttgctgtcaaacatcttgatggtaggcaactattgatcaaatcaaaccctggggaagtcatcaaaccaggtcaatataaagcaataaatgatgagggaatgccacaacacaataggccattcatgaagggtcgccttta

SEQ ID NO: 183695 - DNA, 278 bp, Glycine max
ctgagatactaaaaggttgtgggctacatgctgatattggaataacagttctgatagatcgtagcgtcttaaaagttgaaaagaacaacaaacttggaatgcatcaattgctacgggacatgggaagagagataatctgtgaaagttcaagaaaggaaccagggaaacggagtcgatagtggcttcatgatgatgtacttgatgtattgacaaataatactgggacagtggctattgacgggatggctctgaaattgcatttcgccggtagagcttgc

SEQ ID NO: 183696 - DNA, 283 bp, Glycine max
gcgtctcttacgtacttgccaaagaggaacaaaagtgtttgactgttgatagcatcatcaagaagaagttgtaaagatgttagggctatttgacaagagccacaagatcaagggcactgtggtgttgatgcccaaaagtgtcttggacattaacgacttgaattcagtcaaaaatggcggagttggtggcgttgtctctggtatctttggcgccgtcgccgacgtaaccggccaaatagttgatactgcaactgccatcttttcccggaacgtctccttcaag

SEQ ID NO: 183697 - DNA, 276 bp, Glycine max
tttgggagttaggttctgcacgctctgcttccagcgagtgttctttcttcgtttcaacaccttaatttgcacacgctgcttcttcagcttgagaaatggcacaagaaacctttctattcacatctgaatctgtaaacgagggtcaccccgacaagctgtgcgaccagatctctgatgcagtgctcgatgcgtgccttgaacaggaccctgacagcaaggttgcctgtgagacatgcaccaagaccaactggtcatggtctttggagagatcacaac

SEQ ID NO: 183698 - DNA, 277 bp, Glycine max
atcctaagtctttgggaatagtgctgcaatggcttcaagtcaggaggaggtgaccttttgggagctaactggaagcccatttgtgtgcagggttcatattgccctcaagttgaagggagttcaatacaaatatgtcgaagaaaatttgaggaacaagagtgaactgcttctcaaatccaacccagttcacaagaaggttccagtgtttattcacaatgagaagcccatagcagagtctcttgtgattgttgaatacattgatgagacatggaagaac

SEQ ID NO: 183699 - DNA, 278 bp, Glycine max
tgtgaaaatggcggtacccttgctctccaagaagatcgtgaagaagcgcgtcaagaagtttatacgcccccagagtgatcgcaagatctccgtcaagccaagctggcgcagacccaagggtattgattctcgtgtcaggagaaagttcaaaggatgcactttgatgcccaacattggttatggctcagacaagaaaacccgccattatctaccaaatggtttcaagaaatttgtcgtgcacaatgtgaaagacctggaacttctcatgatgcataaca

SEQ ID NO: 183700 - DNA, 275 bp, Glycine max
caagaatgactttgaccttggcctcaatgctcttgattatgaggtctggcttggtgatgttagcattggaggagcagaacttgccaaatctgcaaagctcgtgaaaagtgggattagtgacattgatgttccaattaccttcaggcctaaggattttggctctgctctttgggacatgattagaggaagggggacaggctacacttttaaaggacatattgatgttgacactccctttggagcaatgaaactgcccatcacgaaagaaggtggta

SEQ ID NO: 183701 - DNA, 280 bp, Glycine max
  unsure (1)..(280): unsure at all n locations
agaacacttaccttaatttcgccaaatcaaccaaagacaaaaaaaaaagaatccaaaggaacagaagagaaagcttgaagctatggggaacaccatgggaaggagtaaaaaggccaaggtgatgaaggtggatggagagacgttgaagctgaaaacaccagcgagagcaaacgacgtcgtaaaggactacccgggccacgtgcttctggactccgaagcggtgaaacattccgnggttcgggccaaacctcttgagccgtaccaggaactgaagcccaca

SEQ ID NO: 183702 - DNA, 282 bp, Glycine max
cttatcatggcttctcacaacatcaaaatccacgaccacttaaggctttcccctccctcagcaacagaaatatccctctctctcactttcttcgacctgttctggctcaggttccaccccgtggaacgcatcttcttctacaccctccctacaccccattcaaatccatccattttctattccaaacttgttccaaagctcaaaacatctctctctcgcactctccaacacttcccccctctcgccggcaacgtcgtttggcctgataacacccaaacccca

SEQ ID NO: 183703 - DNA, 282 bp, Glycine max
atcttatcttatccctctaatcactctagctgttgcaaatttctactatttttcaatggcttctgcagatgttgagttccgttgctttgttggtgggcttgcttgggtcaccggcaacgatgccctcgagaaagccttttcaatctacggcgacatcgttgaatcgaaggttatcaacgaccgtgagactggaaggtccagaggattcggatttgtgaccttcgcctcagagcagtcaatgaaagatgcgatcgcaggaatgaacggccaggaccttgacgg

SEQ ID NO: 183704 - DNA, 282 bp, Glycine max
gatcgatctggtagaaacgatgaaggaactatgggcacaaatggggtcactaatggccactattgtgttcatgtacacaatctttgagcgcttcttccctccacacttgcgtgaaaaacttcaagcctatactcaaaaactcaccaaccatttcaacccttacatccaaataagcttccctgagttctcaggggaacgactgaagaagagtgaagcatacacagccatccaaacctacctgagtgcaaactcatcccagagagccaaaaggctcaaagctga

SEQ ID NO: 183705 - DNA, 279 bp, Glycine max
gaaattaccagttactatactctctctttctgaaacaatttgcccaattgtttgagtggcttttgccaggatggtactcttatccagtattttggtcttggatcagaaacaagaggaaccgccactgatattccagacccttttggaattgaagttggaaacccttcagaaattccatatggatatgatgataaatggttgatcaacgtgcatgccattgacacaaggggcgtggaagataggttagggtgcattgagtgtaggtgtgacctttataat

SEQ ID NO: 183706 - DNA, 280 bp, Glycine max
ctgtatactattgtgtttgcttgcaacttttgggtatatagttttgcaagtttcaactgttagctcttcctagcttttgctacaaacgctgattgaccacttttctatgcttgatttgtgtgattgttttgtctatttagcttgtctattattaaataacacaagggtatggatgctgctgcaagtcaaagtctctatccattgcaccgttgcaaaactgttcacctggttaggcatgcgcaaggagttcataatgtagcaggagagaaaaaccatgatg

SEQ ID NO: 183707 - DNA, 276 bp, Glycine max
gccgaagaacaagggaaagggaggtaagaacaggaagaggggaaagaacgaggcggacgacgagaagcgggagctggtgttcaaggaggacgggcaggagtacgcgcaggtgctccggatgctggggaacgggcggtgcgaggcgatgtgcatcgacgggacgaagaggctctgccacatccgcgggaagatgcacaagaaggtgtggatcgccgccggagacatcatcctggttggactcagggactaccaggacgacaaggctgacgtcatcct

SEQ ID NO: 183708 - DNA, 276 bp, Glycine max
ctcgagccgcacgtccgctccgtcatgagcgacattagggttctacgcaacatggacgacgacgaggtcttcaccttcgccaagaacatcgctgcgccttatgacctcgtcatgcagaccaagcagcttggccgcctccccgttgtccacttcgccgccggcggagtcgccacccccgccgacgccgcgctcatgatgcagctcggctgcgacggcgtcttcgtcggctccggcgttttcaagagcggcgatcccgcgaagccgccacggcgattg

SEQ ID NO: 183709 - DNA, 274 bp, Glycine max
cagctacaaaaatttcgtgaagaacttaagaatcgctcacgagtcttaaagaaacttggtcatattgatgctgatggtgtagttcagttgaagggacgagcagcctgcttgattgacacaggcgatgaactccttgtcgctgaattaatgtttaatggtacttttaatgaccttgaccatcatcaagttgctgcccttgcaagttgtttcataccaggagataagtcaactgagcagatacaattgagaacagagcttgctaggcctctgcaac

SEQ ID NO: 183710 - DNA, 278 bp, Glycine max
ctctgttctaacgcggggtgcgggaggcccgagacgaggaagcacgagtttcgaaggtgttctgtgtgcggcgaggtgaattattgctcacgcgcgtgccaagcgcttgattggaagttccggcacaaagcggagtgcgcccccgtggagcgatggctcgacgaggacggcgaagatgtcggtaacgacgacggtgacggagaggtcgaggttgttatggtagatagttagacaatttttacaacagtaacggcaacggaagtcgctttggacggaaa

SEQ ID NO: 183711 - DNA, 279 bp, Glycine max
ctccaggacaattcccttcacccaacctaattggtacttgttggttgatctaccttgcaccttgagatagtaaagttgcaaactttgaagcaattagtgtagaagatgagtacgttggatgcaacaagggctgaacttggtcttcttgttttatatttgggcaaagctgaagccagggacaaaatatgcagggacatacaatatggttcccgatttttgagtaacggggaacctgggactactcagaatgtcgacaagacgaccaatctcgctcgaaaa

SEQ ID NO: 183712 - DNA, 278 bp, Glycine max
tgggacttttctttctttctccccacacccagattcaaaaactcacctctgctctttcgtttggatctcaaaacatgttcttcttcgattggttctatggcattctagcttccctcggtctctggcagaaagaagccaaaattctcttcctcggtctcgataatgcagggaagaccaccctccttcacatgctcaaagacgagagattagttcagcaccagccgacccaacaccccacttcggaggaattgagcattgggaagatcaagtttaaggct

SEQ ID NO: 183713 - DNA, 282 bp, Glycine max
ctcgagccgaaaagcatggccccttattctctctctccttcggctccatgccaaccgtcgttccctccacccctgagttgttcaagctcttcctccaaacccacgagacaacttccttcaacacaaggttccaaacatctgccataagacgcctacacttacgacaactctgtggccatggttccattcggaccttactggaagttcgtgaggaagctcatcatgaacgaccttctcaacgccaccaccgtcaacaagctcaggcctttgaggacccaacaa

SEQ ID NO: 183714 - DNA, 276 bp, Glycine max
gccgtggcgcgcctctcgctaaggtcgccttccgccacccgttccgctacaagaagcagaacgagctcttcatcgccgccgagggtctctacaccggccagttcatctactgcggcaagaaggccaccctcgttgtcggcaatgtgttgcctcttcgatccattcctgaaggagctgtcatctgcaacgtcgagcaccatgtcggcgaccgcggcgtcttcgctagggcgtctggagactacgccattgttatcagtcacaaccctgataatgaca

SEQ ID NO: 183715 - DNA, 275 bp, Glycine max
gtcactgccggaagaagggagcaacaccatctttcattttccggcgatctcttgtttcttccatcatcaccgttttccggcgatccctaatcctcgcaaacagaaatgacgacatcaaggcgccttgcggacaggaaggtggagaagtttgagaagaacatcacaaaaagaggatttgtgccagacactaccactaagaagggaaaagactaccctgttggcccagtgctgctcggtttcttcgtctttgttgtcattggatcatctctcttcca

SEQ ID NO: 183716 - DNA, 268 bp, Glycine max
gaaagaaaaccctagcttaccttttcaactttcaagatgcaaatctttgttaagacactcactggtaagacaatcacccttgaggtggagagttcagataccatagataatgtaaagtccaagattcaagacaaggaagggatcccaccagaccagcaacgtctcatttttgctggcaagcagcttgaggatggacgtacacttgctgattacaacattcaaaaggagtccactctacacttggtgctccgtctccgtggtggaatgc

SEQ ID NO: 183717 - DNA, 275 bp, Glycine max
ttaattcagaaagagctccagagtttttctgaaccaaaagaggtaatgatatttttcagtgcccatggtgtacctgtcagttacgttgaggaagctggggatccataccgagaccaaatggaggagtgcatcttcttgatcatgcaagagttgaaagctagaggaattagtaatgagcacactcttgcttatcagagtcgagtgggtcctgtacagtggctgaaaccatatactgatgaagttctcgttgagcttggccaaaaaggtgtgaagag

SEQ ID NO: 183718 - DNA, 262 bp, Glycine max
caaattctttgagttgaacacaggggccaagattccttctcttgggttagggacttggcaagctgaacctggtgttgtagctgaagctctcaccacagccattcaggttggatacaggcatattgactgtgctagtgcgtataagaatcaagcagagattggttctgctcttaagaagctttttgatgatggtgtggtgaagcgtgaggacttatggatcacttccaaactctggtgttcagatcatgcaccagaagatgtg

SEQ ID NO: 183719 - DNA, 274 bp, Glycine max
agcccgtggagaagtgtttgcgggatgctaagatggacaagagcaccgtccatgatgttgttcttgtcggtggttctactaggattcccaaggttcaacagttgttgcaggacttcttcaacggaaaggagctttgcaagagcattaacccagatgaagctgtaccctatggtgcagcagtgcaggctgccattctcagtggcgagggtaatgagaaagtgcaggatcttctgttgttggatgttactcctctctcccttgggttggagaccgc

SEQ ID NO: 183720 - DNA, 262 bp, Glycine max
ccaaaagccaagttaattccctttctccactcttcacaaacacaaacacacgtattctcttgcaaaactaagaatgaaggaggagttggtggttgaagaagggtaccttttcaaagaagagactcacttcacagtgcgcaaaacctctctcttcttcaacggtgatggcttcgctgtctacgattgcaaaggccaactcgttttccgcttcgactcctacggtccccgcgcgcgtgacaaggacgagctcgttctcatggat

SEQ ID NO: 183721 - DNA, 276 bp, Glycine max
gctttgtttaggtgaactaattcggagaccttgcaagacttcatcaatggctgtcaaagtttatattgtgtactactccatgtatgggcatgttgagaaactagcagaagaaataaagaaaggggcttcctctgtggaaggtgttgaggccaagttatggcaggtacctgagacactgctggatgaggtgcttggtaagatgagtgcaccacccaagagtgacgtaccagtcattacccccaatgaactatccgaggctgatggctttgtattcgg

SEQ ID NO: 183722 - DNA, 262 bp, Glycine max
aaagactcagatgaggcgcatagagaacgccacaagcaggcaagtcaccttctcaaagcggcgtaatgggttgctgaagaaggcctttgaactttctgttctttgtgatgctgaggttgctctcatcattttctctccaagaggaaagctttatgaatttgcaagctccagcatgcaggacacaattgaacgctaccgcaggcataacaggagtgctcaaacagtgaacagatctgatgaacaaaatatgcagcatttgaag

SEQ ID NO: 183723 - DNA, 272 bp, Glycine max
gggacatcccaagctgactgtgctgttcttatcattgattccactactggtggttttgaagctggaatttcaaaggatggacagactcgtgaacatgctctgctttcattcacccttggtgtgaaacagatgatttgttgctgtaacaagatggatgctactacaccaaagtactccaaggccaggtatgatgaaattgtgaaggaagtttcttcctatttgaagaaagtaggatacaaccctgacaagattccttttgttcctatatctgg

SEQ ID NO: 183724 - DNA, 276 bp, Glycine max
attaactctttcttctcataactctgccgccgcaacagccccaaatccaatggcttcagagaagaaactttcgaacccaatgagggagataaaggtgcagaagctcgtcctcaatatctccgttggcgagagtggagatcgtctcaccagagccgctaaggttttggaacagcttagtggccaaacccctgtgttttccaaagcaaggtacacggttcgttcctttgggattagaagaaatgagaagattgcatgctatgtcactgtcagaggtga

SEQ ID NO: 183725 - DNA, 273 bp, Glycine max
ctcccctttgccgctgttgttgttgctgcaccaccgaacaacttcccctgtaaatcgcgtttcgtttgtgcaaggttttaaaagatggctgatgctgaggacattcaacctcttgttgttgataatggaactggaatggtcaaggctggttttgcaggtgatgatgctcctagggccgtgttccccagcattattgggagaccacgccatactggtgtaatggttgggatgggtcagaaggatgcttacgtgggtgatgaacccaatcaaaaa

SEQ ID NO: 183726 - DNA, 275 bp, Glycine max
aatttctctctgtttccttcttcaccgcatcaatggagttggacggcgttctcctcggcatgtgcaaccctctcctcgacatctctgccgtcgtcgacgacgctttcttgcaaaaatacggtatcaagttgaacgatgcgattctcgctgaggataagcacaaacctatgtatgaagaattggctaacaatcctaatgtggagtacattgctggaggtgctactcagaattcaatcagggttgctcagtggatgcttcaagcaccaggtgccaca

SEQ ID NO: 183727 - DNA, 267 bp, Glycine max
caaacactctgtaactctttattttattttctttctttctttctccgatcgcatagctcgctcgcaaccaccatgccttcccgaagaagaactctcttgaaggtcatcattctcggtgacagtggggtggggaagacatctttgatgaaccaatatgtgaataagaagtttagtaatcagtacaaggcaaccattggagcggattttttaaccatagaagtgcaattcgaagataggcttttcactttacagttttgggatacagct

SEQ ID NO: 183728 - DNA, 268 bp, Glycine max
ctcatcattctcatattattgtcgccacttcgacctcaatcaccctcgcgccctcgatcttcccttcctggtggcgacaatgtcgactcctgctaggaagaggctgatgagagacttcaagaggctgcaacaagacccgcctgcagggatcagcggtgccccccaggataacaacataatgctgtggaatgctgtcatatttggtcctgatgatactccatgggatggaggcacgttcaagttgactctccagtttactgaggattat

SEQ ID NO: 183729 - DNA, 268 bp, Glycine max
ctgtggtattagcaggattgcttgcatccctgaaattagttggtggaacttagttgaccataccttcttattcctgggtgctggagaggctggaactggtatagctgagctgatagctcttgagatttcaaagcagactaaagctccagtggaagagacccgcaagaagatctggctcgtggactcaaagggacttattgttagctctcgtttggaatcacttcagcagttcaaaaagccttgggcccatgagcatgaacctgttaag

SEQ ID NO: 183730 - DNA, 263 bp, Glycine max
caacaacgtgatcggactcctgaacttcctgaccttcctcctctccatcccgatcctggtggccggagtgtggctgagcaagcagggcgccaccgagtgcgagcggtggctggagaagccggtgatcgcactcggcgtcttcctcatgctcgtctcactcgccggcctcgtcggcgcgtgctgtcgcgtgtcgtggctcctctggctctacctcctcgtcatgttcgtcctcatcgttcttctcttcgccttcagcatcttcg

SEQ ID NO: 183731 - DNA, 266 bp, Glycine max
gggaaatgtacatggtcgtgttgatgcagctaaagctttattgattggatctcacatggtacatgcataggctaaaatcaaaagatctctcaatatgccacaatatgatcctactgggatcttgtataatgaagccgaatgctacaaactgaaatgatgcttgcgctgtgacatggcccaactttaccgatgtatacccttttgcaccgattgaccaaaactaaaggttatcagcatatctggtattaggaaatgttcaacaattt

SEQ ID NO: 183732 - DNA, 271 bp, Glycine max
ctgttccatgctgttaaagcctccgttcacactctcacaccgattcaatttcagattttcctgtcaaactcgcattttccgggcacgaaactcgaggaattcgcgcatggcgcctcccatcctctccctcgctcttccctcaaacaccggtcgagttctcagcattcaatctcacaccgttcaggggtatgttggtaataaatccgctgtcttccctctgcaattactgggatatgatgtggatccaattaattctgtgcagttttcgaat

SEQ ID NO: 183733 - DNA, 279 bp, Glycine max
  unsure (1)..(279): unsure at all n locations
agaatggaaacaactcttcatcgaagcaggattcaaacactacaaaatatttcccatctttggttttagatctctgattgaggtctatccttgaacatttttatgatgtgtatgtcacacttaacgtttatatttatgaacatcctcagacatcgttgtaattgtatttagtggtttgcgtgttgtttgctgaataaagctatgatgacatagcattatcaacttctggtggaattacttatgtcntccccgctatgttgttaatgttcgtgtaggatt

SEQ ID NO: 183734 - DNA, 290 bp, Glycine max
tagtctgcgcatgtgcttgatgcttgggctcccatgggccccaaggggccggttcgcgaggaggccgggaagatcttgacggccaatctcaaggggaggccggcgtttgaggccgacgatcagtccgccttgatatacttgctgctgtccaagaaggagaagtggatggacaggacgtttcttgagaattcgttctacttgcacggttattgggccgggttggttgatcggtatgaggagatgattgagaagtatcacccagggttgggggatgagaggtcggcgtttgt

SEQ ID NO: 183735 - DNA, 280 bp, Glycine max
gctctctcactcacaaacacacactgaactaaaaaacatcaaaagagacatggctgagcaaaccttcatcatgatcaagcctgatggcgtccaaagaggccttattggcgagatcattagcagatttgagaagaaaggtttctacttgaaaggttagcaaattgttactgtggaccgtccttttgctgagaagcactatgctgatttgtctgccaagcctttctttagtggtttggtggattacattatctctggcccgttgttgccagatctgggaggg

SEQ ID NO: 183736 - DNA, 288 bp, Glycine max
tcagtgaaagagaatccgaggcgaagagaagagaaaaattaagatggaggggaaggagcaggatgtgtcgctgggagcgaacaagttcccggagagacagccgattgggacggcggcgcagagccaagacgacggcaaggactaccaggagccggcgccggcgccactttgacccgacggagtttacgtcatggtcctgttacagagcagggatagcagagtttgtggccacttttctgtatctatacatcactgtcttaaccgtcatgggagtcgtcggggctaagt

SEQ ID NO: 183737 - DNA, 276 bp, Glycine max
cgtttcttcaatggtttctggatccgaagaagaactggttcgccgctcagcacatgaaatccctctccagacggcttcgcaaatacgggctccgatatgacgatttgtacgatccttactacgatctagatgtgaaggaggcgctgaatcggcttccgacagaggtggtggacgctcgccacgcgcgtcttaaacgcgccatcgatctttccatgaagcacgagtacctccctgacaatcttcaggcaatgcatacaccattcaggggctaccttc

SEQ ID NO: 183738 - DNA, 291 bp, Glycine max
cggatcgagctccaatagtgttgttgatgatcttgtgcagcaatgtcgcacgacgaggtggttctgttggatgcatggggaagcatgtttgggatgagggcatggattgcattggaagaaaagggtgttaagtatgaacacaagatggaggatctcaacaacaagagctctttgcttatgcagatgaaccctatttacaagcaaattccagttctcatccataatggcaaaccaatttctgaatctgcaattatagtgcagtacatttatgaggtctggaatgacaacaaa

SEQ ID NO: 183739 - DNA, 275 bp, Glycine max
cgcattgcacaagcactctctctttcccttaccctttttcaggtttcaacgctccaactatccatggcaaaccgctggctcagacccgaggtgtatccactgttcgctgcggttggtgctgctgttgggatctgtggattccaactggttcgttctatctgcatcaaccctgaagtcagggtgaacaaggagggaaggaaggcaggagttttggagaactttgctgagggagagaatatgccgagcattcctggcgacatatgtgcgcaacagaa

SEQ ID NO: 183740 - DNA, 280 bp, Glycine max
ataattcaattttgagcactaaccagcaccacttccaatggcttcaaatcatgaagaagtgatacttttgggcaagtgggccagcccatttagcaacagagtagaccttgctctcaagctcaagggagttccctacatatactcggaggaagatcttgctaacaagagtgctgatcttctcaggtacaaccccgtgcacaagaaggttccggttatggtccacaatgggtacccattacccgagtcacttatcagtgttgactacatcgatgagacatgg

SEQ ID NO: 183741 - DNA, 283 bp, Glycine max
caagaacattgactttggggttgatttagactctagggttgcactggttggacccaatggtgctgggaagagtacactactgaagctaatgacaggtgacttgatgcctagtgacggcatggtaaggcgtcataatcatcttcgaattgcacaatatcaccagcatttggcagaaaagctagacatggaaatgtctgctctacagtttatgattaaagaataccccggtaatgaggaagagaagatgaggggggcaattgggaagtttgggctgtcaggaaaa

SEQ ID NO: 183742 - DNA, 280 bp, Glycine max
caaagccttcctagaacgaaaaaaaaaagaagagcaattttccctcaccaaagaagaagaagcaaacaatggccgatcaacttaccgatgaacagatctccgagttcaaggaagccttcagcttgttcgacaaggacggcgatggttgcatcacaaccaaggagcttggaactgttatgcgttcattggggcaaaacccaactgaggcagagctccaggacatgatcaatgaagtggatgctgatgggaatggtaccattgacttccctgagttcctaaa

SEQ ID NO: 183743 - DNA, 277 bp, Glycine max
tctcaatctctcttcttacccatttcctccccccctctttctcttttcttgttctgtttttattttcactgttctctgataacaacgttgttagttgtcaccatggttgttctgtctcagccagcattaaaccagtttttccttctgaaaacatgcaagcccacgcccttgttcgcggggattcctgtggtcgacctcacggaccccgatgccaagacccacatagtcaatgcctgcagggacttcggcttcttcaagctcgtgaaccacggtgttc

SEQ ID NO: 183744 - DNA, 276 bp, Glycine max
gtcgcttgggagtgcagaaaggtgccaccttggactggagtgactacttctttctccattacaggcctccctcacttaggaaccaagctaagtggcttgcatttccacaatcctttaggaaagtgattgctgaatatggggaggaagtggttaagctaggaggaaggatactcaaaatgatgtcaataaaccttggcttgaaagaagatttccttctcaatgcatttgggggagagagtgagttggtgcatcctaagggtgaattctacccaagtg

SEQ ID NO: 183745 - DNA, 279 bp, Glycine max
taagtagcaagctagatactcaagcctatggtgatcatacctgtataatagcaaaagaacatttggagcctaacttaggtgggctcactgttgagcaggctatccaaaacaagaagttgttcatcttagatcaccatgactatctcattccttatttgaggaaaataaatgcaaataccacaaagacttatgctacaagaaccatatttttcttgaaagatgatggaactttgacaccattggccattgagttaagtaagccacatcctcagggtgaag

SEQ ID NO: 183746 - DNA, 279 bp, Glycine max
gcacaaagaggggttcctagacaagatcaaggacaagatccacggcgaggagggtggcgccaccgccgagggcgagaagaagaagaagaagaaggagaagaagaagcatgaacatggccatgacagcagcagcagcagtgacagtgattagattatctcccactgctgcatcacctatatatcttataaggtgtatgggaccatagtagtgagggctgtgtctttctctttttttcctacttgtcatttatatttatgagcgagagaaatagtgcgtgt

SEQ ID NO: 183747 - DNA, 275 bp, Glycine max
cttctttctttttctgtgagcctttctttcaggttcttaacttgcatcagtgtgcagtgtccaaatcataagggtagttgcaaattgcaatggctaagcatgatgttgagggtggttccttctctgcaaaggactaccatgatcctcctccagcaccgttgattgatgctgaggaactcacacagtggtccttctacagggctttgattgctgagttcattgccacaatgctcttcctttacatcacagtgctcactgtgattggttacaagagc

SEQ ID NO: 183748 - DNA, 276 bp, Glycine max
agagacgcaagcatgtagaacatgaacttgatttggtacagcaggagatcccggagtgcagaaaaaaatcggtggttgctgagcaagcaaaaacgcaagtactgcaggagctggatagcactaagaggctaatagaagaactaaaacttaacctagagagggcgcaaaccgaagagcgtcaggcaagacaggactcagaacttgcaaagcttagagtggaagagatggagcaaggtattgcagacgactctagcattgcagccagggcacagctgg

SEQ ID NO: 183749 - DNA, 279 bp, Glycine max
gcgctgctcaatttgtccatttttgacaagaacaaaagtaggattatggacgaggaagggtgtctaggatcgattgttgatgtgttgagatttggacacaccacagaggcaaaggaaaatgctgctgcgacgttgttcagtctatcggccgtccatgactataagaaaataattgcagatgagatgcgagcagtcgaggccctcgcaggactgttgcaagaggggactccaagaggaaagaaggatgctgtgacagctttgttcaatctttccacacac

SEQ ID NO: 183750 - DNA, 278 bp, Glycine max
gctacatagtttttctgtttgaagtgctacaaacaatggcagctactcaggaagatgtgacgcttttgggagttgttggaagcccgtttgtgtgcagggtccagattgccctcaaattgaagggaattgaatgcaaatttttggaagaaaatttggcaaacaagagtgatctacttctcaaatccaaccccgtttacaagaaggttccagtgtttattcataatgagaagcccatagcagagtctcttgtgattgttgagtacattgatgagacatgg

SEQ ID NO: 183751 - DNA, 278 bp, Glycine max
cgaaaccaaagcatgaagatgaattgctactggtggcatgccctgataatgagtggttgtgtgttgggcttgtgcgtgggcataggaggttgtgtatgtgtggtggagaacgagaatggaagaatcatcattgatattagtcacaggtaccatcctgatatgcctgcctgggaatccaaggatagccttgggcagtttttgtggcttacaagaagcatggccaatggttctctggctaacttctcccaattcaagctccccgctcacagcggcaccca

SEQ ID NO: 183752 - DNA, 278 bp, Glycine max
gttcttcgtgttctccattccctctctcactccttcatctacttcacatattatatcatcacatatcatagtgatatcatatcacaatgtgtggcatacttgctgtgcttggttgctctgattcatctcaagccaaaagggtccgcgtccttgagctttctcgcagattgaagcaccgtggtcctgactggagtgggctccaccaatatggtgataactatttggctcatcaacggttagccatagttgatccagcttctggtgatcaacccctcttc

SEQ ID NO: 183753 - DNA, 220 bp, Glycine max
cggcacgagtgctactattcaggcttctcttcagtcagatgcatctgaccttagtatgctagagattcaaaatgctcaaggactatctgatgtattgattgaaatgcttagcgccttgagtcgtaaagaccgtgagggtgtgaaggaggaagtgattgttgatcttgttgaccagtgccgttcataccaaaagcgtgtcatgcatcttgtgatcaatact

SEQ ID NO: 183754 - DNA, 274 bp, Glycine max
cttgctccctcagatgcgaagaagaagccacagagaactagtctcctactctcacccgcaagacaaaaatggcatctcacatcgttggatacccccgtatgggtcccaagagagagctcaagttcgctctcgagtctttctgggatggcaagagcagcgccgaggatttgcagaaggtgtcttctgatctcagggcatccatctggaagcagatggctgatgctgggatcaagtacatccccagcaacactttctctcactatgaccaggttct

SEQ ID NO: 183755 - DNA, 273 bp, Glycine max
atcataagacaagcaacgctaaggctaacggtaacggtaacagcggggtgaaggaggtgcattttcgtggagtgagaaagaggccgtgggggagatacgccgcggagatcagagatcccggcaagaagagccgcgtctggctcggaaccttcgacacggcggaggaggcagcgcgtgcctacgacgccgcagcacgagagtttcgcggccctaaggccaagacaaacttccctctccctttggaaaatgttaagaactcgagccccagccaga

SEQ ID NO: 183756 - DNA, 273 bp, Glycine max
ccaaggtgaagcaccgataccggacctatctccggcgaatccccagtccccactttcttccttcgaaatgaatcccgagtatgattatctgttcaagctccttcttattggagactctggtgttggtaaatcatgccttcttctgagattttctgatgattcgtacatcgaaagctacataagcaccattggagttgattttaaaatacgtaccgttgagcaagatggaaagaccattaaactacagatctgggacacagctgggcaagaacg

SEQ ID NO: 183757 - DNA, 300 bp, Glycine max
tcggcattcggctcgatctcaagtccaacctacccctttttcttctcccaccaacttcaccgtcttcttcctcgatcatgtctcacttcaagggcaagtaccatgatgagcttattgccaatgctgcttacattggcactcctggaaagggtattcttgctgctgatgagtcaacagggacaattggcaagcgtttggccagcatcagtgtagagaatgttgaatccaacaggcgtgctcttagggagctgcttttcaccgctcccggtgctcttaaatatctcagtggtgtcatcctct

SEQ ID NO: 183758 - DNA, 279 bp, Glycine max
tgaacattgaacaactcttcacacaacaaaacttttttctggcattgtagcatcatgactggcagagaaatcctccatatgatgaaggtgaaagcagggtttggaacaccagacacagggaatggaaaaggcaaaatatcaaaacacattacacatggctttcacttgatgaagggcaaatcagcgcatcctatggaagattatttagtttcagaatttaagcaagacaaggacagagaattaggcttgtttgcaatatttgatggccacttaggccat

SEQ ID NO: 183759 - DNA, 276 bp, Glycine max
gtcagaattgaaggggaaggttgtcctcctctacttctcagctcactggtgtcctccatgccgtgcattccttccaaaacttattgatgcatataataagattaaggaaaagggcaatgcattagaagttgttttcatctcaagtgacagagatcaaacctcctttgatgaattctttgcgggaatgccatggttggcacttccctttggggactcgaggaagaaattcctgagtcgcaaattcagggtatctggcatccccatgcttgtggccat

SEQ ID NO: 183760 - DNA, 271 bp, Glycine max
ggatacgaaacccacatcacaatccaattccatgaccctttgtatggctgcagaaaatatgagcgaggtggaagaggagcatggatatgtcttcaaagaagagatccatctcacggtgttcaaaacttctctgttcttcgcgggcgatggcttcaccgtctacgattgcaaaggtcaacttgtgttcagagttgactcttatgggcccgacacccgcgacagagacgaactcgttctcatggatcctaacggacgttgtctcctcaccgtt

SEQ ID NO: 183761 - DNA, 268 bp, Glycine max
attttgggcatccttaagaaaataggaagagacacggttaaggttggggagaagcaaaagtcagtgatagctttggatgggggattgtttgaacactacaccaaatttagagaatgcttggagggtaccctgaaggaattgctgggagatgaggctgctgagaccattgtcattgagcatgctaatgatggctctggcattggtgcagccctcctggcagcttctcactcccaatatttgggagtggaggagtcttaaattttattgc

SEQ ID NO: 183762 - DNA, 266 bp, Glycine max
cggaaacagttttcgtcgttcattcatcagctgttctcttcgtttttctgcctacaatggatgagaattcagctacatatggaacccatgaggtggttttagatgtaaacagggacgtctctagaacaactcaagcttcacgctcttgtgtcaatgtttctttcttgcagaagttggtagctgaggtggtaggcacgtatttcttgatatttgcagggagtgcttctgtggtggtgaacagaacaacaaaacgttgtaacacttct

SEQ ID NO: 183763 - DNA, 273 bp, Glycine max
caacattttactgggtatataagtggagagtgtaactgaaattatgtggaggtgcatcaatggaagaattgccagaagatttttatccacttcttctgccagtgcccgtggttggtgggaccatgtaaggccagcaccgaaggaccccattgttcgtgtgaacgaggcatttctagctgacccttttccccataagatcaatcttggaataggtacttataagggtgatgatggcaaagctttcattcctcaaagcgttcgtgaggcagaaac

SEQ ID NO: 183764 - DNA, 275 bp, Glycine max
aatgttacatgagaaggacatgaattcacgagttttctatggaaacgattccatttatgtgctgcttagacttcatcagacattgtatgagaggatacaatcagcaaagattaactcatcatctgctgataggaaatggaaggcttcaagtgatacaagctccaccgatcaatatgacaggttcatgaatgccctttacagtttgctggatggttcttctgataatacaaaatttgaggatgattgtcgagctataattggaattcaatcatatg

SEQ ID NO: 183765 - DNA, 273 bp, Glycine max
agaatatctatctctcattctctcgtgcctcaacgcttttttaactcctttcgcttttccattccaacctctttcacacttcagatctgtttcttcatcggttgttcaagtaaatcgcctttgtcaccactgctgaagtgtgtgatgcgaacccacagttaattttgagtggggagcttcgtgcccttcagccagtttttcagatttatggccgtcgacaggttttctctggacctatagttaccttgaaggtgtttgaagacaatgttttgg

SEQ ID NO: 183766 - DNA, 269 bp, Glycine max
ccctagtctccatacatcaacttgggaggttaaagagacggcaacgttgtgctgtccgccttgaccgagccagagcttcgtcttggccctcgattttgccctgtaaaactaatcccagtcacaacagaaataatcaatggcaccgaaacagaccaaggctgagaagaagatcgcttacgatgcgaagctgtgcgacctaatggaggagtacggccaaatcctcgttgtcaactccgacaacgtgggatcgaaccagctccagaacattc

SEQ ID NO: 183767 - DNA, 269 bp, Glycine max
gcgccacccaaatctgtttcaacgcaagagaaacaacaagagaggagcaagcaggcacatgctgtcaccaccccacgatctaaaagaagaaagaaccagcttaagaaagtttgtcaagtgccagttgagaatctctcctcagacatatgggcatggaggcaatatggccagaaacccataaaggggtctccatatccaagggggtactatagatgtagcagctcaaaggggtgtttggcaaggaaacaggttgaaagaaacagatcaga

SEQ ID NO: 183768 - DNA, 263 bp, Glycine max
gtcgacgtccatgatttggttttcttcctctacattcaatcctacaagagcgtcctcccgcgcatccataaggactccgccgccgtcaccgacgtctggccttccacctccgccttcgatggctacttgtccgctctctcgccgcttcagctcgtacgcagcaacagtcggcggttcatgccgtcccaggctgatgacgaggcgcatcagttgtcgtatctgcaaaagcacttggctaaccttgtgtctcttctagcagagcc

SEQ ID NO: 183769 - DNA, 258 bp, Glycine max
cggctcgaggaaaaagttttgggatcatctgatcccgattcaggtaaaggcaagagcaagatgaagaagcacataactcatggctttcacttggtaaagggaagatcaggtcatgccatggaagactatcttgttgctcaatttaagcaagttgacaacaaagagttgggtttatttgcaatatttgatggccactctggtcacagtgtacctgattacttgaagtctcatttgtctgatgatatcctgaaagaccct

SEQ ID NO: 183770 - DNA, 281 bp, Glycine max
gcgtagtaactcggatcggctcccctcgagcgaatcggtcgacggctcgaggtgtaactagctgcacagttgtgatggcatacgtctctggaagaagttctgctctgaacccaaatgcacctatgttcatacctgctgcacttcgtcaggtggaggatttttcacctcaatggtgggatcttgtgacatcttcaacatggtttcgtgattattcgttgagccaccataaggaggaagaatttgcatcagttgccaatgactctactaatgatgatatggag

SEQ ID NO: 183771 - DNA, 255 bp, Glycine max
cgggcattgagaaggaaggacgctttcagaggcgaaaggccatggggagataccgtctgtgatccatggatctccgatcgggaaaccgtatccaagctccgcggctagtctgcgctctttggacttttaaaacttagcgaactgaaacatcttagtagctaaaggaagggaaatcaaccgagaccccgttagtagcggcgagcgagagcggattggggtttgaagaaaaacaaacacgaagcttcgtttctcttt

SEQ ID NO: 183772 - DNA, 255 bp, Glycine max
cttcttctcttgcggctagggttttagcgcagttgcttctagataccaggcagatgggtaaggaaaaggttcacatcagtattgtggtcattggccatgtcgactctgggaaatccactaccactggtcacctgatttacaagcttggaggcattgacaagcgtgtgattgagaggtttgacaaggaagctgctgagatgaacaagaggtctttcaagtatgcctgggtgctggacaaacttaaggctgagcgtg

SEQ ID NO: 183773 - DNA, 253 bp, Glycine max
gatctatccactcacctgcctcttcctcacccctttctccatctaacgagtaaggaaaaatggcgcgtaagaagatcagagagtatgactcaaagaggttgttgaaggagcactttaagagactttctggcaaggagttgccgatcaagtctgcacaaattactgcatcaactgatttcactgagctacaagagaaggaaccctggctttcatctgctaaattggttgtgaaacctgacatgttatttggaaa

SEQ ID NO: 183774 - DNA, 257 bp, Glycine max
atcaggaacgccacaccatcagtttccttctgctagcacacagacggttatagaggaatctgagtatgagtttgagaatgatcggcaaagatatgctggactagaggcaacaaagccaggtgaaaagcctagggtggttgttcttggtacgggttgggctacgtgtcggttcctcaaagggatagacaccaaaatttatgatgttgtgtgcatatcaccaatgaatcacatggtctttactcctttgcttgcttcaa

SEQ ID NO: 183775 - DNA, 254 bp, Glycine max
gagcatttgaggccttgaacactcatcttgcctccaatacttaccttgttggccattctgttacccttgctgacatcataacaacatgcaacttgtatttaggattcagccagctcttagttaagagcttcacctctgagttccctcacgttgaacgatacttttggaccttggtcaaccagcctaacttcagaaagattctaggtcaggttaagcaaactgaggctgttccacctattccatcggcaaagaag

SEQ ID NO: 183776 - DNA, 260 bp, Glycine max; identical to SEQ ID NO: 182803

SEQ ID NO: 183777 - DNA, 260 bp, Glycine max
ctgtgtatttccctacctctcccttcaagatgcagatcttcgtcaagaccctcaccggcaagaccatcacccttgaggtggaaagctctgacaccatcgacaacgtcaaggccaagatccaggacaaggaaggaatccccccggaccagcaacgtctcattttcgccggaaagcaacttgaggacggccgtacccttgctgactacaacattcagaaggagagtactcttcacctcgtcctccgtctccgtggtggcatg

SEQ ID NO: 183778 - DNA, 255 bp, Glycine max
gcattggcaaggcctgcgtcttacacgaccaagtattttggttgtgaacttggggcccagtcaaaatttgatgagaagaccggcacttctcacgtcaatggagcacatgatactgttaagcttgctggccttcttgagaacttcattaagaaatatgttcagtgttatggttgtggaaatcctgaaactgagatcataatcactaagaaccaaatgatccagctgaaatgcgctgcttgtggttttgtgtctgat

SEQ ID NO: 183779 - DNA, 237 bp, Glycine max
cggctcgagtgtagtgagggactcatggattgcgcggccacagatagcttcagtgggttcgtgttgtcttctgggagcgatttcaaagggagttctttatgtggctaatctcggggattcgagggcggttttgggtaggaaagcgttggaaggagaggtgaattgtggtgctgtggtggcctagcgtttgtccactgatcataatgttggggtggacgaggttaaaaaggaggttga

SEQ ID NO: 183780 - DNA, 258 bp, Glycine max
agatgacaagataattgctgtctgtgctgatgatcctgagtataggcattacaatgatatcaaggagcttcctccacaccgtttagctgaaattcgtcgtttctttgaagattacaagaagaatgagaacaaggaagttgcagtgaacgactttcttcctgcctcagctgcctatgaagcgatcaagcattccatgaccttatatgcggaatacgttgtggagaacttgaggcggtagtgttgattcctgggtgcttg

SEQ ID NO: 183781 - DNA, 251 bp, Glycine max
ttccgttggtgccattcgtgcagcaccggatcctctcatttctccggcgataactctcccttttccggcgaattcaccgcttcctcgatatgaatcccgagtatgactatctgttcaagctccttctgattggagactctggtgttggtaaatcatgccttcttctaagatttgctgatgattcatacattgagagctacataagcaccatcggagttgattttaaaattcgcactgttgagccggatggg

SEQ ID NO: 183782 - DNA, 255 bp, Glycine max
cgaacccaaaccgaaaccctaaccctaacggagagatggcggacacttggcatcgatattcgggacggagaaggacatggtgaactgtccgttctacttcaagatcggcgcgtgcaggcacggcgaccggtgctcccggcttcacaccaagccgacaattagcccaacattggttctgtcgaacatgtaccagaggcccgacatgaacatgagcattatcaccaaccccgatcagccacaaccccaatcccttga

SEQ ID NO: 183783 - DNA, 256 bp, Glycine max
gaagagttgaatcctttcaagaatcaccagaacatgttagctggcatagactatattgttgcacttcagagtgatgtatttctctatacttatgatggaaatatggcaaaggcagtacaaggccataggcacttcgaaaacttcaagaagactatcaatccagacaaggtaaattttgttaaactcgttgataagttggatgaaggaaaaatttcttggaagaagttcagctccaaggtaaaaaggctgcatgaag

SEQ ID NO: 183784 - DNA, 255 bp, Glycine max
agccttcctagaacgaaaaaaaaaagaagagcaattttccctcaccaaagaagaagaagcaaacaatggccgatcaacttaccgatgaacagatctccgagttcaaggaagccttcagcttgttcgacaaggacggcgatggttgcatcacaaccaaggagcttggaactgttatgcgttcattggggcaaaacccaactgaggcagagctccaggacatgatcaatgaagtggatgctgatgggaatggtacca

SEQ ID NO: 183785 - DNA, 256 bp, Glycine max
gttcacttggcaaccatccctatcaccggcactggtatcaaccctgctcgtagtcttggtgctgctatcatcttcaacaaggaccttggttgggatgatcactggatcttctgggtgggacctttcattggtgctgcacttgcagcactctaccaccaggtcgtaatcagggccattcccttcaagtccaagtgattcaatcaaaccgttcatgcttaatcaagttgggaacaacaaaagaactcaaaacaatgtt

SEQ ID NO: 183786 - DNA, 232 bp, Glycine max
cttcagcacaatggcttctctggcattattccttctcctgtgacgcctaaactcatggcattggacatttcctttaacaacttttctggcagcattccacgagcttttcagaatcttagaagactcacttggttgtatctccaaaacaattctatatctggagctattcctgacttcaaccggccaagtctcaagcatttgaagttgagcaataatatcttgaatgggctca

SEQ ID NO: 183787 - DNA, 256 bp, Glycine max
tgacaagggtagactgtcaaaggaagatatcgagaagatggttcaagaggctgagaagtacaaatctgaggatgaagagcacaaaaagaaggttgaggccaagaatgctttggaaaactatgcatacaacatgaggaacactgtgaaggatgacaaaattggtgagaaacttgatcctactgacaagaagaagattgaggacgcaattgagcaagctatccagtggctagacagcaaccagctcgcagaagcagat

SEQ ID NO: 183788 - DNA, 257 bp, Glycine max
tttcgaatgggatgctaactttggaattccaggagcattttacatcagaaactacacctatgatgagttcttccttgtcagtgtcactcttgaggacattccaaatcatggaaccattcacttcgtctgtaactcatgggtttacaactttaaagactacgacaaaaaggatcgtattttctttgccaataagacatatcttccaagtgcaacaccgggcgcattagttaagtatagagcagcagagttgaagattt

SEQ ID NO: 183789 - DNA, 255 bp, Glycine max
gtccagacatagtaaggattgacagactgagagctctttcttgattctatgggtggtggtgcatggccgttcttagttggtggagcgatttgtctggttaattccgttaacaaactttgacctgagccgttatatcaattggccacgtcctaaaacagaagaaaatcatcaaactattcctagcaatgaaaatgtaaactctaatgctgaacttgagctaggttcggctagtgatgagatcacagaagagggtgt

SEQ ID NO: 183790 - DNA, 262 bp, Glycine max
tgaatatgcaatcgaagccatcaagctgggatcaactgcgattggattgaagacgaaagagggtgttgtccttgcagttgaaaagcgcatcacttcaccactgctggagccaagtagtgttgagaaaattatggaaattgatgagcacataggatgtgcaatgagtggattgattgctgatgctcgaacacttgttgagcatgcacgggttgaaactcagaatcataggttctcctatggtgaaccaatgactgttgagtcc

SEQ ID NO: 183791 - DNA, 259 bp, Glycine max
ctccctcgctcaataatacaaaacaaaaaagaagaagaagaaggtcttcgcgatggcatcgaaacggatcttgaaggaactcaaggatctccagaaggatcctcctacctcttgcagcgccggtcctgttgctgaagacatgtttcactggcaagcaacaattatgggtcctccagacagtccttatgctggaggtgttttcctagtcactattcatttccctccagattatcccttcaagccacccaaggttgcattc

SEQ ID NO: 183792 - DNA, 256 bp, Glycine max
cagagccaaggtaggttaaacactcttcttcatcgtcgtcgcaatgggacgtgtgatccgtgcgcacgtaagggagcaggctcggtcttcaagtcccacacgcaccaccgcaagggccctgcccgcttccggagcctggatttcggagagcgcaacggctacctgaagggtgtcgtcactgacgtcatccacgatcctggccgtggcgcgcctctcgctaaggtcgccttccgccacccgttccgctacaagaagc

SEQ ID NO: 183793 - DNA, 255 bp, Glycine max
ggcgacgccaccctcctcatccacgagggcgtcaaggccgaggagctctatgagaagaccggggaactccccgaccctaactccactgacaacgccgagctccagatcgtgcttaccatcatcagagatgggttgaagaccgatcccaccaggtaccgcaagatgaaggagcgtctcgttggggtttctgaggaaaccaccactggtgttaagaggctatatcagatgcaggcgaatgggactctactcttccct

SEQ ID NO: 183794 - DNA, 254 bp, Glycine max
cttcgttatcttttctcagactccgcggcgtagatccgaggagttcgggaaatcctaactcatcatctcaactcaagtcatggctggacttgcacctgagggatcacagttcgatgctcgtcaatatgattctaaaatgagtgacttactttcatctgatggacaggacttcttcacatcctatgacgaggtttatgatagttttgacgctatgggtttgcaggaaaatcttctcaggggaatttacgcatatg

SEQ ID NO: 183795 - DNA, 255 bp, Glycine max
taatttgtccgaagatggaaaagatttcattgaaaaatgtttcattaaggatcctaagaagaggtggagcgcagaaatgctattgaaacacccttttctactcaacgatgacactgtttcatttaagcgcgtctcatgagtcgcccagaagccactttgatttccccgattgggtttctagcgtggcgaattcgcttcccagttcgccggaatttcaagaaaagtggggttttgatgatgagttctgttcgccgg

SEQ ID NO: 183796 - DNA, 242 bp, Glycine max
aaaagatgaaatcctctctgatcttgttatttatgatctgtggtggagtgattgcaactcctccagaggatccaattccgtgttcttcaaagaacacagactgcaccatcacagacacctatggcgtctttccggaccgaagcatttgccacgccggtgaggttatgtacccaaacatagaggaggagttcttatccgtggtggcctcagcttcgaagaagacaagaagagtcaccgccgcc

SEQ ID NO: 183797 - DNA, 257 bp, Glycine max
ctcctctgtaacttcaaaacatacacctcttctctctgtttctcttcactctctctctccctccctcttcaactaacatggcaattgaaaaccaagacaccgctgtcagagaaatcaagcccaagaacaggagaatcatgggtgctggagggcctgatgatgaggacaataggtggccaccgtggttgaagccactgctgaaagagagcttctttgttcaatgcaagtcgcatgctgattctcacaagagcgaatgc

SEQ ID NO: 183798 - DNA, 253 bp, Glycine max
atttggcttggaacgtatccagtgcctgagatggccgcacgtgcgcacgacgtcgccgcgctcgcgcttcggggcacgtcggcttgcctcaacttcgccgactcggcgtggcggctgcccttgccggcgtcgacaaatgcgaaggagatacggcgagtggcggcggcggctgctgtagcgattgcggcggaagacagctgcggcgagcagttacagaatagtattgtgaatgatgccgttgctgatgattgtg

SEQ ID NO: 183799 - DNA, 259 bp, Glycine max
gaagaaccaacaagaggggtattgagattgagattcaagtaatggggaagagcaaggttcttgtggtggggggaactgggtacatagggaggaggatagtgagggcaagcctggcactgggccatgagacctatgtggttcagaggccagagttgagcctccagatagagaagctgcagaggctcctctccttcaagaagcaaggtgctcatctcattgaggcctctttcaatgatcacaagagccttgttgatgctgt

SEQ ID NO: 183800 - DNA, 264 bp, Glycine max
aaccgtcatcataaattcatatatcatcagcctcagccatgtcttcttcgctcttgcacctcctcttccttccacaactacgatcttcgatagtgctttctcagattcttccttcgtggtaaccggtcgaatcatggagcccatggacattgttggcaagtcaaaggcagacgcttcgcttcctaaagctacaatgacaaatattattaaagagatgttacccccagatgtacgttttgcaagagatgcccaagatctattgat

SEQ ID NO: 183801 - DNA, 257 bp, Glycine max
cccaaatcgtagatctacggttaaattggtgtagtgtggtaagatgggaggaggatttagagtgcttcacttagttaggccatttctctcgtttcttcctgaagttcaaactgctgacaggaaagtgccatttagagagaaggtcatatacactgtgatctctcttttcattttcctggtttgtagtcagctccctctatatgggatacactcaacaacatgtgctgatccattctattggatgcgtgtcattctcg

SEQ ID NO: 183802 - DNA, 256 bp, Glycine max
aacctatgagaattcattatgcaaaaacaaagtcagactgtattgcaaaagaagagggtagttttgttccaagggaaaagaagaagaaacaagaggagaaagctgaaagaaagcggcgtgttgaggaagcacagcaatctggtgtggctaatggaacacatagtgcaagtaatggtggtccaactgcatcattccgtcaaggacccggtgctcaagaagcagctgctcctaacaatattttgttcatagagaatct

SEQ ID NO: 183803 - DNA, 250 bp, Glycine max
actacaccaaagtactccaaggccaggtatgatgaaattgtgaaggaagtttcttcctatttgaagaaagtaggatacaaccctgacaagattccttttgttcctatatctggttttgagggagacaacatgattgagaggtccacaaaccttgactggtacaagggtcctactctgctagatgcacttgaccagatctctgagcccaagaggccttctgacaagcccctcaggctaccccttcaggatg

SEQ ID NO: 183804 - DNA, 250 bp, Glycine max
gctgcctcatattagagaaaggaaggttgtgtatgtggaagatattgctgaaggtcttgagaatggtcctgcagccttggttggcctctatagtggtcgcaatgttggtaaacaagtggttgttgttgctcgtgactgaatgcagatgctttcgttggacattgctgtcttgttttatgattttggtgttgaatattcagggcgctttgtatgtttttggcaatcatttgcaattgtggtattggtgata

SEQ ID NO: 183805 - DNA, 253 bp, Glycine max
gcgcacagcacccaaccgtgaagagagactccatggccgagtgcaccgtccccaagtgggcccaaaaaaccgtcagcttgccccctctccggcgcggctgtcatcttgtcacttccaagatagtgaaggaaattgagcaagacctctccggcttcaagtgtggcctagctcatctcttcttgcagcacaccagtgcttctcttaccatcaatgagaattatgactcagatgttcgcgaggataccgaaacctt

SEQ ID NO: 183806 - DNA, 258 bp, Glycine max
cgggcagtagccgagattccgtgagttgcaaaaatgaagacgattctttccaccgagaccatgaacatcccggacggcgtgagcatcaaagttcatgccaaggtcatcgaagttgagggcccccgcggaaaattggtgcgagacttcaagcatttgaatctcgattttcagctcattactgacgaaaacggtaaaagaaagctgaaaatcgacgcgtggtttggttctcggaaaacatccgccgccattcgcaccgcc

SEQ ID NO: 183807 - DNA, 262 bp, Glycine max
gccggccacttggcttggtccctaagggaacaaggcatgtgatggagaaagaagtagtcactccaatccaaaatggcccctttgttcactcccaacctgcttccatacccttcataagtgaggggtgtattggcatacacctctttcacctcaagtggctgctgaaagaactccctccacacctccctcgcccccttcatcaactcatggctcaccccatggttcaccacctgaaaaaaaccccattcccggcatgcctccg

SEQ ID NO: 183808 - DNA, 258 bp, Glycine max
gcaaaggggattcaaggtatgcaggaagggatgcaggggtagttactgttgaaggaataacagcggttttggagggtccagctagccttctagcagtatacgctatagctactgggaagtcatatagctacatacttcagtttgccatttctttgggccagctatacggaactgctgtttattatataacagcaatcttggaaggtgataatttttctacaaactcgttttactattatgcatactacattggagcaa

SEQ ID NO: 183809 - DNA, 254 bp, Glycine max
cgtgttccatgccactatcaagacaacaatcgaccaagcgtatctggagttttatataagacacaaggatggcaccccaattagttcagaaccagagcgacaccgtgtgattcaatgcttgcaagctgcagtggagagaagggcatttgagggtgttaggctagagttatgcaccgaagacagacaaggacttcttgcagaagtgatgagaactttccgagaaaatgggctgaatgtgacaagggcagagatat

SEQ ID NO: 183810 - DNA, 252 bp, Glycine max
cctagacagggctattgaagcagaagatagaaagcatggagatttcctaagattggatcatgttgagggatatcttgaattgtcagcaaagacaaagacatactttgccactgctgttaacttatgggatgctgacttctatattaaagtcgacgacgatgttcatgtaaatatagcgacactgggacaaactctagtgagacaccgatcaaaaccgcgtgcctacattgcatgcatgaaatctgggcctgt

SEQ ID NO: 183811 - DNA, 252 bp, Glycine max
tcgtggcttccagggtcataaagaatggcttgctgaggttcaatttctcggcattgttaatcacccaaatttggttaaacttttgggatactgctctgtggatggagaaagaggaatccaacggctgttagtgtatgagttcatgcccaacaggagcttggaggatcaccttttcaacaaaaaattgccaaccctgccttggaaaacacgattggagatcatgcttggtgctgcacaaggattagcttatct

SEQ ID NO: 183812 - DNA, 251 bp, Glycine max
  unsure (1)..(251): unsure at all n locations
cactcgagccgaatcggctcgagcggctcgagggactttaggttgggacctgggaattagggtacttcgcgtggcgaagatgaatgaggtggacttgaacgatcgattggggaagaaggtgcgcgtgaagtgcaacancgatgataccatcggcgacctgaagaagcttgtcgcggctcagactggcacaagagccgacaagatccgcatccagaagtggtacaccatctacacggatcacatcactctca

SEQ ID NO: 183813 - DNA, 251 bp, Glycine max
cttctcataagctctacttagcaaatcaaaatggcactttcttcttacatcttcaacatccatatttgctttagctttgttcactactcttttgcttataggaagttcttcagctcaactctctgagaacttctatgatagtaaatgtcccaaggttttctatgccgtaaaatccgttcttcaatctgctttggctaaagaacctcgccagggagcatctatcgttcgcctcttctttcatgactgctttg

SEQ ID NO: 183814 - DNA, 250 bp, Glycine max
ggctgggtcttgctctgaatttctctgtgttttactatgagattcttaactctcctgatcgtgcatgcagccttgcaaaacaggcttttgatgaggctattgctgaattggatacgttgggagaggaatcatacaaggatagcactttgatcatgcaacttcttcgtgataaccttaccctctggacctctgacatgcaggatgatggtgcagatgaaattaaagaagccgcacccaaaggtgacgggga

SEQ ID NO: 183815 - DNA, 252 bp, Glycine max
gaagaaacttaatcgatcatcacttcacttcactaatacatcatggcagacgagacccagaacaagtatgagagctctgaggttgaggtccaggatcgtggtgtttttgactttctcggtaagaaaaaggatgaagaagacaagcctcatcctcaggaggaggtcatcgccaccgagtttcaaaaagtcactgtctcagaccaaggagagaacaagcacagcctcttagaaaagcttcaccgatctgacagc

SEQ ID NO: 183816 - DNA, 256 bp, Glycine max
cctcgagccgaatcggctcgaggtgattcagcatcctgggaacaagaccgagagggtttattgactcgctaagcgcacacgaggactatgaactcgaatcctggtcactatgttgcgcttgtcgtgtcctcgcccacgcttatggccgagaatggcacgccgatgaagcagcttaagcttctccgaccagacgatactttgcatattggccaggtttatcgcttgatcacgttcgaagctgtgttgaaggagtctg

SEQ ID NO: 183817 - DNA, 263 bp, Glycine max
agactctagttatatcacaaatgggtatttggagactaccatcgattggataccaggaattaaggaaattcggttgaaggatcttcccagcttcattagaaccacaaatccagatgagttcatgcttgatttcatacagtgggagtgtgggaggactcgaagagcttctgcactaatcttgaacacctttgatgccttagagcacgacgttttggaagcgatctcgtccattttgcctccggtttattccattggccctttga

SEQ ID NO: 183818 - DNA, 262 bp, Glycine max
caacatttctatgttcctgttgcacaccatgctgctgccgttcattttgttgtgaaggacagtgatgtggtgggttcacagctcattggcgttgtggcaattcctgtggaaaaaatatactcagggcaaaacgtacaagggacctaccctatcctgaacagcaatggtaagccttgtaagccaggtgctgttttgatggtatccattcagtacattccaatgcatacacttatcatgtattaccaaggagttggagctggtc

SEQ ID NO: 183819 - DNA, 265 bp, Glycine max
gtgaacacaaagctggagagtaccatggtgagcacaagccagagcacaaagaggggttcctagacaaagtcaaggacaagatccatggtgagggcggcgccgccgagggcgagaagaagaagaaggagaagaagaagaaggagcatggccatgagcatggccatgacagcagccgcagcagtgacagtgcttaaactgctgcatcacctatatatttaacaggtttatgggcccatagtagcgagggctgtgccttaatttctct

SEQ ID NO: 183820 - DNA, 266 bp, Glycine max
tgttggtaaagaaagaaagagaagagaagaatcgaagacgaagatggaggacgcatcagcatcaaagttcattccacaccaaatcggaggggtccaaaacgacgcgcttcgattcggtctccatggagtcaagagcgacatcgttggttctcaccctcttcaatcttcactccaatctacaaggagaatggatgaagcgatgaagaggcaatgcaaagttaacctgtacggaactgcttttcccatgaaggaggagcttgacaggc

SEQ ID NO: 183821 - DNA, 266 bp, Glycine max
gtccttctgagcgccaattactagtgagtgagatgcttgggaccaccgatgaaaatgagcctcttcaggcgatgatgaaagatcaatttgcaaattacgttgtacaaaaggtgctggaaacttgtgatgatcaacaacgtgagctgattctttcccgaattaaggttcatttgaatgcattgaaaaagtacacctatggaaaacacatcgtcacgcgtgtagaaaaacgtgttgctgctggagacaggagaatagctgctcaggct

SEQ ID NO: 183822 - DNA, 238 bp, Glycine max
gcttccttaagctccttagtgctgctccttgcagctctaattctatcccctcaagttcttgcaaactatgagaatcccccagtgtacaagcctcccactgagaaaccaccagttacataagcccccagttgagaagcctcctgtttacaaacctccagttgagaaccctccaatttataagccaccagtagagaagccaccagtgtacaagcccccagttgagaaacctccagtgtac

SEQ ID NO: 183823 - DNA, 267 bp, Glycine max
acagctcgagcggctcgagcaacatgcacagttacctgaagaagcaagagagcttgacaaggaggctagacagattgtaaaacgagacagaagaatctgttcgcaatcaagactttgagaaggccggagagctaagagatagagaaatggatcttaaggcgcagatatctgcacttatagaaaaaggcaaggagatgagtaacgcagaaagtgaggcaggagatgaaggtcccatggtcactgaagttgacatacaacatattgtct

SEQ ID NO: 183824 - DNA, 178 bp, Glycine max
ctcattcttatttctctcctctcttcactttcactctctctctctctctcagccatcatcatgggagcagtgattctcccagatctcggcaccgagattttgattccggtctgcgacatcattggaatagggttcgccctcttccagtgggtcctcgtctccaaggttaagctctccg

SEQ ID NO: 183825 - DNA, 266 bp, Glycine max
ggggaagagattctttaagtaagtggtttacttcatgcaaaatgattggacttgcagccgaacatggatactttctaaggtggagtaaagattctgaatgggaaaccagtcccttgtctcctgatcttgattggaagaagattgtggaacctgtcatgcagttgtatacagaggcaactgatggatctaatattgaaactaaggaaagtgctttggtctggcatcatcaatatgcagaccccgactttggctcatgccaaggcaaa

SEQ ID NO: 183826 - DNA, 265 bp, Glycine max
cagaagaagatggagaagtatcagatctggagcaggagaatagcgttggcagcgtttgcgtttgctctgctgttccaatcggcctcagcagacgacgtcgttgtgctctctgaagataacttcgagaaggaagttggtcaggacagaggagctctcgttgagttctatgctccttggtgtggacactgcaaaaagcttgctccagaatatgaaaagcttggtagcagcttcaagaaagccaaatctgttttaattggcaaggttg

SEQ ID NO: 183827 - DNA, 267 bp, Glycine max
caaacattataatttctattacatacattttgtagctaggatgagcaagttactactcattcgtgttgctgggttcgtggcaacctttgtcaccatggtgatgatgatggtgcccaaacgtgagtgcccaaaacataggtgatgacatcgtcacacaagacttcttcaacagcataatcagtcaggctgatgatggttgtgcagggaagaacttctactcacgagatgctttccttaatgctcacaattcctacaatgagtttggta

SEQ ID NO: 183828 - DNA, 271 bp, Glycine max
gaagaaacaaggagagtacgagcctccagaaagaccagatcctgatacagattatatcagagctcaggaggcccggcgcttcatgatttatgttcatgccaagatgatgatagttgatgatgaatacataatcgttggatctgccaacataaaccagagatcaatggatggtgccagagattctgagattgccatgggtgcttatcaaccatttcatttggctgccaggcagcctgccaggggacagatccatggtttccgcatgtcgttg

SEQ ID NO: 183829 - DNA, 262 bp, Glycine max
cgaaatcaccttccgctttctctccattgttctctccgatccaagaccttactccaaccacagagaatggactcgcaggatagagtctcttatcacacatcaaattgaaatcattgccatacttcgtgaagatgaggaacaaaattccgacacacgtggcactgcaccaaccgctgatctcagcaggaacaatagcagcgagagcagaagctacagcgaggcaagcctgcttccgcggcttgccacgtggtacaaatccaag

SEQ ID NO: 183830 - DNA, 264 bp, Glycine max
ctagaactcacaaaggacagaagaaacgcgaatgccaggagaactccaattaccacccgggttcagattccaccccactgacgatgagcttgtgaatcactacttgtgtagaaagtgtgctgcacaaaccattgctgttcccatcatcaaagaaatcgatttgtacaagtttgatccatggcagcttccagagatggctctttacggtgagaaagagtggtactttttctctcctcgagaccgaaaatacccaaacggttcgag

SEQ ID NO: 183831 - DNA, 264 bp, Glycine max
ctccctctgcgcaggaattgggaacattcgacaggtagagtttcttcaatggctcctaaagttgataagaagaacgacccaaaggcacaggccttgaagactgctaaggcagttaagtctggtgctacctttaagaagaaggcaaagaagatccgaacctctgtcactttccacagaccgaggacattgaagaaggataggaaccccaagtaccctcgcattagcgcgcctccaagaaataagcttgatcattatcagatcctg

SEQ ID NO: 183832 - DNA, 266 bp, Glycine max
cacatcttaaccttgttcttaccagatggctgcctcagttaaactcttatttttgtcctttctctcgttgttcatctctttctccatagctcaaacctctttcagaccaaaggcacttgttcttcctgtaaccaaagatgtttctgcctcagttcctcagtatgtcacacaaatcaaacaaagaaccccacttgtggcagtgaaactaactgttgatcttggtggtggctacttgtgggtgaattgtgaaaagggctatgtctcat

SEQ ID NO: 183833 - DNA, 268 bp, Glycine max
cttgcatcaaaggtggatgcaatcaaggatagccttgataatgatcaagaaaaagttggagctgatattgtgaaaagagctctaagttaccctttgaaattaattgccaagaatgctggtgtcaatggtagtgttgtcagtgagaaggtattgtccagtgacaatccaagatatggatataatgctgccactggtaaatatgaagatttgatgtctgctgggatcattgatccaacaaaggtggtcagatgttgcctggagcatgcag

SEQ ID NO: 183834 - DNA, 269 bp, Glycine max
aagaaagcccatatcatggaaattcaggttaatggtggtagtattgcacaaaaggtggactttgcatacagtttctttgagaaacaggttcctattgatgcagtgttccagaaggatgagatgattgacatcattggtgtgaccaagggtaaaggttatgagggtgttgtcactcgttggggtgttacccgccttccccgtaagactcacagaggtttgaggaaggttgcttgtattggtgcctggcatcctgcaagagtttcattcac

SEQ ID NO: 183835 - DNA, 264 bp, Glycine max
cctcgagccgaatcggctcgagggggagaaagggagaggcgcgaaactgagcggaggcacggacgaagaagaagggagcgagactcgtgatcgattgcgcgaagcggtggaggataagattatggacattgcttctctggagaagttccttcaggagaggattaaggtcggcggcaaggccggtgcactcggcgattccattaccgtcaccagggacaagagcaagatcaccgtcacctccgacagcaacttctctaaacggta

SEQ ID NO: 183836 - DNA, 264 bp, Glycine max
aattcgtacagtttcagcttaccgttaatgtggttgcattaatagtgaatttcacatcagcctgcttgacaggaactgcacccctcacagctgttcaactcttgtgggtgaacatgataatggacacactgggagcacttgctcttgctactgaacctccaaatgatgatttaatgaaacgttcacctgttggaaggaagggaaatttcatcagcaatgtcatgtggaggaacatcttaggacaatcattgtatcagtctatgg

SEQ ID NO: 183837 - DNA, 269 bp, Glycine max
cagacttaacaacagcacaaagcgggttactgtctgttcaagctaccatctctctctctctttcttagtgcctccttgccagaagttaaaatggcccaagaaactttcctattcacatctgaatcagtgaacgaggggcaccccgacaagctctgtgaccagatctccgatgctgtgctcgatgcatgcttggagcaggaccctgacagcaaggttgcctgtgaaacctgcaccaagaccaacatggtgatggttttcggagagatcac

SEQ ID NO: 183838 - DNA, 261 bp, Glycine max
gcaaattcggactttgcaccatgttttgggtggtacacttaacccgaatgctgcatacctattcatcagaggcatgaaaacgctgcatctccgtgtacagcagcagaattcaacaggaatgaggatggccaaacttttagaggcacatcccaaggtgaagcgggtctactatccaggcttgccgagtcaccctgaacatgagcttgccaagaggcagatgactggtttcggtggtgttgtcagttttgagattgatggaga

SEQ ID NO: 183839 - DNA, 262 bp, Glycine max
ctgtggagagcttgttttctcttgttcattcatctcacttccaatacaaggaacaagctttccaccaatttgaatcaccaatggctcgctctttctccaacctcaaggttctctctgctcttgtcgccgacgcattctccaacactctcaccaggcgtgggtacgcagtagcgacacaaagcgcaacaagaggaggagcagcctccatcagcggcaagtcaggggaagacaaggtactaggaggaggtgctgaaaaggtttc

SEQ ID NO: 183840 - DNA, 260 bp, Glycine max
cacttaccagtatggctatccaacaatctctgttagacaggcctagaaaatctgtttccaaaactatctgcttaatcctttctatagctgctgtcatgatctcatcagcctttgttggttcttatctcatcaaatccacctccttcttcaaccaatcctctcctcaacatctctgtgatcatgcacttgatagggcaacatgtttaacccatgtctcagaagtggtacaaggtccgatcttgacccccacaaaagaccac

SEQ ID NO: 183841 - DNA, 263 bp, Glycine max
  unsure (1)..(263): unsure at all n locations
ctcgagccgctcgagccgattcggctcgagagattgggttggtagatactgctgctgtctaacacagcattaccnggtccctatggttcaagaaattgcacggttggagttattcacaagtgagaaatttcctaagctccacaattggagccaagaatttttgaaccatccaattgtcaaagaaagtctgccccctagagatcctgttttctcctttttcaagggtctctatgaaagcctttttggttcaaaatagatttgat

SEQ ID NO: 183842 - DNA, 261 bp, Glycine max
gcggtgaagtccgccgttgaagaggttctgggatggatccggattctgaaccctaaaatcgtgacggttgtggaacaagaagccaaccacaacggggaagggtttttggagcggttcacggaggctttgcattactattccagcgttttcgactcgctcgacgcgtgtccggtcgaaccggacaaggctgctttggcggagatgtatctgcagagggagatatgcaacgtggtgtgctgcgagggaccggcgcggctggag

SEQ ID NO: 183843 - DNA, 260 bp, Glycine max
tggaaactcagggattggtggtggatggcagctagcatggaaatggtctgaaacagaaggtgttttcaagagaatatatttgcaccaagaaggtggtcctggatctagacgtgggtccatcatttcacttccaggctgtgatgcgccgacactaacagatggtgagattgtccaggctgccgctctagtgagtcaatcagccctttacaacaaggagcttatgcatcagcagccagttggaccagccatgattcatccat

SEQ ID NO: 183844 - DNA, 263 bp, Glycine max
gcttggagcacaagaaagctctttactgaactgtacaccaaaggaagacttcggaggaggacacccagaccccaatttgacatatgcaaaagagttggttgctcgtatgggattgggcaaatccgaaccccaagaagagcccccagagtttggtgctgcttctgatggtgatgcagatcgcaacatggttcttggtaaaaggttttttgtcactccttcagattccgtggccattatcgctgcaaatgctgttgaagctatac

SEQ ID NO: 183845 - DNA, 258 bp, Glycine max
cgatgatgatgaggaagagagcaagaccaaaaagaagtcatcagcacctaagaagagtggaagagcacaacttggtgatggccagcagggtgagcgacctccagagtgcaagcagcagtagaagtatttatgcagaatgtcatttatgtagttgagttttgttggtgttcgagaatgtcctaatgtgaaagtgggtttcatgttgttttttaatgtctcttaaattgattttcctccctatatcttggcagtccgaat

SEQ ID NO: 183846 - DNA, 261 bp, Glycine max
ctcaccgacttaccaatccttaccaaactccgactacccagaagtactactcggcaggcagacggtgggtgctaacgtccatcgtcaagagggaaacaaccctgacctacagctaaggcccccaaatcgtggttaagtgggaaagcatgtgggaatacttagacaaccaggaggttggcttagaagcagccatcctttaaagatagcgtaacagctcactggtcaagtgttcctgcggcgaagatgtaacggggctcaaac

SEQ ID NO: 183847 - DNA, 259 bp, Glycine max
cgcgtttcggagagagacgtcgcaatggggaggaggcctgcaaggtgttatcggcagataaaaaacaagccataccccaaatcacgcttttgccgtggtgttcctgatcctaagatcagaatttatgatgttggtatgaagaagaaaggtgttgatgagtttcccttctgtgttcatctggttagctgggaaaaagaaaatgtttcaagtgaagcattggaagctgctagaattgcatgcaacaaatatatggcgaaat

SEQ ID NO: 183848 - DNA, 261 bp, Glycine max
ctcgagccgcaaaaagattagctttatactatctgcatttcgtggtcaagttgctactctaacgatgcatccttatggatgccgagtcatgcagagagttctagaacattgcacagacgagagtcaatgccagtttattgtagatgaaatcttggagtcagtctgtgctcttgctcaggatcagtatggtaattatgttacgcagcatgtcttggagagaggaaagcctcaagaaaggagtcaaattatcaacaagttgtc

SEQ ID NO: 183849 - DNA, 261 bp, Glycine max
gaaaaacacaacaatggggaaccaatcctcttcaaacaagatagaaactcttcccatcgacacaacatttaagcctccagcaaatataccagtttggccacaaggtggtggatttgctactggaaccatcaacataggagggctaaaattgtttcaaatttcaacattcaacaaagtttggaaaaccttagaaggtggaccaggtgatgcaggggcagctttctttgagccagcaggaatacctgagggattcttcacact

SEQ ID NO: 183850 - DNA, 261 bp, Glycine max
cggtgctgaagtggtggaatgtgcctgtgtcattggtgtgcctgatgtcaaggggcagtgcaggcgtattggaaagccactttatgttcttgttgagccgcgtaaagcagataaatgttacccagattgacatactaaaggacgctgggtgtgagccacacaggccataatgtgatccttaagttttaggctgatggagtcgtgttcatggcaattgtcaaatatcatcctgggaaatgttcatcctgtttcatatcttta

SEQ ID NO: 183851 - DNA, 251 bp, Glycine max
ttcagtccctgccctaagcccggaaaacgacctcttcataatcgtgaagtgcttcgccgccggaatcatcctcggcacggggttcatgcatgtgctcccggattccttcgccatgctctggtcggattgcttgaaggagaagccgtggcacgagtttcccttttcgggcctggtcgcaatgttctccgccataatcacgatgatggttgattccattggccacaagtgtttacaccaagaggtgtaggact

SEQ ID NO: 183852 - DNA, 203 bp, Glycine max
gttaggttctgcacgatctgcttccagcgagtgttctttcttcgcttcaacaccttaatttgcacacggtgcttactcagcttgagaaatggcacaagaaatctttctattcacatctgaatctgtacacgagggtcaccccgacaagctgtgcgaccagatctctgatgcagtgctcgatgagtgccttgaagaggaccctg

SEQ ID NO: 183853 - DNA, 260 bp, Glycine max
gtttggaaaccttagcaggtggaccaggtgatgcaggggcagctttcgttgagccagcacgaatacctgacggattcctcacactaggccactccagccaacccaacaacaagtccctttttggatcaattctggtgccaaaagatgagacatcatcatgtgacaataatggagctttgaagaaaccaattgattacacacttgtgtggagcagcaagtcccaacagatcacgcaagacaaagatggctatatttggcta

SEQ ID NO: 183854 - DNA, 266 bp, Glycine max
gaccccagaagtggtttctgcagctccaattcaatcttctacagcaagcgtaagcccctcccactccctcccaacaacgccttagacgtcaccaccttcatctcctcccgcgcccaccgcgccaccacagccttcgtcgacgccgccaccgcccgccgcctcacctacacccagctatggcgttccgtggagggcgtggcagcctctctctccgtggacatggggatccgaaagggcaacgtggtcctcatcctctcccccaactc

SEQ ID NO: 183855 - DNA, 263 bp, Glycine max
gaattagggttttccaattcacagagcaacacaacgaaccaacaatggcgcagctacagacgcagtcgcagccgcagcacgggcaagcagcgctggagcaggtgcagtgcttcggtcgcaagaagaccgccgtcgccgtgacctactgcaagcgcgggcgcggtctcatcaagatcaacggctgccccattgagctcgtggagccggagatcctccgcttcaaggccttcgagcctatcctcctgttgggtaagagcgcttcg

SEQ ID NO: 183856 - DNA, 155 bp, Glycine max
gaaagattgaccatagagttctcgcgggaagctgacatactttccaagcttcaccatccaaatgtggtggcattttatggtgtagttcaggatggaccaggagcaacattagcgactgttaccgagttcatggtggatcgttctcttaggaatgt

SEQ ID NO: 183857 - DNA, 264 bp, Glycine max
ggagcgcttacaccttgcagaatcatctctacattcccaagggctcctactacgcagtaactccaagcccgatctcacatcaatctctcatttactcatcttaatcaatattaaataagaaaagatgggcgatatgtccaacttccaattgggtgtgattggtcgcgtatttatctctgtagcttcttctgtccccattgtcatctgcaacaaatgcttgatgcgcaatcttggcttcacttttgccacaatgcttactagttg

SEQ ID NO: 183858 - DNA, 238 bp, Glycine max
gaacaatatgggtcaaatcgggttggcgctcggatacccagatatctcgctctttctgtctttgacaagtattttcgggtttttcggacggataatctcgggtaccgtttcggagttcaccatcaagaaagctgcaacacctaggcctctttggaatgcagcatctcagcttctaatggcggtaggttacatactcctggccatggctatgccacgttccctatacattgggtccatt

SEQ ID NO: 183859 - DNA, 111 bp, Glycine max
ctcgagccggctgtgggagagaatggatattacaagatctgcagacgtccaactgtgtgtggactagattccatggtgtcaactgtagatgctccatatccatccagccat

SEQ ID NO: 183860 - DNA, 258 bp, Glycine max
ggaaaacctgacttgggcctggtccaggctagatggtcctttgtgaacaaggatgagaatctactcacgaggctccagaacatcaacttgtgctttcactttgaggtggaacaacaagttaatggctacttcctaaatttctttggattcaatggaacagctggtgtttggaggataaaggctttggaggaatcaggagggtggttggagaggaccacggttgaggacatggacatagcagttcgagctcacttgaat

SEQ ID NO: 183861 - DNA, 241 bp, Glycine max
gtttgtgcacatggcaagcttggacttctacttgcaccagaaccaagatggggcttcgcttttggattggaacaagaggttcaggattgctgctggagcagctagagggcttcaatacctgcatgaagtggtggcaccaaacatagtacatggatgtgttacgtcctctaatattctaattgatgttaacttttgtgctaggatttgtgattatgggcttaactttttggcacctgtggaa

SEQ ID NO: 183862 - DNA, 192 bp, Glycine max
agataaaatggggtctctaatggcctctcttactctcactcttgtattggcaatagtttctctaagcttgtactctcaagcctcagctgacaagtacgactattcatctccaccaccaccagtttaacagtacaagtccccaccaccaccatacaagtattcatctcatccaccacctccaacgaagcccta

SEQ ID NO: 183863 - DNA, 264 bp, Glycine max
cttagattcaaacgtccccagaatcaacaatcccgtgaccttctgcacattccttctcagatcgattggagacagagcggcgcagttacacccgtcaaagaccaagcaagctgtggtgcatgttgggcgttctcagctactggtgctattgaaggcataaataagattgtcacagggtctcttgtaagcctttctgaacaagagctgatagattgtgatacatcctacaacagtggttgtggaggtggactcatggattttgca

SEQ ID NO: 183864 - DNA, 261 bp, Glycine max
atttttattccttctttgtttcttcactttcttccatacacataaccatgtcttctcagactgttgtcctcaaagttggtatgtcatgtcaagggtgtgctggagcagtgaacagggttttgggaaaaatggaaggtgttgagtcatttgacattgatctgaaggagcagaaggtgacagtgaaaggaaatgtggagccagatgaagttctgcaagccgtttccaaatctgggaagaagactgcattctgggtggatgaag

SEQ ID NO: 183865 - DNA, 163 bp, Glycine max
tgtagcgcatacagcttgccagggctgtgtatcaagactctgatatatatcttcttgatgatgtttttagtgctgttgatgcacacactggcaatgaaatattcaaggaatgcgtgaagggggctctgaaaggcacgaccgttattcttgttacacaccaagt

SEQ ID NO: 183866 - DNA, 131 bp, Glycine max
ccaccattgaaattgattctctatacgagggaattgatttctactccactgttactcgtgccagatttgaggagctcaacatggatctcttcaggaaatgtatggagccggtggagaatgtttgagggatg

SEQ ID NO: 183867 - DNA, 251 bp, Glycine max
gagaatgcaggatccaacgttgttccaacccatgaaaccccactttccggaacaggagcagcttaaatgaccgaggtgtgactccaccaacaccaagttctggtaatacaacaactacaacctctcgcagccacgccatttttgcaagaactgcagaaggtattggaccaaaggtggtgccctgagaaacatccctgttcgtggtggaagcagacagatcacaaagcgatcatcttcatccaacaacaaca

SEQ ID NO: 183868 - DNA, 224 bp, Glycine max
gtgatccttgggtcaaaatattctacgtctgcagatctttggtcttttgcttgcatttgttttgagcttgcaactggagatctgttatttgaatctcacagtggtgagcagctttgctagggatgaggaccacttagcattaatggtggaagttcttggaatgatgccaactaagatagcacttggtggacgttcattccgtgctttctttaatgacatatggt

SEQ ID NO: 183869 - DNA, 260 bp, Glycine max
attctttccctttgacaactgcaatctaaggtagaaataacaaacacaacatgggttctttgggcacaatcaacaagccacatgctgtgtgcataccgtacccagcacaaggccacataaacccaatgctaaaactagcaaaactccttcacttcaaaggctttcacataacctttgtaaacactgagtataaccacaaacgccttctcaaagcaagaggccctgattcccttaatggcctctcttcatttcgctttgag

SEQ ID NO: 183870 - DNA, 195 bp, Glycine max
gtcttgccgtggcttggacgctacgtcttgttatgatagcagtgcagagactcacaatcctttgttcttatacaagaacagtgttgatgtccacactctcaaacaaatttgtcaacgcacagaatcgaagtacacaaattgcagtggaggacgtttataaccacagaattgtgacttcatttgcgagaatcacga

SEQ ID NO: 183871 - DNA, 205 bp, Glycine max
agctgcggttgctccatcacctaatcacttccccacttcccctgtaaatcacgtttagttcgcacaaggttttaaaaaatggctgatgctgaggacattcaaactcttgttgttgataatggaactggaatggtcaaggcgagttttcaacgtgatgacgctcctagggccgtgttcccagtattattgggcgacaacgcaatac

SEQ ID NO: 183872 - DNA, 256 bp, Glycine max
tgtacatggaagcaagaccattggaggaaggtcttgctgaggccattgatgatggcaagattggaccaagggatgaccccaaggttcgttccaagatcttgtctgaagagctcggttgggacaaggatcttgccaagaaaatctggtgctttggccctgagacccttggacccaacatggtggttgatatgtgcaagggagtccagtatttgaatgaaatcaaggattctgtggttgctggattccagtgggcatc

SEQ ID NO: 183873 - DNA, 260 bp, Glycine max
aggtgacggagaattagggttcgattccggagagggagcctgagaaacggctaccacatccaaggaaggcagcaggcgcgcaaattacccaatcctgacacggggaggtagtgacaataaataacaataccgggctcattgagtctggtaattggaatgagtacaatctacatcccttaacgacgatccattggagggcaagtctggtgccagcagccgcggtaattccagctccaatagcgtatatttaagttgttgca

SEQ ID NO: 183874 - DNA, 255 bp, Glycine max
gcagttagagacagagagagagagaaacaaaaccctaattggtgagtggcgaaaatggcgcagcaggcggcggcagcagcagcaacaggagcagcagtaatcgagcaagtgcagtgcttcgggcggaagaagacagcggtggcagtgacctactgcaagcgtggtcgaggcctcatcaagatcaatggctgcccgatcgagctggtggagccggagatcctccgtttcaaggccttcgagccaatcctcctcctc

SEQ ID NO: 183875 - DNA, 199 bp, Glycine max
ctggcccacactagcatgcccaagtgggaatggggttcaattctggacccacgaatgggagaaacacggcacttgctctcagtcagtccttaaacaacatgactattttgaaacagctctcgatctcaagcagagagccaacctcctccaagctcttacaaatgctggaatacaaccagatggagggttttacagccta

SEQ ID NO: 183876 - DNA, 270 bp, Glycine max
ggcagcgagcgctcccactccacgcgaagagttcgtgtacatggcgaagctggcggagcaggccgagcgctacgaggcgatggtggagttcatggagaaggtctccgcctccgccgagagcgaggagctgaccgtggaggagcgcaacctcctctccgtcgcctacaagaacgtaatcggcgctcgcttcgcctcctggcgcatcatctcctccattgagcagaaggaggagagccgcggcaacgaggaccacgtcgccgtcatccgtga

SEQ ID NO: 183877 - DNA, 267 bp, Glycine max
tttcttctttgttttcaattaggtttttttgttgctctccttcaaactccatctttccaaatcctctctttgcgattgtgttttgatctgcttcctactgcgatagtttctctactgttacatggccatggcggtttccgcaattggttttgaaggtttcgagaaaaggttggaaatatcctttttccagccgggactttttgctgaccctgaaggaaggggtctaagggctcttacaaaatcccagttgggtgagattctaacacc

SEQ ID NO: 183878 - DNA, 270 bp, Glycine max
cgatcatacacttagttgcttccaattaagatggttctgctagagaagctctgggatgatgttgtggctggccctcaacctgagcgtggccttggcaagctcagaaaactcaccaccctcaaaactattgatgaaggagaaagtagcaagctgcagaagacgttgtcgatgccgtcgacaccaacaaccccgatgactccgacgactccaacgacaccgggatcggcccgtaaagctgacaacgtttggaggagcgtcttccatcctggg

SEQ ID NO: 183879 - DNA, 136 bp, Glycine max
gttatgttctcaaggagcccatcggagttgttgcattaattactccatggaactatcctctattgatggctacatggaaagttgctcctgctctagctgctggttgtacagcaatattgaagccatctgaattggc

SEQ ID NO: 183880 - DNA, 155 bp, Glycine max
cttttgttgttctgtgtttgtgtttgtcttttctctcacctgaaactgtcttgctgcggtggtacctgtggttgcggaagctcctgcaagtgcggcaacggctgcggaggctgcaagatgtaaccagacttgagctacactgactcaaccaccac

SEQ ID NO: 183881 - DNA, 274 bp, Glycine max
caaacaacaatggacctccgtgaatcgataagcaaccaaaccgacgtggccctgagcatctcaaagctcctgttgtcgaaagaagctcgggacaagaacctcgtgtattcgccgctgtcgttgcacgttgttctgagcatcatcgccgctggctccaagggccccacactcgatcagcttctctcctaccctccgatccaaatccaccgatcatctcaactccttcgcctctcagctcttcgccgtcgtgctcttcgacgcctctcccgccggc

SEQ ID NO: 183882 - DNA, 265 bp, Glycine max
gtgacatcagtgcctccttctggtctccctggtgttggtctcctacgctgcccggtcggaatcagcgctgggcggctcgagccccatcacggacgtaaacgacagccacgtggcggagatcgccaactacgcgctgagcgagtacgacaagcgttctggggccaagctcacccttgtcaaggtcgtcaagggcgagactcaggtcgtttccggcaccaactaccgtctcgtcctcacagccacggatggatccgcgacggccagt

SEQ ID NO: 183883 - DNA, 261 bp, Glycine max
ttcacttgttacttaccaaaaccacttccaaaaagcctaagattaccacatagtcacattcacattgaagttaaacttgcattgaaaatggagggaagagatgaggatgtaagagtaggagccaataggtatggagagaggcaaccaataggaacagctgcacagacacaagatgccaaagactacagagaggcaccaccagctccattgtttgagcctagagagttaacatcatggtctttctacagagcaggcatagca

SEQ ID NO: 183884 - DNA, 192 bp, Glycine max
gggtcaacagctgtgactgcaatacttattgatggtcagaagcttatagtagcaaatgttggtgactcacgagctgttatttgtgagaatcgaaaggcaagacaactatctgtggatcatgaaccaagcaaggccaaaacctggattgcgaagcgtcgccggcttgtatcaaaaattccaggagatgtccct

SEQ ID NO: 183885 - DNA, 264 bp, Glycine max
cttacatgttcgggagcatatcgccggtgataaagagcagcatgggtttcaaccagaagcaggtggcgttcttgagcgtggctaaggatttgggtgacaacgttggtcttcttgctggaaaaatcagccaggcttcccctgtttgggggcttatacttgtcggggtcgtgcagaatgttgttggctatggccttgtttggctcgtcgtcactcacccgctcgccgctttgcctttgtggttgctcatgcattgtaatccttgtg

SEQ ID NO: 183886 - DNA, 176 bp, Glycine max
ctcgagccgcaatatattccattctctctgtgtatttccctacctctcccttcaagatgcagatcttcgtcaagaccctcaccggcaagaccatcacccttgaggtggaaagctctgacaccatcgacaacgtcaaggcaacgatccaggacaaggaaggcatccccccggcacca

SEQ ID NO: 183887 - DNA, 144 bp, Glycine max
cgttcactgtactttatccctttctgtgagggaattatggtaattgatatcgaggttttgactcatggattctgatcgccccagaaaaccttccaaaaatttagttcactctcgcttcttacttttcggcttctattgctgggc

SEQ ID NO: 183888 - DNA, 96 bp, Glycine max
gaatcgcttgggccttcggtggcatgatcttcgccctcgtttactgcaccgctggcatctcagggggacacataaaccaggcggtgacatttgggc

SEQ ID NO: 183889 - DNA, 174 bp, Glycine max
atgagttggtgaaggtagtggtgcaagtgttgaacctcttgcttctgagactgctggctccactgctgtggttgccattttgactcaaacacacataatagttgcaaattgtggagattcaagacgtgtcttgtgtcgcggaaaaccagcactgccattgtctgatgaccacac

SEQ ID NO: 183890 - DNA, 215 bp, Glycine max
cgaaatttcttagacaaaaaacaaggatcagaaccgttgaatcaagttgaggaagatggcactagtctctggaggacgatcaacactgaaccctaacgcccctctttacattcctgccgcgtttcgccaagtggaggatttctctccggaatggtggcagctcgtgacgacactgacatggtaccctgcctactggctacgccagcagcacgatg

SEQ ID NO: 183891 - DNA, 258 bp, Glycine max
ctgatggcagaattgcatggcaaactaacactgccaacaagggtgacgtggccttcaggcttctctcaaatggtaacatggtccttcttgatgcacaaggcgggttcgtttggcagagttttgatcaccccacagatacccttttggttggtcaatatcttagagcaaaagggccatccaagttggttagtacgctctcagagaaggaaaatgttgatgggccttatagtttggtcttggagctaacaggttagcttg

SEQ ID NO: 183892 - DNA, 235 bp, Glycine max
ttggtcccaggtgggcagctggaggattcgagagttctcaagggagtcatgatacacaaagatgtggttgcacctggcaaaatgaggagaaggattgttaacccacacatcattcttcttgattctccccttgagtataaaaagggtgaaaaccacacaaatgccgaactggtccaaaagcaactcgggactctcttcttgaagatggaagaagaatatattgaggagctatgca

SEQ ID NO: 183893 - DNA, 262 bp, Glycine max
gttctttgtctcgcaatcttcactattttcaccgagcatttgcattccacattgaatatggctgaggctacacaatctaatgctgagttattggagtggcctaagaaagataagcgccgcttcctgcatgttgtgtatcgtgttggtgatcttgatcgcaccattaagttttatactgaatgttttgggatgaagcttttgaggaaaagagatattccagaagagaaatatgccaatgcttttcttggatttggccctgaac

SEQ ID NO: 183894 - DNA, 268 bp, Glycine max
tttttcacaaactgtggaaagattcgattttactgctgggatactgctggacaggagaaatttggtggcctcagagatggatactatatccatggacaatgtgctattatcatgtttgatgttactgcccggctaacatacaaaaatgttcccacctggcaccgtgatctttgcagggtctgtgcgaacatcccaattgttcctttgcggtaacaggttgatgtcacagaccaggccagttaaggcaaagcaggttacattccacagg

SEQ ID NO: 183895 - DNA, 248 bp, Glycine max
ctgaaccttggctgattacaacatccaaaaagaatctaccctccacttggtgctccatctgcgcggtggtatgcaaatctttgtgaagacccttactgggaagaccattactttcgaggtagagagctcagacacaattgacaatgtgaaggcacagatccaagacaaggagggtattcctccagaccagcaaaggttgatttttgctggacagcagcttgaagatggacgtccactggcatactaca

SEQ ID NO: 183896 - DNA, 241 bp, Glycine max
ttccttttgaaggttagaagtgctacaatacaaacaatggcagctactcaggaagatgtgaagcttttgggtattgtgggaagcccatttgtgtgcagggtccagattgcccttaagttgaagggagttgaatacaaatttttggaagaaaatttgggcaacaagagctgattgcttctcaaatacaaccctgttcacaagcaggttccagtgtttgttcacaatgagcagcccatagcag

SEQ ID NO: 183897 - DNA, 96 bp, Glycine max
ctgctcgagaagtctttctgcttcaaaatagacttatttaaggatatttgttgaacaacttgtgtcctgttgagttattgctgtttgaatttcatg

SEQ ID NO: 183898 - DNA, 227 bp, Glycine max
cttagatcaccatgactatctcattccttatttgaggaaaataaatgtacataccacaaagacttatgctacaagaaccatatttttcttgaaagatgatggaactttgacaccattggccattggagttaagtaagccacatcctcagggtgaagaatatggtcctgttagcgaagtctacgtgcctgccagcgaaggagctggaagcttatatttggttactggc

SEQ ID NO: 183899 - DNA, 201 bp, Glycine max
gtagggagaaaaaggaataggagatggcacagttagttatggaatggatgatggtgatgaccatttacatgcgctcttggactggaaccattattggtccctataatactgtacatgaaggcagaatttatcaattgacgctgttttgtgatccagactaccctgaaaagcccccgagcgtccggcttcattcacggatca

SEQ ID NO: 183900 - DNA, 224 bp, Glycine max
ctcaaacacatcccttaaaatgaggaagatcgttgttgaactgtgtgacattgttgctactcgcggagctcggcttgctgctgctggtattttgggcatccttaagaaaataggaagagacacagttaaggttggggagaagcaaaagtcagtgatagcgttggatggggggttgtttgaacactacaccaaatttagagaatgcttggagagtgcactgaagg

SEQ ID NO: 183901 - DNA, 266 bp, Glycine max
cttgttcttcttgttgttttttttcttccctctcttctctttgtttgtcttctccttcggttgaatcaatgggtgcagaggttaagatctggaatcccgttgaagtcgctgagcaagctcgccatgactacgcttcgcagattcatccctcacatctcaccattgatccctccctcgagcttcctcaaatgacacctctcgtcctaaagttgtgcaaggatatgttcaaggcgtggtcgaatttggatgattcttgctttgttgtt

SEQ ID NO: 183902 - DNA, 265 bp, Glycine max
cgttatttcaactccagctattaaagggacaatcctacctggcattactcgcaaaagtataattgatgttgctcgaagccaagggttccaggttgaggagcgattagtgtcagtggatgaattgctagatgctgacgaggtcttctgcacgggaacagctgtggttgtatcacctgttggcagtattacttatcttgacaagagggtagcatatggggatggtattggcgtggttgcacagcaactttatactgtccttaccaga

SEQ ID NO: 183903 - DNA, 265 bp, Glycine max
ggaaaatatctatatatccatgtaggtactccacttgaaatcgagttcgcagagaaaccttattgtgctgaatcctccaaatgggtggcgtttgtggacaatgaaatccaaaaggcatgtgtgggtattggtggtcctgaaggtcatcctggtcaacaaacatttagtggcacatttagcattcagaaatataaatttggatacaaacttgtgttctgtatcactggctcaggcacttgtttagatattggaaggtttgatgcca

SEQ ID NO: 183904 - DNA, 264 bp, Glycine max
cggtgcagaagcaaatggcggcgagaagcaattgaaatttctgatctacggtcgcagcggttggattggtggtctactgggtaagctctgcgaagagcgcgggatccaacgtcgtcggcactctcaccctcgccgacgtctgccatcataaaggcctcatcctcatcaactacgccaccggctgcatcttcgagtacgattcttcccacactctcggatccggcatcgccatccaggaacacgacactcccaatttcaccggat

SEQ ID NO: 183905 - DNA, 264 bp, Glycine max
gcttcattatctcctcttggtgaagcatgctcaagaaaggacttgactgccatacatgaagttctggaaagtcttggctataaagatgatgaaggagtggcgaatgagttatcatttcagatgtggactgatcaaatgcaggacacattaaattgcaagaaaaagggagatgttgcatttcggcagaaagattttagactggcaattgagtgctactcgcagttcatagatactggaacaatggtttctccaacagtctatgca

SEQ ID NO: 183906 - DNA, 197 bp, Glycine max
cttgcacttctacaagaatcccgtgaacatagtggagggtaagaagcagtacctgtttgacgagaaggggagaaggtacgtggatgcgtttggagggattgctacggtgtgctgcgggcactgtcaccctgatgtggtcgaagccatagtcaaccaaaccaaaaagttgcagcactccacagttctctaccttaaca

SEQ ID NO: 183907 - DNA, 265 bp, Glycine max
cggctcgagaaaaaataaattattttgaaaccctaggttggagatggtggtgggaggaacagcagatttcttctacaaagaagctcaacggttagggtatgtggctcgctccgccttcaagctccttcagatacagaaccagcacaagattatcagccctggctcctccattctcgacctcggctgcgcccccggcgggtggctccaggtggcttgccagagcttgggtcccttccgcggcggcggctccgtcctcggcgtcgaa

SEQ ID NO: 183908 - DNA, 264 bp, Glycine max
gcaaaggagtgatttggagtttggagcgactgaactaatcattaatttgcactcgctgtttcagcttcatcacccttcttttgcatcatttatatctcttgagaaatggcacaagaaacctttctattcacatctgaatctgtaaacgagggtcaccccgacatgctgttcgaccagatctctgatgcagtacttgatgcgtgccttgaacaggaccctgacagcaaggttgcctgtgagacatgcaccaagaccaacatggtc

SEQ ID NO: 183909 - DNA, 261 bp, Glycine max
agtatgagagccacgctggttttactcttcctgggctctatagggttgtccatggcattgatgtttttgatcccaagttcaatattgtctctcctggagctgatatgtcaatatatttcccctactctgaaaagcagaacagacttacagccctgcatggttcaattgaacagctattatttgctcctgagcagactgatgaatacattggtttattgaaagacaagtcaaagcccataattttctccatggcaaggctag

SEQ ID NO: 183910 - DNA, 263 bp, Glycine max
cctagatctgagaccacctaccagattgctttgtctatcaaggacgaagtggaagaccttgaaaaggctggcatcactgttatccaaattgatgaagctgctttgagagagggtcttccactgaggacatcagagcaagctcactacttggactgggctgtccatgccttcagaatcaccaatgttggtgtccaggataccacccagatccacactcacatgtgctactcgaacttcaacgacatcatccactccatcatcga

SEQ ID NO: 183911 - DNA, 263 bp, Glycine max
gttaccatttgctcccagcactgagcttaaccgagcttcacaaagatgaatcgggaaaaattgatgaagatggccggttcggttagaactgggggaaagggcaccgtgagaagaaagaagaaggctgtccacaagacaacaaccacagatgacaaaaggcttcagagcaccctgaagagaataggggtgaatgccatcccggctattgaggaggtcaatatctttaaggatgacgtagttatccagtttctaaatcccagagt

SEQ ID NO: 183912 - DNA, 261 bp, Glycine max
gctgtctctgtcttcctttgtggctgacgatgttgccgctgctgttcctgctgctcaagatctgggggagcagtggtcttattaatggatgtgcttcaattcaaatagtctcgcactagtcatcattccctttgtttctgttgcttgcttggttgttcttcttcttcttgttgatcgtcgtggtcgttgaggtcttcaattttttttttattattattccgttttcgctgtttttagttttgtcctggatgcaatgcagga

SEQ ID NO: 183913 - DNA, 135 bp, Glycine max
attctctctgtgtatttccctacctctcccttcaagatgcagatcttcgtcaagaccctcaccggcaagaccatcacccttgaggtggaaagctctgacaccatcgaccacgtcaaggccaagatccaggacaag

SEQ ID NO: 183914 - DNA, 256 bp, Glycine max
caaaacctcaagtaccttctccttcacattccctcagcactttctgtattcaaaacttttggcattgtttccaatatcctaacttgagactatatatatagcagcatatatatatatataatggatagggtgacacagatggcatcagagaggccagtggtgatattcagcagaagttcatgctgcatgtgccacaccatcaaaaccctcttcagtgacttcggagtgcatccaaatgttcatgaacttgatgaga

SEQ ID NO: 183915 - DNA, 260 bp, Glycine max
gttgtaactcgttcttcttcttttgttgttctgtgtttgtgtttgttttttctctcacctgaaaatgtcttgctgcggtggtaactgtggttgcggaagctcctgcaagtgcggcaacggctgcggaggctgcaagatgtacccagacttgagctacactgagtcaaccaccaccgagaccttggtcatgggagtggcacctgttaaggctcaatttgagggtgctgaaatgggtgtgcccgctgagaacgatggctgca

SEQ ID NO: 183916 - DNA, 263 bp, Glycine max
cagaaacatccacaacaacaacacccaattaccgtcttcttcactgtcagacaaagaagcgtcgccgccggtgaaactaacacacaggtgcaccgtttgcaacaaggcctttggttcttatcaagcactcggtggacacaaggccagccaccgcaaggcctcgtcggaatccaaccccaccgcctccgtctctgccctagccaacgacagcgtttctgcttccaccgtcggcggcggaaggatgcacgagtgttccatctgta

SEQ ID NO: 183917 - DNA, 128 bp, Glycine max
ccctagtctccatacatcaacttgggaggttaaagagacggcaacgttgtgctgtccgccttgaccgagccacagcttcgtcttggccctcggttttgccctgtaaaactaatcgcagtcacaacaga

SEQ ID NO: 183918 - DNA, 262 bp, Glycine max
gatgaaaccaaaaggaagttcctagattggccaaagcgtttcaacattattaatggcattgctcgaggacttctatatcttcatcaagactctaggctgaggattattcacagagatctaaaaacaagcaatgttttactagatgcaaatttgcatcccaaaatatcagactttggcttggctcgatcatttataggagatcaagttgaggcaaacacaaatagggtggctggaacatatggttacatacctcccgagtatg

SEQ ID NO: 183919 - DNA, 182 bp, Glycine max
cgattgctagaatggaatttcgatgctcagtcatctcttttaccattctcttctctcttgctcttgcaggagagagccatgtccatgcatcgctacctgaggaagattattgggaagctgtttggccaaacactcccattcccactgcactgcgagagcttctaaagcctctccctgcaggt

SEQ ID NO: 183920 - DNA, 257 bp, Glycine max
cctattgatacggagagcagaaagatacttagttgttggtgctgtccggttcattcgaactattctctctcgccatgatgaacatctgataaattattttgttaggaataatgttctgaagccaattattgatgcatttgtctctaatggcaatcgctacaatctgctccattctgctgttctggaactttttgagtttattcagaaggagaatctgaaattattgctgaaatacatagtcggttctttttgggacc

SEQ ID NO: 183921 - DNA, 260 bp, Glycine max
cctcgagccgattcggctcgaggccttttcagggaaggaccctaccccggttgacagaagtgacccctatattgtaaggcagactgcaaagagtgtcgtggcaaatggccttgctagaaggtgcattgtgcaagtttcctatgccattggtgtccctgagcccttgtcagtgtttgtggacacttatggaactgggaagattcctgacaaggagattctgcaaattgtgaaggagaatttcgacttcagacctggaatga

SEQ ID NO: 183922 - DNA, 257 bp, Glycine max
cctcgagccgattcggctcgaggaagatggagatgtatcagatctacagcaggagaatagcgctgggagcgttcgcgtttgcactgcttttcctatcggcctcagcagacgacgtcgttgtgctctctgaagataacttcgagaaggaagttggtcaggacagaggagctctcgttgagttctatgctccttggtgtggacactgcaaaaagcttgctccagaatatgaaaagcttggtagcagcttcaagaaagcc

SEQ ID NO: 183923 - DNA, 260 bp, Glycine max
cctcgagccgaatcggctcgagcaggtgtcaccaagagttccagcacgtagctatcttgtcaacactgtttcctacgagctgactgtcctttgcactagagggccaagaagaatgcattgtgtcatgaactctatacctgtctcagctattcaggaaggaggcaacgccccaactccaacatctttccctcaaatatttgatgaacctttttctccatcaccagcactgaaagaaaaagctcaagtcacagatttaaact

SEQ ID NO: 183924 - DNA, 259 bp, Glycine max
cagcaatccagctcccggacccgccaagccccacggccgcgcgtggcactccggacatcttcgaatccggcgtccacaccctcgtccgccgcgccgtcgtcatcggcaacggcttcccctcctccgagaatcacagcatcggtttgctccgcgcccttggcctctcccacaaccacctcctctaccgcgttacgaggccgagaggtggaatcaacgattggctccattggcttcccctctctgtccatcgaaaatttca

SEQ ID NO: 183925 - DNA, 236 bp, Glycine max
cgcctcagtagaccatggcctcattgggtgggttacaaaatctaagcggcatcaattttcttatcaaaaaagagggtccaaaagtcaatgcgaagttcgagctgaagccgccaccatatccactgaatggtttggagccggtgatgagccagcagacacttgagtttcatttggggacacaccacaagacatatgtggaaaatctgtaaaagcaaatcgttgggacagcgcttgat

SEQ ID NO: 183926 - DNA, 255 bp, Glycine max
ctttctagaaacatattatgcccaaaatgtaaagggaaaggttcaaaaagtggaactgctggtaggtgttttggatgcaaaggcactggtatgaaaattacaagaaggcagattggactaggcatgattcaacaaatgcaacatgtctgtcctgactgcagaggatctggtgaggtcattaacgagagagataaatgtcctctgtgcaaaggaaacaaggtttcccaggaaaagaaggtgctggaagtgcatgtt

SEQ ID NO: 183927 - DNA, 257 bp, Glycine max
tcgaacactgctactactactactttctctctagatatgggttcccgcgctgtgcaactgtctttcatcttggggctcttggctagctcatgcttagcccaagcaccaggtgctgcaccgtcacaaccacccactacaaccccatcaccaccaccacccagatcagcacctgcaccagcacccaccacaccagcaaccccaccaccagcaaccctaccaccagcagcaactccatcaccagcagcaactccaccacc

SEQ ID NO: 183928 - DNA, 256 bp, Glycine max
ctttccctttgacaactgcaatctaaggtagaaataacaaacacaacatgggttctttgggcacaatcaacaagccacatgctgtgtgcataccgtacccagcacaaggccacataaacccaatgctaaaactagcaaaactccttcacttcaaaggctttcacataacctttgtaaacactgagtataaccacaaacgccttctcaaagcaagaggccctgattcccttaatggcctctcttcatttcgctttga

SEQ ID NO: 183929 - DNA, 125 bp, Glycine max
actcgagccgaatcggctcgaggagagatgaaggcatagaccttttgaaagacaaacaagctcatcagcgtctcactgagacagccgagaaagcaaagatggaggtctcaacattgactcaaact

SEQ ID NO: 183930 - DNA, 255 bp, Glycine max
gaactcacaaaggacagaagaaacgcgaatgccaggagaactccaattaccacccgggttcagattccaccccactgacgatgagcttgtggatcactacttgtgtagaaagtgtgctgcacaaaccattgctgttcccatcatcagagaaatcggtttgtacaagtttgatccatggcagcttccagagatggctctttacggtgagaaagagtggtactttttctctcctcgagaccgaaaatacccaaacgg

SEQ ID NO: 183931 - DNA, 133 bp, Glycine max
tgggttcaacaggtgagactcagattactccaacccatgtatctgatgaagaggcaaccttttcgccatgcaactagccagtgcctcagtactccctatggttctcaaatcaggtcttgagcttgatctgttg

SEQ ID NO: 183932 - DNA, 254 bp, Glycine max
tccattctctctgtgtatttccctacctctcccttcaaggttagtcgatttcttctgtttttcttcttcgttctttccatgaattgtgtatgttctttgatcaatacgatgttgatttgattgtgttttgtttggtttcatcgatcttcaattttcataatcagattcagcttttattatctttacaacaacgtccttaatttgatgattctttaatcgtagatttgctctaattagagctttttcatgtcaga

SEQ ID NO: 183933 - DNA, 255 bp, Glycine max
ggtgaacgcttcaaggaattcctgagggaggttgcaataatgaaaggcttacggcatccaaacattgttttacttatgggtgcagtcactaagcctcctaatttatcaattgtcacggaatatttgtcaaggggtagcttgtacaggctgttgcataaacctggcgctacagagatgttggatgagagacgtaggcttagtatggcttatgatgtggctaagggaatgaattatcttcataaacgcaatcctccc

SEQ ID NO: 183934 - DNA, 261 bp, Glycine max
actttctgttgattaccctgtcgacaaagtttcctgctatgtatcagatgatggttcagctatgttgacctttgaagcactatctgaaacagctgagtttgcgaagaagtgggtgcccttttgcaaaaagcacaatattgaaccaagagccccagagttttattttgcccagaagattgattacttaaaggacaagattcagccctcgtttgtaaaagagcgacgggcaatgaagagagaatatgaagaattcaaagtacg

SEQ ID NO: 183935 - DNA, 262 bp, Glycine max
ctgaaacttcagaagcggcttgccgctagcgttctcaagtgtggtagaggcaaagtttggcttgaccctaatgaggtcaatgaaatctccatggctaattctcgacaaaacataaggaaattggttaaggatggtttcattatcaggaagccaactaagattcattcccgttcccgtgctcgcagaatgaaggaggccaagaggaagggacgtcactctggttatggtaagcgtaagggtacaagagaggctaggctcccca

SEQ ID NO: 183936 - DNA, 262 bp, Glycine max
cagctaatgagcagtctgttgcaactttcttcagtcaagttatggctaagattgggggaaacactgctggcccaggtgatgctgtcgtcaatgtttacattaatcatgacaagaagtttgcctttgtggagatgaggtctgttgaggaagctagcaatgcgatggctctggatgggattattttcgagggggcacctgttaaggtcaggagacctactgattataatccttccttagctgctaccctaggcccaagccaacc

SEQ ID NO: 183937 - DNA, 157 bp, Glycine max
accacccaagaagccatacaaatacccttctcctccaccacctgtttataagtacaagtcaccaccaccaccgtacaaatattcatctcctccaccaccacctaaaaagccctacaagtatccatcaccaccacctccagtttacaaatacgaatca

SEQ ID NO: 183938 - DNA, 253 bp, Glycine max
tttccatcttagttcctggaggcaccaggaacctgacccaataaacaaacccttttttttctttctaatttttctaaagtttcattttttaatccaatggcaccttgggtattatcagaatgtagcttgaagcctcttgctccagtaatccctagacctagaactggggcagttttgtccagcacctcaaaggttggatttttggagacaaacaaggtattggaaggttctaagtttcaacctttgaggtgta

SEQ ID NO: 183939 - DNA, 254 bp, Glycine max
aatagtccaccttcagtgaagttcacctcagagatatggcaccccaatgtatatcctgatggccgggtttgcatatcaattcttcatcctcctggtgaggatccaaatggttatgagcttgcaagtgagcgctggacacctgttcatacggtagagagtatagtattgagtatcatatcaatgctttccagccctaatgatgaatctcctgcaaatgttgaagctgcaaaggagtggagacataggagggatga

SEQ ID NO: 183940 - DNA, 256 bp, Glycine max
  unsure (1)..(256): unsure at all n locations
cggctcgagctcgagccgattcggctcgagatggccgtacccttgccgattacacacattcagaaccangacaccctccacctggtgctccgtcttcgcggtggcatgcaaatctttgtcaagaccctcactggaaagaccatcacccttgaggtggagagctctgacactattgacaatgtcaaagctaagattcaagacaaagaaggtatcccaccagaccaacagaggctcatttttgctggaaaacagcttg

SEQ ID NO: 183941 - DNA, 254 bp, Glycine max
actgcaaagaccaaggtaattaatagctgcttgaatcctgtttggaatgaagagctgaatttcactctgacagaaccattgggagttctgaatttggaagtgtttgacaaagatcttttgaaggctgatgacaagatgggaaatgctttcttgaaccttcaaccaatagtctctgcagccagattaagagacatcttaagagtgtcctctggtgagacaacattaaggaaggtcatacctgatggtgaaaactg

SEQ ID NO: 183942 - DNA, 253 bp, Glycine max
ctcgagccgagcctttctccctaaagatagtcctcttcgcaaggatccggcatactatgtacttaacgaagacgaatctccttgcatttttggttctatcgagaagcagaggtggtcttatgcatgtgcaaaacagttgattgagaggctgatttttgctgagggtgctgaaaatggcttggagttcacaattgtaaggccatttaactggattggacctcgaatggatttcattcctgggattgatggtcca

SEQ ID NO: 183943 - DNA, 257 bp, Glycine max
gtggtatttttggaggacaacttagaagtttggtgagagctaaaggaaatagagcttctgctactgttcaaccatatctcttgctccatcttgacatctatcctgatgctgttcacacaattgaggatgcacttcacttgttttctgcaccagagactcttgaagggtaccgaacatcactcactgcaaaggccggtgttgtgactgcaaggaaatctgttcgaatagtgacactcccgaaaataatgatattgcac

SEQ ID NO: 183944 - DNA, 257 bp, Glycine max
gttgtttctgaggctgatatctttgtcaccaccaccggtaacaaggacatcatcatggttgaccacatgaggaaaatgaagaacaatgccattgtttgcaacattggtcactttgacaatgagatcgacatgcttgggctggagaactaccccggcgtgaagcgcatcaccatcaagccccaaactgacagatgggtcttccctgagaccaacaccggtatcattgtcttggctgagggtcgattgatgaacttggg

SEQ ID NO: 183945 - DNA, 262 bp, Glycine max
tcccaacacattctggtcaccggtggtgccggtttcattggcacccacaccgtcgttcagcttctcaaagctggcttcagcgtttcaataatcgacaatttcgataactccgtcatggaagcagtggaccgcgtccgccaagtggttggccctctgctttctcagaacctccaattcacccagggcgatctccggaatagggatgacttggagaaactcttctccaaaacaacatttgatgccgtgatccactttgctggct

SEQ ID NO: 183946 - DNA, 226 bp, Glycine max
taagtagcaagctagatactcaagcctatggtgatcatacctgtataatagcaaaagaacatttggagcctaacttaggagggctcactgttgagcaggctatccaaaacaagaagttgttcatcttagatcaccatgactatctcattccttatttgaggaaaataaatgcaaataccagaaagacttatgctacaagacccatatttttcttgaaagatgatgg

SEQ ID NO: 183947 - DNA, 252 bp, Glycine max
gaccatcaaagtttcacttcagccttatccggtttagggtttcggtttttgacccaacctttgacgtatcgaaaccttaagtttcggatcaggtctgagcaatctggttggtagaacctttggtcttagagagtcaagttttatgtctgaattagacgatcaaattcctactgccttcgatccttttgctgatgcaaatgctgatgactcgggtgctgggtcaaaggagtatgtgcatattcgcgtacagca

SEQ ID NO: 183948 - DNA, 256 bp, Glycine max
tgagaacatcccaattgttctttgcggtaacaaggttgatgtgaagaacaggcaagtgaaggcaaagcaggttactttccacaggaagaagaatttacagtactatgagatttcagctaaaagcaacctacaattttgagaagcctttcctgtatttggccagaaaacttgcaggtgatcctaacttgcactttgtggagtctccagcattggctccaccagaagttctaattgatgtagctgcacagcaacaaga

SEQ ID NO: 183949 - DNA, 259 bp, Glycine max
cggctcgaggtttcgaatagattatcctaagtctttgggaatagtgctgcaatggcttcaagtcaggaggaggtgacccttttgggagctactggaagcccatttgtgtgcagggttcatattgccctcaagttgaagggagttcaatacaaatatgtcgaagaaaatttgaggaacaagagtgaactgcttctcaaatccaacccagttcacaagaaggttccagtgtttattcacaatgagaagcccatagcagagt

SEQ ID NO: 183950 - DNA, 259 bp, Glycine max
gatttattaaaaagacttgttttgaataacttttgcaccatacccgcaaaacttgtcttgcagctcacaacagcatttcgagagcgtggtttatgtaacaggaatgggacctttttttacaaggatcatctacacaaaagcaatacccctatcttagctattgctggagaccaggatctgatttgcccacctgaagctgtggaagaaaccgttaagctaattcctgagcacctggttacctataaagtttttggagaac

SEQ ID NO: 183951 - DNA, 258 bp, Glycine max
cggctcgagaagtctttctgcttcaaaatagacttatttaaggatatttgttgaacaacttgtgtcttgttgagttattgctgtttgaatttcatgtaaaatgatactagctatatgtaaatcccagaaaaaaaaaaaaaagaatcctaggatcttgttttcgttttggccatttcagttaataaagaaattatatttttcgaaaaaaaaaaaaaaaaaaaaaaaaaaaaaaaaaaaaaaaaatgaaaaaatatgagt

SEQ ID NO: 183952 - DNA, 251 bp, Glycine max
gagaaatcaaagtctttgggttccggggggaggtatgcagatctttgtgaagactttgacagggaaaactatcaccttggaggttgaaagttcagacacaattgataatgtcaaggcaaaaatacaggacaaggaaggtatccccccagaccaacagaggttgatctttgctgggaagcaactggaggatggaaggactcttgctgactacaacattcagaaagagtctactcttcaccttgtcttgcgtc

SEQ ID NO: 183953 - DNA, 252 bp, Glycine max
cgcactctcttttcttcctcagaaacacatcctaatggcagagcgcggaggtggcgatcgtggcggcgaccgtggcggtttcggacgtggattcggcgggcgaggacgcggaggtgacaggggccgaggccggcgccgaggcccccgccgcgaggaagaggagaagtgggtcccagtgaccaaactgggccgcctggtgaaggagggaagaatccgaagccttgaacagatctacctccactcgctcccgat

SEQ ID NO: 183954 - DNA, 249 bp, Glycine max
ggcgttggtggtattgaagcagaggcagcaatgcttggccagcctatgagcatggtgttacctggtgttgttgggttcaagttatctggaaaactgcgcaatggtgttacagcaactgacttggttctaactgtgacacaaatacttaggaaacatggtgttgtagggaaatttgttgaattttatggtgatggtatgggtgagttgtcattagctgacagggccactattgccaacatgtctccagaa

SEQ ID NO: 183955 - DNA, 253 bp, Glycine max
ctcgagccgctcgagccgattcggctcgaggtggccctcatggtgatgctggtctcactggcagaaagatcactcattgatacctatggtgggtggggacctcatggtggaggtgccttttcagggtaggaccctatcaaggttgacagaagtggtgcctatatggtgaggcacgctgcaaagagtgttgtggcaaatggccttgccagaaggtgcattgtccaagtttcctatgcgattggtgtccctgagc

SEQ ID NO: 183956 - DNA, 257 bp, Glycine max
gagagaattaggaatggatgaggatcttcctgctgtattattgatggggggaggtgaaggtatggggcccattgaggctactgctcgggcacttggagattcattatatgacgagaatattggggctcccgtaggtcagatccttgtgatctgtggtcgtaataagaaacttgctaataaactgagttctattaattggaaggttcctgtgcaggtcaaaggatttgttaccaaaatggaggaatgcatgggagctt

SEQ ID NO: 183957 - DNA, 260 bp, Glycine max
cttctcacttcgtcaaaaccaaccaaacccctccccaattctcaagccaaccatgtcttccttcaagagcaagtaccaagatgaactcattgccaatgctgcttacattggcaccccagggaagggtatccttgctgctgatgagtcaactggtacaattggcaagcgattggccagcattaatgtcgagaatgttgaagcaaataggcgtgctcttcgtgaactcctattcaccacacctggtgcttttgagtgcctca

SEQ ID NO: 183958 - DNA, 263 bp, Glycine max
caaaaacaacacattctatatataaaaaaacacacaattccgataacattattcccagccatcgcaagctgcatttggggatggtaatgggacaacagaaaatcgccctcgcccctccctcttcgtccttccgcctccgcagccgcagcctcaactccctccgcctccgccgcatcttcgacatgttcgacaagaacggcgacggcaccatcaccgtcacggagatcagccaggcgctgagcctcctcggcctggacgccgac

SEQ ID NO: 183959 - DNA, 261 bp, Glycine max
gttttgttggtgagaatgaagagaacgaacggatccgaaaggcgctgagagaattttttgacctgacgggggcgttcaatgtgtctgatgctcttccttatttgagatggttggatttggatggtgcagagaagaaaatgaaaaagacggcgaaagagttagatgggtttgttcaagtttggctggaagaacacaaaagtaaaaggaatagtgaagctgaacccaaaagtaaccaggacttgatggacgtgcttcttagcc

SEQ ID NO: 183960 - DNA, 263 bp, Glycine max
tttatgaccctcgcttgtgtgccacttccaactaacaagaggtattatgctgcaaatatttgcaacctcacttacgttgctgttgatgaatccagaattattgtaaagttcgcttttttcgttctgtcttttcattcttttttcaaagtgaattcctgggattttttgttttcaattgagggcactaaaaactactgtggaactggtgctgataaagcatatggccgtgatattgtagatgcacattacaaagcttgtattta

SEQ ID NO: 183961 - DNA, 251 bp, Glycine max
ctttttctcttacaagctactagaacaccgtttgctttgctctcacttcattttgcaaaacctctgggtatctaactctgcagccatgggaagtttggaagttgaatcaacaaatggtcacacctcaagtcctcacaaaaaaactgaaaaatcggagagagagaggagaattgatgagtggcttccaattacttctaaaaggaatggaaaatggtggtattcagctttccacaatgttactgccatggttg

SEQ ID NO: 183962 - DNA, 227 bp, Glycine max
ctcgagccgctcgagccgagagaatccgaggcgaagagaagagaacaattaagatggaggggcaggagcaacatgtgtcgctgggagcgaacaagttcccggagagacagccgattgggacggcggcgcagagccaagacgacggcaaggactaccaggagccggcgccggcgccactggttgacccgacggagtttacgtcatggtccttttacggagcagggata

SEQ ID NO: 183963 - DNA, 248 bp, Glycine max
gggctttgtgttaatctgtttttcacttttccgattatgatgaacccggtgaatgaggtgatggagagacggttcttcgggtccaggtactgcttgtggctgaggtggatgatggtcttgatcataagcttggtggcgcttttggttcccaattttgcggattttctgtcccttgtgggaagcagtgtttgtgttgttctgagttttgtgctgcctgcgatgtttcattgtttggtttttaaggagga

SEQ ID NO: 183964 - DNA, 252 bp, Glycine max
gcccgttggtgccataatagcaaggtatttgaaggtgttcaaatctgcagaccctgcttggttttaccttcatgttacatgccaaacctctgcctacatagttggtgttgctgggtggggaactggtctcaaactcggaagtgactcggttggtattaagtataacacccatagagcactcgggatcaccctcttctgccttggaacccttcaggtttttgctctgctcttgaggcccaacaaagaccacaa

SEQ ID NO: 183965 - DNA, 260 bp, Glycine max
caccagtttacaagcctcctatagagaagccaccagtgtacaagccaccagtgtacaaaccaccagtgtacaaaccaccggtgtacaagccccctgttaagaaacctcctatttacaaaccaccttacccaaagtaccctccaggctccaactgaagacacccacctgattttgaattaagttaagggatgtattaagtatatgctaaataagaggtgtatctacaaccattgactttgtcatgctcaaaaatttagttt

SEQ ID NO: 183966 - DNA, 258 bp, Glycine max
ctcgagccgaatcggctcgaggacctgttgaatgctctaggttcactgtatactgctgttctcttccttggaatacaaaatgcttcctctgttcagccagtggtagcagttgaaaggactgtcttttatagagaaaaagctgcgggaatgtattctgccttaccctatgcatttgcacaggttctggtagagataccatatatcttcgctcaagctgtgacatacggtttaattgtttatgccatgatcggatttgac

SEQ ID NO: 183967 - DNA, 263 bp, Glycine max
attttcctttgtttctatggcttctgcagaagtagagttccgatgctttgttggtgggcttgcgtgggccaccgaccacgatgctctcgagaaagccttctctcaatttggcgaaatcgtcgaatcgaaggtcatcaacgatcgtgaaactggaagatccagagggtttggatttgtgaccttcgccacagagcaggcgatgagagacgcaattgaaggaatgaacggccagaacctcgacggtcgtaatataaccgtgaacg

SEQ ID NO: 183968 - DNA, 249 bp, Glycine max
aagtgcgttttggaagcagagaccgaaatacttcgagatggcccgtacaaagcaaactgctcgtaagtcaactggaggaaaagctcccaggaagcagcttgcaaccaaggctgcacgtaagtctgcaccaacaactggtggtgtgaagaagcctcatcgttatcgccctggaactgttgctcttcgtgagattaggaaataccagaagagcactgagctcctaatcacgaagcttcctttccagaggtt

SEQ ID NO: 183969 - DNA, 250 bp, Glycine max
caggacttaaaaatatctctgatccaccacctggtggcactagaagaagaacgacaattcccacgggcatttatgctccccctaaccgtgatcacattgctctggcgttggcaatggcttaccaagaggtcaccaatcaccataaacagcgccctcctatcaacgatctcgggccaaatgataagcttcctagctgattcacttactgctacttaccctctcagggtttcgaggcctgggtccttaagca

SEQ ID NO: 183970 - DNA, 250 bp, Glycine max
aaatcatggatttcttgcaagcacaagaaaatcagatacttgtgggtgtggccgtggccgttgtagccattgggattggtgcagtatatctctattcatccaagaagaccaaaggttgcttggacccagagaactttaaggcattcaaacttgttaagcgtgcacagctgagccataatgttgcaaagttcacatttgcactcccaacacctacatctgttttgggtcttccaattgggcaacacataag

SEQ ID NO: 183971 - DNA, 257 bp, Glycine max; identical to SEQ ID NO: 110805

SEQ ID NO: 183972 - DNA, 256 bp, Glycine max
attttccacaatgtaactgtgatgcaatcaaataggttaagatgtacaaacaacagaatgatacttgtaaatatgggaagaagtgcgacaacagaaaatcgctctcgcccctccctcttcgtccttccgcctccgcagccgcagcctcaactccctccgcctccgccgcatcttcgacatgttcgacaagaacggcgacggcaccatcaccgtcacggagatcagccaggcgctgagcctcctcggcctggacacc

SEQ ID NO: 183973 - DNA, 254 bp, Glycine max
gattcttccagctgataaaccatggtgttagctcatccttggtggagaaagtaaagttggagattcaggatttcttcaagcttccaatgtcagagaagaaaaagttttggcagagtccacaacatatggagggttttggacaagcatttgttgtgagtgaagaccaaaaacttgattgggctgaccttttctttatgactactcttccaaaacatttaagaataccccacttatttccacagctccctcttcct

SEQ ID NO: 183974 - DNA, 238 bp, Glycine max
ccccgctggtgatccttcagctgagaggttgcgctccaaatttcagcacctgacgttgcgatgatgaaccatggtatggtattgagcaagaatataccttgttgcagaaagatgtaaattggccacttgggtggccacttggtgggtttcctggaccacagggcccatactactgtggaactggtgctgataaagcatatggccgtgatattgtagatgcacattacaaagcttgtat

SEQ ID NO: 183975 - DNA, 243 bp, Glycine max
aattaataacaagctagctattagttcgattttgtagtaagtgaggtgccaatatggtgaagatagctcttggtactttggatgactcttttagcgctgcctctcttaaggcttatttcgcagagttccacgcaactctgattttcgtgttcgctggtgttggatcagccatcgcttacaacgagcttacaaaagatgcagccttggatccaacggggctggtggcagtagctgtggcacatg

SEQ ID NO: 183976 - DNA, 244 bp, Glycine max
ctcaacacagaagcagaaggaggagaagcagaaagaggagacgaagcaatggcgccgaagaagccccgaaccacgtcgaggaaccctgatttggtcaggggaattggcaaatattcgaggtcgcagatgtaccacaagaggggcatctgggccatcaaggccaaaaacggcggtgttttgcccctccacgatcccaagcccaaacccgaggccccggcccagaagccgcccaagatctacccgg

SEQ ID NO: 183977 - DNA, 245 bp, Glycine max
ctcgctgcttattttgatttgaactttgaagttttgttattttgtgcaatggcagccaagagcaaaatcctagtccttggaggaacaggatacattggaaaattcatagttaaggcaagcgcagaagcaggacaccccacttttgccttagttagagagagcaccctttctcatcctgaaaaatctaaacttattgagagcttcaagacctccggagttactcttctttatggtgatctaactga

SEQ ID NO: 183978 - DNA, 244 bp, Glycine max; identical to SEQ ID NO: 130538

SEQ ID NO: 183979 - DNA, 242 bp, Glycine max
catctgaggcaagttttcagccagtatggagaattagtgcatgtgaagattccagcaggcaagcgatgtgggtttgtccaattcgcagacaggagctgtgccgaagaggcacttcgggtgttgaatgggaccctgttgggtggtcaaaatgttcgtctttcatggggccgcagtccttcaaacaaacaggctcaggcagatccaaaccagtggaatggtggtgctggttctggtggtggata

SEQ ID NO: 183980 - DNA, 243 bp, Glycine max
ctcttcccatcttcctgacgatagtggcacttggtttccttgagccagtgctagatcagaacttgtacaacatggggatgaagatgacctcaacaacgtttgcatctgccactgttaatgtcctcccggccattacttttgtaatggcactcattttcaggctagagaaggtgaacttgagaaaatttcacagtgtagccaaagtcattggaacccttataacagtttcaggagctatggtta

SEQ ID NO: 183981 - DNA, 243 bp, Glycine max
caagaacctcgacgatatcgacctttcctttaacaacctctccggccccataccaagctcgcttggtaaactgcctaaactcgcgtatctagatttgagccgcaacaagctcacgggctcaattccggcctcatttggatccttccaaaagcccgggccggctattatgctcactaaaaaccagctttcagggcgccttcctgcttctttggccaacttagactcggacaggatagacttgtc

SEQ ID NO: 183982 - DNA, 242 bp, Glycine max
cttccattcacaaccttaaacctttctttcttgtaaactttatacattgattctgagaatagaactaagagggtatagacatggctagcgcaattgcagcttcttttttggttctgcttctggctttccccactgtatttggagctgaccatgaagttggtgacactagtggatgggccctcggagttaattacaacacctgggcctctgggaaaactttcacagttggtgacactttggtg

SEQ ID NO: 183983 - DNA, 244 bp, Glycine max
ctcactcgttcattccaacctacccttattcttcttcttcaattccacacccatcatggaacgatttccgatcctctttctcctcgccaccctcatcaccctcgcctccggtgcccgccacgatattctccggttaccctccgaagcatccacttttttcaaagcacccggtggcgatcaaaacgatgagggcacgaggtgggccgttttaattgccggttccaatggctactggaattacagg

SEQ ID NO: 183984 - DNA, 242 bp, Glycine max
gcttcgttgaaggagatgaggaacggtggtgaggattatagcaatggtcatggtggtggtggtgtgagggacttgtatggagaggattgtgccactgaggaccagcttatcactccatggactttctctgtggccagtggatgcagtttactgagagatccacgctacaacaaagggctggcctttaccgagggagagagagatgctcattacttgcgtggccttttgcctccagctatctt

SEQ ID NO: 183985 - DNA, 241 bp, Glycine max
tatcaataagcggaggaaaagaaactaacaaggattcccttagtaacggcgagcgaaccgggaaaagcccaccatgaaaatcggtcgccctcggcgtccgaattgtagtctggagaagcgtcctcagtggcggaccgggcccaagtcccctggaagggggcgccagagagggtgagagccccgtcgtgcccggaccctgtcgcaccacgaggcgctgtcggcgagtcgggttgtatgggaa

SEQ ID NO: 183986 - DNA, 240 bp, Glycine max
ctcgagccgctcgagccggttcgattttgtagtaagtgaggtgccaatatggtgaagatagctcttggtactttggatgactcttctagcgctgcctctcttaaggcttatttcgcagagttccacgcaactctgattcccgtgttcgctggtgttggatcagccatcgcttacaacgagcttacaacagatgcagccttggatccaacggggctggtggcagtagctgtggcacatgca

SEQ ID NO: 183987 - DNA, 225 bp, Glycine max
ctctctatcgattctcgtaacaaaccctacccttttgagtcttccaagttttcaccatcgtaatgggttccgaaggatccagcgtcgtggttcctaggaatttcagattattggaagagcttgagagaggtgagaagggaattggggatggaactgttagctatggaatggatgatgctgatgacatatacatgcaatcttggactgggactatcatcggtcccc

SEQ ID NO: 183988 - DNA, 242 bp, Glycine max
attcgccgcagcccctgctccggcaacgccgagctcaccgtgccggagaacctggactccaccatgcagctcctcttcatggcctgccgcggcgacgtcaagggagttgaggatttgctcaacgaaggcatcgacgtcaacagcatcgacctcgacggccgcaccgccctccacgtcgccgcctgcgaaggccacgtcgaagtcgccaggctacttctcagccgcaagccaacctcgacgct

SEQ ID NO: 183989 - DNA, 242 bp, Glycine max
gttcgtgacatgaaggagaagcttgcttatgttgccttggattatgagcaagaacttgagactgcaaagagcagttcttcagttgagaaaaactacgagcttcctgatgggcaagttatcaccattggagctgagagattccgttgccctgaagttcttttccagccttctatgattggaatggaagctgctggaattcacgagaccacctacaactccatcatgaagtgtgatgtggatat

SEQ ID NO: 183990 - DNA, 245 bp, Glycine max
gcttgcttgacttgccaactttaagtttgtcaatttccgtgctgcttggtaggttgcaatcgcaagtgaacaattggctagcgcgtactagttttgaatcacaatggcagaggatgatggttacacgagagatggaacagtcgattactgtggaaatccagctaataacaaggaaactggaacctggaaagcctgcccctatatcttaggaaacgaatgttgtgagagattggcttattatggga

SEQ ID NO: 183991 - DNA, 243 bp, Glycine max
gtgatatggggtacctcaattcagttttgtcctcttcaagccaggttcatgctgcagaagattcacctgtcagtggagggggcctcagtcagaatggaaaattcagctatgggtatgctagctcccctggcaagagatcttcaatggaagatttttatgagacaaaaattgatggtgttgatggtgaaattgttggcctttttggagtttttgatggccatggtggtgctcgtgctgctgagt

SEQ ID NO: 183992 - DNA, 242 bp, Glycine max
gaagaagctcagatcggaaaaattcacctctccaatcccaatcccatcgttgcaaatgatccgattcattctgttgcagaacaggcagggcaagacccgtcttgccaaatactacgttcctctcgaggactccgagaagcacaaggtcgaatacgaggttcatcggctcgtcgtaaacagagaccctaaatacacaaatttcgtcgagtttcgtacgcacaagataatatacaggcgatatg

SEQ ID NO: 183993 - DNA, 239 bp, Glycine max
ataaaacccatttttccctcgccctcgacgaatcaaatgcgtaccaacatagcattacccatggtgctaaccgggttactactctattctcgctccgtaatctccatgctcttcctcggtcgcgtcggtgagctcgccttagctggtggctctctcgccattggattcgccaacatcacgggctattctattctctcgggcctcgccatgggcatggagcccatttgcggccaggcttt

SEQ ID NO: 183994 - DNA, 242 bp, Glycine max
ttttggctctagctgctagagattccactgttcttaccggtggaccaagctggggagtacccttgggcagaagggactctcttggtacgagtattagtggctccaataacaacattcctgctcccaacaacacatttcagaccatcttaactaagttcaagcttaaggggcttgacattgttgatctagttgctctatctgggagccacactataggaaattcccgatgcaccagcttcagg

SEQ ID NO: 183995 - DNA, 240 bp, Glycine max
atccaaattctcgagtctcaaatcagtgaaaagttggaagaagtgaagaagaaggacaaaattatagcagacaaagaaaattccattgaagataaatcaattaccatacaatccttgcagaatgagattgcttctctccagaaaaaagggtcactggatgctgaggagcaggttggaaaggctcatgcacgtgctggtgaactacagaagcaggtggacaaacttaaaagggaactagaa

SEQ ID NO: 183996 - DNA, 241 bp, Glycine max
agcttgcacctattggtatcttctacaatatcctaaagtgtttttcttcttcttcatcaccatgtctttactttcagacctcatcaacctcaatctctcagaatccacagaaaagatcattgctgagtacatatgggttggtggatctggtatggacctcagaagcaaagccaggactcttcctgggccagtgagtgaccctgcaaaacttccgaagtggaactatgatgggtctagcaca

SEQ ID NO: 183997 - DNA, 239 bp, Glycine max
aatttttgtacacacacacagattcccctctttcgaatttcgatactttgatcagatccacaacacttcttcatccatgacgcttggttcttcaggatccagtgtcgtggttccaaggaacttcagattgctggaggagcttgataagggagaaaaaggaataggagatggcacagttagttatggaatggatgatggtgatgacatttacatgcgctcttggactggaaccattattg

SEQ ID NO: 183998 - DNA, 240 bp, Glycine max
aaggaaggcactggagacactgccgagtgccgtaaaatgcagattttcgtccgcacggatcggactcacctcattgaggtgagtccggcccagaccgtcgccgatgtgaaggccgccgtcgaggcgctgcagggcctggaggctggcgagcagcgcattctgttcaacggtgtccagctggaggatggccaggtcctggctgcggctggcgtgagcgacgatagcacgctcatgtgcctg

SEQ ID NO: 183999 - DNA, 241 bp, Glycine max
ccctcaccgaagaagaacgtcataagcaacaactccaatccatcagtgcatctctggcatcactgaccagagaaactggaccgaaactggtgaagggagacccagctaggaagtcagatacccagaaggttactcacgtgcaccatcatgtcagcactcccaccattgttgtcagcgacagttctttgaaatttacccatgtcctctacaatctctccccagctgaactttatgaacaagc

SEQ ID NO: 184000 - DNA, 238 bp, Glycine max
gctcttgggaagccttggtggcctcttctccaaaacttggaaaccaaagaagacacgtgcaataaccggccctgttattgttggagatgatccagtcaggagaaagggtaatcacttggagcaaagagagaagttgtcgctgacttctgcacccaaagggcagtccaagctacggtccccacctcaagaaccaacaaatgcatttgaaaaagttgaggttgagaaaaataagcaagat

SEQ ID NO: 184001 - DNA, 239 bp, Glycine max
gcaacggtgaaggtgaagaagaacgacctgttcaagctctgatggttcttaaatatgggggcgttcttacacatgctggcagaaagcaggctgaagaactaggaagatatttccgcaataatatgtatccagatgtctgcagctgcttttgccaaaggtcttcttgaccttgaagggcagctcacaccaatcctggtttcacttgttagtaaagactcctccatgttggatggtcttga

SEQ ID NO: 184002 - DNA, 240 bp, Glycine max
ggctatctaaggttccggagggtgtagacaacaacaggggcaatgtttacattggcagtacaagcccgacaaatgttgcaagagcttactatgagcaatttcaaagagatttctctctttttctcaagtgtcgtgcagaggaattagttaaaggaggtcgtatggttctaacatttttgggaagaagaagcgatgatccctctagcaaagatggtggctacgtttgggagcttatggcta

SEQ ID NO: 184003 - DNA, 238 bp, Glycine max
tttgaattggttgtgaagatgtatccacaaggacggatgtctcatcactttagggagatacgtgaaggtgattacatggctgtgaagggaccaaagggacgttttaagtaccagcccaaccaagtaagagctttgggtatgattgctggtggcactggcatcaccccaatgtttcaagttacaagagctatattagaaaaccaacaggacaaaaccaacataaatttgatatatgcca

SEQ ID NO: 184004 - DNA, 241 bp, Glycine max
cgtgaagcatattgatgctcttactgacaggattggaaggaatgttgtccttgaacttgttagcactgagattgatccaaagaccaaatctgcaaagaaaagtaatgaagcagtgctgaaggattggtcaaagaagtccaatcttaaggcagagagagttaattacacggctgaattcataattgactctagttttggggagccaggagctattactgtgacaaacaaacaccagaaagag

SEQ ID NO: 184005 - DNA, 244 bp, Glycine max
gctcttgggaagccttggtggcctcttctccaaaacttggaaaccaaagaagacacgtgcaataaccggccctgttattgttggagatgatccagtcaggagaaagggtaatcacttggagcaaagagagaagttggggctgacttctgcacccaaagggcagtccaagctacggtccccacctcaagaaccaacaaatgcatttgaaaaagttgaggttgagaaaaataagcaagatgatgca

SEQ ID NO: 184006 - DNA, 243 bp, Glycine max
cggctcgaggataaactaagtttcctgaatagagcctgtgttatcaaagatcgggaacaagaaatagcctcggatggttcagcatcaaatccatggaaactctgcacagtagatcaagtagaggaactaaaagccattattaaagtgattcccttgtggtctacagggatcatgatgtcagttaacattggaggctcatttggattgctgcaagctaagtccctggacagacacatcacctca

SEQ ID NO: 184007 - DNA, 234 bp, Glycine max
gctgagaaatgactccccagtggtggccaagacatcaattgcaaaggcagtgggtgattggttttatgatcgaaggcccttccgtgagatagattgtgcctacccttgcaaccctacttgccataatcgtatttttgatcagaatgagcgtccagacgtatagattcatttaaaagagtatgcttatttatttattactacaaactatactttattagttatctggtttttatt

SEQ ID NO: 184008 - DNA, 238 bp, Glycine max
ggaacattgacttggtgtatggtgggggaagtgttgggctgatgggcctaatatcccagagaatgtatgatggaggctgccatgttctaggggttattccaaaagctctcatgcctcttgagatatctggtgaaccagttggtgaagtaagaattgtttcagatatgcatgagcgtaaagctgcaatggctcaagaagctgatgcatttatcgccctccctggaggatatggaactat

SEQ ID NO: 184009 - DNA, 237 bp, Glycine max
agaaagtgtgccttggttatccttgcctttcaaggacaaaatctgtgggaagctagctcggtacttcgagctttcaaccctccccactttggttattattggaccagatgggaaaactcttcattctaatgttgctgaggcaattgaggatcatggggttgctgcatacccattcacccctgaaaagtttgctgagcttgatgaaatactgaaggccaaagaggcagctcaaaccct

SEQ ID NO: 184010 - DNA, 238 bp, Glycine max
caattttcatttttctctctcccttagtcaaagggattcatcgttcttcttcccaggttatttagaaaagcaaaatggtgaagatttgctgcattggtgctggatatgtggggggtcctactatggcagtcattgcacttaagtgcccatccattgaagtcgctgttgttgatatctctaaatcccgcattgcagcctggaacagcgaccagcttcctatctatgaacctggccttga

SEQ ID NO: 184011 - DNA, 237 bp, Glycine max
aggagatctgcaaatacctcttccaagagggagtttgctttgcgaagaaggacttcaatttggcgaacaccctgagattgacgtgccgaatctgcaggtgattaagctgatgcagagtttcaagtctcgcgagtatgtgagggagacttttgcttggatgcactattactggttcctcaccaacgatggaatcgagtttctcagaacttaccttaaccttccttccgaaattgtccc

SEQ ID NO: 184012 - DNA, 235 bp, Glycine max
tttgtgatgctgtagataagtaccgtgctgcaatgttggttgtgggtagtcatggttatggggctataaaaagggcggttttaggtagtgtcagtgactattgtgctcatcatgctcactgcactgtgatgatcgtgaagaagccaaaaatcaaacactgatctgtaatggctgcgtctatatagtacaacaataaacataatcctttcagccaaagaagagagaaagaaaataa

SEQ ID NO: 184013 - DNA, 238 bp, Glycine max
gtcttcttggctctctgtttagggttgagtatgaagttgaatattgcagcactggccaaaagaatggtaatggctgtcttgatgggaagagaacaagcctcccaatacaaaagggtggttatgtcatatatggggttgctcatcagcattcaggtggcactggatcaactctatatggacaggatggaagggttatatgttcctcaataccgagttatggaaagggaaaggaagcagg

SEQ ID NO: 184014 - DNA, 239 bp, Glycine max
gatcactatttgaatgttccatttgatctatccaaggtagtttttgtggctacagcaaataggttgcaacccattcctccaccacttcgtgatagaatggaagtaattgagcttcctggatatacacctgaggaaaagctccaaattgccatgcggcatttgattccaagagttttagaccagcatggattgagttctgagtttcttcagattcctgaggcaatggtgaagcttgttat

SEQ ID NO: 184015 - DNA, 241 bp, Glycine max
ctactaacccgacctcccgaacagcagcacaaatctccgcgaggcatctcagcccagaggtttggtcccacgacgctgaacgttcgcccttttccattccttcgtcgacactccggttccggcacgaagaaatcaccatgtcctccttcgagcaggtggtcgtcatcgacggcaagggccatctccttggccgtctggcctccatcgtggccaagcagctcctcaacggccagaagatcgt

SEQ ID NO: 184016 - DNA, 238 bp, Glycine max
ctcgagccgctctgatctcactcaccattcaccaacctgcttctctgttctcttctttccctccccaagaagaagaagaagaagatgccttcttcagaatcatcaacaggcttctccgaaaccatttgtgtgaccggcgctggtggcttcatcgcctcttggatggtcaaactcctcttggagaaaggctacactgtccgaggaaccctcagaaacccagatgatcccaagaacgggc

SEQ ID NO: 184017 - DNA, 237 bp, Glycine max
cttcttcgcaatctcagaacagaacacaacagagcccttcaactctctctgtcgttgatggcgtcacaagcgagcctccttcttcagaagcagctcaaagatctttgcaaaaaccccgtcgatggcttttctgccggtttggtcgacgaaaccaacatttttgaatggagtgtaactataattggacctcccgatactctttatgaggggggatttttcaatgccattatgagcttt

SEQ ID NO: 184018 - DNA, 236 bp, Glycine max
gaattgctcgtgcgcgtgcgtgcgtgatcgtttgattgtttggatcttgttctcgatcgacgacgatgtcggagatggcgagcccagatcccgagggactcgacggagtccggatgacgtggaacgtgtggccgcggacgaaggtggaatcaagcaagtgcgtgatccctctggcggcgacggtggctctgatccgtccccaccctgacatcccccgcctcccgtacgcccctctc

SEQ ID NO: 184019 - DNA, 234 bp, Glycine max
gaatccgccagcgtccatggggaaagtgggctgctgagattcgcgacccaagaaagggggttcgtgtttggcttggaactttcagcactgctgaagaagctgcaagagcttacgatgctgaagcaaggaggatccgtggcaagaaagccaaggtgaatttccctgatgagccttcaggcgctgcttcctcaaaacgtctcaaggcgaatccagaggctcagccaatgaagaaaa

SEQ ID NO: 184020 - DNA, 239 bp, Glycine max
ccctagttcgcttgcagtcacacaagaggccaatcctattcatagctcgagatgggtgaagaagtgaaggtagttgttccagaatcagtgttgaagaagcgcaagagggaggaggaatgggcgttggccaagaagcaagaactcgatgctgccaagaagaagagagccgagagccgcaaactcatctacaacagagctaagcagtacgctaaggagtacgatcaccaggagaaggaatt

SEQ ID NO: 184021 - DNA, 236 bp, Glycine max
gaaggaagtcttacctttctgtcagcaaagttcgatggaatactgggacttggatttcaggagatctcagttgaaaatgctgtgcccgtatggttcaaaatggtggagcaaaaacttatcagtgagaaggtgttctctttttggcttaatggggatccgaatgcgaaaaaaggtggtgaattagtttttggtggtgttgacccaaagcacttcaaaggaaaccacacttatgttcc

SEQ ID NO: 184022 - DNA, 237 bp, Glycine max
gcagattacatacgttatcgtaaaatcacttcaaatatgaacgatcggtttccagatgcaacccctgaagagcttaatgcaagtgatgcaacctgcattatttgtcgtgaagagatgacgacagccaagaaacttatatgtggacatctttttcatgttcattgtctccgatcatggctggagcggcagcacacttgccccacctgcagagccttggttgtaccacctgaaaatggg

SEQ ID NO: 184023 - DNA, 236 bp, Glycine max
ccggactgggccagttcagctgccatacactttgctccatcgttcaagtgaggaagggttgactttcaaaggaattcccaacagtatctctatctaattaaaaagagtttgtggtttccttatctatgttgtacttctgaataacatagactttatgcatgtctatgcgtaattattgcctgaacttctgcactattgtatttggatgctctcggttttcatataataaagtgtgt

SEQ ID NO: 184024 - DNA, 241 bp, Glycine max
gtttcttggttggaaaggggcatcagggttctcagcctcttccacagccgaacaagtcactcaagggattgatggaaccgccctcaccgccatcgtcacaggagcaacaagtggccttggtctggagaccacccgggttcttgcattgcgcggtgtccatgttgttatggcagtaaggagtctggacagtggtaagaatgtcaaagaaacaatacttaaggaaatcccctcggctaaaatt

SEQ ID NO: 184025 - DNA, 259 bp, Glycine max
ctcgagccgctcgagccgattcggctcgagggtcctttgggaagtttcaattggtttgacactcatgatcattcaatgagccgaacaaactcatacattagcggggataataagggtgcagctgcacgatttatggaagctggtttgagcgaaaagggtctgtaagaatggattcggttggatttgaaaatgatggaatcccccgaagaatttcaaacataattcccagccttcatgataatcaccatgaattactgga

SEQ ID NO: 184026 - DNA, 258 bp, Glycine max
ctgcaatctaaggtagaaataacaaacacaacatgggttctttgggcacaatcaacaagccacatgctgtgtgcataccgtacccagcacaaggccacataaacccaatgctaaaactagcaaaactccttcacttcaaagctttcacataacctttgtaaacactgagtataaccacaaacgccttctcaaagcaagaggccctgattcccttaatggactctctacatgtcgctttgagaccatacctgatggact

SEQ ID NO: 184027 - DNA, 263 bp, Glycine max
atttcgtcaattccaacaacaccacaatgggaagaagaccggcgaggtgttaccggcagataaagaacaaaccgtacccgaaatcccgtttctgccgcggcgtgccggagccgaagatccgaatctacgacgtgggaatgaaaagaaaggcgtggacgagttcccgttctgcgtgcacctggtctcgtgggagaaggagaacgtctccagcgaggctttggaggcggcgcgcatcgcatgcaacaagtacatggccaagttcg

SEQ ID NO: 184028 - DNA, 267 bp, Glycine max
attccattctctctgtgtatttccctacctctcccttcaagatgcagatcttcgtcaagaccctcaccggcaagaccatcacccttgaggtggaaagctctgacaccatcgacaacgtcaaggccaagatccaggacaaggaggaatccccccggaccagcaacgtctcattttcgccggaaagcaacttgaggacggccgtacccttgctgactacaacattcagaaggagagtactcttcacctcgtcctccgtctccgtggtgg

SEQ ID NO: 184029 - DNA, 265 bp, Glycine max
atctgcttcaatggggaagggaacagggagcttcgctaagaggaggaacaagacccacactctctgtgtgaggtgtggccgccgcagcttccacctccagaagagtcgctgcgccgcttgtgctttccccgctgcacgcacgcggaaatataactggagcgtcaaggcaattcgcagaaagaccaccggaactggcaggatgagatacttgcgtaacgtgcctcgccgtttcaagagtggcttcagagaaggtaccgaagctgca

SEQ ID NO: 184030 - DNA, 267 bp, Glycine max
ctcgagccgcaagtctcctcctcctcctgttcattcaccacctacaccacactacatctatgcatcccctcctcctccatatcactactagatagtggttttgcttagcttcccgagtagttattaatgaagaatataagccataaagaacgttgttgatagcaggaagatgcacttcgcaattacacaaggaaaacaacggaagcaaagtttccgcgcattttgtcacataagaagaaagaagtgtccatccttttcttcttcgtt

SEQ ID NO: 184031 - DNA, 200 bp, Glycine max
gcgctgattgtgagtggaaggcccaagcagggaacatttgtgttgcatcatttgattggagctgcagtggaatttgcaggtctgctgagaggattaaagaggtacataggaggtgtcgagagggtgagaatgcttgtggagtgccgctttctagggggcaaaaaagtgagagcggagttcgtcctaactcaggacgatta

SEQ ID NO: 184032 - DNA, 248 bp, Glycine max
ggcggctgaggactgctacgccgtggaaaggatctggaagcttctcgcggaggtggaggacctccacctgatgatggatccggacgatttcttgagactgaagaatcagctctcggtgaaatcctccggcggcgaacggcttcgttctgcttcaggtcgaaggagttggttgaactgacgaagatgtgcagagatctgaggcacaaggtgccggagatattggaggtggaggtggatccgaaggagga

SEQ ID NO: 184033 - DNA, 257 bp, Glycine max
gagcagatgaaattaaagaagcagcaccgaaaccggatgaccagtaaaaatattttactgctaattagaattgaacttctcctccatatctttttgaagggagaaggtgtttgttgctaatatctctttggtactggattttaggcattcatgtctgttatgaattgtggatgtactgggccgttttagtttgtccttccattttctcaagtgttttccaaattgcctattttattaaggacactgaagtttttatt

SEQ ID NO: 184034 - DNA, 262 bp, Glycine max
gttttattaggattttctcttctttgttttcaattaggtttttttgttgctctccttcaaactccatctttccaaatcctctctttgcgattgtgttttgatctgcttcctactgcgatagtttctctactgttacatgccatggcggtttccgcaattggttttgaaggtttcgagaaaaggttggaaatatcctttttccagccgggactttttgctgaccctgaaggaaggggtctaagggctcttacaaaatcccagt

SEQ ID NO: 184035 - DNA, 265 bp, Glycine max
gatggatactatatccatggacaatgtgctattatcatgtttgatgttactgcccggctaacatacaaaaatgttcccacctggcaccgtgatctttgcagggtctgtgagaacatcccaattgttctttgcggtaacaagttgatgtcaagaacaggcaagttaaggcaaagcaggttacattccacaggaagaagaatttgcagtactatgagatttcagctaagagcaacgacaactttgaaaagccattcttatatttggc

SEQ ID NO: 184036 - DNA, 267 bp, Glycine max
gaaggcaagatgtcgaagagaggacgcggtggttcggcggggaacaagttccggatgtcgctgggtctgccggtggcggcgacggtgaactgcgccgacaatacgggggcgaagaacctctacatcatatcggtgaaagggtcaaagggcgtttgaaccgtctcccctcggcttgcgttggcgacatggtgatggccaccgtgaagaaggggaaacccgatctgaggaagaaggttttgccagctgtcattgttcgccagcgcaacc

SEQ ID NO: 184037 - DNA, 257 bp, Glycine max
catcttttgtgttcttctttgtttctcacctttctgaggatttttccatcttagttcctggaggcaccaggaacctgaccaaataaataaaccttttttttcttctaatttttctgaagtttcattttttagtccaaggcaacttggatattatcagaatgtggcttgaagcctcttgctccagtaattcctagacctagaactggggctgctttgtccagcacctcaagggttgaatttttggacacaaacaaggt

SEQ ID NO: 184038 - DNA, 251 bp, Glycine max
cgaatatcttgttgtttggagcgatccgagaaaaactctgtaaacatgttggtttaccaggacctccttacaggtgatgagcttctctctgactccttccgttacaaggaaattgagaatggaatgctgtgggaattgaggggaagtgggatgttaaaggagcagttgatgtagacattggtgcaaacccttctgctgagggtggaggagaagatgagggagttgatgatgcagctgttaaggttgttgac

SEQ ID NO: 184039 - DNA, 254 bp, Glycine max
ttgtgtttttctgatcccttatcttaattaatttaatcaccaatggctcgttctatcgctaacgccaagactttctccgctctcgtgctagacggattctccaacactctcaccagacgtggctactctcaaagcgcaacaaggggaggagttgcctccatagcacccaaatcaggggaagacaaaggtgtctcatcatacaaggtttcctgggtgccagatcccgtcaccggttactacaaaccggaaaacat

SEQ ID NO: 184040 - DNA, 254 bp, Glycine max
gttatgacaaggctcattttgattatggtttggaggaagctgattaggaaccccaacacatattccagcctctttggtctcacttggtctttgatctcattcaaatggaatgttgttatgccagcaattgttgctaatcgatatcaattttatctgatgctggtctagggatggcaatgtttagccttgggttattcatggcattgcagccaaagattattgcgtgtggaaactcggttgcttcctttgctatg

SEQ ID NO: 184041 - DNA, 261 bp, Glycine max
tgatgatcctgagtctgtgcagcgatctgttggaggcctcacagaacataggacaaagactagaaaaacttgcagaggcacttggtttgccattcgagtttcgagcagtggcatcaaggacttccattgtcaccccatcaatgctcgactgtagtcctgatgaagcacttgtggtgaactttgcattccagcttcatcacatgcccgacgagagtgtttcaacagcaaacgaacgggaccaacttcttcgcttggtgaaga

SEQ ID NO: 184042 - DNA, 261 bp, Glycine max
ctcttctaacatggcgactcacatcctctctcgcatcttccccaaaaccctagcccccttcctctcccgttctctctccaccgccccctctcctccctccctctccgcgctctccttcctccgctgcatctccgttgctccaacccctccctccaccgcgccctcctccccaactctccctccctccgcgccctctccacacgcgccactacctcctccctcaacgaccccacccctaactggtccaaccgtcccccgaaa

SEQ ID NO: 184043 - DNA, 262 bp, Glycine max
atctccttcagatatgcgagagccaaagctggctgctaaaatagctaagcaacttcaaagatttcatcatggcgaaattccaggctcaaaggaacctcaattatggaatgatgtctggaagttctttgagaaagcatctgtcttgaatttgatgatagtaaaatgcagaagacttatgagacaatttcattcaaggaagtccacgatgaaattgttgagctcaagggattgtgtgatctactcaaatctcctgtaatttttg

SEQ ID NO: 184044 - DNA, 258 bp, Glycine max
ttgacagcaaggagctccggtatgaccaagaaagtggatttcatgtcttggatgctttgccgaagaatgtggatgtggggacatatgtgtttgtttttgagattgtgcttcatgattttagcagtgaaaaagttttgcaactggaggccaaattcatgtaccaatatatgtcactggaattattgaagttggtaatgcagaaatcacagttcttgacagtgatcttggaagtgctgaaacccagaaaaagctagattt

SEQ ID NO: 184045 - DNA, 253 bp, Glycine max
aaagaaagaaagaaagaaaaccctagcttaccttttcaactttcaagatgcaaatctttgttaagacactcactggtaagacaatcacccttgaggtggagagttcagataccatagataatgtaaagtccaagatcaagacaaggaagggatcccaccagaccagcaacgtctcatttttgctggcaagcagcttgaggatggacgtacacttgctgattacaacattcaaaaggagtccactctacacttg

SEQ ID NO: 184046 - DNA, 252 bp, Glycine max
ggcttctcctcttcttactccttacaagatgggcaaattcaatctgtcccatagagttgttttggcaccgctgaccagacagacgtcttacgacaacgtcccacaaccccatgccatcctctactactcccaagaacttccaacggaggccttctcattactgaagccactggcgtctctgacacggctcaaggctatccgcaaacccctggcatatggactaaagaccatgttcaagcttggaaacccatt

SEQ ID NO: 184047 - DNA, 255 bp, Glycine max
acatacattgtcaacacttcccacccatccagagagtgttcctattaatgcacttgttgctgtaaagggaacccctcttgaggatcagaagcctgttgaaatatgggagatgattcgcatgatagcaactgcactatcgtaatgccaaaagcaatggtcaggttatcagctggcagagttcgattctccatgcctgagcaggcattgtgctttcttgctggtgcaaattctatattcactggtgaaaagcttctc

SEQ ID NO: 184048 - DNA, 255 bp, Glycine max
cggctcgagtcttctcttgcggctagggttttagcgcacttcttctagatttaaggaagatggctaaggaaaaggttcacatcagtattgtggtcattggccatgtcgactctgggaaatccactaccactggcacctgatttacaagcttggaggcattgacaagcgtgttattgagaggtttgagaaggaagctgctgagatgaacaagaggtctttcaagtatgcctgggtgctggacaaacttaaggctga

SEQ ID NO: 184049 - DNA, 260 bp, Glycine max
cgagatcaaccctgacccctaaggccaggggtttttctcggcttcttcagattcctgaaatggcgtctgtttcagctttagccaagtacaagctcgtcactcttgggtgaccaatccgtgggcaaaaccagcatcacactcgcttcatgtacgataaattcgataacacctatcaggctacaattggtattgattttctatcaaaaactatgtatctcgaagatcgaactgttcgactgcagttgtgggatacagctggc

SEQ ID NO: 184050 - DNA, 261 bp, Glycine max
atttgatggccacttaggccatgatgtagcaagctatttgcagaaccaccttttccaaaacatcttgcaacagcatgacttttggactgagacagaaagcgcagtgaaaaaagcttacgttgaaacagatgagaaatattggaacaagaacttgtgttggggcgaggagggtcaacagctgtgactgcaatacttattgatggtcagaagcttgtagtagcaaatgttggtgactcaagagctattatctgtgagaatgga

SEQ ID NO: 184051 - DNA, 262 bp, Glycine max
caacaatggcagataactcaattagcttattttctccatacaacaagatgggcaaattcaacctctctcatagggtggtattggctcccatgaccagatgcagagcgctcaatgggactccactggcagcacatgctaatactacgctcagagatcaacaccgggtggatttctcatcactgaaggcaccttgatctctccaacttcttctgggtttcctcatgttcctggaatatactcagatgaacaggtagaggcatgg

SEQ ID NO: 184052 - DNA, 263 bp, Glycine max
aatttaccagctatacttgttccttttgaaggttagaagtgctacaatacaaacaatggcagctactcaggaagatgtgaagcttttgggtattgtgggaagcccatttgtgtgcagggtccagattgcccttaagtgaagggagttgaatacaaatttttggaagaaaatttgggcaacaagagtgatttgcttctcaaatacaaccctgttcacaagaaggctccagtgtttgttcacaatgagaagcccatagcagagtc

SEQ ID NO: 184053 - DNA, 254 bp, Glycine max
gtaatttgtgtctgctcactcgctcttctccgccacttctgaatctattgaatcaacaatcatgtcggacgaagagcaccatttcgagtccaaggccgacgccggagcctccaaaacctaccctcagcaagcggtaccatccgcaagaacggctacatcgtcatcaaaggccgcccctgcaaggttgtggaagtttcgacttccaaaactggaaagcacggtcacgctaagtgtcactttgttggaattgatat

SEQ ID NO: 184054 - DNA, 249 bp, Glycine max
gcaggaggatcatacgaggaagccattgcagcgttgaccaagcttatcagcgagaaagccgacctgagtacgctcgccgccgcaaagatcaagcagttgacggcggactagaaaccgccaccgcaaacggtcgacgccgtttaacccagacgagaggatccgaaccgggttcgcccacttcaagaacgagaaattccagaagaacccggaattatatggcgaacttgccaaaggccagagtccaaagtt

SEQ ID NO: 184055 - DNA, 249 bp, Glycine max
gtggatattgtggcatctttccaaaccagctatttcatttcaggacttgctccctttggtgatgctttggttgttctagcatatattcctggagaagaagatggagataaggattttagtagcaccgctctttacggcagggcaatgcacaaagaccagaagtaagaatagtaacatggaataatgatgagctttctacagatgctcttccagtacatgggtttgagcattacagggcgaaggactatt

SEQ ID NO: 184056 - DNA, 255 bp, Glycine max
atttaatcctatcctatcgtagcaaagaaagaaagaaagaaaaccctagcttaccttttcaactttcaagatgcaaatctttgttaagacactcactggtaagacaatcacccttgaggtggagagttcagataccatagataatgtaaagtccaagattcaagacaaggaagggatcccaccagaccagcaacgtctcatttttgctggcaagcagcttgaggatggacgtacacttgctgattacaacattca

SEQ ID NO: 184057 - DNA, 255 bp, Glycine max
ctcgagccgctgatattgttcgtttctcaactgtcattcatgagcgtggtagccctgaaaccttgagggaccctcgaggttttgccgtgaagttttacaccagagagggtaactttgaccttgttggaaacaacttcccgtcttctttgtacgtgacggcatgaaatttccagatatggttcatgctcttaaacccaatcccaagaaccacatccaagagaattggaggatccttgacttcttctctcacgttcc

SEQ ID NO: 184058 - DNA, 253 bp, Glycine max
cctcgagccgaatcggctcgagcaacaaccctaacgcgtgcagagcatagagagacgcagccatggggcgaagacccgcgaggtgttataggcaaattaagaacaaaccataccccaagtcacggttttgccgtgtgttcctgatcccaagatcaggatttacgatgttggtatgaagaagaagggtgttgatgagtttcctttctgtgtccatctggttagttgggagaaggaaaacgtttctagtgaggcc

SEQ ID NO: 184059 - DNA, 190 bp, Glycine max
aattccaggctcaaaggaacctcaattatggaatgatgtctggaagttctttgagaaagcatctttcttgaatttgatgatagtaaaatgcagaagacttatgagacaatttcattcaaggcagtccatgatgacattgttgagctcaagggattgtgtgatctactcaaatctcctgtaatttttgctc

SEQ ID NO: 184060 - DNA, 255 bp, Glycine max
  unsure (1)..(255): unsure at all n locations
tggttccaagactaagctcgaaaacaattcgtcaggctgtgggtgttgtgggttgtgtcattatgcctcacaatgtattcctgcattctgctttggtgcaatcaaggaaggttgatcctaaaaagataggtcggtgcaggaggctctcaactactattcaatggaatcggcggcggcattgcagtctccttcatgatcaatctatntgtcacaacagtttatgctaagggttttatgcacaaaacaggcagatag

SEQ ID NO: 184061 - DNA, 252 bp, Glycine max
gagcgagagaacaagaacataagggaaccacagcggcggtaacagaagaacaagcagagaatgggtcgagtgagaacgaagacggtgaagaaatcctctcggcaggtgatagagcgtcactactcgcgcagaccctggacttccacacgaacaagaagcttctggaggaagtggcgataatcccgtcgaagagggtaaggaacaagatcgcggggttctcgacgcacctgatgaaccgcatccagaagggcc

SEQ ID NO: 184062 - DNA, 238 bp, Glycine max
agataaagaggcgcaagatgagtggtagggtttctgggaaggtgaagtggttcaatgatcagaaggggtttggattcataagccctgacgatggcagcgacgatctcttcgttcaccaatctcagataaatctgacggtttccgaagcctcgccgaaggagagtccgttgagttcgccattgaatctgaatctgacggacgcgcgaaggctgttgatgtcactggccccgacggcgcc

SEQ ID NO: 184063 - DNA, 215 bp, Glycine max
ctcattttctggctaaccaaccctgacactccttcttctccgcttactcttcgatcatcgcttcagaatgccgccgaagttcgacccctcccagatcgtcgacgtcttcgtacgcgtcaccggcggtgaggcggcgcggcgagttccctcctcccgaagatcggtaccctcggtctctcccgcaagaagatcggagaagatatcgccaaggaaac

SEQ ID NO: 184064 - DNA, 248 bp, Glycine max
attcgtgattgtttccgaaaacccttgtctctgaaatcaacaccaaaatcgtgaagtgtactaagcgaaccattgcaggcgtgagactggggaagaaagcaaaagggtcaaggaagggtaagaaggcatgagggctaacatcagcaccgtagagatcgaagatttcttcgagaaatcaacaaaggacgctctttctggtggctctctccaagccgtttctagcgattccctcttttatgaagacaagt

SEQ ID NO: 184065 - DNA, 296 bp, Glycine max
caatgatgagaagaaaggtcaatattctaagttctggaatgagtttggtaaatccattaaacttggtatcatcgaggatgccaccaacagaaatcgtttggcaaaactgctcagatttgagagcaccaagtctgagggtaaattgacatctctggatcagtacatatctagaatgaaaactgggcagaaggatatcttttacataactggaaccagcaaagaacaactggaaaactctcccttccttgagcggcttaagaagaaaaattttgaggttattttcttcacggatccag

SEQ ID NO: 184066 - DNA, 298 bp, Glycine max
tgtggaatcttccaaaatgtttttttctgcgagctcttgtatgatcctgccgctgggtcactgaagaagttgccggctaatataaaagtaaaatattcaagtggacaaacatctgatgctgcagctagaaagaggaaaggaaaatgtatagagggagatggtgtttcagagtccacaaaggaaggaaaaacattaaatgataaacgtttagcaaccttggacatttttgcaggctgtggtggcttatcagaggggttgcagcagtcaggagtttcatcaactaaatgggctattgagt

SEQ ID NO: 184067 - DNA, 294 bp, Glycine max
  unsure (1)..(294): unsure at all n locations
caccatgccaccgaaactcacactcgtgttggtggtgctgtttttcgcccccgttgacgcgcattttccggcaaccggagagctccaangttccgcgaggcgccggcattccgcaacggaagagaatgccgcaaccgcgcgcggaggatctccgtgatccacatcgcgatgacgctggacgcgacctacctccgcggctccgtcgccggtgtgttctccgtcctgcggcacgcatcatgtccggagaacatcgtgttccactttatcggcaccacgcgccgaagcacggcgctc

SEQ ID NO: 184068 - DNA, 294 bp, Glycine max
cgccacctctgctattcagcaatcagcattcactggtcaaactgctctgaagcagctcaatgagttcgtccgcaagaccggtggcgccggcaaaggtcgcactaacatgcgccgcaccgtcaagagtgctcctcagagcatttggtatggccctgaccgtcccaagtacttgggtccattctcggagcagattccatcatacctgaccggagaattccctggtgactacggatgggacactgctggattatcagctgacccggaaaccttcgccaggacacgggagctggaggt

SEQ ID NO: 184069 - DNA, 292 bp, Glycine max
cgaccctactcattctccatacctcaacgaagaggttaaagagacggcaacactttgctgtccgccttgaccgagcagagcttcgtcttggccctcgattttgccctaaagtactctcagtcacaacagacaccgtcgtcgtcgtcgtcgtcatcaatggcaccgaagcagaccaaggctgagaagaagatcgcttacgatgcgaagctgtgcgacctaatggaggagtacggccagatcctcgttgtgaactccgataacgtgggatcgaaccagctccagaacattcgca

SEQ ID NO: 184070 - DNA, 291 bp, Glycine max
gcctctgcaattcagcgggctcaagtgctccccactctcatcttcttctctcttctccaaaccttctctttggacccaacaatcccaaaagcgcgtttcaattaccattgcgaactcaatagcaatagccaatgcgcagaacaaagagagagcgaggcttaagaaactcttcgaagaagcctacgagagatgccgcaatgctccaatggaaggtgtttccttcaccatcgaagacttcactgctgctcttgacaagtacgacttcgattctgaagttggcggcaagattaa

SEQ ID NO: 184071 - DNA, 290 bp, Glycine max
caagcaggcactaccagcagatctagttagcaggggaatggctgtgaaagatccattttctccacatggcttaaagctcaccattcaagactatccttttgccaatgatggactccttctgtgggatgctataaagctatgggtcactgactatgtcaaccactactaccctgaaccaagtcttgtggagtcagacgaagagttgcaggcatggtggacagagattagaacacttggtcatgctgacaaaaaagacgagccatggtggccacgtcttaaaaccccaaaag

SEQ ID NO: 184072 - DNA, 286 bp, Glycine max
cccatctagaggtgctgttgactttgcttcagctgtcaggaaattggcttctcaggattctggtatatggaagtatgataaaaatggttctggtgatgcttccactggctctagtaggagtttaaatgctctggctagtgcctacaatggtggacaggggagagtcaacaatggtgatagattacagaatcgtggctctgctcgggcagctcctgtttggcttgaaactggtgacgcattggtaaatgtttatgcttatatgcttcaactgtgagatgaattcttt

SEQ ID NO: 184073 - DNA, 294 bp, Glycine max
cggctcgaggttcgatacattgacattgaaacatgccagtctggggttattaagacttctggtgctgttccagtagctcgtgtgggacagtctgccacaatggttggttccagagtgatattgtttggtggagaagatatgagcaggaagctgttgaatgatgtccatgttctcgatcttgaaagtatgacttgggaaatgataaagactacgcagacacctccatctcctagatatgatcattcagctgctattcaaggagagcggtaccttctaatatttggtggttgctct

SEQ ID NO: 184074 - DNA, 296 bp, Glycine max
tcgaaaataaagaaattagcgtcaaaatgttgggtgtgttcagcagctccatagtgtcgccggcggacgagctcgtggccgccggcagccgtactccgtcgccgaagatgacggcggcggcgctgcggaagcggttcgaggagaagaacccctccgccgtgtcggtggaggtcggagagcatgtccagctcgcttatacccaccacaacgagtcgccgtttcagcccagatcctttgctgtcaaggatacggtgttctgcttgtttgagggagcccttgacaatttgggaaacttg

SEQ ID NO: 184075 - DNA, 294 bp, Glycine max
tcttgtatttgagtcttctagacaaggcaaggttgcaattcttgatcggcatatccagctgacagacaacgatgaatttgcttaccaagagatgctcactcaccttgcactctgttccattccagatccaaagaaggtgctgcttattggagggggagatggtggaattcttagggaaatatcacgccattcttctgttgagcatattgatatatgcgaactagaccaaatggtcattgatgtttattcggagtttttcccggatatagctgttggttacgaggatccccgagt

SEQ ID NO: 184076 - DNA, 272 bp, Glycine max
tagaggccagggtctcggagtgtttgggtttgtttatcttaaacaccacaaacacagaacagaggtgtagagatgaaagctcaaggctatggcggcagagtcatcactgagggtggcgactcccactctttgcaacctcaatgggtctcagagacgaccaaccaccaccactctctctccgcttcgcttcatgggttttcgtcctcgaccctcctctcactctctcacctcctcttccctttcacacttcttcgggagcaccagaattcact

SEQ ID NO: 184077 - DNA, 290 bp, Glycine max
cgaggcgggcagcgccccgcactggccattaaggcgagcgtggagaagacgaagaggaggttcgacaactacgcgaacaggggttgctgtgcggcggcgatgggttgccgcacctgatcgtgagcggagaccagaggcactggggtgagttcatcacacccggaatactattcctgtacatctcgggatggatcggctgggtgggtcggagctacctgattgcgatcagggacgagaagaaacccaccatgaacgagatcatcatcgatgttcctctggcttctcgcttg

SEQ ID NO: 184078 - DNA, 290 bp, Glycine max
ctcgagccgttgaaacaaagctagcatagcatttttcttttacaaagcaagacacccttttacttttcattctatcatctctttagctttgtccaaagaccatgtctgtggtggctgataattctgcaaacaatggaagccaccaagtggttttaaatgtaaacggtgatgcccccaagaagtgtgatgactcagccaaccaagactgtgtacctcttctgcagaagttggtagcagaggtggtggggacgtacttcttgatatttgcacggtgtgcttcggtggtggtg

SEQ ID NO: 184079 - DNA, 288 bp, Glycine max
  unsure (1)..(288): unsure at all n locations
ctcgagccggatcctttttcaactggttttacttttctatcaacataggtgcccttgtnctcccgcacttttattgtttggattcaagaaaatgctggctggggtcttggatttggcattcctgctttatttatggcattagctattggaagtttctttttaggcactcccctttacaggtttcaaaaacctgggggaagccctattacgagaatgtgccaggttgtggtagcatctgtctggaagcgaaatctggttgtccctgaggacagtaatctcctatatgag

SEQ ID NO: 184080 - DNA, 288 bp, Glycine max
  unsure (1)..(288): unsure at all n locations
aatcgtgaggctgccaggaaaagccgactgaggaaaaaggcatatgtgcaacaattagagagcagtaggttgaaactgacccaacttgagcaggagctccagcgatctcgccagcagggaatatttatttcaagtactggagatcaggcacagtcaatgagtggaaatggtacttaancattgtgtacctccgattgtatgttttgagggttaaacatattggagtagttttaggggatgttttgaggctgataataataatccatagtcagtgcaaaaacgattgac

SEQ ID NO: 184081 - DNA, 295 bp, Glycine max
tcacagtgaggctggagaaggaagcctcctacgatgaaattaaaaatgctatcaaggaggaatcagaggggcaagttgaagggaattcttggttacactgaagatgatgtggtctccaccgactttgtgggcgatagcagatcaagtatttttgatgcaaaggctggaattgcattgaataagaactttgtgaagcttgtctcttggtatgacaacgagtggggatacagctcacgtgtcattgacctgcttgtattcgttgccaagaagtctttttaaggttgtactgaaaaaa

SEQ ID NO: 184082 - DNA, 292 bp, Glycine max
gtggtccagttcaatgctgatattgctgatgggatgccatggaagtttgttcccacacagagagaggttacggtcaagcccggtgcaagtgccctcgcattttatactgccgaaaacaaaagttctactccaataacaggtgtttctacgtataatgtcactcctatgaaggctgcagtgtacttcaataaaattcaatgcttctgctttgaggagcagcgacttcttcctggagagcatattgacatgcctgtattcttttatattgacccggaatttgagacggatccta

SEQ ID NO: 184083 - DNA, 290 bp, Glycine max
gctgtttcggaggaggaaatcggtcgtctataccgaataaggaagacggtgatgcagatgctgagggacagaaattttctggttggtgacttcgagatcaacatgtccccgcacgagttcaagtccaagtacggcgaacacatgaagcgcgaggacctcgtcatcaacaaatccaagaaggacaactccggcgaccagatctacgttttcttccccgacgaacccaaggtcggcgtcaagaccatgaagacctacaccaaccgcatgaactccgaaaacgtctacagagc

SEQ ID NO: 184084 - DNA, 287 bp, Glycine max
atgagtttgttgatcgagataactagaaacagtgtgatgaaaatgaaggtccttgttttcttcgttgctacaattctgctcgcatggcaatgccatgcgtacgatatgttccctctccgaatgaacactggctatggtgcccgtactccggaggtgaaatgcgcaagttggaggcttgctgtggaagcacacaacatctttggctttcagaccattcctgaagagtgcgttgaagcgtcaaaggaatacatccatggcgaacaatatagatcagactccaaaacagt

SEQ ID NO: 184085 - DNA, 288 bp, Glycine max
ctgtggttatcgtcttcttcttcctcttcctaagatcgctccttcccctgcgtggaagggctaacccatggccggaaaagaaaagggtcctgctatcggaatcgatctcggaaccacctactcttgcgtcggtgtgtggcaacatgaccgcgttgaaatcatcgccaacgaccaagggaacagaaccacgccgtcttacgtcgcgttcactgacaccgagcgtctcatcggtgatgcggccaagaatcagtcgccatgaccccatcaacaccgtcttcgatgccaaga

SEQ ID NO: 184086 - DNA, 288 bp, Glycine max
ctgtcttgcttctttgtcgcgtcttgttcgttgcttggtttcttccctgctatgttgtcatgtgttgttgtgtgcaatttctaggacatgcttggacctcgctgaaatttgcaaagaagtcgggctctctcctggcgtgttgaatcttctcactggattaggacctgaagcgggtgctcctttagcagctcatcccgatgtagacaagattgcctttactggaagctctgcaactgggagcaaaattatgacagctgcagctcagctgatcaagcctgtctcactaga

SEQ ID NO: 184087 - DNA, 281 bp, Glycine max
cgagacagggagaaagggtgtgagaatggagagcaaagaggaagatgtaagggttggagcaactaagttctcagaaaggcaaccaattggtacagcagctcagggtgacaaggactacaaagaaccacccccagcacctttgtttgagcctggtgagctaaagtcatggtccttctacagagctggaattgctgagtttgtggccactttcttgttcctctacattaccatcttaactgtcatgggtgtcaacaagtcaccctccaagtgtgcctctgttg

SEQ ID NO: 184088 - DNA, 283 bp, Glycine max
ctcaccctctgtcgaaaatctctttaattgctttttttcgttaaaaaaaaaatactatttttgtggactacacctaattgtgtgggttgaatatatgagtagattttggcacctttgcctattgggttcgcggtgttcttggttcacttggcaaccatccctatcaccggcactggtatcaaccctgctcgtagtcttggtgctgctatcatcttcaacaaggaccttggttgggatgatcactggatcttctgggtgggacctttcattggtgctgcacttg

SEQ ID NO: 184089 - DNA, 283 bp, Glycine max
ctcgagataactagaaacagtgtgatgaaaatgaaggtccttgttttcctcgttgctacaaatttcgtcgcatggcaatgccatgcgtacgatatgttccctctccgaatgaacactggctatggtgcccgtactccggaggtgaaatgcgcaagttggaggcttgctgtggaagcacacaacaactttggctttgagaccattcctgaagagtgcgttgaagcaacaaaggaatacatccatggcgaacaatatagatcagactccaaaacagttcaacaac

SEQ ID NO: 184090 - DNA, 288 bp, Glycine max
cgctgccaacacattgatgagttctgccatctcagccttcccatctctcctttcctcctcaaaatccagatttgccgcagcagttcctctttccagctttgttgtcaccaatgcctcttcttctcgcttttccatgagtgctgactggatgcctggccagcctagacccccctaccttgatggttcagcacctggtgactttggattcgaccctcttcgtcttggtgaagtaccagagaatcttgagaggttcaaagagtcagaactcattcactgcagatgggccat

SEQ ID NO: 184091 - DNA, 291 bp, Glycine max
ctagatattcattctaagggaaaaatgacagaggagcaatccaaaaaggtggctgagactgagagttttccctctaatcctgcacctgaacctgttgttgttccaaaggaggatgtggcagaggagaaatctgtaattccacaaccctctccctctcctgctgatgagtccaaagctcttgtcatagttgagaagactagtgaagttgctgaagagaacccgattgaggggtctgtgaaccgagatgctgtgcttgcaagagttgcaaccgagaagaggctgtcactaatc

SEQ ID NO: 184092 - DNA, 285 bp, Glycine max
cataatggcttctatttcttgtatgagtgctattttaagctttcttctcatctctatctttctttctgtttacaatattaaagtgtgtgaggcacaagccaggcctcctacagcgaaggggctatcatacaccttctacgacaaaagctgtcctaagcttaaatctatcgttagatcagagctcaaaaaggtcttcaataaggacattgctcaagctgctggcttgcttcgccttcacttccatgactgctttgttcagggctgtgatggatcagtattcttgga

SEQ ID NO: 184093 - DNA, 282 bp, Glycine max
gatcgagataactagaaacagtgtgatgaaaatgaaggtccttgttttcttcgttgctacaattttgctagcatggcaatgccatgcgtacgatatgttccctctccgaatgaacactggctatggtgcccgtactccggaggtgaaatgcgcaagttggaggcttgctgtggaagcacacaacatctttggctttgagaccattcctgaagagcgcgttgaagcaacaaaggaatacatccatggcgaacaatatagatcagactccaaaacagttaacca

SEQ ID NO: 184094 - DNA, 261 bp, Glycine max
  unsure (1)..(261): unsure at all n locations
tggcattgcactccgtgtgccaacacnaaacgtctcagtggtggactcgttgttcaggtctccaaagaagacctttgcagaagaagtgaatgcagcattcagagagagtgcagacaatgagctccagggaatcctctctgtgtgtgatgagccacttgtgtctgttgacttcaggtgcactgatgtgtcctcaaccgttgactcatcgttgaccatggtcatgggagatgacatggttaaggtgattgcttggtatgacaa

SEQ ID NO: 184095 - DNA, 289 bp, Glycine max
  unsure (1)..(289): unsure at all n locations
gccacgcctttcactaatctgaattcatggctttagcactttcctccaccgcattgtcaactcttccaaacagagaaattcggccanaagggcttcccagaaagaacacccacatgcttgagcctgaccagaagaacaattgcaaatgctacaaaaggagtctcagctgtctgtgaaccacttcctccagatagaccattgtggttccctggtagctcacctcctgagtggcttgatggcagtcttcctggtgatttcggattcgaccctcttggattagggtctgatc

SEQ ID NO: 184096 - DNA, 287 bp, Glycine max
cagaatttcctgtttacgatctcattacaattttgcaactttcaaagcttattagctacagtaacatcagaagatgtcattgattccaagtattttcggtggcccaaggagcaacgtgttcgatccattctcactcgatatgtgggatcccttcaaggattttcatgttcccacttcttctgtttctgctgaaaattctgcatttgtgaacacacctgtggattggaaggagacccaagaggcacacgtgctcaaggctgatattccagggctgaagaaagaggaag

SEQ ID NO: 184097 - DNA, 285 bp, Glycine max
ggattctacccgccgctcgccgcgaattgcgcttcaaggcgtctcgtagggctaatccgcctcacgagggctcacaacggcacgtccctttggggggccgaggccccctactgctggtcggcaaacggacggcgggcgcacgcgtcgcttctagcccggattctgacttagaggcgttcagtcataatccaacgcacggtagcttcgcgccactggcttttcatccaagcgcgatgaccaattgtgcgaatcaacggttcctctcgtactaggttgaattactat

SEQ ID NO: 184098 - DNA, 287 bp, Glycine max
ccaactccttcttctcccagaatcggtcactaaatccgcaatcatgaagctcgataccaccggtctcgaatcgtttctcacactgcttgcgcctcaaaacgacgtcgttggagaactctccgccgctccatccttcgaccttccgaattccaacgatttcgatgggtttgtgaaagaagctcattcagatggtgaagcccgcgaagggtactacgactcttgcttttatatttaaggagggtgttatggtagctgctgattctcgagctagcatgggaggatatata

SEQ ID NO: 184099 - DNA, 278 bp, Glycine max
agacaatcacagttatactctctctctctcaccttgatcactgatctcatctcaattctcacctatgtcgatacctgataagccagaagacgtggaaaggggtagcaaggatgaaaagcacaaggaagatgatcaagaggaggggaagggtggattcattgagaaggtgaaggatttcattcatgacattggtgagaagattgaggaagctattgggtttgggaagccgagtgtcgatgttactgcgatacacattccatcaattaatcttcacaaag

SEQ ID NO: 184100 - DNA, 273 bp, Glycine max
cgaacagctagcagagaaacaaagttacgagtaaagtaaattaagaagatcattaatggcttctcttgcaaccttagctgctgttcaaccagctgcgctcaatggccttgctggaacttccctctctggaactaagctctctttcaagccctctcgccaaactggccaattccaagacttccggagtcgtgccgtggtaacaaagtatggtgaccagagtgtgtactttgatttggaagatcttggcaacactacggggcaattgggccttta

SEQ ID NO: 184101 - DNA, 282 bp, Glycine max
ctttggctggaagtttacgttacttgacatgtacaaggccggatattctctatattgtaggcgtagtaagtcgttacatggaagttccaaccacaactcacttcaaggcggcaaagagaatccttcgatacatcaaaggtaccacaaactttggtttgcaccattactcttctgacaattatgacattgttggctatagtgatagcgattggagtggagacctggatgatagaaagagcatactggttttgtgttctttatgggagatatgctttcacttgg

SEQ ID NO: 184102 - DNA, 258 bp, Glycine max
  unsure (1)..(258): unsure at all n locations
tgacttgtgggttaccaacatttgccacatgcaatggtggtcctgctgagatcattgtgcatggaaaatctggttaccacattgacccttaccatggtgaccgtgctgctgagatccttgttgagttctttgaaaagagcaaggctgacccatctcactgggacaaaatctcccagggtgncactcaaggcgtattcatgagaagtacacatggcaaatttactctgacaggctcttgacactcactggtgtgtatgg

SEQ ID NO: 184103 - DNA, 249 bp, Glycine max
gattccgctcgagctaaattctcaaagacaccaatttcattgctcagagttcccaaattcaccccaagagataaaatgtctctaatcccaaacttcttcggtggccggagaaacaatgtgttcgatcctttctcactggacgtgtgggatcccttcaaggattttcctttcccaaatacgctttcttcagcttccttccctgaattttctcgggaaaattcagcatttgtgagcacccgtgtggactgg

SEQ ID NO: 184104 - DNA, 253 bp, Glycine max
ctcgagccgcaagaatgttcttgctgttgcggttgagacagattattctttccctgaggcacacaaggtcaaggagtatctgaaggatccaagtaaatttgctgtcgctgctgttgctgctcctgctgctgagtctggtgctcctgctgcagccaaggaagaggaaaagaaggaagaaccagctgaagaatctgatgatgacatgggtttcagtctgtttgactaatttatgtaatgcttttgttgagtttat

SEQ ID NO: 184105 - DNA, 257 bp, Glycine max
cttccttttcatcattctcatatcctcaatcaccccccctcgcaatcgctcttcccttcctctggtggcgacaatgtcgactcctgctaggaagaggctgatgagagacttcaagacgctgcaacaagacccgcctgcagggatcagtggtgccccccaggataacaacataatgctgtggaatgctgtcatatttggtcctgatgctactccatgggatggaggcacgttcaagttgacactccaatttactgagg

SEQ ID NO: 184106 - DNA, 248 bp, Glycine max
cgccttcgagcctatcctcctgttgggtaagagccgcttcgccggcgtcgacatgcgcatccgcgccaagggtggcggccacacctcccagatctacgccatccgccagagcatcgccaaggcgctcgtcgcgttctaccagaagtatgtcgacgaacagagtaagaaggagatcaaggacattctcgtgaggtacgatcgcaccttgctcgttgcggatcccaggcgctgcgagcccaagaagtttg

SEQ ID NO: 184107 - DNA, 250 bp, Glycine max
  unsure (1)..(250): unsure at all n locations
caagcctttgaacatcgttttgcagccatggaaacaggcatagcatnncacnctcgcgggcctttcctgcctagtgtttcttnccaagcactctnccaccctcccatctctccatcttttggcttgaggagtctgaaatcgagctctttatttggagaatctctaagagtggcatccaaatcaacactaaaggtttcaaagacaaagaatacttcactcgtgaccagatgtgaaattggtgacagtctgg

SEQ ID NO: 184108 - DNA, 254 bp, Glycine max
gtcccaaagagctaacaagagattcaacgcccgcgcatcggctaatcgaacgaggaccagaaaaactcacctcttcggcatcaaagatctcggtcacaagactctccttcagagtgatccactctatcagtatatacttgaaaccagtgtctatccaagagagcacgagtgcttgaaagagatacgcaagatgactgcaaaacacccactgtaaaatataatctatgactatttactatttagttacttttcgt

SEQ ID NO: 184109 - DNA, 247 bp, Glycine max
  unsure (1)..(247): unsure at all n locations
ctcgagcctataaacttncttggtaactttgaaacatgatgataagttacaggatggatcagaatgtgctattcagtgtgcccttctttacacaactgtgtatggccaaaggagaatacgtgtcataaccttgtctctgcccgtcactagtatgctcagtaatctgttccgtgcagctgacttggatactcaattttgctgtttcttgaagcaagctgctagtgagattccgtcaaagccactccca

SEQ ID NO: 184110 - DNA, 247 bp, Glycine max
  unsure (1)..(247): unsure at all n locations
ggacatattgcttgctctacttgctgtgtgagactcagtaacaagtgtcctatgtgtttaatgcccattggttataaccgttgccgggctattgagaaggtcttggagtgtattaaaatgtcatgcccaaatgcaaactatggctgcaaagagacatttagttacagcaggaaaaacaaccatgagaaggaatgagcatatctancatggtcatgccctcttactggttgtgattttgttgcctcat

SEQ ID NO: 184111 - DNA, 245 bp, Glycine max
ccggagatagcaatctcatctcattcatttcaatggcaactcaaggtcaagtcattacctgcaaagctgcggtggcctgggaaccccacaagcccttaactgtccaagacgttcaggtggctccgcctcaggccggcgaggtccgtgtccaaatcctcttcaccgctctctgccacaccgatgcttacacttggggcggcaaggatcccgaaggtctcttcccctgtattcttggccatgaagct

SEQ ID NO: 184112 - DNA, 246 bp, Glycine max
atcgagataactagaaacagtgtgatgaaaatgaaggtccttgttttcttcgttgctacaattttcgtagcatggcaatgccatgcgtacgatatgttccctctccgaatgaacactggctatggtgcccgtactccggaggtgaaatgcgcaagttggaggcttgctgtggaagcacacaacatctttggctttgagaccattcctgaagagtgcgttgaagcaacaaaggaatacatccatggc

SEQ ID NO: 184113 - DNA, 250 bp, Glycine max
gccaaatcaatcaaattctttgtcttgaacacaggggccaagattccttctcttgggttagggacttggcaagctgaacctggtgttgtagctgaagctctcaccacagccattcaggttggatacaggcatattgactgtgctagtgcgtataagaatcaagcagagattggttctgctcttaagaagctttttgatgatggtgtggtgaagcgtgaggacttatggatcacttccaaactctggtgtt

SEQ ID NO: 184114 - DNA, 251 bp, Glycine max
gagcttgctggcactaatggagaaaccaccactcagggtctagatggccttggtcagcgttgcgccaagtactatgaagccggtgcacgttttgccaagtggcgtgctgtgctgaagattggtcccaacgagccatctgagctggctatccatgagaatgcctatggcttggccagatacgctgtcatatgccaggagaatggcctggttcccattgttgagcctgagatccttgttgatggatctcatga

SEQ ID NO: 184115 - DNA, 258 bp, Glycine max
attcggctcgagcgagcaggtagcaaagactgtggaggttgaggaacaacggtggaggagagaaatcttctctctgtggcttacaagaacgtgattggtgcgaggagggcttcgtggaggatcatatcctccattgagcagaaggaggagagcaggggcaatgaggaccatgtggccattataaaggagtacaggggcaaaattgaggctgaactcagcaagatctgtgacgggattttgaacctccttgagtccaac

SEQ ID NO: 184116 - DNA, 242 bp, Glycine max
atgaaaatgaaggtcctcgttttcttcgttgctacaattttcgtagcatggcaatgccatgcgtacgatatgttccctctccgaatgaacactggctatggtgcccgtactccggaggtgaaatgcgcaagttggagagctgctgtggaagcacacaacatctttggctttgagaccattcctgaagagtgcgttgaagcaacaaaggaatacatccatggcgaacaatatagatcagactc

SEQ ID NO: 184117 - DNA, 242 bp, Glycine max
ctctatattccattgccacccagttttgaatatatttttattcctactttgtttcttcactttcttccatacacataaccatgtcttctcagactgttgtcctcaaagttggtatgtcatgtcaagggtgtgctggagcagtgaacagggttttgggaaaaatggaaggtgttgagtcatttgacattgatctgaaggagcagaaggtgacagtgaaaggaaatgtggagccagatgaagtt

SEQ ID NO: 184118 - DNA, 245 bp, Glycine max
acaaatctttgtcaagactttgactggcaagaccatcaccctcgaggtcgaatcctcggacaccattgataatgtcaaggccaagatccaggacaaggagggtatccctccagatcagcagaggttgatatttgctggtaaacaacttgaggatggaagaacccttgctgattacaatattcagaaggagtctaccttacacttggttcttcgtttaagaggtggcatgcagattttcgtcaaga

SEQ ID NO: 184119 - DNA, 248 bp, Glycine max
cctcgagccgcatcggctcgagcggctcgagcactgtggcagaagtaccaggagtgtaaaacacacgacgcaaaatgaagacgaactctatcgtacgagaccatgaatattcccgacggcgtgagcatcaaggttcacgctaaggttatcgaggttgagggccctcgtggaaaactcgtgcgagacttccaccatctgaacttggacttccaacttattaccgacgatggcggtaaaaggaagctcaa

SEQ ID NO: 184120 - DNA, 249 bp, Glycine max
gccttagccttccctacaactccagacagcaagacatcatcatccatggctgcctccgtctccactgtcggagctgtcaacagagctcttttgaacctgaatggttctggagctggagcttcagctcccagttcagccttctttgggaccagcttgaagaaggttattgcctcaagggtccccaacaccaaggtttccggtggaagcttcaagattgttgctgtagaagagacgaaagagattgaagag

SEQ ID NO: 184121 - DNA, 244 bp, Glycine max
ccgcaaggtcttggcccaagatgttcgcgcccccgatcctctccctccctacccggcctccgtcaaggacggttacgccgtcgtctccgccgatggccccggcgagtatcccgtcgttgccgaatcgagagctggagatgacgctctcggcctcactctctcccctggaactgtcgcttacgtcacaaccggaggaccgatacctgatggtgctgatgcagttgttcaggttgagaatactgaa

SEQ ID NO: 184122 - DNA, 243 bp, Glycine max
cgcttccaataccttcagattttggttgggtttcgtgcttttggaaaatccgttgagtttctgaagctatggaggcttataagagatgggtgaggcagaacaaagagtttgtgcactccatggagtctttggccaatggattgacatggcttcttcctgaacggttttctgaatcagagattggacctgaagcagtaacaaccattctgggaatcatcacagctctcaatgaacatataattg

SEQ ID NO: 184123 - DNA, 246 bp, Glycine max
gcaacaattgacaatccatcaaatgcttttgaatgggcacttgctgaaatgataaaccaaccggagttactccaccgagccgttgaagaattggatagtgtggtaggaaaagagagactggtccaagaatcagatatacctaaactcaactatgtgaaggcttgtgcaagggaagcttttcgccttcatcccatttcaccttttattcctccccatgtctctatgagtgacacaatggtggcaaat

SEQ ID NO: 184124 - DNA, 246 bp, Glycine max
cagagtgcagagccttctctcctctattctcggcttccaacctttttgctccattcattctcaacaacaaaccaatctctatattttgcttagacaatgagggggagcttgtggcaacttgggcaatcgatcactcgccgtcttgcccatggagataagaaggctgttgctcgccgatgttttgcctcagaagctgagctgaaaaagacagtgtttcatgacttccatgttgctcatggtgggaag

SEQ ID NO: 184125 - DNA, 249 bp, Glycine max
gcagtctcagtggaatttggaagggtgtaggtgctgtgttttctcccatcacagctgaaatggaaccaatggaaataggtagcaagaatgaacacctatatgactgctatactctttctcgcatagaggcagtaccatcagtttcaggtgagcgtacatctcaaatccagagaaaggttaactgggtgactttgaatccttatggcgaaataccacagcatattgaaggcagcaatgtagctaaagaca

SEQ ID NO: 184126 - DNA, 264 bp, Glycine max
actagagcgaatacgctatagctcacagtttggagtgatccgtgaaaaactctgtaaacatcttggtttagcaggagcgcattacaggtgatgagcttctctatgaatccttccggtacaaggaaattgagaatggaatgctgtgggaagttgaggggaagtgggttgttaaaggagcagttgatgtagacattggtgcaaacccttctgctgagggtggaggagaagatgatggagttgatgatgcagctgttaaggttgttg

SEQ ID NO: 184127 - DNA, 277 bp, Glycine max
atttttacttattctcttcctctctctctactctgagacacaaaggaaaattataagaaattatggctggttattcaaaagcttcagctcttttgatcctttttcttctctttggactctctgtagctaaggaaattttggttggaggtaagactgatgcatggaaggtttcagcctctgaatcagattcactcaaccaatgggcagaaaagtctcgtttccaagttggagactatcttgtttggaaatatgatggtggaaaagactcagtgttgca

SEQ ID NO: 184128 - DNA, 278 bp, Glycine max
actctctctccttcttcttcttcttcttcttgcacgtattgttctaatccacaaaaataatggccttaaattacaacattgccctcgacctctctacggttctcacgctgcttctccttcccttaccaacccttggggagctcgtgcaggagcagccactagtcctcaagtaccacaacggccaactcctgaaggggcgcatcaccgtcaatctcatctggtacggcaccttcaccccgatccaacggtccataatcgtggacttcataaactcacta

SEQ ID NO: 184129 - DNA, 278 bp, Glycine max
ctttcaaataggtggtgaacacgtgatagctggattctttcaaggcatcttcgaatgctgaccccagccccagagtgtgcttcttcgttcacaacacttcactcattaacttttcatttcccgatacgccactcgcttcatatgcaagcacagccagaatcctctatagatcgaaactgttaagtttcgacaaactcgacacaaggacaccatcaacatcttgaagagctcgctgtgttgttcgttccttttggccccttcaacgaaattgtactaat

SEQ ID NO: 184130 - DNA, 302 bp, Glycine max
cgcgtacgtaggctctcggtcgagctccctctccgcatacactctgctcgtagggtttctccacctagagggaaatggctcccaaaccgcctagtacgggtctgtttgttggactgaacaagggtcacgtcgtcaccaagaaggaattgcctccacgcccctcagatcgtaaggggcaaacaagcaagagggtgcactttgtgaggaacctcataagagaggtagccggttttgcaccctatgaaaagcgtataactgagttgctgaaggttgggaaggataagagggcactgaaggttgca

SEQ ID NO: 184131 - DNA, 280 bp, Glycine max
atttgagtgtatattcagagagaaaaacgaagaaaacatcgtgaagcatgtctggaagaggaaagggaggtaagggtctaggaaagggaggagcgaaacggcaccgtaaggttctgagggataacattcagggaatcacgaagcccgcgattcggcgtctggcgcgacgtggtggcgtgaagcgtatcagtggtctcatctatgaagaaactcgcggtgttctcaagatcttcctcgagaacgtcattcgcgacgctgtcacctatactgagcacgctcg

SEQ ID NO: 184132 - DNA, 272 bp, Glycine max
aaaagatgaagagaacacatattgctgcaaaagctgttgagattgccgagagacgcatattaagagacaggtggccagaatattatgacacaaagagatctcgattcgtcggaaagcaatctcgactatatcagacttggtcaatcgcaggataccttgtggcgaactgctgcttgcagacccaagtaaagcaaacacattgatcactgaagaggattctgagctcgtgaatgccttgataagtgccaaccctagaggaaagcgagggcgca

SEQ ID NO: 184133 - DNA, 272 bp, Glycine max
cgaagaggaattggtgattgaagaaatggcagatgcagcgaagggtacctacagagcctcaagatggtcccttaacggaatgactgctcttgtgaccggtggaactcgtggaattgggcatgccatagtggaggacttatgtgggtttggtgccactgtccacacttgttccagaaaccaagctgaattggataagtgtttgacagaatggcgtacaaaggttttttggtttctgggtctgtgtgtgatgtctcatctcaaccccacagaga

SEQ ID NO: 184134 - DNA, 289 bp, Glycine max
ctcggaattaagctcgagatcgagccgttcggatctagagtcttttttcactcttcagttctcgttgttgttcttcgcattcctgatactagggttttcaatttcgattcattcgttaataattaaagatgtttaggagggcaccgaagaagagcgataatacgaggtactacgaaatcctcggcgtctcgaagaacgcttcgcaggatgatctgaagaaggcttacaagaaagccgccatcaagaatcaccctgacaagggcggtgatcccgagaagtttaaagagct

SEQ ID NO: 184135 - DNA, 276 bp, Glycine max
aacaaatttcagtaccaaaatccaaccaagtctctactattatccattattgtctgccacatcttcccttagtactagaaatgaggctgccacaactaaacttgttcttagtgtcatttttactgctctttgttgccagagcaaatggttctctgctcccattcatagatcctcccaccactctcttggctgatctctggtccgatcgcttcccggacacgtttcgagtgctggaacagattccatttggtgttgacaaagatgaaccctccatgg

SEQ ID NO: 184136 - DNA, 275 bp, Glycine max
caagcttcaagtgatcataaccgagatgggtctaagaattcaacaaagaggagaggtcctcaagggtgtgcccttggttcagccaggggatcatttgttctggtataaccgacctggccttattctttaccttatcaattttgtgctctttcagaatgcttttcagctggctttcttcgcatggtctgcgcttcagtttgggattaaatcctgtttccattcgcacacggaggacgtggtgatcagaatcacaatgggggtccttattcaaatct

SEQ ID NO: 184137 - DNA, 272 bp, Glycine max
aaaaaagatgagaacctggctggggagtggaaccacacctctggccaatggaatggagacgctaacgacaaaggtattcaaaccagtgaggattacagattctacgctatttcagctcagtaccctgaattcagcaacaaggataagacactagtcttccaattttctcgtcaagcatgaacagaagcttgactgcggtggtggctacatgaagttgctcagtggtgatgttgatcagaagaaatttggtggggatactccttacagtatta

SEQ ID NO: 184138 - DNA, 267 bp, Glycine max
ctttgttgtgagctataagctagtttatcgtgaggagaatatgaagttgtttgtactctttgttgctgcagtagttttggtagcatggccatgccatggcgcaggctaccaaaggttccctctccgaatgaaaactggctatggtgagcgttcttcggaggtaaaatgcgcaagttttaggcttgctgtggaagcacacaacatccgagcctttaaaaccattcctgaagagtgcgttgaaccctcaaaggactacattaatggcga

SEQ ID NO: 184139 - DNA, 274 bp, Glycine max
ctctgtggaaactttggaaagagatcttaagaacacgaggaaatactacgggagtggaaaaacaaaggaagcaccatggagagaatcacagcttaaaaagttgcacaattttctcgtggaaaaagaggaagaaattgtgacggccctcaagcatgatttggggaagcattacgtggaggcttttagagacgagcttggaacattaaggaagaccttaaacttggcaaccaagtctttgacaaattggatggcggggaaagaggcaaagctgcca

SEQ ID NO: 184140 - DNA, 274 bp, Glycine max
aaaggttcaattgtccgaaatgaatttctagtcccgcatatttatcaacatattaaactcataaaaataactcaatttttttgttgataatttatgtaattctattcagtataatatcagtataatagaataaaaaaattatgaaaagatctttggttctgtatagtctttttatactatatttaaagagttacttgtaacgtaatacaaataaactcgagtatggatattgtcaggaagactatttgactttgttttttcaaccccccaataa

SEQ ID NO: 184141 - DNA, 274 bp, Glycine max
cttccttgtcactgcccgtgtgtcgccgccatggccaccgtcaccacccaagcctccgccgcaattttccggccatgtacctcgaaatcgaggtttttgaccggctcttccggtaaacttaaccgggaagtgactatgcggccaatggggtgccctccttctgcctctttcaaggttgaagccaagaagggagagtggttacctggcttggcctccccaacttacctcaatggcactcttcctggtgacaatggatttgaccctctggggctag

SEQ ID NO: 184142 - DNA, 271 bp, Glycine max
  unsure (1)..(271): unsure at all n locations
cgagtgctttatagcacagatagcttctgcaccatgntgaacacttntgatgcattagagcacgatatgcttggaagctttctcaaccattttgccacctgtgtattccatcggccctttaaattttctcttgaatgcggtcaaggataaggacttgaatgcaatcgggtccaacttatggaaggaggagccagggtgtttggaatggctcgacacaaaagaagtcaacacagtggtttatgtgaattctcaagcngtcaggttatgacaa

SEQ ID NO: 184143 - DNA, 268 bp, Glycine max
cgcggccgtgtcgcatcaaaaccaaaccacatattcacttgtttgctctaagtcatggctctgatcttgcacgcaaccaaagcaaacaagaatgctttcaagactctgattgcggcagagtacagtggcgtccaagtggaattggcccctaatttcgagatgggtgtctctaatagaactcctgaattccttaaaatgaatcccataggaaaggttcctgtcttggaaacgcccgatggtccagtctttgagagcaatgccatagctc

SEQ ID NO: 184144 - DNA, 271 bp, Glycine max
aagaaaaacagaaccacacaaaaaacaaatacacaattaaatctgtgaatggagaacctaatttctttggtgaacaaaatccagacggcttgcaccgctttgggtgaccacggcgaacaagtgccttaccaactctctgggactctctccctgctatcgccgtcgtcggtggccagagctctggaaagtcctcggtgttggaaagtgttgttggcaaggatttcttacctcgtggatcagggattgttactcggagaccccttgttttgca

SEQ ID NO: 184145 - DNA, 260 bp, Glycine max
atgaatgctgcaactttggcccttgcagatgctgggattcctatgcgtgatcttgtaacttcctgtagtgctggataccttaatagcacccctctgcttgatttgaactatgtagaagacagtgctggaggtcacgatgtaactctaggaattcttccgaagctggataaagtgacacttcttcagatggattctaaactaccaattgacattttggaaaatgttatgcaactggcaattgaaggctgcaaagcaatagc

SEQ ID NO: 184146 - DNA, 273 bp, Glycine max
  unsure (1)..(273): unsure at all n locations
caagaagttccaaaatgtgtccaaggagggtttgaaacttgggaaagattcaaaagacaatganatgaaggaatcttttaaggatcttaccaagtggtggaaaactgctctttccaaagacaatgttgatgatgtgaagatttccaaccgattagataacactccttgtgtagtggtgacatcaaaatttggttggagtgctaacatggagagaatcatgcagtctcaaactttgtcagatgctagcaagcaagcatacatgcgcggcaagag

SEQ ID NO: 184147 - DNA, 273 bp, Glycine max
  unsure (1)..(273): unsure at all n locations
gctataagctagtttatcgtgaggagaatatgaagttgtttgtcttctttcttgctgcagtagttttggtagcatggccatgccatggcgcaggctaccaaaggttccctctccgaacgaaaactggctatggtgagcgttcttcggaggtaaaatgcgcaagttttaggcttgctgtggaagcacacaacatccgagcctatanaaccattcctgaagagtgacttgaaccaacaaaggactacattaatggcgaacaatttagatcagact

SEQ ID NO: 184148 - DNA, 271 bp, Glycine max
atgtggttgaaagttaagaagtagcaaagatgtttccattcgggtacaagggtcaaaagataaaggggactatggaggttatgcagaagaatgtgttggatatcaacagcatcaccagtgttgacgggatcgacggcaccggcttagacttcttaggcagtgcactcgatacagttacttttttagcctcctccatctccatccaacttattagtgctaccaaggctgatggtgggaaaggaaaagttggaaaggctacaaatttgagagg

SEQ ID NO: 184149 - DNA, 272 bp, Glycine max
ctcttgttggtaaagaaagagaagaaaagagtggaatcgaagacgaagacgaagatggaggacgcatcagcatcaaagttcatcccacaccaaatcggaggggtccaaaacgacgtgcttcgatttggtctccatggagtcaagagcgacatcgttggttcccaccctcttcaatcttcactccaatctacaaggagaatggatgaagcgatgaagaagcaatgcaaagttaacctgtacggaactgcttttcccctgaaggaggagcttga

SEQ ID NO: 184150 - DNA, 271 bp, Glycine max
ccctaaacgactctatctctcttcgttttgttcttccttgcgctcctcctcgttcgttcgttctccctcgcgtagatcggcaatggcggagaccgagacgactctgctttccaggctgagatcaaccagctcctcagtctcatcatcaacaccttctactccaacaaggaaatcttccttcgtgaactcatcagcaacgcctctgatgctttggacaagattagatttgagagtttgacggacaagagcaagctcgatgctcagccagagt

SEQ ID NO: 184151 - DNA, 287 bp, Glycine max
cacgtcgcttcgcactagaatcgaatcggctcgaggctcacaacttgttatcaaccctaaccgtttctgagctaatacccccaccacgccaatgcctacttttcaacacaaccccctttcacaaacccttagggtttattattgaacccaagcatcagtatcgaaactccccgaatacgagatgccatcggtaacatggggcgtaatccagggtcgcaaggagaactcgtttcgcgagtaatcatcttcgattacctcaagtgtttgggaatcatccccgaccaact

SEQ ID NO: 184152 - DNA, 267 bp, Glycine max
attgacgccattggccattgagttaagtaagccgcatcctcagggtgaaggatatggtcctgttagcgaagtctacgtgccttcgagcgagggcgttgaagcttacatttggttactggcaaaggcttatgttgttgtgaatgattcgtgctaccatcaactcgtcagccactggctaaacactcatgcggttgttgagccattcgtcatagcaacaaacaggcatctgagcgtggttcaccctatttacaaacttttgtttcctca

SEQ ID NO: 184153 - DNA, 267 bp, Glycine max
ctaaaaaattggaacctgcctctcttaaagtttgtatttatttgagcgggtgggttgattgagagtactgtgcaagctttggacctttgtcccaacctgctacttcaatggctactgaagaggttaacaaacctcaatcacttcctccataccctgagatgatagtgaaagcacttgaagcactgaatgagccaaatggatcgaacaagtcagcaatatcatagtacatagtaaccacctacggtgagttgccagacgcaaccgttt

SEQ ID NO: 184154 - DNA, 268 bp, Glycine max
agtgaacaaaaaagtgtagtgggaaatggcaggtgcgggtgcaggaggagggtatggggacgcgaaccagaggatagactacgtgttcaaggtggtgctgataggggactcggcggtggggaagtcgcagatactagctcggtttgcgaggaacgagttcagcttggactccaagtccaccatcggtgttgaatttcagacgaggactttggttatcgatcacaagaccgttaaggctcagatctgggacactgccggccaagaacga

SEQ ID NO: 184155 - DNA, 264 bp, Glycine max
caatatagcccaagccctatacaaccaaaccctaacacacacccatttgattcagtttccatggctagcctcaaggttgcatttttcgctgcagtgctctgcatggttgtggtgagtgccgccatggcacatgcagctatcacgtgcgggcaggtgacgaatagcctgatcaattgcatcggttacctccagtacggaggaacgccgccgtcgggatgctgcaacggagtgaagagcctcaatgccgccgccaagaccaccgcc

SEQ ID NO: 184156 - DNA, 263 bp, Glycine max
acccagccccgagtgagaagtgagaagcgaaaaatggcaatctccatacccagcccacaactttttctagatggagagtggaaagtccctcttctcaacaatcggatctccgatcatcaaccccgccactgcagacatcatacggcatattccagccgctactaaggacgatgttgaccttgcggtggatgctgctaaaagagccttttcccataacaaaggcaaccattggtcttcagctcctggcactgttcgtgctcgct

SEQ ID NO: 184157 - DNA, 266 bp, Glycine max
ctttttcccagtccaagcagcctccaattcgtgccactctcttcaaaatggccgttaccttctcaaatctccacacagaatcaggtataaagtccctcgacgacttcctctctgggaaggtctacgtttctggggatcagttcacaaaggacgacatcaaagtgtatggtgctgttttggagaagccaggtgactcttttcccaatgctgccaagtggtacgaggttgtctcatctcagcttgctgcaagcttccccggcaatgct

SEQ ID NO: 184158 - DNA, 279 bp, Glycine max
cggctcgagattggtcttctttactattcgatggtggaatcctgcaacctttgaagccatgcatccagagggaactgctagaagacctacgtggccattaatcgaagataaatcctatctctggacatggctgtttctggtacccttggttgcttacactttgtggcaggttctatacttcctcattgtcaatgtattacgcagacaaaggcttttaagagatcccgaagtcatgacttcctacagggaactctcaaaaaaggctcagaaagcaaacaa

SEQ ID NO: 184159 - DNA, 269 bp, Glycine max
acaaagcacgaagcagagctcatccttgacttaaaaaatggcagcagcttcttccatggctctctcatccccatccttggctggcaaggccgtgaagctgggcccatcagccccagaagtgggaagggtgagcatgagggcgaccgtcaccaagcaggtctcctcaggaagcccatggtacggcgcagaccgagtcaagtacttgggcccattctctggcgagcccccgtcctacctaaccggtgagttcccaggcgactacggctggg

SEQ ID NO: 184160 - DNA, 183 bp, Glycine max
cctcgagccgaatcggctcgagggcttatgccactaactttgtcccacggacaatgaggatgcaccacatgcaatgcaatcttacgctcccttttgcagttcccttgtgtttaactccattttcactaatgtaactacacctgtgtagcagaaaaatctgtatgagaaccattatatttttat

SEQ ID NO: 184161 - DNA, 260 bp, Glycine max
ctcaatctcactgtgttgtgagttgtgtgtgagcaccaaccaacaatggtgtctctgactccgttatgtttctttattaccttgttgaccgctggtgcagacgcagcggcggaccccaaacggtgcgttttgacaccggggggttgagcagagacacctttcccaaaggattcttattcggaacggccacgtctgcgtaccaagtggagggtatggcccacaaagacggtcgcggcccaagcatttgggacgtcttcatc

SEQ ID NO: 184162 - DNA, 263 bp, Glycine max
ctgtcttgtgactggcgaatacggttggaccgcaaacatggaaaggataatgaaggcccaagctctaagggacaacagcatggcagggtacatgtcaagcaagaagaccatggagatcaaccctgagaacccaatcatggaggagctcaggaagcgtgctgatgcagacaagaatgacaaatccgtgaaggaccttgttctgttgctgtttgagactgctcttctcacttctggtttcagccttgacgagcccaacacttttg

SEQ ID NO: 184163 - DNA, 263 bp, Glycine max
attggttttctttactattcgatggtggaatcctgcaacctttgaagccatgcatccagagggaactgctagaagacctacgtggccatacatcgaagataaatcctatctctggacatggctgactctggtacccttggttgcttacactttgtggcaggttctatacttcctcattgtcaatgtattacgcagacaaaggcttttaagagatcccgaagtcatgacttcctacagggaactctcaaaaaaggctcagaaag

SEQ ID NO: 184164 - DNA, 274 bp, Glycine max
caatcctgttcttgaaagacgatggatctttaaagccacttgctatcgaattaagcaagcctgcaacagtgagtaaagtggtgttccatgcaacagaaggtgttgacagtacaatttggttgctggccaaggctcatgtcattgtgcatgactctggttatcatcagctcataagccattggttaaatactcatgcagtgatggagccatttgccatagcaacaaacaggcatctcagtgtgcttcaccccatttataaacttctttatcctca

SEQ ID NO: 184165 - DNA, 268 bp, Glycine max
agcgaagatgtcgggtcgtggaaagggaggcaagggtttgggaaagggaggagccaagaggcacaggaaggtgcttcgtgacaacatccagggtatcaccaaacccgcaattcggcgtttggctcgcagaggtggtgttaagagaatcagtggtctcatctacgaggagacacgtggcgtcctcaagattttcctcgagaacgttattcgcgacgctgttacctacaccgagcacgctagaagaaagaccgtcaccgctatggatgtt

SEQ ID NO: 184166 - DNA, 263 bp, Glycine max
cccagctcgagaaaagcaaaagattgtgagaactgctatcagcaagtttcgtgcagccatacagttgcaatttgatttccatcgggcaatttacaatcttggaactgttctgtatggattagcagaggacactttaagaactgggggatcagtgagtgctcaagaagtttcaccaaatgaattatacagccagtctgcaatatacattgctgctgctcatgcattgaaaccaaattattcagtttatagcagtgccttgcggt

SEQ ID NO: 184167 - DNA, 259 bp, Glycine max
cgcttctggtggatacctaggcacccagagacaccgaagggcgtagtaagcgacgaaatgcttcggggagttgaaaatacgcgtagatccggggattcccgatataggtcaacctttcgaactgctgctgaatccacgggcaggcaagagacaacctggtgaactgaaacatcttagtagccagaggaaaagaaagcaaaagcgattcccgtagtagcggcgagcgaaatgggagcagcctaaaccgtgaaaacggggt

SEQ ID NO: 184168 - DNA, 261 bp, Glycine max
caaactatcatggccacggcaacagcagctgccacctcgtcctttatggggacgcgtctcctggaggctcactccggggcggggcgagtgcacgcccgattcggcttcggcaagaaaaaggctcccgccccaaagaaagcctccaggggatcgggccgagacaccgacagacccctttggtatccgggcgccaaagcgcccgaatacctcgatgggagtcttgtcggagattacgggttcgatccgtttgggctagggaag

SEQ ID NO: 184169 - DNA, 263 bp, Glycine max
tgcaccctaaggatggtgtttaccctgagaaggtcaacgccggacgccaaggggtgggtcaaaacttcaggtctattggtaagaatgttagtcctattgaggtcaagttcactggcaagcagccctatgatttgtgagcacacaactctatcttcatcatcatcatcccccgtgcttcctttatatgctatatattctcatgtgatatcatgtacctattgtcaattttattatgccacaaatattgcttaaactctgtacct

SEQ ID NO: 184170 - DNA, 262 bp, Glycine max
cgataactagaaacagtgtgatgaaaatgaaggtccttgttttcttcgttgctacaattttggtagcatggcaatgccatgcgtacgatatgttccctctccgaatgaacactggctatggtgcccgtactccggaggtgaaatgcgcaagttggaggcttgctgtggaagcacagcacatctttggctttgagaccattcctgaagagtgcgttgaagcaacaaaggaatacatccatggtcgacaatatagatcagactc

SEQ ID NO: 184171 - DNA, 255 bp, Glycine max
aaactagactcacacgcgcacccatcaccgtctgatctcgatcgcacggacaatggcgtaccgcagcgccatcgtgcgcagagcccaagaggccagccaccgcgacacatggcgagccgctctctccgaattcatctccacactcatcttcgtcctcgccggctccggctcctccgtggccgtcaacaagctcaccgtcgacaagccctccgccctcgtcgtcgccgccgtcgcacacgccttcgccctattcgt

SEQ ID NO: 184172 - DNA, 253 bp, Glycine max
gttctgtgtgtgcgagaaatggcgatggcaatggcgcttcgcaggctttcatcttcaattgacaagcctctgcgccctctactcaatgccggttccctctactacaagtcgtctttgcctgatgaagctgtttacgacaaggagcgacccggagttacatggccgaagcagttgaatgctccacttgaggtcgtggatcctgagattgctgatattattgagcttgagaaagctaggcaatggaaggggctag

SEQ ID NO: 184173 - DNA, 258 bp, Glycine max
cttttcttcgttgctacaattttcgtagcatggcaatgccatgcgtacgatatgttccctctccgaatgaacactggctatggtgcccgtactccggaggtgccatgcgcaagttggaggcttgctgtggcagcacacaacatctttggctttgagaccattcctgaagagtgcgttgaagcaacaaaggaatacatccatggcgaacaatatagatcagactccaaaacagttaaccaacaagcttacttttatgcc

SEQ ID NO: 184174 - DNA, 259 bp, Glycine max
cttcatcatggcttcctcgtgtgcctcctctgccattgcagctgttgccatctccacaccaagttcccagaagaatggatcactcttgggaagcacaaaagcttcttttcttagtgggaggaaactgaaggtgaacaactttacagcaccagttggagcacgatccagcactacagtttgcgcagttgctgagcctgataggcctctgtggttcccaggcagcacccctcctccatggctagatggcagtttgccagga

SEQ ID NO: 184175 - DNA, 261 bp, Glycine max
  unsure (1)..(261): unsure at all n locations
gttcacaacantaatataaataggntgnctcactanaagctgcagctaccttcatgcaacctaccaaggttggcatagcctctcgcaatctcaaatctacacaatgcattttatatgcttttggcttggaacctgntgnagctaaactcacttgctcccttcagcctgatctcaaagaatttgctcaaaaatgtgtcgatgctaccaaaattgcaggattcgcccttgctacctctgctctcgttgtttctggagcaagtg

SEQ ID NO: 184176 - DNA, 258 bp, Glycine max
ctttctgaaacagagcatggctcctctcacattctccttcttcttcatccttatctcttacatttcttcatcatcagaagcgggatcaatcggaataaactatggaagaattgcgaacgacctacctacaccggcgaaagtggtggagcttcttaagagtcaggggctgaaccgtgtgaagctctacgacaccgacgccaccgtcttaaccgcgtttgccaactcaggaatgaaggtggtggttgccatgccaaacga

SEQ ID NO: 184177 - DNA, 255 bp, Glycine max
cctttcgatatcaacggtataaaagataagctctccaatcagttccggccttggcaacgctcattccaattctgggttcgagccattgacatttacaccggatacaaggtgtttcaagtgtgagtgaatttcgtcaaagatgcgcagaagcaggaagcaatgtgggagaggcagcacgagcttgccggcgataagattttctccatgtgctatgaccttggaggtttcatcctcaagattgctcagattattggg

SEQ ID NO: 184178 - DNA, 242 bp, Glycine max
aaaaaatagaaagaaaaaaagaatctatataaatataaaaataatatatataaggtacaaatagtaaatcgaggtacccattttatgataaactttccttccatttttgttcctctagtaggcctagtatttccggcaattgcaatggcttctttatttctttatgttcaaaaaaacaagattttttagatactgcaaacaaagtaaaattctggggttttttattccccaattataatact

SEQ ID NO: 184179 - DNA, 251 bp, Glycine max
gacaaaagctagcggagattgtatctctaggtgcagtctcttccccactatacatggcgtcgaatgccacatctctatatatcccatggatcaacatctttgtccatagatgaatccatactggccaggaagtaccttcagtcatggaagaaggacgtgttccgtcaaagaccctcttcgattctcgtcatctctggtcattgggaaaccgcagttcccacggtcaacgccgttgactccatcaccgagac

SEQ ID NO: 184180 - DNA, 259 bp, Glycine max
tccgagaagaaaattagggtttgcagtcactgctttgtttagatcagaaccagatcgtgttctcttcttccattggcaaacatggcaactcaaatgagcaagaagagaaagtttgtggcggatggagtgttcttcgccgaactgaacgaggttctgacacgtgagttggcggaggacggttactccggcgtggaggttagggttacgccgatgcgcaccgagattatcatcagagccaccagaacccaagccgttctcg

SEQ ID NO: 184181 - DNA, 254 bp, Glycine max
ataccccttctgtgtactgtgcgcagaggggaccggaaaactgccaagggaaagcgcttcgcccattcatttggaaatgcgaggccaaaggacaagaacaagggtagaggactaccaaggccttatgctccaccggcaccttccaagaaagacaagttcgaagataatgaggtggtgaagattgacatcgacgagtcccatttctcgggttgattttagtggtgaattgtaattttgagcctttccatggttta

SEQ ID NO: 184182 - DNA, 256 bp, Glycine max
cttcacttgatggttcgaaacagcatattggttctggaaaccctaggcttgagaaatgtggcagcattttggataatcttctgcggtcacttgatctgccaaaggttaaaaagtctgctaaagggaaggttttgatgcaagctatgtatggagtaaaggtgcagacagtatttttatgcagtgtgtttgctgcggctttttcgggctctacaaagaatatgtcagatttggatgtggctgatgtatattcttgggc

SEQ ID NO: 184183 - DNA, 259 bp, Glycine max
atatatatggacgacggatggtactatgatttcaagcatacacactttgatcaatattcacctccagacttctacacaagagtggggattgctggagtccctaatgatactataatgaagagaactaaggcaatagaggataattggttacctacatggaatgaggcatttgagttccctctcactgttccggagttggccttgcttcgcatagaagttcacgagtatgacatgtctgagaaagatgactttggtggac

SEQ ID NO: 184184 - DNA, 253 bp, Glycine max
attccttcatttttaaacctagctccatctccctccactccccataacatgcaatcagaagcaaatgctgccatcaccaacttctgtgtaaatgttagcaacaatggctacattagtgctaatgaccccttgaactggggtgcggcggcggaggctatggctgggagccatctcgacgaggtcaagcgcatgctagaggagtaccggcagcccgtcgtcaagctcggtggagagaccctgaccatctcgcagg

SEQ ID NO: 184185 - DNA, 249 bp, Glycine max
cttgatccttctttttctccttgaactcaaacatggcagatgaggtggttctgctagatttctggccaagtccatttgggatgagggtcaggattgcacttgctgaaaagggtatcaaatatgagtacaaagaagaggacttgaggaacaagagtcctcttctcctccaaatgaacccggttcacaagaagattccggttctcatccacaatggcaaacccatttgtgaatccctcattgctgttcagt

SEQ ID NO: 184186 - DNA, 250 bp, Glycine max
agaaaaaaagttagggttttgcattttggatcagtcagactcagacatgggaggaggcaatgcccagaaatcaaagatggctcgcgagaagaatctcgagaagcagaaagcagcggctaaggggagccagttggattcaaacaagaaagctatgtctattcagtgtaaggtgtgcatgcaaacatttatatgcaccacatcagaagtgaagtgtaaggagcatgctgaagccaaacaccccaaatctgat

SEQ ID NO: 184187 - DNA, 244 bp, Glycine max
cgactccttgaatatgaaagctgcagttggtgcacaatacaaagggaagaagcaagattatttctctggaatcaacagtttcgacaaggaacgcttactctatctcagctgcgaaaggttgttctatggggaaaaaggagtgtggaatcgatccctgaaagcccagctgacggcaattgaaaaagtgcaagcaaacaacactaggacattcacagcagcaccaactgatacactacttggagca

SEQ ID NO: 184188 - DNA, 253 bp, Glycine max
cgctattctagttgctgcttctgtctgtaacacaatacaatcatcattcatcaaatcactgaaaccaaagccacaagctgcgacatcagaagaatggaagacggtgttgaccacttggctttcgagaggaacaaggcgacattcgatgttgaggacatgaaaatcatttgggccggttctcgtcaagactttgagctttcggatcgaatttctcgccttgttgccagcgatccggcgttcagaaaggatgata

SEQ ID NO: 184189 - DNA, 232 bp, Glycine max
cacgatggagatcattatgccaagtttggagagagacttaaatgacacgagggggtattatgagagtggaaagactaaggaagcgtcctggagagaatcgcagctcaaagggttgcgtcgttttctcattgaaaaacaagaagatatcatgaatgccctcatgcatgatttagggaaacatcaacttgaagctttcagagacgagataggaacgttgattaagaccttaaat

SEQ ID NO: 184190 - DNA, 232 bp, Glycine max
aacaacacaggcgcagacgcaaacgcaaacgcagagcgtgatccattgacgaagatggtgcagcgtctcacctaccgcaagcggcacagctatgccaccaagtccaaccaacacagggtcgtcaaaacccctggtggaaagctcgtttatcagactaccaagaagagggccagcggacccaagtgccccgtcactggcaagaggattcaggggattccacacttgaggcctg

SEQ ID NO: 184191 - DNA, 232 bp, Glycine max
gggagaagaggtcgagtttcacagcagcaatggtgtacgtcaaggctcagaaatcaaaagcctacttcaagagatatcaagtcaagttcaagagaagaagagagggaaaaaccgattaccgtgccaggattcggttgattaatcaggacaagaacaaatataacactccgaaataccgatttgttgttcgctttagcaacaaggacattgttgcacaaataatatctgctag

SEQ ID NO: 184192 - DNA, 226 bp, Glycine max
ttgcaatcaaattagttcattctctttgcgcagttccctacctctcctttcaagatgcagatcttcgtcaagaccctcaccggaaagaccatcacccttgaggtggaaagctctgacaccatcgacaacgtcaaggccaagatccaggacaaggaaggaattcccccggatcagcaacgtctcatcttcgccggaaagcagctcgaggacggccgtaccctcgccg

SEQ ID NO: 184193 - DNA, 229 bp, Glycine max
gcactagatcatggtgtcgtggctgttgggtatggtacagctaatggtcatgattattggatcgtaaggacattcatggggtcctagctggggagaagatggctacatcaggttagaaagaacatcttgctaacagcagatcaggcaagtgtggaattgcaattgagccatcttatccccttaagaatggtccaaatccacctaatcctggaccatcacccccttcacc

SEQ ID NO: 184194 - DNA, 229 bp, Glycine max
caacttcgcttattaaatctcttcttccaattccttctttcattcattcccaggctgagatggcagcggcaccagcagctaccttcactattggaaccaccggttccctaggccaaagaggaaactcgcttcctcaattaaagtcttctgggttgaaattcaactcccagaatcatttgaagagcttctgcggcctcaaggccatgtcatccgtgagatgtgagtcaga

SEQ ID NO: 184195 - DNA, 204 bp, Glycine max
tcgagcagctctcctctcaacttcatttctacatccctggctctgttccgtcgaacacgatggcgtttagggtgcgaaaccctgacctccgctttctcattcttctctctctcttgtccatcacttccgccaaggtcttcttcgaggagcgtttcgatgacggatggggaaatcgttgggttaaatcagattggaaaaaagatg

SEQ ID NO: 184196 - DNA, 229 bp, Glycine max
ttcacaagattctcacaaacaactcttgagaaagaaagaatggctgccaacacattgatgagttctgccatctcagccttcccatctctcctttcctcctcaaaatccagatttgccgcagcagttcctctttccagctttgttgtcaccaatgcctcttcttctcgcttttccatgagtgctgactggatgcctggccagcctagacccccctaccttgatggttcag

SEQ ID NO: 184197 - DNA, 230 bp, Glycine max
aaccttaataaaaagtcccccaaaatggctccaacaagaaaccaccttcttcacattgccatgttcccatggtttgcaacaggtcacatgactccattcctccacctttcaaacgcgttagccataaggggtcacaaaatcacgttcttgctacctaaaaaagccaaactacaactccaacacctcaacaaccatcctcacctcatcacattccacaccctcacaattcc

SEQ ID NO: 184198 - DNA, 229 bp, Glycine max
aagacatacagattcaggatatcaaatgtaggactcaccacttccatcaactttagaatccaagggcataaaatgacaattgttgaggtggaagggacccacactctccaaaacgtttatgactcacttgatgttcatctggggcagacttactctgtgttggttactgctgatcaaccaccccaagactacctcattgtcgtcacgacacgattcacctcccaagtgt

SEQ ID NO: 184199 - DNA, 226 bp, Glycine max
ctttctcctttcttccatcttcttcccttttcacgtcattatcctaaaaacttgcagattttcacatcccaaacaacatgaaggggaggttcatgtttctgtcggtgctcctttgtgccacttttcatgtctccttctctattatcgacggtttagttgccaacggcaactttgagttgggtccaaagccctccgccctaaaaggaacagtggtggtgggcgggag

SEQ ID NO: 184200 - DNA, 228 bp, Glycine max
cagcacaacaactcactcactaagctaaacaatttcatcaagcctgccatggcttcctcgtgtgcttcctctgccattgcagctgttgccatctccacaccaagttcccagaagaatggatcactcttgggaagcacaaaagcttcttttcttagtgggaggaaactgaaggtgaacagttttacagcaccagttggagcacgatccagcactacagtgtgtgcagtt

SEQ ID NO: 184201 - DNA, 224 bp, Glycine max
agaggatactaagcaacaagcttgcattgttggtttgcaagagtaccgagtatcggatgtagagaccatcaaggaactgattgagcaaggaaatgcaacaagaagtactggcaccacaggtgcaaatgaggagtcttcacggtcacatgcaatacttcagcttgctatcaagagatcagttgatggaaatgtatccaagcctcctcgtgttgttgggaagctct

SEQ ID NO: 184202 - DNA, 226 bp, Glycine max
cgtcgtggtcgtgtcgcagcaaaaccaagccacccactaacttgtttggtccaagacatggctctgatcctgcatgctaccaaaacaaacaagaatgccttcaagactctgattgcggcagagtacagtggcgtccaagtggaattggcccctaatttcgagatgggtgtctctaacaaaactcctgaatttctcaagatgaatcctattggaaaggttcctgttt

SEQ ID NO: 184203 - DNA, 232 bp, Glycine max
gaaagatggtgaactatgcctgagcggggcgaagcagaggaaactctggtggaggcccgcagcgatactgacgtgcaaatcgttcgtctgacttgggtataggggcgaaagactaatcgaaccgtctagtagctggttccctccgaagtttccctcaggatagctggagcccgcgggcgagttctatcgggtaaagccaatgattagaggcatcgggggcgcaacgccctcg

SEQ ID NO: 184204 - DNA, 228 bp, Glycine max
gtgaaacactagctagggtcctgggagctctcgttgtttcggagttagggaccttacgcagccatggccactgctacgaatgccgccgccgccccaccacgccagctctcccagaaggaagctgacatccagatgatgttggccgccgacgtccacctcggcaccaagaactgcgacttccaaatggaacgttacatcttcaagcgccgcaacgacgggatttacatt

SEQ ID NO: 184205 - DNA, 227 bp, Glycine max
gcactatagaaaaaaaaggacattcattcatctatggctacccttattgctcccagcaaccactctccccaagaagatgctgaagctctcagaaaggcttttgaaggatggggaactgatgagaacactgtcatagtaattttgggtcatagaactgtgtatcagaggcagcaaatcagaagagtttatgaggaaatttaccaggaggatcttgtgaagcgcctaga

SEQ ID NO: 184206 - DNA, 222 bp, Glycine max
aacacaagaacactctcttgaacattcatggatccagtgagcgtgtggggtaacacgcccttggcgacggtggatcccgagatccatgacctcatcgagaaggagaagcaccgccaatgccgcggcatcgagctcatcgcctccgagaacttcacctccttcgcagtcatcgaggccctcggcagcgccctcaccaacaaatactccgagggcatgcccggc

SEQ ID NO: 184207 - DNA, 221 bp, Glycine max
ctcgagccgctttaaagttacatagtttttcattgttttacttaatctacaatggctgcttcaacaatgactctctcttcatcatcattggctggccaagctatcaagcttgccccctccacccctgagcttggtgttggaagggttagcatgaggaaaacagcctccaagactgtttcctcaggaagcccatggtacggcccagaccgtgtcaagtactt

SEQ ID NO: 184208 - DNA, 222 bp, Glycine max
gggagatgtttcagcttatattcctactaatgtaatttccattacagatggccaaatattcttatctgccgatctattcaatgctggaatcagacccgctattaatgtaggtatttccgtttccagagttggatcggcggctcaaattaaagccatgaaacaagtagctggtaaattaaaattggaattagcacaattcgcagaattagaagcttttgccca

SEQ ID NO: 184209 - DNA, 229 bp, Glycine max
gcgtcttcttgttcctctcgcccagaatccgagatcaaccctgacccctaaggccaggggtttttctcggcttcttcagattcctgaaatggcgtctgtttcagctttagccaagtacaagctcgtcttcttgggtgaccaatccgtgggcaaaaccagcatcatcactcgcttcatgtacgataaattcgataacacctatcaggctacaattggtattgattttcta

SEQ ID NO: 184210 - DNA, 226 bp, Glycine max
atatgctgcaatcttatgatgctgatgcactttttctgaagaagttggaagattctcatcggagggcattttctgggcgcagaccttgccttggctgatgagcaaagtgttagtagttcctgtggaacaacggcgttgaccgcgcttgtacttggcaggcatttgatggttgctaatgctggtgactgtcgagctgttctttgtaggcgaggagttgccgctgata

SEQ ID NO: 184211 - DNA, 226 bp, Glycine max
cacgcgcacatcagcacaacacaacaattcactaagctaaaatcacttcatcatggcttcctcgtgtgcttcctctgccattgcagctgttgccatctccacaccaagttcccagaagaatggatcactcttgggaagcacaaaagcttcttttcttagtgggaggaaactgaaggtgaacaactttacagcaccagttggagcacgatccagcactacagtttgc

SEQ ID NO: 184212 - DNA, 225 bp, Glycine max
cttagctacaagctaaggaaggatcaaagagaatggctcaagcaatggcatcaatgactagcttacgtggttcctctcaggctgtgttggaaggtagccttggctccacacgcttgaatgtggggagtggaagcagggtggcctcagtcacacgtgcagggttcacagttagagcacagcaacaacaagtgaatggtggtgaggtacaaagtagccgtagggcag

SEQ ID NO: 184213 - DNA, 223 bp, Glycine max
ctgtggtgaaggagcttcttagaaagcaccctccaacacactttgcgctaacacatgctgtgactgaacccaccactttgggtggttatgacataccaattgatgcaagtgttgaggtgtacacaccagccattgctggtgacccgaaaaattggtcaaaccctgagaagtttgaccccgagaggttcatctctgggggtgaggaagcagacataaccggggt

SEQ ID NO: 184214 - DNA, 215 bp, Glycine max
catttccatttcctctctctcagtttccaagaatcttaagctatgggaaagtcttacccaaccgtgagcgctgattaccagaaggccgttgagaaggcgaagaagaagctcagaggcttcatcgctgagaagagatgcgctcctctaatgctccgtttggcatggcactctgctggaacttacgacgtgagctcgaagaccggtggtcccttcgg

SEQ ID NO: 184215 - DNA, 223 bp, Glycine max
caacgggatcggaggctaatctattaggcgctgttctctcgtcttctacaaaattttctgttcgatctcaaccaaggttgttccttccaccgccatgagtttcatcttcggaaagcgaaaaacacccgcagagcttctgcgggaaaataagaggatgctggacaaatcaatcagagaaattgagcgcgagcgtcaaggcttgcaaacgcaagagaagaaattg

SEQ ID NO: 184216 - DNA, 230 bp, Glycine max
ctcactcgcaagcaaaaagaaagaatcccaggcgaggagaaagatggaggggaaggagcaggatgtgtcgttgggagcgaacaagttccccgagagacagccgattgggacggcggcgcagagccaagacgacggcaaggactaccaggagccggcgccggcgccgctggttgacccgacggagtttacgtcatggtcgttttacagagcagggatagcagagtttgtgg

SEQ ID NO: 184217 - DNA, 224 bp, Glycine max
gtgagttgttgctccttcgccacaactctctgccaacatgggtatctccagagattctatgcacaagaggcgtgccactggtggcaagaagaaggcctggaggaaaaagagaaagtatgagcttggtcgccagcctgctaacactaagctgtcaagcaacaagacagtcaggaggatccgtgttagaggtggaaatgtgaaatggagggcattgagattggata

SEQ ID NO: 184218 - DNA, 222 bp, Glycine max
cattattattgatccaatcaagaatacaataacatagcatagagtgagaagtgagaagagaaaaatggcaatctccatacccagtagacaacttttcatagatggagagtggaaagtccctcttctcaacaatcggtttccgatcatcaaccccgctactgaagacatcatagggcatattccagccgctactaaggaagatgttgaccttgcggtggatgc

SEQ ID NO: 184219 - DNA, 219 bp, Glycine max
caaagacaccaatttcattgctcagagttcccaaattccccccaagagataaaatgtctctaatcccaaacttcttcggtggccggagaaacaatgtgttcgatcctttctcactggacgtgtgggatcccttcaaggattttcctttcccaaatacgctttcttcagcttccttccctgaattttctcgggaaaattcagcatttgtgagcacccgtg

SEQ ID NO: 184220 - DNA, 223 bp, Glycine max
cgaaatccgagatcgtcgacatgctgcgtaacatacgtacaatgacgagctggaacaaagcaagcgcagcgcggcttcgtacgtcggcgcggctccgcgccggcgccggaaacggaaactcaatctccggcgcgtgtgttatgaaggcgcgtgagcagctattccagaaggccgttacgccgagcgacgttgggaaactgaaccgtttggtgataccgccgca

SEQ ID NO: 184221 - DNA, 237 bp, Glycine max
acttcggcgctaccgcaattgctcatggtgctctcacaagtggaatcaatttgcgaattgttgatggcaacactatcactgttgcttttgatgaaacaaccacattagaggatgttgataatcttttcaaagtttttgctggtggaaagcccgtctccttcacagctgcatctcttgcaccagaagttcagagtgcgattccttctggattagttaggaagagcccttatctgacgc

SEQ ID NO: 184222 - DNA, 222 bp, Glycine max
gcgtcactacaagcagcagctactttcatgcaacccaccaagttgagcaggagcaacactttgcagcaaaagtctactcagtccatttccaaggcttttggtttggaacctgttggagctaaaaaggtcacatgctcccttcaggctgatcttaaggacttggctcacaagtgtgttgatgctaccaaaattgcaggattcgcccttgccacctctgccctc

SEQ ID NO: 184223 - DNA, 221 bp, Glycine max
caagtagttgagaactaagaaggagaagcaaatggcttcctcaatgatctcttccccagctgttaccactgtccaaccgtgccggtgccggcatggttgctccattcactggcctcaagtccatggctggcttccccaccaggaagaccaacaatgacattacctccattgctagcaacggtggaagagtgcaatgcatgcaggtgtggccaccagttggc

SEQ ID NO: 184224 - DNA, 220 bp, Glycine max
gcaatggtgaagtactcaagggagcctgacaatccaactaagtcttgcaaggctagaggcgccgaccttagggttcattttaagaacacaagggaaactgcctttgcaatcaggaagttgcccttggtcaaggctaaaaggtacttggaagatgttcttgcccacaagcaggcaattccattcagacgtttttgtcgaggtgttggaaggacagcccagg

SEQ ID NO: 184225 - DNA, 220 bp, Glycine max
ctcgagccgatataatgatgtttttactgccaaaatattagatgctgagcagtgtaaagaattgaaaatggggtcctatcttggtgttgctgcagcctcagcaaatcctcctcattttatccatctgtgttataaaccaccaactggacctgtcaatgtcaagttagcattagtcggaaaaggtttgacttttgatagtggtggctacaacatcaagaca

SEQ ID NO: 184226 - DNA, 215 bp, Glycine max
ggtggcatttttgttggttcgagtgagcgaggcaagatgtactctcgagattcatggggtggtccgttggagataaacgcgacggactcggcaacggatgacgagcggagcggaacctgcaggacgtggacagggcggcgctgtcgcgtcccttggacgagacgcagcagagctggctcctaggccccggcgagcagaagaagaagaagtacgtc

SEQ ID NO: 184227 - DNA, 218 bp, Glycine max
caaacactatagcaatagaaacctttgcctttgacaaacccctcactcttcatcactacactagctagccacatccaatgtcgaccaaatttaaggtgtttcgtgaattcacaagcgatgactcattcctaaaccaagttatccctgaaaacatcaccgaattccaagtgactctgtccctcgctagagactacgatggcaacaactcaaccaacgga

SEQ ID NO: 184228 - DNA, 222 bp, Glycine max
attcagagggcacccggcaacaccaaaaccaccaccgcctctcctacctcccggagccatggccgccaccgactcctccgctgcttcgtcacgccagctttcgcagagggagacggacatccagatgatgctcgccgccgacgttcacctcggcaccatatactgctacttttagatggaacgctacgtcttcaagcgccgcaccgatggtatttacataat

SEQ ID NO: 184229 - DNA, 306 bp, Glycine max
gtacgtaacctcataatacccttctctctgtgattaagagaatggcttcagatcggaaacttcacacttttgaggaggtggcaaagcacaaccagaccaaggattgctggctcatcttttctggcaaggtgtatgatgtcacccctttcatggaggatcatcccggaggtgatgaggttttgttatctgcaacagggaaagatgcaaccaatgactttgaagatgtggggcacagtgattctgctagagatatgatggaaaaatactacattggtgagattgatgcatcaaccgtcccactaaaac

SEQ ID NO: 184230 - DNA, 288 bp, Glycine max
gggttgtgaagcatctaagtgagatacacagtagttaggtagcaagcataagtgtctaaccttagaaacatatttgctacatatcgtgtgcattttggaattgtgccactaaaattctattcatctatggctgcctcatcttatgctatgcaatcaatccttgcaaaccctatgatccgcatttccagcgggtctagggagaaccattttggtgttcctgcttatcacatgagaaggaatgttggcctgagagttaggtccatggctgaggaagagcaaccaagtcag

SEQ ID NO: 184231 - DNA, 289 bp, Glycine max
ctcgagccgctaatgacaaagaaaatacaaggattgttcttctccggtcagataaatggaactacaggctatgaagaagctgcagcacagggtatcatttctggtatcaatgctgctagacatgcagacagtaagccagttattgttcttgagagggagagcagttatataggaacattaattgatgatctagtaactaaggacctgcgagagccttaccgcatgttaaccagccgctcagagcatcggttacttttgagatctgacaatgctgatagccgtctcacac

SEQ ID NO: 184232 - DNA, 284 bp, Glycine max
ggaaggaggaagaacttactatctgggaatgtttttgggtggggcttacgaggaggcgctcggtggagtccacaacttgttcggcggccccagcgtggtcagggtgtcgcagagcgatggccctcacagctttgcggtcacgcgtgccgtgccggggccatcctgtggagatgttcttcgagtgatgcagcaccagcccgagctcatgttcgagacactcaagcaccgcgcgcaggagtatgtcagccacgacaacgcagcagcgcttctggctgctggccttg

SEQ ID NO: 184233 - DNA, 286 bp, Glycine max
gagagtactaaagaaaatatggagaggaagaataggattcttgtatttgggggaactggttacattgggaagtatttggtgagggcaagtgtctctttaggccatccaactttggtatacactcgccctcttaatgcacaagctcctccctctaaggcacaagtttgcaaggagtttaactccataggggtcacacttgtccatggtgaacttgagcatgagcagatcttggctgtgattaaacaagtagacattgtgatatgcgctctggcatcccctcaagtga

SEQ ID NO: 184234 - DNA, 284 bp, Glycine max
cagcttgctcatcaagtccaagaaccaacctaccttttgcaatctcaattcaatggcgtcctctctcattgcgaacgcttcctctcctcttccctcctctccaggtccctccttcgccccgccgcttccgcttcccaccgctctttcaacaccaacgccatgcgccagtatgacaaccgcgccgacgaccacagcaccgacatcgatcgtcactccgaacgctctttccctagcactgcgcgccgcgacgatatcttctcagatgtgttggatccattttttcc

SEQ ID NO: 184235 - DNA, 282 bp, Glycine max
ctgcactcgatcaaacacaaaatggaaaagaatgtggggattctcgccattgacatctacttccctcccgcttgcgttcagcaggaagcattggagactcatgatggtgccagtaaagggaagtataccattggacttggccaagactgcatgtcattctgtaccgaagtagaagatgtcatctcaatgagtttgacagtggttacttctcttcttgagaagtatgggattgatcctaaacaaatcggtcgtctggacgttggaagcgagaccgtgatagac

SEQ ID NO: 184236 - DNA, 285 bp, Glycine max
gaacaactgctggttcagggtgaaaacaaatgtagccaagccccacaagggtgagattggcatagtgtttgaacaccctacccaaccagcaaaccaaccaggtggttggatggtaaaggaaaaacatttggagaaatcactagagaaattaccaagcctcaaaaagagtggttccacgccatccatgaacacggcctcaaaaatgttcaccatctctgaagtcaaaaagcactgcacctccgactctacttggatcatcatccatggccacgtctatgactgcac

SEQ ID NO: 184237 - DNA, 285 bp, Glycine max
cgctagctcgcacattaagttatataacacatatttgcttgcttagaaatactattattgaagatatgggccgtgtagattatgagtaccctttgggcatgaacaactttgagagagtgcaccaagtggaggttccaccgccacagccgttcttcaagtctctaaagtactctttgaaggagactttcttccctgatgaccctttgaggcagttcaagaacaagccagcttccaagaagttcatgctttacgcttcagttcttcttccccattttcgaatgggct

SEQ ID NO: 184238 - DNA, 273 bp, Glycine max
ctccggtagccgctgtgttggtgagtgagttgtggtgcttttgacagatgaggccgattctgatgaaaggtcatgagaggccattgacgttcctgaaatacaacagggacggcgatctcctcttctcctgcgccaaggaccacaaccctaccgtctggtttgccgacaacggcgaacgcttgggcacttatcgcggccacaacggcgccgtttggacctgcgacgtctcaagagattcggctcgactcatcaggggaagtgccgatcagaccg

SEQ ID NO: 184239 - DNA, 279 bp, Glycine max
cctcgagccgaatcggctcgaggtttgcactcagtccctacttccactttgagtcaccaggacagcctcgaaacctcgtccacttcttgtgcggtttatcatgggggatagtcagtattcgttttctctcaccacatttagcccttctggaaagcttgttcagattgagcatgctttgacagccgttggctctggacaaacgtctttgggaataaaagctgcaaatggagttgtcattgctaccgagaagaaattgccatctatattggttgatgaaac

SEQ ID NO: 184240 - DNA, 279 bp, Glycine max
gttacttcttctctggttgattcggatctagagtcttcagtttctcctcgttgttcttcgctttcctgttttcaatttcgattctttcgttaatttaataagatgtttgggagggcaccgaagaagagcgataatacgaggtactacgaaatcctcggcgtctccaagaacgcttcgcaggatgatctgaagaaggcttacaagaaagccgccattaagaatcaccccgacaagggcggtgatcccgagaagtttaaagagctggcgcaagttatgagg

SEQ ID NO: 184241 - DNA, 282 bp, Glycine max
ctatttttcgcgtcacataaacaaaaaaaataaactggggagaagcatgttgttgatgttgggactatgcttcctattgttctctgcatttccacttgcgttctctcagagatgccacccacaagacaagatcgcgttgctccaactccagaaggacctcggcaacccttatcacatcatatcctggaacgcaaaggaggattgctgcgagtggttctgctgcgttaagtgtgacgagaaaacaaaccgcgtcattagcgttgccttatcatccccttttcc

SEQ ID NO: 184242 - DNA, 291 bp, Glycine max
aggttttacatccaattgacctggacaggcttaaatttgttggagattcactaaagatactgcgccaagaggttggtggtcatgcagctgttttgggttttgtgggagcaccttggacaatagcaacatatatagtggaagggggtacaacacgcacatatacaaccattaagagcatgtgccacactgccccacatgtattgaggactttgctttctcatttgacgcaggcaatagctgattacgttattttccaagtggagtctggggctcattgcatacaaatatttg

SEQ ID NO: 184243 - DNA, 289 bp, Glycine max
gctttctaatagggagtcagccagacgctcaagaagaagaaagcaggctcatttaactgagctggagacacaggtctcccaattaagaagcgaaaattcttcattgttaaagcgcttcacggatgtgagccagaaatacagtaatgctgcagttgacaacagagtactgaaagctgatgttgaaacattaagagcaaaggtaaatccttgccttagtatataggccttaagtaaaacctgttacataggagacctactggactcttgctaagcagttccctaggtttgg

SEQ ID NO: 184244 - DNA, 284 bp, Glycine max
aagcaatgggtagccttgaagcggaaagaacaacagtaggattggcagcaagagacccttcagggattctctccccatacacctacaatctaagaaacacaggccctgatgatgtttacataaaagttcactactgtggaatttgccattctgatctccaccagattaaaaatgatcttggcatgtccaactatcccatggtcccaggacatgaagtggttggtgaggtactggaggtggggtcagacgttagcaggttcagagtgggagagttggtgggagtt

SEQ ID NO: 184245 - DNA, 280 bp, Glycine max
ctcgagccgctcggcgtcgccatggacgaagaagaggtgcgcaagatcttcagcaagttcgacaagaacggcgacggcaagatctcgtgcgcggagtgaaggagatgatggcggcgctgggatccaaaacgacgtcggacgaggtgaagcgcatgatggcggagctggaccggaacggcgacggctacattgatttgaaggagttcggcgagttccactgcggcggcggtggcgacgggagggagctccgggaggcgttcgagctgtacgatctggacaa

SEQ ID NO: 184246 - DNA, 275 bp, Glycine max
ctgaggcagaatatgaggaggtgaagaagtaagtcggggatcaggctcctgaggcagaatatgaggaggtgaagaagtaagtcggggaggagtttgtatccactttttactgatttatttgtctagatcacaagttagagatgaatcatcttttttcataatagcatataatataaggttttttgtactaaaagatggagttcattttttaccttaaggccttttaaacttgtagtacttctggagaaccaaattatgcctgtttgaataacgat

SEQ ID NO: 184247 - DNA, 277 bp, Glycine max
ggcatcgttagcagttttgtagattcaacctcaatttgcagagttacgttctaatatatttacacaagactgataagagaagatgtctctgattccaagtttcttcggtggccgaaggagcagtgttttcgaccctttctccctcgatgtgtgggaccccttcaaggattttccatttcccagttctctttctgctgaaaattcagcgtttgtgagcacacgagtggattggaaggagacaccagaagcacacgtgttcaaggctgatattccaggg

SEQ ID NO: 184248 - DNA, 282 bp, Glycine max
  unsure (1)..(282): unsure at all n locations
ctgtgcactncctctgntcccgccaagcgcannttttcccaccgttcaggccaccngctgagttaggtttcnggctaggatgggtgctgctctnntgtncggagctttgnnacggagatagtcgtgccagtgtggcgctcgtcatcgggntcgtgttctcgctggncgcagtggttcctcgtgtcgcgcgtcaagctcactcccgaccgcaacggaacnacgtcgtcgccgcgcaacaacaaaaacggctanggcgatttcctcattgaagatgangaaggc

SEQ ID NO: 184249 - DNA, 284 bp, Glycine max
gtcaacttgaactggtgtatagtgctagagagtaaagcttgaaacctatcttgttactttcatcgtcagaagcttacaggttgcatccatattttttctccttggaaaatgatgatgatgtttgataagatggggctttgtaataatttggatatgatatctgctccccttggggaggaggatattaccacccggcaaactgatccagaggtaattgttgaggatgattttactgatgaagaaattggggtagatgaactcgagcagaggatgtggaaggacaa

SEQ ID NO: 184250 - DNA, 284 bp, Glycine max
cggctcgagttcactgaaagcactcagtagggtttgccgtttcagcgtttgtgacgcacgcatccatggccaccaccaccaacgccgccgcagccccgccgcgccagctctcccagaaggaagccgacatccagatgatgttagccgccgacgtccacctcggcaccagaaactgcgacttccaaatggaacgttacatcttcaagcgccgcaacgacgggatttggattattaaccttgggaagacatgggagaagcttcagttagcagctagggttattgtt

SEQ ID NO: 184251 - DNA, 279 bp, Glycine max
gcaaaaagaaagaatcccaggcgaggagaaagatggaggggaaggagcaggatgtgtcgttgggagcgaacaagttccccgagagacagccgattgggacggcggcgcagagccaagacgacggcaaggactaccaggagccggcgccggcgccgctggttgacccgacggagtttacgtcatggtcgttttacagagcagggatagcagagtttgtggccacttttctgtttctctacatcaccgtcttaaccgttatgggagtcgccggggctaagt

SEQ ID NO: 184252 - DNA, 273 bp, Glycine max
cggctcgagtttgggttgagaagactaccgagaaggagatttctgacgatgaggatgaggaagagaagaaggatgaggagggtaaggtggaggatgttgatgaggagaaggagaaggaagaaaaaaagaaaaagaagatcaaggaagtgtcacatgaatggtccttggtgaacaagcagaagcctatttggatgaggaagcctgaggagatcacaaaagaggagtattctgctttctacaagagtcttaccaatgactgggaagagcatttgg

SEQ ID NO: 184253 - DNA, 273 bp, Glycine max
tcgtgaacaatctccttttcaaactaggcttggttagctgtgctgataccaatgttggtgatgcaaaagttcgtggaattagtggtggtgaaaagaaacgcttatccatggcatgtgaactgcttgcaagcccatctgttatatttgctgatgaacccacaacaggacttgatgccttccaggctgagaaagtcatggaaactctccaacaacttgcacaagatggtcatactgtaatttgttctatacatcagccaagagggtcagtgtata

SEQ ID NO: 184254 - DNA, 271 bp, Glycine max
ataaaagttaccagtttgcgatctcattacaatctcccaagtttctaatctcagctaagaaaaaccaaaagatgtctctgattccaggtttcttcggtggccgaagagcaacgtgttcgatccattctcactcgacatgtgggatcccttcaaggattttcatgttcccacttcttctgtttctgctgaaaattctgcattcgtgagcactcgtgtggattggacggagaccccagaggcacacgtgttcaaggctgatattccagggctg

SEQ ID NO: 184255 - DNA, 277 bp, Glycine max
cttcttctcttgcggctagggtttagcgcagttcttctagattcaaggaagatgggtaaggaaaaggttcacatcagtattgtggttattggccatgttgactctgggaagtccactaccactggccacctgatctacaagcttggaggcattgacaagcgtgttattgagagatttgagaaggaagctgctgagatgaacaagaggtctttcaagtatgcctgggtgcttgataagcttaaggctgagcgtgaaagaggaatcacaattgatattg

SEQ ID NO: 184256 - DNA, 282 bp, Glycine max
  unsure (1)..(282): unsure at all n locations
gttttcataattcctgaaacaggggaaggaaatggcctcacaacaacacatcncagaagatgcagctccgccagaacttccgcaatctctgggcactnctgatcttttgagtacaattcaagctgacaccccttattgntgcttttctctgtggtgtgcaccgtgtgtatcatatctactccgcaaacgagctctttacgatgatatgtcaagatacacatgttgtgctggttacatgccctgcagtggtcggtgtggagaaagtaaatgtcctgaactctg

SEQ ID NO: 184257 - DNA, 271 bp, Glycine max
acgaaaccaaagcatgaagatgaagaagaagatgaattgctactggtggcatgccctgataatgagtggttgtgtgttgggcttgtgcgtgggcataggaggttgtgtatgtgtggtggagaacgagaatggaagaatcatcattgatattagtcacaggtaccagcctgatatgcctgcctgggaatccaaggatagccttgggcagtttttgtggcttacaagaagcatggccaatggttctctggctaacttctcccaattcaagctc

SEQ ID NO: 184258 - DNA, 272 bp, Glycine max
cgcgagctgccgccctttttttttttgtttttttggaaaaaatttgactggattagtttaaatttaccaacccggatacgatattcccttcacactgatcacccgtttcaaaaagggttctctacctggttaaaatagggggcaaacaaggaaccccttattagaatgggaaccccttattctcaaacacaaagtggttatttaacaacccggttagaaggttgatggtcctaccatcttctataaaggccctcttaattaatttttaaaaa

SEQ ID NO: 184259 - DNA, 271 bp, Glycine max
cagcacctttgttcactcttcttctcttgcggctagggttttagcgcacttgcttctagatttaaggaagatcggtaaggaaaaggttcacatcagtattgtggtcattggccatgtcgactctgggaaatccactaccactggtcacctgatttacaagcttggaggcattgacaagcgtgttattgagaggtttgagaaggaagctgctgagatgaacaagaggtctttcaagtctgcctgggtgctggacaaacgtaaggctgagcgt

SEQ ID NO: 184260 - DNA, 297 bp, Glycine max
ccgaattccgctcgcgattgttgtaactttttgattcctaaattctctaaaattcgacattctaatttcgttaggggaaagagattgtttgtgtgtgagacagtatggctggaaaaggcgagggtcctgctatcggaatcgatttgggaacgacgtactcttgcgtcggcgtgtggcaacacgatcgtgttgaaatcatagccaacgatcagggtaacagaactaccccatcctacgtggctttcaccgacacagaacggttgatcggcgatgcggcgaagaaccaggtcgctatga

SEQ ID NO: 184261 - DNA, 277 bp, Glycine max
gatcatcgccgtgcaacaaatgtcagtgccagactggattctcaacaaaagaagctcaaccttccaatcctgccaaccaccactattggatccttccctcagactgtagaactgaggagggtacgccgtgaattcaaggctaacaagatctccgaggaagagtatgtaaagtcaattaaggaggaaattcgcaaagttgttgagcttcaagaagagcttgatattgatgttcttgttcatggagaaccagagagaaatgatatggttgagtacttcg

SEQ ID NO: 184262 - DNA, 275 bp, Glycine max
gaaagtagcaaagatgacaggtgggttctttggagggaaggggcagaacataaaggggacagtggtgttgatgccaaagaatgtgttggacttcaacgccataacctccgtcggaaaaggcagtgctaaggacaccgccaccggtttcttgggcaaaggcttgggcgcattaggtggtgcagttgatgcctctcactgccttcgctggccatagcatctccttgcagcttatcagtgctcactcagactgatggtagtggaaaaggaaaagttgg

SEQ ID NO: 184263 - DNA, 274 bp, Glycine max
cctcgagccgaatcggctcgaggggagattctttgtttgctaccttacctcggaaaaatggttacgttcaggtttcaccagtaccaggtggttgggagggctcttcccacggaagcagatcagcaccccaagatctaccgaatgaagctctgggccaccaacgaggttcgcgccaagtccaagttctggtattttctgaggaaactgaaaaaggtgaagaagagcaatggccaagtgcttgccatcaacgagatttttgagaagaacccaacca

SEQ ID NO: 184264 - DNA, 274 bp, Glycine max
cctcgagccgaatcggctcgaggtgagatacactaagttatcctcatcaatacactctaattacgtggcaagataagtgtctaaccttagtaacattgccacatattgtgttcattttggaattgtgccactaaaattctattcaattcatctatggctgcctcttcttatgctatgcaatcaatcctggcaaaccctttgatccgcatttccagcgggtctagggtgaaccaatttggcgttcctgctttgcacatgagaaggaatgttggcc

SEQ ID NO: 184265 - DNA, 270 bp, Glycine max
gaaacactcacgcacttcatcaaaactctcctcagttatccctccaacagaagataaaacatggttctagttgcaagtcatggcgaggaggaaaagggggcagaaggcattgctgctgttgattttcgaggtcaccctgtggacaagacaaaaactggaggatggctagcagcagggctcatcttaggtactgaactggcagaaagaatatgtgtaatgggcataagcatgaacttagtgacctacttggttggagttctgaatctccct

SEQ ID NO: 184266 - DNA, 252 bp, Glycine max
  unsure (1)..(252): unsure at all n locations
gtctgctggaaaacactttggcagagctggttatcaatgcggtccccagcattgnnatggttgcgctttgtcaattcaggcaccgaagcttgcatgggtgcactacgtctcgcccgagcttataccggaagagagaagatcatcaagtttgagggctgttaccatggccatgctgatccttttcttgttaaggcaggtagtggagttgccaccttgggacttcctgattctcccggtgtccccaaagctgcc

SEQ ID NO: 184267 - DNA, 269 bp, Glycine max
attcatcactagaagtgttggatgcatttctatttctaactaattattgtgcttattattattgttgagaaagaaaagaatggcaaagttaatatcattctttgagttgaacacaggggctaagattccttctgttgggttaggcacttggcaagctgagcctggtgttgtagccaaagctgtcaccacagccattctggttggatacaggcatattgattgtgctcaagcgtataacaatcaagcagagattggttctgctcttaaga

SEQ ID NO: 184268 - DNA, 280 bp, Glycine max
aagagaatggctcccaagggtttaacctttctggctgtgttaatatgcgtttcagcactgtcactgagtccttctgttgcggggaccgggcaaaataatggccttgttatgaacttctacaaggaatcatgccctcaggctgaagacatcatcacagaacaagtcaagcttctctacaagcgccacaagaacactgctttctcctggctcaggaacatcttccatgactgtgctgttcagagttgtgatgcttcactgttgctggactccacaagaagga

SEQ ID NO: 184269 - DNA, 277 bp, Glycine max
atgctttctatgagttgcaaaaccctcaggagcagatccaggcttatgtttttgatgtgactcgtgctattgttccgagaatgaacttggacgagctgtttgagcagaagggtgaggttgccaaagctgtcttggaggaacttgaaaaggtgatgggagaatatggatatagtatagagcacatactcatggttgatattatacctgatcctgctgtgcgtaaggcaatgaatgagatcaatgcagctcaaaggatgcaacttgctagtcagtacaa

SEQ ID NO: 184270 - DNA, 279 bp, Glycine max
agaatgaaggtccttgttttcttcgttgctacaattttggtagcatggcaatgccatgcgtacgatatgttccctctccgaatgaacactggctatggtgcccgtactccggaggtgaaatgcgcaacttggaggcttgctgtggaagcacacaaacatctttggctttgagaccattcctgaagagtgcgttgaagcaacaaaggaatacatccatggcgaacaatatagatcagactccaaaacagttaaccaacaagcttacttttatgccagaga

SEQ ID NO: 184271 - DNA, 272 bp, Glycine max
ctaattctcatttcttcatcgttcgattcttctcctcctaaaggtacgtctctggtttcctctctctcttgttcattcttttcgtaatagcaaccttattagccttcgtttattgatttttctcctaattacacttcaattttttcgatttgtgtttgttacgtcaatctgtatatcttttttgttgtcgtcgaatccgaaacttttcattcgcctttctgattccgtaaatcgtttgttaagtgcaacatctttccctgttcttaggtatc

SEQ ID NO: 184272 - DNA, 271 bp, Glycine max
caaagatgaaatcaatttattccttggaaatgctggtactgcaatgcgtcctttgacagcagctgtggttgctgcaggtggaaatgcaagctacatacttgatggggtgccccgaatgagagagaggccaattggggatttggttgctggtcttaagcaacttggtgcagatgttgattgctttcttggcacaaactgtccacctgttcgtgtaaatgggaagggaggacttcctggcggaaaggtgaaacagtctggatcagttagcagt

SEQ ID NO: 184273 - DNA, 271 bp, Glycine max
ctcgagccgtctgtttctgtctctgtgtttgcggctgaggattacgaacgagcgaccttcaccgtttctcgcaaagtttaagtcatcatgggtaaggaaaagactcacatcaacattgtcgtcattggacatgtcgactctgggaagtcaactaccactggtcatttgatctacaagcttggaggtattgacaagcgtgtgattgagaggttcgagaaggaggctgctgagatgaacaagaggtcattcaagtatgcctgggtgcttgaca

SEQ ID NO: 184274 - DNA, 270 bp, Glycine max
gaaaagcaaaatggtgaagatttgctgcattggtgctggatatgtggggggtcctactatggcagtcattgcactcaagtgcccatccatcgaagttgctgttgttgatatctctaaatcccgcattgcagcctggaacagtgaccagcttcctatctatgaacctggccttgatggtgttgtgaagcaatgccgtggcaagaacctcttcttcagcactgatgttgaaaagcatgtctttgaggctgacatagtgtttgtctctgtcaa

SEQ ID NO: 184275 - DNA, 276 bp, Glycine max
aattattgctgaggatattgaacaagaagctttagcaactcttgtggtgaacaaacttagaggatcactgaaaattgcagcactcaaggcccctgggtttggagatcgcaagagccagtaccttgatgatattgccatcttgactggaggtactgtaatcagagaagaggttggccttactttggacaaagctgggaaagaggttctcggatatgcacccaaggtggttctcaccaaggatacaaccacaattgttggtgatggaagtacccagga

SEQ ID NO: 184276 - DNA, 273 bp, Glycine max
gtggtgccttatcgctgtggttatcatcttcttcttcctctttcttagatctcttctttctctacgccgcacgccgaaaccatggccggaaaaggagagggtcctgctatcggaatcgatctcggaaccacctactcttgcgtcggtgtgtggcaacatgaccgcgttgaaatcatcgccaacgaccaagggaacagaaccacgccgtcttacgtcggattcactgacaccgagcgtctcatcggtgatgcggccaagaatcaagtcgccatg

SEQ ID NO: 184277 - DNA, 269 bp, Glycine max
ctgttatttacaaggattgggttttcaccgatcaagcattgcctaatgatcttgtcaagagaggagttgctgttaaggatccatctgctccccatggagttcgacttttgatcgaggactatccttatgcttctgatgggctagagatatgggatgctatcaagtcttgggtggaagaatatgtctcattctactacaagtcagatgaggaacttcaaaaagaccccgagctccaagcttggtggaaagaacttgtagaggtgggtcat

SEQ ID NO: 184278 - DNA, 271 bp, Glycine max
cgttggtgcaaagcatccttcgtttcaatttctctctctcagcgctttctgcaatcgaacctttcatctccaaagggatccacaggccgaaggagaaatggggctcacattcacaaagcttttcagtcggcttttcgcgaagaaggaaatgcgaattctgatggttggtcttgatgctgctggtaagaccactatcctgtacaagctcaagctcggagagatcgttaccacaattcctaccatcgggttcaatgttgagactgtggaatac

SEQ ID NO: 184279 - DNA, 271 bp, Glycine max; identical to SEQ ID NO: 176770

SEQ ID NO: 184280 - DNA, 273 bp, Glycine max
gtatctctgtctaccttaccttacctcacctcacaagggacaaagataaaaaatgaagatcattgagaaaattcacgcagcctcggctgatccaaacagggtggtgttctcatttgagttcttcccgcccaagactgaggatggggtggacaatctgtttgagaggatggaccgcatggtggtgcacaacccctcgttttgcgacatcacttggggtgctggagggacaacggctgatcttacattggaaattgccaacaagatgcagaacat

SEQ ID NO: 184281 - DNA, 275 bp, Glycine max
ctccgatacgccactcgcttcatatgcaagcacagccagaatcctctatagatcgaaactgttaagtttcgacaaactcgacacaaggacaccatcaacatcttgaagagctcgctgtgttgttcgttccttttggccccttcaacgaaattgtactaatctaagatttgcgattttttgtaccaaattaaaatgtccatggaagctcaacagattctttccagattctgtccaaaaccatcttcagtgccatctattccaattgtgaaacaaca

SEQ ID NO: 184282 - DNA, 273 bp, Glycine max
cagtcgcagaggaaaaccctagctagtagtctcagttcgtttgagagagacaaaatggcagagggtctcgttctccgcggaaccatgcgcgcccacaccgacgtcgtgacggcgattgccactcccatcgacaactccgacatgatcgtgacggcgtcgcgcgacaaatccatcattctctggcacctcaccaaggaggacaagacctacggtcgtcccccgccgccgcctcaccggacattctcacttcgtccaggacgtcgtcctctcatc

SEQ ID NO: 184283 - DNA, 271 bp, Glycine max
aaccattgggaaaaaccgatttggaaagcggttctcgcccgctgtatccgatgatgcttgagagccccgaactgcgctggtctttcatcagaaaagtatactccataatcgccatacagttgctcgtaaccatcgtcgtcggcgccgtcgtcgtcaccgtccgcccaatcagcgtcttcttcgccaccaccggcgccggattggctctctacatcgtcctcatctttgtccccttcatcacattgtgtccactttactactactcccagaa

SEQ ID NO: 184284 - DNA, 154 bp, Glycine max
catctttctctctccgaacagatcaaactatggccacctcaagcgccaaatcagtccatgatttcaccgttaaagatgccaagggaaatgatattaatcttggtgactacaaaggaaaggtccttatcattgtcaatgttgcctcacaatgtgg

SEQ ID NO: 184285 - DNA, 270 bp, Glycine max
atttgtgaatactgtggatatcatttgaaaatgggcagttcagatagaatcgaactttcgattgattcgggtacttggaatcctatggatgaagacatggtttctctggatcctattgaatttcattccgaagaggaaccttataaagatcgtattgattcttatcaaagaaaaacgggattaactgaggctgtgtcaaacaggtactggtcaactaaatggtattcctgtagctattggaattatggattttcagtttatggggggcag

SEQ ID NO: 184286 - DNA, 275 bp, Glycine max
cagtcgcagaggaaaaccctagctagtagtctcagttcgtttgagagagaaaaaatggcagagggtctcgttctccgcggaaccatgcgcgcccacaccgacgtcgtgacggcgattgccactcccatcgacaactccgacatgatcgtgacggcgtcgcgcgacaaatccatcattctctggcacctcaccaaggaggacaagacctacggtgtcccccgccgccgcctcaccggacattctcacttcgtccaggacgtcgtcctctcatccga

SEQ ID NO: 184287 - DNA, 272 bp, Glycine max
aaccattgggaaaaaccgatttggaaagcggttctcgcccgctgtatccgatgatgcttgagagccccgaactgcgctggtctttcatcagaaaagtatactccataatcgccatacagttgctcgtaaccatcgtcgtcggcgccgtcgtcgtcaccgtccgcccaatcagcgtcttcttcgccaccaccggcgccggattggctctctacatcgtcctcatctttgtacccttcatcacattgtgtccactttactactactcccagaag

SEQ ID NO: 184288 - DNA, 273 bp, Glycine max
catctttctctctccgaacagatcaaactatggccacctcaagcgccaaatcagtccatgatttcaccgttaaagatgccaagggaaatgatattaatcttggtgactacaaaggaaaggtccttaccattgtcaatgttgcctcacaatgtggcttgactaattcaaattacactgagctcagtcagttgtatgagaaatacaaacagaaaggtctggaaattctggcatttccatgcaatcagtttggggcacaggagcctggatctaatg

SEQ ID NO: 184289 - DNA, 269 bp, Glycine max
atttgtgaatactgtggatatcatttgaaaatgggcagttcagatagaatcgaactttcgattgattcgggtacttggaatcctatggatgaagacatggtttctctggatcctattgaatttcattccgaagaggaaccttataaagatcgtattgattcttatcaaagaaaaacgggattaactgaggctgttcaaacaggtactggtcaactaaatggtattcctgtagctattggaattatggattttcagtttatggggggcag

SEQ ID NO: 184290 - DNA, 269 bp, Glycine max
cctcgagccgaatcggctcgagcggctcgaggaagaaggccttcaacaagtactcaaagcagactgaaactgaggagggaaacaaaaacattacaggcacagctggagaaactgaagaagtatgctactgtggttcgtgttttggctcacacccagatcaggaaaatgaaagggttgaagcagaagaaagcccatatcatggaaattcaggttaatggtggtactattgcacagaaggtggactttgcatacagtttctttgagaaaca

SEQ ID NO: 184291 - DNA, 269 bp, Glycine max
gagataactagaaacagtgtgatgaaaatgaaggtccttgttttcttcgttgctacaattttcgtagcatggcaatgccatgcgtacgatatgttccctctccgaatgaacactggctatggtgcccgtactccggaggtgaaatgcgcaagttggaggcttgctgtggaagcacaccacatctttggctttgagaccattcctgaagagtgcgttgaagcaacaaaggaatacatccatggcgaacaatatagatcagactccaaaac

SEQ ID NO: 184292 - DNA, 270 bp, Glycine max
ttctgagtgtggtgcttcactcttcacttcgcagcttcagatactctccatcctctgaatcaagttttgactttatttgaagagtttctcaactgcactttccttccaaaatgagccggccaatggaggaagatgctgcgggtaaaaatgaggaagaggagttcaacaccggaccactatctgtactcatgatgagtgttaaaaataatactcaggtactgataaattgtcggaacaacaaaaagcttctgggtcgtgtaagggcttttg

SEQ ID NO: 184293 - DNA, 269 bp, Glycine max
gtgaattagctatgaacaatgatgagctacatgtggttatgttcccattccttgcatttggccacattagtccatttgttcagctctccaacaagttgttctctcatggtgttcatgtcactttcttgtcagctgcatccaacattcccagaatcagatcaactcttaatctcaatccagccatcaatgttatctcactaaagttcccaaatggtataaccaacactgctgaattgccacctcacttagctggaaatctcatacacgcc

SEQ ID NO: 184294 - DNA, 276 bp, Glycine max
aaactttgaaagctcaatttgttaccaaggttgctctgtgaatccgaggttccaaactctgccactaactttaatggcaactggggtattcattaataaacccccttcacttcctccgtaccccgagatgattttggaggcaattgaagcactgaatgaagacaatggttctaataaatcatcaatttcgaagtacatagaatctacctacggtggattacctcagggccacaaggttttgctcaatgtgcacctcgcgaaaatgagggacagtgg

SEQ ID NO: 184295 - DNA, 270 bp, Glycine max
tgaatttccaactgaagttccaggtcaaaatgcctatgcatacttttatccaccatctaatcctgatttccaagctagcaaagaagaaaagcctccattattattgaagagccacggtggaccaactcaagaaactcgtggaattttaaatttgagcgttcagtactggactagtcgaggttgggccgtcgttgatgttaattatggtggaagtactggttatggcagggtgtacagagaacggcttttgcgccagtggggaatagttga

SEQ ID NO: 184296 - DNA, 269 bp, Glycine max
gtgctgcaccactgcctcctcaacgtcgccgaccaccgttcagctctagtgatcagcagcaatggcggggaaagtggcaaaggcagcttatgatgcaaagatgctgaagcttctgaaagagtacagtcaggtgctggtggtttcatcagacaatgtgggttccaaccagcttcagggcatacggaggggacttaatgctgattcggtggtggtgatgggaaagaactccatgatgaaacgctctatcatcttggatgctcagaagactg

SEQ ID NO: 184297 - DNA, 269 bp, Glycine max
cggtgacgaaaggaaagaagaagaagaagcgttctttcggagagttcgaagatgtcgggcgttaccaacaacaacgaggaagacaagaagccaaccgaacagggagcacacatcaaccttaaggttaaggggcaggatgggaatgaagtttttttcaggatcaagagaagcactcaattgaagaagcttatgaatgcttactgtgaccgacagtcggtggatttcaactccattgcttttctgtttgatggacgccgcctccgagctga

SEQ ID NO: 184298 - DNA, 264 bp, Glycine max
gtggcatttgaggactatgggcttgagttgtatttgtaccgcacagcatatttagtggaccttgatcgtgagaaagttggaagagttttgaagcttgactctatcaagaacggtgactcttggatggggatggacgtgttggtcttcaacacgtggcactggtggacccacaccggaagttctcaaccgtgggactatgttcaggtgaataataagttgttcaaagacatgaaccgttttcttgcgtactataaagggctaaca

SEQ ID NO: 184299 - DNA, 267 bp, Glycine max
ctttagccgaggtcaggaggagcactagctaagttcacaatttcaaaatggctaggggactaaagaagcatttgaaaaggctcaatgctcctaagcattggatgcttgacaaactgggtggtgcatttgcgcctaaaccctcatctggaccacacaaatcgagggagtgcctccccctcattcttattctgcgaaaccggctgaagtatgctctgacataccgtgaagtcattgctattctgatgcagcgccatgttcttgttgatg

SEQ ID NO: 184300 - DNA, 96 bp, Glycine max
tttatgttatgtgggtaagtcacctaagacactccacgtacctacgttgttgtctcttaccggctttaataaatcttctgcccttgttccatattt

SEQ ID NO: 184301 - DNA, 272 bp, Glycine max
tctttcttcctcttcctcagtagtgcgattttcgattctcttctctgcaactatgcctcaccctaaggtcttcttcgacatgaccatcggcggtcaacctgccggccgcatcgtgatggagctctatgccgacgtgactcccagcaccgccgagaacttccgcgcgctctgcaccggcgagaagggcgccgggcggagcggcaagcccctccactacaaaggctcgtccttccaccgcgtgatcccgaacttcatgtgccagggcggcgact

SEQ ID NO: 184302 - DNA, 271 bp, Glycine max
atcaaagtttcttcctttctctgctctttgtcttctctgacacatttggggccttgttgagtgtgtttttgcaagacggtatggcgaaggacgttgaggttgctgagcgtggctccttctctgggaaggactaccaggaccctccaccagcaccactcattgatgctgaggagctcacaaagtggtccttttacagggctcttattgctgagttcattgccactttgctcttcctctacattactgtgctcacagttatagggtacaagca

SEQ ID NO: 184303 - DNA, 270 bp, Glycine max
gcaacaaacaagaggggtttgccttgtgccgtttgtgttgttttcgggacgaagaagaagatggtgtcaggttctggaatctgcgcaaagcgggtggtggtggacgcgcgccaccacatgctgggtcgtctagcctccatcgtggcgaaggagcttctgaacggccagaaagtggtggtcgttcgctgtgaagagatttgcatctcgggcgggctggtgaggcagaagatgaaatacttgaggttccttcgcaaacgcatgaacaccaaa

SEQ ID NO: 184304 - DNA, 267 bp, Glycine max
cttgaagctcccattcacgtcctcatggtgtcctatccagcacaacgacacataaaccctttgctcagactaggtaagtgccttgctgcaaagggcttatttgtaaccttcaccacctcagagaccgctggtaaaaacatgcgaaccgccaataacatcactgacaaatcagtgattcctgtcggcgatggttttctcaagttcgatttctttgaagatggcatggcagatgatgatgatggtcccaagaagataaatctcggtgat

SEQ ID NO: 184305 - DNA, 269 bp, Glycine max
agcgtttgtgagcacacgagtggattggaaggagacaccagaagcacacgtgttcaaggctgatattccagggctgaagaaggaggaagtgaagctggagattcaagatggcagagttcttcagataagcggagagaggaatgttgaaaaagaagacaagaatgatacgtggcatcgcgtggagcgaagcagtggcaagttggtgaggaggtttagattgccggagaatgctaaagtggaccaagtgaaggcttccatggaaaatgggg

SEQ ID NO: 184306 - DNA, 248 bp, Glycine max
  unsure (1)..(248): unsure at all n locations
gtctgctggaaaacactttggcagagctggttatcaatgcggtacccagcattacnaatggttcgctttgtcaattcaggcaccgaagcttgcatgggtgcactacgtctcgcccgagcttataccggaagagagaagatcatcaagtttgagggctgttaccatggccatgctgatccttttcttgttaaggcaggtagtggagttgccaccttgggattcctgattctcccggtgtccccaaactg

SEQ ID NO: 184307 - DNA, 268 bp, Glycine max
ccccaatatacttagccatatctttacttcccaaaacttgctctacaatgagtttccttcgttcttttgcaagaaacaaggatatatcaaaagtaggacgcagaggtatccattgcatgcagaaactatgtgcagaaaaaatatctcctgattcactagagaaggcccaaaatcgtgtgatagatgctgcactcacacttgttcgagaaaatacaaggcttaagaaagaactcgtgcatagtttgggaggtgctgtggcaacttcaac

SEQ ID NO: 184308 - DNA, 267 bp, Glycine max
ctcacaccaggcgcacgttagcacaaactatcatggccacggcaacagcagctgccacctcgtcctttatggggacgcgtctcctggaggctcactccggggcggggcgagtgcacgcccgattcggcttcggcaagaaaaaggctcccgccccaaagaaagcctccaggggatcgggccgagacaccgacagacccctttggtatccgggcgccaaagcgcccgaatacctcgatgggagtcttgtcggagattacgggttcgatc

SEQ ID NO: 184309 - DNA, 259 bp, Glycine max
ctaatccctctttcttcctcttcctcagtagtgcgattttcgattctcttctctgcaactatgcctaaccctaaggtcaccttcgacatgaccatcggcggtcaacctgccggccgcatcgtgatggagctctatgccgacgtgactcccagcaccgccgagaacttccgcgcgctctgcaccggcgagaagggcgccgggcggagcggcaagcccctccactacaaaggctcgtccttccaccgcgtgatcccgaact

SEQ ID NO: 184310 - DNA, 257 bp, Glycine max
cgcagtcctttttctatttgtatgtttgtatgagactgagaaagatagagagatagtgtgtgcagaagatgtggctattcggcagaaaaggggcttctgggttttcatcatcatccactgcagagcaagtcactgaaggaattgatggaactggtttcactgccattgtcacaggggcatccagtggtattggcactgagactacgcgtgttcttgctttgcgtggtgtccatgtgattatgggtgtgagaaatatg

SEQ ID NO: 184311 - DNA, 255 bp, Glycine max
taagggtgcaaaccatagcttccaaatccaaagatgctgccatcccagccatgtttgttagggcagagacagagcaaccaggcatcacaaccgttcaaggggtgaaccttgaggtgccaattattgattttagtgacccagatgaagggaaagtggtgcatgagattttggaggcaagtagggactggggcatgttccaaattgtgaaccatgacatacctagtgatgttatgagaaagttgcaaagtgttggga

SEQ ID NO: 184312 - DNA, 255 bp, Glycine max
gttgcagccatggccacccacgcggctctagcttctacaaggatccccactaacaccaagttcccatccaaggcttcacactctttcccaacccaatgcgcctcaaagagacttgaggtgacagaattctctgggctaagatccacttcatgtgtgacatatgctaacgatgctagagaatcttccttttttgatcttgtagcttcccaactcactcccaagaccaatggatcatcaactcctgtgaggggagag

SEQ ID NO: 184313 - DNA, 255 bp, Glycine max
ctctctcctctctccactctccaccaacacaaaagcacttgcaaactagttttgttttgggaacatcatcacattacattagattggtggtaatggcagcgtcactacaagcagcagctactttcatgcaacccaccaagttgagcaggagcaacactttgcagcaaaagtctactcagtccatttccaaggcttttggtttggaacctgttggagctaaaaaggtcacatgctcccttcaggctgatcttaagg

SEQ ID NO: 184314 - DNA, 255 bp, Glycine max
gcagagaaccttcaaaaaccctaatttctcaaaatcttcagaggacacacagcacaaccaacacctccacagcctctcctacctcccggagccatggccgccgccgactcctccgccgctccatcgcaccagttgtcgcagagggagacggacatccagatgatgctcgccgccgacgttcacctcggcaccaaaaactgcgactttcagatggaacgctacgtcttcaagcgcagaaccgatggtatttacata

SEQ ID NO: 184315 - DNA, 257 bp, Glycine max
ggagaacgagctagaacaaaggacaacaatcttcttgggaagtttgagcttactgggatccctccagcaccaagaggagtgcctcagatcaatgtctgcttcgacatcgacgctaacgggattctgaatgtctccgcagaggacaagactgctggtgtgaagaacaagatcacgatcaccaacgacaagggtaggctgagcaaggaggagattgagaagatgttgaaggatgcagagaggtacaaggcggaggatga

SEQ ID NO: 184316 - DNA, 258 bp, Glycine max
gaagattacaacatgttctccgcaatttcattgaacatctcaatgcaattgcggagaacaaggaagattacaacaagttctatgatgctttttcgaagaatttgaagttgggtatcctcgaggatagtcagaacaggtccaagttggctgatttgctcagataccactcgacaaagagcggagatgaaatgacaagcttgaaggactacgttacacggatgaaggagggtcagaaggacatttactacatcacaggag

SEQ ID NO: 184317 - DNA, 255 bp, Glycine max
ctcgagccgcaacaggtcacctggatactatgatggacgctactggaccatgtggaagctgcctatgtttggctgcactgatgcttctcaggtgttgaaggagcttcaagaggctaagactgcataccccaatggcttcatccgtatcattggatttgacaacgttcgccaagtgcagtgcatcagcttcatcgcctacaagcccccaggcttctaagtcattgaaaaatttgcaaagcatctgtagccacccca

SEQ ID NO: 184318 - DNA, 253 bp, Glycine max
cttcttctcttgcggctagggttttagcgcagttcttctagatacaaggaagatgggtaaggaaaaggttcacatcagtattgtggtcattggccatgtcgactctgggaaatccactaccactggtcacctgatttacaagcttggaggcattgacaagcgtgttattgagaggtttgagaaggaagctgctgagatgaacaagaggtctttcaagtatgcctgggtgctggacaaacttaaggctgagcgt

SEQ ID NO: 184319 - DNA, 258 bp, Glycine max
gcaaagaaggcctccttctgggggggccagagccatcagtgagataccactctggaagagctagaattctaaccttgtgccaggacctaccggccgagggaccgtctcaggtagacagtttctatggggcgtaggcctcccaaaaggtaacggaggcgtgcaaaggtttcctcgggccagacggagattggccctcgagtgcaaaggcagaagggagcttgactgcaagacccacccgtcgagcagggacgaaagtcg

SEQ ID NO: 184320 - DNA, 255 bp, Glycine max
tgagaattgacatcgagtcttttgagacatggcatcctcgttggcaccagctaccaaagccgccactaatttgcgcctcacacactctctccgcttctctcctaaacccaacaacctacgctttgccaccaagcctggtattacgcctctatgcacgagggttaaggcccaactaaatgaggttgcccttgatagttcctccaatgctacttctcctcctatgaaagccaaatcaaaggaggaaccacccgcaaa

SEQ ID NO: 184321 - DNA, 251 bp, Glycine max
cttcctcaagaatatgttgaccagttgtccgttcttcaggatcaagttcctccatttcccgcagagacctctgtagctattgttgaatcagagctgggagctcctttaggtgatatctttgatcagtttgactatgaaccaatagctgctgcaagtcttggtcaggttcatcgtgcgacattaaagggacaggcggttgttgttaaagtacaaaggcctggtctcaaggatctttttgatattgatcttaa

SEQ ID NO: 184322 - DNA, 252 bp, Glycine max
ggagtttcaagggttaccggaaggttgcgttgctagtatactctctcgcactacgccggcggacgtgtgtaggttttccgtcgtatcaaagattttccgttcggccgctgaatcggacgctgtgtggaaacgttttctcccttccgattaccattccatcatttcccagtctccttcgcctctcaactatccttccaagaaggagctctatctcgctctctcggatcggcctatcatcatcgatcagggtaa

SEQ ID NO: 184323 - DNA, 253 bp, Glycine max
ctcgagccgattcagtgtcccactagctagggtattcggagctctcgttgtttcggagttaccgaccttacgcagccatggccactgctacgaatgccgccgccgccccaccacgccagctctcccagaaggaagccgacatccagatgatgttggccgccgacgtccacctcggcaccaagaactgcgacttccaaatggaacgttacatcttcaagcgccgcaacgacgggatttacattattaaccttgg

SEQ ID NO: 184324 - DNA, 251 bp, Glycine max
gaaacagtgtgatgaaaatgaaggtccttgttttcttcgttgctacaattttggtagcatggcaatgccatgcgtacgatatgttccctctccgaatgaacactggctatggtgcccgtactccggaggtgaaatgcgcaagttggaggcttgctgtggaagcacacaacatctttggctttgagaccattcctgaagagtgcgttgaagcaacaaaggaatacatccatggcgaacaatatagatcagac

SEQ ID NO: 184325 - DNA, 256 bp, Glycine max
atctgacagcaaatgctgctaggcctaatccacaagggtcattccattatgggaagattactcctacaaaagtaattaagttggccaattcagcacctttgatcaatggaaagctccgttatgctgttaacagtgtctcatatgttaaccctgacacccctctcaagcttgctgattacttcaacattcccggagtcttcagtgtgaatttactccaaaactctccctcaaacggtccaggatacataggcacctc

SEQ ID NO: 184326 - DNA, 255 bp, Glycine max
gtgagatagccagccatgtcgatcttttctattccctcaccaacgtaccgttgttcaatttcaatttcaatttctcggcagccattgccatgttctttcacggctcaagtgagaagaagagggaaagggaacgtggtaatgagcatggaggcaggcattggagtgatgggcaccaagttgggtatgatgagctatttcgaatccgacggagaggttgttcctgtcactgtcgtgggtttcaaagaaggcaacatc

SEQ ID NO: 184327 - DNA, 253 bp, Glycine max
cacaaagccagcaagcagcaagaagggcaatatcaaggagaccctcttgactccaagattctacaccactgactttgatgagatggagacactcttcaacactgagatcaacaaaaacctcaaccaggatgagtttgaggcactgctccaggagttcaagactgactacaaccagacacactttgtcaggaacaaggagttcaaggaagccgctgacaaacttgagggtcccctcagacagatctttgtggag

SEQ ID NO: 184328 - DNA, 256 bp, Glycine max
attctctagaagacatcttgtactcctctttgaataatgataggactttgcttgattttagatatgtctctgctctcaaatctcataaaccttaacctctccgatatcaccgcgaaggtgatcgcagagtacatatggatcggtggatcaggaattgacctgaagagtaaatcaaggaatctcccatgaccatttagcgactcttcagagctgcccaagtggaactatgatggttccagcataggtcaaactcctg

SEQ ID NO: 184329 - DNA, 264 bp, Glycine max
gtcgttgttcctcctggcaacacagggctcgatccctctcagacctctttcttccaggtgcttaacattcctaccaagattaacaagggtactgtggaaatcattacacctgtggaactcattaggaagggagacaaggttggatcttctgaagctgcattgcttgccaagctaggcataaggcccttctcatatgggcttgtggttctctctgtttatgataatggttcagtgttcagccccgaggttcttgatcttactgag

SEQ ID NO: 184330 - DNA, 249 bp, Glycine max
ggaaccgaaacccttcgccgcaaaaaaatgcctcccaaatctgccaaatccaaggaagctccagctgagcgacccatcctcggtcgattctcttctcacctcaaaattggcattgttggcttgccaaatgttggaaaatctactctctttaatactctcaccaagttggcaatacctgctgagaacttccccttttgcaccattgagcctaatgaggcgcgggtcaatgtacccgatgaacggtttgag

SEQ ID NO: 184331 - DNA, 250 bp, Glycine max
caatttcgttgatggcgtcacaagcaagcctcctccttcagaagcagctcaaagatctttgcaagaaccccgtcgatggcttttccgccggtttggtcgacgaaaccaacatttttgaatggagtgtgactataattggacctcccgatactctttatgaggggggatttttcaatgccattatgagctttccacccaactacccaaccagtccaccatcagtgaaatttacctcagagttatggcatcc

SEQ ID NO: 184332 - DNA, 251 bp, Glycine max
gtgaagagtgagagagagagagagagaggcacttggaatccaaaaatgagagaaatcatcagcattcacataggtcaggccgggatccaggttggcaactcctgctgggaactctactgcctggaacatggcatccagcccgatggcatgatgccaagtgactcctccttcggtgtagcccacgacgccttcaacaccttcttcagcgaaaccggatccggcaagcacgtccctcgcgccgtcttcgtcga

SEQ ID NO: 184333 - DNA, 254 bp, Glycine max
gctgccggagccttttagtttcattttcacttggtttgctgctgttcccctcattgtgtggatagctctgtcactaacaaatgccattgtaaaagactttgtgattttaaagggtccttgtccgaactgcggtactgaaaatacctctttctttgggactatactctcaatttcaaatggtggttccaccaacactgtcaaatgctccaactgtggaactgcaatggaatatgattcaactacaagattgatta

SEQ ID NO: 184334 - DNA, 249 bp, Glycine max
cattgattccgaagagaaaagaaaagatgtttgagccacagcagctatacactcgcgcgaagaccgaggaattcgacctcgaatcaggagaaaccctctacccagggctgagcgtcggcgaaaaccagctccgatggggtttcatccgcaaggtctacggcatcctctccgcgcagatcgtcctcaccaccctcgtctccgtcaccaccgttttctatactccaatcaatgacctcctcaagggcaatt

SEQ ID NO: 184335 - DNA, 251 bp, Glycine max
gaagagttcgctgatataaaagatcaatttgatgctatagatgtggacaaaaatggttctattagcctggaagagatgagacaggctcttgccaaagatcttccttggaaattgaaagaatcacgtgtactagagatattgcaagcgatagacagcaacactgatggcctagtggatttccgggagtttgtagcggctacattacacgtgcatcaactggaggaagactctgacaagtggcagcaactgtc

SEQ ID NO: 184336 - DNA, 251 bp, Glycine max
agcaaaagcaagaagaactagtctaagcagaaatggcctcttcagtgatggcatctgtggccctcaaacctgcccctttcactgttgagaagtcctcagttagaggccttccctccctctcaaggaactcctcttcattcagagttgtggccagtggtggcaagaagatcaagactgacaagccttatggacttaatggtggcatggctttgagggaaggagttgatgcatctggcaggaaaggaaaggga

SEQ ID NO: 184337 - DNA, 250 bp, Glycine max
ctgattttgtaattgagttcgatcaaatagctcccagtactttaatcgatttctggatatcatcacttaattatgaaggaaagatggtgagcgtagctgagatccgccaggcacaaagggcagaaggcccagcaaccatccttgccattggaactgcaaacccaccaaactgtggttgatcagagcgacctatcctgactactacttcagaatcaccatcagtgagcacatgaccgagttcaaagagaaa

SEQ ID NO: 184338 - DNA, 248 bp, Glycine max
  unsure (1)..(248): unsure at all n locations
tttcgggttctgtttctcctccttcaaaaccccctcctcgtgactgtctacgttgcccatattntgtcatagcattttcagaggaacaatggcgggtagggtttcgacgtgcttcttcttcgtgtttgctctttctctccttcttccttttcagatctccgctgaggaatcatcggagaaagagttcgtactcacattggatcactctaactttcacgacactgtcagcaagcacgatttcatcgtcg

SEQ ID NO: 184339 - DNA, 254 bp, Glycine max
tgggttcacaaaattgtatggataggaagcactatgttctggtgcatggggcatgccatggagcttggtgttggtataagctcaagccacgcttggaatctgcaggccataaggtcacagtacttgaccttgcagcttctggaaccaacatgaagaaaattgaagatgttgatactttctcagagtattctgcgcctttgtcgcagctaatggccacaattccctcaaatgagaagttagttctagttggtcac

SEQ ID NO: 184340 - DNA, 255 bp, Glycine max
ttttcactcttcagttctcgttgttgttcttcgctttcctgaaactagggttttcaattccgattcattcgttaataattaaagatgtttgggagggcacgaagaagagcgataatacgaggtactacgaaatcctcggcgtctcgaagaacgcttcgcaggatgatctgaagaaggcttacaagaaagccgccatcaagaatcaccctgacaagggcggtgatcccgagaagtttaaagagctggcacaagcat

SEQ ID NO: 184341 - DNA, 247 bp, Glycine max
gaggctatctcttcagtatcaccctgacaagaacaaagccaagggtgcacaagagaagttttctcagatcaataatgcatatgaacttttatccgatgaagagaagagaaagaattatgacttgtatggagatgagaaaggaaaccctggatttcaaggtggccatcctggaggtcaggatggatatacttattttacagggggtggtcctggacaaagccattttaacttcaaaccaggggggggc

SEQ ID NO: 184342 - DNA, 265 bp, Glycine max
ggctagagaacactgaagctaaccgccaggcgtaccgtaccctccttgtgacagttccaggacttggtcagtacatctctggtgccattctctttgaggaaactctctaccaatccacaactgatggcaggaagattgttgacgtgctcctcgagcaaaacattgttcccggtattaaagtcgacaagggtttggtaccccttgctggttccaacgatgagtcatggtgccaaggtcttgatggtcttgcctctcgctcggctgc

SEQ ID NO: 184343 - DNA, 264 bp, Glycine max
aaaacactcataacacaaagcacaaagcaaagctcatccttgagttaaaaaatggcagcagcttcttccatggctctctcatccccatccttggctggcaaggccgtgaagctgggcccatcagccccagaagtgggaagggtgagcatgaggaagaccgtcaccaagcaggtctcctcaggaagcccatggtacggcccagaccgagtcaagtacttgggcccattctctggcgagcccccgtcctacctaaccggtgagttc

SEQ ID NO: 184344 - DNA, 265 bp, Glycine max
agttgctcctatagccggcgctcaacaacatggcggacaaggcagtcaccatccgaaccagaaagttcatgacaaacaggcttctctccagaaagcaattcatcgttgatgtccttcatccagggagggctaatgtttccaaggctgaactgaaggagaaattgggcagaatgtatgacgtgaaagacactaacactgtatttgtcttcaagtttcgaactcattttggtggtggcaagtccactgggtttggtttgatctatga

SEQ ID NO: 184345 - DNA, 267 bp, Glycine max
ggcagactagtatccgatcctctgtcctctcgaagctttcatcgttcaacatattctcaccatctcagtcatgggcctgctatcttgttttaggtctaccgtcctgagaaaatgttccaaaggaagctctggcatgtcaagattcctgtatacgaacaattttcaacgaaacttgatttcgtctggtggcaatgaatcgtattatgggtattttaacaggagatcatacacttcactttatatgggaactggaactgtgggtgggat

SEQ ID NO: 184346 - DNA, 260 bp, Glycine max
attctctcgcattccgtggagatctagtgcttctgctgcaagacctcgctgaaaattagggtttcgattcggaggtagacgaagatgttcggaagggcaccgaagaaaagcgacagcaccaggtactacgaaatcctcggcgtttccaagaacgcttcgccggatgacttaaagaaggcttacaagaaagccgccattaagaaccatcctgacaaaggcggtgatcccgagaagtttaaagagcttgctcaagcctatga

SEQ ID NO: 184347 - DNA, 265 bp, Glycine max
gaactttgcaactttgagcagaaaatctcacagtcgaaggaagaaataatcaccaatggcaattgaacacgaagacgatctcaaagacgagaagaaccctcgacccctcgacgaggatgacatcgccctcctcaaaacctacggtttgggaccttattccacaagcataaaaaaacgcggagaaggaaatcaaagatatggccaagaaagtgaatgacttatgtggtatcaaggagtctgatactggattagcagcaccaagcca

SEQ ID NO: 184348 - DNA, 259 bp, Glycine max
tgaggctggagaaggaagcctcctacgatgaaattaaaaatgctatcaaggaggaatcagagggcaagttgaagggaattcttggttacactgaagatgatgtggtctccaccgactttgtgggcgatagcagatcaagtatttttgatgcaaaggctggaattgcattgaataagaactttgtgaagctgtctcttggtatgacaacgagtggggatacagctcacgtgtcatgacctgcttgtattcgttgccaaga

SEQ ID NO: 184349 - DNA, 257 bp, Glycine max
gcaagtttgacaacttgtatgggtgccgtcactctctccctgatggtctcatgagggctaccgatgttatgattgctggaaaggtggctgttgtggctggatatggtgatgttggcaagggttgtgctgctgcaatgaagcaggctggtgctcgtgtcatcgtgaccgagattgatcccatctgtgcccttcaggctctcatggaaggccttcaggttctgaccttggaggatgttgtttctgaggctgatatcttt

SEQ ID NO: 184350 - DNA, 259 bp, Glycine max
acaattgggtgtatgaagaagccaacacaactttcattcaggatgagcaaatgctgaacaagctcatgaacactaatccaaactccttcaggaaactagtgcagacattcttggaagccaatggacgtggttattgggaaacttcagaagataatattgaaaagctcaggcagttgtattcagaagtggaagacaaaattgaaggcattgatcgctgaatttaatagctattcttgaaaagaacatacaacagtgaaga

SEQ ID NO: 184351 - DNA, 264 bp, Glycine max
ggatgtggctcccctcactctcggaattgaaactgttggtggagtcattccaaagttgattcccagaaacactgttatcccaaccaagaaatctcaggtgttcaccacctatcaggaccagcagactacagtctccattcaggttttcgaaggcgagaggagtctcacaaaggattgccgccttcttgggaaatttgatctgtctggaattcctccagccccaaggggtacgcctcaaattgaagtgaccttcgaagttgatgc

SEQ ID NO: 184352 - DNA, 267 bp, Glycine max
gagaaatcatatcaggttaagtagtgtttgtactcttaattcatatgatttcttttgctgcagacttgcagttaaaaggtgatattaaccttgcctttttaatgcagccaaactgaagaaaatgctttgtctgatgttgaagttctaaggttagcagctgcagtggaatcaaattcagtacatccagttggtcaagcgattgtcaatgctgctcaggctgctaattgtcatgatgctaaggtaaaagatggaacattcctggaagaa

SEQ ID NO: 184353 - DNA, 264 bp, Glycine max
caagattctcacaaacaactcttgagaaagaaagaatggctgccaacacattgatgagttctgccatctcagccttcccatctctcctttcctcctcaaaatccagatttgccgcagcagttcctctttccagctttgttgtcaccaatgcctcttcttctcgcttttccatgagtgctgactggatgcctggccagcctagacccccctaccttgatggttcagcacctggtgactttggattcgaccctcttcgtcttggtg

SEQ ID NO: 184354 - DNA, 257 bp, Glycine max
gcttctaagtttttgaacgataaggttaccaaggccgttgttacggtgcctgcttacttcaatgactcccaaaggactgccaccaaggatgctggtcggattgctggtctagaggttcttcgtattatcaatgaaccaaccgctgcatccttagcctatggctttgaaaagaaaaacaacgaaactatccttgtttttgaccttggaggcggtacctttgatgtctccgtgctcgaggttggcgatggagtctttga

SEQ ID NO: 184355 - DNA, 254 bp, Glycine max
gtagctcagagctcgctctcctcgccgtttctctcatcgctagtttcaagtctccttgtgacaatggtgagggttagtgtgttgaatgatgctctgaagagcatgtacaacgccgagaaacggggcgaagcgccaagtcatgattaggccgtcctcgaaggtcataataaaattcctcttggtgatgcagaagcatgggtacattggtgagttcgagtatgttgatgaccacagggctgggaaaatcgtggttg

SEQ ID NO: 184356 - DNA, 253 bp, Glycine max
actcgagccgaatcggctcgaggttgtttggagcgatccgagaaaacctctgtaaacatgtacgtttaccaggacctccttacaggtgatgagcttctctctgactccttccgttacaaggaaattgagaatggaatgctgtgggaagttgaggggaagtgggttgttaaaggagcagttgatgtagacattggtgcaaacccttctgctgagggtggaggagaagatgagggagttgatgatgcagctgtta

SEQ ID NO: 184357 - DNA, 260 bp, Glycine max
aaaggattctacccgccgctcgatgggaattgcgcttcaaggcgtctcgtagggctaatccgcctcacgagggtcaccaacggcacgtgcctttggggggccgaggccccctactgctggtcggcaaacggacggcgggcgcacgcgtcgcttctagcccggattctgacttacaggcgttcagtcataatccaacgcacggtagcttcgcgccactggcttttcacccaagcgcgatgaccaattgtgcgaatcaacgg

SEQ ID NO: 184358 - DNA, 257 bp, Glycine max
caaaggttgctgtaggagataagattgcagtagtgctaagtgctaacacctgcagtgaacaatggcctctgcatcagcatctctgctcaagtcttcacttgttcttgacaagtctgagtgggtgaagggacaaacccttcgccaaccttctgcatcagttgtgagatgcaaccccaccaccccatcaggcctcaccatcagagctggttcctatgctgatgagctcgttaagaccgcgaaaacagtggcttcaccag

SEQ ID NO: 184359 - DNA, 251 bp, Glycine max
caggagatttcgactatgatgatgaagcagaaagacgtctcgtctcgctgcaacgccggatccaccgcaaggcggacggcgacggcgacgttctgggccccgtgctgtaccgcgaccggctcgccaggacgttcaacaccagcggcttcgcgaagttccgccacctcgctaagatttcgcggccgaacaggaataagaggaggaggaagagtagggaggcgagtgaagaggttaagcccgtgggggagaac

SEQ ID NO: 184360 - DNA, 255 bp, Glycine max
gtgccggctgtgatgcaggcgacgcagtgggaacagagcaacaatgcctccgctgttcattgggagcgctttctgcctcggatggtgcttcgggtcttgcttgtcgaagctgatgattctactcgacagatcatttctgcacttctccgtaaatgcggttacaaagttgttgcattttgtgatggcttaaaggcatgggagacattgaagaacaaagcatttgacttagatctcatattaacagaagtggatttg

SEQ ID NO: 184361 - DNA, 265 bp, Glycine max
ctcgagccgttcgcatctgaattctcagtcgcttctcgaaccctacttcttccgcggtgatacgcatttgaattcctgtaatggcgattgataatatttttaaacatgaagccagtgaagaaaaaggagagcgggccagaatggcttcttttgttggagccatggctattgctgacttggtgaagacaaccttggggccaaagggaatggataaaattttgcagtcaacaggtagaggacgtgaagttactgtcactaatgatgg

SEQ ID NO: 184362 - DNA, 267 bp, Glycine max
ctggctcaggatgaacgctggcggcatgccttacacatgcaagtcggacgggaagtggtgtttccagtggcggacgggtgagtaacgcgtaagaacctacccttgggaggggaacaacagctggaaacggctgctaataccccgtaggctgaggagcaaaaggaggaatccgcccgaggaggggctcgcgtctgattagctagttggtgaggcaatagcttaccaaggcgatgatcagtagctggtccgagacgatgatcagccaca

SEQ ID NO: 184363 - DNA, 258 bp, Glycine max
ctcgagccgctagtttatcgtgaggagaatatgaagttgtttgtactctttgttgctgcagtagttttggtagcatggccatgccatggcgcaggctaccaaaggttccctctccgaatgaaaactggctatggtgagcgttcttcggaggtaaaatgcgcaagttttaggcttgctgtggaagcacacaacatccgagcctttaaaaccattcctgaagagcgcgttgaaccaacaaaggactacattaatggcgaa

SEQ ID NO: 184364 - DNA, 254 bp, Glycine max
attccattgtggaacagattgctgggaggctttctatgatttctttcttggatgtgagctactgtattaaaatcggtccctatgcacttgagatgattggcaagaactgcaaactgctagaagggttgtgtcgaaacatgcacccgttggatactgcaagcaagccgtttcaagatgatgaagcatatgcaattgcctccacaatgcctaagctcaagcatcttgaaatggcttatcatcttatcagcacttcg

SEQ ID NO: 184365 - DNA, 255 bp, Glycine max
agcaaagatgacaggtgggttctttggagggaaggggcaaaagataaaggggacagtggtgttgatgccaaagaatgtgttggacttcaacgccataacctccgtcggaaaaggcagtgctaaggacaccgccaccgatttcttgggcaaaggcttgggcgcattaggtggtgcagttgatgctctcactgccttcgctggccatagcatctccttgcagcttatcagtgctactcagactgatggtagtggaaa

SEQ ID NO: 184366 - DNA, 259 bp, Glycine max
  unsure (1)..(259): unsure at all n locations
ggaagaatcactcccttatccatttccacaccacaccatacttccaannaangntctctcttcagcctccattctacgctctcccaaccgccagtctctctcccgaagagcgaaccataatggaagagtaaattaccggaaaccgaataaccgtttctccgtgaaagcctccgccaaagagattgcctttgaccagcattcccgctctgctatgcaggccggcattgacaagctcgccgacgctgttgggctcactctt

SEQ ID NO: 184367 - DNA, 262 bp, Glycine max
ctaacccaaagtgtttctctcctctgtctttttctctctcttgctatccttttggctagtcgcactgctgcaactgcaactccaagaagcgcagtgccaagccaccatgtttcaacattcaacagaagcctttttccttccacttttctctgtggccttggttcttctgcttaccaggcagaaggagcagcaagtgtagatgggagatgaccaagcatatgggacacctacactagacagcatactgaaaagatttgggatc

SEQ ID NO: 184368 - DNA, 255 bp, Glycine max
ctcgttagtcgtttgtaacgcctttgtttgcgttttttgcacagaagaattaacacgtatatagcaagcatggcagtcacactctacgaccttagctctgcctctgggttgaagaagcttgatgagtaccttctcccacgcagctacatcaccgggtaccaagctacaaaggatgatcttactgtttatgcagctttgccaactgctccattagatgaatatggaaatgtttccaggtggtacaagcacattgat

SEQ ID NO: 184369 - DNA, 271 bp, Glycine max
gtggaagtggcactattgagattgataaagatctgaatgagggagagacttctaaggaaaccagtgatatccattgggaagactgcaaggatcaaattgatgtagttgcacttgcatccaaggagcccatacttttctatgatgaggtggtgttatatgaggatgaactcgctgataatggagtatcacttcttactataaaagtgagagttatgcctagctcttggtttcttctgttgcgtttctggcttagagttgatggagtgttgat

SEQ ID NO: 184370 - DNA, 267 bp, Glycine max
ctcgagccgctcgagccgggcttatggtggatacctaggcacccagagacgaggaagggcgtagtaagccacgaaatgcttcggggagttgaaaataagcgtagatccggggattcccgatataggtcaacctttcgaactgctgctgaatccacgggcaggcaagagacaacctggtgaactgaaacatcttagtagccagaggaaaagaaagcaaaagcgattcccgtagtagcggcgagcgaaatgggagcagcctaaaccgtg

SEQ ID NO: 184371 - DNA, 269 bp, Glycine max
ttggactatgagattacatatgtgcggaatttcactgatgttgatgacaagataataaagcgagcaaatgagaccggggaggatccattgatgttgagcaaccgtttttgtgatgaatacaatgctgatatggctgatcttcagtgcaagacaccatctaaggaacctcgtgtttctgaacaccttaacgagataaaggacatgataacccagattatcagcaatggctatgcgtacgaagttgatggcgatgttttctatgctgttga

SEQ ID NO: 184372 - DNA, 255 bp, Glycine max
tgtggctcagagggtctgtgacacacagactcacttccaagttccaagctttggccatttattcccactgtttattgaacatggcacacattttggctccctctacgcaatggcagatgagaatctcaaaatcctctcccaatgcaagtcccattacatcaaacatgtggagttctttattgtggaaacaaaataagaaagtttcacccacaagttctgctaaatttagagtgatggcaattaagtctgacaata

SEQ ID NO: 184373 - DNA, 260 bp, Glycine max
ccgtggatggaaaggaaatcaaagttgtttctgaccgcaaccctgccaaccttccttggaaggacttggggatagacttggtgattgaaggaaccggggtgtttgtagacagagaaggtgcagggaaacacattcaagcaggagctaagaaggtgctcatcactgctcctggtaaaggagatatccccacctacgtggttggtgtcaatgagtatgactacagccctgatgaacccatcatcagcaatgcctcttgcacc

SEQ ID NO: 184374 - DNA, 288 bp, Glycine max
gaaatgtcttgcaatggacagaaaaatggaaattacagcaactgttttaagatctttctctgatatgttttatataatccatataattttccaatttcgtactggattcattgctccctcttctcgagtatttggaagaggtgttttggttgaagatgcttgggcaatagcaatgcggtatctatcatcatacttcttgattgacattcttgccgttcttcccctcccacaggtggcaattctaattatcattccaaagttgagtggctctgaatcactgaatacaaa

SEQ ID NO: 184375 - DNA, 292 bp, Glycine max
ggaaagaggtgtgaagtgtgtgagtctgagagaagagaacttagagaaatggaactacgtgagcttggaagaaccggactgaaactcagcactgtaggattcggagcttctccactgggcaatgtcttcggcgatgtttccgaggaacaagccaacgcttccgttcgcctcgctttccaatccggcatcaatttcttcgacacttctccgtactacggagggacactgtcggaaaaagttctgggaaaggcactgaaggctctgggagctccgaggaactcgtacgttgtgg

SEQ ID NO: 184376 - DNA, 292 bp, Glycine max
ggaatttaaagaaaagtcattcttctgtgcttgacactacaggaaccagtccaaaacttggcgacaagacaatttattccattggcacaagactgaaagcattctctgattggcttctgaaaactatggtttcgggcaagcttgatgctatctttccagccgctactcgtgaatatgctcctttgattgaggagttatgggacgatgcagccattaaggccgcctatgaaagaagaaatgaaatagaattgctacctagtgttgccagttatttcttagagcgggctgttga

SEQ ID NO: 184377 - DNA, 292 bp, Glycine max
ggcaagcgcttctcctctttgtgttctggctatgcttcttggcaagagctagatcggacgaggttgcgtgtaaacggtgtacgttcggacgggttcgatcatcaagggaggcaccgattcagtaattggtctgaagctatacgacaagtccggctacggcatatacatcaccaacctcgaggcatggggcgggttaatggatccgggtcacaactactacgagcggggcaacctcgacatattcagtggtagaggcccttgcttggaagcacccgtttgcgaggccaaccta

SEQ ID NO: 184378 - DNA, 295 bp, Glycine max
attcttaggccggtggctgaatgagcacatccaagatgcacagaacacccttcacaagccacttctatttgcggagtttggtatttccacaaagagttatggtggcaactcaacaccaagggatcggttattcaacacggtatattcagcaatatactcatcagcaagcagtggcggggctgctgttggtggcctgttttggcaacttatggctcaaggaatggattcttatcgagacggttacgaggtggtcttagatgagagcccttcaacggctaatttgattgctcaagag

SEQ ID NO: 184379 - DNA, 293 bp, Glycine max
gtcggttcttccttctcaaatattcttgagatccccattttctccgaagcaaagccatggctaagggtcctggtctctactctgacatcggcaagaaagctagggatctgctgttcaaggactaccacagtgaccagaagttcaccatcaccacctactcaccgactggagttgctattacagcatcaggaaccaggaaaagtgaactgtttctggctgatgtcaacacccagttgaagaacaaaaacatcactactgatatcaaagttgatacagattctaatctcttcaca

SEQ ID NO: 184380 - DNA, 286 bp, Glycine max
tttcactcaaatcatggatttcttgcaagcacaagaaaatcagatacttgtgggtgtcgccgtggccgttgtagccattgggcttggtgcagtctatctctattcatccaagaagaccaaaggttgcttggacccagagaactttaaggcattcaaacttgttaagcgtgcacagctgagccataatgttgcaaagttcacatttgcactcccaacacctacatctgttttgggtcttccaattgggcaacacataagttgcaggggtaaagatgccaaggtgaag

SEQ ID NO: 184381 - DNA, 291 bp, Glycine max
gatacacagtagttaggtagcaagcataagtgtctaaccttagaaacatatctgctacatatcgtgtgcattttggaattgtgccactaaaattctattcatctatggctgcctcatcttatgctatgcaatcaatccttgcaaaccctatgatccgcatttccagcgggtctagggagaaccattttggtgttcctgcttatcacatgagaaggaatgttggcctgagagttaggtccatggctgaggaagagcaaccaagtcagcctgcgaccccagttacaccaccac

SEQ ID NO: 184382 - DNA, 287 bp, Glycine max
actcgagccgaatcggctcgaggttgattcggatctagagtcttcactttctcctcgttgtacttcgctttcctgttttcaatttcgattctttcgttaatttaataagatgtttgggagggcaccgaagaagagcgataatacgaggtactacgaaatcctcggcgtctccaagaacgcttcgcaggatgatctgaagaaggcttacaagaaagccgccattaagaatcaccccgacaagggcggtgatcccgagaagtttaaagagctggcgcaacttatgaggt

SEQ ID NO: 184383 - DNA, 288 bp, Glycine max
gggaagttgaggggaagtgggttgttaagggagcagttgatgttgacattggtgcaaacccttctgctgagggtggagaagatgagggagtcgatgacgcagctgttaaggttgttgacattgttgatacattcagacttcaggagcaacccgcttttgataagaaacagtttgttaccttcatgaagaggtttatcaagaatttgactcccaagctcgatgcagagaaacaagagttgtttaagaagcacagtgagggagcaactaaatacctgctctctaagatta

SEQ ID NO: 184384 - DNA, 291 bp, Glycine max
atcaaatactcagaactgttcggtttttctggaaatttttcttctctcagccatctctctctctctctgcgtccatggagttttggggtgttgaggtgaaaagtggagaatctctcaaggttgatccgggagatgacaagattatccacctttcaaatgcatgcctgggggatgtcactaaggataaagaaggtctaccagtagccctgtatgtcaagtttggtaactaaaagcttgtacttggaacgctttcttctgaagcttttcctcagatatcttatgatttggtat

SEQ ID NO: 184385 - DNA, 297 bp, Glycine max
ctcaacttccttctttctttgccttctattcttctccgtaacattttctcatgtttttggggataaagtatttacgggaacatatggagtaaactacggtagggtagcagacaatctaccttctcctgagagtgtggttacccttctgaaagctgcaaagattaggaacgtgagaatatatgatgctgatcgtcaagtcctgagtgccttcaaagggtcaggaattgcaattagtgtttgtgtaccaaatgagcttctgaaggagataagtgtgggtgaggatcgtgccatgaattg

SEQ ID NO: 184386 - DNA, 293 bp, Glycine max
aacaagaacaagaacaacaaagtaacgtgaaagagagagagatggaggcgattgttccagtggtggatttccagaggctttcagaggaagaggagcgcaagaagctgagaaaaacatgtgagaaaccagggtgtttcagaatcatcaactactcaattccactaacactcatggctgacatgaagtcagtggttaaatacttgcatgaccttcccacggaaatcaaaatgcgcaacaaaccctcggtccctgagagtggctatagggcggcaatgccaacaagtcctctatac

SEQ ID NO: 184387 - DNA, 289 bp, Glycine max
cggctcgagggagaaatacattgaagaaacttatggaagttgggcagtgttccggccacagtacatgattgggtctggcaacaacaaagactgtgctgagtggttttttgacaggattgtttcggacagacctgtgccaattcctggctcgggactgcaactcagtaacatagctcatgttagggacttatcttcaatgcttactcttgctgttgagaatccagaagctgcaaatcagaccattttcaactgtgtgagtgaccgtgcagtgactctagacggaatagcc

SEQ ID NO: 184388 - DNA, 287 bp, Glycine max
aacgaaccactctgaagccgctcacgttatccacaacactctcaaccctccttaaaccctaaccaatccaaccatggcttcttcttccaccttcactgcaatgtccgcctgcaagctctcctcctccgccgccatctcctccttcccctcccgccgccgctccaacgccgtcgttctgtcgaggcgcagcgcgccgccagggtctccgccatggccaaggagttgcacttcaacaaagacggcaccgcaattaagaagctccagagcggtgtgaacaagctcgcgga

SEQ ID NO: 184389 - DNA, 281 bp, Glycine max
gcgccaccatagttggtgtagctagcgagggagggatatagggggatacgttgattcattcattaagatggcatcggagcttcaattgcccccaggcttcagattccatccaacggaccaggagctggtgttgcactatctctgccgtaaatgcgcgtcgcagcctatcgccgttcccatcatcgccgaaatcgacctctacaaatacgacccctgggacctacccggattggcttcctacggagagaaagagtggtacttcttttcaccacgggaccgga

SEQ ID NO: 184390 - DNA, 287 bp, Glycine max
tctaaatgaatggcatggatcaggcaaggtcaagatcggaatcaacggatttggaagaattggccgtttggttgccagaatcgctctgcaaagagacgatgttgaactcgttgccgttaacgaccctttcattaccaccgattacatgacatacatgtttaaataccacagtgttcacggacactggaagcatcacgatgtcaccgttaaggacgagaagacccttctcttcggtgacaaggcagtcactgtttttggacacagaaaccctgaagagatcccatggg

SEQ ID NO: 184391 - DNA, 286 bp, Glycine max
ggatgttgtaacaacaatgcttgatccaactattcctctcactacctcagaatgggaggaatggggtgatcctagaaaggaggaattctacttctacatgaaatcatattcccccgttgataacgtgaaggcacagaattatccacacattcttgttacagcaggattaaatgacccacgggttttgtattcagaacctgcgaagtttgtggcaaaactgagggatatgaagactgatgataacatactgctgtttaaatgcgagctcggtgctggacatttttcc

SEQ ID NO: 184392 - DNA, 279 bp, Glycine max
ccaagttatgattatatctttttccagaagatctaccattatacctacaatgatagatgctctggtaaatgatataataagaacttggtccagagcatctatcattgtaggtataatggtagatgctctggaccaagttattatgatacctacacggattggccatactatggctatcgacaacggaaaagagcatttacgtatttatataacagatcgaatggtaggccataaattaggagtatttgcacctactctaaatttccgaggacatgcgaa

SEQ ID NO: 184393 - DNA, 291 bp, Glycine max
gtcttggcacatccacgatgagagatccctacttgctctgcagggtcctcttgctgcccccgttcttcaacacctgacaaaagaggatttgagcaagctctactttggggagttccgtgtgttggacatcaatggctcagagtgttttcttaccaggacagggtatactggggaagatggatttgagatctcagttccttcagagcatggagtagatcttgccaaagcaatactggaaaaatctgaagggaaggtaagattgacaggattgggagctagagatagtctgcg

SEQ ID NO: 184394 - DNA, 288 bp, Glycine max
gtggtgttagatctgtacctgcctagccattgatttggaaaagtccaagcttcaaagatgagtaagcttcagagtgatgctcttagagaagctatctcaggaatcatgactgattccaaggaaaagaacaggaaatttgtggagaccattgaactccaaattgggctgaaaaactatgatccccagaaggacaagcgttttagtggctctgttaagttgcctcacattcctcgccccaagatgaagatttgtatgcttggagatgcccaacacgttgaagaggctgag

SEQ ID NO: 184395 - DNA, 290 bp, Glycine max
caaaaatggaacttcatgtaaaataaactatggaactggatcaatatctggtttcttcagtcaagataatgttaaagttggcagtgctgttgtcaagcatcaggatttcattgaggctacccacgaaggaagtcttacctttctgtcagcaaagttcgatggaatactgggacttggatttcaggagatctcagttgaaaatgctgtgcccgtatggttcaaaatggtggagcaaaaacttatcggtgagaaggtgttctctttttggcttaatggggatccgaatgcga

SEQ ID NO: 184396 - DNA, 288 bp, Glycine max
gtgagctataagctagtttatcgtgaggagaatatgaagttgtttgttctctttgttgctgcagtagttttggtagcatggccatgccatggtacaggctaccaaaggttccctctccgaatgaaaactggctatggtgagcgttcttcggaggtaaaatgcgcaagttttaggcttgctgtggaagcacacaacatccgagcctttaaaaccattcctgaagagtgcgttgaaccaacaaaggactacattaatggcgaacaatttagatcagactctaaaacagtt

SEQ ID NO: 184397 - DNA, 286 bp, Glycine max
ggaattgttgtaactttttgattcctaaattctctaaaattcgaaattctaatttcgttaggggaaagagattgtttgtgtgtgagagagtatggctggaaaaggcgagggtcctgctatcggaatcgatttgggaacgacgtactcttgcgtcggcgtgtggcaacacgatcgtgttgaaatcatagccaacgatcagggtaacagaactaccccatcctacgtggctttcaccgacacagaacggttgatcggcgatgcggcgaagaaccaggtcgctatgaac

SEQ ID NO: 184398 - DNA, 286 bp, Glycine max
gcttccacaaccctatcgcacatctttctcagttctacgatggagttttggagtaccgaggttaaggctggagcgcacgtaaaggtagacccagccgaatcctatgcatgcatacacctcttttaggctgctcttggtgaggcaaagatagacatgcctgaaccggtggttctctacatgaaagttggtgaacagaaatttgtcttgggaaccctttccagggagaaaatccctcaaatatctctggaattggttttggaaaaggagtttgagctttcccacagtt

SEQ ID NO: 184399 - DNA, 286 bp, Glycine max
actaactgcaccatcaccagataaaacttgggtggtgcctttattctttttctttctctctatcgattctcgtaacaaaccctacccttttgagtcttccaagttttcaccatcgtaatgggttccgaaggatccagcgtcgtggttcctaggaatttcagattattggaagagcttgagagaggtgagaagggaattggggatggaactgttagctatggaatggatgatgctgatgacatatacatgcaatcttggactgggactatcatcggtccccctagta

SEQ ID NO: 184400 - DNA, 291 bp, Glycine max
gaagaaggatgaggagggtaaggtggaggatgttgatgaggagaaggagaaggaagaaaaaaagaaaaagaagatcaaggaagtgtcacatgaatggtccttggtgaacaagcagaagcctatttggatgaggaagcctgaggagatcacaaaagaggagtattctgctttctacaagagtcttaccaatgactgggaagagcatttggctgtcaagcacttctctgttgagggtcagttggagtttaaggctatactctttgttcccaagagggcaccttttgacctctt

SEQ ID NO: 184401 - DNA, 290 bp, Glycine max
accacattcacctgaggctgacaaagcaatggcttccactgcagcatcgactgctgctgcttcccttggcatgtcagaaatgcttggaaaccccatcaacttcagtggtgccacaaggccagctccatctgcttctagtcctgcctccttcaagactgtggctcttttctccaaaaagaaggctacaccaacacctccaaaaaaagctgctgtggtggctcctgccaatgatgagcttgccaagttgtatggtcctgacagaaggatcttcttgcctgagggtctcttgg

SEQ ID NO: 184402 - DNA, 288 bp, Glycine max
cttcccttctccaacatgccaaacgacagcgttctgagtcttttcttcttcgttaccctcttcacatgccttctctctgctacttcccacgatgaccatattttcctaccgagtcaactccatgacgatgactcagtgagttgcactgcaaccgacccaagccttaactacaagccggtgatcggaatcctgacccaccccggcgacggtgcctctggccggctcagcaacgccaccggggtttcttacatcgccgcctcctacgtgaaattcgtggagtccggtggt

SEQ ID NO: 184403 - DNA, 283 bp, Glycine max
cttggatctgatctgctgaaacacgccacactcttcttaccatgggcctcctcgatcacttgtgggatgacaccgtcgccggtcctcgcccggagaacggccttggcaagctccgaaagcaccacaccttcgctttccgatctgcctccggcaaggaatcagacagcggaagcgtgaaatcgtacggtgaagatttgccggaggatgcggtgagagtgacgcgaagtatcatcatcgtgaaaccacctggtggtaaccagagtccgagcggatccgctccggc

SEQ ID NO: 184404 - DNA, 283 bp, Glycine max
attgctacatagcacacactccctcttctcttctacggttatggcgtccacgttgggcacttcttcaattgcggttcttccttcgcgctgcatctcttctttttcttccaagccttccattcacacactctctctaacttcagggcagagctatgggcggaaattttatggaggaattggaattcatggcatcaagggaaggtctcagctctcagttgccaatgttgccactgaagttaactctgtagaacaggcccaaagtattgcttctaaagaaagccag

SEQ ID NO: 184405 - DNA, 286 bp, Glycine max
tcagtttctcctcgttgttcttcgctttcctgtttgcaatttcgattctctcgtgaattgaataagatgtttgggagggcaccgaagaagagcgataatacgaggtactacgaaatcctcggcgtctccaagaacgcttcgcaggatgatctgaagaaggcttacaagaaagccgccattaagaatcaccccgacaagggcggtgatcccgagaagtttaaagagctggcgcaagctgatgaggttctgagtgaccctgagaagcgtgagatatatgatcagtatg

SEQ ID NO: 184406 - DNA, 290 bp, Glycine max
atttgggggagcatttggttgattagggtttcttcggctgcgtgctgatgctcttgtgttctcacacacacacaacagcaatggaagcaatcacagagggagtgaacaacatcaacatctctgattcttacaagaagaatcgcattcaggtctccaacaccaaaaagcctctcttcttctacgtcaatctcgccaagaggtatatgcaacagcataatgaggttgagctctcagcactaggaatggctattgctacagtggttactgttgctgaaatcttgaaaaacaat

SEQ ID NO: 184407 - DNA, 286 bp, Glycine max
ggtggagcaaggattctccttgggagacttgcggattggcgactgattttgaatggaaaatgattgcagaacctgtgatgtcgcttgatacagaagcaactgatggttccttcattgaacataaggaaagcgcaatggtttggcaccatcaagaagcggatccttattttggatcatgccaagctaaagagcttcttgatcatctggagagtgtgcttgccaatgagccagtagtggttataagaggacaacatatagttgaagttaaacctcaggtatacttaaa

SEQ ID NO: 184408 - DNA, 284 bp, Glycine max
ctttttgccgtgccatggcctcaaactccatggctggcttgatcaccagttcgaattctcatttctcgcgtgactccaatgagcatcaggctcctcctacccggcaagcttcgtcgaaaactacgtgtcgagtttgtggcgatgagattggatacatggaaaatggggagctgtttgtggcttgtcatgtgtgtagatttcctgtttgtcgaccgtgttatgaatatgagaggagtgatgggaaccagagctgtccacaatgcaacactcgctataagcgccac

SEQ ID NO: 184409 - DNA, 283 bp, Glycine max
ctcagctcatagcattctgcttcttccaacgagaatcagtctttgtgctccaaatggctcgtacgaagcaaacagcacagaaagtccaccggaggaaaagctccaaggaagcagctcgccaccaaggcagcacgcaagtccgctccggcgacgggcggcgtgaagaagccccaccgtttcaagccggggacagtggctctgagggagattcggaagtaccagaagaccacggagtttctcatagggaagctcccttccagaggctcgtaagggaaatcgctca

SEQ ID NO: 184410 - DNA, 281 bp, Glycine max
cgcagtcgcagtgagtgaaaaggaaaaccctaattgcggtgttctcagtgccttcgagagaaagaaaaaatggcagataatcttgttctccgtggcaccatgcgcgcccacaccgacgttgtgacggcgattgccactcccatcgacaactccgacatgatcgtcaccgcctcacgcgacaaatccatcatcctctggcatcttaccaaggaggacaagacttacggtgtcccccgccgccgcctcaccggccattctcattttgtccaggacgtcgtcct

SEQ ID NO: 184411 - DNA, 281 bp, Glycine max
gcggaaaacgttgttgagttcacagacttacccgtcaagaggccaagagaagaagaagaaggaaccaatggcgtctccaacgacgccgtttcagcgctccccaatgaccctcaataccctggcatctctgcggttattcccggttggttctccgaaatcagcccaatgtggcccggggaggcacattccttgaagatggaaaagattttgtttcaagggaagtctgactatcagaatgtcatggtcttccagtcatcaacatatggcaaagttcttgtttt

SEQ ID NO: 184412 - DNA, 287 bp, Glycine max
actcgagccgattcggctcgagttcttctctggttgattcggatctacagtcttcagtttctcctcgttgttcttcgctttcctcttttcaatttcgattctttcgttaatttaataagatgtttgggagggcaccgaagaagagcgataatacgaggtactacgaaatcctcggcgtctccaagaacgcttcgcaggatgatctgaagaaggcttacaagaaagccgccattaagaatcaccccgacaagggcggtgatcccgagaagtttaaagagctggcgcaa

SEQ ID NO: 184413 - DNA, 285 bp, Glycine max
gaaatcgatccttgctgatcaaaatcacatttcctttcatttcttcgttatttcctaatcccaatggctcaagcactatcaacttcatcactactactatcacaaaaaacagggtcctacgtcaaaccacagaacaatgtaattgtaccctgcatggcctcttttccatcaaggaaggaatttccaaggctaggaagggtgagagctcaggcttctggtgataacaaagacaactctgtggaagtacaacatgttaacaagggtgaccaaggaaccgcggttgag

SEQ ID NO: 184414 - DNA, 280 bp, Glycine max
ctcgagccgtgatattggttttgattggacgataggcaaaggaaaaccttttagatatttcacttatggggctgcgtttgctgaggttgaaattgacactctgactggagattttcacaccagagtggcaaacatatttttggatctaggttattcgctgaatccagcgatagatgttggacagatcgagggagcttttatccaaggtttgggttgggtagctttagaagaacttaaatggggagatgaagcacataaatggatcccgtctgggtgcctt

SEQ ID NO: 184415 - DNA, 282 bp, Glycine max
taccaacaccaacaccatcaccatcaccatctatggcttgctcaagcgcccaaatacacggcctcggaaccccttccttttcccgaaccctatttttaggtcagaggctaaataccaaggccgcctttatcaaggtcaagtctgcacccactcccaggaggctccgccctctcagagtcgttaatgagaaagtcgtcggtatcgatttgggaaccaccaactccgccgtagccgccatggaaggcggcaagcccaccatcatcaccaacgccgagggccaga

SEQ ID NO: 184416 - DNA, 285 bp, Glycine max
ggcattctgtgtgaagaattgtcaattgtcagtgaagcaggtcaatcctcgacagtatgttgctgaaattcctcagctatccaacctcgacgtttggcttcagaggcccaaagacatagtaagaaaattgttatctggagatcttgaccttggtattgtgggactcgatactttcagtgaacatggccagggtaatgatgatcttatcattgtccacgaggctctggagtatggtgattgccgtttatcccttgcgattccccaatatggaatatttgaaaatgt

SEQ ID NO: 184417 - DNA, 292 bp, Glycine max
tcgaggtgagtgtgttgatcgagataactagaaacagtgtgatgaaaatgaaggtccaagtgttcttcgttgctacaattttggtagcatggcaatgccatgcgtacgatatgttccctctccgaatgaacactggctatggtgcccgtactccggaggtgaaatgcgcaagttggaggcttgctgtggaagcacacaacatctttggctttgagaccattcctgaagagtgcgttgaagcaacaaaggaatacatccatggcgaacaatatagatcagactccaaaacagt

SEQ ID NO: 184418 - DNA, 287 bp, Glycine max
ggaagaaccaccactaccttatccatttccactcctcaccaagccacaccatggcctcaaccaacgccctctcttcagctttcattctacgctctcccaaccgccagtctctgaccagaagagcgaaccacaacggaagagtaaattaccgtcaaccgaatagccgtttctccgtcaaagcctccgccaaagagattgcctttgaccagcattcccgctctgctatgcaggccggcattgacaagctcgccgacgccgtcgggctcactcttgggcccagggggagg

SEQ ID NO: 184419 - DNA, 286 bp, Glycine max
gctcctcctcagtctttcagttgcaatcttcacatcagcgtgccaatatggtctcccattcctagcaaaatgtaccccttgtgatccatccctctcagatgtgtgccccaccaacgggcgttctggaaacttcaaacaattcaactgcccaaaaggctactacaatgatcttgctactcttcttctgaccaccaatgatgatgctgttagaaacatattctcaaccaacacccctcttgaataccaaccctcctccatcataattttctttgcactgtattgcata

SEQ ID NO: 184420 - DNA, 285 bp, Glycine max
agattgttaattgaagcagaggaagacctaacatgtccgttacggagctgaaggagcgtcacttggcggcgacggaaaccgtcaacagtctcagggagcgcttgaaggagaggcgtctttcattgctcgatacagatattgctggctacgccagtctcaaggtagatcccctgtcacctttggtcccaccgatctcgtgtgttgtagaactctccagggtcatgcgggaaaggtgtactcattggattggacttcagaaaagaatcgaattgttagtgcatccca

SEQ ID NO: 184421 - DNA, 287 bp, Glycine max
cggctcgaggcaaaaaccaccttcacatctacaaaccacacctccgccataaatacaagtaacctccctcatggaagagctctcagcggggcctctcgtccccgccgtcgtcaaacctgaaccgtccaaaggcgcctccgccgctgcctccggcggcacgttcccggcctccacgtcggagccggacaaggacttcctctgtccgatttgcatgcagatcatcaaggacccgttcctcaccgcgtgcggccccagcttctgctacatgtgcatcatcacgcacctcc

SEQ ID NO: 184422 - DNA, 298 bp, Glycine max
tcgcatgcatccgtatgcaactcgagcatttcgctctaaccaaagtattctttctcttcatattgtgatatataaataagaggacaagctactacaggctttagtgttaattagtttccacttgcaaatggaactggacatcatgttgcgacaaggtaggtgtaaagaatggaccatggactcctgaggaagatcagaagctcttagcttatatagaagaacatggccatggacgatagcgtgtcttgccagcaaaagctggacttcagaggagtggcaaacttgcagactaagatgg

SEQ ID NO: 184423 - DNA, 280 bp, Glycine max
cgagataactagaaacagtgtgatgaaaatgaaggtccttgttttcttcgttgctacaattttggtagcatggcaatgccatgcgtacgatatgttccctctccgaatgaacactggctatggtgcccgtactccggaggtgaaatgcgcaagttggaggcttgctgtggaagcacacaacatctttggctttgagaccattcctgaagagtgcgttgaagcaacaaaggaatacatccatggcgaacaatatagatcagactccaaaacagttaaccaa

SEQ ID NO: 184424 - DNA, 282 bp, Glycine max
tgaaaacccaaagtgcttctctcctctgtctttttctctctcttgctatccttttggctagtgccactgctgcaagtgcaactccaagaagcgcagtgccaagccaccatgtttcaacattcaacagaagcctttttccttccacttttctctttggaattggttcttctgcttaccaggcagaaggagcagcaagtgtagatgggagaggcccaagcatatgggacacctacactagacagcatactgaaaagatttgggatcatagcaccggtgacatgg

SEQ ID NO: 184425 - DNA, 277 bp, Glycine max
  unsure (1)..(277): unsure at all n locations
aanggnnanccacgcgggctctagcttctacaaggatccccactaacaccaagttcccatccaaggcttcacactctttcccaacccaatgcgcctcaaagagacttgaggtgacagaantctctgggctaagatccacttcatgtgtgantatgctaacgatgctagagaatcttccttttttgatcttgtagcttcccaactcactcccaagaccaatggatcatcaactcctgtgaggggagagacagtggccagttgaagtggcaatcaatng

SEQ ID NO: 184426 - DNA, 280 bp, Glycine max
cgggtttattttacgttatgttgcgctgtggtggctgctgctgttggagcttttcttcatgttctgtggaacattgggggttttctcaccacgttggcttccattggaagcatggtttggttgctatctacaccccctgttgaagagcaaaagaggttgtctctgttgatggcttcggccttgtttcagggcgcttccattggacctctgattgatttggctattgccattgatcctagccttattgttagtgcatttgtggcaacttctttggcttttg

SEQ ID NO: 184427 - DNA, 283 bp, Glycine max
cttaggtggggactgcaaacaggtcatagtgtgctgcctaagagcactaatgagtccagaatcaagggaaactttgatgtgtttgactggtctattccagacgaagtgatggataagttctctgaaattaagcaggatagactaattaagggcacttttttgttgacgagacctatggtgcctttaagaccgttgaagagctttgggatggtgaactctgagcaatatgcttcatagagatgttgacaaatgcactgctcctcaagcagattgattccgcctt

SEQ ID NO: 184428 - DNA, 279 bp, Glycine max
  unsure (1)..(279): unsure at all n locations
gaaaattcagtgctgaaacatggcttcggctactctctctggaagccaaaccagcccttcaggcaaatgggaaaggcttctctgaattctctggcctccgaagctcatcaggcttccttcccttttctanaaaatcttcagaggatttccattctgtcattgccttccagacctatgcagttggaagcagtggaggatacaagaagggtgtgacagaagcaaaactgaaggttgccataaacgggtttggaagatggaaggaattcttgaggtgctggc

SEQ ID NO: 184429 - DNA, 283 bp, Glycine max
cactgttgttctcaagggattcgattctctctgcactcacttctagggttttctacgcgctataagcaatcatggcggatgaaacaccaaatgagatgaaggaggaggttccagaaattgttccttttgatcctaccaagaagaagaagaagaagaaaattacaattgtagatcctgctgatgaacctgtggagaaattggctgagaagacagaaaacctctcagtttccgagggggttgagactgcatttactggtttgacaaagaagaagaagaagcctgt

SEQ ID NO: 184430 - DNA, 246 bp, Glycine max
ctctgctattcagcaatcagcattcactggtcaaactgctctgaagcagctcaatgagttcgtccgcaagaccggtggcgccggcaaaggtcgcactaacatgcgccgcaccgtcaagagtgctcctcagagcatttggtatggccctgaccgtcccaagtacttgggtccattctcggagcagattccatcatacctgaccggagaattccctggtgactacggatgggacactgctggattatc

SEQ ID NO: 184431 - DNA, 282 bp, Glycine max
gcgactacggctgggacactgctgggctttccgcagacccagaaaccttcgccaagaaccgtgaactcgaagtgatccactccaggtgggccatgctcggagccttgggctgcgtcttcccggagttgctgtcccgcaacggggtgaagttcggagaagccgtgtggttcaaggccgggtcccagatcttcagcgagggtgggctcgactacttgggcaacccaagcctgatccacgcccagagcatcctcgccatctgggccacacaagttatcctaatgg

SEQ ID NO: 184432 - DNA, 280 bp, Glycine max
aaaactttcgaaagattttatccaattgaaattttaaaaatgactgggataaacttaagaattcaattattgaaattgaataagtaaacaatttaattggattggtcgaatggtatcaaaaaaatggagtactaactcccatttcttatttattattgaattaaccgatcaacttgctttgttatcgaacatttctttttgatttcaaaaattttccggaaaaaatttgaatctatttttatatgcgaatcaatcctactacttctggtcctgaggtttc

SEQ ID NO: 184433 - DNA, 271 bp, Glycine max
cccaaaactcatttctcatctcaatcaatccaatggactctcccaatgctttgtctaccgctccggcagcgggtagtaggaagaacgcgacgctaatttgcatcccaataatgggagaatcagttgaaaagatggagattgacgtggacaaagcgaaagtcggaggcgtggaccttgttgaaattcgattggactctttgaaaacctttgacccctatcgagatctcaacgctttcattcaacaccgttctttacccttgttgttcactta

SEQ ID NO: 184434 - DNA, 282 bp, Glycine max
  unsure (1)..(282): unsure at all n locations
tgaaaatgaaagtgcttgtcttgtttgttgctacagttttggtagcatatgaatgccatggctcagactaccagaagttccctctccaaatgaaaactgggtttggtgggcaatacagcaatgaggtggcatgtgccagttggaggcttggcgtggaagcaaacaacgtagtcaagtggcaaactgttcctgcagcttgcggagagtacatagctgactacgttctaggagaccaatatagatcagattccanaacagttaaccaacaagcttatttctatg

SEQ ID NO: 184435 - DNA, 281 bp, Glycine max
tccgcatggccaccgtcacttctgcagccgttgctattccctcattcactggcctcaaggcaagcgcaggcaaagtgagtgccgcagttaaagtctcagctccccaagccacaaggttgggcatcaaggcttcgctgaaagacgttggagtcgctgttgtggccactgccgcgagtgcagtgctggctagcaacgccatggccattgaagtgttgctgggtggagatgacgggtctctggctttcgttcccaacaatttctccgtggcctctggggagaag

SEQ ID NO: 184436 - DNA, 275 bp, Glycine max
taacacaaagcacaaagcaaagctcatccttgagttaaaaaatggcagcagcttcttccatggctctctcatccccatccttggctggcaaggccgtgaagctgggcccatcagccccagaagtgggaagggtgagcatgaggaagaccgtcaccaagcaggtctcctcaggaagcccatggtacggcccagaccgagtcaagtacttgggcccattctctggcgagcccccgtcctacctaaccggtgagttcccaggcgactacggctgggac

SEQ ID NO: 184437 - DNA, 286 bp, Glycine max
ttcggctgatatgagcgaatcggctcgaggaaatacatagataaggctgcatctctggagggactatgccctcatgtaccactatacaaagtaacagaagggaatgaaccttgctttttcacaacatacttttcttgggatcatacaaaagctatggttccaggaaactcattccagaaaaaggtgacattactctttggaattggccatcctgtagaggaaaagtctaatgggtcaagtcaaggagggggaccaagacaaagagcagaagctttggctgccttaa

SEQ ID NO: 184438 - DNA, 276 bp, Glycine max
acatatcacaacctttaaccatcacattgtcaacaaattcggcaagaattcatttttatgggaaggtaccaaaccaaaagtggtaatcactgaccctgagcaaatcaaagaagtcttcaacaagatccaagactttgagaaacccaagttgagtcctattgtcaagttgttgggctctggacttgcaaatttagaaggcgagaactggcgtacacatcgaaagattattaaccctgctttccatttagaaaaattgaaggttatgttaccaatatt

SEQ ID NO: 184439 - DNA, 277 bp, Glycine max
gcagttaacaaaatttcgataagacaagttcccaacttcagctaagagaaaatgtctctgattccaaactttttcggtggccgtaggagcaatgtgtttgatcctttctcccttgaagtgtgggatcccttcaaggattttcattttccctcttctgtttctgctgaaaatttagcatttgtaagcactcgtgtggattggaaggagactccagaagcgcacgtgttgaaggcagatattccagggctgaagaaggaggaagtgaaggtgcagattg

SEQ ID NO: 184440 - DNA, 268 bp, Glycine max
gaaaaaaaaaaatatggaaaagaaacaagattaagaattggggtttgaagaagccggtggtgtctccttgcttgttctcgatcgatcttgttattgtaaaatataataacttttttatatcgtgatcaagatgcgccgagggagagccaccgccgccgtcgtggatccgacggcggagcaggcgaaggagacgcggttccggtgcgtcaggaagcggccgtgggggcgattcgcggcggagattcgagatccgtggaagaagcagcgc

SEQ ID NO: 184441 - DNA, 280 bp, Glycine max
aaggaaatggcttcctcaatgatctcctccccagctgttaccaccgtcaaccgtgccggtgccggcatggttgctccattcaccggcctcaaatccatggctggcttccccacgaggaagaccaacaatgacattacctccattgctagcaacggtggcagagtacaatgcatgacaggtgtggccaccaattggcaagaagaagttcgagactctttcctacttgccagacctcgatgatgcccaattggcaaaggaagtcgaataccttctaaggaaa

SEQ ID NO: 184442 - DNA, 277 bp, Glycine max
gtacgtggtgggaatccaccatgttccgtgccaggaagattttccaataatgcccttgttgagcaccggatttgaattgaggccaactaatttctttgagagaaatccagtccttaagaccctttctcctggcattgttaaatttccaggttgtgagaaaccctagatttgcttttgagctttgtcactttaagtacaatattgttgatcgatagatccggagaaacattatctttttactaatatcggtcatatgtgctaaggtgagaaaataata

SEQ ID NO: 184443 - DNA, 166 bp, Glycine max
ctgtcgttgaatgatatcacatgaatgcattttggtttgcaacctgctgcgcttgcaaggggttgtgaagccaattttataatgaataaaatcaaatatatgctttgtatatttattgaaaaattctacaatatgtattgtatcttcaataataaaaatttgattt

SEQ ID NO: 184444 - DNA, 275 bp, Glycine max
atagccagggagtgtgggattttaactgatgatggcatagctattgaaggtccagagtctagagagaagagtcagaaagagttgcttgaactgattcccaaaattcaggttatggctcgatcctcacctttagacaaacacacattggtgaaacacttgcgtactacttttggggaagtggtagctgtaacaggtgatggaactaatgatgccccagcccttcatgaagctgacattggacttgcaatgggaattgctggaactgaggttgcaaa

SEQ ID NO: 184445 - DNA, 275 bp, Glycine max
ctgaggctcaccaaaagctttctgagcttgggtttgctgaagcctaagcaacgttttggggattgttggagaggcacggtgcccataatatttctctcataaattctatggtcatggtttctaatgcgccactgtgggttcctcaaatttttagatagcttttgaatgtattttgctggacgtggtgatgatgattggagttgggttgtttttatttgtggtcgatccttttgttaaataacattgttcagcgattgcgctattattaccctttg

SEQ ID NO: 184446 - DNA, 276 bp, Glycine max
  unsure (1)..(276): unsure at all n locations
aaaacaagtagttgagaactaagaagaaggaaatggcttcctcaatgatctcctccccagctgttaccaccgtcaaccgtgccggtgccggcatggttgctccattcaccggcctcaaatccatggctggcttccccacgaggaagaccaacaatgacattacctccattgctagcaacggtggaagagtacaatgcatgcaggtgtngccaccaattggcaagaagaagttcgagactctttcctacttgccagacctcgatgatgcccattggc

SEQ ID NO: 184447 - DNA, 286 bp, Glycine max
taacctagtcaaaacttagacatgacgagcaatacagatagcaataaccattctatactatggctcactcacgcgccccaatacacggtcgcggaaactcttcctaccgaaccctatttataggtcagaggctaaataccaaggccgcctttatcaagctcaagtccacacctagaagactccgccctctcagagtggttaatgagaaagtcgtcggtatcgatttgggaaccaccaactccgccgtggctgccatggaaggcggcaagcccactatcatcaccaa

SEQ ID NO: 184448 - DNA, 270 bp, Glycine max
gccgcagcttgaaacagagcagagcgaccttgaagagctactcgtgtcggaaagaataagaggatttccaagggacagaagggtggcaagaagaaagcgttagtgcccattcccttcttcactcttttattctctcctttaaactctgatttctttcttcttcttccgtgattccacagcgctgatccctttgccaagaaagactggtacgatatcaaggccccttccctcttccaggtcaagaatattggcaaaccctcgtctctcgta

SEQ ID NO: 184449 - DNA, 265 bp, Glycine max
cgaaaccagctgatgctagtatatcagtacatggagaacaatagacttgctcgtgcactttttggtagagagcatgagaggatgcaattggactggcccagaagaatgcaaatttgtctgggtatagcaacgggcttagctgatcttcatgaggactcaaggttgaaaatagtgcacacggatattcaggcaaccaatgtcttacttgataaacatctgcatgccaagatctctgactttggtttagccaaacttgatgaagaag

SEQ ID NO: 184450 - DNA, 275 bp, Glycine max
tggttcctctccctcacggataaggaggtgttgggagaaggtgataacaccaagcttgatattcagattaagttggacaaggaaaagaaaattctctcaattcgagacagaggtatcggtatgacgaaggaggatttgataaagaatttggggacaatagcgaaatctggaacttctgcatttgttgagaagatgcaaacaagtggagatctcaatctgattgggcagtttggagtcggcttctactctgtttatcttgtggccgactatgtcga

SEQ ID NO: 184451 - DNA, 277 bp, Glycine max
aaacattataatttctattacatacattttgtagctaggatgagcaagttattactcattcgtgttcctgggttcgtggcaacctttgtcaccatggtgatgatgatggtgcccaaaaacgtgagtgcccaaaacataggtgatgacatcgtcacacaagacttcttcaacagcataatcagtcaggctgatgatggttgtgcagggaagaacttctactcacgagatgctttcctgtaatgctcacaattcctacaatgagtttggtaggcttggt

SEQ ID NO: 184452 - DNA, 277 bp, Glycine max
taacaaggtcactgatttgtgcaaatgatgtctttgcagaggaccaagttgtatccttttttcattgtccttgtttccttcacatgtagtctctcccttgctatgtccagtaaccagttggagcagtttgcttcggaggaagaagtgtttcaactattccaagcgtggcagaaggagcataagcgtgaatatggcaaccaagaggagaaggcaaagaggttccagatattccaaagtaatttgaggtacatcaacgagatgaatgcgaagaggaagt

SEQ ID NO: 184453 - DNA, 272 bp, Glycine max
cctcgagccgaatcggctcgagatggaatttcgatgctcagtcatctcttttaccattctcacctcccttgctcttgcaggacagagccatgtacatgcatcgctacctgaggaagattattgggaagctgtttggccaaacactcccattcccactgcactgcgagagcttctaaagcctctccctgcaggtgttgaaatcgatgaactccctaagcaaattgatgatacacagtacccaaaaacattcttctataaagaagaccttcatc

SEQ ID NO: 184454 - DNA, 268 bp, Glycine max
tgagggtgtttccctctgacgcgtttgggttagaagcaaatgtagcattgacagaacagggccttgtatccgtgtctgaaggctgaaccaagctccagtcagttctatatctttgtcgtcaaatgactaattctgccttggatacaattgccaggaacaggcctaatatgacacgttttagactatgtattatcgagcctcaagctcctgaccatcttacccatcaacctctggatgctggttttggagctattgtagagcattgcaa

SEQ ID NO: 184455 - DNA, 280 bp, Glycine max
  unsure (1)..(280): unsure at all n locations
cgagatcgagccgataaaatagaaaatggggataggggtactatttgttagggtttacttgtaattgtggtgtgtgtgtgaacggtgtgtcccaaaagctcacncatttgtacatttccgggcagtttacaactttgggggactcaaactcagacactggaggcatatcagcttcatttgtgccaattcctgcaccttatggcgagggcttctttcacaagccttctggaagggactgtgatggccgtctcattgtagatttcatagctgagaagctaaa

SEQ ID NO: 184456 - DNA, 276 bp, Glycine max
ttatcatccgcagctgcttttattcgcaccgcaaacagtgaaccatggccgtcggaaagaacaagcgcatctccaaggggaagaagttggcaagaagaaggcagctgatccctttgccaagaaggattggtatgacattaaggctccttctgtttttcaagtgaaaaatgttggcaaaaccctcgtctctcgtactcagggtaccaagattgcttctgaaggactcaagcatagagtgtttgaggtctccttggctgatcttcaaggggatgagga

SEQ ID NO: 184457 - DNA, 273 bp, Glycine max
gtccgcttttccacttttctcttctctctctgctctccttcctatttctcaatcgaacaacacagcacaatcctcaaactctctctctctctctctctctcttcaatttcgttgatggcgtcacaagcaagcctcctccttcagaagcagctcaaagatctttgcaagaaccccgtcgatggcttttccgccggtttggtcgacgaaaccaacatttttgaatggagtgtgactataattggacctcccgatactctttatgaggggggattt

SEQ ID NO: 184458 - DNA, 273 bp, Glycine max
ttaatggcttctcttgcaaccttagctgctgttcaaccagctgcgctcaatggccttgctggaagttccctctctggaactaagctctctttcaagccctctcgccacactgtcaaatccaagaacttcaggagtggtgccgtggtagcaaagtatggtgacaagagtgtgtactttgatttggaggatctgggcaacactacggggcagtgggacttgtatggctcagatgcaccttcaccctacaaccctcttcagagcaagttcttcgag

SEQ ID NO: 184459 - DNA, 291 bp, Glycine max
  unsure (1)..(291): unsure at all n locations
ttcgaattcggactcgaggaatttaattctccaaaaaaaacatagatattgtgcaagcatggcttcaagacccggaattctctctgattggccatggaagcctcttggaagctttaagtatatgttactagctccttgcatcgttcatagctcgtattctatgatggtgaaagataacagtgagaaggacatgtttaactttctcatattaccctttttgctatggcgtatgcttcataaccanatatggatcactttctctcgttaccgaactgccanaggcaacgcaag

SEQ ID NO: 184460 - DNA, 276 bp, Glycine max
tccgacaacgccaacggcagaacccaatccttcacttcctactccgaaaacggcaatgccggcgagcagacattcacctcgtacggcaaaaacggcaacggcccgaccaacgtgttcacctcgtatggaacacagtccaacgttgtcgggtcagggttctccaactacgtcgagaccgccaacgccgccaacgacaccttcaagggatacggcgtcgacatgagcaaccccaccaacacgttctccaactacgccggcggcggcaacggcgccgtc

SEQ ID NO: 184461 - DNA, 268 bp, Glycine max
cttcagtactttagtgtgtgatttaattccaagattttgagaatgtctagctgtgggtgtggaagtagctgcaactgtggcagcaactgcggttgcaacaagtactcttttgacttgagctatgttgagaagacaaccacagagactcttgttttgggtgttgggtctgtgaaggcccaattggagggtgctgaaatgggtgttgcagctgagaacggtgcctgcaactgtggatcaagctgcacctgcgacccatgcaactgcaagt

SEQ ID NO: 184462 - DNA, 265 bp, Glycine max
cagggagtgttcccaaaatcgcaatatcttcaactctatctgcaacagccatctttctcgctcgtcgatcacaaaaatcgcggcgaaacttcaaatatttacgggattgccccccgcgccatttcaatcttcctcctccactctctgcgtactcaagaagcctctcactacctccttcttcggcactgtcacgagtgtcagtcctgaaacttcgagtgatgacgattgcgaagctgtgcgcggtggaggtgctcctgtgctccat

SEQ ID NO: 184463 - DNA, 276 bp, Glycine max
ggcccaagagcaaagaaactaagaagattttgagcacaatggcatccacacaatgcttcttgcaccaccatgccctcaccactccaaccagagcttcatcacagcgcttagttgtgagcaccaaaccaaaccacattgtttgcaaggcacaaaagcaggttgtccaagagggtgaggacactactaacattgtctctcgcaggttggccctcactgttctcattggtgctgctgctgttggctctaaggttgcacctgctgatgctgcctatggag

SEQ ID NO: 184464 - DNA, 290 bp, Glycine max
gtgagctcggaattagatttgatcgaattgaaattttaaaaatgactgggataaacttaagaattcaattattgaaattgaataagtacacaatttaattggattggtcgaatggtatcaaaaaaatggagtactaactcccatttcttatttattattgaattaaccgatcaacttgctttgttatcgaacatttctttttgatttcaaaaattttccggaaaaaatttgaatctatttttatatgcgaatcaatcctactacttctggtcctgaggtttctgcgcttg

SEQ ID NO: 184465 - DNA, 273 bp, Glycine max
gaattgacaatgagaagtcatcactaatgtctcaatcgaagtttgagaagaagtttgggcaatcatctgttttcatagcttcgacactcttggaagatgggggtgttccaaaagcagcaagttctgctacactcttgaaagaggccatccatgtaattagttgtggttatgaagataagacagaatgggggaaagaggttgggtggatatatggctcagttaccgaagatattttaacaggtttcaagatgcattgtcatggttggagatctg

SEQ ID NO: 184466 - DNA, 271 bp, Glycine max
  unsure (1)..(271): unsure at all n locations
tccttttgtgtggggnaattatggtaattnattttnagggtttgactactcatggattatgatggtatgagaaaaccttccaaaaacttatttcactcctcgcttcttcctttntgggttctattgctgggattgggagttcttgaccgctctcctcctttttagttcttccccttaatcttcttcttcacaattttnattnccntccgtattagacgtattagatcagattgaacaaaagggtntttcnttctttcttnttggggaataa

SEQ ID NO: 184467 - DNA, 270 bp, Glycine max
ctactatagtgtctgactcacaggttagagggcaaagattttgaccacaatggcctcgacacaatgctttttgcaccaccacgccctcaccactccagctagagcttcaacacagcgcctagttgtgagcaccaaaccaaaccacattgtttgcaaggcagcacataagcaggttactgtccaagagggtgaggacactactactggccttgtctctcgcaggttggccctcactgtgctcattggtgctgctgctgttggctctaaggt

SEQ ID NO: 184468 - DNA, 266 bp, Glycine max
gacacacacaaaaaaaagctttagtttaggatgacccaagtgaggaacaagcaagtggttctaagagactatgtcaccggattccctaaagaatccgacatgaacattgttgaaggcaccataatattgaaggttccagaaggttccaatgatgtccttctaaaaaatctctacttgtcatgtgatccatacatgcgactcctcatggccaaggaccgttctttcggagatggctccttcacccatgcctctccattgaaaggata

SEQ ID NO: 184469 - DNA, 259 bp, Glycine max
gaaagatcggcgatgactgcctccaaggatcgcgagaacttcgtctacatcgccaaactcgccgagcaggccgagcgttacgaagagatggtggaatcaatgaagaacgttgcgaatctcgacgttgaactgacggtggaggagcggaatttgctttctgttgggtacaagaatgtgattggtgctcgcagacgatcctggaggatcctgtcttccattgagcagaaggaagaaacaaaagggaacgagttgaatgcga

SEQ ID NO: 184470 - DNA, 276 bp, Glycine max
gaacaagaacaacaaagtaacgtgaaagagagagagatggaggcgattgttccagtggtggatttccagaggctttcagaggaagaggagcgcaagaagctgagaaaaacatgtgagaaaccagggtgtttcagaatcatcaaccactcaattccactaacactcatggctgacatgaagtcagtggttaaatacttgcatgaccttcccacggaaatcaaaatgcgcaacaaaccctccgtccctgagagtggctatagggcggcaatgccaaca

SEQ ID NO: 184471 - DNA, 269 bp, Glycine max
gaaaaaagttacctgtttgcgatctcattacaatctccccagtttctaatctcagctaagaaaaaccaaaagatgtctctgattccaggtttcttcggtggccgaaggagcaacgtcttcgatccattctcactcgacatgtgggatcccttcaaggattttcatgttcccacttcttctgtttctgctgaaaattctgcattcgtgagcactcgtgtggattggaaggagaccccagaggcacacgtgttcaaggctgatattccagg

SEQ ID NO: 184472 - DNA, 268 bp, Glycine max
agaaaatcaacatttttattctatcaattcacacgacaaaatttagcagagttcaaaacaccaaccaagtaaagtaaagaagggaagatgtcactgataccaagtttcttcggtggtcgaaggagcaatgttttcgaccctttctcgctcgacgtatgggaccccttcaaggatttgtctttcccttctgctgaagattcagctttcttgaaaacacgagtggattggaaggagaccccagaagcgcacgtgttcaaggctgatattc

SEQ ID NO: 184473 - DNA, 220 bp, Glycine max
  unsure (1)..(220): unsure at all n locations
ggaattcagctcgagcggctcgagcgactccatctattattcatccacactacctctcatccaaatccgctnctcgatgccggcggcggcgcgcatcatccgggacatgcagtccgatgccggtaacaagatgtgcattgactgctcccaggagaatccgcagtgggactccgtctccgacggcgactgcaagtgcctcgaattctccggcaagcaccgt

SEQ ID NO: 184474 - DNA, 271 bp, Glycine max
gttttgttttgggaacatcatcacattacattagattggtggtaatggcagcgtcactacaagcagcagctactttcatgcaacccaccaagttgagcaggagcaacactttgcagcaaaagtctactcagtccatttccaaggcttttggtttggaacctgttggagctaaaaaggtcacatgctcccttcaggctgatcttaaggacttggctcacaagtgtgttgatgctaccaaaattgcaggattcgcccttgccacctctgccct

SEQ ID NO: 184475 - DNA, 274 bp, Glycine max
atcactctctcttccaacgatcatgttccgcatccaagaagctatggcacatctctgccccctccatcttcacccgcctcgccatgttctccatcaccgtcgtcacccagtccttagccggccacctcggcgatctcgacctcgccgccatttccatcgcctgcaccgtcctcatctccatcaccttcggtttcttgttgggtatggcgagtgcgcttgagacactatgcgggcaggcgtacggcgccggacaacagcgcatattgggcgttta

SEQ ID NO: 184476 - DNA, 274 bp, Glycine max
acagaaatcactgctttcagtgaccggcatgcagagttcgaggtcactaaatactgagatattgggtgtttcagttgacagtgtgttctcgcaccttgcatggatccaaacagatagaaagtcaggtggccttagtgacttgaattatcctttgatttctgatgtcaccaaatctatatcgaaatcttatggtgttctcattcctgatcagggaattgcattgagaggtttgttcattattgacaaggaaggggttattcagcattctaccatt

SEQ ID NO: 184477 - DNA, 228 bp, Glycine max
caaaatttgaaatagaaataatctgtgctgtggtagtggaatcatcgagaacatcgcagcgatggcgagagtgggtagaatgaagttgggttcacaaggcatggaggtgtctttgcagggacttgggtgcatgggcatgtctgcgttctatggtcctcccaagcctgaccccgatatgattgctctcatccaccacgctgttcaaactggtgtcactttccttgacac

SEQ ID NO: 184478 - DNA, 277 bp, Glycine max
actctccaaaatttctctctctctccatccatccatctattgcacacttccatcatcatggccatcgcaacagagactcaacctcaacctcagcaacacaaggattcttcggaggtttcgggttcagctgcggagaacgaaggtggacgctaaacgatttcgatatcggaaagcctctcggaaggggaaaattcggtcacgtttatttggccagggagaagactagtaatcatattgttgctttgaaagtactcttcaagagccaattgcaacaatc

SEQ ID NO: 184479 - DNA, 275 bp, Glycine max
cagcagttaacaaaatttcgataagaaaagttcccaacttcagctaagagaaaatgtctctgattccaaactttttcggtggcacgtaagagcaatgtgtttgatcctttctcccttgaagtgtgggatcccttcaaggattttcattttccctcttctgtttctgctgaaaatttagcatttgtaagcactcgtgtggattggaaggagactccagaagcgcacgtgttgaaggcagatattccagggctgaagaacgaggaagtgaaggtgca

SEQ ID NO: 184480 - DNA, 267 bp, Glycine max
  unsure (1)..(267): unsure at all n locations
aaaattgatgaagtcaatttttnattttnaatctatcaggaaactgctgtcatctcctaaattccacattctgttatgatgcantacatggggttggtggagcttatgcaaagagtatttttgtggatgagcttggagcacaagaaagctcttactgaactgtacaccaaaggaagacttcngaggaggacacccagacnccantttgacatatgcaaaagagttggttgctcgtatgggatnggcaaatccgnaccccaagaagag

SEQ ID NO: 184481 - DNA, 268 bp, Glycine max
ctcgagccgctcgagccgattagggtttgccgattgacagataaacagaaatgggagaacgaaaaggaataccaatggctttggggctcttggcgatgatcctcttcttcattgcttcctcttcctctcacgtcgttcgcgattccgatgacgccgacgacgcgatcttctacgagtcgttcgacgaggattttgatggaccgtggattgtatccgacaacgacgattacaatggtgtctggaagcatgccaagagtgatgggcatga

SEQ ID NO: 184482 - DNA, 268 bp, Glycine max
aatggaccccctctctctcttctgcaccggagccctcctcgccggcggcctctactggttcgtgtgcgttctgggccccgccgagcagaagggcaaacgcgccaccgatctttccggcggctccatctccgccgagaaagtccaagacaactacaaacagtactggtccttcttccgccgcccaaaggagatcgagaccgccgacaaagtccccgacttcgtcgacaccttctacaatctagtcacagacatctacgagtgggggtgg

SEQ ID NO: 184483 - DNA, 266 bp, Glycine max
  unsure (1)..(266): unsure at all n locations
ttatttagggtttttgtgactgtgctccacaaccgagtcgccatggcgtgcgcaggagagtatcgaaaagatgcaggcacggcagaattaccggaatttatggcacaccgatctcatgagatccattcaggccgatactccttattgttgcctcgcgttgtggtgtgcaccatgtgtgtcttaccttcttcgcaaacgagctctctatgatgatatgtcaaggtacacatgttgtgctggctacatgcctngcagtggtaggtgtg

SEQ ID NO: 184484 - DNA, 236 bp, Glycine max
ctcgagccggacaagacagagtagtacagattactaccaatggctaccaaggtttacattgactattattctacgtatggacatgttgagaagctagctagagagatagaaaaaggggctgcttctgtgcagggagtagaagcaaaactgtggcaggtactgaaacattgcctgaagaagtccttgctaagttggaagcacccccaaagagtgatgtcccaattattaccccaatg

SEQ ID NO: 184485 - DNA, 269 bp, Glycine max
tcgagcacacccaacattctcacaagtcacagccaaacaccatttcattaattcttgcagaatattgcttagttttgttttatctgaatttggaaacagcttttgaatggctttttcaagagttgcactgctaatatgcacggtcgggtattttgtgattgcctctgccggcaatttccaccaagattttgatatcacatggggagatggtcgggctaagatactcaacaatggagagcttctcactctgtcacttgacaaagcctctg

SEQ ID NO: 184486 - DNA, 235 bp, Glycine max
ctgttacgagcccatcaagcagattattaacacttgtatgaatgatcagaaggataagctgtggcctatgctgcaaaagcttggggtcaccatgaaatctgaggagaaggacctaatgggcaaagcattgatgaagcgtgtcatgcaaacctggcttccagcaagtagtgcattactggaaatgatgatatttcatctaccctctccatcaacagcccagaagtatcgtgtggag

SEQ ID NO: 184487 - DNA, 230 bp, Glycine max
tcggctcgagaagaaaatcctcacccattttcttcgtagccaaacactctgctcattctcagttatgtcgtggcaagcgtatgtggatgatcacctactgtgtgaaatcgaaggtaaccacctcactcacgccgctatcatcggccaagacggaagcgtttgggctcagagcaccaacttccctcagttcaaacctgaggaaataactgccatcaataatgactttaatg

SEQ ID NO: 184488 - DNA, 276 bp, Glycine max
cgagggacaccgcaattcgtggcgcgattattctcgcgaagtttacggttattcccgtgatgaggggttactgggggaacaagattgggaagccccacaccgttccgtgcaaggttaccgggaagtgtgggtccgttaccgttaggatggttcccgcgcctaggggttccgggattgtggcggctagggttcccaagaaggtgctgcagtttgctggtattgatgatgttttcacctcctccaggggatccaccaagacccttggcaacttcgtta

SEQ ID NO: 184489 - DNA, 266 bp, Glycine max
caaatttctgccctatcaactttcgatggtaggatagtggcctaccatggtggtgacgggtgacggagaattagggttcgattccggagagggagcctgagaaacggctaccacatccaaggaaggcagcaggcgcgcaaattacccaatcctgacacggggaggtagtgacaataaataacaataccgggctcattgagtctggtaattggaatgagtacaatctaaatcccgtaacgaggatccattggagggcaagtctggtg

SEQ ID NO: 184490 - DNA, 237 bp, Glycine max
ctcgagccgctataagctagtttatcgtgaggagaatccgcagttgcttgtcttctttgttgctgcagtagttttggtagcatggccatgccatggcgcaggctaccaaaggttccctctccgaatgaaaactggctatggtgagcgctcttcggaggtaaaatgcgcaagttttaggcttgctgtggaagcacacaacatccgagcctttaaaaccattcctgaagagtgcgttga

SEQ ID NO: 184491 - DNA, 266 bp, Glycine max
gtcatcacaatggggttcctcgtgcaatttgttgtttttatgttattcccttggtttctgagtgtgagagctgaggaaaattactcatcacagcattgtgattttccagccatattcaactttggtgactccaattcggatactggttgcatggctgcagcattttaccctgaggttttgccatatggtgaaactttcttccatgagccagttggtagagcttctgatggtcgccttatcatagatttcattgcccagcatctagg

SEQ ID NO: 184492 - DNA, 267 bp, Glycine max
ggtcatttggtataacggcacttgaacttgctcatggtcatgccccattttccaagtatccacctatgaaagttttgcttatgactttacaaaatgcccctcctggtcttgattatgaaagagacaagagattttcaaaggctttcaaagagttggttgccacctcgcttagtaaaagatccaaaaaagcgtccaagttcagaaaagcttttaaaacaccacttctttaaacaagcacgtgccagcaaatatctagctcgcaccatt

SEQ ID NO: 184493 - DNA, 261 bp, Glycine max
gttcttcctattcgagaagctatacacatggagcttgagaaacttttcttagataaggttatagcaaacttgggcctctgcatttctgtctatgatatcagatccattgatggtgggtttatcttccctggtgatggggctccaacctatacggttgtgttcaatttgattatgtttcgtccgtttgagaaggagatcattactgcaaggcttctttcatctgatgctgatggcttacgattaaccattggattctttgat

SEQ ID NO: 184494 - DNA, 260 bp, Glycine max
aagcagaaccacgtgctgccttgaacctcgcatcttatggaagtagtcatgctttcaaactagccaaggaagatgttgttttgtattcagctaaggttatccctggtaatgagtctcgtgtaatgaaaatgctaaaccgcatatcggagattggatcaacaattgttatgggaaaaaatgaaggtttgcacacatctggccatgcatatcgtggagaattggaagaaatacttagaatagtgaagccacaacattttctt

SEQ ID NO: 184495 - DNA, 268 bp, Glycine max
caatcattcagctttttaaataaataaattgcctttctccctcacaatcacaatgctcttctacccttccttcgctccttccctaatactataatttgttacgtcacggagcccaaatgtctgttacggagctcaaagagcgtcactccgctgccaccgacaccgtcaacaatctcagacaccgtttaaagcagaagcgcctttcgttgctcgacacagatgtttctgggtatgcaaggtctcagggtagaacacctgtgacctttgg

SEQ ID NO: 184496 - DNA, 267 bp, Glycine max
acaacatgaattttctaaccttcgttactgttctactcttcatactatccctaacctaatcttcccagtatttggggaacaaccttctcactcatcgcaagatattcctaaaaaaagacaacattattacctcgtacgctgtcatctttgacggtggtagcacaggaacccgtgtgcatgtcttccattttgaccagaatttggatatccttcccattggtgatagtcttgagcttaataaaaagatcacacccggttcaagtgctt

SEQ ID NO: 184497 - DNA, 232 bp, Glycine max
ctgggaaagtattcactaattaactgtgccaagaccagtatgtcctcaaagttgatagctgcttatagtgacttctttggcattttggttgtagatgcagtgcaagctgtaaagatgaccaatgctcgaggtggagttaagtacccaatcaagggaatcaatatcttgaaagctcatggaaaaagtgctagagacagctttctgatgactggttctgctctagatactggcg

SEQ ID NO: 184498 - DNA, 275 bp, Glycine max
ggcaaatcaaagttttgaaccttggttcaatatctagagtccctgcaagctcaacacatcagagataatcaaaatgcatcctgcgcagatcgttttgtatggatcaactttatgtgtcatgataacagtgcacttctccatgaagctactcgctgaacatgttttgaactggaagaaaccaaaggagcaaaaggccatagtaattataatccttatggccccattgtacgctgtggactcctatgttggtttgataaatttctttggaagtgaag

SEQ ID NO: 184499 - DNA, 295 bp, Glycine max
cctcgagccgaatcggctcgagcccaaaggtccttccggggcttgactgtcaaagccgccacacgttgttgcccccaaatacactgcgataaagcctctgggagatagagtgctaataaaaattaaggaagcagaggagaaaactgagggtgggattttgcttccatcaactgctcaaacgaagcctcaagggggtgaggtggttgctgttggggaaggaaagacagttgggaagaacaatgtagagattgtgtgaagactggtgcacaagttgtgtattcgaagtatgcaggta

SEQ ID NO: 184500 - DNA, 285 bp, Glycine max
cttcactctcagttctgccacatattaacattccggcgcaaaatgaaggtcatcgccgcctacttgctcgccgttttgggaggcaacgcagccccttccgccgatgacttgagggacatccttggctccgttggagctgacgcgaacgatgacaacatcagcaacttcttgtctgaagttaagggcaaagacattgtggagcttatcgcctccggtagggaaaagctggcctccgtgccttctgcggtggcgccgccgttgctgttgctgccgctcccggcggtg

SEQ ID NO: 184501 - DNA, 272 bp, Glycine max
  unsure (1)..(272): unsure at all n locations
ccagaggggattccaccagaccagcagaggcttatctttgctgggaagcagctggaagatggtcgtactcttgctgattataatatccagaaggagtccactctgcatttggtgttgaggcttcgtggaggtatgcagatatttgtgaagactctgacagggaagaccattaccttggaggtggaaagctctgatactattgacaatgtgaaagctaagattcaggacaaggcaggtatctccagatcagcagaggctcatttntgctggga

SEQ ID NO: 184502 - DNA, 278 bp, Glycine max
gactgacaagatgcgaagtcgagaccacacagtctcagcaacccatggagacatggaccagaataccagggacattattatgcgtgaattccgttctgggtcatcccgtgttttgataactactgatcttttggcccgtggtattgatgtccagcaagtgtctttagttataaattatgatctcccaacgcagcctgagaactatctccatcgtattggacgtagtggaaggtttgtaggaaaggtgttgccattaacttcgtcacaaaggatgatga

SEQ ID NO: 184503 - DNA, 127 bp, Glycine max
gttttgtttatttgaaattaacaagtagcaaagatgtttggactcatcggaggaaacaagggtcacaagataaaggggaacttggtgattatgcgaaagactgtgttggatatcaacagcattacca

SEQ ID NO: 184504 - DNA, 283 bp, Glycine max
gccaatgagccatttggaatcaattgcttcctctgcggttcgggcagctatcaaggttaaggcctctgttattatttgcttcacttcatctggaagagctgcaagattgattgctaagtacagaccaaccatgcctgtgatatctgttgtcattcctcaattgaagacaaatcaactccgatggacgttcaccggtgcttttgaggctaggcaatctcttattgtgagaggtctttttcctagctggcagatccacgacacccagctgagtccagaagtggaa

SEQ ID NO: 184505 - DNA, 285 bp, Glycine max
atctttgggaataaaagctgcaaatggagttgtcattgccaccgagaagaaattgccatctatattggttgatgaaacatcagtccagaaaattcagttattaacaccaaatataggtgtcgtatatagtggcatgggtcccgattttcgagttttggttcgaaaaagcaggaaacaagctgagcagtatcatcggttatataaagaacccattcctgtcactcaacttgttagggaagttgcgctgtaatgcaggaatttactcagtctggtggtgttaggcct

SEQ ID NO: 184506 - DNA, 289 bp, Glycine max
cttcttcgagtttcacagccaagtcgtaaaagggtttcaagggatgcgcaaacatgcagagcttctggcaattgggtgatgaactccgtgggcactcaaaagcatcggaggatcacaagtggttaatggttgcctcgaaactggccgaacagacaagattgaagggggagcgtgtgaacaaccttgatctttcaaagggacccattgaaacaaggtcaagggataaatttgggttccaggaagaaacaaatttgattctcttaacttgagcatgttgaacctggactct

SEQ ID NO: 184507 - DNA, 282 bp, Glycine max
catcgtcggtgacggcggtacaggaaagacaacgttcgtgaaaaggcatcttaccggtgaattcgagaaaaaatacgaaccgaccattggagtggaggttcacccattggatttcttcacaaactgcggaaagattcgcttctactgttgggatactgctggacaagagaagtttggtggcctcagagatggatattatatccatgggcaatgtgcgattataatgtttgatgttacgcccgtctaacatacaaaaatgtccctacctggcaccgggatctt

SEQ ID NO: 184508 - DNA, 287 bp, Glycine max
tcgctctcttttctgcaattttcttttttgttccttctctgcggttatctttttgagcttcaatggcggacgctgaaaccttcgctttccaggctgagatcaaccagcttctcagcctcatcatcaacaccttctacagcaacaaggagcccttcttgcgtgaactcatcagcaacgcttctgatgctttggataagattcgatttgagagtttaaccgacaagagcaagctcgatgctcagcagagctcttcattcgtcttgtgcccgacaaggccaacaagactc

SEQ ID NO: 184509 - DNA, 282 bp, Glycine max
ctcttctcggagcttggcattgcttatcgattctctctcctctcgattctctaattccaaggtttgtaaaagatggcagatgccgaggatattcaaccccttgtttgcgacaatggaactggaatggtcaaggcaggatttgctggtgacgatgctcctagggctgtctttcccagtattgttggccgacctcgacatactggtgttatggttgggatgggtcaaaaggatgcctatgtggtgatgaagcccaatccaaaagaggtattcttactctcaagt

SEQ ID NO: 184510 - DNA, 221 bp, Glycine max
caaacaccaccacccattgatcggtttttgcttcatccaaactcaatgggtgccgacgaagactacgattacttgttcaagctggtcctcatcggagattcgggtgttggcaagtccaacctcactgtcccgattcacccgaaacgagttcagcttggagaccaaatccaccatcggcgtcgaattcgccacgcgaagctccccgttgatagcaagctcgt

SEQ ID NO: 184511 - DNA, 275 bp, Glycine max
gctccatagaggaactccttgtttccgtggatatggaaggcgcaatggagagcgtagaaggaagtctgttcgtggttgcattgtcagcccagatctctctgttttgaacctggtaattgtgaagaagggtgagagtgatttgccaggtctcactgatgttgagaagccaaggatgaggggtcctaagagagcatccaaaatccgtaagctgttcaacctgtccaaggaggacgagtgagaaagtatgttaacacataccgtcgaacctttacaac

SEQ ID NO: 184512 - DNA, 280 bp, Glycine max
caggaaatagctttcctcggttataaccttcaaggtggaaagaaaaacccacccactatcccaattccaataaataccttcctctctatattttcgcacaataccctctcacccttcaacgatgagttactacaatcagcagccaccacccgtcggtgttcctcctccccaaggttacccaccgccggattcttacggaaaggacgcgtaccctccgccagggtacccgccgcaaggggataccctccgcaggcgtatccagcacaggggtacctccacc

SEQ ID NO: 184513 - DNA, 283 bp, Glycine max
ctcgagccggtggattccaatcctaaggaaaatatgttggtacttggttctagcgccctatgctccaatgcagtcaagccttctcaattccaccttggaggataagaatatatctgagattccaaacttcaagttacttttgaaacagctggttaccatggaggttatccaatggaccactctatgggatacatataagagtgattttgagaatgagaaggcctctgggaaatctttggtgaaaaagcagcagaagatctgaggcaaagaataattgagcata

SEQ ID NO: 184514 - DNA, 274 bp, Glycine max
gcttttgactgggccagtgttgccagaggaggctgatgggaagttagaagaaaattgggccaattggcttgatgcgtttgcgaatgagtctattgtgtattgtgcatttgggtctcaaatcaatttggagaaagatcaatttcaagagcttttgcttgggtttgagctttcagggttaccctttttggttgctctcaaaactcctagagggtgtgagagtgtggaagaggcagcctgaggggtttgaagagagggtgaaggggagaggggtggt

SEQ ID NO: 184515 - DNA, 275 bp, Glycine max
ctcactcactgcaacgccgccggagatccgtcgctctcctcctccaccaccaccgcgatgggcgccaattccatgctcgccgagttctctcacgatctcgacgaccagatctcccagctcatgcagtgcaagccactctccgagcaacaggtccgaggtttatgtgagaaggctaaggagattttaacggatgaaagtaatgttcagcctgttaaaagccctgtgacaatctgggcgatattcatgggcagtttcatgatcttgctgaactgttt

SEQ ID NO: 184516 - DNA, 276 bp, Glycine max
cgggtctcttcatgatattttacacggcagaaaaggtgttaaaggagcacagcctggcccagttttgacatgggcacaaagagtaaaaattgccgtaggggcggcaagaggacttgaatacttgcatgagaaggctgatccacacattatccaccgggacatcaagtcaagcaatgtgctaatctttgatgatgatgttgctaaaattgcagattttgatttatcaaatcaggtcctgacatggctgcacgtcttcattctactcgtgtccttgga

SEQ ID NO: 184517 - DNA, 277 bp, Glycine max
ctcaaaagagcactgaccaaaccattttattttatttttgaatcaagggtgagggccttccatggcttccgcttgtgcttcctctgcaattacagcgcttgccatctctacgccgagttccgggcagaagaatggatcaggaggttgttttcttagtggaaggaaattgagggtgaaaaaggagagagcagcaattggaggacgatcgatgggcactacagtgtgcgcagttgcgagcctgacagacctctacggttcccaggcagcacccctcctc

SEQ ID NO: 184518 - DNA, 281 bp, Glycine max
gtgaccccaatatacttagccatatctttacttcccaaaacttgctctacaatgagtttccttcgttcttttgcaagaaacaaggatatatcaaaagtaggacgcagaggtatccattgcatgcagaaactatgtgcagaaaaaatatctcctgattcactagagaaggcccaaaatcgtgtgatagatgctgcactcacacttgttcgagaaaatacaaggcttaagaaagaactgtgcatagtttgggaggtgctgtggcaacttcaactcttcttgga

SEQ ID NO: 184519 - DNA, 274 bp, Glycine max
caattctcagatccaagcatgggagacagagtgagagagagattatggacgccattgattcagtgttcgatccgctgagagcattcgcaaaggtcagcgttatgctcgtgaagcgctgccacaaacccgatcgcaaagagattctccaaggttgccgtccgtactgcaattggtttacgtcgtgatgagattcgtcggtatcttcgtgaagctcacgttcagtccaattagaacatcattgtcggatctggttaggatgaaaggtactacaatt

SEQ ID NO: 184520 - DNA, 271 bp, Glycine max
cctttttctcaaccaaaaggggttcaattctagctagttctattacatcgtccgccaccatgaacatggcgatcgtgcttctgttcatggttttcgcagtttcatcagctttagacatgtcaataatatcacatgacaacgctcatgcggatagggccacgaggcgcaccgacgacgaggtgatgtcaatgttcgaggagtggctggtgcaacacgacaaggtgtacacgcgctcggtgagaaggagaagaggtttcaaatcttcaagaac

SEQ ID NO: 184521 - DNA, 273 bp, Glycine max
caaaattttctgttcgatctcaaccaaggttgttccttccaccgccatgagtttcatcttcggaaagcgaaaaacacccgcagagcttctgcgggaaaataagaggatgctggacaaatcaatcagagaaattgagcgcgagcggcaaggcttgcaaacgcaagagaagaaattgattgcggagataaagaaaagtgccaaacagggccagatgggagctgttagagctcggcaaaagatcttgttagaacaaggcatcaggttgagaaattt

SEQ ID NO: 184522 - DNA, 275 bp, Glycine max
cgcttatttctctttcaccagaaacatcttacaagggaaacctatcaccgtttaccgcggtaaaaaccatgtcgacctggccagggatttcacctacattgatgatattgtcaagggttgcgtcgggtcgttggatacttcggccaagagtaccgggtcgggtgggaagaaacggggacccgctccgtatagaatatttaacctggggaacacgtcgccggttactgttccactcttgtcagtatattggagcgccatttgaaggtgaaggccaa

SEQ ID NO: 184523 - DNA, 277 bp, Glycine max
ctaatgactcaagcccagattcaaccagttaaacttggaacccaaggctttgaggtttcaaaattgggattcggatgtatgggccttactggagcgtacaatgaccctctccaagaacaggatggcatatctgttatcaagtatgcgttcagtaagggaatcacattttttgatactgcggatgtttatggagccaatgctaatgaacttttggttggaaaggctttgaagcactgcccagagaaaagattcagatagccacaaaatttggtattgc

SEQ ID NO: 184524 - DNA, 281 bp, Glycine max
cctcgagccgaatcggctcgaggctcgtaaacgacgcgaacttcgaacgctcctccaccgggacctccctccaggccatggaacccagccacgtcgccctcgttgcgctcctcctccggtccgagggctttgagcactaccgctgcgaccgcaatacctccatgggcatgaacctcaacaacatggccaagatgctcaagtgcgccggcaatgacgacatcataaccatcaaggccgcgacggcagcgacaccgtcactttcatgttcgaaagccctacac

SEQ ID NO: 184525 - DNA, 265 bp, Glycine max
gtttgttgtttcccttcatctattttttcttcgcccccttttgtgtttctttttttggttgtttgttctttcttctcgttcgtcgctttgtgatctctctctgcaaccatgtccgccgagaaagagagagagacccaggtttacttggccaagcttgccgagcaggccgagagatacgaagaaatggttgagtgtatgaagaaagtagcaaaacttgatcttgtctaactgtggaagaaaggaacctcctctcagtgggatacaa

SEQ ID NO: 184526 - DNA, 267 bp, Glycine max
ctggatttggcgttccctaagcacaccattattttattatgaatgagtggcaatagcagcaacaacaacaatataagtaaaagaatctctgtgttgtcatcacacttcgctagatccagccccatcatggcttcagagaagcaagcggctcttgccgtcactccctctgatgctgatgctcctaccatatttgacaagatcatcaataaggagattccttctacttggtttatgaggatgacaaggtgcttgccttcagggacataa

SEQ ID NO: 184527 - DNA, 269 bp, Glycine max
gttttcttcgttgctacaattttggtagcatggcaatgccatgcgtacgatatgttccctctccgaatgaacactggctatggtgcccgtactccggaggtgacctgcgcaagttggaggcttgctgtggacgcacacaacatctttggctttgagaccattcctgaagagtgcgttgaagcaacaaaggaatacatccatggcgaacaatatagatcagactccaaacagttaaccaacaagcttacttttatgccagagacctcgaa

SEQ ID NO: 184528 - DNA, 270 bp, Glycine max
caacataatagcagaatcccttttccaacctttcttctcttcagatcggatcagatcagaatcccaccgccatggatttcatgaaggtcttcgatcaaaccgttcgagaaataaagagagaggtgaatctgaaggtgctcaaggttccggaaatcgaacagacggtgctggatgcaactgataatgaaccttggggtcctcatggtactgtgctggcagagatttcacagctaccaaaaaatttactgaatgccaaatgatcatgaatgt

SEQ ID NO: 184529 - DNA, 258 bp, Glycine max
gtggttgacagtcaagaagtagcaaagatgtttccattcgggcacaagggtcaaaagataaaggggactatggtggttatgcagaagaatgtgttggatatcaacagcatcaccagtgttgacgggatcgtcggcaccggcttagacttcttaggcagtgcactcgatacagttacttttttagcctcctccatctccatccaacttattagtgctaccaagctgatggtgggaaaggaaagttggaaaggctacaaa

SEQ ID NO: 184530 - DNA, 263 bp, Glycine max
cgaacataccaatctacaataaacgatgattctcattatctccctcattttttctcttctctctttctcccatgcttctgtcctagatttctgtgttgcagattatgcaggtcctattggacctgcaggatattcctgcaagaagccttcaaaggtcacagcagatgattttgcttacagtggccttggcattgctggtaacacctcaaacattatcaaagtgcagtgacccctgcatttgatgctcagtttgctggtctcaa

SEQ ID NO: 184531 - DNA, 260 bp, Glycine max
aggaggcataccgatgacgatggcgatgacggcgtcgcagttgcggtgcggttgggggtggaggccaacgccgaatcagcagcagcaacgacgtcgtatggttccggtggtgtgttccatcgctatagagaacgcgaagaacaaagagagagcgaaactgaagaagctcttcgatgaagcgtacgagacgtgccgcactgctcccaccgaaggcgttatctcactctccaacaattcaccgacgctctcgacaagtacga

SEQ ID NO: 184532 - DNA, 263 bp, Glycine max
atggaattgcatcttcaggccggtgggcctttctacgaggttgaattgggaagatttgatgggctaagatctaaagattcagatgtaaacgggaggctgcctcatccagagttcaacttgaaccagctcaattcactgtttgcggccaacggtctcacccaaacggaaatgatagctctatcaggtgctcacactgttggattctcccattgcaacaaattacgaacagagtatacaatttcaagagcaaaagtcgagtggac

SEQ ID NO: 184533 - DNA, 263 bp, Glycine max
aactttgaagcttagaaaagcggttaggtagctaggttgagttccagatctggtagagaagttcatcatggcgccgttaccggcggagcaaaccggtgaatcagcgccgacggagttgcagagatccattccgacgccgtttctgaccaagacgtaccagctcgtcgatgatccctccgcggatgacctaatttcctggaacgaagacggcaccagcttcatgtatggcgacccgcggaatttgcaagggatttgcttcctaa

SEQ ID NO: 184534 - DNA, 269 bp, Glycine max
gtttgttgtgagctataagctagtttatcgtgaggagaatatgaagttgtttgttttctttgttgctgcagtagttttggtagcatggccatgccatggcgcaggctaccaaaggttccctctccgaatgaaaactggctatggtgagcgttcttcggaggtaaaatgcgcaagttttaggcttgctgtggaagcacacaacatccgagcctttaaaaccattcctaagagtgcgttgaaccaacaacggactacattaatggcgaaca

SEQ ID NO: 184535 - DNA, 272 bp, Glycine max
cttttgtccttctgttaaatttttctttaaatttctcaattgatcaaagatcttcagcaaaacggtcaagtttgtgtagtttggccagatgggaggtgggtttagagtgctacacttagttagaccttttctctcgttcctacctgaagttcagactgctgataggaaagtgccatttagagagaaggtcatatatactgtgatctctctgttcattttccttgtttgagtcagcttcctctgtatggaatacactcaacaacaggtgctga

SEQ ID NO: 184536 - DNA, 290 bp, Glycine max
gttggaaagctaatggaaaactacatagctgaaatagccaccgaccgaaatttagccgttacaaagttcaccagtttggcagaattaattcctgaacagtcaaggccaacagaagatgggatgtatagagccatagacatctttcttaaggctcatcctgctctaagtgacatggacagaaagaaagtttgcagcgtgatggactgtcagaagttatcgcgagaggcatgtgcgcatgcctcaaaatgaccggctacctgtccagacagtggttcaagttctctattatg

SEQ ID NO: 184537 - DNA, 285 bp, Glycine max
aggacttgttgtaactttttgattcctaaattctctaaaattcgaaattctaatttcgttaggggaaagagattgtttgtgtgtgagtcagtatggctggaaaaggcgagggtcctgctatcggaatcgatttgggaacgacgtactcttgcgtcggcgtgtggcaacacgatcgtgttgaaatcatagccaacgatcagggtaacagaactaccccatcctacgtggctttcacccacagaacggttgatcggcgatgcggcgaagaaccaggtcgctatgaac

SEQ ID NO: 184538 - DNA, 283 bp, Glycine max
gggaaggtctttttgaggctataactggttatggtttgggtggatcttccatggctctgtttggcagagttggtggtggtatctataccaagggctgctgatgttggtgctgatctggttggaaaagttgagagaaatatcccagaggatgatccaagaaatccagctgtgattgctgacaatgttggtgataatgttatatcccctactcatcagttctatgggcattattgtctttgattactactctctttgcaactgatttcttgagatcaaggctgtc

SEQ ID NO: 184539 - DNA, 285 bp, Glycine max
cgcgtgtccttattgggtacatactttggcagtattgtattggtgattggtcagactagtgttattctccggtggctccttccttccttcgccatggcgttctacgtgctctcgcgtcgtttatcagctggatccaactcaacgacgctcctcgccctgcgttttgcttcctcttccagatccttctcctcttccttcagggaagaaagagatacctttggacccattcaagttccccgacaaattatggggagcacaaactcaaagatcgttgcagaacttcga

SEQ ID NO: 184540 - DNA, 283 bp, Glycine max
agcatcgttagcagttttgtagattcaacctcaatttgcagagttacgttctaatatatttacacaagactgataagagaaaatgtctctgattccaagtttcttcggtggccgaaggagcagtgttttcgaccctttctccctcgatgtgtgggaccccttcaaggattttccatttcccagttctctttctgctgaaaattcagcgtttgtgagcacacgagtggattggaaggacaccagaagcacacgtgttcaaggctgatattccagggctgaagaa

SEQ ID NO: 184541 - DNA, 284 bp, Glycine max
ataacacaaagcacaaagcaaagctcatccttgagttaaaaaatggcagcagcttcttccatggctctctcatccccatccttggctggcaaggccgtgaagctgggcccatcagccccagaagtgggaagggtgagcatgaggaagaccgtcaccaagcaggtctcctcaggaagcccatggtacggcccagaccgagtcaagtacttgggcccattctctggcgagcccccgttacctaaccggtgagttcccaggcgactacggctgggacactgctgggc

SEQ ID NO: 184542 - DNA, 283 bp, Glycine max
cgaaggagccgtagcagcagcggaagctctagcttgggcagcgaatcacaatggcgagaggattgaagaagcatttgaagaggcttaatcccccaaagcattggatgcttgacaaactgggtggtgcatttgctcctaagccctcatctggaccacacaaatccagggaatgcctgccactcatactcattttgcgaaaccggctgaagtatgctctgacataccgtgaagtcagctattctgatgcagcgacatgtccttgttgatggcaaagtcaggacag

SEQ ID NO: 184543 - DNA, 283 bp, Glycine max
ctcatttgtgttcagtatagatggcaccgtactctctaatattccatactacaaaacacaccgatatggggtggagaaatttaactcgaccttgtatgatgaatgggttaacaagggcaatgcaccggcactgcccgagactcttaagaattacaacaagctggtgtctcttggcttcaagattatattcttgtcaggaagaacactggacaaacaggccgtaacagaagcaattaaagaaggctggctaccacacatgggaaaaattaattctcaaggatcc

SEQ ID NO: 184544 - DNA, 283 bp, Glycine max
ctctgttcttcactcactctcattcattcaccatgacgaaacaacatgccaattggtctccttacgataacaacggaggatcatgtgttgcgattgctggagcagattactgcgttatcgccgcagatacgagaatgtccaccggttacaacatcctcactcgcgcttactccaaaatctcccaactggctgagaagtgtgtgatggcttcatctggctttcaagctgatgtcagctttgcagaaggttttgtctgctaggcatttgatttatcagcatcaac

SEQ ID NO: 184545 - DNA, 282 bp, Glycine max
gcgactgcgcttcacgatgggtgcttacaagtatgtttcggagctatggcgcaagaagcagtctgatgttatgagattcttgcagcgggtgaggtgctgggagtaccgccagcaaccttctattgtccgtttgacaaggtctactcgcccagacaaggctcgccgcttgggtttcaaggctaagcagggttatgtgatttaccgtgttcgtgtacgaaggggtggccggaagaccagttccaaaaggtattgtttatggcgagcccaccaaccaaggtgtta

SEQ ID NO: 184546 - DNA, 284 bp, Glycine max
actcgagccgaatcggctcgaggaaaaaataaaaatcaaagagcatactgtcagggatcattgccaagattggggagaccctacatgtgggagggcacaagaaggaggaggagcataagggtgagcaccatgctggagaatacaaaggggagcaccatggtgaacacagtagtgagtacaaaggagagcatcatggtgaacacaaagctggagagtaccatggtgagcacaagccagcacaaagaggggttcctagacaaagtcaaggacaagatccatggtga

SEQ ID NO: 184547 - DNA, 283 bp, Glycine max
agggtgtgagaagagaatggagagtaaagaggaagatgttaacgttggagcaaacaagttctcagacaggcaaccaattggtacagcagctcagggtggtggtgacaaggactacaaggaggcacccccagctcctttgtttgaacctggtgagctcaaatcatggtccttctacagagctggaattgctgagtttgtggcaactttcttgttcctctacattaccatcttaactcatgggtgtcaacaggtcaccctccaagtgtgcctctgttggcattca

SEQ ID NO: 184548 - DNA, 284 bp, Glycine max
ctaaatttcgatatgtgatgtggttttctgacagtcattttgatacatacatggtgtgttttccaaataagttaccaaatcaaattggttcttcaaaagcaacattttcttcctcccttatttcggttacccactcttggttgggaatgaatgaaggaagctggcagagcttggctacaacagaaatgccaagaaatgcaaagagaagtttgagaacgtttacaagtaccacaagaaccaaagaaggacgaagtgggaaatcagaaggcaaaacttatcgcttc

SEQ ID NO: 184549 - DNA, 283 bp, Glycine max
ggcagggaaaccccagagggccaaaaagctattcaagcattgaaggatgtttatgctcaatgggtccccgaagaccgaatactaaccacaaatctctggtcggcagaactatctaagcttgctgctaatgccttcttggcccaaaggatttcatctgtcaatgccatgtcagcactttgtgaggctaccggggcaaatgttcaacaggtgtcctattctgttggaacagactcagattggacccaagttcctcaacgccagtgttggttttggtggatcctgc

SEQ ID NO: 184550 - DNA, 282 bp, Glycine max
ctcgagccgtttgctggtaaacaacttgaggatggaagaacccttgctgattacaatattcaccaggagtctaccttacacttggttcttcgtttaagaggtggcatgcagattttcgtcaagactttgacgggaaagaccatcaccttggaggtggagagttcagataccatagacaatgtgaaagccaagattcaagataaggagggtatcccctcagaccagcagaggcttatttgctggtaaacagcttgaagatggacgaacccttgcagattataa

SEQ ID NO: 184551 - DNA, 283 bp, Glycine max
gggcaaaggaagtagaataccttcttaggaagggatggattccttgcttggaattcgagttggagcacggtttcgtgtaccgtgagcacaacaggtcaccaggatactacgatggacgctactggaccatgtggaagctgcctatgtttggttgcactgatgcttctcaggtgttgaaggagcttcaagaggctaagactgcataccccaacggcttcatccgtatcatcggattacaacgttcgccaatgcagtgcatcagcttcatcgcctacaagccccc

SEQ ID NO: 184552 - DNA, 274 bp, Glycine max
cacaaggcagaaagcaagctcatcctagagttttaaaaatggcagcagcctcctccatggctctctcttccccatccttggctggcaaggccgtgaagctgggcccatcagccccgaaagtcgggagggtcagcatgaggaagaccgtcaccaagcaggcctcctccggaagcccatggtacggcccagaccgcgtcaagtacttgggcccattctctggcgagcccccgtcctctcactggcgagttcccaggtgactacggctgggacactg

SEQ ID NO: 184553 - DNA, 227 bp, Glycine max
gcaatgtagaaatcgctgcacatgtttcacgcctgtcatcatcaaaacatgaaggggagcacgattctttccagctagaagggttaatggagagtccgtccgtggatgacgatgggagctgcttctcgcctttacagttaaacgcaacatccatcaacattgaagtctactataataaagcattgaactataccttgatggttacttttatctcatttttgcaagtt

SEQ ID NO: 184554 - DNA, 281 bp, Glycine max
cgttgccattctcatcctcttctttctctctctaccattgccatggatccctacaagcaccggccatccagcgccttcaattctcccttctggactacaaattctggtgctcctatttggaacaacaactcctctttaaccgttggagctagaggtccaattctgctggaggattatcatcttgtggagaagcttgcaaattttgatagggaacgtatcccagaacgtgttgcatgccaggggcgctagtgcaaagggtttctttgaggtcacccatgaca

SEQ ID NO: 184555 - DNA, 282 bp, Glycine max
ctcgagccgttcagtttaaagttacatagtttttcattgttttacataatctacaatggctgactcaacaatggctctctcttcatcatcattggctggccaagctatcaagcttgccccctccacccctgagcttggtgttggaagggttagcatgaggaaaacagcctccaaaactgtttcctcaggaagcccatggtacggcccagaccgtgtcaagtacttgggcccactcaggtgagcccccatcctatctcactggtgaattcccaggtgactatg

SEQ ID NO: 184556 - DNA, 282 bp, Glycine max
ctcacttcccttctccaacatgccaaacgacagcgttctgagtcttttcttcttcgttaccctcttcacatgccttctctctgctacttcccacgatgaccatattttcctaccgagtcaactccatgacgatgactcagtgagttgcactgcaaccgacccaagccttaactacaagccggtgatcggaatcctgacccaccccggcgacggtgcctctggccggctcagcagccaccggggtttcttacatcgccgcctcctacgttaaattcgtggagt

SEQ ID NO: 184557 - DNA, 280 bp, Glycine max
gtcatatgcttgtctcaaagattaagccatgcatgtgtaagtatgaactaattcagactgtgaaactgcgaatggctcattaaatcagttatagtttgtttgatggtatcttctactcggataaccgtagtaattctagagctaatacgtgcaacaaaccccgacttctggaagggatgcatttattagataaaaggtcaacacaggctctgcctgttgctttgatgattcgataactcgtcggatcgcacggcctttgtgccggcgacgcatcattcaa

SEQ ID NO: 184558 - DNA, 280 bp, Glycine max
caaccaagtgaaagtcagacaaaataaaaatcaaagagcataatgtcagggatcattcacaagattggggagactcttcatgtgggagggcacaagaaggaggaggagcataagggtgagcaccatgctggagaatacaaaggggagcaccatggtgaacacagtagtgagtacaaaggagagcatcatggtgaacacaaagctggagagtaccatggtgagcacaagccagcacaaagaggggttcctagacaaagtcaaggacaagatccatggtgag

SEQ ID NO: 184559 - DNA, 274 bp, Glycine max
agaccgcaacacaatggttacagacatgctgggactggtggtgtgcacaaccagaagactcatgaacctttggtcaaccaatcaagagcacctgcaaatcaaccttatcatttacatgaaaagcatgctgcatccactgctcagacagtgcctcaaaatatgccatggaagcctcctggtccagcccttagtcctaaacctgttgttggtgttaggcaagacacaatttgggaagcagtttgaggatgtgaagcagttctacacacttgggaag

SEQ ID NO: 184560 - DNA, 278 bp, Glycine max
cagcaaacagagtgtctaatcgaagatagaagaagagatggctaaatctccagaaactgaacttcccgtcgaagctttcggttgggctgcttcagacacttctggcacccttgcaccttttcatttctccagaagagaaaatggcgttgatgacgtcactctcaagattctcttctgcggggtttgccactcggatctccacactctcaaaaacgactggggtttcaccttaccctgtcgttcctgggcatgaaattgttggtgttgtgacaaaagtt

SEQ ID NO: 184561 - DNA, 282 bp, Glycine max
ggttcatctccctcttcctttccatctttgctactggaatcctggagatgaggtggagtggcgttggaatcgacgagtggtggaggaacgaacagttttgggtcattggtggtgtctcggcgcatctctttgctgtcttccaaggcctgctcaaagtgcttgctggaattgacaccaactttactgtcacctccaaggcctcggacgaagatggagactttgccgagctctatgtccaaatggaccacccttctcatcccccccacaacccttctcataata

SEQ ID NO: 184562 - DNA, 267 bp, Glycine max
  unsure (1)..(267): unsure at all n locations
atccaattgaaattttaaaaatgactgggataaacttaagaattcaattattgaaattgaataagtanacaatttaattggattggtcgaatggtatcaaaaaaatggagtactaactcccatttcttatttattattgaattaaccgatcaacttgctttgttatcgaacatttctttttgatttcaaaaattttccggaaaaaatttgaatctatttttatatgcgaatatcctactacttctggtcctgaggtttctgcgcttg

SEQ ID NO: 184563 - DNA, 280 bp, Glycine max
cttatctacgcaagagaagaatagaaaatggatatcaggttgatggacttggactctccattgttcaacactctgcaccgaatcatggatctgacagaggacgcagagaagaacttgaacgctccgacgcggacatacgtgcgcgacgcgaaggcaatggctgcgactcctgcggacgtgaaggagtaccctaactactacgtgttcgtgatcgacatgccaggcctgaaacggggacattaaggtgcaggtggaggatgataacgtgcttctgataagc

SEQ ID NO: 184564 - DNA, 281 bp, Glycine max
caggattaaagccaacagttgcagcaattgaagcagggaaagacatagcattggccaacaaagagacaatgattgcgggagccccttttgttcttcctcttgctcacaaacataacatcaaaattcttcccgctgattcggaacattctgcaatttttcagtctatccaggggttgccaaagggtgcacttaggaaaatccttttaactggatcaggaggtgctttcagagaagcctgctgaaaagatgaaagatattaagcttgctgatgcattaaagca

SEQ ID NO: 184565 - DNA, 277 bp, Glycine max
cgaaacgctccatactcgatatagcttacaccacttgggccatcaaaccccaaccaattctaaccatttcttttcgttccgatcagtttttcgtctctctctctctctctctctgttttccgaaaccttaatctcttgcccgataagggaaaattatgaatcctgataagttcacccacaagacaaacgaagctctggtgagtgctcacgaaatagcaacaagcaacggtcacgcagttcacccctcttcacctggcgtcctctctgatttccgaca

SEQ ID NO: 184566 - DNA, 297 bp, Glycine max
cgctcttgcaattattcctcttctcgcaatccgcactaaaattctagggttccgaaatggacgctgacggaaagatcaagaagggcgccggcggaagaaagggcggcggcccaaagaagaagccggtttcaaggtccgtcaaagccggtctccaattccccgtcggaagaattggccgatatttgaagaaaggaaggtacgctcagcgtgtcggtaccggtgctcccgtatacttggctgcagttctcgaatacctagctgccgaggtgcttgagttggctgggaatgcagcacgtg

SEQ ID NO: 184567 - DNA, 292 bp, Glycine max
gcggtgggcccatctacgtcagcgacgcgccggggaagcataactttgatctgctcaagaaactggtcttgcccgatgggtcgattttacgggcccgtctaccaggaaggcccattaaggattgcttgttcaccgacccggcccgcgatggagttagtctgctgaaaatatggaatatgaacaagttgggtggggtgttgggggtttataactgtcaaggtgctgcctggagtgctactgagaggaagaatgcgtttcatagtacggactattctggtggtgatgccatcac

SEQ ID NO: 184568 - DNA, 294 bp, Glycine max
agaaaaacaattaagatatagccaaagtccaacccatatagtctcattgctttcaattttccaatactttttctgagtaccaaaacagaaggcacatccgcacatacacattccaacgtacaaaatgaggcactttttagtactagtaccactgatcttgcttgtttttgctggttttccatccaaagcaaaagggtctctgctaccattcacaaatcatccaaataccctcattggctgatctatggtctaatcatttccctgatccatttcgcgtgttagagcaaatcccat

SEQ ID NO: 184569 - DNA, 288 bp, Glycine max
agatcaattgcaacggttgaattttgactgaggatatagttagaataaaaaaaacatgtcttgctccgtcgcggtttccaatttgccggtgttctctccttcttcttccctcttcatgctgaagccctccatcatctcttcttcgccggaatccctctccctctctctgtcgcatctcaaaccttcgaactcttctacgacgtcgtcttgttcttcgccttctgctgctgctgacccttcttctccgtttcgacttcgcattcccaagcttccaccgcgttctccggt

SEQ ID NO: 184570 - DNA, 281 bp, Glycine max
cagtttctcagttctcacactcattccgtgctctaaatctcaaattctagggttagggttcccaatttctccgccaatcagaagatgagttccaccggtggttctaccaagggctgaaggggcaagcccaaagcctccaaatccgtttcaagatcgcagaaagctggtctccaattccccgttggaagaatcgctcgattccttaaggctgggaaatacgctgagcgtgttggtgctggtgctctgtgtacctctctgtagtgtcgagtatctcgctgctg

SEQ ID NO: 184571 - DNA, 290 bp, Glycine max
ctcgagcgcttctcactcttcagatctctctcccttccttccatcccaaccacaaggctactgagaagacataaaaaatggtgaagatttgctgcattggagctggctatgttggtggcccaaccatggctgtaattgccttgaagtgtcctgagatcgaggtggtcgtggtggacattgctgcaccgcgaatcaacgcgtggaacagcgaccacctcccgatatatgagcctggccttgatgatgtggtgaagcagtgcagggggaagaatctcttcttcagcactgat

SEQ ID NO: 184572 - DNA, 292 bp, Glycine max
  unsure (1)..(292): unsure at all n locations
caaaaccctaggtagagagctcttcctcactctcattcgccccngccgnagcagcacgtcctctcgtcaccgtgcaggccctcgacactgacatggccaccgacgcctccgccaccgtccctatccctgacgtcatgaagtcctccatccgcccggacatcgtcaacttcgtacactccaacatctccaaggacagccgacaaccctatgcagtcagccgccgcgccggccaccagacttccgccgagtcctggggaaccggtcctgccgtctcccgtatcccccgtgttcc

SEQ ID NO: 184573 - DNA, 240 bp, Glycine max
aggattccggaaatcatgtctgtagctgctctttttatttatgtgataaatgtaaaacgctttggtttggcttggccgttgtgcattaggttgaaaaaataaatgttataattactcagaatctcagatctttctcatactttgcccctgattataagtctctcaaatttcaactaattcatcttactttaaaaaaaatgttaattaattaatcatattaaatatatgttaattgtttat

SEQ ID NO: 184574 - DNA, 288 bp, Glycine max
ctcagatagggcacgtctctcgcggcctcttctctccctcgcgccgcccacactaaaaggttattgctctattattgtttgacgatggctgatgctcatgggactgataagaacattgaggtgtggaaaatcaagaaattgatcaaagctcttgaggctgccagaggaaatgggacaagtatgatttcccttatcatgcctccacgtgatcaaatatctcgtgtcaccaagatgcttggtgatgagtttggaactgcatcaaacatcaaaagcagggtgaatcgacag

SEQ ID NO: 184575 - DNA, 295 bp, Glycine max
cgagataactagaaacagtgtgatgaaaatgaaggtccttgttttcttcgttgctacaattttggtagcatggcaatgccatgcgtacgatatgttccctctccgaatgaacactggctatggtgcccgtactccggaggtgaaatgcgcaagttggaggcttgctgtggaagcacacaacatctttggctttgagaccattcctgaagagtgcgttgaagcaacaaaggaatacatccatggcgaacaatatagatcagactccagaacagttaaccagcaagcttacttttat

SEQ ID NO: 184576 - DNA, 275 bp, Glycine max
ctcgagccgaatcggctcgagcggctcgagagcaagtgcgtttcaccagcagagaccgaaacacttcgagatggcccgtacaaagcaaactgctcgtaagtcaactggaggaaaagctcccaggaagcagcttgcaaccaaggctgcacgtaagtctgctccaacaactggtggtgtgaagaagcctcatcgttatcgccctggaactgttgctcttcgtgagattaggaaataccagaagagcactgagctcctaatcaggaagcttcctttcc

SEQ ID NO: 184577 - DNA, 304 bp, Glycine max
attcggctcgagcttcttctcttgcggctagggttttagcgcacttcttctagatacaaggaagatgggtaaggaaaaggttcacatcagtattgtggttattggccatgttgactctgggaagtccactaccactggacacctgatctacaagcttggaggcattgacaagcgtgttattgagagatttgagaaggaagctgctgagatgaacaagaggtctttcaagtatgcctgggtgcttgataagctaaggctgagcgtgaaagaggaatcacaattgatattgccttgtggaagtttg

SEQ ID NO: 184578 - DNA, 293 bp, Glycine max
ggtttcgcaagtgcgatcgaagaagaacaacgacgatggcgatggctgcagctctgcgtcgcgaaggaaggcgtttgacccaaccaatcaacgccctccactcttctctcaattcctccctcatctctcaagaccaagcccctcatggcgcgcgctccatttccactcaagttgtgaggcaccgaatgaagagtgtgaggaatatccagaagatcaccaaggccatgaagatggttgccgcgtccaagctgcgggccgttcagaccagaactgaaaattcccgcggcctctgg

SEQ ID NO: 184579 - DNA, 296 bp, Glycine max
  unsure (1)..(296): unsure at all n locations
gnaagttgaaganacaatggngtatgcnantgntgnttcaantagnncaacaacatnttcaannctctcnccgcaacccatggaanggctgcacgaggtgggtcnccctccgtttctcaccaaaaccttcgntngnggtggaagacccatccaccaacgacatcgttnncgtggagcagagcccgcaanagtttcgtcgtttgggantctcacaagttctctaccancatcctggnntggctacttcaagcacaacaatttctccagnttcgtangacaantcaacacttaggttt

SEQ ID NO: 184580 - DNA, 294 bp, Glycine max
ggcgaagagaagagaaaaattaagatggaggggaaggagcaggatgtgtcgctgggagcgaacaagttcccggagagacagccgattgggacggcggcgcagagccaagacgacggcaaggactaccaggagccggcgccggcgccactggttgacccgacggagtttacgtcatggtccttttacagagcagggatagcagagtttgtggccacttttctgtttctatacatcactagtcttaaccgtcatgggagtcgccggggctaagtctaagtgcagtaccgttgggat

SEQ ID NO: 184581 - DNA, 291 bp, Glycine max
attctcttcactttaaagttacatagtttttcattgttttacttaatctacaatggctgcttcaacaatgactctctcttcatcatcattggctggccaagctatcaagcttgccccctccacccctgagcttggtgttggaagggttagcatgaggaaaacagcctccaagactgtttcctcaggaagcccatggtacggcccagaccgtgtcaagtacttgggcccattctctgggtgagccccatcctatctcactggtgaattccaggtgactatggttgggacact

SEQ ID NO: 184582 - DNA, 291 bp, Glycine max
  unsure (1)..(291): unsure at all n locations
ctcgagccgctttcaagaaggctaatggaaaggatttggccctgcatggatgcgccggggagcctcccctcacattcctcgactcacttcttcttggagagtgggaagatcgcatgcagagaggactttttcgctatgatgttaccgcctgtgaaaccaaggtgattcctggtgaatatggtntcgttgcncagcttaatgagggtcgtcacctcaagaagagaccaactgagttccgagttgacaaggtcttcaacctttgatgaaaacaaattcactttaccaagttgg

SEQ ID NO: 184583 - DNA, 287 bp, Glycine max
cttgggctccgcagcctcaggtattgggccatccatccacgggtgggttcttgacccactgcggctggaactctattctggagagcgtggtgaacggtgtgcctttcatagcctggcctctgttcgcggagcagaggaccaacgcctttatgctcacgcatgacgtcaaggtggcgctgaggcccaacgttgcagagagtggcttggtggagagacaggagatagccagccatagtcaagtgcctcatggaaggtgaacaagggaagaagcttcgttaccgaatcaa

SEQ ID NO: 184584 - DNA, 291 bp, Glycine max
tatcgagccgaatcggctcgaggtgagaggggcagtagccgagattccgtgagttgcaaaaaaccagacgattctttccaccgcgaccatgaacatcccggacggcgtgagcatcaaagttcatgccaaggtcatcgaagttgagggcccccgcggaaaattggtgcgagacttcaagcatttgaatctcgattttcagctcattactgacgaaaacggtaaaagaaagctgaaaatcgacgcgtggtttggttctcggaaaacatccgccgccattcgcaccgccttgag

SEQ ID NO: 184585 - DNA, 287 bp, Glycine max
atgggatatgcgtttgagaattgccactgaagtggctggagctctattttacttgcactcagctgcttctcaacccatttatcatagagatgtgaagtcaacaaatatattattggatgagaagtataaggcaaaagtagcagactttggggcatcaagaatggtttccattgaagccactcacctcactactgcagttcaaggaacttttggatacttagatcctgaatattttcatacaagtcaattgacagagaagagtgatgtctacagctttggagtggttc

SEQ ID NO: 184586 - DNA, 288 bp, Glycine max
  unsure (1)..(288): unsure at all n locations
ctttatcgtgaggagaatatgaagttgtttgtactctttgttgctgcagtagttttggtagcatggccatgccatggcgcaggctaccaaaggttccctctccgaatgaaaactggctatggtgagcgttcttcggaggtaaaatgcgcaagttttaggcttgctgtggaagcacacaacatccgaccctatanaaccattactgaagagtgcgttgaaccaacaaaggactacattaatggcgaacaatttagatcagactctagaacagttaaccaacaagctttc

SEQ ID NO: 184587 - DNA, 273 bp, Glycine max
caaaaatcttcaacttttagcagttttttttttctatattgcagaagccatggatttcagggtgatgggtttggattctccattgttccacacgctgcaacacatgatggacatgtcagaggacgctgcaggggacaacaagacatacagtgctccgacacggtcatacgttcgagacgccaaagcaatggctgcaacacctgcggatgtgaaggaatatcccaactcctacgtattcgagattacatgccagggttgaatctggggacataa

SEQ ID NO: 184588 - DNA, 294 bp, Glycine max
cgcatttgcgagaattcaaagatagaaaagcgacacatagtccacacggaagaatacccaaagcagaactcagacagcggcacgtacgatggccttcccttggagacacgacagaatgtccccacggaacaggtaataaaattaggtatggaagcagcatcaaaggccattaaggaatggggcgaacccttatcagaaatcacacacctcatcttctacaccacttcttgctacggctccgttcccggtcctgaccactacctctccaaacaacttggactccgctcaacggtc

SEQ ID NO: 184589 - DNA, 287 bp, Glycine max
actccaccacctaatcacttaacctgtaaatcacgtttagttcgcacaaggttttaaaaaatggttgatgctgaggacattcaagctcttgttgttgataatggaactggaatggtcaaggcgggttttgcaggtgatgacgctcctagggccgtgttccccagtattattgggcgaccacgccataccggtgtaatggttgggatgggtcagaaggatgcttacgtgggtgatgaagctcaatcaaaaaggggtatactcaccttgaagtatcctatagagcatgg

SEQ ID NO: 184590 - DNA, 284 bp, Glycine max
attttattttattttattttcctggttggtggggaatcggggaagtgtaggctaagatggggatgacagatgagtttgagacttctttgcaagtgttacgaggatttgacacagatatatctgttgaagtatatgaaattaagatctgtggcttcaacgggaaaaagagctacaatccgatttgcagatctcaagaggaaaagatattggttccccttaatggttggtattggattacttgttcttcagcagttatctggtatcaatggagttttgttctattc

SEQ ID NO: 184591 - DNA, 289 bp, Glycine max
tcaacttcaacctttcttcacttcccttcacatggcagctcttgtgaaaccaatttccaatgtcactcccaaatttgtcagcagccccagaatgggctcatcacactcctccaaattcagcaccataataagaatgtctgccactgccaccccaccaccatccacctccacaaagccagcaagcagcaagaagggcaatatcaaggagaccctcttgactccaagattctacaccactgactttgatgagatggagacactcttcaacactgagatcaacaaaaacctc

SEQ ID NO: 184592 - DNA, 288 bp, Glycine max
caaaatccaaccaagtctctactattatccattattgtctgccacatcttcccttagtactagaaatgaggctgccacaactaaacttgttcttagtgtcatccttcttgctctttgttgccagagcaaatggttctctgctcccattcatagatcctcccaccactctcttggctgatctctggtccgatcgcttcccggacccgtttcgagtgctggaacagattccatttggtgttgacaaagatgaaccctccatggctatgtcacctgctagagtggactgga

SEQ ID NO: 184593 - DNA, 287 bp, Glycine max
  unsure (1)..(287): unsure at all n locations
caaatggcaagagtggtggcactccaacagaaccaactatctttctctaccttagcttcctctctttctgacttcagtggaaccagacttcaaactcaacttcagttcaagagaaagcaatgccatccaaaagggtctttctacgtctccgcatcgagcaccaagaaaatcctaataatgggaggcaccaggtttattggtgtgtttttgtctaggctccttgtcaaagagggtcaccaggtgactttattcacaagaggtanagcgcctgtcactcaacagttgcc

SEQ ID NO: 184594 - DNA, 285 bp, Glycine max
  unsure (1)..(285): unsure at all n locations
tggaaaaaagggagtgaaaagtctgctcgctgttccaattagcttcgtcagtgagcatattgaaactctagaagaaattgatgttgaatacaaagagttggctctagaatctggtatagaaaagtggggccgtgttcctgcnctaggatgcgaacctacctcatttctgatttggcagatgccgttattgagagtctcccatatgttggtgccatgacagcttcagaccttgaagctcaacaatccctcgttccatgggcagtgtagaagagttatggcagcata

SEQ ID NO: 184595 - DNA, 286 bp, Glycine max
ctactaccatggctaccgctccttcgcttctacactcatctgggtcctcttttttctctcaatttcgagcctttcaattctcttcttcttcgctgttccctcatggaaacaggcatgggaatgccgtggtctctgtgaaggcctctgcttctggggttgtgttggtggagaagtctgaggcagagaaggccaataggctcaaaacagcttacactgagaaaattattcccttgctcatggaagagttctcttacaccaacaaacaccaggtgcctagaattgagaa

SEQ ID NO: 184596 - DNA, 291 bp, Glycine max
aagagataagggtgctgcagaacaagagaatgaagaggcgcttccatatgatgtgcgccttaaggaacctcatgcagcagtatccggaattattggtagcacctttgcttcctggatttggaatggaaggagcttgtctagcattgattccagagaagatccagaggtgtcaacaagcaagagatctcgacataatgctgatttgtttggctcagtttgctactcctttcagcatggcagattcacaaaaaaatatggggacttaaccagggtagatgctcgtttagatat

SEQ ID NO: 184597 - DNA, 291 bp, Glycine max
atcaaactttgtaacttcaaaacatactcctctgttctctctgtttctcttcaatcttcctgaaaaaaacaaaaacacgaaaaatcatccaccctctcacattctatctctctctcctttcaactaatatgaaaattgaaaaccaagacaacactgtcagagaaatcaagccaaagaacaggagaatcatgggtgctggaggccctgatgatgacgacaataggtggtcaccgtggttgaagcactgctgaaagagagcttctttgttcaatgcaagttgcatgctgactc

SEQ ID NO: 184598 - DNA, 290 bp, Glycine max
gagccgattcggctcgagcattattctcccaattcaaaactcaatctccgttagaagcaacgaatcctgatggcaccaaacgcagagaagaagccagcggagaagaagcccgcagaggagaagaagtccacggtgggagacaaggctccggcggagaagaagccaaaggccggaaagaagcttccgaaggagggaggcgcggcggcgaagggaagaagaagaagagaaacaagaagagcgtggagacatacaagatctacatcttcaaggttctgaagcaggttcaccct

SEQ ID NO: 184599 - DNA, 288 bp, Glycine max
  unsure (1)..(288): unsure at all n locations
atnctaacagcaagactgtgccggcatcaagcatcccagatgggtggatggggttggatattggtccngattccatcaagacatttggtgaagcattggatacgactcagaccattatttggaatggaccaatgggtgtttttgagtttgataagtttgccacaggaacagaggctatagccaagaaactggcagagctgagtgggaagggagtgacaaccatcattggaggaggtgactccgttgccgctgtggagaaggttggacttgcagacaagatgagccaca

SEQ ID NO: 184600 - DNA, 287 bp, Glycine max
  unsure (1)..(287): unsure at all n locations
cttcaccaagcacttttggttgcagctttggttaatttccaatatggtgtttcctctcctatctatctttgctttactcaatcttgcagtggtggcaacccatgcagaaaccttgccccctgaagtttactggaagtcgaagcttcccaccactccaatgccgaaagccattacagatatccttcacccagatttggcagaagacaaaagcacctctgtggccgtaggaaaggggnggcgtaaacgttaacgcagggaaaacaaagccaggaggcacatcagtgaac

SEQ ID NO: 184601 - DNA, 285 bp, Glycine max
caatgctctcttcaaacccctcactcctaataaggaaatggtcgaccccaacaccttgcttcactacaccaacgtcctcgacgctatggtcgacgccgcttatttctccatgaagaaccttaatatcaccgatgttgttgttcttgtcaccgtaactggctggcctgccaagggtgattctaaggaaccttatgctaccaaggacaatgctgatacttataactccaatttgattaggcatgtctttgatcgcagtggaacccctttgcatcctgagactacttc

SEQ ID NO: 184602 - DNA, 288 bp, Glycine max
tagcagagagagtggtgtgttgcgaattgcaatggcagttaaccgtcctgtacctcgtgttcacgagaatctaccattagcattaactgttgctcctcaccaattcctccccttcaaattcacctccgttggaattcgctgctcccctttcaacgacaaaaccctcatttccatcaaacctaacacttcccacctcaaccacgacactctcgcttgtcgctttcacgctgcccagtttgctgaacaggagagcaacaagtacgtggaagcctatgctgtggggagaaa

SEQ ID NO: 184603 - DNA, 281 bp, Glycine max
agaagcagaagcagcaatgaagaagaagatgatggcaagcacagccatctccctcgtcttcgacgcgctcttcctcttctcctccgtccactctttctacctccctggtgtcgctcctcgcgatttccaaattggtgaccccctctttgtcaaagtgaacaagttatcatctaccaagactcaacttccatatgactactacttcttgaagtattgcaaacccaaaacgatattgaacaaatcagaaatttgggagaggttttagaggtgatcgtattgag

SEQ ID NO: 184604 - DNA, 281 bp, Glycine max
cctcgagccgaatcggctcgagcttgattgcgctcttggattttctactgggtcgggggtttaccctctctttctctgcagtacgatggatcgggaaggaggatccaacgccggatcttgctactactccgttctcgggattcgtagggatgcctccttctctgatattcgcactgcctaccgcaaactcgctatgaggtggcacccggacaagtgggctctgaatcccgcaaccgcccgcgagcaagcgccggtttcagcagatccaagaagctactcag

SEQ ID NO: 184605 - DNA, 280 bp, Glycine max
accttttctcttaatccaaatacgatggcagccatggcaaccacaaccctctcttcaaaccccaaactctcattcttcaacggaaagcccgtcacatattcttcccgcgtcgcgcccaccaccaaattatcctcatccaaacaaggcacaatttcccatgtccctaaccccacccccctacgacctccagtccttcaaattccagcccatcaaagaatccatcgtgtcacgggaaatgacgcgccgctacatgaccgactgatacctacgcgacaccgac

SEQ ID NO: 184606 - DNA, 275 bp, Glycine max
caaagaaaaaaaaaacccttagccaacacaaccatcatggccacctctgctattcagcaatcagcattcactggtcaaactgctctgaagcagctcaatgagttcgtccgcaagaccggtggcgccggcaaaggtcgcactaacatgcgccgcaccgtcaagagtgctcctcagagcatttggtatggccctgaccgtccaaatacttgggtccattctcggagcagattccatcatgacctgaccggagaattccctggtgattacggatggga

SEQ ID NO: 184607 - DNA, 285 bp, Glycine max
tagagaacaccatggtgagcacaaaggtgaacacaaaggagaacaccatggtgagcacaaaggtgaacacaaaggagaacaacaccatggggagcacaaggagggacttgtggataagatcaaggacaagatccatggtgatggccatgacaagggtgagaaaaagaagaagaaggacaagaagaagaaggagcatggacatgaccatcatggtcatagcagcagcagtgacagtgattagatcttatatgttaagcaggtgtacggtacgatggtagtgaggag

SEQ ID NO: 184608 - DNA, 284 bp, Glycine max
cttccgttcctcttcaccatcaagcagttggtggcatcagggaagccagacagctttagtggagagtttctggtcccatcataccgtggaagctctttcttggaccccaagggaagaggtgcctctacaggttatgacaatgcagttgctttgcctgctggtggaagaggagatgaggaggaacttgccaaggaaaacaacaagagtgcctcatcatccaaggggaaaatcaccttcagtgtcaccaagaccaagcctgagaccggcgaggttatcggtgtgtt

SEQ ID NO: 184609 - DNA, 283 bp, Glycine max
  unsure (1)..(283): unsure at all n locations
aaaaggtaaacttttgcaacaaccatggttgcaatggcagcagcaacagcatcctcccagttgattttctcaaagcctcgctcaccctcgcgtctctgtcccttccaactaacngtctttgacaccaaacaagtgctgtcaagttcaagtggcaggagaaggcatgtggggggttctggagttaggtgcatggcggtgggagaagctgcaaccactgagactaagaagagaagtggatatgagcttcaaacactcactaactggttgctgaagcaggagcaag

SEQ ID NO: 184610 - DNA, 286 bp, Glycine max
  unsure (1)..(286): unsure at all n locations
cccgaccaaaacaggtttttgtggccaatcatacttccatgattgatttcattatcttagaacagatgactgcatttgctgttattatgcagaagcatcctggatgggttggattattgcagagcaccattctggagagtgtagggtgtatctggttcaaccgtacagaggcaaaggatcgagaagttgtggcaaggaaattgagggatcatgtcctgggagctaacaacaaccctcttcttatatttcctgaaggaacttgtgtanataatcactactctgtcat

SEQ ID NO: 184611 - DNA, 289 bp, Glycine max
caggatgttgaagttgggtcttagcattgatgaggatgacaatggtggagacgatgttgatatgcccccattggaagaggacggtgctgaggagagcaagatggaggaagtggactaaatgccaaaggtctcgtgttaaatgaattgtggttcgtgtctgttaaatggtggtggatgcagaagtcttttagttttatctttctttttgttttgtttttctgagatatatagggggttttacattttaagtttttgtgatgtgaaaaaaatgtgtctgtcagtctgtgtg

SEQ ID NO: 184612 - DNA, 268 bp, Glycine max
tacaattctgcgttcgttctctgcagttatatcctttttgagcttcaatggcggacgctgaaaccttcgctttccaggctgagatcaaccagcttctaagtctcatcatcaacacattctacagcaacaaggagattttcttgcgtgaactcatcagcaatgcttctgatgctttggataagattcgattcgagagcttaaccgacaagagcaagctcgatgctcagccagagctcttcattcgtcttgtgcctgacaaggataacaa

SEQ ID NO: 184613 - DNA, 268 bp, Glycine max
agctagcaccacattcacctgaggcttccaaagcaatggcttcccttgcagcatccactgctgctgcttcccttggcatgtcagaaatgcttggaaaccccatcaacttcagtggtgccacaaggccagctccatctgcttctagtcctgcctccttcaagactgtggctcttttctccaaaaagaaggctacaccaacacctccaaaaaaagctgctgctgctgctcctgccaatgatgagcttgccaagtggtatggtcctgacag

SEQ ID NO: 184614 - DNA, 271 bp, Glycine max
tctgcttgcaagagtgaaaaccttctcttacccttctctcaagtttcaagagatttcatcatggctccaaagaaggacaaggctccaccaccttcctccaagcccgccaaatctggcggtggccagcagaagaagaagaagtggagcaagggaaaccaaaaggagaaggtgaacaatatggtgctgtttgatcagggcacctatgacaagctcctttctgaagctcccaaatacaagctcatcactccttccattctctctgatcgtttga

SEQ ID NO: 184615 - DNA, 263 bp, Glycine max
attttctcttattctcgtcctctctctctactctgaggcacaaaggagaattataagaaattatggctggtgattcaaaagcttcagctctttggatcctttgtcttctctttggcttctctgtagctaaggaaattttggttggaggtaagactgatgcatggaaggtttcagcctctgaatcagattcactcaaccaatgggcagaaaagtctcgtttccaagttggagactatcttgttttgaaatatggtggtggaaaa

SEQ ID NO: 184616 - DNA, 272 bp, Glycine max
  unsure (1)..(272): unsure at all n locations
gcctttgaacatcgttttgcngccatgganacaggcatagcatgntagcactcgcgggnctttccngcctagtgtttcttccaagcantctccaccctccatctctccatcttttggcttgaggagtctgaaatcgagctctttatttggagaatctctaagantggcatccaaatcaacactaaaggtttcaaagacnaagaatacttcactcgtgaccagatgtgaaattggtgacagtctgggaagaattcctcacaaaagcaacaccc

SEQ ID NO: 184617 - DNA, 268 bp, Glycine max
gtaacgcgcaagataaggagtcgcagtcacacactacagactacataggcttcattggcagatcagagggcgatagagactgtgaaagttggaatggcgaaaaaggcactgttgatcggaataaactacccaggaacaaaggcggagctgagaggatgcataaacgacgtgtggagaatgcatcgctgcctgatcgagcgatacggtttctccgaagacgacatcaccgttttgatcgacacggacgagtctacacggagcccaccgg

SEQ ID NO: 184618 - DNA, 268 bp, Glycine max
gagaaagtttgttatagagagagaaagcgcgctgctgcttcttctgcttcttctgctgctgcttcgacagtgagaagagagagagaagcgctcttctccgtaccgtttctagagagagaaactgatggccggagttaatccgaacggcgtcgccgattttccggcgactccaacgcacggcggacagttcattcagtacaacatattcggcaacctcttcgaggtctaggcgaagtaccgtcctccgatcatgcctgttggacgcggc

SEQ ID NO: 184619 - DNA, 267 bp, Glycine max
gcgacaagggttgctaaggctttcaagaaatcatcaccaaggatatgtaaatactggatcaacaacaattgtgtacatggtgaacaatgcctgtatctgcattcatggttttgtggtgatgggttttccaccgtaaccaaacttcaagaacataagaaggttatcactggcatcgcacttcctgttggatccgacaaactttattctggcagcactgatgggacagttaggatatgggactgccatactggtcaatgtgctaaagtc

SEQ ID NO: 184620 - DNA, 274 bp, Glycine max
gcatgttttgctgattccgcgcatatttgagtgcttgcctcaaaggattgaccgtgagagcttcctccttgcacttcagatggcagtggaagccgataatccttattttcgattgggttacaacagcttgggtgcttttgcaactatcaaccatcttcacttccaggcttattatttggctctgcccttcccaattgagaaggcccccactaagagaattgcaagtgtaaatggtggggtgaagatatctgaactgttgaagtatccggttaga

SEQ ID NO: 184621 - DNA, 279 bp, Glycine max
ggctcgaggtaacgccttgttgctgccattgccacccacgcggctcttccttctaccaggatcccttcaaacacaaggttcccatccaagggctctcaatctttcccaacccaatgcgcctctaaagagacttgcaggtgacagaattctctgggcttagatccacttcatgtgtcacacatgctaacagtgctagagaatcttccttttctgatcttgtagcttcccaactcactcccaagaccaatggatcaactcctgtgaggggagagacagtgg

SEQ ID NO: 184622 - DNA, 268 bp, Glycine max
tgcaattgaagttgaagtcttgcccttctctcttcaactccaaacacaagacatcatcatccatggctgcctccgtctccactgtcggagctgtcaacagagctcttttgaacctgaatgggtctggacctggggtttcagctcccagttcatccttctttgggagcagcttgaagaaggttattggctcaagggtccccaacacaaagatttcctctggaagcttcaagattgttgctgtagaagagaagaaagagattgaagagac

SEQ ID NO: 184623 - DNA, 268 bp, Glycine max
gggaaagagaagccacttccaatttcacacacacacagcaatccactgcactgtgtggaaagtaagcatggcaagagtggtggcactccaacagaaccaactatctttctctcccttagcttcctctctttctgacttcagtggaaccagacttcaaactcaacttcagttcaagagaaaactatgccatccaaaagggtctttctacgtctcggcatcgagcaccaagaaaatcctaataatgggaggcaccaggtttattggtgtg

SEQ ID NO: 184624 - DNA, 271 bp, Glycine max
ggagaatatgaagttgtttgtattctttgttgctgcagtagttttggtagcatggccatgccatggcgcaggctaccaaaggttccctctccgaatgaaaactggctatggtgagcgttcttcggaggtaaaatgcgcaagttttaggcttgctgtggaagcacacaacatccgagccttcaaaaccattcctgaagagtgcgttgaaccaacaaaggactacattaatggcgaacaatttagatcagactctaaaacagttaaccaacaa

SEQ ID NO: 184625 - DNA, 268 bp, Glycine max
cttcaagcgatcaaggaaggtgttaatttgaagggctattatgcatggtcattttcggacagtttggaatgggatgctggttacacagttcgattcgggctcatatatgtggattacaagaacaacttgaaaagataccccaagttctctgctttttggttgcaaaagttccttctcaagtgatctgaatttagtgttcctttgacatgtctagtgtttttcttgtttatttccctagatttcatcgtatatcacttgtgttggatgt

SEQ ID NO: 184626 - DNA, 268 bp, Glycine max
gaaaaacttagctactaaggaaggatcaaagagaatggctcaagcaatggcatcaatggctggcttgcgtggttcctctcaggctgtgttggaaggtagccttcaggtgagtggctccacacgcttgaatgtggggagtggaagcagggtggcctcagtcacacgtgcagggttcacagttagagcacaacaacaacaagtgagtggtgaggtacaaagcagccgtagggcagtgctttcacttgttgctgctggtttggccactggc

SEQ ID NO: 184627 - DNA, 267 bp, Glycine max
gtttttcgtgttggtgttggtgttgaattgagttgagaagaaaagaagaggtcatagacacacacacaagacatgtctgctgttgagtcagctgaacacaacaacatcagaggagtaccaactcatggtggacgctatgttcagtacaatatctatggcaatctcttcgaagtttccagaaagtatgtccctcctattcgccctgtcggtagaggtgcttatggtattgtttgcgctgctgtaaatgcagagacaggcgaggaagtt

SEQ ID NO: 184628 - DNA, 241 bp, Glycine max
cttgtactaacttattgaggcctgaattctctaaaattctcaattctaagtacgttagggtgactagcttgtttctgctcgagacgatatggctggtaaatgtcacgggcctggtatcggaatccagttgggaacgacttactctagcgtcggctgagttgaaacacgatcgtgttgaaattcatagcacacgatcagggtaacagtactaacccatcctacatgcgtttcaccgtcacag

SEQ ID NO: 184629 - DNA, 271 bp, Glycine max
gagtgaggattatataatttgctttgagcaccaaccaaccacgaattcacacacacatattctctggtgcaatatcacaaacacctcgtccgtcacaatgcagctagctgtggcggtcaacgctgtcgtttcaccgtcgccgttccgacctcatccccttctccggtcatccttctccggcgtctccgttaagctcactccccaatccataacgctttcacgcttgaagcccctcaccgtcttcgccgccaccaagaaggccgtcgctgtc

SEQ ID NO: 184630 - DNA, 265 bp, Glycine max
cagccctaacgcgtgcagatcagagagatacgccgccatggggcgaagaccgcgaggtcttatatgcagattcaagagcaaaccataccccaagtcacggttttgccgtggtgttcctgatcccaagatcaggatttacgatgttggtatgaagaagaagggtgttgatgaatttcctttctgtgtcgatctggttagttcggagaaggaaaacgtttctagtgaggccctggaagctgctcgtattgcttgcaacaagtacatg

SEQ ID NO: 184631 - DNA, 266 bp, Glycine max
gtcggttcttccttctcaaatattcttgagatccccattttctccgaagcaaagccatggctaagggtcctggtctctactctgacatcggcaagaaagctagggatctgctgttcaaggactaccacagtgaccagaagttcaccatcaccacctactcaccgactggagtggctattacagcatcaggaaccaggaaaagtgaactgtttctggctgatgtcaacacccagttgaagaacaaaaacatcactactgatatcaaa

SEQ ID NO: 184632 - DNA, 264 bp, Glycine max
caaaagagagaaaaacaaaaatgctgagaatcgctgctagcgcgaagacaattgttcgaacggggtcgttggaggcgccaccattggggattagggttctgcctcggctctaccacgagagggtggtggaccactacgataacccccgcaacgttggatccttcgacaagaacgaccccaccgtcggaacgggtcttgtcggagcacccgcgtgtggtgacgtcatgaaactccagattaaggttgatgacaaaacggggaaga

SEQ ID NO: 184633 - DNA, 267 bp, Glycine max
gttctagctcgcgatctagaactagtcgaacaagtagttgagaactaagaaggagaagcaaatggcttcctcaatgatctcttccccagctgttaccactgtcaaccgtgccggtgccggcatggttgctccattcactggcctcaagtccatggctggcttccccaccaggaagaccaacaatgacattacctccattgctagcaacggtggaagagtgcaatgcatgcaggtgtggccaccagttggcaagaagaagtttgagac

SEQ ID NO: 184634 - DNA, 267 bp, Glycine max
ataatctgcgagactttctgaatgttgctggacctatgggtgtcacacatttcttcatattgtcaaaaaccgctacttcaccttacttgagggttgcaacaacccctcaagggcctactcttacgtttaagatacatgaatactcattggccgctgacattgctcgatctcaattgcatcctcgatgccctaaggatctgtttaaaagttctgctctgattgtgctttctggatttgtgagtggagatccaccactgcagcttacaa

SEQ ID NO: 184635 - DNA, 264 bp, Glycine max
ctcacactcagcagcttcatcagctctctctttgattgtcttcaaccttcagtacgactttaacaaactggtgccttttcttagttgcgctgcttttaaaaagtctgatgggttcaagattcccatctcatcagctcagcaatggcctgtatgtatcaggccgccctgaacagccaaaagaaaagactccgacaatgagttcagttgccatgccctataccggtggtgacatcaagaagtctggagaactagggaaaatgtttg

SEQ ID NO: 184636 - DNA, 266 bp, Glycine max
ttccgtcccttctctcattcaagacaggcctgtctttgctggccctgcccccatcatcaccccaagtgtgagagaggatatggcaaaggaatacgagcaagctattgaagaactccagaaattgttgagggagaagagtgaactcaaagccacagctgctgagaaagtggagcagataacagcttctctgggaacatcatcatctgatggcatcccatcatcagaagcctcagacaggatcaaagctggtttcattcacttcaaga

SEQ ID NO: 184637 - DNA, 261 bp, Glycine max
acttgggagaagaggtcgagtttcacagcagcaatggtgtacgtcaaggctcagaaatcaaaagcctacttcaagagatatcaagtcaagttcaagagaagaagagagggaaaaaccgattaccgtgccaggattcggttgattaatcaggacaagaacaaatataacactccgaaataccgatttgttgttcgctttagcaacaaggacattgttgcacaaataatatctgctagcattgctggcgatattgttcttgct

SEQ ID NO: 184638 - DNA, 262 bp, Glycine max
caacgagaatgtgcaggatgtgctgttgttggatgttacacccctttctcttggtttggaaactgccggcggcgtcatgactgttctcattcccaggaacacgactattcccaccaagaaggagcaagtgttctctacttactcagacaaccaacctggtgtcttgattcaggtgtatgagggatagagagctagaaccagggacaacaacttgttgggtaaatttgagctttctggcattcccccaggacccaggggtgtt

SEQ ID NO: 184639 - DNA, 263 bp, Glycine max
gatcgagataactagaaacagtgtgatgaaaatgaatgtccttgttctcttcgttgctacaattttcgtagcatggcaatgccatgcgtacgatatgttccctctccgaatgaacactggctatggtgcccgtactccggaggtgaaatgcgcaagttggaggcttgctgtggaagcacacaacatctttggctttgagaccattcctgaagagtgcgttgaagcaacaaaggaatacatccatggcgaacaatatagatcag

SEQ ID NO: 184640 - DNA, 263 bp, Glycine max
ctgctcgtgcctctagggttatcatatctccatttccatttcctctctctcagtttccaagaatcttaagctatgggaaagtcgtacccaaccgtgagcgctgattagcagaaggccgttgagaaggcgaagaagaagctcagaggcttcatcgctgagaagagatgcgctcctctaatgctccgtttggcatggcactctgctggaacttacgacgtgagctcgaagaccggtggtcccgtcggaaccatgaagcacccctc

SEQ ID NO: 184641 - DNA, 265 bp, Glycine max
  unsure (1)..(265): unsure at all n locations
gcaggattccttatgcagaaggaacttgnctatctagttggagctgtgtcanaccccaanagnccatttgctgctatcgttggtgggtcaaaggtgtcttccaagattggagttattgagtccttgttggagaaagttaacgttctcttgcttggtggaggaatgatctttaccttttacaaggctcagggttattcagttggttcatctcttgtggaggaagacaagcttagccttgcaactacacttctcgaaaaggccaagg

SEQ ID NO: 184642 - DNA, 265 bp, Glycine max
tttcatttgtgaaactaacaacaacacaaggccatcatcatggcagctcgttccccaatggcaatccaactcaagtccaccttcactaggactcttgtagctccaaagggcctctctgcctcttcaccacttcacctcgtgccttctagaaggcaatttagcttcactgttaaggccatccaatcagagaagccaacctatcaagtgattcagccaatcaacggtgacccattcattggaagcctggaaaccccagttacatcca

SEQ ID NO: 184643 - DNA, 264 bp, Glycine max
attcaagatgcagcaagtgcgtttcggaagcatagaccgaaatacttcgagatgggccgtacaaagcaaactgctcgtaagtcaactggaggaaaagctcccaggaagcagcttgcaaccaaggctgcacgtaagtctgctccaacaactggtggtgtgaagaagcctcatcgttatcgccctggaactgttgctcttcgtgagattaggaaataccataagagcactggagctcctaatcaggaagcttcctttccagaggtt

SEQ ID NO: 184644 - DNA, 250 bp, Glycine max
ttcggctcgagatcctttgtgtaggtgatcaaccctagtaaggcgcaatggtgaagtactcaagggagcctggcaatccagataagtcgttgcaagctataggcgccgaacttagggctcattgtaagaacacaagggaaactgcctttgcaatcaggaagttgcccgtggtcaaggctaaaaggtacttcgaagatgttctttcccacaagcaggcaattccattcagacgtttttgtcgaggtgttgg

SEQ ID NO: 184645 - DNA, 268 bp, Glycine max
ggaaaattcagcatttgtgagcacccgtgtggactggaaggagaccccagaggcgcacgtgttcaaggcagatattccaggactgaagaaggaggaagtgaaggtgcagattgaagacgataaggttcttcagataagcggagagaggaacgttgagaaggaagataagaacgacacgtggcatcgagtggagcgtagcagtggcaagttcatgagaaggttcagattgccggagaacgctaaagtggagcaagtgaaggcttctatg

SEQ ID NO: 184646 - DNA, 262 bp, Glycine max
gtgagataagctgccatgtcgatcttgtccgttccgtcaccaacacagcgttgttccatttcgatttctcggctgccattgccattgccattgccgtttcaattgcaagtaagaagaagagcaaaagggggtcaagtggtaatgagcatggaggcaggtattggagtgatgggcaccaagttgggtatgatgagctatttcgaatccgacggagaggttgttcctgtcactgtcgtgggtttcaaagaaggcaacatcgtca

SEQ ID NO: 184647 - DNA, 228 bp, Glycine max
caaaacgcttcgcataaggtacttatgcgcgataagactgtactggtaaccggcggagggtttacatcggcagccacaccgttcttcagctcttgctcggaggtttcagagccgtcgtcctcgacaacctcggaaattcctccgaggttgccatccacagagtcacggagctctccggcgaattttggaacaacctctcctttcacaaggtggacctacgggacagag

SEQ ID NO: 184648 - DNA, 263 bp, Glycine max
aatggagattgacagagggtatatctcgcctcaattggtgacaaaccctgagaagttgattggtgaatttgagaatgcgagagtgttgatcacggatcagaagatttcagcaataaaagatattataccactgttggagaaaaccactcagttgagacctcctttgcgtatcattgctgaggatgtcactggtgaggctttggccacccttgttgtgaataagctacgtggtatccttaacgttgctgccatcaaagctcctg

SEQ ID NO: 184649 - DNA, 262 bp, Glycine max
aggtccatgtcctctctctcagtttccaagaatcttaagctatgggaaagtcttacgcaaccgtgagcgctcgattaccagaagggcgttgagaaggcgaagaagaagctcagaggcttcatcgctgagaagagatgcgctcctctaatgctccgtttggcatggcactctgctgggaattacgacgttagctcgaagaccggtggtccctttcggaaccataaagcacccctccgaactcgctcacggcgctaacaacggt

SEQ ID NO: 184650 - DNA, 289 bp, Glycine max
ttcttaaattgtgctattattgtggccattgctttcacttcattgcctaaagagagtccccagctcaactctctagttgttgttgctgcatttttcattttctaggcttagtcattagatagaaagagaaggaaaaaaaggctattatggcaggaggaggagctccagctaaagcagatgagccacagccacatccaccaaaggatcagttaccaaatatttcttactgtattactagtcctcctccatggcaatgagaaggcaagagttatcgaaaccctgctttttg

SEQ ID NO: 184651 - DNA, 284 bp, Glycine max
  unsure (1)..(284): unsure at all n locations
gaacaagtagttgagaactaagaaggagaagcaaatggcttcctcaatgatctcttccccagctgttaccactgtcaaccgtgccggtgccggcatggttgctccattcactggcctcaagtccatggctggcttccccaccaggaagaccaacaatgacattacctccattgctagcaacggtggaagagtgcaatgcatggcaggtgtggccaccagttggcaanaagaatttgagactcttcctnacctgccagaccttgatgatgcacattggcaaagga

SEQ ID NO: 184652 - DNA, 286 bp, Glycine max
ctcgagccgtggacatgggcagacagaaaaaatgagaagggatacgtccacatatgtttacatctgtaatagctgccagccatcctgaattttcatctacgcagcaacaggatgctttagaatttttcctacattttcttgatcaagttgagcgagctaatactgggaaaactgaactggatccatcgaggagtttcaaatttggtattgaagatagaattttgtgttcatctggaaaagttacatataatagaaggaatgactacattctttccctcaatatccc

SEQ ID NO: 184653 - DNA, 279 bp, Glycine max
gttcggtggaaggagccgtagcagcagcggaagctctagcttgggcagcgaatcacaatggcgagaggattgaagaagcatttgaagaggcttaatgccccaaagcattggatgcttgacaaactgggtggtgcatttgctcctaagccctcatctggaccacacaaatccagggaatgcctgccactcatactcattttgcgaaaccggctgaagtatgctctgacataccgtgaagtcattgctattctgatgcagcgacatgtccttgttgatggc

SEQ ID NO: 184654 - DNA, 287 bp, Glycine max
atcttcgcaatcttagaagtccctggtgtgtactggctggccatcgtaaagctgtgagctatgtcaaattcttggactctgaaacacttgtttctgcttctactgataatacattgaagatctgggatctcaataaaacctctcctgtgggtgcatccattaatgcttgcagcctaactctgtcgggacatactaatgagaagaattttgtgggtctatcggtggctgatggatatattgcatgtggttcagaaacaaatgagtttacactactatagatcgcttcc

SEQ ID NO: 184655 - DNA, 277 bp, Glycine max
aattgatttatttattattaggaacctgggtttggctcttcgaaagtttcctcaggtctccattgatgtggttgggttggttgatgagtgggctgctcgattttttgaggagttagactatgtgaatgaaggtgaaaatggaaaccgttttgcagaaatgatgaggaaagacctaccacaggttgtcataccaagaacctaccataaatatacatcaaggagggttcttacgacagaatggattgatggagagaagctgtcacagagcacagaaagt

SEQ ID NO: 184656 - DNA, 258 bp, Glycine max
caagaaggtgttccattttcaacactcatcagatcccagtcatcaattgcgttaacaactcgtaaggcaaccatgaggggcattctttctgtaaggacagccttggttcaacatcgtagtgagaaattgggccttggtttcaggctatttagcactcagggtgcttccactgctagtaccccacagccgccgccaccacctccaccaccagagaaaacccattttggtggccttaaggatgaggacaggatatttact

SEQ ID NO: 184657 - DNA, 279 bp, Glycine max
tttccatgatgctcaaggcaccaaggctgatagacttcgataacaagagagcctatttccgctcaagaataaggttacaacatgaccaacacttgtctgggccattgcgtataagtgtaaggcgggcttacattttggaggactcttataatcagctaaggatgcgtcctactcaggatctgaaggggcgattaaatgtgcaatttcaaggtgaagagggtattgatgctggtggtctcaccagagaatggtatcagctgttgtcgagggtcatatttg

SEQ ID NO: 184658 - DNA, 278 bp, Glycine max
ctcgagccgcaaggagaaagcaagctcatcctagagttttaaaaatggcagcagcctcctccatggctctctcttccccatccttggatggcaaggccgtgaagctgggcccatcagcccccgaagtcgggagggtcagcatgaggaagaccgtcaccaagcaggcctcctccggaagcccatggtacggcccagaccgcgtcaagtacttgggcccattctctggcgagcccccgtcctacctcactggcgagttcccaggtgactacggctgggac

SEQ ID NO: 184659 - DNA, 285 bp, Glycine max
atcgatccttgctgatcaaaatcacatttcctttcatttcttcgttatttcctaatcccaatggctcaagcactatcaacttcatcactactactatcacaaaaaacagggtcctacgtcaaaccacagaacaatgtaattgtaccctgcatggcctcttttccatcaaggaaggaatttccaaggctaggaagggtgagagctcaggcttctggtgataacaaagacaactctgtggaagtacaacatgttaacaagggtgaccaaggaaccgcggttgagaag

SEQ ID NO: 184660 - DNA, 207 bp, Glycine max
  unsure (1)..(207): unsure at all n locations
gtggttgtaagttaagaagtagcaaagatgtttccattcgggcacaaggctcanaagataaaggggactatggtggttatgcagaagaatgtgttggatatcaacagcatcaccagtgttgacgggatcgtcggcaccggcttagacttcttaggcagtgcactcgatacagttactttttcagcctcctccatctccatacaacat

SEQ ID NO: 184661 - DNA, 286 bp, Glycine max
agaaaaacaagtagttgagaactaagaagaaggaaatggcttcctcaatgatctcctccccagctgttaccaccgtcaaccgtgccggtgccggcatggttgctccattcaccggcctcaaatccatggctggcttccccacgaggaagaccaacaatgacattacctccattgctagcaacggtggaagagtacaatgcatgcaggtgtggctaccaattggcaagaacaagttcgagactctttcctacttgccagacctcgatgatgcccaattggcaaagga

SEQ ID NO: 184662 - DNA, 254 bp, Glycine max
tggcagcaacgttctcatgtacccaaatttggcaattgggatagtggagagaatgttccttatacagcatattttgacaaggcacggaaaggtcgaactggcacaaggataataaatccaaatgaccccgaggaaaatgctgatttaagttttgataatccatcatctgataacctacctcctaccagacctagaactcaattcagaggatcaatccggaaaaggatcactgcatttggacgatgatcccaaga

SEQ ID NO: 184663 - DNA, 286 bp, Glycine max
aattgttgtaactttttgattcctaaattctctaaaattcgaaattctaatttcgttaggggaaagagattgtttgtgtgtgagtgagtatggctggaaaaggcgagggtcctgctatcggaatcgatttgggaacgacgtactcttgcgtcggcgtgtggcaacacgatcgtgttgaaatcatagccaacgatcagggtaacagaactaccccatcctacgtggctttcaccgacacagaacggttgatcggcgatgcggcgaagaaccaggtcgctatgaaccc

SEQ ID NO: 184664 - DNA, 278 bp, Glycine max
tgggtgggggtaggagatactctcattcacctcccatcatcattataatcattcattccaacctacccttattcttcttcttcaatttcacacccatcatggactgttttccgatcctctttctcgtcgccaccctcatcaccctcgcctccggtgcccgccacgatattctccggttaccctccgaagcttccaggttcttcaaagcacctgctaatgccgatcaaaacgatgagggcaccaggtgggccgttttagttgccggttccaatggctac

SEQ ID NO: 184665 - DNA, 251 bp, Glycine max
cacccagctgggctcactcaaacacctggacctcagcaataatcagctctgcggcgagattccggaagacttcgggaatctgggcatgctgagccgcatgttgctgagccggaaccagctaaccggtaaaataccagtttctgtctccaagatttaccggcttgcggacttagacttatccgcaaaccgactatccggttctgtcccgttcgaactcgggacaatgccggttctatccacactgaatttgg

SEQ ID NO: 184666 - DNA, 280 bp, Glycine max
cttatctttctctcttctctctccccgcccaaaccctaactccacaccctattccgctttctctcatccatcatgaaaggaggaaagtccaagaccgaatctaagagagccgatgccaaacttgctgtgaataagaagggcgccgccaccaagactaggaaacccgccggaaaggggaaggcagcgaaagatcctaacaagccaaagaggcctccaagtgctttcttcgttttcatggaggaattcaggaaggtgttcaacaaggaacatcccgacaaca

SEQ ID NO: 184667 - DNA, 273 bp, Glycine max
ggggaaaataaactagtggaggagtctgacttgtcaaagttgccttatttgaacatggtagtgaaagagaccttaaggttatatccggctggacccttgctattgcctcgcgagtccctagaagatattactattaatggttatcacataaagaagaagacaagaattttagtcaatgcatgggccattggacgagaccctaaagtttggtcagataatgctgatatgttttgtccagagaggtttgtgaatagcaatgtagacattagagga

SEQ ID NO: 184668 - DNA, 265 bp, Glycine max
agatgattcaagttaacattccaagatataaggaagtcctgccaggtttagaaagttggcaagcccagaaaattgcttcttggcacaatatggaagggcactccatccaatggttatctgtagtatgtatagaccgaaaaggcatgatggctgaggtcactacagcattggccactgcaggcatagccatatgttcttgtgtggctgagattgatggaggaaggggaatggctgttatggtatttcacgtagaaggaaatttgga

SEQ ID NO: 184669 - DNA, 274 bp, Glycine max
gaagaaagcagagcctctactacatcatcacattcacatttcagtaccttctctttctcccagtctctcacacacaacaattgaagaagaaaatggttgacaatgattcgctctcggaattcctcgcatctgcggtcgacgcggctcagaaagctggcgagattattcgaaaaggcttctaccagaccaaaaatgtggaacacaaaggacaggttgatttggtcacagaaactgataaagcatgtgaagaactcatatttaatcatctgaaaca

SEQ ID NO: 184670 - DNA, 250 bp, Glycine max
actcgagccgattcggctcgaggctaattagatttctgacagaaggcgaagggtgtgagacgacgatggagagtacagaggacgatgttaacgttggagcaaacaagttctcagaaaggcaaccaattggtacagcagctcagggtggtggtgacaaggactacaaggaggcacccccagctcctttgtttgaacctggtgagctcaaatcatggtccttctacagagctggaattgctgagtttgtggc

SEQ ID NO: 184671 - DNA, 277 bp, Glycine max
aagtagcaaagatgacaggtgggttctttggagggaaggggcaaaagataaaggggacagtggtgttgatgccaaagaatgtgttggacttcaacgccataacctccgtcggaaaaggcagtgctaaggacaccgccaccgatttcttgggcaaaggcttgggcgcattaggtggtgcagttgatgctctcactgccttcgctggccatagcatctccttgcagcttatcagtgctactcagactgctggtagtggaaaaggaaaagttggacacgc

SEQ ID NO: 184672 - DNA, 239 bp, Glycine max
gttcatttctacacatccctagctctgtcgttccgtcgttgacgatggcgtttcgggtgcgaaccctgacctccgctctctctttcttctctctctcttgtccatcgcttccgccaatgtcttcttcgaagagcgtttcgatgacgggtgggaaaatcgatgggttaaatcagattggaaaaaagatgagaacgtggctggggagtggaaccacacctctggtcaatggactggagacg

SEQ ID NO: 184673 - DNA, 245 bp, Glycine max
ataaattgcaggtgtagcagcagagagtgcggtaggctcttccgagacccgaagcagccatggggatcgatctcaaggccggaggtaagagcaaaaagaccaaaagaacagcacccaagtccaatgatatctatctcaagctcttggtcaagctttatcgcttccttgttcggagaactggcagcaacttcaatgctgttatacttaagagattgttcatgagcaaggttaacaaacccccatgt

SEQ ID NO: 184674 - DNA, 278 bp, Glycine max
acacaagaactctccaaggatcctccttcccacgaaattctttggtgggaaaatccaagaagagggtggaatttcaagccagggaagatggattatttcaatgcaccaggaagaaaccatctctttgttccggggccggttaacatcccggaccagatcattcgggccatgaacagaaacaatgaggactaccgttctccagcaattccagctatgaccaaaacactgcttgaggatgtcaagaagattttcaagaccataactggaatcccatttct

SEQ ID NO: 184675 - DNA, 279 bp, Glycine max
cgcaacacaacaaaaaaagacaacccagagagcgcgtcttaataaacgctcttctctgaaaacccccatttcttttcttctttcttcttctctttcgcttcttcgatcttcgatcttcgtcgctgaaaatgagagagtgcatttcaatccacatcggccaggccgggattcaggttggaaacgcctgctgggagctttactgcctcgaacacggcattcagcctgatgggcagatgccaagtgacaagaccgttggtggaggtgatgatgctttcaaca

SEQ ID NO: 184676 - DNA, 278 bp, Glycine max
gccgttgctctgcttcaaccttgcggaagaagaagacgccgcagccatggtgaagtactccagagaacccgacaatcccaccaagtcctgcaaggccagaggcgctgaccttagagtgcatttcaagaacactagggagactgcctttgccatcaggaagttgcccctggttaaagctaaaagatacctggaggatgttttggcccacaaacaggccatccctttccgacgcttctgtggtggtgttgggaggacagcccaggctaagagcagacact

SEQ ID NO: 184677 - DNA, 274 bp, Glycine max
ctcgagccgaatcggctcgagcgcgtacgccgtcgggctcactctacgggcccaggggcgaagactgttgtgttggatgagttaggaagtcctaaagtggttaacgatggtgtcaccattgctcgcgccatcgagcttccagatcctatggagaacggcggtgcagctcttattagagaggttgctagtaagactaacgactctgccggtgatgggacgagcacggcttcggttcttgctcgcgagataattaagctggggcttcttagtgtga

SEQ ID NO: 184678 - DNA, 269 bp, Glycine max
caccttttctcggaggatcaaatcctccgagaaaagatattccgacacgtggacgaggcgtgtcgggagtgggggttcttccaggtggtgaaccatgggcttagccatgagttgatgaaaagttctagggaactgtggcgcgagttcttcaaccagccacttgaggcgaaggaggagtatgccaactcccccaccacttatgagggctatggaagtcgcttgggagtgcagaaaggtgccaccttggactggagtgactacttctttct

SEQ ID NO: 184679 - DNA, 259 bp, Glycine max
gagacagagacgcagccatggggcggagacctgcgaggtgttataggcaaattaagaacaagccataccccaagtcacgtttctgccgtggtgttcctgatcccaagatcaggatttatgatgttggtatgaagaagaagggtgttgatgagtttcctttctgtgtccatctggttagttgggagaaggaaaatgtttcaagtgaggccctggaagctgctcgcattgcttgcaacaagtacatggccaaatttgctgg

SEQ ID NO: 184680 - DNA, 275 bp, Glycine max
atttaatgaaaccttatatgatgaatgggttaacaagggcgacgcaccggcattgccagagactcttaaaaattacaacaagctgttgtctcttggcttcaagattgtattcttgtcaggaagatatcttgacaaaatggccgtaacagaagcaaacctaaagaaggctggcttccacacatgggagcagttaattctcaaggatccacatcttatcactccaaatgcactttcatacaaatcagcaatgagagagaatctgttgagggcaggat

SEQ ID NO: 184681 - DNA, 264 bp, Glycine max
ggcttatggtggatacctaggcacccagagacgaggaagggcgtagtaagcgacgaaatgcttcggggagttgaaaataagcgtagatccggggattcccgatataggtcaacctttcgaactgctgctgaatccacgggcaggcaagagacaacctggtgaactgaaacatcttagtagccagaggaaaagaaagcaaaagcgattcccgtagtagcggcgagcgaaatgggagcagcctaaaccgtgaaaacgggttgtggg

SEQ ID NO: 184682 - DNA, 275 bp, Glycine max
ccgcggctggaagagcaccgcacgtcgcgtggtgtccggtgcgcccccggcgcaccttgaaaatccggaggaccgagtgcctcccacgcccggtcgtactcccaaccgcatcaggtctccaaggtgaacagcctctgctcgatggcccaatgtaggcaagggaagtcggcaaaatggatccgtaacctcgggaaaaggattggctctgagggctgggcacgggggtcccagtcccgaacccgtcggctgtcggtggactgctcgagctgcttccg

SEQ ID NO: 184683 - DNA, 267 bp, Glycine max
caggtcgactcgagcgcgcaacaaaaagaaagaatcccaggcgaggagaaagatggaggggaaggagcaggatgtgtcgttgggagcgaacaagttccccgagagacagccaattgggacggcggcgcagagccaagacgacggcaaggactaccaggagccggcgccggcgccgctggttgacccgacggagtttacgtcatggtcgttttacagagcagggatagcagagtttgtggccacttttctgtttctctacatcactgt

SEQ ID NO: 184684 - DNA, 274 bp, Glycine max
actcgagccgaatcggctcgagctctgaccgggaaaagaaaaatcagctttcttcaagcaccacagatttcctctctctctctactaaaatggcgttctcttcttttctcggccgagtcctcttcgcctctgttttcatcctctccgcttaccaagaatttaatgcttatggagttgattggggacccacagcaaaagcactcagaccgaagtttgatgcctttgcacatcaagtacattctaaagctggctttcaacttccagatattgatat

SEQ ID NO: 184685 - DNA, 263 bp, Glycine max
tctcaaccaaatctcagttttgagttcaactcaactaaactatgtcttccttatccctatatgccaacctctcctctctaccatcctccctcaccattcgttcttcttcatccaaagatacctctttgaaacaggattggaggacaaagtccaaacctatcccaccaggtggcacataccctgcaaaagatcattgcagtcgttgtgggttgtgtgatacttactatattgcccatgtcaagaatgcatgtgctttcttggga

SEQ ID NO: 184686 - DNA, 268 bp, Glycine max
ggtccttccaatcatcccgtgttctggtcgacttttctcccttctccccatttgctcattctcctccccattctgctcagacaccgcacagcgaacaaatccaccattcattttcctttttcgcaacagcgcaatggctcgaagatccctcccgctcctgaagcacctcctctcgcggcggatcccggcccgatccgtgacgtacatgcaccggccgggcgacgggtcgccgcggccggtgacactgatcccgggcgacgggatcggg

SEQ ID NO: 184687 - DNA, 270 bp, Glycine max
  unsure (1)..(270): unsure at all n locations
gagcgacctcgcatcgcaccttcaacttaacctattccacttgtcatagtaatatacnttgctagaagaagagacaaagtgtgtctgtgtgtgtgagagattgagcaatggctggctcgtgggcacgccgttctctgattgttctagccatcatttccttcggatgtctatttgcgatttccattgctaaggaggaacccaccaagttagggacggtcatcggcattgatcttggaacaacctattcatgtgtcggtgtttacaagaatg

SEQ ID NO: 184688 - DNA, 269 bp, Glycine max
cgtaggtgggagaagggaaggtgagtagtaatggtcatggatgttgcaaatcagggccaggctatgcttccccactggaagccatttctggtcccagagagtctctcatttatgtaacctctgtctacacagggaccggaatagagaagccagactatttggcgacagtggatgtggatccaaactctccaacttattccaaagtcatccataggcttcctgttccttatttaggtgacgaattgcatcacacaggctggaattcatgc

SEQ ID NO: 184689 - DNA, 268 bp, Glycine max
atttcagtggcgtgaaacttccagaagaactcaaagtcactcctcttctgcttgccctctttcgcttcctgcaaatctttctgagaatcgagtcacagactagagctaaatcagcatagagatacaaaaatgccaaaagtaaagacaaatcgtgttaaatacccagagggctgggaattaattgagcctacactccgtgaacttcaagcaaagatgagggaagctgagaatgatccgcatgatggcaaaagaaaatgtgagaccttat

SEQ ID NO: 184690 - DNA, 267 bp, Glycine max
ctcgagcgctcttcttctcttgcggccagggttttagcgcacatcttctagatttaaaccagatgggtaaggaaaaggttcacatcagtattgtggtcattggccatgtcgactcctgggaaatccactaccactggtcacctgatttacaagcttggaggcattgacaagcgtgttattgagaggtttgagaaggaagctgctgagatgaacaagaggtctttcaagtatgcctgggtgctggacaaacttaaggctgagcgtgaa

SEQ ID NO: 184691 - DNA, 267 bp, Glycine max
cgagttttgtttatttgaaattaacaagtagcaaagatgtttggaatcatcggaggaaacaagggtcacaagataaaggggaacttggtgattatgcgaaagaatgtgttggatatcaacagcattaccagtgttaagggtgccatccggaaccggcattaacatcattggaggagtcgtcgacaccgttactgctttggcgtcccacctctccatccagctcattagtgccaccaaggctgatggacatgggaaaggaaaagttgg

SEQ ID NO: 184692 - DNA, 265 bp, Glycine max
gacaagattagctgtgaaaaaaagaaccacacactttacgagttcccagatctcagcgtggcggagaagtgatagaaccacttgttagtaagcagtggtttgtgactatggagcctcttgctgagaaagctcttcaagcagttgaaaaaggagaactgaccataattccggaaagatttcaaaagatttacaaccattggctttccaacattaaggattggtgtatcagcagacaactatggcggggacacaggatacctgtatg

SEQ ID NO: 184693 - DNA, 168 bp, Glycine max
acacatccctagctctgtcgttccgtcgttgacgatggcgtttcgggtgcgaaccctgacctccgctctctctttcttctctctctcttgtccatcgcttccgccaatgtcttcttcgaagagcgtttcgatgacgggtgggaaaatcgatgggttaaatcagattgg

SEQ ID NO: 184694 - DNA, 267 bp, Glycine max
agagtttgttgtgagctataagctagtttatcgtgaggagaatatgaagttgtttgttctctttgttgctgcagtagttttggtagcatggccatgccatggcgcaggctaccaaaggttccctctccgaatgaaaactggctatggtgagcgttcttcggaggtaaaatgcgcaagttttaggcttgctgtggaagcacacaacatccgagcctttaaaaccattcctgaagagtgcgttgaaccaacaaaggactacattaatgg

SEQ ID NO: 184695 - DNA, 266 bp, Glycine max
ctttccattgatttcttgcttctatatattacttgcttcttttcatgatcatgtcccttgctggtaaaatcagctctgaaattggtgttcaggcaaccgctgcaaagtggttcaacctcttcacaacacaacttcatcacgttcaaaatcttactgatagaattcatggaaccgagctgcatcatggtgaagactggcatcacaatgagtcggtcaagcactggacttataccatagatggcaaggttacaacttgcaaggagagt

SEQ ID NO: 184696 - DNA, 268 bp, Glycine max
tcggaatgcgggtcgatctcgatcaaggcagacgatgtcgaaagaggatgtgtttgtcggcgcgatggaccaaggaacgagcagcagcaggttcataatatacgacgcgaagactggagtagtaggatgccaccacgtggagttcacccagttctacccgcaagccgggtgggtggagcatgaccccatggagatcttggagagtgtgaaggtgtgcgtggccaaggccgtcgataaggccccgctgatggcttcaacgtcgataaag

SEQ ID NO: 184697 - DNA, 269 bp, Glycine max
  unsure (1)..(269): unsure at all n locations
caggaagctctaaggtcaagagggctgaaggatgatacaacttgcctcgttgtagatattattccttcagatcatcctgtgttaccagcaattccaagaaagaaacgtagtgcgctaacttcccttctctttggaaagaaatctccaaactctacaaacaaaggcaacaataagctttctgctgttggtgttgtggaggaattatttgaagagggttctgcaatgcttacagagaggtaactgagactataattgctanatttatattt

SEQ ID NO: 184698 - DNA, 266 bp, Glycine max
cttccttgtctgttatcactgtgttgcgagcagtgatcgattcacgcgaactgcgattcgcattgccaatttcaacagcgtgcgttcgtacgtcggagatggagtcgctaccgacgacgaagcgaggaggagcgagatcgaagcccgttcagacctcgaaatcgtccctcgtcatggccttcttctcctgcgtcgcgtggctctacgtcgctggaaggttatggcaagacgcagagaatcggaatttgcacgctagtcttctgaaa

SEQ ID NO: 184699 - DNA, 264 bp, Glycine max
cgacaataagcaaaccaaaaccaccgccgccaccgccaccaacaccactaaacctcaaaaggctcgctccacagcgccgccgcagcattcgaaggcggcgcggcggttctataaccaaaacatcaaggaatcctccgccgcgcgcctcagcaaggttctcgccgcctccggagttgcgtccaggagaagctgcgaagagcttatcttcgaagggaaggttacagcgaaaggtcacgtgtgtactacgcctcagactaaagttga

SEQ ID NO: 184700 - DNA, 260 bp, Glycine max
caaggaataatgtgtcaccacaaaaggcatctttgaagttcttgatatatggtggtgcagggtggattggggggcttataggaaacatttgtgagaagcaagggataccctttgaatatggcatggctcgcttagatgatagatcacagatcttgtttgattttaggaccattaagcctactcatgttttcaatgcttctggggtgattggagcattaaatgtgaaatggtttgaagctcataagccggaaactatacgt

SEQ ID NO: 184701 - DNA, 259 bp, Glycine max
gtttctgtctctgtgtttgcggctgaggattccgaacgagcgaccttcttcgtttctcgcaaagtttaagtcatcatgggtaaggaaaagactcacatcaacattgtcgtcattggacatgtcgactctgggaagtcaactaccactggtcatttgatctacaagcttggaggtattgacaagcgtgtgattgagaggttcgagaaggaggctgctgagatgaacaagaggtcattcaagtatgcctgggtgcttgata

SEQ ID NO: 184702 - DNA, 265 bp, Glycine max
cggctcgagattaaataaaaccgccacaaatttctccatagttatgggcacttccattctcgacgccctgaacgttcgcgtggaaggttccggcgacaagtaccttgtcctggcccacggcttcggcacggaccaatccgcgtggcagcgcgtgctcccttacttcacccgcaactacagcgtcattctctacgacctcgtctgcgccggcagcgtcaaccccgaccacttcgactaccgccgttataccaccctcgacgcctac

SEQ ID NO: 184703 - DNA, 267 bp, Glycine max
gaagtattggcattcttactgtccctgcgctcagattaagatgtagaataaatcaatctgcttatctccatcccaacccaagcttgagagtgcatcctcttgtgattgctgcacatccctccgaacccaatcaatttgcattaggactcaccgatggtggagtacatgtacttgaaccactagaggcagaaggaaaatggggtactccacctccgaacgagaatggtgccgggcctagcactgcttcaggtgctgctgtttcagagc

SEQ ID NO: 184704 - DNA, 283 bp, Glycine max
attcggctcgagggagagaataatgaggcaaatgtctttctcatttatgaatatgtgtcaaatgggactttccagacttatctctctggagatagtccaggcaaggttttcaattggtcagagcgattgtctgtactaattaatgttgctaaggctgttcacttcctacacactggcatgatacctggtttcttcaaaaatcgacttaagaccaacaatatcttgctgaatgagaattggatggcaaagttgagtgactatggattatccattatatcagaag

SEQ ID NO: 184705 - DNA, 266 bp, Glycine max
atagtttatcagtctgggcatggatgttcttgtttggacatcttgtttgggctactggatttatgttcttaatttcctggcgcggatattggcaggaattgattgaaactttagcatgggctcatgaacgcacacctttggctaatttgattcgatggagagataaaccagtggctctttccattgtgcaagcaagattggttggactagcccacttttccgacagttatatatttacttatgcagccttcttaattgcctcgact

SEQ ID NO: 184706 - DNA, 265 bp, Glycine max
cccaagcacaagttctctgagttgttttgtgagatagcacatagcatagcaaggaaggagtattacaaccgaaaccctgaagaaaaaaagagtagaggaagaaaaaacacctgcaccaccaacgatgggtgtggattactacaagatcttgcaggttgataggagcgccaaagacgacgacttgaagaaggcttataggaaacttgctatgaaatggcaccctgataagaaccccaacaacaagaaagacgctgaagctaagttt

SEQ ID NO: 184707 - DNA, 261 bp, Glycine max
cgcatcttcagaaaggcgaatccatagcacccgagctgctacaggccattcaagggtctcgccttttccttgtggtattctctaagaactatgcttcctcaacttggtgtttgcgtgaacttgcacacatctgcaactagactgatgaagcatccccgagtcatgttcttccgattttctatgatgttgatccatcagaggtgcggaaacagagtggttattatgggatagcctttgcagaacacgaagaaagattcagag

SEQ ID NO: 184708 - DNA, 258 bp, Glycine max
ctcgagccggctggatggtgcatgggtatagcccgtggacttgaatttacagctactcgacactgccacgcttactatcactgtgttagtagttgcattaatgatgcaggtaggaacctcggattgttctaaatggttgatgcttatactacgctatctactagttgctgccagtttactcgtacatgtcgaccctaaaagtggtgatgactagatatttagtgtaggtgatggcattgtcaatgctgcatttctttc

SEQ ID NO: 184709 - DNA, 256 bp, Glycine max
ctctaatattattctcactgtcttgtctctccagagaactgtatagatagacatggcagctgcaacatctggtgctgtgttaaatgggttgggatcttccttcttgagtggaggaaacaggagccaaacccttctggccactgctattggaggcaaagttggtgctgctgctgatactgttagtcctagaagactcattgtggtagctgctgctgcaccaaagaagtcatggctccctggtgtcagacgtggtggc

SEQ ID NO: 184710 - DNA, 262 bp, Glycine max
agcgtaccaaagactatgcagattagagggcatatttccctctttggaggccgcacatgcattggctatcttagataaattggtccctactctatgcaatggtactaaggttgttgtgaattgtagtgggcgaggagataaggatgcagcaatagtcttcaatcggggaatatatatttgacaaggaataacaaagatggatgaagacctgtgttaaataacgatttgacctagcttacgatgaatactataaatgctatat

SEQ ID NO: 184711 - DNA, 258 bp, Glycine max
cagggcttccgtcgccgtaggccagaagcttccggcaaccgctccccgttcaaccccgttatcgtcctccgcggccccggcgacgactccgccgccgccgaccacgacggcgtcagcacgttcgagctcttctacgacgacggccacggcaccggcctccgccctcttcctcccaccatgtcggacttgctcctcggctctggctttgacagacttctcgaacagtcagcgcagatcgagatgaacggattcgggcgg

SEQ ID NO: 184712 - DNA, 261 bp, Glycine max
ctaatggcataccaagcgatgcagggtccgagttcgggatcgagttcgagttcggggtttcagttattgaattctccgttgcgagacaccacctacaccaaagtcttcgtcggaggattggcctgggagactcagagcgaaaccatgcgccgctacttcgaccagttcggcgagattctcgaggccgtcgtcatcaccgataagaacaccggaagatccaagggctacggtttcggtataggtgactttccgggatcccga

SEQ ID NO: 184713 - DNA, 254 bp, Glycine max
gttcaggcgtcttaagaagcttggtatttcaaagatcaatccagatgatcttacaccagatgaagtaaataaatttgctaggcttgatattgaccccaattctatcacatggaggagagtaatggacatcaatgaccgattcttgagaaaaattactattggccagggacctgacgagaaaggaatggtgagagaaacaggctttgatatttcagttgctagtgagataatggctgttttggcactgacaacat

SEQ ID NO: 184714 - DNA, 258 bp, Glycine max
ggcagagcgaagagaaggggcaaaagagaaagaagcgcttatcgaactcggacggaagcactgagttgactcggagggagtggaaagtgttgttgcgtaatgtctggtggtatcgctcgtggacgcctcaccgaggagcgcaagtcgtggcggaagaaccatccccatggttttgttgcgaaccggagacgctgcccgatggaaccgtgaatttgatggtgtggcattgcactattcccgggaagactgggactgatt

SEQ ID NO: 184715 - DNA, 257 bp, Glycine max
aagaggttctgatcttctttgttttgttttgtctggttccctttcttccttcaaccaattttgacatccgaaaccggcatcagatccgattcgaaatgtacggattcgaagctctcaccttcaacatccacggcggcttcctcgaggccatcgtccgcggccaccgcgccggcctcctcaccaccgccgattccaacaacctctgccaatgcgaaaccctcgacgacatcaagatgcacctctccgccaccgagtac

SEQ ID NO: 184716 - DNA, 258 bp, Glycine max
ctcagtttcttattcgttagatctcatcttacactcaccgtcaagttcgtctcgcgccaccgtcgacgcagttccggccactgcctttggttccctcactttctgtctcttcttcttcttctcagaaatatgccttctcagaaggttgaaacgggtcaagacacagtccatgatgttgcgatggattattatggtaagaggctggccacggcttcatcagatcacacgattaagataattggggtgagcaacacggcc

SEQ ID NO: 184717 - DNA, 257 bp, Glycine max
catcagttgcgttattattccagagaaacctactgacggcatcccactagttcctgataaattttattgtgaactctgtcgtctcactcgtgcagatccattttgggtttcagtggcgcaccctttgcatcctgtgaagttgaccaccaccagtaatccaactgatggaaacaacccagtgcagagtgtggagagaacatttcaactgactagagctgacccagacttggtatcaaaaccagaatttgatgttgagg

SEQ ID NO: 184718 - DNA, 261 bp, Glycine max
ctacaattcgctctgtgcagtttcctcgctctcttttctgcaatactcttttttgttcgttctctgcggttatctttttgagcttcaatggcggacgctgaaaccttcgctttccaggctgagatcaaccagcttctcagcctcatcatcaacaccttctacagcaacaaggagtctttcttgcgtgaactcatcagcaacgcttctgatgctttggataagattcgatttgagagtttaaccgacaagagcaagctcgat

SEQ ID NO: 184719 - DNA, 258 bp, Glycine max
ctgtacctgaaattggggatgacccaaataaaactccagcttcagcacgacacaaaagaggatgcaactgcaaaaaatcaagctgcctaaagaaatattgtgaatgttatcagggtggtgttggttgctccattagctgtagatgtgaaggatgcaagaatgcttttggtagaaaggatggttctgctcctgtaggcatagaaactgatccagaagaaacagaagcctctgacaagggtatggtagaaaaaactttac

SEQ ID NO: 184720 - DNA, 247 bp, Glycine max
gaggatttgtataaagggactaccaagaaaatgaagatttcaagggatgttagtgatgccagtgggagaccctccacagtagaggaaatacttacaattgagatcaagccaggttggaagaaaggaacaaaaataacttttcctgaaaagggaaatgagcagagaggagttatcccttcggaccttgtctttattattgatgagaagcctcatagtctctttaaaagggatggcaatgatcttgttg

SEQ ID NO: 184721 - DNA, 255 bp, Glycine max
gttctgttttgttctcattctgtgactctgtgtttagttaacgttaacagtgacttaagatggcggattctgcagatgtcacccacgatgttgtgtccctcctctcttctcctcaaaggtactttcttcttcgaaacaacggcgatcacgttaaaattgacagcttgaagggtaagaaacttggtttgtatttttcggcatcctggtgtggtccatgtcaaacatttacgccaactttggtggatgtgtacaatg

SEQ ID NO: 184722 - DNA, 258 bp, Glycine max
ctcgagccgctcgagccgattcggctcgagggcgaacaatttagatcagactctaaaacagactaaccaacagcacctttcttttatgctagtgaacgcgacgtccatcacaacgacatatttatattcggcatagataacaccgtactctctaatatcccatactatgaaaaacatggatatggggtggaggaatttaatgaaaccttatatgatgaatgggttaacaagggcgacgcaccggcattgccagagact

SEQ ID NO: 184723 - DNA, 253 bp, Glycine max
cttcaggatctccgaggaagagtatgtaaagtcaattaaggaggaaattcgcaaagttgttgagcttcaagaagagcttgatattgatgttcttgttcatggagaaccagaggtccgctctcatttcataacatgactaaatattagtcttttgaattgaagatagcttctttctttctgaagagcaactactctttgcatattttctttccttattgttagattgctgattccaaaattgcagcacctccaa

SEQ ID NO: 184724 - DNA, 260 bp, Glycine max
gcaaacaatggcgagtgcaggcagttgcagtatctcctgacagttttcagagccgaaaggtctaccctcacagtggcaagggttaagggatgaagaattgtcgaaggagtctggcattccaggatgtgtttttgtgcatatgagcggatttattggtggaaacaaaaactttgacggtgccttggccatggcgaaggctgctttgacaatgtagacgaggatcatatgaaccaagggctatcgtttttgcacgctcattc

SEQ ID NO: 184725 - DNA, 254 bp, Glycine max
tgaaggtcggcggcgtggtgttatacggcggagttccacgtggcagcgtcgtgcctctgcttctcagccgccgcagagtttctcttcgcgcttcttcttcttcttactcctccatttctgaccacgtttctttcgtgaaggatgtagctgcgactcagcctcctcagcatctttcacaactcctcagcattttgaaaaccagaggtgaatctattatctctccgggtgccaggcaaggattaattcctcttgct

SEQ ID NO: 184726 - DNA, 249 bp, Glycine max
agagtttgttgtgagctataagctagtttatcgtgaggagaatatgaagttgtttgttctctttgttgctgcagtagttttggtagcatggccatgccatggcgcaggctaccaaaggttccctctccgaatgaaaactggctatggtgagcgttcttcggaggtaaaatgcgcaagttttaggcttgctgtggaagcacacaacatccgaatcattaaaaccattcctgaagagtgcgttgaaccaac

SEQ ID NO: 184727 - DNA, 251 bp, Glycine max
cctgacaaaggattgccaacctgaatgtgaataattttgcatgaactgggttggtttaccaagttgcttaagggctctgatcataaaattttacgaggacaataccatggcaaatatggagaggacagaatttgggataatcatcatagttcaatggatgatttgactgatattgagaaagaagacattgaccgtgcaattgcactttctctgtcagaggaggatcataaagggaaaaaagttgttggtaa

SEQ ID NO: 184728 - DNA, 283 bp, Glycine max
tctcctcattccttcatttttaaacctagctccatctccctccactcaccataacatacaatcagaagcaactgctgccaacaccaacttctgtgtaaatgttagcaacaatggctacattagtgctaatgaccccttgaactggggtgcggcggcggacgctatggctgggagccacctcgacgaggtcaagcgcatgctagaggagtaccggaggcccgtcgtcaagctcggtggagagaccctgaccatctcgcaggtcgcggcgatcgctgcccacgac

SEQ ID NO: 184729 - DNA, 285 bp, Glycine max
caatctcatacaatggcaggaactgctttctccacctcctgtctttcctcttctagcaacttagggacatgttggttggtattaaaaactcacaatgcaagggccgtgccagggaaactactacctggaaatggaaggagaagaatggcattaataaaagcagaagtgaagtatgtgaacgctgaaaaagctaaggaacttgtggaagctgatggatatacggttcttgatgtgcgggacaaaaatcagtttgagcgagctcacatcaaatcttgttctcatgtg

SEQ ID NO: 184730 - DNA, 279 bp, Glycine max
agggttcttcacttctcttcttcaattcattctagttctggattccgactcgccgcattgactcggtccgggttggggtcgactcagttcggtttttcattctctcgcgaatctaatctataggaaaagctaagggcacatcacaatgaaggcattgattctggttggggggtttggaacaaggctgaggccactgacactcagttttcctaagcctcttgttgattttgctaacaaacctatgattctgcatcagatagaggcccttaaggccattgg

SEQ ID NO: 184731 - DNA, 278 bp, Glycine max
  unsure (1)..(278): unsure at all n locations
tggtgttccagacaacagaagaattngctcaanagtantcttggtctgcatccaattcaggttgcnntcaagtngntctgccagagtagatggaggnatgnaggcaattgcattcgctggtcgannnctannacagganaatctcatgctctncataagagagtggaacagtctctgcatcaggggcaatcagatgggctgnnttgagctagaaaatnagaggaagagnngacactagnantcatgtcttcagtttccctccagacaaaggaaagtgg

SEQ ID NO: 184732 - DNA, 275 bp, Glycine max
atgctgatattaaacctggaagcatcattccttatagggtgaaggttagtctcatttttacagttcccatcttgggaaggctaactctacctttggagaaaactggagaaattcccataccatacaagcctgatattgatcttgagaagattcattttgaaaggttctcttttgaagagacaattgcaactcttcacttgaagttggaaaacaagaatgattttgacctcggcctcaacgcgctcgattatgaggtctggcttggtgatgttagc

SEQ ID NO: 184733 - DNA, 277 bp, Glycine max
cctcggttcatcagcgtgtgtctcagccatggcgttttactacatggaagccgttgtaggatttatgatattaatgtacatttttgaaacttacttggatgtgcgacaacatagggccctcaaacttcctactcttccaaagactttagaaggtgttatcagccaagagaaatttgagaaatctagagcctatagtcttgataaaagccacttccattttgttcacgagtctgtgacaatagtgacagactctacaattttgtactttggggtattg

SEQ ID NO: 184734 - DNA, 238 bp, Glycine max
aagaagtggaaagtggttgacgaagaagacgaagaagaagaatggagaagtcagggaagagagtgttgcttacccccaacggcgacgacatttctcaaggcattgccttccatttggtgaagcaagggtgcaggttggttttgctgggagatcagaattccctgcggagcaatcgcgaacaagatcatggattccctctccctcgcagacagaggcaccgtgcaagtcgttggattgg

SEQ ID NO: 184735 - DNA, 280 bp, Glycine max
cggctcgagaaatcctttatcctctccacgctcccaatatcctcgcaaatgtcccgtcaagctcccggcgtcgtcaaaacgcgcctgaggggcgtcgttttcgacatggacggcaccctgaccgtcccggtgatcgattttccggcgatgtacagggcggtgctgggcgacgaggagtacctgaggctcaaagcggaaaacccttccggcatcgacattttgggccgcatcgacggctggccacctcacaaacagcgcaaggcattcgacgccattgctg

SEQ ID NO: 184736 - DNA, 275 bp, Glycine max
ctcccactcactttctcgcagaaacgtattgtttttctctctttccgcggcctagatctgcgcagtttggaaaccctaactgctctcaccaacgacatcaccactctctccgatcaactacctctttcgtcgccctaagtcatggcaggaattgcacccgagggatcacagtttgatgctcgtcaatatgatcccaagatgaatgagctgcttacgtccgatggacaggatttcttcacatcctacgatgaggtttatgacagttttgatgctat

SEQ ID NO: 184737 - DNA, 274 bp, Glycine max
gaaaatgtggaagagaacgggttttgaagaagaagcagttcaattgatcaactcagatttcagggacctaagtctagctgctaatagactcgcccatcatgccatcaaacttggtggcattggctttggagcctcttttttcggattgtttgctgccattgctgctatttatctgttgattttggatcgtacaaactggaaaacaaatattctcacagcactactcattccatacattttcttcagcttgccttcattaatcttcgacgtcttc

SEQ ID NO: 184738 - DNA, 285 bp, Glycine max
agtaaatctgcagaaccccaagttgctggggcaaatgatgaagaggagcaggaagagtacaacaacactagagagcaggaaactggaagtgttgaaggagtgaaacgaggtgactatgaatatctgttatccatgtcaattggaactttgaccctcgaagctgttcagaagctgctagcagagaaagctgaaaaagaaaaggagttcgagattttgaaggctacaccatcaaagtctctgtggttgaacgatcttgatgagcttgagcataaacttgatgacata

SEQ ID NO: 184739 - DNA, 226 bp, Glycine max
agagtttgttgtgagctataagctagtttatcgtgaggagaatatgaagttgtttgttttctttgttgctgcagtagttttggtagcatggccatgccatgccgcaggctaccaaaggttccctctccgaatgaaaactggctatggtgagcgttcttcggaggtaaaatgcgcaagttttaggcttgctgtggaagcacacaacatccgagcctttaaaaccatt

SEQ ID NO: 184740 - DNA, 272 bp, Glycine max
gccatattccacaagaactctccaaagatcctccttcccacgagattctttcgtgggaaaaatccaagaggtttgaaatttgaacgcagggaagatggattatttcaatgcaccaggaagacaccatctctttgttctcaggccggttaacattccggatcagatcatccgggccatgaacagagacaatgaggactaccgttctccagcaattccagctatgacaataactttgcttgacgatgtcaagaagattttcacgaccactactg

SEQ ID NO: 184741 - DNA, 282 bp, Glycine max
tctggaaaacaacacacatatgttgagactgagaatgtgcgctatagtttaccagccaatagaggcactgtacctgcttctcgtaacaaacaaaaacagcaacattgtggaagatttggaaactctgagacttctctctaaacttgtacctgaatattcttactcccttgatgaagagggtgtttgcaaacatgcctttgagttgatttttgcatttgatgaagtcatctctcttgggcacaaggaaaatgtgactgttgcacaagtgaagcaatactgtga

SEQ ID NO: 184742 - DNA, 270 bp, Glycine max
ctcgagccgaaaaaatattttcccacatgaaaccaaatagcatactgggtctgtcccatacttttcttcttgggcatttacagtcaataggacttgattttcccaagcacttcagcgtaattgccgtctgcccgaaaggtatgggtccttctgtcaggaggctgtatgtccaaggcaaagagataaatggtgctggaattaattcgagttttgcagtccaccaggatgtggatggcagagctactgatgttgctttggcatggtctgttg

SEQ ID NO: 184743 - DNA, 222 bp, Glycine max
gtgattctgtcaagctagtgatggaagaggatccattacgtcccttaatttagggtggtgatcactcaatctcatatccagttgtcagagccatatctgagaagcttgggggaccagttgatgttcttcattatgatgcacatcctgaactctatgatgaatttgaaggaaattattattcgcacgcatcttctattgctcgaatcatggaaggtggttatg

SEQ ID NO: 184744 - DNA, 273 bp, Glycine max
  unsure (1)..(273): unsure at all n locations
cacacacagtcanactttngtgaaggcctaggattggtgagtcaaacttgaattgaaggtgaagaaggagatggcagcaacttcttccttgtgttcatcgaccctccaatcccaaatcaatggattctgccttcacaaaacctctctttcccatcctcgttccctcactttctccaggaagaaaatttcaaccacagtgaaggctacatctcgtgttgacaagttttcaaaaagcggatatcattgtttctccatccatctttctgcaaattt

SEQ ID NO: 184745 - DNA, 275 bp, Glycine max
agacaacacaacacaacccatggccaccacctccgcattcctcctccttacgctcctcctgctgctccacctcgccatcgccgctcacggcatcggcatcaactacggcacgctcggcgacaaccttccaccgcccgcggcgtgaccgaacttcctgaagacgaagacgaccatcgaccgcgtgaagatctacgacgtgaacccggacatcctgcgggccttcgccggcagcggcatctccgtgacggtgaccgcccccaacggcgacatcgccg

SEQ ID NO: 184746 - DNA, 266 bp, Glycine max
gatcgagataactagaaacagtgtgatgaaaatgaaggtccttgttttcttcgttgctacacttttagtagcatggcaatgccatgcgtacgatatgttccctctccgaatgaacactggctatggtgcccgtactccggaggtgaaatgcgcaagttggaggcttgctgtggaagcacaccgcatctttggctttgagaccatacctgaagagtacgatgagacaacaacagaatacatccatggcgaacaatatagatcagact

SEQ ID NO: 184747 - DNA, 277 bp, Glycine max
gctggttcggctcggggcgaacatgcgagtcatcgatattggaggtggactgggcatagattacgacggttcaaaatcttgtgactcagatatttctcgttgagtacggactcgaggagtatgctgcagcggttgttcacgcggttcagtgtgtgtgcgaccgaagtccgtgaaacaccctgtcatctgcagcgagagtgggagagccatcgtgtctcatcattcggtcttgattttcgatgcggttggcaccagcatcacaaacggcggaggagct

SEQ ID NO: 184748 - DNA, 230 bp, Glycine max
aatatgtaaattcggatcgaggaactatggaaagctgactatgcatttcttcatcgttagattcttctcatgatacagatgcagatcttcgtgaaaactttgacaggtaagaccatcaccctagaggtagagtcctccgacaccatcgataacgtgaaagctaagattcaagacaaggaagggatcacacctgaccagcagagacttatctttgcgggtaaacagcttga

SEQ ID NO: 184749 - DNA, 284 bp, Glycine max
ggcaactgtgttggagttgacatataactatggtgtgactgaatactctaagggaaatgcttatgcacagattgccattggtactgatgatgtatataagagtgctgaggtagttaaccaagtcataaaagaggttggagggaagattactcggcaaccagggccaattcctggccttaatacaaaaaccacttcgtttttagatccagatggatggaaaactgtcatggttgacaacggtgatttcttggaagcactgaagtgaagagccagctttatatgaa

SEQ ID NO: 184750 - DNA, 273 bp, Glycine max
cacgttctccatttttggctttacgaaaccactgtgtctgattaagggttctttaatatttccaatatttcttgtagtgaaaaagctgttagctaaaagaagaccaagtttttactactgtagaaggaagagaagaattaacatgaaaattcagtgtgacgtgtgtgagagagctccagcaacagtgatttgttgcgcggatgaggctgctttgtgtgccaaaactgacgttgaagttcatgctgcaaacaagcttgcaagcaagcaccaaag

SEQ ID NO: 184751 - DNA, 274 bp, Glycine max
cgtttgtctcccctgcagtcaacggcaccccccacaaaaatgacaggagagacagtgaacccaaaagcttaccctttggccgatgcgcaactcgcaataacaatcttggatcttgtgcaacaagctgccaactacaagcaactaaaaaagggtgctaatgaagcgactaagacactgaacagaggcatttctgagttcgttgtgatggccgcagacactgagcctcttgagattcttctccatcttcctctccttgctgaggataagaatgttc

SEQ ID NO: 184752 - DNA, 271 bp, Glycine max
cttcgttcgttctctgcagttatatcctttttgagcatcaatggcggacgctgaaaccttcgctttccaggctgagatcaaccagcttctaagtctcatcatcaacacattctacagcaacaaggagacattcttgcgtgaactcatcatcaatgcttctgatgctttggataagattcgattcgagagcttaaccgacaagagcaagctcgatgctcagccagagctcttcattcgtcttgtgcctgacaaggataacaagactctttcc

SEQ ID NO: 184753 - DNA, 272 bp, Glycine max
atcaagcgtcgcacccatttggatctcttggttctctatgtcacagtggagcagactaagctactccaccacgtagaagccgacggtgggtttgtaaaaacaagaggagtgcagcttatgctgaatgggagtccctactatgctaatggctttaatgcctattggcttatgtaccttgcctctgatccttcccagagatacaaaatctcatcggtatttcaacaggcttcaaatcatggactcaacattgccagaacttgggccttcagtga

SEQ ID NO: 184754 - DNA, 268 bp, Glycine max
caactccataacacaaggcagaaagcaagctcaacctagagttttaaaaatggcagcagcctcctccatggctctctcttccccatccttggctggcaaggccgtgaagctgggcccatcagcccccgaagtcgggagggtcagcatgaggaagaccgtcaccaagcaggcctcctccggaagcccatggtacggcccagaccgcgtcaagtacttgggcccattctctggcgagcccccgtcctacctcactggcgagttcccaggt

SEQ ID NO: 184755 - DNA, 273 bp, Glycine max
agagaacagaagatggcacaaacgctggcaatgcccgtggcaccttcgctcgctatcatctccaattctcgcctctccaagacactctccgttcccgttctcaacaacccaaagtttcaagggttaagcatcaagtgcgttcgtgttggaggtgtggagattccgaacaacaagcgaatcgagtactcgctgcagtacattcatggagttggcaggaccagagcaaaacagattctgtgtgatatccaaatggataacaaaatcacgaaggaa

SEQ ID NO: 184756 - DNA, 293 bp, Glycine max
aatattagtgcgagcatgtcgtcaagtatctcaatacgtgcagaagaaagaagcttggtcagcacatagatccactggtctaaggctagaatatgtacaattgaaagctgtttggccaaagctttttctctaacgaagaagacatcaacttccatgtgctttgtacgactgtggaacacagggttgtgagcaatggacacaacactttggtggtcatagaagaggacacgagtagtgaatggtacttgtaattctgttaaaagagcatgaatccatgttaactcaatggaagt

SEQ ID NO: 184757 - DNA, 280 bp, Glycine max
aagcagtttaaccttggccctaatggtggaattttgacttccctgaacttgtttgccactaagtttgatgaggtaatttctgtgattgagaaacgggcagatcaacttgactatgttcttgtggatacccctgtacagattgaaatatttacctggtctgcttctggtgctatcattacagaagcttttgcatccacatttcccactgtagttgcctatgtagttgatacaccccgttcagaagatcccaccactttcatgagcaacatgttgtatgctt

SEQ ID NO: 184758 - DNA, 270 bp, Glycine max
ggccaatactatttttctttctcaggttctcattatgaaaatgctggaacatcctaatatagtcaatctcattgaggtgattgatgatccagagacggataacttctacatggtacttgaatatgttgaaggaacatggatttgtgagggttcaggtcccacttgtggcttaggtgaagagactgctaggagatacttgcgtgatatagtttctggattaacatatctccatgctcataatatagtacatctggatattaagccagataa

SEQ ID NO: 184759 - DNA, 268 bp, Glycine max
gaagcactcttcgttcttcgactgtctacgatctgctttctctgaattgtgaaaatgtcgctgggagaaactgcttgttcatacgcagctctcatccttcatgaagatggaattagtgtaactgctgacaagatcagcaccttgttgaaaactgcaaaggttccagtagactcttattggccaaccttgtttgctaattttgctgagaagaaaaatcttggcgatttgatagcaaatgcggcaggcggtggtgcaccagttgctgttg

SEQ ID NO: 184760 - DNA, 273 bp, Glycine max
  unsure (1)..(273): unsure at all n locations
gaagcctcagacaggatcaaagctggtttcattcacttcaagaaggagaaatacgacaagaatccagctttgtatggtgaacttgccaaaggccagagccccaagttcatggtgtttgcttgctcagactcaagggtgtgcccatctcatgtgccagatttccaaccaggagaggcctttgtggtcagaaatgttgccaacattgtcccaccatatgaccagtcanaatacgctggaactggggctgcagttgagtatgctgttttgcatctt

SEQ ID NO: 184761 - DNA, 295 bp, Glycine max
tcggctcgatctttcctaaagaaaattggaacctggctctgttgttaaagttacgtaatattgcttgagtagaggggcttgagaaaactgtgcaagctttggaacttcttcaaagtctggtacttcaatggctaccgaagaggctcataaacttcaatcacttcctccttaccctcaggtaattcacatcaatagtcagaatcccttttttattgtaagaggtctctccaaaattattaaaccttggagaaattttcctagtaaagttggcagatttcacactggtgtaattgat

SEQ ID NO: 184762 - DNA, 288 bp, Glycine max
cgtcgcccgacaacttgggtgttccattttcctgttacctgaggacataatagaggtcaaccagaagatgattctcattttagctgctagtataatgtattggagcctcaagaaacctgaagaaaacatcacccctgaagcatcgcctaaagcttcagtagatggtgaaagcgaaacagatttagttgatgaggtatcccatttagccattgacgaggtatccaatttagccattgatgagacaattcggagaatgctagctcttcttaagttagtactggttgaagt

SEQ ID NO: 184763 - DNA, 289 bp, Glycine max
ctcttcttctcttgcggccagggttttagcgcacttcttctagatttaaggaagatgggtaaggaaaggttcacatcagtattgtggtcattggccatgtcgactctgggaaatccactaccactggtcacctgatttacaagcttggaggcattgacaagcgtgttattgagaggtttgagaaggaagctgctgagatgaacaagaggtctttcaagtatgcctgggtgctggacaaacttaaggctgagcgtgaaagaggaatcaccattgatattgctttgtggaa

SEQ ID NO: 184764 - DNA, 261 bp, Glycine max
gagataactagaaacagtgtgatgaaaatgaaggtccttgttttcttcgttgctacaatgttggtagcatggcaatgccatgcgtacgatatgttccctctccgaatgaacactggctatggtgcccgtactccggaggtgaaatgcgcaagttggaggcttgctgtggaagcacacaacatctttggctttgagaccattcctgaagagtgcgttgaagcaacaaaggaatacatccatggcgaacaatatagatcagga

SEQ ID NO: 184765 - DNA, 274 bp, Glycine max
caataacatagcatagagtgagaagtgagaagagacaactggcaatctccatacccagtagacaacttttcatagatggagagtggaaagtcgctcttctcaacaatcggtttccgatcatcaagcccgctactgaagacatcatagggcatattccagccgctactaaggaagatgttgaccttgcggtggatgctgctacaagagacttttcccataacaaaggcaaagattggtcttcagctcctggctctgttcgtgctcgctatcttcg

SEQ ID NO: 184766 - DNA, 295 bp, Glycine max
  unsure (1)..(295): unsure at all n locations
atcctattaaccttttcttctttcatttcccaccccattctatanctcaatcaatggcaatggctttcttcaatccctaatgcgccttctgcgttcaattctcagagctacgttggtctcagagcgccactgaggaccttcaacttttcttctcctcaagctgccaaaattcctcgctcccaacgccttttcgtcgtcagagcctccgattcggagttcgaagccgccgttgtcgccggtaaggttccgccggcgcctcccgtnccgnccagaccggcggctccggttggaacac

SEQ ID NO: 184767 - DNA, 281 bp, Glycine max
cagccacacgcttcagaagacatggcctcattgggtgggttacaaaatgtgagcaccatcaattttcttatcaaagagggtccaaaagtcaatgcaaagttcgagctgaagccgccaccatatccactgaatggtttggagccggtgatgagccagcagacacttgagtttcactgggggaagcaccacaagacttatgtggaaaatctgaaaaaacaagttgttgggacagagcttgatgggaagtcactagaagagattattgtcacatcatacaataa

SEQ ID NO: 184768 - DNA, 299 bp, Glycine max
tctgctcgagacgcgctccgctgggcgccgcatcacctttgagtccagggactacgtcgtggaggagctgacggcggagagcttcgatggcgtcgacatcgcgctcttcagcgccggcggctccattagcaagtacttcggccccatcgccgtcgatcggggaacggtggtcgtcgacaacagctccgcgtttcggatggacgagaatgtcccattggtaactcccgaagtgaacccggaagcaatgcaaaacatcaaagccggaactggaaagggcgcactcattgctaaccctaatt

SEQ ID NO: 184769 - DNA, 288 bp, Glycine max
gcttcttagaatcagtagcaaaggctcttcgacccggaggagtgttctctgctccagcagacagcctgtggcataagaactttgtggttgcagacaccatagcaaattgcaagaagatattcaaaggctccgttaactatgcttggaccacggttcctacatatgcaagtggggtgattggattcatgctttgctctacggagggtccaccagtgaacttcaaacatccaataaataaattgaatccagagaaaaatggggtggcaaagggacctactaagttttatt

SEQ ID NO: 184770 - DNA, 287 bp, Glycine max
gtggaacaaccttgtaagtttgtaacaatgacttcctcggttacttcctcttttcgcatcagcaatttgaattctgtttttgttggtgagacaaataaattcagagtttcaactgttcctggtgctcatgttggtttcattagaaagactgtagaatgtaaggtatcacgaattgggaagctaccaattcctgtgccatccaatgtcacagtcaaattggaaggacaggatatacaagtgaaaggtcctctgggagaacttgcattaagttatcctcgagaagtgtt

SEQ ID NO: 184771 - DNA, 286 bp, Glycine max
attcggatctagagtcttcagtttctcctcgttgttcttcgctttcctgtattcaacttcgattcttacgtcaatttaataagatgtttgggagggcacgaagaagagcgataatacgaggtactacgaaatcctcggcgtctccaagaacgcttcgcaggatgatctgaagaacgcttacaagaaagccgccattaagaatcaccccgacaagggcggtgatcccgagaagtttaaagagctggcgcaagttatgaggttctgagtgaccctgagaagcgtgaga

SEQ ID NO: 184772 - DNA, 283 bp, Glycine max
ctgggcagttgtttctcaaggttattcatagcagtgtgtgggctggtcagaagcgacttgggcagttggcgaagtggaaaacagcagaagaagttgctgctcttgtaaggtctttgcctgttgaagaacaaccaaagcaaattatcgtcactcgtaaaggaatgttggatccattggaggttcacctgctggacttccccaacattgttattaaaggaagtgaactgcaacttcctttccaggcatgtttgacaattgagaaatttggggatcttatcttgaa

SEQ ID NO: 184773 - DNA, 286 bp, Glycine max
ttggctctctctctctgaacccttcagtgagacacaacacaagtcatagtccattgggcatgtctgtgtatctttggcggttatatagggtttctggctgagcagcaatttgttgttgttgtaatcaatttttgaagaaaagatggggaagacagcagcttccaatcctgctttgcaagtgtctgtttcatttggtagatttgagaatgattccttgtcttgggagaaatggtctgctttctccccaaataagtacttggaagaagttgagaagtgtgccactcct

SEQ ID NO: 184774 - DNA, 292 bp, Glycine max
cttctctcgttgattcggatctagagtcttttttcactcttcacttctcgttgttgttcttcgctttcctgaaactagggttttcaatttcgattcattcgttaataattaaagatgtttgggagggcaccgacgaagagcgataatacgaggtactacgaaatcctcggcgtctcgaagaacgcttcgcaggatgatctgaagaaggcttacaagaaagccgccatcaagaatcaccctgacaagggcggtgatcccgtcaagtttaaagagctggcacaagcatatgagg

SEQ ID NO: 184775 - DNA, 293 bp, Glycine max
ttcagattacattgcaaaaatggcatcattcaccatgacagcttctatctttggctgcccagctgtcaccaaacggtcggcagtggctgcgcagaggagattactcgtagtgagtgctgccaaagctgaaggggaaaaggtcagttatgacaacaatgctagcaatggaaggaggaacttgatgttcgctgtggctgctgctgctgttttctctgttgctgggatggcagtggcagatgagcctaaaccaggaacctcagaagccaagacaaagtatgccccggtttgtgtca

SEQ ID NO: 184776 - DNA, 280 bp, Glycine max
ctgttctaccgattagtgtctcagaaatttgaggatcctgcagaaggggaagctgtttggttgctcatttcagaagttacacgaggacctgactaatggtttccgcaaccttgaggacgaaacccgatgattgaagatttggtatggtagtttgctcaaataatgtgttatctccaattgtaagaggcagtctagcatcgcagggttacaccgtcccgagtgttcttatatttgactgttctgattcattcatatcacatttatttcctttcttggtgct

SEQ ID NO: 184777 - DNA, 281 bp, Glycine max
aattgttgtaactttttgattcctaaattctctaaaattcgaaattctaatttcgttaggggaaagagattgtcctgtgtgtgagtgagtatggctggaaaaggcgagggtcctgctatcggaatcgatttgggaacgacgtactcttgcgtcggcgtgtggcaacacgatcgtgttgatatcatagccaacgatcagggtaacagaactaccccctcctacgtggctttcaccgacacagaacggttgatcggcgatgcggcgaagaaccaggtcgctat

SEQ ID NO: 184778 - DNA, 225 bp, Glycine max
tcaaaaccagacacacacacaaacaaacgctcaatctctcgtcgttcttactatttgcggtttcttcttcttctcacgttctacctaacattttctaaaacatgtctggggaagaggaagaaaacgccgcagagctcaaaattggagacgagtttttgaaggcaaagtgcttaatgaactgtgaagtttcattgattcttgagcacaagtatgagcagcttcaac

SEQ ID NO: 184779 - DNA, 245 bp, Glycine max
cgagcagacgacagcgttctgagtcttttcttcttcgttaccctcttcacatgccttctctctgttacttcccacgatgaccatattttcctagcgagtcaactccatgacgatgactcagtgagttgcactgcaaccgacccaagctcttaactagaaggcggtgatcggaatcctgagccaccccggcgacggtgcctctggccggctcagcaacgccaccggggtttcttacatcgccgcct

SEQ ID NO: 184780 - DNA, 274 bp, Glycine max
cgcagaaggacgagaagcagacagaggagacgaagcaatggcgccgaagaagccccgacacacgtcgaggaaccctgatttggtcaggggaattggcaaatattcgaggtcgcagatgtaccacaagacgggcatctgggccatcaaggccaaaaacggcggtgttttgctcctccacgatcccaagcccaaacccgaggctccggcccagaagccgcccaagttctacccggccgatgacgtgaagaagcccctcgtcaacaagcacaagccc

SEQ ID NO: 184781 - DNA, 239 bp, Glycine max
ctaaaacatctccagtgggttcttcttcttctattacaacaacgtcatccaacatcatgtaccatggccatggccacgatcctgctcctgttcacagtcttcgcggtttcatcggccctagacatgtcgataatcttgtacgacaacgcctaagtcgcgatgtcgtgcaggcgagccgagctgatgtccatgtacgagcagtggctggtgaagcacggcaaggtgtacaacgcgctcgg

SEQ ID NO: 184782 - DNA, 281 bp, Glycine max
  unsure (1)..(281): unsure at all n locations
gagaatggcaactatgactggtgtgagcntttcatgcnccagggttttcttcaacgcatcagnctcanngcaaaacgcgcatgctgtaaagttctcanttncacacagccaagaannganaacgggtagtatcaagttgggtcgcgtgatgaggatncgacncgttcgagntgcgnctgagcgcatatcggagaaggtggaggagagnaaagnaacgcgnaggaggcgtgngcnggngatccgacgagcggcgagtncgtngcggngtggngagaggtgga

SEQ ID NO: 184783 - DNA, 280 bp, Glycine max
  unsure (1)..(280): unsure at all n locations
tctcacttgactcgattgcaagtgatccacgacacactgttcgcttcacaaacgtntcgaatccaattcctccagtnacatcntgcatgaagtcttaccccttcaccatggccaccaaagcctttagactatgggtcaataaatgaaaacgtgaagaagagtcaatatgctgtcagaggtgaattataccttcgagcttctgagcttcagaaagagggcaaaaagattatatttactaatgttggcaacccacatgcattgggacagaaaccactgagct

SEQ ID NO: 184784 - DNA, 268 bp, Glycine max
caggcctcctccggaagtccatggtacggcccagaccgcgtcaagtacttggggccattctctggcgagcccccgtcctagctcactggcgagttcccaggtgactacggctgggacactgctgggctctcggccgacccagaaaccttcgccagaaaccgtgagctcgaagtgatccactccaggtgggccatgctcggggccttgggctgcgtcttccccgaactattgtcccgcaacggggtcaagtttggagaacccgtgtggt

SEQ ID NO: 184785 - DNA, 287 bp, Glycine max
tcgagcgtcagcaatggtgtacgacaaggctcagacatcagaagcctacctcaagagctatcaagtctagttacagataagacgagagggaaaaacggattatcgtgccaagattcggttgattaatcaggacaagaacaaatataacactccgaaataccgatttgtggtgcgctttagcaacaaggacattgttgcacaaataatatctgctagcattgccggcgatttagttcatgctacagcatagtcacatgagctgtcacgatatggtcttgaagtaggac

SEQ ID NO: 184786 - DNA, 279 bp, Glycine max
tgcgaaatcatagttagaagtcttaaacattcaacctcaatttgcagagttctaatattacattgcagagaaaatgtctttgattccaagtttctttggtggcagaaggagcaatgttttggatcctttctccctcgatgtgtgggacccttttaaggattttccttttcccacttctctttctgctgaaaattcagcgtttgtgagcacacgagtggattggaaggagacaccagaagcacacgtgttcaaggctgatattccagggctgaagaagga

SEQ ID NO: 184787 - DNA, 257 bp, Glycine max
gctgagttcattgccactttgctcttcctctacattactgtgctcacagttatagggtacaagcaccagacggatcatgctgatgcgtgtggtggggttggcattcttggcattgcatgggcctttggtggcatgatcttcatccttgtctactgcactgctgggatttcacgaggtcacattaacccagcagtgacatttgggctgttacttggctcgcaaggtgtctttgatccgagccatcatgtacatggtgg

SEQ ID NO: 184788 - DNA, 286 bp, Glycine max
cctgaacttgatgatgtctgatgttccagggattgaagaagaggaaaaacaaaggctgttacactgtgtggttgtcggaggtggtcccactggagtggaattcagtggtgaacttagtgattttattgtcagagatgtccgtcagagatatgctcatgtgaaggactacatccacgttactttaattgaggccaatgagatattgtcttcctttgatgtccgactcaggcagtatgccaccaatcaattgacaaagtcaggagttcgacttgtccgtggcattgtg

SEQ ID NO: 184789 - DNA, 151 bp, Glycine max
gtttgttgtgagctataagctagtttatcgtgaggagaatatgacgttgtttgttactctatgttgctgcagtagtcttggtagcatggccatgccatggcgcaggctaccaaaggttccctctccgaatgacaactggctatggtgagcg

SEQ ID NO: 184790 - DNA, 260 bp, Glycine max
gagcaagctcatcctagagttttaaaaatggcagcagcctcctccatggctctctcttccccatccttggctggcaaggccgtgaagctgggcccatcagactccgaagtcgggagggtcagcatgaggacgaccgtcaccaagcagtcctcctccggaagcccatggtacggcccagaccgcgtcaagtacttgggcccattctctggcgaggtcccgtacctactcactggcaagttcccaagtgactacggctggga

SEQ ID NO: 184791 - DNA, 279 bp, Glycine max
cacacatattctttgttgcaatatcacaaacacctctcccgtcacaatgcagctagctgtgcgcggcaacgctgtcgtctcaccgtcgccgttccgacgtcatccccttctccggtcatccttctccggcgtctccgttaagctcactccccaatccataacgttgtcacgcttgaagcccctcagcgtcttcgccgcgaactagaaggtcgtcgctgtcctcaaggggacctccgccgtcggaagcgtcgccactctcatccaaggagacgatggccc

SEQ ID NO: 184792 - DNA, 273 bp, Glycine max
cttcaggtcaccatctagactgcaatcatggctgatggaccagcgcatccatcagttgttcagacgctagctggacaatcttacctggtgtccaggcttagccccaactttaactctaggaattattctgcaactggttcttacgtcaatggcggtatgcactcgcctgggttggctgttgtgtcacctgtatctccagttactgtgcatgctccagcagagaaaggagtgagtggatttctagtggattttctgatgggtggagtatccgct

SEQ ID NO: 184793 - DNA, 279 bp, Glycine max
ctcaaaagctcaacaaccacatgccatggcaacagcgtcaatgtgtatgagcttcaacctggcaacagcattcaagggtctctctttatcttcttcttcatcgttcttcggtggaagtagtggttctctccgcgcgcggtcctgcctcggtggtgtcgctgccccggcgctgcccgctgaccatagagaacgcgcacaagaagggggcgggcagcaccaagaacggccgcgactcgcagggcaagcgcctcggagtcaagatttacggcgaccaggtcg

SEQ ID NO: 184794 - DNA, 273 bp, Glycine max
  unsure (1)..(273): unsure at all n locations
gctgttgcaaacaagggtgctggtggaaggtccagtgcaaagaaacgaccannacatgggntggaaaaaatgcctccacagaaagagaggatccttcagagttcatcacacacagagctacagattttctctctagcataaaggatatagagcataggttcattcgagcttctgaatctggtagggaggtcttgaggttgttagaggctaacaaaatcaaggtgggatattctgaggccaaagggaagtcgtctaccactgctttgttgtctg

SEQ ID NO: 184795 - DNA, 274 bp, Glycine max
ggctctgcagaaccagatagatgagcttgcagcgttttctgactctcctgctccatcagtaacaagggtcttgtatactgacaaggatgttttaggtcgcaggtatgtaaaaacccagatggaacttgctggtctatctgtgagagaggatgctgttggtaacatatttggtcgttgggatggcgttgaacctgagcttgctgcagttgcaacaggttcgcacattgatgctataccttactctggaaaatatgatggagttattggtgtttta

SEQ ID NO: 184796 - DNA, 217 bp, Glycine max
atgccatgcgtacgatatgtcccctctccgaatgaacactggctatggtgcccgtactccggaggtgaaatgcgcaagttggaggcttgctgtggaagcacacaacatctttggctttgagaccattcctgaagagtgcgttgaagcaacaaaggaatacatccatggcgaacaatatagatcagactccaaaacagttaaccaacaagcttacttt

SEQ ID NO: 184797 - DNA, 279 bp, Glycine max
ctttattccttttgtaatttcattcattcttaatctttgtgaaaactaatgttcatcgagaattttaaggttgagtgtcctaatgtgaagtacaccgagactgagattcagtccgtgtacaactacgaaaccaccgaacttgttcacgagaacaggaatggcacctatcagtggattgtcaaacccaaatctgtcaaatacgaatttaaaaccaacatccatgttcctaaattaggggtaatgcttgtgggttggggtggaacaacggctcaaccctca

SEQ ID NO: 184798 - DNA, 285 bp, Glycine max
gcttcaacttgctccctcagaagcgaagaagaagccacagatccctagtctcctactctcacccgcaagaagaaaatggcatctcacatcgttggatacccccgtatgggtcccaagagacagctcaagttcgctctcgagtctttctgggatggcaagagcagcgccgaggatttgcagaaggtgtcttctgatctcagggcatccatctggaagcagatggctgatgctcggatcaagtacatccccagcaacactttctctcactatgaccaggttctcgac

SEQ ID NO: 184799 - DNA, 282 bp, Glycine max
aagaggtcgagtttcacagcagcaatggtgtacgtcaaggctcagaaatcaaaagcctacttcaagagatatcaagtcaagttcaagagaagaagagagggaaaaaccgattaccgtgccaggattcggttgattaatcaggacaagaacaaatataacactccgaaataccgatttgttgttcgctttagcaacaaggacattgttgcacaaataatatctgctagcattgctggcgatattgttcttgctgcagcatatgcacatgagctgccacgatat

SEQ ID NO: 184800 - DNA, 227 bp, Glycine max
  unsure (1)..(227): unsure at all n locations
cggctcgagcggctcgagggagaacaccgagggatccagatctgcgacgaacggggttctgcctctggcgcgcaaggtggcattgattaccggaattaccggccaagacggttcgtacctgacggaattccttctagacaacggacaattttcgcacggtctgatccgncgctccncgaacttcaacacgcagcgcaacgttcacatcnatgtggatccccacaacg

SEQ ID NO: 184801 - DNA, 284 bp, Glycine max
ccaatctacaataaacgatgattctcattatctccctcattttttctcttctctctttctcccatgcttctgtcctagatttctgtgttgcagattatgcaggtcctattggacctgcaggatattcctgcaagaagccttcaaaggtcacagcagatgattttgcttacagtggccttggcattgctggtaacacctcaaacattatcaaagctgcagtgacccctgcatttgatgctcagtttgctggtctcaacggtcttggcatttccgcagcacgtttg

SEQ ID NO: 184802 - DNA, 290 bp, Glycine max
  unsure (1)..(290): unsure at all n locations
acagtattttcccaggtttaacgacaactacacaatattcgggagaaccttttccttaacacatacgtgtttcagtagctcttactataaccggtttgtctggaaatatgcgtacccatatttgtccacctcgtcgaacatttcgtgacattgcccgccttnccgcttctatttgtctagatgttatccaagctggctcaagtgcttgaagagcatatcttccgaagcaaatatgattttctcgataggatattcctttcattcttccactatgttgtttacttgatctg

SEQ ID NO: 184803 - DNA, 298 bp, Glycine max
  unsure (1)..(298): unsure at all n locations
gcattttcagaggaaaatggcgggtacggtttcgacttgtttcttcttcgtgtttcttctttctctccttcttccttttcagatctccgctgaggaatcctcggagaaggagttcgtactcacattggatcactctaactttcacgacactgtcagcaagcacgatttcatcgtcgtcgagttctacgccccatggtgtggtcactgtaagaagcttgctccggagtatgagaaagctgcttctatcttgagtagtcatgatcctcctattgtcttggctanagtagatgccaatgag

SEQ ID NO: 184804 - DNA, 283 bp, Glycine max
ctcattttgcaagctttctttggtttcacaccatttttctattgccttctgcacaatataaaagttcattagtgtcggtattatcaccaccatattcttttcgacttcctctgctatttctaggtttcgttttatttggctttgatgttcatctgcaatatcatctaatgcaactatccggatactgagtctaacttatcctgccacagtttgccttgtttacctgagctctgtttttaactggtctttgatcaaggatggccataaaggcaattgagttgtt

SEQ ID NO: 184805 - DNA, 282 bp, Glycine max
  unsure (1)..(282): unsure at all n locations
gagaactgatttgacggacgatgagaatgctcttctacagcaggcccntgcaatgtcaatggatgatcccacaattaaccatgaagtgagagatacagatatgtctgaagcagctgctgaagatcccgagttggctctagctctccaattgtcagtagaagacagctcaaaggactcggcaagccagtctgacgtgagtaaactgttggcagatcagtccttgtatcttctatccttgcatcgcttcctggggttgacccaaatgacccatctgtcaaagat

SEQ ID NO: 184806 - DNA, 282 bp, Glycine max
aaagaaagagaagagaagaatcgaagacgaagatggaggacgcatcagcatcaaagttcattccacaccaaatcggaggggtccaaaacgacgcgcttcgattcggtctccatggagtcaagagcgacatcgttggttctcaccctcttcaatcttcactccaatctacaaggagaatggatgaagcgatgaagaggcaatgcaaagttaacctgtacggaactgcttttcccatgaaggaggagcttgacaggcaaatcctgtccaggttccagcggcctc

SEQ ID NO: 184807 - DNA, 283 bp, Glycine max
ccatgatgttgttcttgtcggtggttctactaggattcccaaggttcaacagttgttgcaggacttcttcaacggaaaggagctttgcaagagcattaacccagatgaagctgttgcctatggtgcagcagtgcaggctgccattctcagtggcgagggtaatgagaaagtgcaggatcttctgttgttggatgttactcctctctcccttgggttggagaccgcaggaggagtcatgactgtgttgattcccagaaacacaaccattcccaccaagaaggag

SEQ ID NO: 184808 - DNA, 282 bp, Glycine max
acagaggatgaccccgggagcggcgagattgacggaggtgaggaggatcgtccgtttgggattaacaatgggcacagtgagggcgctgatggtgttgttgatgctgatgatgaggaggagagtgacgcggatgaggaggagacggagtcgtcgaggcggatggttgttaatggggagggccaccgggagaacggttttcgggttgcgcccgtcgagggtgacgacgtggaggaggaggatgacgaggatgattccggggaggagattgatgaggaggagggg

SEQ ID NO: 184809 - DNA, 292 bp, Glycine max
actcgagccgaatcggctcgagctcacaaacaactcttgagaaagacagaatggctgccaacacattgatgagttctgccatctcagccttcccatctctcctttcctcctcaaaatccagatttgccgcagcagttcctctttccagctttgttgtcaccaatgcctcttcttctcgcttttccatgagtgctgactggatgcctggccagcctagacccccctaccttgatggttcagcacctggtgactttggattcgaccctcttcgtcttggtgaagtaccagagaa

SEQ ID NO: 184810 - DNA, 292 bp, Glycine max
cgaaacatcactagcttacgctctgacccgagtagcatggggcacgtggaatcccgtgtgaatcagcaaggaccaccttgcaaggctaaatactcctgggtgaccgatagtgaagtagtaccgtgagggaagggtgaaaagaacccccatcggggagtgaaatagaacatgaaaccgtaagctcccaagcagtgggaggaggctcgggactctgaccgcgtgcctgttgaagaatgagccggcgactcataggcagtggcttcggttaagggaaaccaccggagccgtagcg

SEQ ID NO: 184811 - DNA, 298 bp, Glycine max
aaattctcaaagatttaaactttgtctcagagtttccaaattcacccaaccccagagagaaaatgtctctaatcccaaatttcttcggtggcagaaggagcaacgttttcgatcctttttccctcgacgtctgggaccccttcaaggattttcctttcccaaacactctttcttcagcttcctttcctgaattttctcgggaaaattctgcattcgtgagcactcgtgtggattggaaggagaccccagaagcacacgtattcaaggctgatattccagggctgaagaaggaggaatt

SEQ ID NO: 184812 - DNA, 294 bp, Glycine max
cgaccttcgttctcaattggagaatgacttcgtgcattctcttcgcgatgaggttgttgaaggaggtgaaacggaggctattcggccgttgctgtggtaccctgggaacttcgcttagcattcaaatttttctcggatgcagctcaggaagaaccaaacgcttgagaggttccatgaattcttaaaactagaaaatgagattggaaatatcacaagacaggaagctgtcagtatggttcctcccctcttcttggatgtgcattcagatcattttgtgcttgatatgtgtgctgc

SEQ ID NO: 184813 - DNA, 283 bp, Glycine max
cagagagggagattctttgtttgctaccttctctcggaaaaatggttacgttcaggtttcaccagtaccaggtggttgggagggctcttcccacggaagcagatcagcaccccaagatctaccgaatgaagctctgggccaccaacgaggttcgcgccaagtccaagttctggtattttctgaggaaactgaaaaaggtgaagaagagcaatggccaagtgcttgccatcaacgagatttttgagaagaacccaaccaaaattaagaactatggtatatggtt

SEQ ID NO: 184814 - DNA, 277 bp, Glycine max
caaaagggttgtattttttttataagaagaagaggagagggaagatgatgatgatgacaatggaggggatgatggacaagggggtgttggatgatgtgataagaaggcttctggaagggaaaggagggaaacaggtgcaactctcagagtcggagatccgtcaactctgcgtcaacgccagacaaatcttcctctctcagccaattcttctcgacctccgtgctcccatccgcatctgcggtgatatacatggtcagtaccaggacttgctgaggct

SEQ ID NO: 184815 - DNA, 279 bp, Glycine max
actcgagccgaatcggctcgagctttaaagttacatagtttttcaacgttttacttaatctaccatggctgcttcaacaacgactctctcttcatcatcattggctggccaagctatcaagcttgccccctccacccctgagcttggtgttggaagggttagcatgaggaaaacagcctccaagactgtttcctcaggaagcccatggtacggcccagaccgtgtcaagtacttgggcccattctctggtgagcccccatcctacctcactggtgaatt

SEQ ID NO: 184816 - DNA, 280 bp, Glycine max
cgttgatcgagataactagaaacagtgtgatgaaaatgaaggtccttgttttcttcgttgctacaattttcgtagcatggcaatgccatgcgtacgatatgttccctctccgaatgaacactggctatggtgcccgtactccggaggtgaaatgcgcaagttggaggcttgctgtggaagcacacaacatctttggctttgagaccattcctgaagagtgcgttgaagcaacaaaggaatacatccatggcgaacaatatagatcagactccaaaacagt

SEQ ID NO: 184817 - DNA, 279 bp, Glycine max
atctatctcactttcctattacagtatctttacctcaatggcaccaagttctgcagtgccagatgaacaggttgttgttggagaggagattgagcatgtaagagtggtcactttgaacaggccaaggcaattgaatgccatctcaccagaactggtttctcagctagcaacatatttggaaaagtgggagaaggatgagaaagcagaactagttattataaagggagctggtcgggctttttgtgctggaggagatttgagagtcttctatgatggaag

SEQ ID NO: 184818 - DNA, 284 bp, Glycine max
aaatcttaaaaatattcagtgaagatcaacctcaatggcatctcttggcgtgcgaccagttcttccccctccattaacttccatctccgacccacctcctcttttcgatggcaccaccaggttgtacatcagttattcttgcccctatgcacaacgtgtgtggatcgctaggaactacaaggggctacaagataagatcaatttggtccctattaaccttcaagacaggccagcttggtataaggagaaagtctaccctgaaaataaggtgccatccttggagc

SEQ ID NO: 184819 - DNA, 298 bp, Glycine max
gcagttccaaggaacttcagattgctggaggagcttgagaagggagaaaaaggaataggagatggcacagttagttatggaatggatgatggtgatgacatttacatgcgctcttggactggaaccattattggtccctataatactgtacatgaaggaagaatttatcaattgaagctgttttgtgataaagactaccctgaaaagcccccgagcgtccggtttcattcacggatcaatatgacttgtgttaatcatgaaactggagtggtacagttcataggttttcacatgctct

SEQ ID NO: 184820 - DNA, 287 bp, Glycine max
aatctctctctctccaatggccaaagacctcgaaacggagattcaaagtgggttgcctcacaaggactaccacgacccaccccccgccccattctacgaccccgccgagctccgaaagtggtccttcttccgagccctcatcgccgagttcgtcgccaccctcctcttcctctacgtcaccatcctcaccgtcatcggctacaaccaccagacagccaccgccgccgagccctgcagcggcgtcggcgtcctcggcatcgcttgggcctttggaggcatgatttttg

SEQ ID NO: 184821 - DNA, 285 bp, Glycine max
gtgagctttacattcatcgaattggccgttctggacgttttggaagaaagggtgttgcgataaattttgtgaagagcgatgacatcaagatcttgagagacattgaacaatactacagtactcagattgatgaaatgccaatgaatgttgctgatcttatataatttgtcacgtggtgtgctggatggagtggatttgtcatatcttgtggtagggagtagtgtttgaatgtggtttcttgctatggaatgcattcgtgatgctcttgtacacttttgacttttg

SEQ ID NO: 184822 - DNA, 276 bp, Glycine max
ctgccatcgataacatatcacacttgagacagttatctgtatctacgcaagagaagaatagaaaatggatatcaggttgatggatttggactctccattgttcaacactctgcaccgaatcatggatctgacagaggacgcagagaagaacttgaacgctccgacgcggacatacgtgcgcgacgcgaaggcaatggctgcgactcctgcggacgtgaaggagtaccctaactactacgtgttcgtgatcgacatgccaggcctgaaatccgggga

SEQ ID NO: 184823 - DNA, 273 bp, Glycine max
catctattgacactgtaatggtgaattattcaagaggacccgacaatcccacaaagcagaaagagaggttgttatgttatggcgggcaaaggtgttggttcagtggctaaggcagtagcagaatatcagtatccttggcgtgagaagttggcgaaatataaggatgagtttgctaagggtgtgtggggatactgggagctgggggcatggaagccgctgagcatcggtgctcggcatcgcgctagaattcgcaaggaagtcctccttgctggg

SEQ ID NO: 184824 - DNA, 276 bp, Glycine max
ctttataaggaggaatttgaaaagatgaaggagaaagcacctgacaacttcaggcttgactttgctgtgagcagagagcaaacaaacgaaaaaggagagaaaatgtacatccaaacacgaatggctcaatatgcagaagagttatgggaattactgaagaaagataacacttttgtctatatgtgtggactgaagggaatggaaaagggtatagatgacataatggtttcattggctgcaaaagatggtaatatcacttaactttaggggcacttt

SEQ ID NO: 184825 - DNA, 272 bp, Glycine max
tgttgatcgagataactagaaacagtgtgatgaaaatgaaggtccttgttttcttcgttgctacaattttggtagcatggcaatgccatgcgtacgatatgttccctctccgaatgaacactggctatggtgcccgtactccggaggtgaaatgcgcaagttggaggcttgctgtggaagcacacaacatctttggctttgagaccattcctgaagagtgcgttgaagcaacaaaggaatacatccatggcgaacaatatagatcagactcc

SEQ ID NO: 184826 - DNA, 280 bp, Glycine max
aataaactgctaagctaactgaactctccctctctccttcctcgttcctttcgcctctcactacaaatacacatctcatctcatccgtctctcacttttaatttttctctgcaatctgaaccttccggatttcgtttttctttgttccggtagccagccagccagccatggtgctcttcaatgtttcacgcgttgagaccactcccttcgatggacagaagcctggaacctctggtctccgcaagaaggtgaaagtattcgtgcaacctcattacctcca

SEQ ID NO: 184827 - DNA, 281 bp, Glycine max
atataatatacatacatatatatataacttattcccccgcatcttttgatccgtgctctgtgattcccagaccttattttttctgtcatttgcttcaaatttcaggagattaattatggctcaacccacaacaagaataggccttgctggattggctgttatgggccaaaatctggcactcaatattgctgagaaaggctttcccatttctgtttacaaccgaaccacttccaaggttgatgagacagtagaacgagcaaaacaagaaggaaatcttccag

SEQ ID NO: 184828 - DNA, 292 bp, Glycine max
gacatttctgaacaacaattttggacagcctcagcttgtggtttaatgggatacttgcaatttgatgagcttgtcgaaagaggcattattcccttccaagatgaaagtttcactactgatgggtcattggatacaaatctagactggatatctggaatgaaaaatatgcgaatcagagattgtccaagtttcgtgagaactaccactctagatgaaaccagttttatttgctttggtatagaagcaaaaacctgcatgaaatcatcttcaatcataattaacaccatccaag

SEQ ID NO: 184829 - DNA, 289 bp, Glycine max
gtcaatggtgactgctctctgtcaaccaatcacaaaatttagaattttcaatgtatcatttttaacttaaatactgtgagactctgtgtcagagtttgtgaagtgaatcccataatcatgaagaaaggaaacttgggacttggtctcaaactctcagttcctgtgtctgatcaatctaattttgccaggttcctgactgaaagtgggacttttaaggatggggatctgcttgtcaacagggatggagttcgaattgtctctcagaatgatgtcgaagctccacctccaa

SEQ ID NO: 184830 - DNA, 280 bp, Glycine max
aattttctaattctagataattttggtgcttgggagtccctaatgattaaatgaaccaagattttaccatgactgcaattttagagagacgcgagagcgaaagcctatggggtcgcttctgtaactggataaccagcaccgaaaatcgtctttacattggatggtttggtgttttgatgattcctactttattgaccgcaacttctgtatttattatcgcttttattgctgcccctccagtagatattgatggtattcgtgagcctgtttctggatctct

SEQ ID NO: 184831 - DNA, 277 bp, Glycine max
cagagagagggaggagggagagtgttgacgctccatcaagatgggtatttctagggactccatgcacaagaggcgtgccactggtggcaagaagaaggcctggagaaagaagagaaagtatgagcttgggcgtcaggccgcaaacaccaagttatcaagcaacaaaactatccggaggattcgtgttcgaggtggcaatgttaaatggagggcattgaggttggataccggcaattactcatggggtagtgaagcagttactcgcaagactcgtatt

SEQ ID NO: 184832 - DNA, 275 bp, Glycine max
acttgatgtccgtccctcaaatgaacacaaaaaggcatgggtgagagcttcaacctggattccaatatttgatgttgataataagctagattttggaaccattcccagaaaagtcacaagctttgttatgggaggttggtggagtggcatgcctacactgtcttatgacagtcagtttttagccaaagttgaggagaagttccccaaagatgctgaattaattgttgtatgccagaagggactgagatcacttgctgcctgtgaactgctgtata

SEQ ID NO: 184833 - DNA, 275 bp, Glycine max
ctcgagccgctcgagccggtagaactgaaggctccatggatgctgctaatctattcaaacacatgcttgaccgcggccagcttaggtgcattggtgccaccacgcttgaggagtacaggaagtatgtggagaaggatgctgcattcgagaggaggttccaacaggtttttgtggcggaacctagtgtggttgataccattagcattcttcgtggcttgaaagagagatatgaaggccatcacggtgttagaattcaggaccgtgctttggttatg

SEQ ID NO: 184834 - DNA, 277 bp, Glycine max
atcgagataactagaaacagtgtgatgaaaatgaaggtccttgttttcttcgttgctacaattttcgtagcatggcaatgccatgcgtacgatatgttccctctccgaatgaacactggctatggtgcccgtactccggaggtgaaatgcgcaagttggaggcttgctgtggaagcacacaacatctttggctttgagaccattcctgaagagtgcgttgaagcaacaaaggaatacatccatggcgaacaatatagatcagactccaaaacagtta

SEQ ID NO: 184835 - DNA, 280 bp, Glycine max
gcagaaagcaagctcatcctagagttttaaaaatggcagcagcctcctccatggctctctcttccccatccttggctggcaaggccgtgaagctgggcccatcagcccccgaagtcgggagggtcagcatgaggaagaccgtcaccaagcaggcctcctccggaagcccatggtacggcccagaccgcgtcaagtacttgggcccattctctggcgagcccccgtcctacctcactggcgagttcccaggtgactacggctgggacactgctgggctttc

SEQ ID NO: 184836 - DNA, 285 bp, Glycine max
ctcttgtatctgagcttaaacagatgtcaaaagaggttgaagatactgagttggcagatgtggcagcagtcagtgcagggaacaattatgaagtaggaaatatgattgctgaagcattgagcagagttggtagaaagggtgtcgtgacccttgaggagggaaagagtgctgataacagtctgtatgttgttgaggggatgcaattcgaccgtggttatatttctccatacttcgttactgacagtgagaaaatggctgttgagtatgagaactgtaagttgctgt

SEQ ID NO: 184837 - DNA, 283 bp, Glycine max
ccctcttcgctttagcaaattccaattcccaatccaaaaccctaatttcgttcaaagaaccaattgtgatggcaccaaaggcagagaagaagccagcggagaagaagcccgcggaggagaagaagtcgacggtgggagacaaggctccggcggagaagaagccgaaggccggaaagaagcttcctaaggagggaggagccggcggagaaggggggaagaagaagaagaggaacaagaagagcacggaacttctgatccggaagctcccgttccagcgattggt

SEQ ID NO: 184838 - DNA, 277 bp, Glycine max
gacggaggaagggaggagggtgcgaccggaagggcacaatcagccgcgacgacctccgcgccttctacgccggagtcggcggcggaggagatgacgtgatcggggcaatgatgacagtggctgacaccaataaggacgggttcgtggagtacgaggagttcgagcgcgtggtctcggcggacagaaagcccgtggggtactgtggggccatggaggacgtgttcagggtcatggacaaggacggcgacggcaagctcagccaccatgatctgaagac

SEQ ID NO: 184839 - DNA, 270 bp, Glycine max
ctcgagccgtgccatcgataacatatcacacttgagacagttatctgtatctacgcaagacaagaatagaaaatggatatcaggttgatggatttggactctccattgttcaacactctgcaccgaatcatggatctgacagaggacgcagagaagaacttgaacgctccgacgcggacatacgtgcgcgacgcgaaggcaatggctgcgactcctgcggacgtgaaggagtaccctaactactacgtgttcgtgatcgacatgccaggc

SEQ ID NO: 184840 - DNA, 273 bp, Glycine max
gcttagtattgtttagatataggatacatttttctagttcatccacaatgtcattgaaacactgccatagagttccatgatttctgtgttccccaaaaccctaatcgccactcgtttcctttcccgaacccgacctcgaatacatactcccaaactaaccgccattagaaccatgagctcgtccacccagcgcatgttccagctcaagcttgacccaataacgggtaactctgaatgggtcgtcatcgaagacaacgacgacggagacgaaag

SEQ ID NO: 184841 - DNA, 270 bp, Glycine max
caaagcacaaagcaaagctcatccttgagttaaaaaatggcagcagcttcttccatggctctctcatccccatccttggctggcaaggccgtgaagctgggcccatcagccccagaagtgggaagggtgagcatgaggaagaccgtcaccaagcaggtctcctcaggaagcccatggtacggcccagaccgagtcaagtacttgggcccattctctggcgagcccccgtcctacctaaccggtgagttcccaggcgactacggctgggac

SEQ ID NO: 184842 - DNA, 269 bp, Glycine max
  unsure (1)..(269): unsure at all n locations
acagatgtgtgttagagtgaagaaagaggttgacattaacaaatcatagcatagcagaagaagaagaagaagagatacatagaaagaaagaaaaaaaaaatgagtttgagggaagacaatgaagagggaagggatctgaagaagccatttcttcacacgggaagttggtatcgtatgagtgggagacaatccagtgtgttcggttccacacaggccattcaatatncctccatctctgtctttgcttgtgttctaatcgttgctttggg

SEQ ID NO: 184843 - DNA, 107 bp, Glycine max
aacgaaatgacttttgagagtttttagatttgtgtttggtgaagtacttcagataatgtgaattatcttgtgtatccgaatccaacttaatgttacttgctttttac

SEQ ID NO: 184844 - DNA, 271 bp, Glycine max
ctcgcaagcaaaaagaaagaatcccaggcgaggagaaagatggaggggaaggagcaggatgtgtcgttgggagcgaacaagttccccgagagacagccaattgggacggcggcgcagagccaagacgacggcaaggactaccaggagccggcgccggcgccgctggttgacccgacggagtttacgtcatggtcgttttacagagcagggatagcagagtttgtggccacttttctgtttctctacatcactgtcttaaccgttatgggag

SEQ ID NO: 184845 - DNA, 272 bp, Glycine max
ctaattcatggggtgatgagtgggtttttacaagaaaagacgaaagtgacttaggtccattttcacaatggaacataagtggaacttacagagggaattggaagtttttagatactacaaatggttctaccggatttccagacatcagaaaaataaatggaaattctgtaattgaattagttagtatgcccacaaagataactggtgtacattatgtgcagggggtagtcatattccatgatgtatttgacaatgaatacaatgttggtgga

SEQ ID NO: 184846 - DNA, 274 bp, Glycine max
tctcgagccgaatcggctcgagaccactcttaatttctctctgcctacgctcatttacacacatctccaacctttcactttcacctttatttgaatccctctctctcctttccaaatggccagcgttgaggttgcacatcaaacaccaacaacagttccagaaaatgaaacaaccgaggtaatcaagacccaggaaacaaccccggaaccagtaccagccactgaggctcctgcaacagaacaagcagcagctgaggttcctgctcaagaagaa

SEQ ID NO: 184847 - DNA, 263 bp, Glycine max
  unsure (1)..(263): unsure at all n locations
ctcttcctcaccgattgccacactggaatttcgatgctcagtcatatcttttaccattctcttctctcttgctcttgcaggagagagccatgtccatgcatcgctacctgaggaagattattgggaagctgtttggccaaacactcccattcccactgcactgcgagagcttctaaagcctctccctgcaggtgttgaaatcgatgaactccctaagcaaattgatgatacacagtacccanaaacattcttctataaagaag

SEQ ID NO: 184848 - DNA, 269 bp, Glycine max
cttgaatcaacaatcatgtcggacgaagagcaccatttcgagtccaaggccgacgccggagcctccaaaacctaccctcagcaagccggtaccatccgcaagaacggctacatcgtcatcaaaggccgcccctgcaaggttgtggaagtttcgacttccaaaactggaaagcacggtcacgctaagtgtcactttgttggaattgatattttcactgccaagaaacttgaggatattgtgccctcttctcacaactgtgatgttcctca

SEQ ID NO: 184849 - DNA, 268 bp, Glycine max
gtcttcgctctaactaatcaaaatctacctttctccgaaaccacacacatgatactaaaaactctaatggaagacaaccagttagattttaatcagcctcttttatcggtaaggcgaatctcatcaacggcggcctctgaaaatgacaataaaagaaaacctgataaatcagtgcggaaacgacctcctcttccgttctacaaatcagagttaaaatcaggtccagtgactaaccctggaactgttccttttgtatgggagaagactc

SEQ ID NO: 184850 - DNA, 271 bp, Glycine max
ctttcttccatcttcttctcttttcacgtcattatcctaaacttgccgattttcacatcccaagcaacatgaaggggaggttcatgtttctgtcggtgctcctttgtgccacctttcatgtctccttctccattactgacggcttagtagcaaacggcaacttcgagctgggtccgaagccctccgccctgaaaggaactgtggtgattggtggcagccactcgatcccagaatgggagatctctggcttcgtggagtacataaagtccgg

SEQ ID NO: 184851 - DNA, 267 bp, Glycine max
gattatcctaagtctttgggaatagtgctgcaatggcttcaagtcaggaggaggtgacccttttgggagctactggaagcccatttgtgtgcagggttcatattgccctcaagttgaagggagttcaatacaaatatgtcgaagaaaatttgaggaacaagagtgaactgcttctcaaatccaacccagttcacaagaaggttccagtgtgtattcacactgagaagcccatagcagagtctcttgtgattgtcgaatacattgatg

SEQ ID NO: 184852 - DNA, 266 bp, Glycine max
cactcgcaagcaataagcacgaatcccatgcgaggctctagatggaggtgactgagcaggctgtgtcgatgagagcgaacacgttccccgagagacagccgattgggacggctgcgcagagccaagacgacggcaaggactaccatgagccggcgaccggtgccgctggttgacgcgacggtatttacgtcatggtcgttttacagaacacggatagtagagatcgtggccacttatctgtttctctacatcagcgtctaaaccgt

SEQ ID NO: 184853 - DNA, 269 bp, Glycine max
ctcttgaccaaatcaatgagcccaagaggccctcagacaagccactcaggcttccattgcaggatgtctacaaaattggtggtattggtaccgtgccagtgggacgtgttgagactggtgtcgtgaagcccggtatggtggtgacttttggtcccactgggctgacaactgaggttaagtctgttgagatgcaccatgaggctctcacagaggctcttccaggtgacaatgttggctttaacgtgaagaacgttgcagtcaaggatctc

SEQ ID NO: 184854 - DNA, 266 bp, Glycine max
cgcgatctctctctattctttgaaaccaaagttcaaactctgtcttccctgggttctatttcgaaatcaacgacgatgagttccacagaggcagcagccacagagaagacaggtggaagagggaaaccgaagacttcaaagtccgtttcccgttcctccaaagctggccttcagtttcccgtcggccgtgtcgctcgctacctcaaggccggtcgctacgcccagcgcgttggctccggttcccctgtttatctctccgcggttct

SEQ ID NO: 184855 - DNA, 265 bp, Glycine max
agagcgtatgttattgcaaccaacaggcaacttagtgagttgcaccccatatacaaattgctacaccctcatttccgttatacaatggagattaacgctatcgcacgagaagcacttatcaacgctgatggcaccattgagagctcatttgcaccaggaaagtactccatagagattagctctgctgcttatgctctcgaatggcggtttgacaagcaggcactaccagcagatctagttagcaggggaatggctgtgaaagatc

SEQ ID NO: 184856 - DNA, 264 bp, Glycine max
  unsure (1)..(264): unsure at all n locations
ganntgcacgctgggttggcatcagaaggtggttctaanctcaaaatgcttataacatttgttcataatctccctaatgggactgagaaaggaacatattatgcactagatcttgggggnacaaattttagggttttgcgggttcatttgcatggtcaacaatcgtctgttttggaacatgaagtagagcgacagcccattcctcaacatctaatgaccagcacaagtgaggatctctttgatttccatgcttcttcattaaag

SEQ ID NO: 184857 - DNA, 278 bp, Glycine max
tgggtccatgccgttttatggccccagttcttgcagagattgcaaagaaaactcctgaattgatcttcctcaaagtggatgtggatgacgtgaggcctgttgctgaggaatattccattgaggccatgccaaccttcctcttcttgaaagatggcgagatcgtggacaaggtggttggtgctagtaaggatgaccttcaagccaccatagccaagcatgcatctgctgttgctgctgcttcttcttcttgaagtgaagtatcataatatgaaagaaga

SEQ ID NO: 184858 - DNA, 263 bp, Glycine max
gttagaagtcttaaacattcaacctcaatttgcagagttctaatattacattgcagagaaaatgtctttgattccaagtttctttggtggcagaaggagcaatgttttggatcctttctccctcgatgtgtgggacccttttaaggattttccttttcccacttctctttctgctgaaaattcagcgtttgtgagcacacgagtggattggaaggagacaccagaagcacacgtgttcaaggctgatattccagggctgaaga

SEQ ID NO: 184859 - DNA, 265 bp, Glycine max
gctatagtgagtctacgtgtttgagagacaggttgagctatagcctaaagggagagacacataaatagtttctactttctattcatagatagatggctggcccaattatgagacctcagattgtgctatttggctcctccataattcaaatgagcttcgacaatggtggttggggtgctattctagctaacttgtacgctaggaaggcggacatcatcttaagaggatactctggttggaattcaaggcgggctttggaggtttt

SEQ ID NO: 184860 - DNA, 268 bp, Glycine max
ctttccattcgttcaccgccccaatctctgcagcgccttcgatctacgaaaacatgactaagagaacaaagaaggctggcattgttggaaaatacggtacccgttatggtgccagtctgcgaaagcagattaagaagatggaagttagtcaacacagcaaatttttctgtgaattttgtggaaagtatgctgtgaagaggaaagctgtaggaatatggggatgcaaggactgtggtaaagtgaaagcaggcggtgcttatactttgaa

SEQ ID NO: 184861 - DNA, 261 bp, Glycine max
cagtggtaagttcttgaggaagttcagattgccagaaaacgctaaagtcgatcaagttaaggcttctattgaaaatggggttctcactgtcaccgttccaaaggaagaggtcaaaaaacctgatgttaaggccgtgcaaatctctggttaaaagtccaatatatagaaaatactgtgttttgcttcttgtgagttataaggaagatcttacaatgtaaactgtacctgttgaaataagcgtcagttgttcttgttgagtgg

SEQ ID NO: 184862 - DNA, 268 bp, Glycine max
ctaattctcatttcttcatcgttcgattcttctcctcctaaagatgcagatcttcgtgaaaactttgaccggtaagaccatcacccttgaggtggagtcctccgacaccatcgataacgtgaaagctaagattcaagacaaggaagggatcccacctgaccagcagagacttatctttgcgggtaaacagcttgaggatggtcgaacccttgccgactacaacatccaaaaggaatccactctccacctcgtgcttcgcctcaggggt

SEQ ID NO: 184863 - DNA, 273 bp, Glycine max
gacgcttcgcaaatctcaatcgaatctcagaacaatgagagacatcatcagcattcacataggtcaggccgggatccaggtcggaaactcctgctgggaactctactgcctcgaacatggcatccagcccgacggcatgatgccttctgactccaccttcggtgtagcccacgacgccttcaacaccttcttcagcgaaaccggatctggcaagcacgtcccccgtgctgtcttcgtcgacctcgaacccaccgtcatcgacgaggtccgctg

SEQ ID NO: 184864 - DNA, 278 bp, Glycine max
cctcgagccgaatcggctcgagaagaatatcaaattggtctcttgacttcctcctcatctctaccactactccacatagagcacagcctctcaagcccaagcccaagcccaagcccaagcccgttcataaaatcctcctgcagcagcacccagtacccagccctctgcgtctcatccctctccgtctacgcctccagcatccaacaggaccctcaccaactggttcagacagcactctccctctccctgaaccgcacccaagccaccaaaaccttcgt

SEQ ID NO: 184865 - DNA, 273 bp, Glycine max
tgggtgagggccttccatggcttccgcttgtgcttcctctgcaataaatactgttgccatctctacgccgagttccgggcagaagaatggatattgaggttgttttcttagtggaaggaaattgagggtgaaaaaggagagagcagcaattggaggacgatcgatgggcactacagtgtgcgcagttgctgagcctgacagacctctatggttcccaggcagcacccctcctccatggcttgatggcactctacctggagacttcggctttga

SEQ ID NO: 184866 - DNA, 275 bp, Glycine max
ctcgagccgattcggctcgaggagataactagaaacagtgtgatacccatgaaggtgccttacttacttcgttgctacaatactggtagcatggcaatgccatgcgtacgatatgttccctctccgaatgaacactggctatggtgcccgtactccggaggtgaaatgcgcaagttggaggcttgctgtggaagcacacaacatctttggctttgagaccattcctgaagagtgcgttgaagccacaaaggaatacatccatggcgaacaatata

SEQ ID NO: 184867 - DNA, 280 bp, Glycine max
ggttcttcttcttctattacaacaacgtcgtccaagaccatgaccatggccatggccacgatcctgctcctgttcacggtcttcgcggtttcatcggccctagacatgtcgataatctcgtacgacaacgcccacgccgccacgtcgcgcagcagacggagctgatgtccatgtacgagcagtggctggtgaagcacggcaaggtgtacaacgcgctcggggagaaggagaagaggttccagatcttcaaggacaacctgcgattcatcgacgaccacaa

SEQ ID NO: 184868 - DNA, 292 bp, Glycine max
tcggctattcggctcgaggtttttcattgtttcatttaatctacaatggctgcttcaacaatggctctctcttcatcatcattggctggccaagctatcaagcttgccccctccacccctcagcttggtgttggcagggttagcatgaggaaaacagcctccaagactgtttcttctggaagcccatggtacggcccagaccgtgtcaagtacttgggcccattctctggtgagcccccatcctacctcactggtgaattcccaggtgactatggttgggacactgctgggc

SEQ ID NO: 184869 - DNA, 266 bp, Glycine max
cagaaacagtgtgatgaaaatgaaggtccttgttttcttcgttgctacaattttcgtagcatggcaatgccatgcgtacgatatgttccctctccgaatgaacactggctatggtgcccgtactccggaggtgaaatgcgcaagttggaggcttgctgtggacgcacacaacatctttggctttgagaccattcctgaagagtgcgttgaagcaacaaaggaatacatccatggcgaacaatatagatcagactccaaaacagtta

SEQ ID NO: 184870 - DNA, 265 bp, Glycine max
ggatgcttctgctgctgaagatgatgatgaccttgatctctttggcgatgagactgaggaagacaaaaaggcagcagaggaaagggaggctgctaagaagtctaccaagaagaaagagagtggcaaatcttctgttctgcttgacgttaagcccttgggatgatgaaacagacatgaagaagctggaagaggctgttcgcagtgttgagatgcctggtctattgtggggagcatccaaactggttcctgttggttatgggatcaa

SEQ ID NO: 184871 - DNA, 261 bp, Glycine max
gcgtttgtctcttcttcttcttcttcgcataatagcagatacaatggtgaagctctacagacccccggggaagaaaaaggagggaaatgctgccaaatttgtcattaggtcacaagcaatcaagcagcttcaaatcagtctaccccttttcaggaaactatgtattttgaaaggtgtaactccaagggagcctaagaaaaagttcaagggaactcatcagacttattaccatgtcaaggatgtttccttccttcatcacga

SEQ ID NO: 184872 - DNA, 268 bp, Glycine max
cggctcgagcactaagatggcttcctttgtatccttcctagtgctgcttcttgcagcccttattctcctgcctcaagggcttgctacttactacaaaccaattaagaagccaccagtgtacaagcctccagtgtacaagccaccagtgtacaaaccaccggtttataagccaaaaccaccggtttacaagccgaaaccaccggtttacaagccaccatataagaagccaccatacaagaaaccaccttatggaaagtaccctccagta

SEQ ID NO: 184873 - DNA, 268 bp, Glycine max
cctcgagccgattcggctcgagaaacgagccatttggcagttaggatctgcacgatctgcttaccgcgagtgttctgtcttcactacgacaccttaatttgcacacgctgctacttccgcttgagatatggcacaagaaacgtttctattcacatctgaatctgtaaacgatggtcaccccgacaagctgtgcgaccagatctctgatgcagtgctcgatgcgtgccttgaacaggaccctgacagcgaggttacctgtgagacatgc

SEQ ID NO: 184874 - DNA, 262 bp, Glycine max
  unsure (1)..(262): unsure at all n locations
cgtggccacagcaacaataacaatggcagcctcactacaagctgcagccaccttcatgcaacccaccaaggtgggcatggccactcgcaacctcaaatctacacaatgcatgtctaaggcttttggcttggaacccgctgcagctaaactcatttgctcccttaagcccgatcgttaagatttatgtcaacaatgtgtcgacgccaccaaaattgcaagatcgtcgggagccnactcagctctcgttgtttctggagcgagt

SEQ ID NO: 184875 - DNA, 228 bp, Glycine max
gttacatagtttttcattgttttacttaatctacaatggctgcttcaacaatggctctctcttcatcatcattagctggccatgctatcaagcttgctccctccactccctgagcttggtgttggaatggttagcatgcggaaaacatcctccaaaactgtttcctcaggatgtccattgtacggcacatcacgtgtacagatccttgggcccatcctcaggtgagcc

SEQ ID NO: 184876 - DNA, 266 bp, Glycine max
  unsure (1)..(266): unsure at all n locations
aaagaatggcagcttgcactgtctactcaacacaatctctgagcnccaaattgctccatctcaaccccatcaaagacgcaactcagttttttccaccaaaagcaggtantcnttctggaggaacagcaagaagggcagctgcagcagcagaagaagctatgtgataacatgtgcagcaggtgactcacagacagtggtgattggcctggctgcagactcagggtgtgggaagagcaccttcatgaggaggctgaccagtgtgtttg

SEQ ID NO: 184877 - DNA, 262 bp, Glycine max
attagcacttcttcttttcacactgccgctgcaacaatggcttcagagaagaaactttcgaacccaatgagggagataaaagtgcagaagctcgttctcaatatctctgttggcgagagtggagatcgtctcaccagagccgccaaggtgttggaacaacttagtggccaaaccccagtgttttccaaagcaaggtacactgttcgttcctttgggattagaagaaatgagaagattgcatgctatgtcactgtcagaggtg

SEQ ID NO: 184878 - DNA, 262 bp, Glycine max; identical to SEQ ID NO: 184877

SEQ ID NO: 184879 - DNA, 263 bp, Glycine max
caagaattcatttttttgggaaggtaccaaaccaaaagtggtaatcactgaccctgagcaaatcaaagaagtcttcaacaagatccaagactttgagaaacccaagttgagtcctattgtcaagttgttgggctctggacttgcaaatttagaaggcgagaaatggcgtacacatcgaaagattattaaccctgctttccatttagaaaaattgaaggttatgttaccaatatttcttgaatgttgtgacgatatggtttcca

SEQ ID NO: 184880 - DNA, 264 bp, Glycine max
gataactagaaacagtgtgatgaaaatgaaggtccttgttttcttcgttgctacaattttggtagcatggcaatgccatgcgtacgatatgttccctctccgaatgaacactggctatggtgcccgtactccggaggtgaaatgcgcaagttggaggcttgctgtggaagcacacaacatctttggctttgagaccattcctgaagagtgcgttgaagcaacaaaggaatacatccatggcgaacaatatagatcagactccaa

SEQ ID NO: 184881 - DNA, 269 bp, Glycine max
tggatgtttggaaggaaggggcaaaagataaaggggacagtggtgttgatgccaaagaatgtgttggacttcaacgccataacctccgtcggaaaaggcagtgctaaggacaccgccaccgatttcttgggcaaaggcttggacgcattaggtcatgcagttgatgctctcactgccttcgctggccatagcatctccttgcagcttatcagtgctactcagactgatggtagtggaaaaggaaaagttggaaacgaagcctatttgga

SEQ ID NO: 184882 - DNA, 280 bp, Glycine max
caagaatgggatatacgatttctggaactggtttgatgatcgaacttggtatcccctcggtcgtgtaattggtgggactgtctatcctggtttgacgttgacagcaggcaccttatggtgggtactgaattccctaaacatacctctctcagttgaaactgtttgtgtgtttactgcacctatattctcagcctttgcttcatgggcaacttatcttctgacaaaggaggttaagggtgcgggggctggcttgacagcagcagttcttctggctatggtc

SEQ ID NO: 184883 - DNA, 202 bp, Glycine max
gctattatcatccgcagctgcttttattcgcaccgcaaacagtgagccatggccgtcggaaagaacaagcgcatctccaaggggaagaagggtggcaagaagaaggcagctgatccctttgccaagaaggattggtatgacattaaggctccttctgtttttcaagtgaaaaatgttggcaatacctcgtctctcgtactca

SEQ ID NO: 184884 - DNA, 179 bp, Glycine max
caggattcaggacagatttcttaagggcatttagtgtggttggcaacggcgcatctaaagggcattttatagatggttactatgtacactgccaaactggaatacaagagacatggctgagaaatgactccccagtggtgggcaagacagttagaaactgagatttatttctcccttct

SEQ ID NO: 184885 - DNA, 273 bp, Glycine max
agagaaggcaatggatatgaggttgatggatttggactctccattcttcaacactctgcacagaatcatggatctgacggaggacgccgagaagaacttgaacgctccaactcggacatacgtgcgcgacgccaaggcaatggctgcgactcctgctgacgtgaaggagtaccctaactcgtacgttttcgtgatcgacatgcctggcctcaaatctggggacattaaagtgcaggtggaggacgacaacgtgcttctgataagcggcgagag

SEQ ID NO: 184886 - DNA, 272 bp, Glycine max
gtagaacccttccacggtggtgactgcgcgatgggtgcctacaagtatgtttcagagctatggcgcaagaagcagtctgatgtcatgcgcttcttgcagcgggtgaggtgctgggagtataggcagcaaccttccattgttcgcttgacaaggtcgacccgccctgacaaggctcgtcgcttgggcttcaaggctaagcagggctatgtgatataccgtgttcgtgttaggaggggtggccgaaagaggccagttcccaaaggtattgttta

SEQ ID NO: 184887 - DNA, 239 bp, Glycine max
ctcctctctccttctacattactctctcttctcctaaaaatttctaatgcttccattgcttcatctgactcactcatcaatggctctgagactgaaccctatccccacccaaaccttctccctcccccaaatgcccagcctcagatctccccgcttccgcatggcttccaccctccgctccggttccaaagaggttgaaaatattaagacgccattcactcctcccagagaagtgcatg

SEQ ID NO: 184888 - DNA, 274 bp, Glycine max
gtctcttagctttgattctctgttctctgttttgttctgtttcgcgcacaggaacttaaacaacgaagactgcaaagggcaagggagcagcgaggccctcaaatcaatcactgaagcctgttgatgaccgaaaggttggaaagcggaaggcttctggtaagcctgagaaaagcagagcaccaaagaaggagaagaaggccaagaaagaccccaacaagcctaaaagaccaccgagtgctttcttcgtgttccttgaggagttcaggaagacctt

SEQ ID NO: 184889 - DNA, 273 bp, Glycine max
  unsure (1)..(273): unsure at all n locations
gcagtagtgctaagtgctaacacctgcagtgaacaatggcctctgcatcagcatctctgctcaagtcttcacttgttcttgacaagtctgagtgggtgaagggacaaacccttcgccaaccttctgcatcagttgngagatgcaaccccaccaccccatcaggcctcaccatcagagctggttcctatgctgatgagctcgttaagaccgcgaaaacagtggcttcaccaggaggggtattttggccatggatgagtccantgctacctgtgg

SEQ ID NO: 184890 - DNA, 274 bp, Glycine max
gactgcagtaggtgtgggaactgtggggtcatcagaggcaataatgttggcaggtctagcttttaaaaggaaatggcagacaaagagaaaagcagaaggcaaaccatatgataagcccaacatagtaactggggctaatgtgcaggtttgttgggaaaaatttgcaaggtactttgaggtagagctcaaggaagtgaaactcaaagaaggatactatgtgatggaccctgcgaaagcagttgaaatggtagatgagaacacatctgtgttgcag

SEQ ID NO: 184891 - DNA, 268 bp, Glycine max
ctctctctctcttctctctctctctttcttcctttctttaatacttattaattcatcttttttatctttctttctttctttccccttttgtctttctgcgttcgatattgttatcggttatttgtgcactgcttccgccggggctattcaggaatcatggctagggttttggctcagtctgttaatgtccctggtctagtggctgagcataggcatggtcagcaaaagggatcaggaaaattaaaaagatcgaccaacatgatgagtg

SEQ ID NO: 184892 - DNA, 272 bp, Glycine max
gatggatgactgttgtgccgtttgcgctgagcctttggaatgggttgcgtacggagcctgtttgcaccgggaggtgtgttccacgtccgtcgctcgagaccgtttcatctgcgacgatcgccgttgctgcatctgcaagaccgaatgcaacctcgttttcgtcaccaaggctctaggtgattatacgaggatgatcaatgatttttcgacccttcctttggaggcgagggagggcaaggttggatcatattggtaccatgaggatacaaatg

SEQ ID NO: 184893 - DNA, 274 bp, Glycine max
tcttcaaggattagcaacgcaaaaatcattctaattatagattgtgacatgtactcaaaccattcacaatcagtgagagatgccctttgttttctcatggatgaagagaaaggccaagaaattgcttttgtgcagtttcctcaaaattttgagaacctcggtaagaatgatttgtatgggaatgctatatcagcaactgtggaggtggagctccatggtgcggatggttatggtggccctttgtttattggaacttgttgctttcatagaagag

SEQ ID NO: 184894 - DNA, 274 bp, Glycine max
gtgagctataagctagtttatcgtgaggagaatatgaagttgtttgtcttctttgttgctgcagtagttttggtagcatggccatgccatggcgcaggctaccaaaggttccctctccgaatgaaaactggctatggtgagcgttcttcggaggtaaaatgcgcaagttttaggcttgctgtggaagcacacaacatccgagcctttaacaccattcctgaagagtgcgttgaaccaacaaaggactacattaatggcgaacaatttagatcag

SEQ ID NO: 184895 - DNA, 275 bp, Glycine max
atccttgttagcagctgcagctgccgcaaccatgtcaagcccagcagccatggctttggttgatgagagactcagcactgaaggaactgggcatccctttgggcttagcaacaaccttcttggttggatcctgtttggtgtctttggtctcatatgggctctcttctttgtctacacttccacccttgaagaggatgaagagtctggattgtccctctaaacccccatgtgatgatgcatgtattgtagaaattgcaaagagttatgtccttttc

SEQ ID NO: 184896 - DNA, 269 bp, Glycine max
ggaccaaacagcatccgcggcagcgacggtaaccctccaacaacaacacttccgctgcgaaaaatgtctctggtggcgaacgaggatttccagcacattctgcgtgtgctgaacaccaacgtggatgggaagcagaagataatgttcgcaatgacctccatcaagggtattggaaggagattcgccaacatcgcttgcaagaaggctgatgttgacatgaacaaaagggctggtgagttgactgctgctgagctggatagtgtgatgac

SEQ ID NO: 184897 - DNA, 271 bp, Glycine max
gatcattctctctcagtgctctcgatctccatctgcaacttccttgtctgacagatcctgtgttccggagaaaggaaaggaaaggaaagatgtcggggcaaacgcagcgtctgaacgtggtccccaccgtgacgatgctgggagtggtgaaggcccgattggtcggcgccacgcgcggccacgcgctcctgaagaagaagagcgacgcgctcacggtgcagttccgccagatcctgtagaagatcgtctccacaaaagaatccatgggcga

SEQ ID NO: 184898 - DNA, 266 bp, Glycine max
ccgactcggagtttgagccaggttctgaacatgatggaccaggtcatggacaatccgttcctctccgcgtcgcgcgggatcggagctggcgctggagtgcgtcgcggatgggacgcgagggagacagaggatgctctgcatctgcgcgtggacatgcctgggctcggcaaggaagacgtaaagatctccgtggagcagaacactctcattatcaaaggtgaaggtgctaaagaacgcgatgaagaagagagcgctcgtcgctacac

SEQ ID NO: 184899 - DNA, 273 bp, Glycine max
gtggatacctaggcacccagagacgaggaagggcgtagtaagcgacgaaatgcttcggggagttgaaaatagacgtagatccggggattcccgatataggtcaacctttcgaactgctgctgaatccacgggcaggcaagagacaacctggtgaactgaaacatcttagtagccagaggaaaagaaagcaaaagcgattcccgtagtagcggcgagcgaaatgggagcagcctaaaccgtgaaaacggggttgtgggagagctatacaagtgt

SEQ ID NO: 184900 - DNA, 273 bp, Glycine max
cagaatgttgtcaagaaaccaaagacatttgaatcaactccaatgaaaaaatatttcatggttatagggatcaatacagcttttagtagcacgaagcacagagatactgttcatgcaacttggatgccacaagttgtggaaagaaagaagttggaggaagaaaagggcataatcatacgattggtcacggttctacatctggtgcattcttgacaaagctattgaagtagaggagaggcttcatgctgactttttgaggctgaaccacattga

SEQ ID NO: 184901 - DNA, 262 bp, Glycine max
taagtcagaagagtgtattgtgttgaagtatcaaagatgttgattgcctctctcttaaacaggcgtcctaatatcaatgggactgtggtgttgatgaccaagaatgtgttcgacgtcaacgacttcatggcgactactaggggcggacagccgctgttgctagcggcatcttcggtgccgcccaggacattgttggtggaacatttagggtgctacggccatcttcatccgtatcattgccatccagttgagcagtgccacc

SEQ ID NO: 184902 - DNA, 270 bp, Glycine max
gaataattcgatacccctctcgtctcgtaactaaccatggcagcgctccgatggaagagcttcgaggagaatgaggatcgcccagccaagcctcgtcattttggcgtcaccgagattcaaagcccccactgcactctcttctcccacaaccttcttcaggatatttttgaatctatgggagactatgtagatgggttaaagttttctggaggttctcacagcatgatgccaaaggctactatcaagcaaatcattgacatgggccatcag

SEQ ID NO: 184903 - DNA, 274 bp, Glycine max
gcaaccatggcaatggcaacccaagcctctctcttaaccccacccctctccggtctcaaagccagcgaccgcgcctccgtgccatggaagcaaaactccagcctctccttctccagcccgaagcccctcaagttctccagaacaatcagagcagcagccgccgacgagaccacagaggcaccagcaaaagtagaggctgcaccggtcgggttcaccccaccagaacttgacccaaacaccccttccccgatcttcgggggcagcaccggcgggc

SEQ ID NO: 184904 - DNA, 272 bp, Glycine max
cggctcgagcaagggtgagggccttccatggcttccgcttgtgcttcctctgcaattacagctgttgccatctctacgccgagttccgggcagaagaatggatcaggaggttgttttcttagtggaaggaaattgagggtgaaaaaggagagagcagcaattggaggacgatcgatgggcactacagtgtgcgcagttgctgagcctgacagacctctatggttcccaggcagcacccctcctccatggcttgatggcactctacctggaga

SEQ ID NO: 184905 - DNA, 273 bp, Glycine max
ggcgcaagtgaggaacaagcaagtgcttctaaaggactatgttaccggttttcccaaagaatccgacatgaatattgtcgaaagtaccataacattgaagcttccacaaggttccaatgatgtcttgctcaaaaatttgtatttgtcttgtgatccgtatatgaggaatctcatgaacaggcccgaaggccctcccaatagtcgtgcttacactcctggctctccattaataggatatggtgtgtctaaagtcctggaatctgggcacccaga

SEQ ID NO: 184906 - DNA, 271 bp, Glycine max
aggggttcaattctagctagttctattacatcgtccgccaccatgaacatggcgatcgtgcttctgttcatggttttcgcagtttcatcagctttagacatgtcaataatatcacatgacaacgctcatgcggatagggccacgaggcgcaccgacgacgaggtgatgtcactgttcgaggagtggctggtgaaacacgacaaggtgtacaacgcgctcggtgagaaggagaagaggtttcaaatcttcaagaacaatctgcgctttatcg

SEQ ID NO: 184907 - DNA, 270 bp, Glycine max
tctcgagccgattcggctcgaggttcatcgtcccactttcttctcactttagggtttcctttctgtttctcctttccagatacgcatcttccattttttaggattaagcggtgagattcgtgaatctgagaaatgtcggattcttctcgggaggagaatgtttacatggcgaaattggcggacaggccgagcgttacgaggagatggttgagttcatggagaaggtagcaaagactgtggaggttgaggagttgacggtggaggagagaa

SEQ ID NO: 184908 - DNA, 260 bp, Glycine max
gtttttcattgtgcattattcaatggccaacacagcagctctatccggaaccatggtgagcacctccttcatgaggaagcaacctatgacgaccaagagcctaaagacattccccaacgctctttttggtctgaaaggtggacgaggtggtcgtgtaacttgcatggcctcgtacaaggtgaagctcataaccccagaagggaagtggagtttgaatgccccatcgaagtttcacattgttgacaaggctgaggaagaag

SEQ ID NO: 184909 - DNA, 278 bp, Glycine max
cgatctcgagcgttgtctcagagtttccaaattcacccaaccccagagagaaaatgtctctaatcccaaatttcttcggtggcagaaggagcaacgtgttcgatcctttttccctcgacgtctgggaccccttcaaggattttcctttcccaaacactctttcttcagcttcctttcctgaattttctcgggaaaattctgcattcgtgagcactcgtgtggattggaaggagaccccagaagcacacgtattcaaggctgatattccagggctgaag

SEQ ID NO: 184910 - DNA, 155 bp, Glycine max
gccgtgcctcagattttggtctgatgaggatagacaacaagggaaggatcctttcatacagtgaaaagcccaaaggataagagttgaatccaatgcaattgggactaacgtgttagggccttcaaaagattaagctcagaagaaaacatacattg

SEQ ID NO: 184911 - DNA, 266 bp, Glycine max
attcctaattgtttaaacctaattctcatttcttcatcgttcgattcttctcctcctaaagatgcagatcttcgtgaaaactttgaccggtaagaccatcacccttgaggtggagtcctccgacaccatcgataacgtgaaagctaagattcaagacaaggaagggatcccacctgaccaccagagacttatctttgcgggtaaacagcttgaggatggtcgaacccttgccgactacaacatccaaaaggaatccactctccacc

SEQ ID NO: 184912 - DNA, 267 bp, Glycine max
  unsure (1)..(267): unsure at all n locations
caccacttcatcaactttacttgacaacaatattgtaaaactcaaaatctagtttcannnnnnnnnnnnnnnnnnnngaaatggctctccaggctgcttctcttgttcctgcttctttctcggttcttaaagagggaaagagtggtgtgtctctcaaggactccaccttgttcggtctttcattttcagaacctatcaaagctaacttcagctcttctgcattgaggtgcaagagggaattcgaacaaaagctctgtgctgtgaggg

SEQ ID NO: 184913 - DNA, 259 bp, Glycine max
atacttgatcgacttgaccaagctgtatcgaacatgatgacacgggaaattgcattgctgatcatacaacctgaatatgctcatgctccatctgagtcctctcaggaattcgctagtgtacctcctaattccactatctactacgcccctgtgatacttgcctgggtcaaagataaagcatcgtgggatctgaatacacgagatgaggttgaggctagtcggaagcaataggaagcacggtatgccgcttgtaaggtta

SEQ ID NO: 184914 - DNA, 268 bp, Glycine max
gtcgtggccgtgtcgcagcaaaaccaaaccacatattaacttgtatgctctaagtcatggctctgatcttgcacgcaaccaaagcaaacaagaatgctttcaagactctgattgcggcagagtacagtggcgtccaagtggaattggcccctaatttcgagatgggtgtctctaatagaactcctgaattccttaaaatgaatcccataggaaaggttcctgtcttggaaacgcccgatggtccagtctttgagagcaatgccattgc

SEQ ID NO: 184915 - DNA, 268 bp, Glycine max
aaaagaccatgtcggtgaaggagtgcgagcaccacaaggggaagaagaggaagatcttccggcaagtgttctggtgcttagtggtgttcctactcatcgtgctggtcacaattcttttgatatgggcaatccttagacccaccaaacccaccttcacgctccaagacgtcaccgtctacgccttcaacgccaccgtggcgaacttcctcacttcgaattttcaggtcacgctcatctcgcgtaacccgaacgaccgcatcggtgttta

SEQ ID NO: 184916 - DNA, 270 bp, Glycine max
  unsure (1)..(270): unsure at all n locations
cactctcaaccctccttaaaccctaaccaatccaaccatggcttcttcttccacattcactgcaagacaagaatgnaagntctcctcctccgccgccatctcctccttcccctcccgccgccgctccaacgccgtcgttctgtcgaggcgcactcagacgtcagggtctccgccatggccaaggagttgcacttcaacaaagacgccaccgcaattaagaagctccagagcagtgtgaacaagctcgcggatctagttggggtcacgctt

SEQ ID NO: 184917 - DNA, 267 bp, Glycine max
ctttcctggaaaaaaattggaacctgcctctcttaaagtttgtatctttttgagtgggtgggttgattgagagtactgtgcaagctttggaactttgtcccaacctgctacttcaatggctactgaagaggttaacaaacctcaatcacttcctccataccctgagatgatagtgaaagcacttgaagcactgaatgagccaaatggatcgaacaagtcagcaatatcaaagtacatagaaaccacctacggtgagttgccagacgc

SEQ ID NO: 184918 - DNA, 265 bp, Glycine max
attcctaattgtttaaacctaattctcatttcttcatcgttcgattcttctcctcctaaaggtacgtctctggtttcctctctctcttgttcattcttttcgtaatagcaaccttattagccttcgtttattgatttttctcctaattacacttcaattttctcgatttgtgtctgttacgtcaatctgtatatctgttctgttgtcgtcgaatccgaaacttttcattcgcctttctgattccgtccctcgtttgtcaagtgca

SEQ ID NO: 184919 - DNA, 268 bp, Glycine max
ctcttgcggctagggttttagcgcacttcttctagatttaaggaacgatgggtaaggcaaaggttcacatcagtattgtggttattggccatgttgactctgggaagtccactaccactggccacctgatctacaagcttggaggcattgacaagcgtgttattgagagatttgagaaggaagctgctgagatgaacaagaggtctttcaagtatgcctgggtgcttgataagcttaaggctgagcgtgaaagaggaatcacaattga

SEQ ID NO: 184920 - DNA, 206 bp, Glycine max
tttgaaaaaccatatatgaagagctccatcttattggttcagtgatatattaataataaccaaaacagcagagagaagagaagggctacacatacaccatctctaatggcactcaggatgtgggcttcttccactgccaatgcactcaaactctcttctgtctccagacctcatctcttgcctcctttttctttctccagatgctt

SEQ ID NO: 184921 - DNA, 269 bp, Glycine max
aaacaaagaaaaaaaaaacccttagccaacacaaccatcatggccacctctgctattcagcaatcagcattcactggtcaaactgctctgaagcagctcaatgagttcgtccgcaagaccggtggcgccggcaaaggtcgcactaacatgcgccgcaccgtcaagagtgctcctcagagcatttggtatggccctgaccgtcccaagtacttgggtccattctcggagcagattccatcatacctgaccggagaattccctggtgacta

SEQ ID NO: 184922 - DNA, 236 bp, Glycine max
attcaagcgccgggtcccagatcttcagcgagggtgggctggactacttgggcaacccaagccttgtccacgcccagagcatcctcgccatctgggccacccaagttatcctaatgggtgctgttgagggttatcgtattgctggtgggcccctcggtgaggtcactgacccaatctacaccggtggcagctttgacccattgggccttgctgatgacccagaggcttttgctgag

SEQ ID NO: 184923 - DNA, 248 bp, Glycine max
aagtgccaccctagggttggggcttggattcgctatgccaagtttgagatgaagaatggcgacgttgtgaggtcgaggaacgtgtacgagagagccgtggataagctctccgatgatgaggaagcggcgcagttatatgttgcttttgctgagtttgaggaaaggtgtaaggagactgagcgtgcaagggccatatataagtgtgctcttgatcatattcccaagggaagggcggaagatttgtatcg

SEQ ID NO: 184924 - DNA, 245 bp, Glycine max
atcgccgcttcagcgtagcaacatgatcattcccgagaagaaccgtaaagagatctgcaaatacctcttccaagagggagtttgctttgcgaagaaggacttcaatctggcgaagacccggagattgatgtgccgaatctgcaggtgataaagctgatgcagagcttcaaatccagagagtacgtgagggaaacatttgcgtggatgcactattactggttcctcaccaacgatggaatgagttc

SEQ ID NO: 184925 - DNA, 244 bp, Glycine max
acaagatggggttggaggctgcagtggaggcagcggcagaattccttaacaaggcagtgaaaccagtgctggtgggtggtcctaaactgagggtggcaacggcatctgatgcctttgttgaactggctgatgcgtgtggttatgcgcttgctgtgatgccatcggctaaagggcaggttccagagcaccatccccatttcatcggaacttattggggtgctgtgagcactgccttctgtgctga

SEQ ID NO: 184926 - DNA, 245 bp, Glycine max
gtttatcgtgaggagaatatgaagttgtttgtcttctttgttgctgcagtagttttggtagcatggccatgccatggcgcaggctaccaaaggttccctctccgaatgaaaactggctatggtgagcgttcttcggaggtaaaatgcgcaagttttaggcttgctgtggaagcacacaacatccgagcctttaaaaccaaccctgaagagtgcgttgaaccaacaaaggactacattaatggcga

SEQ ID NO: 184927 - DNA, 246 bp, Glycine max
ctgcattactctctcactctcttttaggctcactcaccaacacttctttcactactttcattacgaacgtatattatatggctcctgaacttgtccccaccgttgcgttcacgaaacccgcaacccttccaaggcgtgcctacgtgacattcctcgccggaaacggtgactacgtgaaaggggtcgttggtcttgccaaagggttgcgaaaggtgaaaaccgcgtacccattggtggtggcggtcc

SEQ ID NO: 184928 - DNA, 248 bp, Glycine max
aacattctcagtctctgcacacacctcagaagaacagaacagaaccaccagtgcttttcaaagacggtttcagcaatggcgttcttaaataaaattggaaatctggtcaagaattctgctgtcaagcacatcaatcaagatttttcagtgtctaccccatcacttttccaagcaattagatccatgtcatctgcaaagctttttgtcggaggtatttcttacagcactgatgatatgagtttgcgaga

SEQ ID NO: 184929 - DNA, 250 bp, Glycine max
ctcgagccgctccaaatacaagccaatagaaattgaaatatagatcatcataagatattaagataaggacccatttcctcttctaagctatatagtgctcgtctagcctacccactacaagcaacattgttaaccattctcttcactttaaagttacatagtttttcattgttttacttaatctacaatggctgcttcaacaatgactctctcttcatcatcattggctggccaagctatcaagcttgcc

SEQ ID NO: 184930 - DNA, 262 bp, Glycine max
ttcggctcgagcttcaagttcccagcttgtgccatttttcccactgttcattgagaagaactgcagaacatggcacagattttggctccctctacgcaatggcagatgagaatctcaaaatcctctcccaatgcaactcccattacatcaaacatgtggagttctttattgtggaaacaaaataagaaagtttcacctaccagttctgctaaatttagagtgctggcaattaagtctgacaatagcactatcacaggctcga

SEQ ID NO: 184931 - DNA, 248 bp, Glycine max
ctgaagcacacgtgttcaaggctgatattccagggctgaagaaggaggatgtgaagctggagattcaagatgacagaattcttcagataagtggagagaggaacgttgagaaggaagacaagaacgacacgtggcaacgcgtggagcgaagcagtggtaagttcatgaatgatttcagattgccagagaatgctaaagtggatcaagttaaggcttccatggaaaatggggttctcactgtaactgtt

SEQ ID NO: 184932 - DNA, 243 bp, Glycine max
cgacactcgcgtctcagcctcagtttcggatctctcccttctctcaccaatttccaggatttgaaaaatggcagattccaaaccaggattgaggaagccagtgttcaccaaggtcgatcagcttcgtccagggaccagcgggcacactttaactgtgaaggtggtcgatgctaagatggtgatgcagaaaggtcgttctgatggtcctcaatcccgccaaatgcgaattgctgaatgtttggt

SEQ ID NO: 184933 - DNA, 246 bp, Glycine max
ccgatccgccgcatacgcctccctcaaaaactacgcagatgcattagcggatgccacaaagacagttgaactcaagcccgactggtccaagggctacagccgtctcggtgccgcgcatcttggcctttcccaatacgatgatgctattttggcttacaaaagcgggtctcgaaatcgaccctcacaacgagccccttaagtctggtttggcagatgcgcagaatgccttggccgcggcctccaggc

SEQ ID NO: 184934 - DNA, 244 bp, Glycine max
cggctcgagcaatttaatcaccattgtacaacccaattcccttcgtcgttttcgattaagagagcaatggcacgtaccaagcaaaccgctcgcaagtccaccggaggaaaggctccgaggaagcaattggcaaccaaagacgctcgcaagtcagccccggcgaccggcggagtgaagaagccccaccgcttcaggccaggaacggtggctctgagggagattcgaaagtaccagaagagcaccg

SEQ ID NO: 184935 - DNA, 244 bp, Glycine max
cttttcttcagttcggtggagggagggagccgtagcagcggaagctctagcttgggtagcgaatcacaatggcgagaggattaaagaagcatctgaagaggcttaatgccccaaagcattggatgcttgacaaactgggtggtgcatttgctcctaagccctcatctggaccacacaaatcgagggaatgcctgccactcatactcattttgcgaaaccggctgaagtatgctctaacaaccgt

SEQ ID NO: 184936 - DNA, 253 bp, Glycine max
gtgaatggtgacaaagctgctccactgtacaagtatctaaaatcaagcaaaggtggactctttggggatggtatcaaatggaacttctccaagttccttgttgataaccagggaaatgtggttgatcgctatgcacccacaacttctcctctgagcattgagaaggacttgctgaagttgttggatgcatgaatgaagctatgaatgactggagctgccaataaatgaattgtgattagaatataaattatga

SEQ ID NO: 184937 - DNA, 229 bp, Glycine max
gagaagctgaaccttcctctgcacaatctccttcaaaaagcttctcatccatggcgaaaacgctcatttcgtctccatcgttcatcggcacgccgctcccctcgctccctcgccaccacctcccccaccgcaccaggtttgtcactaccaaagtccacgtcagcctccatgaaattccccctattcaatccttaagaacatccactgaactcaacggaatcgttaccag

SEQ ID NO: 184938 - DNA, 240 bp, Glycine max
gctttttgacagtttgagcatttcagacaaacatggggactgatggaaagaagattagtggagagggggggttagtgaaggttgagccaaaacccagcaatggtttcacctcaaaagtggttgatttgttggagaaattggtggtgaagttcttgtatgattcttcactgccccatcactacctcactggtaattttgctcccgtgagtgagacccctccaaccaaggaccttcctgtca

SEQ ID NO: 184939 - DNA, 248 bp, Glycine max
ttgttgtaaagccttgttgctgccatggccacccacgcggctcttgcttctacaaggatcccttccaaacacaaggttcccatccaaggcctctcactctttcccaacccaatgcgccttaaagagacttgaggtgacagaattctctgggcttagatccacttcatgtgtcacatatgctaacagtgctagagaatcttccttttttgatcttgtagcttcccaactcacttcccaagaccaatgga

SEQ ID NO: 184940 - DNA, 247 bp, Glycine max
cgttctcgaagtggagaagaaagtaatcgaagaagatgttgtggcactaaagagaaaagactcgacggagattccatcgccggaggagaagccactggtgtctgctaggttcactcaccggaaattccttaaatccagttcagaaggtgggagagcgttgagagtggtggctaaggcaaaacgggacgagacgttggagagcacgtggaaggccataacggagggtcgatcaatgccatgagcagca

SEQ ID NO: 184941 - DNA, 248 bp, Glycine max
gatcccaaaaccctaggtttcagatccttaatcggccaggaccaaacagcatccgcggcagcacggtaaccctccaacaacaacacttccgctgcgaaaaatgtctctggtggcgaacgaggatttccagcacattctgcgtgtgctgaacaccaacgtggatgggaagcagaagataatgttcgcaatgacctccatcaagggtattggaaggagattcgccaacatcgcttgcaagaaggctgatg

SEQ ID NO: 184942 - DNA, 242 bp, Glycine max
ctgaagctaagtttcgttgccactgaggaatgaaatggccaatggtaacaacattagtcatttcttcaagctcttgcttttccttctagctttccactcttgtctcgctgagattttcttccaagagagattcgaagatggatggaagagccgttgggtgctatccgattggaaaaggagcgagggaaaagcgggtaccttcaagcacacagcagggaaatggtctggggatcctgatgaca

SEQ ID NO: 184943 - DNA, 240 bp, Glycine max
caaacatgcttgatcaggtccaacaccctacaatcatggacaaggttgctggccagctccatctccgttctggtgtttctggtattaggagttatgaaggagcctactgccaccccacaatgtaccaaagaccctcttttgggaattactcgaatgctgcattgcagtatcctgtgatgccctcatgcaaagctactatggatttgtctgctgctgcaacaactgcctcccccgtctttg

SEQ ID NO: 184944 - DNA, 242 bp, Glycine max
aacaaagagaaaaaaaacccttagccaacacaaccatcatggccacctctgctattcagcaatcagcattcactggtgaaactgctctgaagcagatcaatgtgttcgtccgcaagaccggtggcgccgactaaggtcgcactatcatgcgccgcaccgtcatgagtgctcctcagagcatttggtatggccctgacggtcccaagtacatgggtccattctgcggagcagattcgatcata

SEQ ID NO: 184945 - DNA, 244 bp, Glycine max
ctgattgatcacacaagaagtggagaaccacttgttattggattagtgcttcgtagtcatttattggtaattctgcagtcaaaggttgatttccagcatagccctttaccctctgatccaagaggtgggggcagatcaattaggcatgattctggtgaatttgcaaagcctgtttctagtaaaggaatatgtattgatgatatacatctaagttcagatgacttagaaatgtacattgatcttg

SEQ ID NO: 184946 - DNA, 244 bp, Glycine max
cgttaattaactatgaagcctaccctactattatccctttccatcctgcctctctttgctttcctggctctttcagaagatgttgaacaagttgtggacataagtggcaaccccattttcccaggtggcacatattacattatgccatcaacttggggcgctgccggtggtggattgaaactaggccggacaggaaactcaaactgcccagttactgttttgcaagattactcagaaatcttcc

SEQ ID NO: 184947 - DNA, 244 bp, Glycine max
gttgatcgagataactagaaacagtgtgatgaaaatgaaggtccttgttttcttcgttgctacaattttggtagcatggcaatgccatgcgtacgatatgttccctctccgaatgaacactggctatggtgcccgtactccggaggtgaaatgcgcaagttggaggcttgctgtggaagcacacaacatctttggctttgagaccattcctgaagagtgcgttgaagcaacaaaggaatacatc

SEQ ID NO: 184948 - DNA, 227 bp, Glycine max
tagagatcgagccgataaacgccgcccaaaaccatttatagggttttcttatctttgccaacaaaatgagagagtgcatttcaatccacattggtcaggccggtatccaggtcggaaacgcctgctgggaactctattgccttgaacacggcattcagcccgatgcggcagatgccgagtgacaagaccgttggaagaggagacgacgccttcagcacattcttcag

SEQ ID NO: 184949 - DNA, 248 bp, Glycine max
tgtagaattgaagaatgtaagaggggatggaactggtgagcgcaaggacatgggatacgatctatgattatgatgtctacaatgacttgggcgatccagataagggtgaaaagtatgcacgccccgctcttggaggatctgccttaccttaccctcgcagaggaagaaccggaagacgatagactacataagatcccaacagtgagaagcccagtgattttgattaccttccgagagatgaagcattg

SEQ ID NO: 184950 - DNA, 234 bp, Glycine max
agaacttagctacaagctaaggaaggatcaaagagaatggctcaagcaatggcatcaatgactagcttacgtggttcctctcaggctgtgttggaaggtagccttggctccacacgcttgaatgtggggagtggaagcagggtggcctcagtcacacgtgcagggttcacagttagagcacagcaacaacaagtgaatggtggtgaggtacaaagtagccgtagtgcagtgctt

SEQ ID NO: 184951 - DNA, 235 bp, Glycine max
cacaaacagcgacaccacagaagacagcaaaaaaatggatgatagagagacaatacctctcctcaccccatacaagatgggaaattttaatctatcccacaggattgtgttggcaccgttaacacgatcaaggtcttacaacttcgttcctcagccgcatgctgctctgtattattctcaaagaactactaagggtggcttcttgatcggggaagctactggtgtatctgatacg

SEQ ID NO: 184952 - DNA, 238 bp, Glycine max
caaaaaaccactctacaaaactctccagtaattctgaaaatcttattttcttttggtgaaattaatagctctgtgattgatcaatggcgacaaacgtatgcaaagccataagcatcgatctcggcacgacctacatctgcgtgggcgtgtggcaaaacgactgcgtctagatcatccccaacgaccaatgcaaccgggccactccctcttatgtagccttcaccgagacggatacgct

SEQ ID NO: 184953 - DNA, 238 bp, Glycine max
gatcgagataactagaaacagtgtgatgaaaatgaaggtccttgttttcttcgttgctacaatcttggtagcatggcaatgccatgcgtacgatatgttccctctccgaatgaacactggctatggtgcccgtactccggacgtgaaatgcgcaagttggaggcttgctgtggaagcacacaacatctttggctttgagaccattcctgaagagtgcgttgaagcaacaaaggaatac

SEQ ID NO: 184954 - DNA, 242 bp, Glycine max
gcttatggtggatacctaggcacccagagacgaggaagggcgtagtaagcgacgaaatgcttcggggagttgaaaataagcgtagatccggggattcccgatataggtcaacctttcgaactgctgctgaatccacgggcatgcaagagacaacctggtgaactgaaacatcttagtagccagaggataagacagcaaaagcgattcccgtagtagcggcgagcgacatgggagcagcctaa

SEQ ID NO: 184955 - DNA, 233 bp, Glycine max
ccagaaagcaagctcatcctagagttttaaaaatggcagcagccttctccatggctctctcttccccatccttggctggcaaggccgtgaagctgggcccatcagcccccgaagtcgggagggtcagcatgaggaagaccgtcaccaagcaggcctcctccggaagcccatggtacggcccagaccgagtcaagtacttggggacattctctggcgagcccccgtcctagctc

SEQ ID NO: 184956 - DNA, 242 bp, Glycine max
gggcaatgacctctaccctgggggccagtactttgacccactgggccttgctgatgacccagtcacttttgctgagctcaaagtcaaggagatcaacaatggaaggctggccatgttctctatgtttggatcctttgttcaagctattgtcactggaaaaggcccattggagaacctcttggaccaccttgacaaccctgtggctaacaatgcttgggtctatgccactaagtttgccccag

SEQ ID NO: 184957 - DNA, 241 bp, Glycine max
attctctgcaattcactctgtacaattcttcgttcgttctctgcagttatatcctttatgagcttcaatggcggacgctgaaaccttcgctttccaggctgagatcaaccagcttctaagtctcatcatcaacacattctacagcaacaaggagactttcttgcgtgaactcatcagcaatgcttctgatgctatggataagattcgattcgagagcttaaccgacaagagccatctcgat

SEQ ID NO: 184958 - DNA, 219 bp, Glycine max
gtcacaggtaacacaagctgagcttcattgtcagtttcatgcactgggggcaggagtgattgaggaggtacgagttcagatggatagggcttctgatttatcagatagaacactcatgaagaagctgcactggatattcagatggctaatggaagacttgtacgtgggaagaatatgaagtgatcgtggggtagtaaaccaactccacctggaacagct

SEQ ID NO: 184959 - DNA, 238 bp, Glycine max
cttttacgttggtttattcggtttgtgttgatctgttatgctgctcctccctgtttgatttcaagggtaaaggataaagggatgatctacacagcaattgacacgttctacctcacagatgagcagctagcaaactcaccttctagaaaagatggcatagatgaagccactgagactacgcttagaatctatggttgtgatctcatccaagaaagtggcattttgctcagattgccac

SEQ ID NO: 184960 - DNA, 246 bp, Glycine max
tgaagatcaggttgttgaatgagaaagacatctgtgtttatcagcgcgccgattggttggttgacaagttgggtacaaaagtccattcttatttctggcttgatgagtactcagaaaaagatgattttgcgcgatactggaaaaatgaatggatgagtggtttgacgtcatggcgcaaagcactgaagattccagatactgatgtcataatggaagatggatgtgctaaggtcactgatcaagata

SEQ ID NO: 184961 - DNA, 142 bp, Glycine max
ataacacaaagcacaaagcaaagctcatccttgagttaaaaaattggagcagtttcttccatggctcccttattcccatactttggttgccaggcccttaagctggggcccttaacccccaaaattggaaaggttaacatta

SEQ ID NO: 184962 - DNA, 275 bp, Glycine max
ttttctcactccacagacccgatgttctccccatcaatgaccttggtgtcaggaaaggggttcagcttctctacaacctcgaggacttgccgcggccctcgcagatggaccagttgtgtgacaagtggaggccttatcggtctgttgcttcgtggtatatgtggagatttgttgaagccaagggaactccttcgagtgcggtgaaggtagcgactggtgccggcttgcagcagcagcgccatcaccagcatcaacaacaggagcaacagcagcag

SEQ ID NO: 184963 - DNA, 210 bp, Glycine max
aagggaatgaggtttgctattagggaaggtgggaagaccgttggtgctggtgttatccaatccattattgagtgaaaattctgtcactttatttttaattaattaattttttccgttttatacagcttctgtactttgctttccctttttcttatactttaattgcacttttaggatggatattattggataataaagaacgaaacaaaa

SEQ ID NO: 184964 - DNA, 276 bp, Glycine max
aaagatcccctttatattcttcattcctctggggtgctgcacaacgaaactcacagaagaaagaagaaaaagaagcgaaactaaagtcagcattcgaaaaagatgagtagcatcggtacaggttacgatctatcggtcaccactttctcacctgatggccgcgttttccagatcgagtatgccgctaaagccgtcgacaacagcgggactgttattgggatccccgtcacagatggggttgtgttgggcgttgagaagcttattacgtcgaaaatg

SEQ ID NO: 184965 - DNA, 277 bp, Glycine max
ctcgagccgtgatcgagataactagaaacagtgtgatgaaaatgaaggtccttgttttcttacgttgctacaattttcgtagcatggcaatgccatgcgtacgatatgttccctctccgaatgaacactggctatggtgcccgtactccggaggtgaaatgcgcaagttggaggcttgctgtggaagcacacaacatctttggctttgagaccattcctgaagagtgcgttgaagcaacaaaggaatacatccatggcgaacaatatagatcagact

SEQ ID NO: 184966 - DNA, 277 bp, Glycine max
gggccttgctggaactaagctctctttcaagccctctcgccagagtttcagacccaagaatttcagtttaatattaattacaggagtggtgctgtggtagcaaagtatggtgacaagagtgtgtactttgatttggaggatctaggcaacactactggtcagtgggacttgtacggctccgatgcaccttcaccctacaaccctcttcagagcaagttcttcgagacatctgcctctccattcacataaaggggattgttactcaagtttatgatcc

SEQ ID NO: 184967 - DNA, 280 bp, Glycine max
aaaccacacacctcacaccctcttcaacatcctcagcaagaacaagaagaagaagaagaaacaatgtcttgctccaatctgacaatgttggtgtcctcaaaaccttccctttccgacccctcgaacctctccttccgctctgtcctgaacccttttcagctccctacacaaaacccagcttcatgcaccccttcacgctcctcaagcacccaaattcagtgtggtctgagagaactgagaacccgcattgagtctgtgaagaacacgcagaaaatcacgg

SEQ ID NO: 184968 - DNA, 268 bp, Glycine max
caaagagatatgaaaaggccataaagtttgttgagtatgattcctccttcagtgatgaggagaaacagaagactaaggcattgaaaatcacatgcaatctcaacaatgcagcctgtaagttgaagctaaaggactacaaacaggcagagaagatgtgcacaaaggttttagagcttgatagtagaaatgtaaaagcactctatcggagggcacaagggtatctccatcttgtggacttggatctagctgagatggatattaagaaagc

SEQ ID NO: 184969 - DNA, 274 bp, Glycine max
ttttgagttgcattgttgcatcaccgcaagtccacaacatggctgccactgccgctgcaggcatagcttccttgttttcttcttctattaacagtgtcaaatgtcttcgttcctccaagaactgctccattatagacccccttataaccacagtgccctcaaaccgtggcatgtttgtgtcacacttggtggaacctttgtccattgggggtgccattaattcgcacaagttgtgggggcctagaatttctgctgctgttgcacaagaagaggc

SEQ ID NO: 184970 - DNA, 262 bp, Glycine max
cagattcaaccagttaaacttggaacccaaggctttgaggtttcaaaattgggattcggatgtatgggccttactggagcgtacaatgaccctctccaagaacaggatggcatatctgttatcaagtatgcgttcagtaagggaatcacattttttgatactgcggatgtttatggagccaatgctaatgaacttttggttggaaaggctttgaagcagctgcccagagaaaagattcagatagccacaaaatttggtattg

SEQ ID NO: 184971 - DNA, 268 bp, Glycine max
gctatacgctagtttatcgtgaggagaatatgaagttgtttgttttctttgttgctgcagtagttttggtagcatggccatgccatggcgcaggctaccaaaggttccctctccgagtgaaaactggctatggtgagcgttcttcggaggtagaatgcgcaagttttaggcttgctgtggaagcacacaacatccgagccgttaaaaccattcctgaagagtgcgttgaaccagcaaaggactacattaatggcggaccatttagatc

SEQ ID NO: 184972 - DNA, 271 bp, Glycine max
caacaggtcacctggatactatgatggacgctactggaccatgtggaagctgcctatgtttggctgcactgatgcttctcaggtgttgaaggagcttcaagaggctaagactgcataccccaatggcttcatccgtatcattggatttgacaacgttcgccaagtgcagtgcatcagcttcatcgcctacaagcccccaggcttctaagtcattgaaaaatttgcaaagcatctgtagccaccccactttgtttgttgtacttaaactaca

SEQ ID NO: 184973 - DNA, 269 bp, Glycine max
cactgagaggcagacggagtgagagtgttcttcgtttgctaccttctctcagaaatggttacgttcaggtttcaccagtaccaggtggtcgggagggctctcccaacggaagcagatcagcatccgaagatctaccgaatgaagctctgggccaccaacgaggttcgtgccaagtctaagttctggtattttttgaggaagctgcagcaggtcaagacgagcaatggtcaagttcttgctatcaacgagatttttgagcagaacccaac

SEQ ID NO: 184974 - DNA, 267 bp, Glycine max
gaaatcgatccttgctgatcaaaatcacatttcctttcatttcttcgttatttcctaatcccaatggctcaagcactatcaacttcatcactactactatcaccaaaaacagggtcctacgtcaaaccacagaacaatgtaattgtaccctgcatggcctcttttccatcaaggaaggaatttccaaggctaggaagggtgagagctcaggcttctggtgataacaaagacaactctgtggaagtacaacatgttaacaagggtgac

SEQ ID NO: 184975 - DNA, 273 bp, Glycine max
tccataacacaaggcagaaagcaagctcatcctagagttttaaaaatggcagcagcctcctccatggctctctcttccccatccttggctggcaaggccgtgaagctgggcccatcagcccccgaagtcgggagggtcagcatgaggaagaccgtcaccaagcaggcctcctccggaagcccatggtacggcccagaccgcgtcaagtacttgggcccattctctggcgagcccccgtcctacctcactggcgagttcccaggtgactacggc

SEQ ID NO: 184976 - DNA, 273 bp, Glycine max
ctcgagccgctcaacatttcaagagaaatgttgcaacagaacaagatcttgaaggtcatcagaaagaacttggttaagaagtgccttgagctcttctttgaaattgcagagaacaaggaggattacaacaagttctatgaggctttctccaagaacttgaagctaggtatccatgaggattcacagaacaagggaaagattgctgaattgctcaggtaccactccaccaagagtggtgatgaaatgacaagcctcaaggattatgtgaccagg

SEQ ID NO: 184977 - DNA, 275 bp, Glycine max
atcttcttatagcttcatcccaaaaagctcttttccttctaaatttgattccttagttcagcattctattattatatatggcttcttcaccttcctcagaaaacaaaaacctagagggagtagctggtggtgccggagagaaacccattccacttggtgagaacgttctgcagaagcatgctgcattctttgacttgaataaagatggtgtcatctacccatgggagacttttaaagggttgcgtgaaatcgggactggggttttgctgtccgtt

SEQ ID NO: 184978 - DNA, 278 bp, Glycine max
caaagttctctcctccataaagaattctccttcctatcaagtttctattcaaagtctccaatattcctaaacacttttcctaaacataaaaagccttatttccaacaaagtggtatcagagcttcaagatcctcaaaagatggcgaatggaggttttcctttccaaatgccgatgctcacaaagaacaactatgataattggagtatcaagatgaaggcgctactaggagctcaagatgtgtgggataccgtagagaatgacttcgaggagcaatatg

SEQ ID NO: 184979 - DNA, 276 bp, Glycine max
cacacaccttgttttcctttctatagagacacacagagagagcaataaacacccttcaatggctaccactaccactaaagtttacattgtttactattctatgtacggacatgttgagaagctagctgaagagattaaaaaaggagctgcttctgttgaaggagtagaagcaaagctatggcaggtacctgaaacactgcctcaagaggtccttgggaaaatgggagcacctccaaagagtgatgtaccaattattacacccaatgagctacctga

SEQ ID NO: 184980 - DNA, 272 bp, Glycine max
cgcagtgttagggtttctgaagcctccaaccagaaagagagggaaatggctcccaaacatcctagtacgggtttgtttgttggattgaacaagggtcacgttgtcaccaagaaggagttgcctccacgcccttcagatcgtaaggggaaaacaagcaagcgagtgcactttgtgaggaacctcattcgagaggttgccggctttgcaccttatgaaaagcgaataactgagttgctcaaggttggaaaagataagagggcactgaaagttgc

SEQ ID NO: 184981 - DNA, 271 bp, Glycine max
gttttcaccgcatctccacctattctcaatctccacaaatccaagagaagagaatgagtagacgctcgagcagaactgtctacgttgggaatctacctggtgatatccgtgaaagagaagttgaagatttgtttctgaagtatggacacataacacacattgacctaaaggttcccccaagaccacctggttatgcatttgtagagtttgaagatgctcaagatgctgaggatgcaattcgtggtcgtgatggctatgattttcatgggca

SEQ ID NO: 184982 - DNA, 271 bp, Glycine max
atttctccatttccatttcctctctcacttttcaagaatcgtaagctatgggaaagtcttacccaactgtgagtgctgattaccagaaggccgttgagaaggcgaagaagaagctcagaggcatcatcgctgagaagagatgcgctcctctaatgctccgtttggcatggcactctgctggaacctttgacaagggcacgaagaccggtggacccttcggaaccatcaagcaccctgccgaactggctcacagcgctaacaacggtcttga

SEQ ID NO: 184983 - DNA, 279 bp, Glycine max
ctcgttgattcggatctagagtcttttttcactcttcagttctcgttgttgttcttcgctttcctgaaactagggttttcaatttcgattcattcgttaataattaaagatgtttgggagggcaccgaagaagagcgataatacgaggtactacgaaatcctcggcgtctcgaagaacgcttcgcaggatgatctgaagaaggcttacaagaaagccgccatcaagaatcaccctgacaagggcggtgatcccgagaagtttaaagagctggcacaagc

SEQ ID NO: 184984 - DNA, 265 bp, Glycine max
gagggcttatgaccaggtggtgcatgatgtggatttgcagaagctgcctgtaagatttgcaatggacagggctggattagttggagcagatggtcccacacattgtggttcttttgatgtcacatttatggcatgcctgcctaacatggtggtgatggctccttctgatgaagccgaacttttccacatggttgccactgcagcagccattaatgatcgacctagttgtgtccgatatccaaggggaaatggcattggtgttcaa

SEQ ID NO: 184985 - DNA, 269 bp, Glycine max
cgagaagaaccgtaaagagatctgcaaatacctcttccaagagggagtttgctttgcgaagaaggacttcaatctggcaaagcacccagagattgatgtgccgaatctgcaggtgataaagctgatgcagagcttcaaatccagagagtatgtgagggagacatttgcgtggatgcactattactggttcctcaccaacgatggaattgagttcctcaggacatacctcaaccttccttccgaaattgtccctgccactctcaagaagc

SEQ ID NO: 184986 - DNA, 274 bp, Glycine max
gttccaactggagaacttcctagaaacctgcttctctctcttgatcgacatctggttcagacagtggtgcctggctcaagattgacaatcatgggaatttttagtatctaccaggcttctaactctaatacatctaacaaaggagcagttgcaattagacagccttatattagggttgtaggaatagaagaaacaaatgagaccaattctcggggtccagctgcatttacacaagatgagatagaagaattcataaaatttgctgctgaacctg

SEQ ID NO: 184987 - DNA, 277 bp, Glycine max
cacccagcatatctctctattcctttttattagcacccctcacattaccttgtgtcaccaactactttgactcctttaccataccattacaataattatcaaacctaaccagtaaaaatggtgaccgtggaggaaatccgcaacgctcagcgttcccatggacccgccaccatcttggccttcggcaccgccacgccgtccaactgcgtctcccaagccgattaccctgactactacttccgcattaccaacagcgaacacatgactgatctcaaag

SEQ ID NO: 184988 - DNA, 268 bp, Glycine max
cttcttgaactcaaggagatggctctgggaagaggcagtgcagtggttctactactttgcttcttgctgcttcactctcagatggctcgtgctgccacctacacagttggagattctgggggttggacctttaacactgttgcctggcccaaaggaaagctctttcgggctggtgacacacttgctttcaattatagccctgggactcacaatgtggtggccgtgaacaaggctggatatgatagctgcaagactccaagaggagcca

SEQ ID NO: 184989 - DNA, 270 bp, Glycine max
cgttacagcttggtttttctccctgtctcacccctctggcaagaactaagaaaaatctgccacggaaacttgttttcggcaaagacccttgacgcaagcacggaccttaggcgcatgaaaatgaaggagcttcttaccgatatccgccaaagaagcctcaacggcgaagtggtggacattggaagagcagccttcatggcatgcattaactttttatcgtacacgtttctctctctggattttgttccctctgtaggtgatggcgagtac

SEQ ID NO: 184990 - DNA, 272 bp, Glycine max
cggctcgagctcgagccgaatcggctcgagcggctcgagagagaatccgaggcgacgagaagagaccaataccgatggaggggaaggagcaggatgtgtcgctgggagcgaacaagttcccggagagacagccgattgggacggcggcgcagagccaagacgacggcaaggactaccaggagccggcgccggcgccactggttgacccgacggagtttacgtcatggtccttttacagagcagggatagcagagtttgtggccacttttctg

SEQ ID NO: 184991 - DNA, 272 bp, Glycine max
gagctataagctagtttatcgtgaggagaatatgaagttgtttgttttctttgttgctgcagtagttttggtagcatggccatgccatggcgcaggctaccaaaggttccctctccgaatgaaaactggctatggtgagcgttcttcggaggtaaaatgcgcaagttttaggcttgctgtggaagcacacaacatccgagcctttaaaaccattcctgaagagtgcgttcaaccaacaaaggactacattaatggcgaacaatttagatcag

SEQ ID NO: 184992 - DNA, 276 bp, Glycine max
cagtgcaggggctcaattatggagaaagcaattcaaagacagagagttctgcttgaacatcttcaacccatttcttcaagttcaaatttttcctctcaaacccatcaatctacggatctctcagcttcattatgttttgctgggaattcttcgcatggtcaaacaggtggatcagatgatgacgtggtgattgtagctgcatatcgtactgccatctgcaaagcaaagcgtgggggctttaaggatacccttccagatgaccttcttgccacagtt

SEQ ID NO: 184993 - DNA, 279 bp, Glycine max
aaaagaggtccatgccctccccgctctaacaatatataatgtaaccaaaccccttatcaatactacttcagagttaagttgagaacataccaatctacaataaacgatgattctcattatctccctcattttttctcttctctctttctcccatgcttctgtcctagatttctgtgttgcagattatgcaggtcctattggacctgcaggatattcctgcaagaagccttcaaaggtcacagcagatgattttgcttacagtggccttggcattgctgg

SEQ ID NO: 184994 - DNA, 281 bp, Glycine max
cactcactaagctaaacaatttcatcaagcctgccatggcttcctcgtgtgcttcctctgccattgcagctgttgccatctccacaccaagttcccagcagaatggatcactcttgggaagcacaaaagcttcttttcttagtgggaggaaactgaaggtgaacagttttacagcaccagttggagcacgatccagcactacagtgtgtgcagttgctgagcctgataggcctctgtcgttcgcaggcagcacgcctcctccgtggctagatggcagtttg

SEQ ID NO: 184995 - DNA, 270 bp, Glycine max
atgcagtccacactcttcaaccccacccattcccttatccccacttcaccacactctatcagatccaattctggtcatgcttctctctccgttcgcgcctccatcgccgtggaaacccccacggagacggtgaagctgaacaagtacagctcccgcatcaccgagcccaaatctcagggcgcctcccaggccgtgctctacggcgtcggtctctccgaggacgacatggccaagccccaggtcggcgtctcctcggtctggtacgagggc

SEQ ID NO: 184996 - DNA, 270 bp, Glycine max
cttcccttctccaacatgccaaacgacagcgttctgagtcttttcttcttcgttaccctcttcacatgcctcctctctgctaattcccacgatgaccatattttcctaccgagtcaactccatgacgatgactcagtgagttgcactgctaccgacccaaaccttaactacaagcccgtgatcggaatcctgacccaccccggcgacggtgcctctggccggctcagcaacgccaccggggtttcttacatcgccgcctcctacgttaaa

SEQ ID NO: 184997 - DNA, 267 bp, Glycine max
actcgatcaaacacaaaatggaaaagaatgtggggattctcgccattgacatctacttccctcccgcttgcgttcagcaggaagcattggagactcatgatggtgccagtaaagggaagtataccattggacttggccaagactgcatgtcattctgtaccgaagtagaagatgtcatctcaatgagtttgacagtggttacttctcttcttgagaagtatgggattgatcctaaacaaatcggtcgtctggaagttggaagcgaga

SEQ ID NO: 184998 - DNA, 269 bp, Glycine max
agataactagaaacagtgtgatgaaaatgaaggtccttgttttcttcgttgctacaattttcgtagcatggcaatgccatgcgtacgatatgttccctctccgaatgaacactggctatggtgcccgtactccggaggtgaaatgcgcaagttggaggcttgctgtggaagcacacaacatctttggctttgagaccattcctgaagagtgcgttgaagcaacaaaggaatacatccatggcgaacaatatagatcagactccaaaaca

SEQ ID NO: 184999 - DNA, 272 bp, Glycine max
atgagatcaatgagagagatcgtggaagccctgcttatcttagattgagccagaaaactgtcaattcccttggtgatctagtccccttcagcaacaagttgtattctggatgtttgcaaaagagggtggggataacagctggaatctgtgtcttgatccaaaacaaagccgagaagaagggagataggtatgaggcaatctacagcttctactttggggactacggtcacatttcagtgcagggttcatacctgacctatgaggacacttat

SEQ ID NO: 185000 - DNA, 274 bp, Glycine max
cggggtatgattcgaagcagaagaggtcactaagttcttaaatcggatgcagttgcatgccaaactgtctacatctgataataagcagtgtaactttgtggtatctgtacctccttctagaagtgatgttcttcacccatgtgatgttatggaggatgtggcaattgcttatggattcaatgctattaaggatcaagcagtagtagataataaaggctcaaagaggttggctgcttccttgactctacttcctctgaatgagctcagtgatctt

SEQ ID NO: 185001 - DNA, 276 bp, Glycine max
cttcacattttagaagaataccccctcttttgctgcatcagaggagttgtaaattaagagcatggctgcacaagctcttgtatcatcatcttctcttaccttctcagcggaggctgcaagacaaagtcttggaccaagatcactccaatctccatttggcttctccagaaaagcctcctttcttgttaaggcagctgctaccccccctgtcaagcaaggatcagacaggcctttgtggtttgcatcaaagcaaagtctttcttacttggatggcag

SEQ ID NO: 185002 - DNA, 279 bp, Glycine max
gtgagtttgttgatcgagataactagaaacagtgtgatgaaaatgaaggtccttgttttcttcgttgctacaattttggtagcatggcaatgccatgcgtacgatatgttccctctccgaatgaacactggctatggtgcccgtactccggaggtgaaatgcgcaagttggaggcttgctgtggaagcacacaacatctttggctttgagaccattcctgaagagtgcgttgaagcaacaaaggaatacatccatggcgaacaatatagatcagactcc

SEQ ID NO: 185003 - DNA, 277 bp, Glycine max
caataatcgaaagtgttaatgctggtttgccaatggctacttggcctctgtttgctgagcagttttacaatgagaagttgctggctgaggtgctgagaattggggtgccagtgggggcaaaggaatggaggaattggaatgagtttggagatgaggtggtaaaaagggaagagataggaaatgcaattggtgttttgatgggtggtgaagagtctatagaaatgaggagaagagcaaaagcacttagtgatgctgctaagaaagctattcaggttgg

SEQ ID NO: 185004 - DNA, 270 bp, Glycine max
ccctcgagccgattcggctcgaccactccacacaaccatcattgaacccttctcatcctccacttaagaagaaagccacccaccaattggcggagatcaagcacgcccgtctcgccatggtgggcttcttgggctttgcagtccaagctgccgccactggcaagggcccgctcaacaactgggccacccacttgagtgacccactccacacaaccatcattgacaccttctcatcctcctcttaagaagaagcaaaagaagaagaattgt

SEQ ID NO: 185005 - DNA, 268 bp, Glycine max
cctcgagccgctcgagccgattcggctcgaggttgtttgtcttctctgttgctgcagtagtcttggtagcactggccatgccatggcgcaggctaccaacggttccctctccgaatgaaaactggctatggtgagcgttcttcggaggtaaaatgcgcaagttttaggcttgctgtggaagcacacaacatccgagcctttaaaaccattcctgaagagtgcgttgaaccaacaaaggactacattaatggcgaacaatttagatcag

SEQ ID NO: 185006 - DNA, 271 bp, Glycine max
cttcctttgcggcagggaaacaccatcagttgctggaataattaaccctggttctgagggatttcaaaaacttttttttggtcaggaggaaattgccatcccagtgcatgctaccgttgaagcagcttgtgctgcacatcctactgccgatgtcttcatcaactttgcttcatttagaagtgctgcagcatcatccatggctgctttaaaacagccaacaattagagttgttgctattattgctgaaggagtacccgagtcagacactaag

SEQ ID NO: 185007 - DNA, 273 bp, Glycine max
aaactcagaaaacacagggaaagaaagagttgagtgatggcggcttgtctgcaactgtggcaatgcaaactagcgagaccctttgactcattaccggtgcgaaggtcaattcctttgagtctgaggtgttcggccgcgccctcttcttccaagccgacgcgctcctacagcatcactctcatccccggcgacggcatcggccccgaaatcatctcggtggccaaagacgttcttgtcctcgccggttatctcgaagggattaaatacgacttc

SEQ ID NO: 185008 - DNA, 277 bp, Glycine max
cagtatcggagtccaaatctgcttctgtgcaacctcatgcagctgaatctttctctgttggatatattcagatgaagactgcagcgaactgttcttacctggtagttatatctacgagttgttcatcgcctaagttcactacggataagattggtattacgtttggcgatgcttatggcaaccaggtatatgaaccaagactggatgatccaatttcaaggacctttgagcagtgttcttcagatacatttcagatagatggtgcatgtgcatctcc

SEQ ID NO: 185009 - DNA, 263 bp, Glycine max
gatcgagataactagaaacagtgtgatgaaaatgaaggtccttgttctcttcgttgctacaattttcgtagcatggcaatgccatgcgtacgatatgttccctctccgaatgaacactggctatggtgcccgtactccggaggtgaaatgcgcaagttggaggcttgctgtggaagcacacaacatctttggctttgagaccattcctgaagagtgcgttgaagcaacaaaggaatacatccatggcgaacaatatagatcag

SEQ ID NO: 185010 - DNA, 265 bp, Glycine max
caattctaaagtttacgaaaaggattgtcaacccatgactcgcaaacaaagtgcatgcttccttgattaggaatgtcttcaagagtcaaactcactaggaagactgcactttgtttgcaactcatgggtttacaattctaaagtttacgaaaaggatcggattttctttgccagtgagacatatgttccaagtgaaacacctggtccattagtgacatatagagccgcagaattgcaggctctaagaggacatggaacagggaag

SEQ ID NO: 185011 - DNA, 275 bp, Glycine max
cacaaaactcagtttccaattcaccaaactcacaatggttgatctagattggcaaacaaagatggttcactccaacatcatgcctccaatgtcccccaaactctctctcccggatcataacattccaatcccaactttgcaactcccccttcgccaaaacgacatcaccgcagcgtcgtctcctatctgcgctgcatacgacaactaccttcgtctccctgagctcagagccctctgggcctccaaggacttccccaattgggccaacgagccca

SEQ ID NO: 185012 - DNA, 231 bp, Glycine max
gcgacaagatgctggaatcattggatatgaggaaagatgttcaagacctttttcaagatgattccccatgataagcaagtaatgatgttctcagcaacactcagcaaggaaattcgcccagtctgcaagaaattatgccaggttcctatggaaattatggtgatggttgaggccgttgacactttcaaggcttgtgcgcactacatccaattggcagacgaggaaaagaat

SEQ ID NO: 185013 - DNA, 267 bp, Glycine max
cttgctcatcaagtccaagaaccaacctaccttttgcaatctcaattcaatggcgtcctctctcattgcgaacgcttcctctcctcttccctcctctccaggtccctccttcgccccgccgcttccgcttcccaccgctctttcaacaccaacgccatgcgccagtatgacaaccgcgccgacgaccacagcaccgacatcgatcgtcactccgaacgctctttccctagcactgcgcgccgcgacgatatcttctcagatgtgttg

SEQ ID NO: 185014 - DNA, 265 bp, Glycine max
atcagcagggctgcttcgccggcgccaccgtactccgcctcgcgaatgacctcgccgagaacaacaagggtgcgagggtgctcgttgtctgctccgagataaccaccgtgacgttccgcggcccctctgacacgcacctcgactcgctcgtgggacaggcactgttcggagacggcgccgcagcgttgatcatcggatcagaccccgacccagcagtggagcggccaatattcgagatgatatcggccgcccagacaatcctgcc

SEQ ID NO: 185015 - DNA, 259 bp, Glycine max
  unsure (1)..(259): unsure at all n locations
cacacctcatcgtttctctctctagatctctgtttcttctttttctccaaccttcgtttcaccaccacacttacattactttgtcgaaatggctccaccaattgagaccccaaacaaggtttccagctatcaacagtccccaaaccctcgtcttaacgancggattctttcatccatttccaggagacacgttgctgcacacccgtggcacgatcttgagataggacccgaagctccaaagatcttcaactgtgtggtc

SEQ ID NO: 185016 - DNA, 268 bp, Glycine max
ttacaaagtagtactacttggtttcaatcaaaacaaaaactcacactttggtggccacagcaacaataacaatggcagcctcactacaagctgcagctaccttcatgcaacccaccaaggtgggcatggccactcgcaacctcaaatctacacaatgcatttctaaggcttttggcttggaacccgctgcagctaaactcatttgctcccttaagcccgatctcaaagatcttgctcaaaaatgtgtcgacgccaccaaaattgcagg

SEQ ID NO: 185017 - DNA, 270 bp, Glycine max
gagaaattgagtttctgagataaccacttttctctttgattcatcaatggcaaccgcgaggaccgtgaaggatgtttcgcctcacgatttcgtgaaggcttacgcctcccatctcaagcgttccggcaagatggagcttcctgagtggactgatattgtaaaaacagcaaaatttaaggaattggctccatatgatcctgactggtattatgttagggctgcctcaatggcaagaaagatttatttgagaggcggtcttggtgttggggc

SEQ ID NO: 185018 - DNA, 278 bp, Glycine max
  unsure (1)..(278): unsure at all n locations
gatattccaacttatgttgttggtgtaaatgaaggggactacactcatcagntctctaacattataagcaacgctttcctgcaccacaaactgtcttgctccctttgtgaagatcctggatgaagagtttggaattgtgaagggaaccatgacaaccacacattcctacacaggagaccagaggcttttggatgcttcacaccgtgacttgagaagagccagggctgcagcactgaacattgtcccaaccagcactggagctgccaaggctgtgtctc

SEQ ID NO: 185019 - DNA, 277 bp, Glycine max
tcatcttcctctttttctcaacaaaaaggggttcaattctagctagttctattacgtcgtccgccaccatgaacatggcgatcgcgcttctgttcatggttttcgcagtttcatcagctttagacatgtcaataatatcacacgacaacgctcatgcggatagggccacgaggcgcaccgacgaggaggtgatgtcaatgttcgacgagtggctggtgaaacacgacaaggtgtacaacgcgctcggtgagaaggagaagaggtttcacatcttcaa

SEQ ID NO: 185020 - DNA, 278 bp, Glycine max
tttcgttttgccctttcttcaagccaacctcttcacatatcttctttcttcctttcttcctctcactaccaccattatcacagtaagcgtaagatggcaaaaggagattttcaaagatgtagaacttgacactacccagtctgcttatgtttttaaatgccaattgtatgatttgactggtgtgcctcctgaaagacaaaaaattatggtcaagggtggtcttttgaaggatgatgctgattggtcaacagtaggggtgaaagagggtcataagctaa

SEQ ID NO: 185021 - DNA, 272 bp, Glycine max
cgatctttgcagtaagaagagtgtgttgtgttgaagtatcaaagatgttgattggttctctcttaaacaggcgtcctaagatcaaggggactgtggtgttgatgaccaagaatgtgttcgacgtcaacgacttcatggcgactactaggggcggaccagccgctgttgctggcggcatcttcggtgccgcccaggacattgttggtggaatagttgatggtgctacggccatcttcagccgtaacattgccatacagttgatcagtgccacc

SEQ ID NO: 185022 - DNA, 268 bp, Glycine max
ggaaaagaagatgaagaatgacccttcatttacatatgaggagacggttcagactgccatttctgccctgcaatcagttcttcaggaggattttaaggccactgagattgaggttggagtggtgcggaaggataatccagaattcagagttttaaccaccgacgaaattgatgagcacttgactgcaataagtgagcgtgactgagttcttgataaggatgtagttgttcaaactttctgatggtagagattatattatgtacttgtt

SEQ ID NO: 185023 - DNA, 266 bp, Glycine max
aaggaagtgagatcagtgagcaagtgggagaggatttgggagcaaagaagaaagtttttgtagctggagccactggtagcaccggcaaaagaatcgttgagcagttactcgcaaagggctttgctgttaaggctggggttagagacgtcgacaaggccaagacaaccctttcatctgccaacccttctcttcaaattgtgaaagctgatgtcacagagggttctgataagctagctgaggccattcgttaatgttcagaagcagta

SEQ ID NO: 185024 - DNA, 267 bp, Glycine max
attttactagatgagaattgggtggctaaggtttctgattttggactgtcaaaaacaggtccaactttggataatacccatgtaagtactgtggtaaagggtagttttgggtacttggatccagaatacttcaggaggcagcaactgactgacaaatctgatgtttactcgtttggtgtggttctctttgaggtattatgcgctcgcccagctttgaaccccacccttgctaaggagcaggtgagtctggctgagtgggcagctcat

SEQ ID NO: 185025 - DNA, 271 bp, Glycine max
ataacacttgcggtgttgggatttgggaaggttggttctgaagttgctcgtcgtgccaagggacttggtatgaatgtcattgcgcatgacccgtatgctcctgcagaccgtgctagggccattggtgtggagcttgtgaactttgatgaggccattgccactgcggatttcatctctctacatatgcctcttacggctgctacatcaaagatactcaatgacgagacatttgccaagatgaagacaggagttcgcatagtcaatgttgctc

SEQ ID NO: 185026 - DNA, 273 bp, Glycine max
atatttgacaggttcatcatcataaccttcattgaaaagaaatggctgaggcaagcattcgcagcaaaagcagcagatggtctttacagggaatgacagctctcgtcaccggtggatccaaaggaatcggatatgctatcgtggaggagttggcacagcttggagccactgtgcacacttgcgctcggaacgaagctgaactcacagaatccttaaatgaatggaacacaaaaggatacagagtaactggttccgtctgtgacgtggcgtctc

SEQ ID NO: 185027 - DNA, 275 bp, Glycine max
tgcagactgtggaggatctcattcaatcctgctctattatcatatggacagcttcggctctccatgcagctgttaattttgggcaatacccttatggaggttatatcgtgaaccgtccaactctagccagaaggtttatcccagaagaaggaaccaaagaatatgatgagatggtgaaggatcctcaaaaggcatatctgagaacaatcacacccaagttcgagacccttattgacatttcagtgatagagatattgtcaaggcatgcttctgat

SEQ ID NO: 185028 - DNA, 264 bp, Glycine max
ttgcgttttctgcgtcatctccgattccccgacaatggccacccaaatgagcaagaagagaaagttcgtagctgatggagtgttcttcgctgaactgaacgaggttctgacaagggagttagccgaggacggatactccggcgtggaagttagggttacgccgatgcgcaccgaaatcatcatcagagccaccagaacccaagccgttctcggtgagaagggaaggagaatcagggaacttacctcggtggttcagaagaggtt

SEQ ID NO: 185029 - DNA, 265 bp, Glycine max
gtggtgccttatcgctgtggttatcatcttcttcttcctctttcttagatctcttctttctctacgccgcacgccgaaaccatggccggaaaaggagagggtcctgctatcggaatcgatctcggaaccacctactcttgcgtcggtgtgtggcaacatgaccgcgttgaaatcatcgccaacgaccaagggaacagaaccacgccgtcttacgtcggattcactgacaccgagcgtctcatcggtgatgcggccaagaatcaag

SEQ ID NO: 185030 - DNA, 267 bp, Glycine max
acagaatttcctgtttacgatctcattacaattttgcaactttcaaagcttattagctaaagtaacatcaaaagatgtcattgattccaagtattttcggtggcccaaggagcaacgtgttcgatccattctcactcgatatgtgggatcccttcaaggattttcatgttcccacttcttctgtttctgctgaaaattctgcatttgtgaacacacgtgtggattggaaggagacccaagaggcacacgtgctcaaggctgatattc

SEQ ID NO: 185031 - DNA, 275 bp, Glycine max
ctgagaagagcgagagagaagcttgagaaagagcagagggagaggaaggaaagagcaagattgaagcttctgaaggaaaagaaggaccaaagaagaggctcagaagcaaaaagaagccatcgaagctgttcaaagatctcgtcgtattgatgccgcccaagctcaactcaaggctgaccaacagatgcaagaaaacctacttgctggcagaggaatagtgttttaccgactactagaggcttttttttatgaaggtgctggagataagatcaagc

SEQ ID NO: 185032 - DNA, 289 bp, Glycine max
agaaacacaaccattcccaccaagaaggagcaggtattttcgacctattccgacaaccagcctggtgtgttgattcaggtctatgaaggtgaacgtacgaggactcgtgataacaatttgcttggcaaatttgagttatctggaattcctcctgctcgagaggtgttcctaagatcaccgtttgctttgacattgacgccaacggtatattgaacgtgtctgcggaggacaaaaccactggacagaagaacaagattacaattaccaacgacaaaggaaggctttctaa

SEQ ID NO: 185033 - DNA, 279 bp, Glycine max
aacaaatcaaagccatggccacctccaacttctctattgttctctccgtctccctagccttctttttggtgctacttaccaaggcacactcgaccgataccgtttctttcaccttcaacaagttcaacccagtccaaccaaacattatgctccaaaagatgctagtatttcatcctctggggtgttacaactcaccaaagttggcagcaacggcgtgcccacctcggggatctctcggtcgtgcccttacgctgcccaatccagatttgggacagcgaa

SEQ ID NO: 185034 - DNA, 283 bp, Glycine max
caaccaagtgcgatgacgatgactatggctgtaaggagggtacttggctttgcttcaaaaaaacccccttttctgaatctctatcaaaatgcaaacttgcgccatattctcccttctcctcgtcatatctccgcattttcaggtataatgtacacttagtaatttctgtataggtgattcatgtgtaatccacaatggagtctgcattggtcaagatggatttggattttacgtggatggtgatggtaatatgataaagaagcctcaggttggttgtatgtct

SEQ ID NO: 185035 - DNA, 283 bp, Glycine max
gttatttctcagcgcgtaaagcatggctttgttggtggagaaaaccacgagtggtcgcgagtacaaggtcaaggacctttcccaggccgacttcggccgcctcgagatcgagctggccgaggttgagatgcccggcctcatggcctgtcggccgagttcggcccctcccagcccttcaagggggcccgcatcaccggctccctccacatgaccatccagaccgccgttctcattgagaccctcaccgcccttggcaccgaggtccgctggtgctcctgcaaca

SEQ ID NO: 185036 - DNA, 292 bp, Glycine max
tctcactccgttagaagcaccaaatccagatggcaccaaaggcagagaagaagccagcggagaagaagcccgcagaggagaagaagtccacggtgggagacaaggctccggcggagaagaagccaaaggccggaaagaagcttccgaaggagggagcgccggcggcgaagggaagaagaagaagagaaacaagaagagcgtggagacatacaagatctacatcttcaaggttctgaagcaggttcaccctgacattggtatctcaagcaaggccatgggaatcatgaacagc

SEQ ID NO: 185037 - DNA, 287 bp, Glycine max
gaaatcgtgacaccaaccctacaccaccatggcctccgtagacaaattttgggcttttgccctcgctcttctcctccttgcctcccctctcctccaagttgctaggtgtcagtcagactccgaagatgtagtggaggctgctgaagaatcaagtgaatcggcattgttggtgatgatgtccaagactttggtgatgggaccttcccttctgctccaggaattgaaacaataagtgtttttccaaaaaatagtgcgagattgataacagctggagaagagacagagct

SEQ ID NO: 185038 - DNA, 291 bp, Glycine max
caaatgttgtacaatcaagtgtgctgcctgatatgtttagggacacatataatgcaatcacccaagggaatcccatgtggaataatctatctgttccaacgggcactcttcatgcttggggacctacatcgacttatattcatgagccaccttatttagagatatgagcatgtctcccccaggctctcatggagtgaaggatgcttactgtttgctcaactttggagacagtatcacaactgaccacatctctccagctggcagcatacataaggacagtcctgcggccag

SEQ ID NO: 185039 - DNA, 286 bp, Glycine max
ggcagactcctacacactgttcgtgtttgagatggcactgatgggatttgcagagcacagaagattccaagactgggccaaaccaggctctatgggcaaacaatacttcctaggactagagaaggggcttggaggttctggtgagccagcttatcaggaggacctttcttcaacccactaggctttggtaaggatgagaagtccttgaaggatttgaagctcaaggaagtgaagaatggaaggttggctatgttggcaatcttgggttactttgttcaagctcttg

SEQ ID NO: 185040 - DNA, 283 bp, Glycine max
gaactgctgatgaagctgctgcagtggcaggagttgcttcagaggctactggccaagctactgagggagaagttcatcctgatggtgcagagcgttctcctaaatctgtaagtgctggcttaacagaagcagaagagttggagaagtatatgccattagagaagagatgtataagaaagctaaagagttcgattctaagatcattggttttgaaacagctattaggaggccctactttcatgtacggcccctcaatgttggagagcttgagaattggcataac

SEQ ID NO: 185041 - DNA, 287 bp, Glycine max
agctgccatcgataacatatcacacttgagacagttatctatatctacgcaagagaagaatagagaatggatatcaggttgatggatttggactctccattgttcaacactctgcaccgaatcatgggatctgacagaggacgcagagaagaactgaacgctccgacgcggacatacgtgcgcgacgcgaaggcaatggcatggactcctgcggacgtgaaggagtaccctaactactacgtgttcgtgatcgacatgccaggcctgaaatccggggacattaaggt

SEQ ID NO: 185042 - DNA, 282 bp, Glycine max
gagtaaattaactatgaagcctaccctactattatccctttccttcctgcctctctttgctttcctggctctttcagaagatgttgaacaagttgtggacataagtggcaaccccattttcccaggtggcacatattacattatgccatcacttggggcgctgccggtggtggattgaaactaggccggacaggaaactcaaactgcccagttactgttttgcaagattactcagaaatcttccgtggcacaccagtcaaattcagcatacctgggataagc

SEQ ID NO: 185043 - DNA, 282 bp, Glycine max
tgtcaaagggtcctggtctctactctgacattggcaagaaagcccgagatctcctcttcaaggactaccacagtgaccagaagttcaccatcactacctactcacccactggagttgctataacatcctcagggaccaagaaaggtgatcttttgtggctgatgttaacacccagttgaagaacaagaacatcaccactgatatcaaattagacactaattccaatcttctcacaactatcactgtcaatgagcctgctcctggtctcaagactatttttag

SEQ ID NO: 185044 - DNA, 282 bp, Glycine max
ctcgagccgatgaaatggatctcactcttgtggatttagaagggcttttaccctcggctattattatggttgtctctgttacagcatcaactacaactggcaagcctcttccagaagaagtgcttagcaagacagttgaggcctgcgatcagctcttgatcttgactcagcaaagaagaaagttcttgatttcgttgagagtaggatgggctacattgcacccaatctttctgctatagttgggagtgctgttgcagccaaactcatggggacagctggtgg

SEQ ID NO: 185045 - DNA, 284 bp, Glycine max
cgcttacagtaagaggtgagaaagagagacaaatcggcagaagcaaggaggctgagagcgagagagcaactgcacgcactgtaactcctaacttcccagatcgtcttcttcctcctttctctccggtgattgttggaactcagagagcttctttatggaacagtacgagaagttgagaagataggcgaaggaacataccgcgtcgttaacaaggtcgcgaccggtcaccaggaggacatcgcgttgaagaaattcgcttcgagcaggaggtcacggggttccca

SEQ ID NO: 185046 - DNA, 286 bp, Glycine max
aaagtgtttaatattggtaagagcagcaagaatgaaaatatatttgatgcacacagaatggtgatgactggtcttcaaaaagaaggatcaagagtaattcttggtgttcctaaccggggaagaaaaggaaatttatggaagtaagcaagcattccgtggcacatgaaaacagtaagatcagtgatagaaatgattcagttaaacttgcaaatttcttgatgcctccaagttccggacctagaggatggaaaaatagttccaaaaatgatgtcaaagagaaacatgg

SEQ ID NO: 185047 - DNA, 287 bp, Glycine max
gtccggtccaggcttaatcttgatgttgctgtcgcatctgactctcctcctgcacctgctccaatagaatcgtttacggatatgtgtttgcatccgagtatcatgaaggacattgcttaccatgaatacaccaggccaacttcgatccaggcaaggccatgccaattgctctcagtggaagggatctattgggttgtgctgaaaccggtagtggaaagactgcagctttcacaattcctatgatacagcattgcttggcccaacatcccattcggcgcaatgatggt

SEQ ID NO: 185048 - DNA, 263 bp, Glycine max
aaaaaaacccttagccaacacaaccatcatggccacctctgctattcagcaatcagcattcactggtcaaactgctctgaagcagctcaatgagttcgtccgcaagaccggtggcgccggcaaaggtcgcactaacatgcgccgcaccgtaagagtgctcctcagagcatttggtatggccctgaccgtcccaagtacttgggtccattctcggagcagattccatcatacctgaccggagaattccctggtgactacggatg

SEQ ID NO: 185049 - DNA, 268 bp, Glycine max
ggctcgagctattatcatccgcagctgctactattcgcaccgcaaacagtgagccatggccgtcggaaagaacaagcgcatctccaaggggaagaagggtggcaagaagaaggcagctgatccctttgccaagaagattggtatgacattaaggctccttctgtttttcaagtgaaaaatgttggcaaaaccctcgtctctcgtactcagggtaccaagattgcttctgaaggactcaagcatagagtgtttgaggtctccttggctg

SEQ ID NO: 185050 - DNA, 281 bp, Glycine max
cgcttagtggcagcagcagtggcggcaagcaactccatccgcaatgggaatcgatttgaaggcaggaggtaagtccaagaagaccaagcgaaccgcccccaaatccgatgatatctacctcaagcttctcgtcaagctgtaccgttttctgttcggaggactgggagtaacttcaatgctgttgtcctcaagcgccttttcatgagcaaggtcaacaagcccccgctatccctctctagattgatccgttacacgaagggaaaggaggataagatagctgt

SEQ ID NO: 185051 - DNA, 283 bp, Glycine max
caactatagagatgttgtggctgaaaatgtgaccatagctgctaggtttcaaggaatctccaatgatccctttacaggaatctgcattgcaaatgtgacactaaggatggcagccaaggccaagaagcagccttggacctgcactgatatgaagggatgacgagtggggtgacccctccaccttgtggtctgttacctgatcaagggccggagaagatcacagcatgtgatttcccagcagataatctacctattgacatagtggagcttaagaaatgtacta

SEQ ID NO: 185052 - DNA, 288 bp, Glycine max
cgccgcccagagaacgtgaaggcggcacaagatgcactccttttccgtgccaagtccaactcgctcgcccagcttgggaagtacaccggtgagggtgaatccgaggaagccaagaaggagttgttcgtcaaaggctactcctactaagatgtagtagtgaatatgatacatgttaggcagcagcaacaccagcagttatattaggtgttgacggaggatgaattggaagaagattaatttgtctaaaatgtaatgttttaatagtcttggagactattttggtttatg

SEQ ID NO: 185053 - DNA, 285 bp, Glycine max
atactattcagtggagactgttacacttttggtggctttgaaagtccgttacagagatagaatcacaattctcaggggaaatcatgaaagtcgtcaaattactcaagtgtatggcttctatgatgaatgcttgagaaaatatggaaatgccatgtctggaaatactttacagacttgtttgattatttacctctgactgccctcattgagagtcagattttctgcttgcatggaggtctctcaccttctttggatacactggataacatcagagcattggatcgt

SEQ ID NO: 185054 - DNA, 282 bp, Glycine max
aaagtcacagccctctgctcatgatgcttttgtcggcagctggaagcctaccaagaatgacactatggagaatcgggttcctggatttggcactacaatgaacattctctatggggatggtgtttgtggacaaggtgatgtggactcaatgacaatattgtttcccattacctgtattatcttgaccttcttggtgttggtcgagaacaggctgggccccatgacatccttacatgcgctgagcaggttcctttcaacccatcttccaaacctgcttcatca

SEQ ID NO: 185055 - DNA, 281 bp, Glycine max
ctcatcaagggttgtgaaagcagagaagtgagatacactaagttatcctcataaatacactctaattaggtggcaagataagtgtctaaccttagtaacattgccacatattgtgttcattttggaattgtgccactaaaattctattcattcatctatggctgcctcttcttatgctatgcaatcaatcctggcaaaccctttgatccgcatttccagcgggtctagggtgaaccaatttggcgttcctgctttgcacatgagcaggaatgttggcctga

SEQ ID NO: 185056 - DNA, 281 bp, Glycine max
cttcaaaacactcataacacaaagcacaaagcaaagctcatccttgagttaaaaaatggcagcagcttcttccatggctctctcatccccatccttggctggcaaggccgtgaagctgggcccatcagccccagaagtgggaagggtgacatgaggaagaccttcaccaagcaggtctcctcaggaagcccatggtacggcccagaccgagtcaagtacttgggcccattctctggcgagcccccgtcctacctaaccggtgagttcccaggcgactacgg

SEQ ID NO: 185057 - DNA, 280 bp, Glycine max
tgaaaacccaaagtgcttctctcctctgtctttttctctctcttgctatccttttggctagtagcactgctgcaagtgcaactccaagaagcgcagtgccaagccaccatgtttcaacattcaacagaagcctttttccttccactttctctttggaattggttcttctgcttaccaggcagaaggagcagcaagtgtagatgggagaggaccaagcatatgggacacctacactagacagcatactgaaaagatttgggatcatagcaccggtgacatg

SEQ ID NO: 185058 - DNA, 279 bp, Glycine max
cggctcgaggagaattagagatggaaaagagcagagtgcttattgttgggggaactggctacataggaaaaaggttggtgaaggcaagtttagctcaaggacatgaaacatttgttcttcacaggccagagattggtgttgatattgaaaagttcagcttctattgtcattcaagagatttttgccctcggagtttggtactgatccggcaagaatggcgcatgcattggaacctggaagagtaacatttgacgacaaaatggtagtgaggaaagccat

SEQ ID NO: 185059 - DNA, 284 bp, Glycine max
gtgagtttgttgatcgagataactagaaacagtgtgatgaaaatgaaggtccttgttttcttcgttgctacaattttggtagcatggcaatgccatgcatacgatatgttccctctccgaatgaacactggctatggtgcccgtactccggggtgaaatgcgcaagttggatgcttgctgtggaagcacacaacatctttggctttgagaccattcctgaagagtgcgttgaagcaacaaaggaatacatccatggcgaacaatatagatcagactccaaaaca

SEQ ID NO: 185060 - DNA, 287 bp, Glycine max
caaagccttcctagaacgaaaaaaaaaagaagagcaattttccctcaccaaagaagaagaagcaaacaatggccgatcaacttaccgatgaacagatctccgagttcaaggaagccttcagcttgttcgacaaggacggcgatggttgcatccaaccaaggagcttggaactgttatgcgttcattggggcaaaacccaactgaggcagagctccaggacatgatcaatgaagtggatgctgatgggaatggtaccattgacttccctgagttcctaaatctcatgg

SEQ ID NO: 185061 - DNA, 282 bp, Glycine max
tctgtctatctctcgttgtagcgtagcagcagttgaatttggaaaacaagatgtctcaccgcaagttcgagcacccgagacacggttcccttggctttctcccaaggaagcgagcttctcgtcatcgcggaaaggtgaaggctttcccaaagacaatcctagtcaaccatgcaggttgactgcctttgtgggctacaaagctggaatgacccacattgttagagaggttgagaaacctggatcaaagcttcacaagaaagagacatgtgaagctgttactat

SEQ ID NO: 185062 - DNA, 284 bp, Glycine max
gcaggtctcctcaggaagcccatggtacggcccagaccgagtcaagtacttgggcccattctctggcgagcccccgtcctacctaaccggtgagttcccaggcgactacggctgggacactgctgggctttccgcagacccagaaaccttcgcaagaaccgtgaactcgaagtgatccactccaggtgggccatgctcgcagccttgggctgcgtcttcccggagttgctgtcccgcaacggggtgaagttcggagaagccgtgtggttcaaggccgggtccca

SEQ ID NO: 185063 - DNA, 286 bp, Glycine max
cttggagttcggtccctggtgctggagcaggcacagtcacttcgaacaggtggaacttcactcacccttttcaaaaacggatggagggtgctcgatgcaattggagtagctaatgacctcagaactcaattcttagaaattcaagggatggtgtgaagtccgtggatgggagggaactacgcgccttcaatttcaaacaagaggatccaagccaagaggtacgtgcagtggagaggagagtgcttttggaaaccttggctagtcagctacctcgggataccattca

SEQ ID NO: 185064 - DNA, 286 bp, Glycine max
gttgtcgcccacaatcacaccactgttaagcctctgggtgatagagtactggtgaaaattaaggatgcagaggagaagactgcaggtgggattttactgccagcaactgctcaaggcaagcctcaaggaggtgaagtggttgctgttggggtgggaagtcggttgggaagagcaaagtggatgttagtgtgaagacaggtttgcaggttgtgtattcaaagtatgcagggactgagcgtggagttcaatggttcaaaacatcttattctgaaggacgatgacatcg

SEQ ID NO: 185065 - DNA, 279 bp, Glycine max
ggcaagtcatgtcttctcctgaggtttgctgatgattcataccttgacagctatatcagtaccattggagtggactttaaaatccgcactgtggagcaggatgggaagactattaaacttcaaatttgggacactgcgggtcaggaacgttccggacaatcactagcagctactatcgtggggctcatggcattattgttgtttatgatgtcactgaccaagagagcttcaacaatgttaagcagtggctgaatgaaattgaccgttatgcaagtgaaa

SEQ ID NO: 185066 - DNA, 278 bp, Glycine max
tcaggttccgcctcagaatgcgatcccaggtcccaacggtggtggtggtgccggtggtgctggaaaccagttcgtaacgacgtcgctttacgtcggagatctcgacccgaacgtcacggacgcgcactctatgacttgttcaaccattggggcaagtcgtgtccgttagggtttgcagggatttgaccagccggagatcgctcggttatggttatgtcaactttagcaacccgcaagacgctgctagagcattggatgttctgaacttcactcctctc

SEQ ID NO: 185067 - DNA, 280 bp, Glycine max
catcgagccgaatcggctcgagctgccatcgataacatatcacacctgagacagttatctgcatctacgcaagagaagaatagaaaatggatatcaggttgatggatttggactctccattgttcaacactctgcaccgaatcatggactgacagaggacgcagagaagaacttgaacgctccgacgcggacatacgtgcgcgacgcgaaggcaatggctgcgactcctgcggacgtgaaggagtaccctaactactacgtgttcgtgatcgacatgcca

SEQ ID NO: 185068 - DNA, 278 bp, Glycine max
ctcgagccgctcactttcatttctacatccctggctctgttccgtcgatgacgatggcgtttagggtgcgaaaccctgacctccgctttctcattcttctctctctcttgtccatcacttccgccaaggtcttcttcgaggagcgttcgatgacggatggggaaatcgttgggttaaatcagattggaaaaaagatgagaacctggctggggagtggaaccacacctctggccaatggaatggagacgctaacgacaaaggtattcaaaccagtgagg

SEQ ID NO: 185069 - DNA, 281 bp, Glycine max
ctgggcggcatgagttaccctcagcctcagcgtcaggacagccagagtcgctgttccaatgccaaatctgagaggcaaagcggttgttggtgttggttccagaatgataaggtgcatggctaaccccagaagagttcaaatggtggcaagcaaattaggagagagctttctcatatgcttctcaccgataaagtcttgcagtatgctgttcttcccgaagcctccttaggagccgaccgttacctctcttctctcaccaccatcaccgacgtccaagtctc

SEQ ID NO: 185070 - DNA, 298 bp, Glycine max
agctttctccacctcctgtctttcctcttctagcaacttagggacatgttggttggtattaaaaactcacaatgcaagggccgtgccagggaaactactacctggaaatggaaggagaagaatggcattaataaaagcagaagtgaagtatgtgaacgctgaaaaagctaaggaacttgtggaagctgatggatatacggttcttgatgtgcgggacaaaaatcagtttgagcgagctcacatcaaatcttgttctcatgtgcctctttttgttgaaaacaaagacaatgatcccggt

SEQ ID NO: 185071 - DNA, 296 bp, Glycine max
tcaaggattgaagttttgttgctctggtacggcgttatgttcaaggattgaagttttgttgctctggtacggcgtttgtggatttgtatgctgagaatttacatatggtctagaaattagaggtaccgtgccattactagtgcttactaccgaggagctgttggtgccttacttgtctatgatgtcacacgccgtgctacatttgagaatgctgcaaggtggttgaaagagttgagagatcacacagaccccaacattgtggtcatgcttattggaaataagtcggatcttcgaca

SEQ ID NO: 185072 - DNA, 297 bp, Glycine max
ctcgagccgatcaagtccaagaaccaacctaccttttgcaatctcaattcaatggcgtcctctctcattgcgaacgcttcctctcctcttcactcctctccaggtccctccttcgccccgccgcttccgcttcccaccgctctttcaacaccaacgccatgcgccagtatgacaaccgcgccgacgaccacagcaccgacatcgatcgtcactccgaacgctctttccctagcactgcgcgccgcgacgatatcttctcagatgtgttggatccattttttccgactcggagtttga

SEQ ID NO: 185073 - DNA, 295 bp, Glycine max
ccgctcgagcggctcgacgaaaacgaaaccgaataacccaatgtatcatcatcctctgaattcaactcgctacgcacatgggaatttattgaccagcatcaaccagatctgtgactgtgttcgattgggtaccaactattattcaataggctgtcagtaacgtaaaagtaatccctgtgccccagccatggctgcaccgtttttctcaacgccctttcagccttatgtttatcagagtccgcaagatgcaattataccttttcagattttagggggtgaagctcaagtggttcag

SEQ ID NO: 185074 - DNA, 294 bp, Glycine max
ctcttccgtgcacagcttgaacacaccgcgtttcggagagagacgtcgcaatggggaggaggcctgcaaggtgttatcggcagataaaaaacaagccataccccaaatcacgcttttgccgtggtgttcctgatcctaagatcagaatttatgatgttggtatgaagaagaaaggtgttgatgagtttcccttctgtgttcatctggttagctgggaaaaagaaaatgtttcaagtgaagcattggaagctgctagaattgcatgcaacaaatatatggcgaaatttgctggaa

SEQ ID NO: 185075 - DNA, 293 bp, Glycine max
actcgagccgctcgagccgaatcggctcgagctcgagccgctcgagccgattttctcacttatcagcactaatcagcgatatcagttgaagatacagaaccaaacaaaagaggcagaagatgttgtgggtggacaaatatcgtcccaaaaccctcgaccaggttatggtccacaccgacatcgctcgcaatctcaagaaattggtaacggaacaggattgcccccatttactcttctatggcccatctggctccggcaagaaaaccctaatcatggctcttctccgccaaatg

SEQ ID NO: 185076 - DNA, 297 bp, Glycine max
cagctctcgctcttcttctcatcaagcacagagttacagactcaccgatcttccgattctctttcgtcttggtttatgagcacgatggagagacccactcttggtggcacgcggattaagacccgcaaacgaaatattgctgcgccgctggaccctgcagcattctcggatgcagtggtccagatttatttggataatgctggtgatctggaacttattgctaagagtattgaatcttcagaccttaacttttcaagatacggtgacaccttttttgaggttgctttcactgggggt

SEQ ID NO: 185077 - DNA, 297 bp, Glycine max
caaaaactgaaggcaaaacagagaaagctctagctctgaatgatggatagaaggcactgttacaaggatttgctgcctctggtggtgcttgttgccaacgaatgcaacaacacaggcttgttcactctcttcaaagcagccacactgcaagggatgagcaactatgtctttgtcacctatgcctattctgttgcccttcttgtactccttcctgtcacttttttctacagaagatcgagagcggttcctccactcagttgttccatcttatccaaaattgctcttcttggagtgata

SEQ ID NO: 185078 - DNA, 278 bp, Glycine max
acacgttgctgtaggagataagattgcagtagtgctaaatgctaacacctacagtgaacaacggcctatgcatgagcatctctgctcaaggcttcacctgttcttgacaagtctgagtaggtgaagggacaaacccttcgtcaaccttctgcatcagttgtgagattcaaccccaccaccccatcagggctcaccatcagcgctggatcctatgctgatgagtcgttaagatcgcgaaaacagtgggttcaccacggacgggtattttggccatggat

SEQ ID NO: 185079 - DNA, 302 bp, Glycine max
ggcagaaatgctagcaagtgagcttacaactgccaaggaacacttgaaggaagcacaagcagagctgcaaggtgtgtcaaaagaattgacagctgctcttgaaaagaatgatagcctacaaaaagaattagttgaagtctacaaaaaggctgaaagcacagcagaggatttgaaggaacaaaaacagttagttgcttctctgaacaaagatttacaagcattagagcagcaagtctcaaaagacaaggagtcccgaaaatctcttgagagggacctggaggaggcgaccatatcactagatg

SEQ ID NO: 185080 - DNA, 138 bp, Glycine max
tcacaagatacaggggaactcggtgattatccgcaagaatgtgttggatatcaacatcactaccactgttaagggcgtcattgcaaccggcattaacatcattgcaggcgtcgtcgcacacgttactcctctcgcgtc

SEQ ID NO: 185081 - DNA, 294 bp, Glycine max
cttcctcatatcttccaccctttggcttattagtgggagcaatacatatcattcattcagaggcaacaaaggagttgtaaattaagagcatggctgcacaagctcttgtatcatcatcatctcttaccttctcagccgaggctacaagacaaagtcttggaccaagatcactccaatctccatttggcttctcaagaaaagcctcctttcttgttaaggcagctgctactccccctgtcaagcaaggatcagacagacctttgtggtttgcatcaaagcaaagtctttcctact

SEQ ID NO: 185082 - DNA, 258 bp, Glycine max
ctctgcttcaacttgctccctcagaagcgaagaagaagccacagagaactagtctcctactctcacccgcaagacaaaaatggcatctcacatcgtgtggatacccccgtatgggtcccaagagagagctcaagttcgctctcgagtctttctgggatgcaagagcagcgcgaggattcagaagggctctgattcaggatcattgagcaatggtgtctggatagtaatccagacactcctcactatgacagtctgagc

SEQ ID NO: 185083 - DNA, 297 bp, Glycine max
tctcgagccgattcggctcgaggccaatggcccaagagtatagttactgttgggtgtggcataggtggcagctctagatacctggccaagaaatttggagcaaccagtgtaggcatcactctgagtcctgttcaagctcaaagagcaaatgctcttgctgctgctcaaggattggctgataaggtttcctttcaggttgctgacgctctacagcaaccattctctgacggccagtttgatctggtgtggtccatggagagtggagagcatatgcctgacaaagctaaggttttaatt

SEQ ID NO: 185084 - DNA, 294 bp, Glycine max
ggatctctcccagaaaagaggcatcagttgcaatggctcgttacggtgagggcgacaagcggtggatcgtggaggaccgccccgacggcaccaatgtccacaactggcattggtccgagaccaactgcctcgactggtccaagaccttcttcaccagcctcctcactaacctccctatcctcgacggcgagggtaacctcttcctcaaaacgacgtcgcttcgctccctcgacggcgaggcctacatcaatgtccgaaaggggaagatcatccccggctacgagatcagcctca

SEQ ID NO: 185085 - DNA, 275 bp, Glycine max
aacaacatgaattttctaaccttcgttactgttctactcttcatactacccgcaacctcatcttcccagtatttggggaacaaccttctcactcatcgcaagctattcctaaaaaaagacaacattattacctcgtacgctgtcatctttgacggtggtagcacaggaacccgtgtgcatgtcttccattttgaccagaatttggatctccttcccattggtgatagtcttgagcttgataaaatggtcacacccggtttaagtgcttacgagga

SEQ ID NO: 185086 - DNA, 296 bp, Glycine max
actcgagccgaatcggctcgagccaaaacgctccatactcgatatcccttacaccacttgggacatcaaaccccaaccaattataaccatttcttttcgttccgatcagtttttcgtctctctctctctctctctctgttttccgaaaccttaatctcttgcccgataagggaaaattatgaatcctgataagttcacccacaagacaaacgaagctctggtgagtgctcacgaaatagcaacaagcaacggtcacgcgcagttcacccctcttcacctggcgtcctctctgattt

SEQ ID NO: 185087 - DNA, 295 bp, Glycine max
cgagataactagaaacagtgtgatgaaaatgaaggtccttgttttcttcgttgctacaattttcgtagcatggcaatgccatgcgtacgatatgttccctctccgaatgaacactggctatggtgcccgtactccggaggtgaaatgcgcaagttggaggcttgctgtggaagcacacaacatctttggctttgagaccattcctgaagagtgcgttgaagcaacaaaggaatacatccatggcgaacaatatagatcagactccaaaacagttaaccaacaagcttacttttat

SEQ ID NO: 185088 - DNA, 291 bp, Glycine max
cttcagtgtgcattgcacaatttaggttcttcctcttcagagcagtatgttcgggcatgttcttcacttgatggttggaaacagcatattggttctggaaaccctaggattgagaaatgtggcagcattttggatgatcttctgcggtcacttgatcttccaaaggttaaaaagtccgctaaaggaaaggttttgatgcaagctatgtatggagtaaaggtgcagacagtatttgtatgcagtgtgtttgctgcggctttttcgggctctacaaagaatatgtcagatttg

SEQ ID NO: 185089 - DNA, 289 bp, Glycine max
ctccctttcctctccgaaccctcgatcactctcacgcgctcctatattcgctcctccaccgtcgctctctcgaacaaccacaacaccatcttcatcacatggcaaacgcagcatctggtatggcagtccatgatgactgcaagttgaggtttttggagctgaaggcaaaaaggacacaccgtttcatagtttttaagattgaggagcagcagaagcaggtcattgtggagaagcttggtgagcctgcccagggctatgaagatttcactgccagccttcctgctgacga

SEQ ID NO: 185090 - DNA, 292 bp, Glycine max
ctttctcctaaaacatctcaatgggttcttcttctattacaacatcgccctcaaccatgaccatggctgcgatcgtgctcctgttcacggtctttgccgtttcctccgccctagacatgtcgataatctcgtacgacagcgcccacgcggacaaggccgccacgttgcgcaccgaggaccagctgatgtccatgtacgagcagtggctcgtgaagcacgggaaggtgtacaacgcgctcggcgagaaggagaagcgcttccagatcttcaaggacaacctgcgattcatcga

SEQ ID NO: 185091 - DNA, 292 bp, Glycine max
tgaaggtccttgttttcttcgttgctacaattttggtagcatggcaatgccatgcgtacgatatgttccctctccgaatgaacactggctatggtgcccgtactccggaggtgagatgcgcaagttggaggcttgctgtggaagcacacaacatctttggctttgagaccattcctgaagagtgcgttgaagcaacaaaggaatacatccatggcgaacaatatagatcagactccaaaacagttaaccagcaagcttacttttatgccagagacctcgaagtccatcccaa

SEQ ID NO: 185092 - DNA, 295 bp, Glycine max
ctcgagccgctcgagccgcatcttcctctttttctcaacaaaaaggggttcaattctagctagttctattacgtcgtccgcgaccatgaacatggcgatcgcgcttctgttcatggttttcgcagtttcatcagctttagacatgtcaataatatcacacgacaacgctcatgcggatagggccacgaggcgcaccgacgaggaggtgatgtcaatgttcgaggagtggctggtgaaacacgacaaggtgtacaacgcgctcggtgagaaggagaagaggtttcaaatcttcaag

SEQ ID NO: 185093 - DNA, 294 bp, Glycine max
ctcgctctgcactctctctttctcatcctattctcttcgcttctctgttcgtgccacttcttctcgagcaatggcatctcatattgttggttatccacgcatgggacccaagagagaacttaagtttgctttggaatctttttgggatggaaagagtagtgctgaggagctgcagaaggttgctgcagaccttaggtcagccatctggaagcagatggctgatgctggaataaagtatattcctagcaacaccttctcactttacgatcaagtactggacacaacagccatgct

SEQ ID NO: 185094 - DNA, 293 bp, Glycine max
ataacacaaagcacaaagcaaagctcatccttgagttaaaaaatggcagcagcttcttccatggctctctcatccccatccttggctggcaaggccgtgaagctgggcccatcagccccagaagtgggaagggtgagcatgaggaagaccgtcaccaagcaggtctcctcaggaagcccatggtacggcccagaccgagtcaagtacttgggcccattctctggcgagcccccgtcctacctaaccggtgagttcccaggcgactacggctgggacactgctgggctttccgc

SEQ ID NO: 185095 - DNA, 289 bp, Glycine max
cttactctagactcttccttttctcttctctgtctaaggggtgcactgagatcacattgaacaatggtgaaggctgtggccgttcttggcagcagtgagggtgtcactggaactattcacttcgttcaggagggaagtggtccaaccaccgtaactggatctcttgctggtcttaagcctggtctccatggtttccatgtccatgccttgggggacactaccaatggttgcctctcaactggatcacatttcaatcctaataacaaggagcatggtgcccctgaggatg

SEQ ID NO: 185096 - DNA, 288 bp, Glycine max
agcaacaataacaatggcagcctcactacaagctgcagctaccttcatgcaacccaccaaggtgggcatggccactcgcaacctcaaatctacacaatgcatttctaaggcttttggcttggaacccgctgcagctaaactcatttgctcccttaagcccgatctcaaagattttgctcaaaaatgtgtcgacgccaccaaaattgcaggattcgcccttgccacctcagctctcgttgtttctggagcgagtgcagaaggtgttccaaagaggctaaccttcgacga

SEQ ID NO: 185097 - DNA, 288 bp, Glycine max
aaagtgtttaatattggtaagagcagcaagaatgaaaataaatttgatgcacacagaatggtgaggactggtcttcaaaaagaaggatcaaaagtaatttttggtgttcctaaaccggggaagaaaaggaaatttatggaagtaagcaagcattacgtggcacatgaaaacagtaagatcagtgatagaaatgattcagttaaacttgcaaatttcttgatgcctccaagttccggacctagaggatggaaaaatagttccaaaaatgatgccaaagagaaacatgga

SEQ ID NO: 185098 - DNA, 291 bp, Glycine max
gccgagcagcgagagagagaaaccctagcaaaaatgccggctggtcacggtttgagatcccgcaccagagattccttctctcgtcccttcaggaagaagggtaccatcgccctcaccacatacctcagaacctaccacgtcggcgattatgtcgacgtcaaggttaacggcgccgtccacaagggaatgcctcacaagttctaccatggccgcaccggtcgcgtctggaatgtcaccaaacgtgctgttggggtcgaagtcaacaagcaggtcggcaacagaatcataagg

SEQ ID NO: 185099 - DNA, 288 bp, Glycine max
tgccttcctctctgcagagtgcagagctttctctccccgttgcttcattcattctcaacaacaaaccaatctttcttagaaaatgagggggggcttgtggcaacttgggcaatcgatcactcgccgtcttgcccatggagataagaaggctgttgctcgtcgatgttttgcctcagaagctgagctgaaaaagacagtgtttcatgacttccatgttgctcatggtgggaagatggttccatttgctgggtggagcatgccaatccaatacaaggactcaatcatgga

SEQ ID NO: 185100 - DNA, 293 bp, Glycine max
cggctcgagatcgagataactagaaacagtgtgatgaaaatgaaggtccttgttttcttcgttgctacaattttcgtagcatggcaatgccatgcgtacgatatgttccctctccgaatgaacactggctatggtgcccgtactccggaggtgaaatgcgcaagttggaggcttgctgtggaagcacacaacatctttggctcttgagaccattcctgaagagtgcgttgaagcaacaaaggaatacatccatggcgaacaatatagatcagactccaaaacagttaaccaac

SEQ ID NO: 185101 - DNA, 291 bp, Glycine max
ggttgattagggtttcttcggctgcgtgctgatgctcttgttttctcacagtcacacaacagcaatggaagcaatcacagagggagtgaacaacatcaacatctctgattcttacaagaagaatcgcattcaggtctccaacaccaaaaagcctctcttcttctacgtcaatctcgccaagaggtatatgcaacagcataatgaggttgagctctcagcactaggaatggctattgctacagtggttactgttgctgaaatcttgaaaaacaatgagcttgctattgaaaa

SEQ ID NO: 185102 - DNA, 291 bp, Glycine max
taaatatcaatggccttgctaggcagtccctgattaacgcaggtggcattattgagcaaacatttttgcctggaaagtactccattgaaatgtcatcagttgtttacaagaattgggttttcactgaccaagcattaccagctgatcttgtcaagagaggattggcagttgaggatccctctgccccacatggtcttcgccttgtgatagaggactacccttatgctgttgatggacttgaaatatgggatgctattaagacatgggtccatgagtatgtctctgtgtatt

SEQ ID NO: 185103 - DNA, 293 bp, Glycine max
caagttacatccattgagaaacatgaaggtctcccccttagcattttacaatcctttttttgtccttcaccatagaactcttcattggcattgcttcagcagcacaagaaccagtgcttgacacctcaggccagaagctgagaacaggtgtcaagtactacattctaccagtcttcagaggcagaggtggaggcctaacagtttcaagcagtggcaacaacacatgccccctctttgtggtgcaagagaagcttgaagtctcaaagggcaccccagttaccttcacaccctac

SEQ ID NO: 185104 - DNA, 287 bp, Glycine max
ctcgagccgttgcgactaagagttgctgcttcttccgccactcagcacttcgctccctctgtgcttcaccaaccatggccgaaatcgaagctaccgttccagatccctctcaaatcgacgtcaaacttttcaaccgctggagcttcgacgacgttgaggttactgatatgtctctggctgattacattggagtgtccccgtcaaagcatgctacatatgttcctcacactgctggtaggtactcagtgaagaggttcaggaaggcgcagtgccccattgttgagaga

SEQ ID NO: 185105 - DNA, 288 bp, Glycine max
cacttgtgagggctgctactatcgaagaaattgaagccgaaaaagccgcaattgaaaaagatgctaaaaccaggatggataggactattgataatgtccgtacaaatttcagttccataaggacagggagagcaaacccatccatgcttgacaaaattcaggtggaatactatggaagcccagttagcttgaagagcatcgctcaaattagcactcctgatgccagttctcttttggtacagccatatgacaaatcaagcttgaaggctatagagaaagccatagtta

SEQ ID NO: 185106 - DNA, 290 bp, Glycine max
ctcctctcaacacagatatttcattgcaccaatattcaagagcaatggccatgctcaatatcatcgccattgtctccctcttactcttaatgattccatcccaagccaaaattcccggcgtctattccggtgggccatggcaaagcgctcacgccactttctacggtggcagcgacgcctcaggaactatgggaggggcgtgtgggtacgggaacctatattcccaaggctacggcgtgaacactgcggcactaagcactgctctattcaacaatggtttcagctgtgga

SEQ ID NO: 185107 - DNA, 286 bp, Glycine max
gaaagtttgagtagggatgaaggcattaagctagttgttgaggcgatatgcgctggaatatttaatgacctaggaagtggaagtaatgttgacgtttgtgtgataaccaagggacacaaggaatatctcaggaaccaccttctaccaaatcctcgtacctatgtcaatccaaaaggctttgatttccccaaaaagacagaggtcctcttaacaaagattaccccgttgaaggagaaggtggaagtgattgaaggagatgctatggaagagtaacaatcgttccaaa

SEQ ID NO: 185108 - DNA, 291 bp, Glycine max
caaattccaagcacaagttctctaagttgttttgtgagatagcacatagcatagcaaggaaggagtattacaaccgaaaccctgaagaaaaaaagagtagaggaagaaaaaacacctgcaccaccaacgatgggtgtggattactacaagatcttgcaggttgataggagcgccaaagacgacgacttgaagaaggcttataggaaacttgctatgaaatggcaccctgataagaaccccaacaacaagaaagaagctgaagctaagtttaagcagatttccgaagcatac

SEQ ID NO: 185109 - DNA, 293 bp, Glycine max
cgaataccttcgcggaatgctccgtggatcctagtaagagaccattgatggattatgttcagaagattcagagggatgttaatgctaacatgcgcggtgttcttgtggattggttggtggaagttgcagaagaatacaaacttgtttcggacacgctttatttctctgttgcttatattgataggtttttgtcgttgaatattttgtcgagacagaggttgcaattgctgggggttgcttcaatgctcattgcttcgaaatacgaagagattaagccgcccgaggtggaggat

SEQ ID NO: 185110 - DNA, 293 bp, Glycine max
aaggaagtgagatcagtgagcaagtgggagaggatttgggagcaaagaagaaagtttttgtagctggagccactggtagcaccggcaaaagaatcgttgagcagttactcgcaaagggctttgctgttaaggctggggttagagacgtcgacaaggccaagacaaccctttcatctgccaacccttctcttcaaattgtgaaagctgatgtcacagagggttctgataagctagctgaggccattggtgatgattcagaagcagtagtgtgtgccacaggctttcgcccgggg

SEQ ID NO: 185111 - DNA, 290 bp, Glycine max
tttctttattctctccttcctcttccttcttcttgtttcatctgccactgcttgtgatcgctgcttgtatcaatccaaggcttcctatttctccaaagcttctgctctttcatctggggcatgtgggtatggctctttggcactagacataagtggtggacaccttgcagctggtgtggattctctcttcaaaaatggagcaggttgtggtgcctgctttcagataagatgcaagaacccaactctatgtagcaaagaaggtaccaaagtggtattgactgatcttaatc

SEQ ID NO: 185112 - DNA, 291 bp, Glycine max
gcgagagacagtcgacgacgacgacgttgctgcacggcaagtacgagctaggtcgtgtgctggggcacggaagcttcgccaaggtctaccacgcgcggaacctgaagacggggcagcacgtggctatgaaggtcgttggaaaagaaaaggtgatcaaggtcggaatgatggagcaggtcaagagggagatctcggtcatgaagatggtcaagcacccaaacatcgtcgagctccacgaagtcatggccagtaagtccaagatctacatctccatcgaactcgtccgcggcg

SEQ ID NO: 185113 - DNA, 287 bp, Glycine max
gagacatcagtgcctccttctggtctccctggtgttggtctcctacgctgcccggtcggaatcagcgctgggcggctggagccccatcaaggacgtaaacgacagccacgtggcggagatcgccaactacgcgctgagcgagtacgacaagcgttctggggccaagctcacccttgtcaaggtcgtcaagggcgagactcaggtcgtttccggcaccaactaccgtctcgtcctcaaagccaaggatggatccgccacggccagttacgaagccatcgtctgggaga

SEQ ID NO: 185114 - DNA, 273 bp, Glycine max
ctctgctctttgccttctctgacacatttggtgccttgtagagcgtgttttggcaggaaggtggtatggcgaaggacgttgaggttgctgagcgtggctccttctctgggaaggactaccaggaccctccaccagcaccactcattgatgctgaggagctcacaaagtggtccttttacagggctctcattgctgaattcattgccactttgctcttcctctacattactgtgctcacagtcatagggtacaatcaccagactgacctcaagg

SEQ ID NO: 185115 - DNA, 288 bp, Glycine max
gaaaatgaaggtccttgttttcttcgttgctacaattttggtagcatggcaatgccatgcgtacgatatgttccctctccgaatgaacactggctatggtgcccgtactccggaggtgaaatgcgcaagttggaggcttgctgtggaagcacacaacatctttggctttgagaccattcctgaagagtgcgttgaagcaacaaaggaatacatccatggcgaacaatatagatcagactccaaaacagttaaccaacaagcttacttttatgccagagacctcgaagt

SEQ ID NO: 185116 - DNA, 285 bp, Glycine max
gctttttcccagtccaagcagcctccaattcgtgccactctcttcaaaatggccgttaccttctcaaatctccacacagaatcaggtctcaagtccctcgacgacttcctctctgggaaggtctacgtttctggggatcagttcacaaaggacgacatcaaagtgtatggtgctgttttggagaagccaggtgactcttttcccaatgctgccaagtggtacgaggttgtctcatctcagcttgctgcaagcttccccggcaatgctcaaggggtgagattcagt

SEQ ID NO: 185117 - DNA, 289 bp, Glycine max
caaccaacgaacaacgatgtcgtggtttgcaaggacaatcgcaaactcactcagactcgacgacgacgacgacgaccacaatggcagtgacctaaaatcccctccgaagaaacccgattccgtatccacccccagtcctaccgcgcgcggcgtcaaagaggatttctccgagctcaccaaatccttttcccgccagctctggggcgtcgcctccttcctcgccccgccgcccgatcccctatctgaaaatcccgtcgccgatcccaatcccattcccaccgacgaagaa

SEQ ID NO: 185118 - DNA, 288 bp, Glycine max
gatgaatcttctggatagagcagtgaagatggttgctgaattagatgaaccagcagagcaaaactatgtaagaaagcatgcattagaacaagctcaagcccttggagttgaagttcgagaggcagcaacaaggatcttctccaatgcttctggctcctactcctcaaacataaacctggctgtggagaattcttcatggaatgacgagaagcagctccaggacatgtatcttagcagaaagtcttttgcttttgattctgatgctcctggtgctggcatgactgagaa

SEQ ID NO: 185119 - DNA, 288 bp, Glycine max
agaaatttaagtgaggagctagagaatgatgatgaagtctgctatgtgtgcagtggtggttgtagcacttcttcttctggcggaggtggggcccatggctgaggctgtgacatgcaccccaacagagttgagtccgtgtcttccagcaatcacttccggtgctaaaccttccaatgcttgttgcacgaagctgaagcagcaaaaaccatgcttatgtggctacctcaaaaacgctagcttgaagcagtatgttaactctcctaatgcccgaaaaaccgttgcttcttg

SEQ ID NO: 185120 - DNA, 290 bp, Glycine max
ctcgagccgaatcggctcgagactagaaacagtgtgatgaaaatgctggtccttgttttcaccgttgctacaattttggacgcatggcaatgccatgcgtacgatatgttccctctccgaatgaacactggctatggtgcccgtactccggaggtgaaatgcgcaagttggaggcttgctgtggaagcacacaacatctttggctttgagaccattcctgaagagtgcgttgaagcaacaaaggaatacatccatggcgaacaatatagatcagactccaaaacagttaa

SEQ ID NO: 185121 - DNA, 287 bp, Glycine max
ctcgagccgctcgagccgatcggctcgacccatgaccctccctactatgctgttttcgtacgttgcaaacgcagtgatggagccagattcatccatgcaactttagatatgaccatatctgatatcctctctcccgttgacgttccacccattgttcaatcattgtttgaccaccacaaagctgtcaaccatgacggtcacacaatgccgttgttgtccgtccaagtcactgaatttgtggatggtgttttcataggttgttccatgaaccacactcttggtgatgg

SEQ ID NO: 185122 - DNA, 286 bp, Glycine max
aagagatcacatagcagaatggcttctactcaatgtttcttgcaccaccatgctcttaccacccctgccagatccccatcacaacgcatcatggttagcaccaagcctaaccagcttgtttgcaaggcacagaagcaagaggatattgatgtcagcccaatctctcgccggttagctctaaccgtgctcattggtgctgctgctgttggctccaaagtccaacctgctgatgcagcttatggggaagctgccaatgtgtttggaaagccaaagacagacacagatt

SEQ ID NO: 185123 - DNA, 282 bp, Glycine max
actagaaacagtgtgatgaaaatgaaggtccttgttttcttcgttgctacaattttggtagcatggcaatgccatgcgtacgatatgttccctctccgaatgaacactggctatggtgcccgtactccggaggtgaaatgcgcaagttggaggcttgctgtggaagcacacaacatctttggctttgagaccattcctgaagagtgcgttgaagcaacaaaggaatacatccatggcgaacaatatagatcagactccaaaacagttaaccaacaagcttac

SEQ ID NO: 185124 - DNA, 284 bp, Glycine max
ctctcctcacattcgtggctcagacatcggattgggccaaagaagacgaggaagaagaaacctcgtgggagaaccaaggcgacaccgcgtggggaactgaagaaggtggccacgaagaagggggtttctctgaaaaagctgacgaagataagatcttcgttgggaacttgcctttcgacatcgacagcgacaatttggcgtcgctcttcgggcaggctggcaccgttgaggttgctgaggttatttataatagggtcactgaccggagtcgtgggtttggattt

SEQ ID NO: 185125 - DNA, 285 bp, Glycine max
cttacatgaatacagactttattttgagaaagatacggcattggatcgacggtttcaacctgtttgggttgatgagccgagtgaggatgacacaattaagatacttacgggtctacgtgagaaatatgaggcacatcacaaatgcagatacacagcagaggctataaaggctgcagttgatttgtcagctagatacatagttgataggtatctacctgataaagctattgacctcatagatgaagcaggaagtagagctcgtattgaagcctttaagaagaaaaa

SEQ ID NO: 185126 - DNA, 288 bp, Glycine max
gttcaggaaggagatgattctgttattactgctcatgtccctcttaacaatatgtttggatactctacagctcttcgctcaatgacatcgtgcaaaggtgaattcaccatggaatacaaggaacatttaccagtttctcatgatgtacagacgcaactgataaacacgtacaagggaaataaggtaggtgaataatcagcttttgtcgaagtacatgataaaaaaattttatgacaatcacttactataagaaaaaaaagttgtgacaataatataggatataggctt

SEQ ID NO: 185127 - DNA, 279 bp, Glycine max
ctctttctctctctaaagggtttcctttgttctcttccaacttcgaagaaatgtcgattatatcacgcagaggcatctgttacatgccaagactagatgcagcaaaagtatctgctgctttgctacagaaaggccaaaatcgtgtcatagatgcttcacttacacttattcgagaaagatcaaagcttaagggagaacttgtgcgtgctttgggaggtgctaaagcaaccccagctcttcttggagttcctttgggacataattcatcgttccttcaag

SEQ ID NO: 185128 - DNA, 282 bp, Glycine max
tcgatgtcttgattcattacccacaacataaagccgatgggatgattgcacaccttgcatcattggccaacaaccgattgattctgagttttgccccaaagacgttttattatgatctgctaaagagggttggagagttgttccctggtccttcaaaggcaacaagagcatatcttcactctgaggcagatgtagagagagcattgcaaaaggttggctggaccataaggaagagaggcttaaccactacccaattttactttgctaggcttattgaggctg

SEQ ID NO: 185129 - DNA, 283 bp, Glycine max
cgtgggccttatcgctgaggttatcatcttcttcttcctctttcttagatctcttctttctctacgccgcacgccgaaaccatggccggaaaaggagagggtcctgctatcggaatcgatctcggaaccacctactcttgcgtcggtgtgtggcaacatgaccgcgttgaaatcatcgccaacgaccaagggaacagaaccacgccgtcttacgtcggattcactgacaccgagcgtctcatcggtgatgcggccaagaatcaagtcgccatgaaccccatca

SEQ ID NO: 185130 - DNA, 280 bp, Glycine max
attcccttctccaacatgccaaacgacgtcgttctgagtcttttcgtcttcgttaccctcttcacatgccttctctctgctacttcccacgattaccatattttcctaccgagtcaactccatgacgatgactcagtgagttgcactgcaaccgacccaagccttaactacaagccggtgatcggaatcctgacccaccccggcgacggtgactctggccggctcagcaacgccaccggggtttcttacatcgccgcctcctacgttaaattcgtggagt

SEQ ID NO: 185131 - DNA, 283 bp, Glycine max
atcgagttgaatgcgaacggcattaaggagtacagacagaaggttgaattggagctatcgaacatctgtaatgatgttatgagagtgattgatgagcaccttatcccttcggctgcagctggtgaatccactgtgttttactataagatgaaaggagattattatcgttatcttgctgaatttaagtcaggcaatgagaagaacgaagctgctgatcagtctatgaaagcatatgagtctgctaccgctgcagcagaggctgatttacctcccacacatccca

SEQ ID NO: 185132 - DNA, 282 bp, Glycine max
caagtggtggggtggccaccagtgaggtctttcagaaagaacattgttcaaaggagtaacaacaatgagggcgaaaaagccgccacaagtagtagcaacaatgtgaacacgggagcagctttcgtgaaggtgagcatggatggtgctccttatttacgcaaggtggatttgaagttgtacaagagctaccaagagttgttggatgcgctggctaaaatgttcagttcattcaccattgacaagtgtggatcccaaggcatgaaagacttcatgaacgagagc

SEQ ID NO: 185133 - DNA, 182 bp, Glycine max
ctatcaattcacacgacaaaatttagcagagttcaaaacaccaaccaagtaaagtaaagaagggaagatgtcactgataccaagtttcttcggtggtcgaaggagcaatgttttcgaccctttctcgctcgacgtatgggaccccttcaaggatttgtctttcccttctgctgaagttcagc

SEQ ID NO: 185134 - DNA, 241 bp, Glycine max
aattcactctgtacaattcttcgttcgttctctgcagttatatcctttttgagtctcaatggcggacgctgaaaccttcgctttccaggctgagatcaaccagcttctaagtctcatcatcaacacattctacagcaacaaggagatcttcttgcgtgaactcatcagcaatgcttctgatgctttggataagattcgattcgagagcttaaccgacaagagcaagctcgatgctcagcca

SEQ ID NO: 185135 - DNA, 283 bp, Glycine max
tgttgatcgagataactacaaacagtgtgatgaaaatgaaggtccttgttttcttcgttgctacaattttggtagcatggcaatgccatgcgtacgatatgttccctctccgaatgaacactggctatggtgcccgtactccggaggtgaaatgcgcaagttggaggcttgctgtggaagcacacaacatatttggctttgagaccattcctgaagagtgcgttgaagcaacaaaggaatacatccatggcgaacaatatagatcagactccaaaacagttaa

SEQ ID NO: 185136 - DNA, 282 bp, Glycine max
gtaagagaatccgaggcgaagagaagagaaaaattaagatggaggggaaggagcaggatgtgtcgctgggagcgaacaagttcccggagagacagccgattgggacggcggcgcagagccaagacgacggcaaggactaccaggagccggcgccggcgccactggttgacccgacggagtttacgtcatggtccttttacagagcagggatagcagagtttgtggccacttttctgtttctatacatcactgtcttaaccgtcatgggagtcgccggggcta

SEQ ID NO: 185137 - DNA, 279 bp, Glycine max
atcactcacagagtaatggcatccatggcggctataggttctctgaatgttccttgttctgcttcttcgcgttcatcgaatgtgggtggaaaaagctttccacgcagcctttcatacgatgcatcacaactttgtggagataagattcacacagattcagtttcattcgcaccaaaaatcggtcgcaatcctgtaattgttacccctaaagcagtttctgattcccaaaactgccaaacctgtcttgatcccgatgctagcagaagtgtgcgtggcatt

SEQ ID NO: 185138 - DNA, 277 bp, Glycine max
agtaaaggcccttgaggagagtggtggttggttggatcgaacaactgttgaggacatggatattgctgttcgtgctcatctctgtggatggaagtttgtatttctcaatgatgttaagtgtctttgtgaacttccagagacctatgaggcatataagaaacaacaacaccgctggcattctggtccaatgcaattgtttcgcttgtgttttcttgatatacttcgttcaaaggttagttgggtaaagaaggtcaatttgatatttcttttcttcctc

SEQ ID NO: 185139 - DNA, 269 bp, Glycine max
ctaggtccgactctctctaaagggtgacccttgatctcttccaacttccgagaaatgtcgattatatcacgcagaggcatctgttacatgccaagactagatgcagcaaaagtatctgctgctttgctagagaaaggccaaaatcgtgtcatagatgcttcacttacacttattcgagaaagagcaaagcttaagggagaacttgtgcgtgctttgggaggtgctaaagcaacttcaactcttcttggagttcctttgggacataattc

SEQ ID NO: 185140 - DNA, 278 bp, Glycine max
ggggaactgtgaaattctagagaaacattacaacgatatgatggatatcgaattcactgtccaagaaaataggttgtggatgttgcaatgtcgaagcggaaaacgtactggtaaaggtgcattcaaaatagctgtagatatggttaatgaggggcttgttgatattcgttctgcaatcaagatggtagagccacagcatcttgatcaacttctccacccacagtttgaggatccatctacttacaaggataaagtgatcgccgttggtttgcctgcat

SEQ ID NO: 185141 - DNA, 272 bp, Glycine max
atcaagtccaacaaccaacctaccttttgcaatctcaattcaatggcgtcctctctcattgcgaacgcttcctctcctcttctctcctctccaggtccctccttcgccccgccgcttccgcttcccaccgctctttcaacaccaacgccatgcgccagtatgacaaccgcgccgacgaccacagcaccgacatcgatcgtcactccgaacgctctttccctagcactgcgcgccgcgacgatatcttctcagatgtgttggatccatttttt

SEQ ID NO: 185142 - DNA, 277 bp, Glycine max
gcttctctagggacatcatcatctgatggcatcccatcatcagaagcctcagacaggatcaaagctggattcattcacttcaagaaggacaaatacgacaagaatccagctttgtatggtgaacttgccaaaggccagagccccaagttcatggagtttgcttgctcagactcaagggtgtgcacatctcatgtgctagatttccaaccaggagaggcctttgtggtcagaaatgttgccgaattgtcccaccatatgaccagtcaaaatacgctgg

SEQ ID NO: 185143 - DNA, 278 bp, Glycine max
actcgagccgaatcggctcgagtgacctggaatattacctgcacttattctcaattcctggcgctaaagacaccaagttgctgcgtttccctctcatccttctataatgacaccgttgtaaactgcccaacatgcacctgtggttgccgaaacaaaacagaacctggcagctgtgtagatccaaattccccacatttagattcagttgtatcatcatctggcaaagctgcaaacacgcctctagtccagtgtacaagccatatgtgtcctattcgagt

SEQ ID NO: 185144 - DNA, 274 bp, Glycine max
gtaaataagaggatgctggacaaatcaatcagagaaattgagcgcgagcgacaaggcttgcaaacgcaagagaagaaattgattgcggagataaagaaaagtgccaaacagggccagatgggagctgttagagttatggcaaaagatcttgttagaacaaggcatcaggttgagaaattttataagctaaaatctcagctccaaggtgtatcactcagaattcagactttgaaatcaacacaagcaatgggtgaggctatgaaaggcgtgacaa

SEQ ID NO: 185145 - DNA, 274 bp, Glycine max
gtttctctgaaaaccaaaacaacaggaattaaagttcattcatttaagaaagaaagtaaagataaaaataacatgcacaacaacatgagcactctctctttcttcatccttctttcaacactactaactgtacaaaacggtggtcgcgacttaggagataaaaacccgttcaccccgaaggcttacgtggcacgttactgggaccaacacgtccgcaacaacttgccaaagccatcgtttcttctctcaaaagcatccccaatgagcgcttccg

SEQ ID NO: 185146 - DNA, 274 bp, Glycine max
gcttctctagggacatcatcatctgatggcatcccatcatcagaagcctcagacaggatcaaagctggtttcattcacttcaagaaggagaaatacgacaagaatccagctttgtatggtgaacttgccaaaggccagagccccaagttcatggtgtttgcttgctcagactcaagggtgtgcccatctcatgtgctagatttccaaccaggagaggcctttgtggtcagaaatgttgccaacattgtcccaccatatgaccagtcaaaatacg

SEQ ID NO: 185147 - DNA, 273 bp, Glycine max
ctacagcttctaataaatccttgacaacttcctcctcttctaattcaattcaggctctagctatgagcgtaagcaataacaatataatgagctttaaagctctaaccttatggtgcattttgttgtctttgttgcaactatctctaggagctgtaaggcaccgtattaggtttaacgtagagtacatgtatcgtgagccagattgccatgagcacgttgtgatgggaatcaatggccagtttcctggcccaaccatcacagctgaagctggag

SEQ ID NO: 185148 - DNA, 269 bp, Glycine max
gtaaagaggaagatgttaacgttggagcaaacaagttctcagaaaggcaaccaattggtacagcagctcagggtggtggtgacaaggactacaaggaggcacccccagctcctttgtttgaacctggtgagctcaaatcatggtccttctacagagctggaattgctgagtttgtggcaactttctagttcctctacattaccgtcttaactgtcatgggtgtcaacatgtcaccctccaagtgtgcctctgttggcattcaaggcatt

SEQ ID NO: 185149 - DNA, 270 bp, Glycine max
acttcggtcattttattttgtataataaaagaaagataataaagagaataatcatattaaatattaaatagaaaaaatggcccgatcatttatcaaaggccaatcttcggtagaagagaaggttcctttggaacacttatttctatttcagtataccgggtctctttctttcatttcaaaaaatttatagaatttcgattttgaaatgaaagaaaagtgtggggataaatataaatgacaaaaagatattggaacataatcttggaagag

SEQ ID NO: 185150 - DNA, 273 bp, Glycine max
ggcgacttctcgatattattttttctgacagagccaccgacagagaatggccgacaagtacaacctgaagaaccccgccgtgaagcggatcctccaggaggttaaggagatgcagtccaacccttccgacgatttcacgagcctccctctcgaggaaaatatatttgagtggcaatttgcgattagagggcctcgtgatacggaatttgagggtggtatttatcatggaaggatccagttgccttcagagtatccattcaaacccccttcatt

SEQ ID NO: 185151 - DNA, 270 bp, Glycine max
gagtaccgagacttcatcatcaacaagtacagagaagagccctccagaaggctcacattcagcgaggttcgaaagtcgctcgtgggagacgtcacgtttcttcacaaggtcttcctcttcttggagcattgggccttgatcaactacggcaccgcagaggatgtggaggaggaccattgcaaggttcgcttcgaagaaggcgcccccagtgggattcgagtcgccgccacgcccaattccttgaagcctatgctgctgcctcgcaatggg

SEQ ID NO: 185152 - DNA, 272 bp, Glycine max
gattgttccagtggtggatttccagaggctttcagaggaagaggagcgcaagaagctgagaaaaacatgtgagaaaccagggtgtttcagaatcatcaaccactcaattccactaacactcatggagaacatgaagtcagtggttaaatacttgcatgaccttcccacggaaatcaaaatgcgcaacaaaccctccgtccctgagagtggatatagggcggcaatgccaacaagtcctctatacgagggcatgggaatatatgacatgcatg

SEQ ID NO: 185153 - DNA, 227 bp, Glycine max
gtaagagccaaaatcccagacccaagtgctgtgaagccagatgactgggatgacgatgcacccatggaaatcttagatgaagaagcagagaaacctgaaggatggttggatgatgagccagaggaaatcgatgacccagaggcaactacaccagaagactgggatgatgaggaggatggtgaatgggaagcccaaagattgaaacccaagtgtgaggcgccctggtt

SEQ ID NO: 185154 - DNA, 274 bp, Glycine max
ctttctttctttctctctccactttccaacattcgctttctttctctcgcgtttcgcaatttccccaaatctcacgcctagggtttctatcgcaaaccctcactcccttcattaaggtcgcgcgcgaagggatttcgaagcttcggaaggaaaaaaaaaaagatgaaacctgttttctgcggaaacctggatttcgacgcgcgtcaatccgacgtggagaggctcttcagaagatacggcaaggttgatagagtcgacatgaaatccgggtttg

SEQ ID NO: 185155 - DNA, 270 bp, Glycine max
cgcatcgagtctgtcccggagctcccccttgtcgtcagcgactccgccgaaggagtcgagaagacaaaagaagcgatcaaagtcctcaagcagatcggagcattcccggacgccgaaaaggctaaagacagccgcagcattcgtcccggcaagggaaaaatgcgtaaccgccgctacatctctcgccggggaccacttgtggtgtacggaacggaaggtgcgaaagccgttaaggccttccgtaacgtccccggcgtcgaggtcgccaac

SEQ ID NO: 185156 - DNA, 261 bp, Glycine max
ctttggttctggtttatagatctctgtgaagtcgctttataacactcaacctaagatgcagaacgaggaaggacagatcaccgagctttacattcctaggaagtgctctgccacaaaccgattgattaccgctaaggaccatgcttcggttcaggttaacattgggcatgtggatgagaatggcgtctacaatggccatttctccacttttgctctctgcggcttcatccgtgctcagggtgatgctgacagtgccctaga

SEQ ID NO: 185157 - DNA, 264 bp, Glycine max
  unsure (1)..(264): unsure at all n locations
ctttagccgaggtcaggaggagcactagctaagttcacaatttcaaaatggctaggggactaaagaagcatttgaaaaggctcaatgctcctaagcattggatgcttgacaaactgggtggtgcatttgcgcctaaaccctcatctggaccacacaaatcgagacacacnctcnccctcattcttattctgcgaaaccggctgaagtatgctctgacataccgtgaagtcattgctattctgatgcagcgccatgttcttgttg

SEQ ID NO: 185158 - DNA, 262 bp, Glycine max
gaagaagaagaagatggagaagtatcagatctggagcaggagaatagcgttggcagcgtttgcgtttgctctgctgttccaatcggcctcagcagacgacgtcgttgtgctctctgaagataacttcgagaaggaagttggtcaggacagaggagctctcgttgagttctatgctccttggtgtggacactgcaaaaagcttgctccagaatatgaaaagcttggtagcagcttcaagaaagccaaatctgttttaattggc

SEQ ID NO: 185159 - DNA, 279 bp, Glycine max
ggattcagctcgagcgattcggactcgagacagaaaaaaaaaacccttagccaccacaaccatcatggccacctctgctattcagcaatcagcattcactggtcaaactgctctgaagcagctcaatgagttcgtccgcaagaccggtggcgccggcaaaggtcgcactaacatgcgccgcaccgtcaagagtgctcctcagagcatttggtatggccctgaccgtcccaagtacttgggtccattctcggagcagattccatcatacctgaccggaga

SEQ ID NO: 185160 - DNA, 266 bp, Glycine max
gagtttgttgtgagctataagctagtttatcgtgaggagaatatgaagttgtttgttctctttgttgctgcagtagttttggtagcatggccatgccatggcgcaggctaccaaaggttccctctccgaatgaaaactggctatggtgagcgttcttcggaggtaaaatgcgcaagttttaggcttgctgtggaagcacacaacatccgagcctttaaaaccattcctgaagagtgcgttgaaccaacaaaggactacattaatgg

SEQ ID NO: 185161 - DNA, 264 bp, Glycine max
ctcactcactgcagatctcaattgcatcgctgtccatggctaccatcgttagcatcaaggcccgccagatcttcgacagtcgtggcaatccaactgtcgaggtggatttgacttgctccgatggtacttttgccagagctgctgttccaagtggtgcatccactgggatttatgaggcccttgaattgagagatggaggatctgactaccttggaaagggtgtctcaaaggctgttgacaatgtgaacaccgtcattggccctg

SEQ ID NO: 185162 - DNA, 262 bp, Glycine max
gaaggtccttgttttcttcgttgctacaattttcgtagcatggcaatgccatgcgtacgatatgttccctctccgaatgaacactggctatggtgcccgtactccggaggtgaaatgcgcaagttggaggcttgctgtggaagcacacaacatctttggctttgagaccattcctgaagagtgcgttgaagcaacaaaggaatacatccatggcgaacaatatagatcggactccaaaacagttaaccaacaagcttacttt

SEQ ID NO: 185163 - DNA, 263 bp, Glycine max
aaagcacaaagcaaagctcatccttgagttaaaaaatggcagcagcttctcccatggctctctcatccccatccttggctggcaaggccgtgaagctgggcccatcagccccagaagtgggaagggtgagcatgaggaagaccgtcaccaagcaggtctcctcaggaagcccatggtacggcccagaccgagtcaagtacttgggcccattctctggcgagcccccgtcctacctaaccggtgagttcccaggcgactacggc

SEQ ID NO: 185164 - DNA, 262 bp, Glycine max
ggaacagtgcagaaagcgatagaaaatggcttcccttttccccttttgtgctcgcaattgaccgtcgaatccaatcctgaaatcccccaataaatagagaagcgaagaaaccaaaccaaaccatcgagtgcgttgcgcccccaccgtaagtagagctatgtcgttgcgcaggcgaaccttgctcaaggtcattgttctcggcgacagcggggttgggaagacctcgttgatgaatcaatacgtgcacaagaagtttagtcag

SEQ ID NO: 185165 - DNA, 264 bp, Glycine max
ctcaaccggcccaatttagcataagcccagcatggccaccgcaacagcagcagccacctcgtccttcatggggacgcgcctcctggaggcccattccggggcggggcgggtgcaggcccggttcgggtttggcaagaagaaagccgccgccccgaagaaagtttccagggggtcgggctctagctccgataggcccctgtggtatccgggcgccaaggcgcccgagtacctggatgggagccttgtcggagactacgggttcga

SEQ ID NO: 185166 - DNA, 264 bp, Glycine max
ctctcgttgattcggatctagagtcttttttcactcttcagttctcgttgttgttcttcgctttcctgaaactagggttttcaatttcgattcattcgttaataattaaagatgtttgggagggcaccgtagaagagcgataatacgaggtactacgaaatcctcggcgtctcgaagaacgcttcgcaggatgatctgaagaaggcttacaagaaagccgccatcaagtatcaccctgacaagggcggtgatcccgagaagttt

SEQ ID NO: 185167 - DNA, 260 bp, Glycine max
aagttacatagtttttcattgttttacttaatctacaatggctgcttcaacaatgactctctcttcatcatcattggctggccaagctatcaagcttgccccctccacccctgagcttggtgttggaagggttagcatgaggaaaacagcctccaagactgtttcctcaggaagcccatggtacggcccagaccgtgtcaagtacttgggcccattctctggtgagcccccatcctatctcactggtgaattcccaggtg

SEQ ID NO: 185168 - DNA, 261 bp, Glycine max
aagttacatagtttttcattgttttacttaatctacaatggctgcttcaacaatgactctctcttcatcatcattggctggccaagctatcaagcttgccccctccacccctgagcttggtgttggaagggttagcatgaggaaaacagcctccaagactgtttcctcaggaagcccatggtacggcccagaccgtgtcaagtacttgggcccattctctggtgagcccccatcctatctcactggtgaattcccaggtga

SEQ ID NO: 185169 - DNA, 262 bp, Glycine max
cgagataactagaaacagtgtgatgaaaatgaaggtccttgttttcttcgttgctacaattttggtagcatggcaatgccatgcgtacgatatgttccctctccgaatgaacactggctatggtgcccgtactccggaggtgaaatgcgcaagttggaggcttgctgtggaagcacacaacatctttggctttgagaccattcctgaagagtgcgttgaagcaacaaaggaatacatccatggcgaacaatatagatcagac

SEQ ID NO: 185170 - DNA, 265 bp, Glycine max
ctatcctatcgtagcaaagaaagaaagaaagaaaaccctagcttaccttttcaactttcaagatgcaaatcttcgttaagacactcactggtaagacaatcacccttgaggtggagagttcagataccatagataatgtaaagtccaagattcaagacaaggaagggatcccaccagaccagcaacgtctcattttttgctggcaagcagcttgaggatggacgtacacttgctgattacaacatccaaaaggagtccactcttc

SEQ ID NO: 185171 - DNA, 266 bp, Glycine max
gccttctctcctctattttggcttccaacctttttgctccattcattctcaacaacaaaccaatctctatattttgcttagacaatgagggggagcttgtggcaacttgggcaatcgatcactcgccgtcttgcccatggagataagaaggctgttgctcgccgatgttttgcctcagaagctgagctgaaaaagacagtgtttcatgacttccatgttgctcatggtgggaagatggttccatttgctggatggagcatgccaat

SEQ ID NO: 185172 - DNA, 270 bp, Glycine max
caatcataacttttggtgattctgctgtggatgtagggaacaatgactatcttcccacccttttcaaggctgattaccctccttatgggagggactttgttaaccaccaacctactgggaggttttgcaatggcaaattagctactgatttcactgctgacacattgggtttcaagacctatgctccagcatatcttagcccacatgcatcagggaaaaacctccttattggagcaaactttgcttcagctgcatctggttatgatgaaa

SEQ ID NO: 185173 - DNA, 266 bp, Glycine max
ctagaatggaatttcgatgctcagtcatctcttttaccattctcttctctcttgctcttgcaggagagagccatgtccatgcatcgctacctgaggaagattattgggaagctgtttggccaaacactcccattcccactgcactgcgagagcttctaaagcctctccctgcaggtgttgaaatcgatgaactccctaagcaaattgatgatacacagtacccaaaaacattcttctataaagaagaccttcatccaggcaaaaca

SEQ ID NO: 185174 - DNA, 259 bp, Glycine max
ttggaagccaatggacgcggttactgggagacttcagaagacaacatcgacaagctcaggcagttgtactcagaagtggaagacaaaatagaaggcattgatcgctgaagtgataattgagatgaacagcagaaacattaactgttttttaactatgccttctttgtatctggagcttctttcccacactgaattgaaagttgttgatggtgtccttttaatgtgattttgctcctctctcctttttccctgctgtaat

SEQ ID NO: 185175 - DNA, 260 bp, Glycine max
gaagcattagcaaaagcaagaagaactagtctaagcagaaatggcctcttcagtgatggcatctgtggccctcaaacctgcccctttcactgttgagaagtcctcagttagaggccttccctccctctcaaggaactcctcttcattcagagttgtggccagtggtggcaagaagatcaagactgacaagccttatggaattaatggtggcatggctttgagggaaggagttgatgcatctggcaggaaaggaaagggaa

SEQ ID NO: 185176 - DNA, 260 bp, Glycine max
ggaagaggaaaaagaggattggagggtcgccacgtttagcaacaaccaaaccctctctactctttcttcttctcttcgctagggttttagcttcttcctcttcacttcgttcttctggcctctacaatgagcaacgacaaggacaccttcaacgtcgctgatctcacttccgctctcaacgaggacaatagagcagaccttgtcaatgctctcaagagcaagatacagagtttggctggacagcattctgatattctaga

SEQ ID NO: 185177 - DNA, 258 bp, Glycine max
acggcatcagattgcgagggtgctggtgaacagttctgcgttactaccttgataccaagttctcatgaaactactgattctcctgttgatgctattccaaaaacaaatgatggattaattgactggtcacaagacttctttggaaaaccagcattcttgactgtttcaggtcaactcaatggtgaaacttatgccactgctctctctgatgtgtatacatttggtcctacattccgagcagaaaattctaacacttct

SEQ ID NO: 185178 - DNA, 260 bp, Glycine max
ttaccattgatattgctttgtggaagtttgaaaccaccaagtactactgcacagtcatcgatgcccccggacatcgtgactttatcaagaacatgattactggtacctcccaggctgattgtgctgtccttatcattgactccaccactggtggttttgaagctcgtatttctaaggatggacagactcgtgagcatgctcttcttgctttcacccttggtgtgaagcagatgatttgctgctgtaacaagatggatgcc

SEQ ID NO: 185179 - DNA, 263 bp, Glycine max
caaaagcaaatccatcaagacattcctgatgcagatcttcgagaaatatggaaatactgacattgagggtgttgattcaactaatgcatgctatggaggaactgctgctctgtttaattgtgtcaattgggtggagagcaattcatgggatggacgctatggacttgttgtctgcactgacagtgcagtctatgctgaaggacctgcccgacctactggaggagctgctgctattgccatgctaattggtcctgatgctccca

SEQ ID NO: 185180 - DNA, 258 bp, Glycine max
gagagaaagagatcacatagcagaatggcttctactcaatgtttcttgcaccaccatgctcttaccacccctgccagatccccatcacaacgcatcatggttagcaccaagcctaaccagcttgtttgcaaggcacagaagcaagaggatattgatgtcagcccaatctctcgccggttagctctaaccgtgctcattggtgctgctgctgttggctccaaagtccaacctgctgatgcagcttatggggaagctgcc

SEQ ID NO: 185181 - DNA, 260 bp, Glycine max
aaagaattcatagcttcactccacaaacaaaagacagaactatttatggcccttattgagaaaaaactgttgcctcttcgtccaggtgttgcaaagattatcgaccaggcttttgctcaaggagtccaagttgcagtttgcagcacttccaatgagaaggcggtctctgcaatagtatcattcttgctgggacctgagagagcagaaaaaatcaagatatttgccggagacgtggttccccgtaaaaagcctgatccagc

SEQ ID NO: 185182 - DNA, 261 bp, Glycine max
ctctgcgccccccggttcagctcggcgagatcacagcggaggagctcaaggcctacgacggcaccgatcccgagaagcccttgctcatggccatcaaggcccagatctatgatgtctcccagagcaggatgttttatggacctggtggaccttatgccctatttgctggcaaggatgctagcagagccttagcaaagatgtcttttgaagagaaagatctgactggggatatttctggtcttggcccgtttgagcttgatg

SEQ ID NO: 185183 - DNA, 260 bp, Glycine max
ggtggatgtggctcatgctgctattagaaatgatcccagaatcaattggctcgccaatccagtgcacaagcacagagagctgcgtgggctcacctctgctgggaaaagcaacaggggtttacgtggcagaggacatctgtaccacaaagcacgtccatctcgcagggcaacctggaagagaaacaacaccctgtctctccgccgttaccgctaatttctgctgttatcatcttatttttgcttcattttctggaatacta

SEQ ID NO: 185184 - DNA, 261 bp, Glycine max
gagccggtggagaaatgtttgagggatgctaaaatggacaaaagaagtgttgatgatgttgttcttgttggtggttctaccagaattcccaaggttcaacaactgctgcaggacttctttaatggaaaggagctgtgcaagagcatcaatcctgatgaagctgttgcatatggtgctgctgttcaggctgcaattttaagtggtgagggcaatgagaaggttcaggatcttctcctccttgatgtcacccctctatctctt

SEQ ID NO: 185185 - DNA, 262 bp, Glycine max
caaaggttgctgtaggagataagattgcagtagtgctaagtgctaacacctgcagtgaacaatggcctctgcatcagcatctctgctcaagtcttcacttgttcttgacaagtctgagtgggtgaagggacaaacccttcgccaaccttctgcatcagttgtgagatgcaaccccaccaccccatcaggcctcaccatcagagctggttcctatgctgatgagctcgttaagaccgcgaaaacagtggcttcaccagggagg

SEQ ID NO: 185186 - DNA, 263 bp, Glycine max
gcttctctagggacatcatcatctgatggcatcccatcatcagaagcctcagacaggatcaaagctggtttcattcacttcaagaaggagaaatacgacaagaatccagctttgtatggtgaacttgccaaaggccagagccccaagttcatggtgtttgcttgctcagactcaagggtgtgcccatctcatgtgctagatttccaaccaggagaggcctttgtggtcagaaatgttgccaacattgtcccaccatatgacca

SEQ ID NO: 185187 - DNA, 259 bp, Glycine max
atttcttgctgttatagtgtggtgttttgattaatgcagccgcaacttgtttgaaaatgggtctagtggcggctgacaagggttcgatgcagacccaagaggaacagagcgacaatgcctccgctgttcagtgggaacgctttctgcctcggatggtgcttcgggtcttgcttgtcgaagctgatgattctactcgacagatcatttctgcacttctccataaatgcagttacaaagttgtcgcattttgtgacggctt

SEQ ID NO: 185188 - DNA, 255 bp, Glycine max
ctccctcacccacgtctctccccgcttcagatcttaaacgtctttcgctgttccaagatgggtgtggctgagaacattcccgatatggaggagggtaccttggagattggaatggaatacagaactgtatctggagttgctggaccattggtcattcttgacaaagttaagggacccaaatttcaagagattgttaatattcgtttaggagatggaactactcggcgtggacaagttctagaggttgatggtgaa

SEQ ID NO: 185189 - DNA, 254 bp, Glycine max
ggcatcgttagcagttttgtagattcaacctcaatttgcagagttacgttctaatatatttacacaagactgataagagaaaatgtctctgattccaagtttcttcggtggccgaaggagcagtgttttcgaccctttctccctcgatgtgtgggaccccttcaaggattttccatttcccagttctctttctgctgaaaattcagcgtttgtgagcacacgagtggattggaaggagacaccagaagcacacg

SEQ ID NO: 185190 - DNA, 256 bp, Glycine max
ggaactgtggaagttcaggaccttcccttctttgacactgtgaaggttaagacttccaatgcacacgcaattgctgatgctgctctcaaaagtggaataaatttgcgagttgttgatggaaacactatcactgttgcttttgatgaaacaaccacattagaggatgttgataatcttttcaaagtttttgctggtggaaagcccgtctccttcacagctgcatctcttgcaccagaagttcagagtgcgattcctt

SEQ ID NO: 185191 - DNA, 259 bp, Glycine max
tccaaatcagcacaaagcaccacgccatatggcacgagtcctttcacagtctccatccggcagccaatagccccgtcgaactgcaccgcatacaacctcaccggaacacccctcacacacctacaacaccatcatatcactccatccaccgccacgtgtccagattacttccgttggatccacgaggatttgaggccttgggcccgtacgggcatcacgcaagacacggtggagagggcaaagcaaacggcaaatttta

SEQ ID NO: 185192 - DNA, 261 bp, Glycine max
gacaattcagtgtgagaatggacatattgcttgctctatttgctgtgtgagactcagtaacaagtgtcccatgtgttcaatgcccattgggtataaccgttgccgggctattgagaaggtcttggagtgtattaaaatgtcatgcccgaatgcaaattatggctgcaaagagacacttagttacagcaagaaaaacgaacatgagaaggaatgcatctatctgccatgttcatgcccttttactggttgtgattttattgc

SEQ ID NO: 185193 - DNA, 260 bp, Glycine max
tttttctctctcccttagtcaaagggattcatcgttcttcttcccaggttatttagaaaagcaaaatggtgaagatttgctgcattggtgctggatatgtggggggtcctactatggcagtcattgcacttaagtgcccatccattgaagtcgctgttgttgatatctctaaatcccgcattgcagcctggaacagcgaccagcttcctatctatgaacctggccttgatggtgttgtgaagcaatgccgtggcaagaac

SEQ ID NO: 185194 - DNA, 262 bp, Glycine max
gcaagagtgaagagcgaagagaatggctcccaagggtttaatctttttggctgtgttatgcttctcagcactgtcactgagtcgttgtcttgcggaggataatggacttgttatgaacttctacaaggaatcatgccctcaggctgaagacatcatcaaagaacaagtcaagcttctctacaagcgccacaagaacactgctttctcctggctcagaaacatcttccatgactgtgctgttcagagttgtgatgcttcactg

SEQ ID NO: 185195 - DNA, 254 bp, Glycine max
ctcgagccgctttaatgatgatattcagggaacagcatccgtggttcttgctggacttgttgcagctctgaagttggttgggggtaacttagctgatcacagattcttattccttggtgctggagaggctggcactggcatagcagaactcatagcacttgaaacatcaaaacagacaaatgctccactggaggaagtgcgcaagaatatttggttggtggactcaaagggattgattgtcagttcccgcaaag

SEQ ID NO: 185196 - DNA, 259 bp, Glycine max
cagaaagcaagctcatcctagagttttaaaaatggcagcagcctcctccatggctctctcttccccatccttggctggcaatgccgtgaagctgggcccatcagcccccgaagtcgggagggtcagcatgaggaagaccgtcaccaagcaggcctcctccggaagcccatggtacggcccagaccgcgtcaagtacttgggcccattctctggcgagcccccgtcctacctcactggcgagttcccaggtgactacggc

SEQ ID NO: 185197 - DNA, 261 bp, Glycine max
actccctcctcttcacacattttcttagccctctccaacaatccctctcgttcacactttcagattgtgtgaagatgggggctggtggccgaactgctgttcctcctgccaacaggaagtcagaggctgaccctttgaagcgggtaccatttgaaaaacctcagtttagtctcagccagattaagaaggccattccacctcactgtttccaccgctctgttctccgctcattctcctatgttgtttatgacctcaccatag

SEQ ID NO: 185198 - DNA, 289 bp, Glycine max
cttctttccaaatcccaactactactcacactcactgcagatctcaatccatggctaccatcgttagcatcaaggcccgccagatctttgacagtcgtggcaatccaaccgtcgaggtggatttgacatgctccgatggtacttttgctagagctgctgttccaagtggtgcatccactgggatttatgaggcccttgaattgagagatggaggatctgactaccttggaaagggtgtatcaaaggctgttgacaatgtgaacaccattattgcccctgctttggttgg

SEQ ID NO: 185199 - DNA, 284 bp, Glycine max
ctcgcacgaattcggctcgagacttcattcaacatttctccacttagcttgtttcaacaatggctgctgcggttagtgctgcagtctcttttccatccaccaagtctacctctcttccaagcaggacctccctcattgccccagagagagttgtgttcaagaaggcttcattgcaaaacagagatgtttctagcagtggacgggtagtttccatcagagctcaagtcaccactgaggcaccagccaaggttgaaaaagagtccaagaaacaggatgaaggtgtg

SEQ ID NO: 185200 - DNA, 283 bp, Glycine max
cagttcgtcaatgtgagactctgtgtcagagtttgtgaagtgaatcccataatcatgaagaaaggaaacttgggacttggtctcaaactctcagttcctgtgtctgatcaatctaattttgccaggttcctgactgaaagtgggacttttaaggatggggatctgcttgtcaacagggatggagttcgaattgtctctcagaatgatgtcgaagctccacctccaatcaagcctacagacaaccagttaactttggcagacatagatgtaatcaaagttgttg

SEQ ID NO: 185201 - DNA, 285 bp, Glycine max
aaaatataacaaataatttgtactttcatccaaacaaaatcccgttgtatttttctcagatggctcgaacgaagcaaacggcccgcaagtccaccggcggcaaggcgccgcggaagcagctggcgactaaggcggctcgcaagtcggctccggcgaccggcggcgtgaagaagccgcacagattcaggccgggaaccgtggcgctgcgcgagatccggaagtatcagaagagcacggagctactcatccggaagcttccgttccagcgcttggtccgcgagatcg

SEQ ID NO: 185202 - DNA, 285 bp, Glycine max
gtttgttgtgagctataagctagtttatcgtgaggagaatatgaagttgtttgttttctttgttgctgcagtagttttggtagcatggccatgccatggcgcaggctaccaaaggttccctctccgaatgaaaactggctatggtgagcgttcttcggaggtaaaatgcgcaagttttaggcttgctgtggaagcacacaacatccgagcctttaaaaccattcctgaagagtgcgttgaaccaacaaaggactacattaatggcgaacaatttagatcagactc

SEQ ID NO: 185203 - DNA, 284 bp, Glycine max
ctcatcttcctctttttctcaaccaaaaggggttcaattctagctagttctattacatcgtccgcgaccatgaacatggcgatcgtgcttctgttcatggttttcgcagtttcatcagctttagacatgtcaataatatcacatgacaacgctcatgcggatagggccacgaggcgcaccgacgacgaggtgatgtcaatgttcgaggagtggctggtgaaacacgacaaggtgtacaacgcgctcggtgagaaggagaagaggtttcaaatcttcaagaacaa

SEQ ID NO: 185204 - DNA, 282 bp, Glycine max
cttcagttttgatctatgccgaagaaacgcaatgcttcaaaacaagggcctcaaagccccaacctttctcaaaactggcaccactattgtcggtttagttttccaggatggtgtcattcttggggctgatactagggcaactgaaggacctatagtggctgataaaaactgtgagaaaattcattatatggcacccaacatatattgctgtggagcaggcacagctgctgatacagaggctgtaacagacatggttagctcacagctgcaactacatcgcta

SEQ ID NO: 185205 - DNA, 282 bp, Glycine max
gattatcctaagtctttgggaatagtgctgcaatggcttcaagtcaggaggaggtgaccttttgggagctactggaagcccatttgtgtgcagggttcatattgccctcaagttgaagggagttgaatacaaatatgtcgaagaaaatttgaggaacaagagtgaactgcttctcaaatccaacccagttcacaagaaggttccagtgtttattcacaatgagaagcccatagcagagtctcttgtgattgttgaatacattgatgagacatggaagaacaa

SEQ ID NO: 185206 - DNA, 277 bp, Glycine max
acagcatcggcggcgacagtcactctccgacaacaacacttccgcggcgaaaaatgtctctggtggcgaacgaggatttccagcacattctgcgtgtgctgaacaccaacgtggatgggaagcagaagataatgttcgctatgacctccatcaagggtattggaaggagattcgccaacatcgcttgcaagaaggccgatgttgacatgaacaaaagggctggtgagttgagtgctgcagagttggatagtgtgatgactgtggtggcgaaccctag

SEQ ID NO: 185207 - DNA, 284 bp, Glycine max
ggctattagagttggccggagaattgtggatatcccaccggaggctctagcgttcaatgctaacaccggcgccggcaccgtttttgattcgggtacggtattcacccgactggttgaaccggcctacaacgccgtccgaaatgagttccggcgacgaattgccgttcagaagaaactcactgtgacaagcctaggagggtttgacacatgctacacagtcccaatagttgcaccaacaataacattcatgttctccggcatgaatgtgacactcccaccggaca

SEQ ID NO: 185208 - DNA, 285 bp, Glycine max
gaagaaccaccactaccttatccatttccactcctcaccaagccacaccatggcctcaaccaacgccctctcttcagcttccattctacgctctcccaaccgccagtctctgaccagaagagcgaaccacaacggaagagtaaattaccgtcaaccgaatagccgtttctccgtcaaagcctccgccaaagagattgcctttgaccagcattcccgctctgctatgcaggccggcattgacaagctcgccgacgccgtcgggctcactcttgggcacagggggag

SEQ ID NO: 185209 - DNA, 282 bp, Glycine max
ctcgaagtccatcccaaggacacatttgtgttcagtatagatggcaccgtactctctaatattccatactacaaaaaacatggatatggggtggagaaatttaactcgaccttgtatgatgaatgggttaacaagggcaatgcaccggcactgcccgagactcttaagaattacaacaagctggtgtctcttggcttcaagattatattcttgtcaggaagaacactggacaaacaggccgtaacagaagcaaacttaaagaaggctggctaccacacatgg

SEQ ID NO: 185210 - DNA, 282 bp, Glycine max
tttggcttctgcctttccttttctagggagctcattgacaatggctgaaacaaagtgggtcatgaaggacaaaagatggtctctccatggaatgacagctctagtcacaggaggcacccgaggcatagggcatgccattgttgaagagttagctgagtttggagcaactgttcatatatgtgcacgtaatcaagatgatatagataaatgtttagaagagtggaaaagcaagggacttaatgtgactggttcagtatgtgatttactatgttctgaccaacg

SEQ ID NO: 185211 - DNA, 282 bp, Glycine max
gtacgaggcaatgaacaacgctggttttcttgacaccaatcttattataatcttaaacgacaatgaacaagtttcccttcccactgcaaccattgatggaccagctccaccggttggagctcttagtagagccctcgccaggctaaatactagttctaagttccatcaactacgcgacctcgcaaagggaatcacgaagcaaattggaagccgagcatatgaatttacatctaaattggactcctaccttagagggatggtaggtggtgctggtgcatgttt

SEQ ID NO: 185212 - DNA, 283 bp, Glycine max
agccattctcttcagtttaaagttacatagtttttcattgttttacttaatctacaatggctgcttcaacaatggctctctcttcatcatcattggctggccaagctatcaagcttgccccctccacccctgagcttggtgttggaagggttagcatgaggaaaacagcctccaaaactgtttcctcaggaagcccatggtacggcccagaccgtgtcaagtacttgggcccattctcaggtgagcccccatcctatctcactggtgaattcccaggtgacta

SEQ ID NO: 185213 - DNA, 280 bp, Glycine max
gtttgataaaatattctacacataaatctagctccaattcctaatcacctggttaatttcttcacatagagctatcaagatccaacgttaacatgaagaatgttttagtaaggtcagctgcgcgagctctgcttggcggcggtgggcggactactaccgccagctctcaacggcggcgatcgtggaacagagacaccagcacggtggcggcgcgtttggaagcttccacttgcggaggatgtccactcttccagaggtaaaggatcagcattcagaggag

SEQ ID NO: 185214 - DNA, 281 bp, Glycine max
ctctcttctgcggcggatccattcgtttcatacgaatttgaagtctcttacatcactgcatcccctcttggagttcctcagcaggtcattgctatcaacaacaagttcccaggtcctattatcaatgttactacaaacaacaacgttgctgtcaatgttcggaacaagttggatgagagcctcctcattcattggtctgggattcagcaaaggaggagttcgtggcaagatggtgttcttggcacaaactgtcctattcctgcaaagtggaactggactta

SEQ ID NO: 185215 - DNA, 281 bp, Glycine max
gaagatccagcacagtgaggtggaagtgaagggactgaagcttcacgtggcagagattggaagtggctccaaaacagtggtattcttgcatggattcccagagatctggtacacatggaggcaccaaatgatttctgtggcaaacgctggttatagggctattgcctttgatttcagaggctatggactttctcagcaaccagcagagcctgaaaaggaaaccatgtttgatctggttcatgaaattgtaggccttttggatgctttgaacatctccaagg

SEQ ID NO: 185216 - DNA, 281 bp, Glycine max
gttttccacataggagacatgccttatgcaaatggatacatctcacaatgggaccaattcacagctcaagtgcaagaaatttcctcaacagtaccatacatgattgcaagtggaaatcatgaacgtgactggccaaacacaggatcattctatgatactccagattcaggtggagaatgtggagtccctgcagaaaccatgtattattttcctgctgagaatagagccaaattctggtataaagcagattatggcctgtttcgtttctgcatagcagatag

SEQ ID NO: 185217 - DNA, 282 bp, Glycine max
cgttgttgttctaaagcactcatccacacattctccgtcgccacgacaacaatggctccaaagaaaggtgcgaaaggtggagttgtagcagcaaagaagaaggttcaggagaaggtaacgaaccctttgttcgagaagcgtccgaagcagttcgggatcggaggcgcgctgccgccgaagcgggacctgacgcgcttcgtgaagtggccgaagaacgtccaaatccaacgcaagaagcgcatcctcaagcagaggctcaaggtccctccggctctcaaccag

SEQ ID NO: 185218 - DNA, 279 bp, Glycine max
  unsure (1)..(279): unsure at all n locations
aaacatgtctcattcacaactttacccactcttcatgcttgcaattcgnattcccaatccaaaaccctagtaccttctnagatcctagtagtgaatcagtgatggcacataaggcagagaagaagccagcggagaagtagccggtggaggagaagaagtcgacggtgggagactaggctccgccggtgaagaagacgaaggccggaaagaagcttccgaaggacggacgagccggcggagaatgggggaagtaagagaagaggaacaagaagagcgtgg

SEQ ID NO: 185219 - DNA, 280 bp, Glycine max
  unsure (1)..(280): unsure at all n locations
ccggaattcgcgagcgaggtgcaaagcgagcccaagtggaacgagtgggagaaaagcctcgaatttccatttaattacgtggatgccactctcaacaacagcttcatggcccaattccagggcaataatcagatgttgtcgccgctgcaggacatgttcatgtactggcccaacaagtccttttgagcacatcatgatggttttaaattacgatccgcaattgctcttaagatnttctgactcaccatgcgaccacaatcgtaatttaaaaccatgtcac

SEQ ID NO: 185220 - DNA, 279 bp, Glycine max
ttagtggtaaaagtgcgattcgttccatggacccctaaatagttaagggatcccccgtttgattcatattccgatcaaaaactttatttcttacttaaagggaatcctttataccctcaatgaatgatttgcggtataatatacattatcgtaatttgtatacaagaagaatcaattctaaattgacaacttgagttctaaaattatgaaacataagtttttggaattggatctataatccgaatttttttgagtatgacgaaaggatctatggagaga

SEQ ID NO: 185221 - DNA, 275 bp, Glycine max
ggttttcactgatcaagcccttcctgcggatcttatcaagagaggaatggcagtggaggatccatcctctccctatggccttcgccttgtgatagatgactacccttatgctgttgatggactagagatatggagtgctatccagacatgggttaaggactacgtctccttgtactatgccacggatgatgcagttaagaaagactcagaactccaagcttggtggaaggaagctgttgagaagggtcacggtgacttgaaagacaagccatggt

SEQ ID NO: 185222 - DNA, 279 bp, Glycine max
gaagagcggaagagaaaatgacgaccaggttcaagaagaacaggaagaagagaggtcacgtcagcgccggacacggccgtatcggaaagcaccgcaagcatcccggaggtcgcggtaacgccggtggcatgcatcaccaccgtatcctcttcgacaagtaccatcctggtttcttcgggaaggtaggcatgcgctacttccacaaacttcgcaacaaattctacaatccgatcatcaacatcgacaagctgtggtccctcctcccccaggaggccaaag

SEQ ID NO: 185223 - DNA, 277 bp, Glycine max
caaaagttacaaaaagaatcgcattttctttgtcaatgatacatatcttccgagtgctacaccaggtccactagttaagtacagacaagaagaattggaggttttaagaggagatggaacacggaagcgcagagactttgacagaatctatgattatgatatctataatgatttgggcaatccagatggtggtgatcctcgcccaatcattggaggctctagcaactatccttaccctcgcagggttagaaccggtagagaaaagaccaggaaagat

SEQ ID NO: 185224 - DNA, 271 bp, Glycine max
gcaatacatagcatctaatggtggcgttgttgcagctgaagaacttgctccatatcttgatatagattccacagagggaattaaggatgatgaatcctatattttacctgtgctcttacgatttgatggtcaacctgatgttgatgaggagggaaatattctgtataggtttccatctttgcagaggacagcttctcaaaagagtaagagaaaagaatatgttggaaggagatgggcagattgggttggaattgagaagtttttcaaggag

SEQ ID NO: 185225 - DNA, 280 bp, Glycine max
  unsure (1)..(280): unsure at all n locations
gcgctgaaaaatgtccgaaaacggagaagagaaattactcgctgtggcgcggcacatagccaaaacgctgggccacaacaacaccatgtctgatgacatattccaaatactatcgaactncgatggaagattctcgagagagaatctttctgagaagggcgcagatgtggatcccagaggctgcgccgcactggatcattccctcaaatccctagaccgccggatctctccctacgtctcctccgaccgcacaatctgggccgacgccgccgattctgct

SEQ ID NO: 185226 - DNA, 281 bp, Glycine max
  unsure (1)..(281): unsure at all n locations
caagtagttgagaactaagaagaaggaaatggcttcctcaatgatctcctccccagctgttaccaccgtcaaccgtgccggtgccggcatggttgctccattcaccggcctcaaatccatggctggcttccccacgaggaagaccaacaatgacattacctccattgctagcaacggtggaagagtacaatgcatgcanntgtggccaccaattggcaagaagaagttcgagactctttcctacttgccagacctcgatgatgcccaattggcaaaggaag

SEQ ID NO: 185227 - DNA, 275 bp, Glycine max
gtgggcataaaattttcaaagtcgaagcgagaacttgccatttcgagggttttagggttagggttttctcaaattgcaagaacatgggtttcaacattcaaccctatgggattcagtccatgctcaaggaaggccataagcacctttctggcctcgatgaagcggttctcaagaacatcgacgcctgcaaacaactttccactatcactcgaactttcctcggtcccaatgggatgaataagatggttataaatcacttggacaagctttttgtc

SEQ ID NO: 185228 - DNA, 277 bp, Glycine max
atggctgcctcactacaagctgcagctaccttcatgcaacccaccaaggttggcatagcctctcgcaacctcaaatctacacaatgcatttctaaggcttttggcttggaacctgctgcagctaaactcacttgctcccttcagcctgatctcaaagaatttgctcaaaaatgtgtcgacgctaccaaaattgcaggattcgcccttgccacctctgctctcgttgtttctggagcaagtgcagaaggtgttccaaaaaggctaaccttcgacgaaa

SEQ ID NO: 185229 - DNA, 276 bp, Glycine max
cgcaagcaaaaagaaagaatcccaggcgaggagaaagatggaggggaaggagcaggatgtgtcgttgggagcgaacaagttccccgagagacagccaattgggacggcggcgcagagccaagacgacggcaaggactaccaggagccggcgccggcgccgctggttgacccgacggagtttacgtcatggtcgttttacagagcagggatagcagagtttgtggccacttttctgtttctctacatcactgtcttaaccgttatgggagtcgccgg

SEQ ID NO: 185230 - DNA, 277 bp, Glycine max
cgacacgcatctgagtcttttcttcttcgttaccctcttcacatgccttctctctgctacttcccacgatgaccatattttcctaccgagtcaactccatgacgatgactcagtgagttgcactgcaaccgacccaagccttaactacaagccggtgatcggaatcctgacccaccccggcgacggtgcctctggccggctcagcaacgccaccggggtttcttacatcgccgcctcctacgttaaattcgtggagtccggtggtgctagagttatt

SEQ ID NO: 185231 - DNA, 276 bp, Glycine max
  unsure (1)..(276): unsure at all n locations
tcaaaatctagtttcatacttttnttcttcttcttgnantggctctccaggctgcttctcttgttcctgcttctttctcggttcttaaagagggaaagagtggtgtgtctctcaaggactccaccttgttcggtctttcattttcagaacctatcaaagctaacttcagctcttctgcattgaggtgcaagagggaattcgaacaaaagctctgtgctgtgagggccgaaacagtggctacagcctctccagcagttaccaagtctacaccagaag

SEQ ID NO: 185232 - DNA, 270 bp, Glycine max
gcaatctgtatcttctaccacttatgtaatccatccctgtcaaacaaaccatggcttccgaaacaaaccagtccaagaatgtgtgtgtaattggagctggaccctcggggctattggcagcgagggagctgagaaaagaaggtcacaaggtggttatgcacgagcagaaccatgatattggaggtcaatggctatatgacccaaatgtacaagaggaggatcccttaggtagagacacttggctaaaggtgcatagcagcatctatgagt

SEQ ID NO: 185233 - DNA, 279 bp, Glycine max
ctcttcggagctcaatttcgccgtcaatggcggcctccgaggctctcaacggcacaaccaccacctccatcaggcacgcgttcggcaacgtcctcgcgttcttcatccttctcatgatcggcgttctcgccttctcgatccgtctcttctcgcttataaagtatgagagtgttattcacgagtttgatccttatttcaactatagagtcactcagtttttgacaaagaatgggatatatgatttctggaactggtttgttgatcgaacttggtatccct

SEQ ID NO: 185234 - DNA, 277 bp, Glycine max
acggcgcaaaggggaacaagaagaagaagatggtgtccttgaagcttcagaagcggctcgccgctagcgtcttaaagtgtggcagaggcaaggtctggctcgatccaaatgaagtcaatgaaatctccatggccaattctcgacaaaacataagaaagttggttaaggatgggtttattatcaggaagccaactaagattcactctcgctctcgtgctcgtcgaatgaaggaggccaagaggaagggacgtcactctggctatggtaagcgtaaggg

SEQ ID NO: 185235 - DNA, 273 bp, Glycine max
atcgttagcagttttgtagattcaacctcaatttgcagagttacgttctaatatatttacacaagactgataagagaaaatgtctctgattccaagtttcttcggtggccgaaggagcagtgttttcgaccctttctccctcgatgtgtgggaccccttcaaggattttccatttcccagttctctttctgctgaaaattcagcgtttgtgagcacacgagtggattggaaggagacaccagaagcacacgtgttcaaggctgatattccagg

SEQ ID NO: 185236 - DNA, 274 bp, Glycine max
cttttgctttaccaaattccaatttccaattcaaaaccctaactccgttcgaagcaccaaatcgtgatggcaccaaaggcagagaagaagccagcagagaagaagcccgcggaggagaagaaatcgacggtgggagacaaggctccggcggagaagaagccaaaggccggaaagaagcttccgaaggagggaggcgccggcggagaagggaagaagaagaagagaaacaagaagagcgtggagacatacaagatctacatcttcaaggttctga

SEQ ID NO: 185237 - DNA, 272 bp, Glycine max
gccgcagcttgaaacagagcagagcgaccttgacaagctatggctgtcggaaagaataagaggatttccaagggaaagaagggtggcaagaagaaagccgctgatccctttgccaagaaagactggtacgatatcaaggccccttccctcttccaggtcaagaatattggcaaaaccctcgtctctcgtacccagggaaccaagattgcatccgaagactcaaacatcgggtttttgaggtctcattggctgatctccaaggggatgaagac

SEQ ID NO: 185238 - DNA, 273 bp, Glycine max
cccaaattacccgtgagtggtctggaatcaatacattcgcacctgctacccagactaagttgcttgaactcttgggaaaacttaaacaagagaatgtgaactccttaactatacttgtgatgggaaaaggtggtgttggaaaatcttcaactgtgaactccatcattggggatagagtggtttcgattaatcctttccagtcggaagggccaagacccgtgattgtgtcgcgatcaagggctggttttacattgaacatcattgacactcctg

SEQ ID NO: 185239 - DNA, 274 bp, Glycine max
ttttctttcttttttttcccctctttaaaagtctggcttttggtcctttgattcccaacttcacttgtcacatatcatattatgaagctcacaggtttcctgcaagcggtgactcttgctttggtgttagccaccgtctctgcatcagatcctgatcctcttcaagacctctgtgtcgcagaccttgcttcagcggttaaagtgaatggattcacatgcaaagatgctgccaaggtaaatgcgagtgatttcttctcagacatactagccaaac

SEQ ID NO: 185240 - DNA, 293 bp, Glycine max
agctaggacttccgctcgagcttgtctcgagcgatccgagaaaaactctgtaaacatgttggtttaccaggacctccttacaggtgatgagcttctctctgactccttccgttacaaggaaattgagaatggaatgctgtgggaagttgagggcaagtgggttgttaaaggagcagttgatgtagacattggtgcaaacccttctgctgagggtggaggagaagatgagggagttgatgatgcagctgttaaggttgttgacattgttgacacattcagacttcaggagcaac

SEQ ID NO: 185241 - DNA, 267 bp, Glycine max
  unsure (1)..(267): unsure at all n locations
aaagccatggccacctccaacttctctattgttctctccgtctccctagccttctttttggtgctacttaccaangcacactcgaccgataccgtttctttcaccttcaacaagttcaacccagtccaaccaaacattatgctccaaaaagatgctagtatttcatcctctggggtgttacaactcaccaaagttggcagcaacggcgtgcccacctcgggatctctcggtcgtgccctttacgctgccccaatccagatttgggac

SEQ ID NO: 185242 - DNA, 272 bp, Glycine max
aagccacaatgcttttgatagcaaacaatgctgcccaagggattttatcctctttcttcttcaaatatgcagatacaattttgaagaagtactcatcaacagtagcaacaatcttcaccggtatagcatctgctgtactatttggacatactttaacaatgaacttcgttattggcatttctattgtgtttatctcaatgcaccaattcttttcgccactttcaaaagttaaagatgaacaaaatggtgtgctggaactgcatgatgttcat

SEQ ID NO: 185243 - DNA, 269 bp, Glycine max
cgcaaaaatggcacctgcaacactgtctctgtctctcctcctcctgttctcactcagcatcgccgtaaccgttagatcgagcgactacgactacgattgtgtgtacactgcatacgttagaaccggttcggtgttgaagggcggaacggactctaagatcgggctgaagctgtacgacaagtacggctactacatctacattaaaaacctcgaagcatggggcggcttgatgggcaagggctacgactacttcgagcgcggcaacctcg

SEQ ID NO: 185244 - DNA, 270 bp, Glycine max
caactctatctgcaacagccaactttctcgttcgtcgatcacaaaaatggcggcgaaacttcaaatatttacgggattgccccccgcgccatttcaatcttcctcctccactctctgcgtactcaagaagcctctcactacctccttcttcggcactgcacgagtggaagttctgaaacttcgagtgatgaggattgcgaacctgcgcgcggtggaggtgctctcggtgctcgcatgaacctctttgacaggttcgccagagttgtgaag

SEQ ID NO: 185245 - DNA, 270 bp, Glycine max
caggaatcaattggttgaatctcttgggaacaggatacaaaatgagggtactgtggcatactatttgttattggacaaccgatttcgtgtttccagtggctatcttggagctgagtttcaagagaccatggattccggttttaatcaaatgcattccagtgaacttgcttcttcagttgttggaaaccgctttccaggctacatggaatatccaggagtaggatcgaggcaacagttccctgttgaaaggaaatgggcccttgggcttca

SEQ ID NO: 185246 - DNA, 268 bp, Glycine max
gagcaaagagccaagagggtgcaattacatgagctgaaagaagtaacgcaaaagcccctttattttttatggttagaacttagaagctgattgtgacaatggatgctcgtggagaagggtcttctacttcttactacaacgttcttggtgttagctcagattctaacgtggatgagattagacgtgcttataggaagctggctatgcaatggcatcctgataagtgcacaaggtcgccttctttgctgggtgaagctaagcgcaaatt

SEQ ID NO: 185247 - DNA, 266 bp, Glycine max
gggttataaacttattataaccatgccttcttcgatgagtctcgaaagacgaaccattcttcgggcttttggagctgagttagtcctcactgatcccgccaaaggtatgaaaggagctgttcagaaggcagaagagattcgggataagactccaaattcttatattcttcagcaatttgaaaatcctgccaacccaaagatccattatgaaaccactggaccggagatctggaagggctctagtgggaaggttgatgctcttgtct

SEQ ID NO: 185248 - DNA, 266 bp, Glycine max
tgccatttgggttttatccctcccttgttctgcactgcggccgataacaattttctgttttgtgtgattttcttgttctttgtttacagctctgcgagatcttgagtcgccgattagaaaagatgagtaagcttcagagtgatgctttgcgtgaagccatctcaggaatcatggccgattccaaggagaagaatcgcaaatttgtggagaccatcgaactccaaatcggtttgaagaactacgatccacagaaggacaagcgtttc

SEQ ID NO: 185249 - DNA, 267 bp, Glycine max
gtttcgggggaagagatccagcagcaatggtgtacgtcaaggctcagaaatcaaaagcctacttcaagagatatcaagtcaagttcaagagaagaagagagggaaaaaccgattaccgtgccaggattcggttgattaatcaggacaagaacaaatataacactccgaaataccgatttgtggttcgctttagcaacaaggacattgttgcacaaataatatctgctagcattgccggcgatttagttcttgctacagcatattcac

SEQ ID NO: 185250 - DNA, 267 bp, Glycine max
taaaaaggtccaactgtttccattcttcaggcggaaaaagtccatgtcaggtttcaagcaacccatacatgatcggttttggcataatccaaattttattttctcaaattccagattttcatgaaacatggtggctctccatagttgcagcaatcatgtcttttgtctattccacaattgggctcgctcttggcattgccaaagttgcagaaacgggtactttcaagggtagtctcacaggagtaaggattggaactgtgaccgagg

SEQ ID NO: 185251 - DNA, 267 bp, Glycine max
gggtaatcctattccctatggctggtgcgacttgcgaggtgtagacatgatgtgatgtgatgaattgaggggaatccattgaagaggcgaggcgagttaatcagaaatcagaatgcacttgagcgagaacgaagggatagaggggaaggccttcgtggtcaccggtggactgggattcgtaggatctgctctctgcttggagctcatccgaagaggtgctagagaggtgcgaacctttgacctccgcctctcttctccatggtcgcg

SEQ ID NO: 185252 - DNA, 266 bp, Glycine max
gtttggaaggattattaaggtgtgggaagagttgcaggctgagatggattaactatttgagagctgaccttaaaagaggaaacatttctgctgaagaggaaaataccattgttaagttgcacgcttcttttggtaacaggtggtctttgatagcaaatcacttaccaggaagaacagacaacgagataaaaaactactggaattctcacctcagcaggaaaatttacagtttcccaggtgcaggtgcaggtgcaagtgcagggatc

SEQ ID NO: 185253 - DNA, 271 bp, Glycine max
cgaggtacgaggcacttaacatcgctggttttcttgacaccaatcttattataatctcacccgacaatgaacaagtttcccttcccactgcaaccattgatggatcagctccaccggttggagctcttagtagagccctcgccaggctaaatactagttctaagttccatcaactacgcgacctcgcaaagggcatcacgaagcaaattggaagccgagcatatgaatttacatctaaattggactcctaccttagagggatggtaggtgg

SEQ ID NO: 185254 - DNA, 265 bp, Glycine max
attctcttcactttaaagttacatagtttttcattgttttacttaatctacaatggctgcttcaacaatgactctctcttcatcatcattggctggccaagctatcaagcttgccccctccacccctgagcttggtgttggaagggttagcatgaggaaaacagcctccaagactgtttcctcaggaagcccatggtacggcccagaccgtgtcaagtacttgggcccattctctggtgagcccccatcctacctcactggtgaa

SEQ ID NO: 185255 - DNA, 266 bp, Glycine max
ctcttctctcactttgagtttgcgactctggaattccgctacaatggtcgtctcacagaaagttaaggatgctgagatcaccgagcaggattcacttcttctcacgaggaacctgctccgtcttgccatattcaacatcagttatatcagaggactatttcctgagaagtattttaatgataagtctgtacccgcgttagagatgaagataaaaaaacttatgccagtggatgctgagtctcgcacgatgattgattggatggaga

SEQ ID NO: 185256 - DNA, 268 bp, Glycine max
gtttgttgtgagctataagctagtttatcgtgaggagaatatgaagttgtttgttttctttgttgctgcagtagttttggtagcatggccatgccatggcgcaggctaccaaaggttccctctccgaatgaaaactggctatggtgagcgttcttcggaggtaaaatgcgcaagttttaggcttgctgtggaagcacacaacatccgagcctttaaaaccattcctgaagagtgcgttgaaccaacaaaggactacattaatggcgaa

SEQ ID NO: 185257 - DNA, 269 bp, Glycine max
gcctcgctctgtttctgtctctgtgtttgcggctgaggattccgaacgagcgaccttcttcgtttctcgcaaagtttaagtcatcatgggtaaggaaaagactcacatcaacattgtcgtcattggacatgtcgactctgggaagtcaactaccactggtcatttgatctacaagcttggaggtattgacaagcgtgtgattgagaggttcgagaaggaggctgctgagatgaacaagaggtcattcaagtatgcctgggtgcttgaca

SEQ ID NO: 185258 - DNA, 267 bp, Glycine max
tagcattctaagaaatgaagagccctaccattttcattctctttctactttctgccttctacacctcactcctaccttcagccaccgctcaagtcgtggttgacatggacggtaatgatcttcaaaatggtgggaaatattatgtgttgccagtaatagagtcatcatatggtggaataagagtagccgcaactggaaaagaaagatgccctctcactgttgtacaatctgccgatccgtatgataaggggattgcaacaattattt

SEQ ID NO: 185259 - DNA, 271 bp, Glycine max
atcactcccacgcgctcctatatcctctccttcaccgtcgctctctccaacgatcacaacaacatcgtcatcccatggcaaacgccgcatctggtatggcagtccatgatgactgcaagttaaggtttttggagctgaagacaaagaggacacaccgtttcatagtttttaagattgaggagcagcagaagcaggtcattgtggagaagcttggtgagccagcccaaggctatgaagatttcactgccagccttcctgctgatgtgtgccg

SEQ ID NO: 185260 - DNA, 267 bp, Glycine max
gacggatcttgacatggttgatgctgccatagtagaagggaaaacaaaagtgctttacttcgaatctgtttccaaccccacccttacggttgcgaacatacctgaactgtgccacatggcacaccggaagggagtgacggtggtggtggacaacacgttcgcgcccatggtgctttcgccagcgcgtcttggtgctgatgttgtcgttcacagtatctccaagttcatcagcggtggggccgatatcattgcaggagcggtgtgcgg

SEQ ID NO: 185261 - DNA, 230 bp, Glycine max
  unsure (1)..(230): unsure at all n locations
ttaagaaaaaatggcagcctgcactgtctactcaacacaatctctgagcacaaattgctccatctcaaccccatcaaagacacagctgagtttcttccaccaaaagcaggtagttttctggaggaacagcnnnnnnnnnnnnnnnnnnnnnnnnnnnnnntatgtgataacatgtgcagcaggtgactcacagacagtggtgattggtcttgctgcagactcagggtgtg

SEQ ID NO: 185262 - DNA, 263 bp, Glycine max
ctcttcaccctgctaggagccattggaggtttaggtgaccgtggaaaatttgttgatgacgaacctactactggaggtgttattcctccaggcaaaggcttcagggaagctcttggtcttggttcaggtcctttatttggattcacgaaagcaaacgagctatttgtgggaagattggctcaattgggtttcgttttctcattgattggagaaattataaccggaaagggagcactagcccaactcaacattgagactggggt

SEQ ID NO: 185263 - DNA, 265 bp, Glycine max
caacaactcactcactaagctaaacaatttcatcaagcctgccatggcttcctcgtgtgcttcctctgccattgcagctgttgccatctccacaccaagttcccagaagaatggatcactcttgggaagcacaaaagcttcttttcttagtgggaggaaactgaaggtgaacagttttacagcaccagttggagcacgatccagcactacagtgtgtgcagttgctgagcctgataggcctctgtggttcccaggcagcacccct

SEQ ID NO: 185264 - DNA, 265 bp, Glycine max
gtgtggttgacagttaagaagtagcaaagatgtttccattcgggcacaagggtcaaaagataaaggggactatggtggttatgcagaagaatgtgttggctatcaacagcatcaccagtgttgacgggatcgtcggcaccggcttagacttcttaggcagtgcactcgatacagttacttttttagcctcctccatctccatccaacttattagtgctaccaaggctgatggtgggaaaggaaaagttggcaaggctacaaattt

SEQ ID NO: 185265 - DNA, 265 bp, Glycine max
gactagacagtaataataaggactctgcatggcaaaaggggagatttggtgaaaatacaataattggtaacatcgacacaggtgtttggcctgaatccgagagcttcagtgataatggatttggctccgtcccatcaaaatggcgagggggtaacgtttgtcaaattaacaaactccctggctccaagagaaatccatgcaacaggaagctgattggagcaagattctttaacaaagctttcgaggcagccaatgggcaacttga

SEQ ID NO: 185266 - DNA, 268 bp, Glycine max
cacacaaaaaatttctagagcgagaaagtgagaggagagagaaagtagctgatcctccatggcctccaccaaggaacgcgaaaactttgtctacaccgccaagctcgccgaacaagccgaacgctatgaagaaatggtggaagcaatgaagaatgtggcgaactgaacgtggaattgacggtcgaggagcggaaccttctgtcggtagggtacaagaacgtggtgggtgctcgtagggcttcgtggaggattctatcgtcgattgaac

SEQ ID NO: 185267 - DNA, 267 bp, Glycine max
  unsure (1)..(267): unsure at all n locations
ggcttcctcagttacttcctcttttcgcatcagcaatttgaagtcggtttttgttggtgagactaataaactcagagcttcaagtctacctggtgnccatgttggtttcaatagatagactgtagaatgttaggtctcacgaattgggaagcaaccaattcctgtgccatccaacgtcacagtcaaattggcaggacaggatatacaagtgaaaggtcctttgggagaacttgcattaacttatcctcgagaagtgttggttgagag

SEQ ID NO: 185268 - DNA, 263 bp, Glycine max
cgaagaaggtgttcacgttttacgaccatttacacagttatctggcgtccgctggtgtggacggcgttaaggtggacgtgcagtgcattctagagactctcggcgcgggactcggcggaagggtggagctcactagaaattaccatcaggcccttgacgcttcgatttctagaaacttccctgacaacggttgtatcgcctgcatgagccacaacacggacgcgctctactgctccaaacagacggcggtggtgagggcttcc

SEQ ID NO: 185269 - DNA, 264 bp, Glycine max
cgaggcgaagagaagagaaaaattaagatggaggggaaggagcaggatgtgtcgctgggagcgaacaagttcccggagagacagccgattgggacggcggcgcagagccaagacgacggcaaggactaccaggagccggcgccggcgccactggttgacccgacggagtttacgtcatggtccttttacagagcagggatagcagagtttgtggccacttttctgtttctatacatcactgtcttaaccgtcatgggagtcgcc

SEQ ID NO: 185270 - DNA, 264 bp, Glycine max
cttcgagcgaatcggctcgagccctcttcttaattcaacaatggcagataactcaattagcttattttctccatacaacaagatgggtaaattcaacctctctcatagggtggtattggctcccatgaccagatgcagagcgctcaatcggactccactggcagcacatgctgaatactacgctcagagatcaacaccgggtggatttctcatcactgaaggcaccttgatctctccaacttcttctgggtttcctcatgttcc

SEQ ID NO: 185271 - DNA, 267 bp, Glycine max
caacgcaggtttcccccacaacgttgtgttcgacgaggacgagattcctagcggcgtggatgcagggaaaatctccatgagcgatgaagaccttctcaatgcgcctggtgagacttacagcgttactttggatgctaagggaacctacagtttcttctgttcgcctcaccaaggagctggtatggtgggaaaagtcactgttaattaattattgtctcaagggctcgtctcctacgtctaagttctcatatggttccttcttctaat

SEQ ID NO: 185272 - DNA, 269 bp, Glycine max
caaaaccatcaatggcatcagcattatcttctctctcctccacctcttcttcactgttacagcacagtttcaccggaaactcgaaggctcctcccactactcaattccccaacaaaaatgtacgcttttcggtcttcgctcaaaagaaggcaaagaaacttcgaaagattattttgaaggaagatgtggcttatgtaggaaagcaagggcaacttcttgatgtgaaggctggctttttcagaaattcacctgcttcctatgggaaaagc

SEQ ID NO: 185273 - DNA, 265 bp, Glycine max
ttcggatctcgagtcttcagtttctcctcgttgttcttcgctttcctgtattcaatttcgattctttcgtcaatttaataagatgcttaggatggcacgaagtagagcgataatacgaggtactacgaaatcctcggcgtctccaagaacgcttcgcaggatgatctgaagaaggcttacgagatagccgccattaagattcaccccgacaagggcggtgatcccgagaagtttcaagagctggcgcaactctatgaagttctga

SEQ ID NO: 185274 - DNA, 264 bp, Glycine max
  unsure (1)..(264): unsure at all n locations
gcgcaacccagctgttattgcagacaacgtaggagngcaatgttggagatatcgctgggatgggttcagactnatttgggtctnatgcagaatcatcatgtgcagctttatttgtagcatccatatcatcgtttggaacaaatcatgatcacacagccatgtcatatcctctcatcataagctccatgggaattgtggtttgcttgattacgactctttttgcaactgatctgtttgaaattaanaacgtgagccaaatagaac

SEQ ID NO: 185275 - DNA, 264 bp, Glycine max
gtttcagttccaaacaaaacccatcatagtctttctccctcagtgatcatatattcattcagttctatacaaaatcctcaaaaactcttcctctctgccatgaccatggaatacagaaccttagaactcaacatcatatccgcaaaggacatcaagaatgttaatctcttctccaagatggacgtatacgccgccgtttcgctctccggtgaccctctccaccctcagggcgccaccacccacgtccacaaagacgccggcagc

SEQ ID NO: 185276 - DNA, 261 bp, Glycine max
gttccaagttagttagaggccttgttgcttgcatagctctctgatctgaaaatgagtgcgtcgaggttcattaagtgcgtcaccgtcggcgaggtgctgtcggcaaaacctgcttgttgatttcctacaccagcaacactcttcccacggactatgtgcccaccgtttttgacaatttcagtgctaatgtggtggtggatggaagcaccgtaaacctaggattgtgggatacagctggtcaggaggattaccatagattaa

SEQ ID NO: 185277 - DNA, 264 bp, Glycine max
ctaccttataagggtgatgataagccagggttcttgaagaagcttgcattgaagtttaaggagccagagaataccacattgtttattcttgacaaatttgatgggaactctgatatggttgcagagttggttaccattaatggatttaaagcagcttatgcaattaaggatggtgcagaaggaccgcgaggatggaagagtagtggtcttccttggatagcaccacggaaaacattgagtttggacaatctgacagatgctata

SEQ ID NO: 185278 - DNA, 264 bp, Glycine max
catagccccatttatttacccagagcttgagtgggacttccggttacaactagtgaagagcatcaatgttagtgggcacaagtatggtttggtctatgctggaatcggttgggttatctggagaagcaagcaggacttgcctgaggaactcatctttcacatcaactatcttggggctgatcaacccaccttcacccttaacttctccaaaggttctagccaagtcattgctcaatactaccaactgattcgccttggttttga

SEQ ID NO: 185279 - DNA, 267 bp, Glycine max
  unsure (1)..(267): unsure at all n locations
gtgacactgtagactctggctcacgccttagacgacgaagctcgctctgtactctcactacacctgaacggatccttcttcttccttatcgcgaattccgttacttcaaaacctaattgcgtgagtgtggtttctgatttgtgttgaagcgaagatgaggattatgattaagggcggtgtttggaaaaacaccgaagatgaaatcctgaaagcggctgttatganatatggtaagaaccagtgggctcgaatctcttcgctccttgt

SEQ ID NO: 185280 - DNA, 261 bp, Glycine max
gttcaaccacggctaggttgggttcaaggaaatgggctcctcgatttgactacatcctaacccagcaggccatggtggcggtggacaatggaacacctattaaccgggacttaatcagcaacttcctgtcagacccagtgcatggagccattaaagtttgcgctgaactgagacccacagtagacatttctgtgccaccagatgcagactttgttcgtccagagttgcgttccagcaattagaacttaaaatcaattatgg

SEQ ID NO: 185281 - DNA, 261 bp, Glycine max
ctcgttcttcttcttttgttgttctgtgtttgtgtttgttttttctctcacctgaaaatgtcttgctgcggtggtaactgtggttgcggaagctcctgcaagtgcggcaacggctgcggaggctgcaagatgtacccagacttgagctacactgagtcaaccaccaccgagaccttggtcatgggagtggcacctgttaaggctcaatttgagggtgctgaaatgggtgtgcccgctgagaacgatggctgcaaatgtgga

SEQ ID NO: 185282 - DNA, 264 bp, Glycine max
gccatatctttacttcccaaaacttgctctacaatgagtttccttcgttcttttgcaagaaacaaggatatatcaaaagtaggacgcagaggtatccattgcatgcagaaactatgtgcagaaaaaatatctcctgattcactagagaaggcccaaaatcgtgtgatagatgctgcactcacacttgttcgagaaaatacaaggcttaagaaagaactcgtgcatagtttgggaggtgctgtggcaacttcaactcttcttgga

SEQ ID NO: 185283 - DNA, 262 bp, Glycine max
ggctcataaatcttttttatgggtttcagggtcactactactctgtctctgctctccctgttttggctcttgtccctgcaccaagcaagagctgcaaatttccacaatgtgagtggcttgagagggaaaaagccagttgtagcaaatgggtgcaatttgttcctgggaagttgggtggttgacacttcttatcctctctatgactcttcaacatgccccttcattgatcccgagtttgattgccaaaagtatggaagacctg

SEQ ID NO: 185284 - DNA, 261 bp, Glycine max
gcataactgaacaaacaaagcaaccctatgtcgaaggtggtttgtgtcaccggagccagtggcgccattggatcatcggtggccctcctcctcctccagcgtggttatacggtccatgccaccgtccaagatatcactgatgtaaatgagacgaaacatttggaggaaatggaaggagcaaacagtcgtctccatttctttgaaatggatcttcttgctatcgactccattgccgctgccataaagggttgttccggcgtc

SEQ ID NO: 185285 - DNA, 263 bp, Glycine max
atcactcccacgcgctcctatatcctctccttcaccgtcgctctctccaacgatcacaacaacatcgtcatcccatggcaaacgccgcatctggtatggcagtccatgatgactgcaagttaaggtttttggagctgaagacaaagaggacacaccgtttcatagtttttaagattgaggagcagcagaagcaggtcattgtggagaagcttggtgctcctgcccaaggctatgaagatttcactgccagccttcctgctgat

SEQ ID NO: 185286 - DNA, 259 bp, Glycine max
cggctcgaacatttgcgttgtcgcagtcacaggcttaaggcaaaaccctaaattctctcacactttcgtcggaatactattttggcatattccgtgacaagatgccggcgaaggacgacggctccgacaaggagaagtgcctcgatctctttctcaagtacggcttagacgagcgcacggctaaaaacactgtcgccaacaacaaagtcactgccaatctcacttccgtcatcgacgaggccggtgctactgatggatg

SEQ ID NO: 185287 - DNA, 265 bp, Glycine max
ctttattgtggaaacaaaataagaaagtttcacctaccagttctgctaaatttagagtgctggcaattaagtctgacaatagcaccatcaacaggctcgagggtctacttaatttggatatcactccattcactgacaagataattgctgagtacatttggattggggggacaggaattgatgtgcgcagtaaatcaagaacaatatcaaagcctgttgaagatccctctgagctccctaaatggaactatgatggatctagcac

SEQ ID NO: 185288 - DNA, 268 bp, Glycine max
ttcagattctaaaaaatgagttggtggtgggctggagcaatcggtgctgccaagaagaaattcgaggaagaggaaccgccgcgaagcttccagagcgtgggcctggtgatcggcgtgacgggcatcgtgggcaacagcctcgccgagatcctccctctcgccgagacccccgccggtccatggaaggtctacggcgtcgcacgccgcccccgtccgccgtggaacgccgaccaccctgtcgagtacatccagtgcgacgtctccgatc

SEQ ID NO: 185289 - DNA, 274 bp, Glycine max
  unsure (1)..(274): unsure at all n locations
ggagaagggtgtcactgcccttgncccctagagccaatgattttgatctcatgtatgaacaagttaaagctcttaaggatggaattgctgttgaaaaaccaatctacaaccatgtcactggtctcctggatccccctgagctcattaaaccccccaaaatcttagtcattgaaggcttgcacccaatgtatgattctcgggtcagagatctcttggactttagcatctacctagacattagcaatgaggtcaaattcgcttggaaaattcagag

SEQ ID NO: 185290 - DNA, 267 bp, Glycine max
ggataagtgggagctggaaacagcgaaagtgaaataccactacttttaacgttattttacttattccgtgaatcggaagcagggcactgcccctctttttggacccaaggtcggcttcggccggtcgatccgggcggaagacattgtcaggtggggagtttgggtggggcggcacatctgataaaagacaacgcaggtagtctaagatgagctcgaagagaacagttatctcgtgtagaacagagggtaccagtcgttttattctga

SEQ ID NO: 185291 - DNA, 268 bp, Glycine max
tctttttcttctcctctctctctctcccctccgccatggctgaggataaggagatgtctacctctgtcatcaatgggaatgattccctaactggtcacatcatatctacaactattggaggcaaaaatggggaacccaaacagactattagctacatggcagaacgggttgtaggaactggatcatttggaatcgttttccaggcaaaatgcttggcaactggggaggcagtggcaattaaaaaggttttacaagacagaagatacaa

SEQ ID NO: 185292 - DNA, 269 bp, Glycine max
gcagacttaacaacagcacaaagcgggttactgtctgttcaagctaccatctctctctctctttcttagtgcctccttgccagaagttaaaatggcccaagaaactttcctattcacatctgaatcagtgaacgaggggcaccctgacaagctctgtgaccagatctccgatgctgtgctcgatgcatgcttggagcaggaccctgacagcaaggttgcctgtgaaacctgcaccaagaccaacatggtgatggttttcggagagatca

SEQ ID NO: 185293 - DNA, 272 bp, Glycine max
cctcgaccgctcgagcggctcgagggactcgagtgtgcctccaaccttgtacaagagtgactgcctaaactaattggagagactttgcccacgagagacttcaccaggatccacattcccttccttcaaacggaaccatgtttcagcatgtgtgttcttgaatatgtaaccaaaatctggagcaacagccatgaatttgaaacaattgctcacaaatagtttcagaatctgagttccagcgtcagagtcaagggactttgacactatgacca

SEQ ID NO: 185294 - DNA, 270 bp, Glycine max
ctagaaacagtgtgatgaaaatgaaggtccttgttttcttcgttgctacaattttcgtagcatggcaatgccatgcgctacgatatgttccctctccgaatgaacactggctatggtgcccgtactccggaggtgaaatgcgcaagttggaggcttgctgacggaagcacacaacatctttggctttgagaccattcctgaagagtgcgttgaagcaacaaaggaatacatccatggcgaacaatatagatcagactccaaaacagttaa

SEQ ID NO: 185295 - DNA, 271 bp, Glycine max
cggctcgagtgcagatattatcatcctcaatccaaattcaacctttgagataactgcaaagtcccaccactccaaactggacacaaatgtctatgagggaaggagtggaaagggaaaaatcgaagtgactattgcaggaggaagagttgtttgggaaaataatgaactgaaggttgctcctggtactggcagatatataaaaatgccaccctttagctatctgtttaacggaattgacaaaaaggatgccttttatctaaattccctccaa

SEQ ID NO: 185296 - DNA, 270 bp, Glycine max
cggtttctagagagagaaagtttgttatagagagagaaagcgcgctgctgcttcttctgctgctgcttcgacagtgagaagagagagagaagcgctcttctccgtaccgtttctagagagagaaactgatggccggagttaatccgaacggcgtcgccgattttccggcgactccaacgcacggcggacagttcattcagtacaacatattcggaaacctcttcgaagcttaggcgaagtaccgtcctccgatcatgcctgtcggacgcg

SEQ ID NO: 185297 - DNA, 268 bp, Glycine max
caactgaagaaccaacaagaggggtattgagattgagattcaagtaatggggaagagcaaggttcttgtggtggggggaactgggtacatagggaggaggatagtgagggcaagcctggcactgggccatgagacctatgtggttcagaggccagagttgagcctccagatagagaagctgcagaggctcctctccttcaagaagcaaggtgctcatctcattgaggcctctttcaatgatcacaagagccttgttgatgctgtgaag

SEQ ID NO: 185298 - DNA, 275 bp, Glycine max
acaaatactaccatttcggtgaatcatggcgaacccaatcgacggtggcgagttcgagtgcctttccgggttcggcaaccacttctcctccgaggccctcgccggagctctgccggcggcgcagaacagccccctcgtctgcccgtacggactatacgccgagcaaatctccggcacctccttcacttctcctcgcaaccgcaacctcttcagttggttttatcggatcaaaccatcagtgactcacgaaccgttcaagccaagagtaccgggta

SEQ ID NO: 185299 - DNA, 267 bp, Glycine max
gcaacattgaaggcaggtacgtcggttctggcaaaggggagctcattggggacaaccactctggtgtggtgcagctgcacaacgtggaggacgtgcagaagctcatagaggaccacaagctggatcacaagctcatcgtgctcgatgtgggtctcaaacattgtgggccctgcgttaaggtttatcctacagtggttaagctctcgaggcagatggactcggtggtgttcgctcggatgaacggggacgagaacgagagctgcatgc

SEQ ID NO: 185300 - DNA, 273 bp, Glycine max
cggcgtctctgcctctgcaattcagcgggctcaagtgctccccactctcatcttcttctctcttctccaaaccttctctttggacccaacaatcccaaaagcgcgtttcaattaccattgcgaactcaatagcaatagccacatgcgcagaacaaagagagagcgaggcttaagaaactcttcgaagaagcctacgagagatgccgcaatgctccaatggaaggtgtttccttcaccatcgaagacttcactgctgctcttgacaagtacgac

SEQ ID NO: 185301 - DNA, 269 bp, Glycine max
  unsure (1)..(269): unsure at all n locations
cagcttgcagtggatttgctagctaatcagcttctttttgaggccttaaattactctcatttctgcaagtatgcttgctctgaagnaaatcctgagctcttggacatgggaggtccagttgaaggtggatttagtgttgcatttgatccccttgatggctccagcattgtggacacaaatttcacagtaggcaccatcttnggtgtgtggcctggagataagttgaccggcatcaccggaagagatcaagttgctgcagccatgggggt

SEQ ID NO: 185302 - DNA, 269 bp, Glycine max
caaggagatggctctgggaagaggcagtgcagtggttctactactttgcttcttgctgcttcactctcagatggctcgtgctgccacctacacagttggagattctgggggttggacctttaacactgttgcctggcccaaaggaaagctctttcgggctggtgacacacttgctttcaattatagccctgggactcacaatgtggtggccgtgaacaaggctggatatgatagctgcaagactccaagaggagccaaagtgtataagt

SEQ ID NO: 185303 - DNA, 271 bp, Glycine max
cttcgttttgttcttccttgcgctcctcctcgttcgttcgttctccctcgcgtagatcggcaatggcggagaccgagacgtttgctttccaggctgagatcaaccagctcctcagtctcatcatcaacaccttctactccaacaaggaaatcttccttcgtgaactcatcagcaacgcctctgatgctttggacaagattagatttgagagtttgacggacaagagcaagctcgatgctcagccagagttgttcattcatattattcccga

SEQ ID NO: 185304 - DNA, 270 bp, Glycine max
ttctgaaatcccatccaatcgaaggctgtgaagtgtgtgatgcactctatccttctttctcttgaacccataattccatgactcggcgttgctcccactgcagcaacaacggccacaattcccggacatgcccttcgcgtgggggcggaggtgtgaagcttttcggggtcaggctgacggatggatcaatcattaagaagagcgccagcatgggcaacctaaacctctcctccgccgccgcacatcaccaattccattcatctccttctt

SEQ ID NO: 185305 - DNA, 268 bp, Glycine max
ctcgttccgattcgttttcgttggtcttctagaagcttcttccaccatgaacagcaatctcaacgtttccaaagagctcaacgccaagcacaagaagatactggaagggcttcttaaattaccagagaataggggatgtgctgactgcaaagctaaacgtccaagatgggctagtgtaaatcttggcatctttatatgcatgcagtgttcaggaatacatcgaagtttgggggtacatatatcacaggttcgttctgcaaccctggac

SEQ ID NO: 185306 - DNA, 270 bp, Glycine max
cagcatcatcacatgcacccgcgattcctacgatcccttcccatggtctcttctctgcaccctcgccgtaccttctagaaccttccctcagatctcaattccccttccgctttctcctttcatggaaatggcttccactccccgcaccgtcgaagagatcttcaaggactacaccgcccgcagaaccgccatcgttcgcgctctctctcaagatgtggatgaattctacggactctgcgatccagataaggagaacttgtgcctctatgg

SEQ ID NO: 185307 - DNA, 268 bp, Glycine max
cagaaatcccatattttccccccacattaactcacccaacccctctttctaaaaggcctcaaggatacactccggacttaattacgttattttgttagggtcaccgtctcgagatattctaaacttgtactgaaaaatatggagggaaaagaagaggacgtaagacttggagccaacaggtacggagagaggcagccaatagggaccgctgctcaggctaaagactacagagagccaccgtcggcgcctctcttcgaaccgggagagt

SEQ ID NO: 185308 - DNA, 267 bp, Glycine max
ctatattcatggctttctttattctctccttcctcttccttcttcttgtttcatctgccactgcttgtgatcgctgcttgtatcaatccaaggcttcctatttctccaaagcttctgctctttcatctggggcatgtgggtatggctctttggcactagacataagtggtggacaccttgcagctggtgtggattctctcttcaaaaatggagcaggttgtggtgcctgctttcagataagatgcatgaacccaactctatgtagca

SEQ ID NO: 185309 - DNA, 268 bp, Glycine max
gtatgatgaaattgtgaaggaagtctcttcctacttgaagaaagtaggatacaaccctgacaagattccttttgttcctatctctggttttgagggagacaacatgattgagaggtccacaaaccttgactggtacaagggtccaactctgcttgatgcacttgaccagattagtgagcccaagaggccctctgacaagcccctcaggcttccccttcaggatgtgtacaagattggaggtattggaactgtgccagtgggacgtgtt

SEQ ID NO: 185310 - DNA, 262 bp, Glycine max
ggaatcctctctgtgtgtgatgagccacttgtgtccgttgacttcaggtgcactgatgtgtcctcaaccgttgactcctcgttgaccatggtcatgggagatgacatggtgaaggtcattgcttggtatgacaatgaatggggctactcccaaagggttgtggatttggctgacattgttgccaacaaatggaagtgagagccaaacaaattctcatggtaattaaatatgtatgtaccacgccatgtaatttgtatgctta

SEQ ID NO: 185311 - DNA, 268 bp, Glycine max
atctgcacataaaaaaccactctacaaaactctccagtaattctgaaaattttatttacttttggtgaaattaacagctctgtgcttgatcaatggcgacaaaggaaggcaaagccataggcatcgatctcggcacgacctacagctgcgtgggcgtgtggcaaaacgaccgcgtcgagatcatccccaacgaccaaggcaaccgaaccactccctcttatgtagccttcaccgacaccgagaggctcatcggagacgcggcgaagaa

SEQ ID NO: 185312 - DNA, 271 bp, Glycine max
gtaaaaaaaaacccttagccaacacaaccatcatggccacctctgctattcagcaatcagcattcactggtcaaactgctctgaagcagctcaatgagttcgtccgcaagaccggtggcgccggcaaaggtcgcactaacatgcgccgcaccgtcaagagtgctcctcagagcatttggtatggccctgaccgtcccaagtacttgggtccattctcggagcagattccatcatacctgaccggagaattccctggtgactacggatggga

SEQ ID NO: 185313 - DNA, 261 bp, Glycine max
aacactcataacacaaagcacaaagcaaagctcatccttgagttaaaaaatggcagcagcttcttccatggctctctcatccccatccttggctggcaaggccgtgaagctgggcccatcagccccagaagtgggaagggtgagcatgaggaagaccgtcaccaagcaggtctcctcaggaagcccatggtacggcccagaccgagtcaagtacttgggcccattctctggcgagccccgtcctacctaaccggtgagttc

SEQ ID NO: 185314 - DNA, 267 bp, Glycine max
ccttcatttcggacattcagatcttcttcgtcctctgaatcaagtttcgactttatttgagtagttttgctctttccttccaaaatgagccggccaatggaggaagatactgcaggtaagaatgaggaagaggagttcaacaccggaccactatctgtactcatgatgagtgttaaaaataatactcaggtactgataaattgtcggaacaacaaaaagcttctgggtcgtgtaagggcttttgacaggcactgcaacatggttctt

SEQ ID NO: 185315 - DNA, 266 bp, Glycine max
gcagcagcatctgttagtgggttgaaaacgttagagaggaactttgcaacaagcatggagacagcctcagactatggagcattcacagagaaattcactttaccaccaaattctgcaccagctcttcctctcaaatcactcacctttgcagtgaaagagattttcgacacggaaggatacgtgaccggcttcgggaatcctgactgggcaaggactcatccggtggctacctctactgctccaacagctctggctctcctcagagc

SEQ ID NO: 185316 - DNA, 267 bp, Glycine max
ggaagttggggagtttgctacatttatggcacttggtttgcacttcgtggtcttgcagcggcgggtaaaacttacactaattgtgctgccattcgcaaaggcgttaaatttctactttcaacacagaaagaggatggtgggtggggagaaagttatctttcatgcccaaaacagatatatgtacctcttgaaggatgtcgatcaacagttgtgcacactgcttgggctcttttgggtctaattcttgctggacaggcagagagagat

SEQ ID NO: 185317 - DNA, 266 bp, Glycine max
ctgaaggcatcgttagcagttttgtagattcaacctcaatttgcagagttacgttctaatatatttacacaagactgataagagaaaatgtctctgattccaagtttcttcggtggccgaaggagcagtgttttcgaccctttctccctcgatgtgtgggaccccttcaaggattttccatttcccagttctctttctgctgaaaattcagcgtttgtgagcacacgagtggattggaaggagacaccagaagcacacgtgttcaa

SEQ ID NO: 185318 - DNA, 266 bp, Glycine max
atggttcgaagaatgctaaaccaattaccaaaactgaaaattgtgaaagcttcttcaatttcttcaaccccccgcaagttcctgaagatgatgaagacatcgatgaagatgtggctgaggaacttcagaatcagatggaacaagactatgacatagggtccacaataagagacaagattattccccatgctgtatcatggtttactggggaggccattcagggggacgagtttggagatctggaggacgatgaggatgatgaagat

SEQ ID NO: 185319 - DNA, 269 bp, Glycine max
ggcatcgttagcagttttgtagattcaacctcaatttgcagagttacgttctaatatatttacacaagactgataagagaaaatgtctctgattccaagtttcttcggtggccgaaggagcagtgttttcgaccctttctccctcgatgtgtgggaccccttcaaggattttccatttcccagttctctttctgctgaaaattcagcgtttgtgagcacacgagtggattggaaggagacaccagaagcacacgtgttcaaggctgata

SEQ ID NO: 185320 - DNA, 256 bp, Glycine max
ggctcgagagctcacaaagtggtccttttaactggctcttattgctgacgttcattgccactttgctcactcctctacattactgtgctcacagttatagggtacaagcaccagacggatcatgctgatgcgtgtggtggggttggcattcttggcattgcatgggtctttggtggcatgatcttcatccttgtctactgcactgctgggcatttcaggaggtcacattaacccagcagtgacatttgggctgttt

SEQ ID NO: 185321 - DNA, 269 bp, Glycine max
gaacatttagatggagggcgtccaggaggagataggatatataatgtctttgacaatcagcttcctgctgctttacggaagcttccacttgaccggcatctttctctccagaatgtaagaaaagtggtgtcagacgctgatggttatcagcctcacttgattgccccagagcaaggttacaggcgcttgattgagggagctctcggttactttagaggcccagctgaagcttcagtagatgcttttacctttgttttgaaagaactcgt

SEQ ID NO: 185322 - DNA, 269 bp, Glycine max
ctttcaaagacggcgtctctcataaacgcctttcttctccgtttccgtctcctcgcttgaattcgctttttgatctgcgaaaatgagagagtgcatctcgactccacatcggtcaggctggtatccaggtcggaaatgcttgctgggagctctactgcctcgagcacggcatcgggcccgatgggcaaatgccaagtgacaagacagttggcggtggtgatgatgctttcaatactttcttcagcgagactggtgctggatagcacgtg

SEQ ID NO: 185323 - DNA, 267 bp, Glycine max
ccctcttctcgcaatccgcactaaaattctagggttccgaaatggacgctgacggaaagatcaagaagggcgccggcggaagaaagggcggcggcccaaagaagaagccggtttcaaggtccgtcaaagccggtctccaattccccgtcggaagaattggccgttatttgaagaaaggaaggtacgctcagcgtgtcggtaccggtgctcccgtatacttggctgcagttctcgaatacctagctgccgaggtgcttgagttggctg

SEQ ID NO: 185324 - DNA, 266 bp, Glycine max
caactcaatttttctctcaaccggcccaatttagcataagcccagcatggccaccgcaacagcagcagccacctcgtccttcatggggacgcgcctcctggaggcccattccggggcggggcgggtgcaggcccggttcgggtttggcaagaagaaagccgccgccccgaagaaagtttccagggggtcgggctctagctccgataggcccctgtggtatccgggcgccaaggcgcccgagtacctggatgggagccttgtcggag

SEQ ID NO: 185325 - DNA, 283 bp, Glycine max
tcggctcgatgtgagagagagtggtgcaagaggactaagcaaggctgtcctctcagcctcaaagaagaggggaaggtggggcccagaagtggaggaaagactccacaggctgggttggcggcaacgactgagcccatccctggttggcaatgtgattgatccttttctgaagagccaccactcccttgcacttggcttcttcaattgggcctctcagcaacccggtttctcccacacacccttcaccttccactcactcctcaagccgatctcccacaccaac

SEQ ID NO: 185326 - DNA, 271 bp, Glycine max
atttggaaatatcctttcgtgcaaggtagctacggattcatctgggcaatcaaaaggctatggctttgttcaatttgataatgaggaatctgcccaaaaagctatagagaagctgaatggtatgctgttgaatgataaacaagtgtacgtgggacccttgcttcgcaagcaagagagagaaagtgctgctgacaaggcaaaattcaacaatgtttttgtgaagaatctatcagaatcaaccaccgatgatgagttgaagaacacttttggt

SEQ ID NO: 185327 - DNA, 263 bp, Glycine max
ctcgagccgcggcaaaggtgatgcttagacctgcttctcccggtactggggttattgcagctgggtctgtgagaattgttctggaaatggcaggagttgataatgctttgggaaagcaactagggagtaataatgcactcaacaatgccagagcgactgttgctgctgtgcagacaatgaagcagtttcgtgaggttgctgaggagcgtgggattccaatggaagaattgtggaagtaatgaaatttgtgaagggaatgtaat

SEQ ID NO: 185328 - DNA, 265 bp, Glycine max
ggcagttactcttgggattgctgcagctgctgctggacttagtatattagctttttctgagatagaatcaatcctccaagttgtaggatcagctgcgctcattcagtttgcaagcaagaagcttttgtttgctgaggaccgaaagcaaaccgtgaaacaacttgatgagttcttgaacaccaaggttgcccctaaagaacttgttgatgaaataaaggatattggaaaggctcttctaccatcctctaccaataataaggctctt

SEQ ID NO: 185329 - DNA, 266 bp, Glycine max
  unsure (1)..(266): unsure at all n locations
ttgagaactangaaggagaagcaaatggcttcctcaatgatctcttccccagctgttaccactgtncaaccgtgccggtgccggcatggttgctccattcactggcctcaagtccatggctggcttccccaccagaaagaccaacaatgacattacctccattgctagcaacggtggaagagtgcaatgcatgcaggtgtggccaccagttggcaagaagaagtttgagactcttcctacctgccagncttgaggtngcaattgga

SEQ ID NO: 185330 - DNA, 270 bp, Glycine max
ctcgtttccctttcgactgtgattgtttgttaactgaacttttcgagcaaaatgtctggacgtggaaaggggggcaagggtttgggaaagggaggagcgaaacgacaccgtaaggtgtctgcgcgataacattcagggaatcaccaagcctgcgattcggcgtttggctcgcaggggtggtgtgaagcgtatcagtggtctcatctacgaggagacacgtggcgtgctcaagatctttctggagaacgtgattcgtgacgccgttaccta

SEQ ID NO: 185331 - DNA, 264 bp, Glycine max
attgaatacattgatttatacaatatttatgctccactatgcaagaatgcaaatctcacatccctgccaaaaaggaactcaattgtgactgatccatgtagtgagtattatgtgtatgcatatcttaatagaaaagatgttcaagaggctctccatgccaatgtaaccaacctcaaacatgactgggaaccctgtagcgatgtcataacaaagtgggttgatcaagcttcaacagttcttccacttttacatgaattcctcaac

SEQ ID NO: 185332 - DNA, 254 bp, Glycine max
gcctttgaccatgggaaggttatatggctttgcttctatagcagagacaattccatctctcttcaggcagtttttggctgcgatgaggcatttgatgaccatggttaaggttgctttccttttagtcattgaactgggggtatttcctttgatgtgtggatggtggctcgatgtttgtaccattcagatgtttgggaagacaatggttcacagagttcagttcttctctgcatcccctttagcaagctcattgg

SEQ ID NO: 185333 - DNA, 266 bp, Glycine max
  unsure (1)..(266): unsure at all n locations
gcgngttgttgtaaagctagncttgttgcagccatggccacccacgcggctctagcttctacaaggatccccactaacaccaagttcccatccaaggcttcacactctttcccaacccaatgcgcctcaaagagacttgaggtgacagaattctctgggctaagatccacttcatgtgtgacatatgctaacgatgctagagaatcttcctttttgatctgtagctcccaactcactcccaagaccaatggatcatcaactcctgt

SEQ ID NO: 185334 - DNA, 268 bp, Glycine max
cagaatggctcccaagggtttaacctttctggctgtgttaatatgcgtttcagcactgtcactgagtccttctgttgcgggggaagggcaaaataatggccttgttatgaacttctacaaggaatcatgccctcaggctgaagacatcatcacagaacaagtcaagcttctctacaagcgccacaagaacactgctttctcctggctcaggaacatcttccatgactgtgctgttcagagttgtgatgcttcactgttgctggactcc

SEQ ID NO: 185335 - DNA, 266 bp, Glycine max
ctttttctttcctgtaatccaggaaatgaaattgctagcttaatattgatctgtagagaagacaagggaacttgcttgctatggcaactctgagcaattcaactaatatcttttggcaagattgtcaagtaggaaggcttgaaaggcagaagctacttaaccaaaagggatgtgttgtatggattactggactcagcggatcaggaaaaagcacattggcatgttccctaagcagagaactgcactcaaagggaaagttatcttat

SEQ ID NO: 185336 - DNA, 266 bp, Glycine max
  unsure (1)..(266): unsure at all n locations
tgttggagagcaatttggaagcaaagtccaaaatttacaaggaccctgctttgtgttatattttcttgatgaacaatgggaggtacattgttcagaagaccaaagatagtgaattgggaaccctcttgggagaagattggatcagaaaacacgctgcaaaagttaggcaattccatgtgcactatcaaagaagctcgtggaataagctattagggannctgaagttggatagtaatgggtcatgccccatattaacttggcaaagt

SEQ ID NO: 185337 - DNA, 266 bp, Glycine max
  unsure (1)..(266): unsure at all n locations
gaagaatcactcccttatccatttccacaccacatcatacccccaancaacgctctctcttcagcctccattctacgctctcccaacctccagtctctgatccgaagagcgaaccataatggaagagtaaattaccggaaaccgaataaccgtttctccgtgaaagcctccgccaaagagattgcctttgaccagcattcccgctctgctatgcaggccggcattgacaagctcgccgacgctgttgggctcactcttgggcccag

SEQ ID NO: 185338 - DNA, 266 bp, Glycine max
  unsure (1)..(266): unsure at all n locations
acaacttctgctacttnctactccaaccgcacttctgttccgcaattatcatgggcaaggtcaagatcggaatcaacggatttggaagaattggccgtttggtagccagagtggctctgcagagagacgatgttgaactcgttgccgttaacgaccctttcatcaccaccgattacatgacatacatgtttaaatacgacagtgttcatggacactggaagcatcacgatgtcaccgttaaggacgagaagacccttctcttcggt

SEQ ID NO: 185339 - DNA, 270 bp, Glycine max
ctcgatcttttctattccctcaccaacgtaccgttgttcaatttcaatttcaatttctcggcagccattgccatgttctttcacggctcaagtgagaagaagagggaaagggaaagtggtaatgagcatggaggcaggcattggagtgatgggcaccaagttgggtatgatgagctatttcgaatccgacggagaggttgttcctgtcactgtcgtgggtttcaaagaaggcaacatcgtcacccagatcaatactgaggccaccgatgg

SEQ ID NO: 185340 - DNA, 255 bp, Glycine max
agcagaatcaggcatgtcatagttaataactatattaacacgttctatgtcaatcccccttcctacttgcacagggtgggaagagctggtagatttggcacgaagggtcttgcaattacttttgtgtcttctactgctgactctgaggttcttaatcaggtgcaatctaggtttgaggttgacataaaggagcttcctgaacaaattgacacttcgacatatatgccaaactgatgacgttttggaactattagg

SEQ ID NO: 185341 - DNA, 252 bp, Glycine max
gctctccagaaccctcgtcaccgcctcaccattttgaggatggtgctggacatccagaagtttttgaataatgctgatcagcagcattttgagtttcaacatttcccttcttcctacctccgactggctgccaccgtgttgctcaacactacaacatgcaaacaatggttcaagatatctgcttagatggccagggaagtaaaattctggcgaggaagttaccagaaagcaagtatcctgtggttcgattat

SEQ ID NO: 185342 - DNA, 252 bp, Glycine max
cgcggtagaaggtatcccatacctgacaaatcagcacctatttacataacaatcggagatggaggaaatctagaaggtcttgcctcaagttatttggatccacagccagaatattctgcattcagagaagcggctatggacacgccacactggagataaaaaacaggacccatgctatctaccactggtatcgcaatgatgacggaaagaaagtcccagctgactctctcgtattgcataaccagtattggg

SEQ ID NO: 185343 - DNA, 251 bp, Glycine max
gtcaattccaacaacaccacaatgcgaagaagaccggcgaggtgttaccggcagataaagaacaaaccgtacccgaaatcccgtttctgccgcggcgtgccggagccgaagatccgaatctacgaagtgggatgaagaagaaaggcgtggacgagttcccgttctgcgtgcacctggtctcgtgggagaaggagaacgtctccagcgaggctttggaggcggcgcgcatcgcatgcaacaagtacatggcc

SEQ ID NO: 185344 - DNA, 253 bp, Glycine max
tggctgttttgaacattcacccaatttgcagagttccaagttatatacatacactgcataattaagagaaaatgtctctgattccaagtttcttcggtggccgaaggagcagtgttttcgaccctttctcctcgatgtgtgggagccctttaaggattttccatttcccagttctctttctgctgaaaattcagcctttgtgagcacacgagtggattggaaggagacaccagaagcacacgtgttcaaggct

SEQ ID NO: 185345 - DNA, 279 bp, Glycine max
acgcgagctcggacatccgctcgagctcgagccgattcaacaggactttccgttcacgacactcccttttatcgtttcacttccgtcgtcgtcgtcttcaattttggatcttcgaatcgaatcgcatcctatgggtagcagcagaggacacacgctctggaggttggacccgacggggttgccgtcatcaccatcgtcaaccctcccgttaattcactttcctttgatgtattgcgcagtttaaaggagagttttgatcaggcgatacagagagatgat

SEQ ID NO: 185346 - DNA, 254 bp, Glycine max
ctttttgagaagaatatggaacgaagtggcggaatggtaacggggtcgcatgacaggaacgaacttgttagagttagacacggttctgacagtgggtctaaacccttgaagaatttaaatggtcagatttgtaaatatgtggtgacaccattggattaacggctactggtgacctctttgttgcttgtcatgagtgtggcttcccactttgtcattcttgttacgagtatgagctgaaaaatgtgagccaatct

SEQ ID NO: 185347 - DNA, 255 bp, Glycine max
tgaaaacccaaagtgcttctctcctctgtctttttctctctcttgctatccttttggctagtcgcactgctgcaagtgcaactccaagaagcgcagtgccaagccaccatgtttcaacattcaacagaagccttttccttccacttttctctttggctttggttcttctgcttaccaggcagaaggagcagcaagtgtagatgggagaggaccaagcatatgggacacctacactagacagcatactgaaaagat

SEQ ID NO: 185348 - DNA, 258 bp, Glycine max
  unsure (1)..(258): unsure at all n locations
gnacangtagttgagaactanganggagaagcaaatggcttcctcaatgatctcttccccagctgttaccactgtacaancgtgccggtgccggcatggttgctccattcactggcctcaagtccatggctggttccccaccagaaagaccaacaatgacattacctccattgctagcaacggtggaagagtgcaatgcatgcaggtgtggccaccagttggcaagaagaagtttgagactctttcctacctgccaga

SEQ ID NO: 185349 - DNA, 252 bp, Glycine max
cagaaatggaaaagtacgagaagctggagaaggtgggagaaggaacatacgggaaagtgtacaaggctcgggagaaggcgagtgggagcctggtggctctgaagaagacgcgtctggagatggacgatgaggtgtccctcccaccgcactacgcgaggtgtctctccttcagcttctctcccaatccgtctacatcgtccgcctcctctccgtcgaacacgtcgacaaggtccccaagtcccagaaatcctc

SEQ ID NO: 185350 - DNA, 251 bp, Glycine max
cagcacaacacaattcactaagctaaaatcacttcatcatggcttcctcgtgtgcttcctctgccattgcagctgttgccatctccacaccaagttcccagaagaatggatcactcttgggaagcacaaagcttcttttcttagtgggaggaaactgaaggtgaacaactttacagcaccagttggagcacgatccagcactacagtttgcgcagttgctgagcctgataggcctctgtggttcccaggca

SEQ ID NO: 185351 - DNA, 250 bp, Glycine max
cggctcgagatttggttatgtggcaccggaatatgctaatacaggtttgttaaatgagaggagtgacatttacagctttggtgttctcctgcttgaagcagttactggaagggatcctgtggactactccgtccttctaacgaggtgaatcttgttgaatggctcaagatgatggtggggacaaggagaactgaggaagttgtcgactcaaggcttgaagtgaaaccatcaatacgtgctttaaagtgtg

SEQ ID NO: 185352 - DNA, 250 bp, Glycine max
cagggtttcctgtgttctcggccatagatgaccttttcgatgaaggcctttacttgcctcctctaaaaggtatcaggagtatcttgcccaggctcgttaggcatattaaggatattcaggaagacattctctttttgatcctcccgcaacaatgaacaaggccagatttttctggttaagggacgaagaatttggaagacagactctcgcgggtcttaacccttgctgcatccaattggtcacggaatgg

SEQ ID NO: 185353 - DNA, 250 bp, Glycine max
ggcaacagaaacaaaagtggcagtattaggtggcatcaccgaagtgcagggagctgtcaacagcgtcgagatcaacaatctcgctcgctttgctgtagaggaacaaaacaaaagagagaattcagttctgagtttgtgagggtgattagtgcacagcagcaagtggtttctggagtgaattactacataacattggaagcaaaagatggtgagattaaaaatgagtataaagcgaaggtttgggagaggg

SEQ ID NO: 185354 - DNA, 251 bp, Glycine max
catgtcctcccaatctgacgccgttggctgtaacttgaaggagacggagctcaccttaggccttcccggcaccaaaactaatggcacaaaacgtggcttctccgacacccttaacacttctcataataaatgttgcgccccacctccaaggaacaagtggtggggtggccgccggtgagggcaagcaggaaaaatgctatgaagatgagttgcaagttggtgaaggtggcggtggatggagctccttatct

SEQ ID NO: 185355 - DNA, 256 bp, Glycine max
atgaagatcacgccggtccagaagcagacccgggccgggcagaggacccggttcaaggccttcgtcgtcgtcggagacaacaacggccacgtcgggctgggcgtgaagtgcagcaaggaagtggcgacagctatcgtggcgcgattattctggcgaactgtctgttatccccgtgaggagggggtactgggggaacaagatcgggaagccccacaccgtcccgtgcaaggtcacggggaagtgcggctccgttacc

SEQ ID NO: 185356 - DNA, 252 bp, Glycine max
ctcaaattggtcatcataagaacaataccaccaacagcaacatcccagtgattgacatgaagcacatctacggtggtgacgagggaaagagggctgagacgctccggctcgtgtcggaggcgtgccaagaaggggttttttccaggtggtgaaccatggagtgagccatgagttgatgaagggggcaagggaggtgtggagggagttctttcaccagccacttgatgtgaaagaggtgtatgctaatacacc

SEQ ID NO: 185357 - DNA, 251 bp, Glycine max
gagaatccgaggcgaagagaagagaaaaattaagatggaggggaaggagcaggatgtgtcgctgggagcgaacaagttcccggagagacagccgattgggacggcggcgcagagccaagacgacggcaagactaccaggagccggcgccggcgccactggttgacccgacggagtttacgtcatggtccttttacagagcagggatagcagagtttgtggccacttttctgtttctatacatcactgtctt

SEQ ID NO: 185358 - DNA, 251 bp, Glycine max
cgccatataattttcttttatttgaaataatgtccgggatcatccacaagattgatgagaccctccatgtgggagggcacaagatcagaggagcacaaaggagaacaccatggtgagcacaaaggtgacacaaaggagaacaccatggtgagcacaaaggtgaacacaaaggagaacaacaccatggggagcacaaggtgggacttgtggataagatcaaggacaagatccatggtgatggccatgacaag

SEQ ID NO: 185359 - DNA, 245 bp, Glycine max
cggctcgagaagcgattttgagggaagaagaagatgaggccgatttttgctgggaacttggagtacgatactcgtcaatcagagcttgagcgcttgttctcaaagtatggaaggattgaccgcgtgacatgaaatctggttttgcttttgtctattatgaggatgagcgtgatgcagaagaagcaattcgtgcacttgacaatgttccatttggtcatgaaaagcgaaggctgtcagtggagtgg

SEQ ID NO: 185360 - DNA, 249 bp, Glycine max
ctcttgtcacattccacacaaacgaagtatgtacacaagggaagaacaacttagctactaaggaaggatcaaagagcttggctcaagcattggcatcaatggctggcttgcgtggttcctctcaggcttgttggaaggtagccttcaggtgagtggctccacacgcttgaatgtggggagtggaagcagggtggcctcagtcacacgtgcagggttcacagttagagcacaacaacaacaagtgagtgg

SEQ ID NO: 185361 - DNA, 243 bp, Glycine max
ctctctcttgcaaaacctaattttcatttcttccctcaactttcaaaatgcgtgagatccttcacatccagggtggccaatgcggcaaccagatcggcgccaagttctgggaggtggtttgcgcggacacgggatcgaccctaccggaaggtacggtggggactcggagttgcagctcgagaggatcaatgtctactacaacgaggccagttgcggtcggttcgtgccgcgcgcggttctcat

SEQ ID NO: 185362 - DNA, 246 bp, Glycine max
atttctatttctaactaattattgtgcttattattattgttgagaaagaaaagaatggcaaagttaataaaattctttgagttgaacacaggggccaagattccttctgttgggttaggcacttggcagctgagcctggtgttgtagccaaagctgtcaccacagccattctggttggatacaggcatattgattgtgctcaagcgtataacaatcaagcagagattggttctgctcttaagaagc

SEQ ID NO: 185363 - DNA, 250 bp, Glycine max
ctacgctaacgggattctgaatgtctccgcagaggacaagactgctggtgtgaagaacaagatcacgatcaccaacgacaagggtaggctgagcaaggaggagattgagaagatgttgaaggatgcaggaggtacaaggcggaggatgaagaggtgaagaagaaggtggaggcgaaaaactcgcttgagaactacgcgtataatatgagaaacacaataaaggatgagaagattggagagaagttgagcc

SEQ ID NO: 185364 - DNA, 249 bp, Glycine max
cacatactttgtgttgccaactataatattaaacggcggtggaatagaatatgccacatttggaaatgaaacttgccctgtcactgttgcgcaatctcgcgatcagttctgcaagggctttccgataccatttcatccccagcccgaatccgtcacatcagcgaaggccttagtttgaacattgggttcactttcgcatccccgtgttcccccgcttctgagtggaccattgtgaaggatcaaccagaa

SEQ ID NO: 185365 - DNA, 256 bp, Glycine max
gctttaccaaattccaatttccaattcaaaaccctaactccgttcgaagcaccaaatcgtgatggcaccaaaggcagagaagaagccagcagagaagaagcccgcggaggagaagaaatcgacggtgggaacaaggctccggcggagaagaagccaaaggccggaaagaagcttccgaaggagggaggcgccggcggagaagggaagaagaagaagagaaacaagaagagcgtggagacatacaagatctacatct

SEQ ID NO: 185366 - DNA, 247 bp, Glycine max
aatatgagcagcagtgcagggaagttggtgtgtgtcaccggtgctgccggttatattgcttcatggattgtcaagttcctacttgaacgtggttacactgtcagggccactgttcgaaacccaaatgatacacgaaggtagaacatttgctaaaacttgaaggtgcaaaggagagactgcacctttttaaggcagatcttttgggtgacaattcttttgactccattgttgagggctgtgatggcgt

SEQ ID NO: 185367 - DNA, 252 bp, Glycine max
gcgtgacaaaagcaaaaggaaagaatatcaacaaggtaaagtagattccttactagacatggcgttgaaggacacattctacatatctcatggatcaccaactttgtccatagatgaatccattctggcaggaagttccttcagtcatggaagaaggacgtgtttcctcaaagaccctcttcaattcttgtcatctctggtcattgggaaaccgcagttcccacggtcaacgtcgttgactccatcaacgac

SEQ ID NO: 185368 - DNA, 251 bp, Glycine max
tagctctttcttcttttcttttatacttaattcgtctttgttatctttctttctttctttccccttttatatttctgggttcgatattgttatcggtttatttgtgcactacttccgccggctattcattatcatggctagggttttggctcagtctattaatgtccctggtctattggctgagcataggcatggtcagcaaaaggaatcaggaaaattaaaaagatcgaccaaaatgatgagtgctttac

SEQ ID NO: 185369 - DNA, 245 bp, Glycine max
ctcgagccgagattaaaggaggtgtagctggtggaagcattctgaggggtgttttgaaggtacatcaattcattgaagttcgtcctggcattgttgttaaagacgagagtggaaatatcagatgcaacccatatactcaagaatagtttcattgtacgctgaacaaaatgagcttcaatttgctgtgcctggaggcctaattggtgttgggacaacaatggatcccactttgacacgcgctgata

SEQ ID NO: 185370 - DNA, 253 bp, Glycine max
  unsure (1)..(253): unsure at all n locations
ctgaagctgatatgcaagtngatcttgacagaaggaggccaggtcagagccgaattacaactcctagaaaggagactgatacatgtaaaatattttcaggagtttccgaaggaatcactactggaactcaattcatgtatctgtacccaatactgatcaaagaggacatgactatagcgagatggcagtagcttataggccctcccatgcagatgctacctatgacntgaagtatggtgtcagatcagttcag

SEQ ID NO: 185371 - DNA, 252 bp, Glycine max
gtttattcttctctcggcgtcgccatggacgaagaagaggtgcgcaagatcttcagcaagttcgacaagaacggcgacggcaagatctcgtgcgcggactgaaggagatgatggcggcgctgggatccaaacgacgtcggacgaggtgaagcgcatgatggcggagctggaccggaacggcgacggctacattgacttgactgagttcggcgagttccactgcggcggcggtggcgacgggagggagctccg

SEQ ID NO: 185372 - DNA, 249 bp, Glycine max
aaaacctttagtctttgtttagttaattcgtgtcgggctcattggatcttggaaagtttatgaatatctatagtattgattcatgaatatgtaactaagttggaattctgggtttgtgaggcttaaaaaaaaaaaaaaaaaaaaaaaaaaaaaaaaaaaaaaaaaaaaaaaaaaaaaaaaagaaaaaaaaaaaaaaagtgggaccgctcccaaaaaagccactctgcccggggaaatttttcgccgagg

SEQ ID NO: 185373 - DNA, 250 bp, Glycine max
cacaaggcagaaagcaagctcatcctagagttttaaaaatggcaggcgcctcctccatggctctctcttccccatccttggctggcacggccgtgaagctgggcccatcagcccccgaagtcgggaggtcagcatgaggaagaccgtcaccaagcaggcctcctccggaagcccatggtacggcccagaccgcgtcaagtacttgggcccattctctggcgagcccccgtcctaactcactggcgagttc

SEQ ID NO: 185374 - DNA, 248 bp, Glycine max
ctaacttaaggtttcaatcctaggaagttggaagtcatggcagcaacattgatggcagctacaacaagttctggtactcttaaagcaactcctttccttggccaaggcaagggtgccaatgccaatgctcttagggatgttgtctccatgggaactgggaagtacaccatgggcaatgatttgtggtatggaccagacagagtgaaatacttgggacccttctcagctcagaccccttcatacttgaa

SEQ ID NO: 185375 - DNA, 248 bp, Glycine max
ccagctacctgcaggactctctaatgaattgaaggactttggagagcaggtgattgatgctgacataaagtcatatggggtaatcataaatacttttgaagagttggagaaggcatatgtgagggatacaagaaggtgagaaacgataaggtgtggtgcattggtcctgtctcattatgtaacaaagatggcttggataaggctcaaagaggcaaccgggcctcaattaatgagcatcattgcttgaa

SEQ ID NO: 185376 - DNA, 227 bp, Glycine max
gtcgatgatgaaaatgaaattggtgaaaacattactgcttctcctttgtgtgaaactcttctgttatgcagtgattggtgctcctcaaacttgtcctgctaacaataggataaatgcggcgattcagatgaatggaaaggggagtttttccctgacattcccaaaattaaatatgagggtccgtcaagtaagaatgtgctttcatttaaatggtataatgcagagga

SEQ ID NO: 185377 - DNA, 246 bp, Glycine max
gattgtttgttgttgtaactcgttcttcttcttttgttgttctgtgtttgtgtttgttttttctcacctgaaaatgtcttgctgcggtggtaactgtggttgcggaagctcctgcaagtgcggcacggctgcggaggctgcaagatgtacccagacttgagctacactgagtcaaccaccaccgagaccttggtcatgggagtggcacctgttaaggctcaattcgagggtgctgaaatgggtgtg

SEQ ID NO: 185378 - DNA, 249 bp, Glycine max
ctgacagttctgaagaagacagcgaggatgaaagtgaagagcaaccctccaaaactcctcagaaaagaggcacggacgtgtagctggttgatgctgccttgtctgaaaagaaagctcctaagaccccattacaccaagagaagaatctggcacttcaaagacactatttgttgggaacttgccatttagtgttgagcgggctgacgtggaagggttcttcaaggatgccggacaagttgttgatgttcg

SEQ ID NO: 185379 - DNA, 241 bp, Glycine max
ctcccatcataaaaaaccgaccctctcctttccctcttcaccaaccaatggctcccccaaaggccgagaagaagcccgcggagaaaaagcccgcagagaaggctccggcggagaagaagccaaggccgagaagaagatatcgaaggaaggaggaagcgagaagaagaagaagagaacaaagaagagcgtggagacctacaagatttacatcttcaaggtgctgaagcaggttcaccccgac

SEQ ID NO: 185380 - DNA, 246 bp, Glycine max
aacattctagtcatcgatatttgaggtggactgggcatagattacgacggttcaaatcgtgtgactctgatatttccgctgagtacagtctcgaggattatgcagtcgcggttgttcacgcggtcagtgtgtgtgcgaccgaaggccgtgaaacacccagttatctgcagcgagagtgggagagccatcgtgtctcatcattcggtcttgattttcgaggcggttggcaccagcagtaccaccggg

SEQ ID NO: 185381 - DNA, 249 bp, Glycine max
gttaaaaggaaggagtagtagtagagtaaggaaaaatggcgcgtaagaagatcagagagtatgactcaaagaggttgttgaaggagcactttaagagactttctggcaaggagttgccgatcaagttgcacaaattactgcatcaactgatttcactgagctacaagagattaaaccctggctttcatcttctaaattggttgtgaaacctgacatgttatttggaaagcgtggcaaaagtggtttggt

SEQ ID NO: 185382 - DNA, 274 bp, Glycine max
ctaaaaggggttcaattctagctagttctattacgtcgtccgccaccatgaacatggcgatcgcgcttctgttcatggttttcgcagtttcatcagctttagacatgtcaataatatcacacgacaacgctcatgcggatagggccacgaggcgcaccgacgaggaggtgatgtcaatgttcgaggagtggctggtgaaacacgacaaggtgtacaacgcgctcggtgagaaggagaagaggtttcaaatcttcaagcacaatctgcgcattat

SEQ ID NO: 185383 - DNA, 278 bp, Glycine max
cgctcgaactcgagccgaatcggctcgagggaattgcgcttcaaggcgtctcctagggctaatccgcatcacgagggtcaccaacggcacgtgcctttggggggccgaggccccctactgctggtcggcaaacggacggcgggcgcacgcgtcgcttctagcccggattctgacttagaggcgttcagtcataatccaacgcacggtagcttcgcgccactggcttttcaaccaagcgcgatgaccaattgtgcgaatcaacggttcctctcgtacta

SEQ ID NO: 185384 - DNA, 265 bp, Glycine max
aacaatttaccagctatacttgttccttttgaaggttagaagtgctacaatacaaacaatggcagctactcaggaagatgtgaagcttttgggtattgtgggaagcccatttgtgtgcagggtccagattgcccttaagttgaagggagttgaatacaaatttttggaagaaaatttgggcaacaagagtgatttgcttctcaaatacaaccctgttcacaagaaggttccagtgtttgttcacaatgagaagcccatagcagag

SEQ ID NO: 185385 - DNA, 265 bp, Glycine max
cattatcactggaccacctccctccttccgaacagctatgttatcttcactgcaacatttgtgacaccgtcctcgctgtaagtgttccttgcacaagcttgttcaagaccgtcacagtccgatgcggccattgcactaacctcctcccagtgaacatgcgagggctgcttatgccatctcccactcaatttcatttgggtcactctttcttctccccatctcataaccttctggaggagataccaaatccctctccaaattttct

SEQ ID NO: 185386 - DNA, 262 bp, Glycine max
aagatattgaagtttatctcaaatgctaagagtgagggtgcaaccattttgactggtgggtctcgcccagagcatctaaagaagggattctttgttgaaccaactgtcataactgatgtaactacctccatgcaaatttggagagaagaagtatttggaccagttctctgtgtaaaaacatttagcactgaggaagaagctattgatctagcaaatgacactgtatatggcttgggttctgctgtaatatcaaatgatctag

SEQ ID NO: 185387 - DNA, 267 bp, Glycine max
ctcgaacaaactggtgctgaacaaaaatttaaggaaattagcaatgcctatgaggtgttatcagatgatgagaaacgatccatatatgacaggtttggagaggctgggcttaaaggttctgcaatggggatgggggatttcagcaatccatttgatctgtttgaatcactgtttgagggcatgaatcgtggcgcaggttccagaggttcttggaatggagcaattgatggtgaagatgagtattacagtcttgttttgaactttaaa

SEQ ID NO: 185388 - DNA, 262 bp, Glycine max
attgaatacattgatttatacaatatttatgctccactatgcaagaatgcaaatctcacatccctgccaaaaaggaactcaattgtgactgatccatgtagtgagtattatgtgtatgcatatcttaatagaaaagatgttcaagaggctctccatgccaatgtaaccaacctcaaacatgactgggaaccctgtagcgatgtcataacaaagtgggttgatcaagcttcaacagttcttccacttttacatgaattcctca

SEQ ID NO: 185389 - DNA, 262 bp, Glycine max
cttctctggttgattcggatctagagtcttcagtttctcctcgatgttcttcgctttcctgttttcaatttcgattctttcgttaatttaataagatgtttgggagggcaccgaagaagagcgataatacgaggtactacgaaatcctcggcgtctccaagaacgcttcgcaggatgatctgaagaaggcttacaagaaagccgccattaagaatcaccccgacaagggcggtgatcccgagaagtttaaagagctggcgca

SEQ ID NO: 185390 - DNA, 265 bp, Glycine max
  unsure (1)..(265): unsure at all n locations
agtagttgagaactaagaaggagaagcaaatggcttcctcaatgatctcttccccagctgttaccactgttcaaccgtgccggtgccggcatggttgctccattcactggcctcaagtccatggctggcttccccaccagaaagaccaacaatgacattacctccattgctagcaacggtggaagagtgcaatgcatgcaggtgtggccaccagttggcnagaagaagtttgagactctttcctacctgccagaccttgatgatg

SEQ ID NO: 185391 - DNA, 263 bp, Glycine max
tagttagtagtgagtaatgagagggaggaagcaaaagtgaagcgatgaatgctccaaatcattacgagcgtttcgtcgtcctgaaggcaccaaaaaggtttcttatgaaacggacacgaagatcatcaatgcgacatccttcaccatcgagagataggagcacactatcggcaacatcctccgcatgcagctgcacagagaccccaatgtcttatttgccgaatacaagcttcttcatcctcttcaatacaaaattattgtca

SEQ ID NO: 185392 - DNA, 267 bp, Glycine max
ataacaacagcacaaagcgggttactgtctgttcaagctaccatctctctctctctttcttagtgcctccttgccagaagttaaaatggcccaagaaactttcctattcacatctgaatcagtgaacgaggggcaccctgacaagctctgtgaccagatctccgatgctgtgctcgatgcatgcttggagcaggaccctgacagcaaggttgcctgtgaaacctgcaccaagaccaacatggtgatggttttcggagagatcacaac

SEQ ID NO: 185393 - DNA, 264 bp, Glycine max
ctaagagcaggttgatcatcttttgggttgtgctctatttttgttccatcacacactcgctacctgcttcaaagcagtgccatttccctgccatcttcaactttggtgactccaattcagacactgtaggtctctctgctgcctttggacaagctgcttctcctcatggagagtcctacttccatcaccctgctggccgttactgtgatggccgtctcattgttgatttcttagccaagaagctggggctgccttatttgagtg

SEQ ID NO: 185394 - DNA, 265 bp, Glycine max
aagatattaagataaggacccatttcctcttctaagctatatagtgctcgtctagccttcccactacaagcaacattgttaaccattctcttcactttaaagttacatagtttttcattgttttacttaatctacaatggctgcttcaacaatgactctctcttcatcatcattggctggccaagctatcaagcttgccccctccacccctgagcttggtgttggaagggttagcatgaggaaaacagcctccaagactgtttcc

SEQ ID NO: 185395 - DNA, 260 bp, Glycine max
catcgagataactagaaacagtgtgatgaaaatgaaggtccttgttttcttcgttgctacacttttcgtagcatggcaatgccatgcgtacgatatgttccctctccgaatgaacactggctatggtgcccgtactccggaggtgaaatgcgcaagttggaggcttgctgtggaagcacacacacatctttggctttgagaccattcctgatgagtgcgttgaagcaacaaaggaatacatccatggcgaacaatataga

SEQ ID NO: 185396 - DNA, 264 bp, Glycine max
gatcgagataactagaaacagtgtgatgaaaatgaaggtccttgttttcttcgttgctacaattttcgtagcatggcaatgccatgcgtacgatatgttccctctccgaatgaacactggctatggtgcccgtactccggaggtgaaatgcgcaagttggaggcttgctgtggaagcacacaacatctttggctttgagaccattcctgaagagtgcgttgaagcaacaaaggaatacatccatggcgaacaatatagatcaga

SEQ ID NO: 185397 - DNA, 217 bp, Glycine max
ttacatgacattggagcaagaaagtatgccttggacgcgttgggccttataggatgcaccccaggtatggtgagtgctcatgggacaaatggatcatgtgctgaagagcaaaatctcgctgcattcaacttcaataacaagcttaaagctcgagtggatcaattcaacaatgatttctattatgctaattccaaattcatctttataaacactcaag

SEQ ID NO: 185398 - DNA, 267 bp, Glycine max
attctcttcactttaaagttacatagtttttcattgttttacttaatctacaatggctgcttcaacaatgactctctcttcatcatcattggctggccaagctatcaagcttgccccctccacccctgagcttggtgttggaagggttagcatgaggaaaacagcctccaagactgtttcctcaggaagcccatggtacggcccagaccgtgtcaagtacttgggcccattctctggtgagcccccatcctacctcactggtgaatt

SEQ ID NO: 185399 - DNA, 272 bp, Glycine max
gctcgatccgaatagaaacacgatctaagactccatggcgacaccaacgacgacgaagagaaaaccggtgttcgtgaaggtggatcagctaaaacctggcaccaacggccacacgctgacggtgaaggtggtcagctccaagccggtgaagacggtgaccactcgcggcggtcgatcgtcggtgctcgctgcgcgcccgtcgcgcatcgccgagtgcctcgtcggagacaaaccggaaccataatcttcacagcacgcaacgaacaggtgga

SEQ ID NO: 185400 - DNA, 257 bp, Glycine max
aagggaagttcacagtgcttgttgccactgttgttgcagctcgtggacttgatattcccaatgttgatttggttatacattatgaacttcccaatgatgctgagacttttgtacatcgttctggccgtactgggcgtgcaggaaaagagggtacagccattctgatgtacaccagtagccagaggagaacagttagatcccttgagcgtgatgtagggagcaaatttgaatttgttagtccaccagctatggaagag

SEQ ID NO: 185401 - DNA, 258 bp, Glycine max
atttctatttctaactaattattgtgcttattattccggttgagaaagataataatgcgccagttactaatatcctttgagttgaacacaggggccacgattccttctggcgtcctaggcacttggcaagctgagcctggtgttgtaggcaaagctgtcaccacagccattctggttggatacaggcatattgattgtgctcaagcgtataacaatcaagcagagattggttctgctcttaagaagctttttggtgat

SEQ ID NO: 185402 - DNA, 284 bp, Glycine max
gctcggaattcggatctagctacatgccaaacgacagcgttctgagtcttttcttcttcgttaccctcttcacatgccttctctctgctacttcccacgatgaccatattttcctaccgagtcaactccatgacgatgactcagtgagttgcactgcaaccgacccaagccttaactacaagccggtgatcggaatcctgacccaccccggcgacggtgcctctggccggctcagcaacgccaccggggtttcttacatcgccgcctcctacgttaaattcgtg

SEQ ID NO: 185403 - DNA, 238 bp, Glycine max
tctcgtcactggagcagcgggctgattggatatgatcttgtccatatgattgctaggggagtgatgctgggtcctgaccagcccgtgatcctccacatgcttgacattcctccagcagcagagtcactgaatggggataaaatggaattggtggatgctgcattccctcttcttaaaggtgttgttgctacaaccgatgtggttgaggcatgcactggggtcaatattgcagtgatgg

SEQ ID NO: 185404 - DNA, 265 bp, Glycine max
actcgagccgcggctcgagctccttctctcgttgattcggatctaacgtcttttttcactcttcagttctcgttgttgaccttcgctttcctgaaactagggttttcaatttcgattcattcgttaataattaaagatgtttgggagggcaccgaagaagagcgataatacgaggtactacgaaatcctcggcgtctcgaagaacgcttcgcaggatgatctgaagaacgcttacaagaaagccgccatcaagaatcaccctgac

SEQ ID NO: 185405 - DNA, 259 bp, Glycine max
ataagttggggagtttgctacatttatggcacttggtttgcacttcgtggtcttgcagcggcgggtaaaacttacactaattgtgctgccattcgcaaaggcgttaaatttctactttcaacacagaaagaggatggtgggtggggagaaagttatctttcatgcccaaaacagatatatgtacctcttgaaggaagtcgatcaacagttgtgcacactgcttggtctcttttgggtcagttcttgctggacaggcaga

SEQ ID NO: 185406 - DNA, 260 bp, Glycine max
gtcaccgcccggcttcctctactcccatagaggaaaccgtgagggccatgaaccatgttattgatcagggcgtgggccttctactggggcactagcgagtggtctgcacagcagatcaccgaggcgtaggctgtggctcagagattggaccttgttgggcctattgttgaacagcctgagtataacctcttgtccaggcacaaggttgagtcggagtttcttcctctgtacaccaactatggcacaggcctcactacatg

SEQ ID NO: 185407 - DNA, 260 bp, Glycine max
actcgagccgaatcggctcgagggttcctttaactctgtcgttcaacgttgccatgctgtgactcacactgcttctcccttacatcacaatgtcaaggacccccaggctgaattgttagacccagctttgaaggggactctcaatgttctgaaatcgtgtgtaaacttgccgacgctggaacgcgttgttttaacctcttctgttgctgcagttgcgtacaacggaaagcctcgaactcccgatgtagtagttgatgaga

SEQ ID NO: 185408 - DNA, 262 bp, Glycine max
actcgagccgaatcggctcgagtgggagggggcacggggcttaacacttttcaaaaacgcttacccgaacgatgttttgatgctgggatagcagaacaacatgctgtaacttttgctgcaggcctagctgctgagggcctcaaacccttttgcgcaatttactcttcctttctacaaagaggttatgatcaggtagcacatgatgtggatcttcaaaagcttccagttagatttgcgttagacagagctggcttagttggtg

SEQ ID NO: 185409 - DNA, 259 bp, Glycine max
aacactcatagcgcagagcacatagcatagctcatccttgagttaaaaaatggcagcagcttcttccatggctctctcatccccatccttggctggcaaggccgtcaagctgggcccatcagtcccagaagtgggaacggtgacacttaggaagaacgtcaccaatcatgtctcctcagggagcccatggtactgcgcagaccgcatcaagtacttgggctcattctctggcgagcccccgtcctacataagcggtgag

SEQ ID NO: 185410 - DNA, 259 bp, Glycine max
ctgctcgagggtgaccacttatttacagttaaagttacaataccaaaaaggattagtacaaaggagcgtgagttgcttgaagaacttgcttctctaggtgacacaagcagacgttcaaaatcccgtcctaggactcactcttccacaggtggtacggaaagtccgaaagctcaaaaggatgaaagtacaacatcaacagtcgaagaaaaaactgaaaaatcagaagatgaaaatgatgtatggatagttgaaggacttg

SEQ ID NO: 185411 - DNA, 278 bp, Glycine max
attcggctcgagattgtttgcttcccaagtctctcgaagcatctttctttctcttcctgcagaagctatccgtgttacttgttcccaagtctccaacaagcaaagtacatggttgatttggaaatccaggtccccagcgcattcgacccgtttgccgaggcgagagaatcagatgcccccggggcaaaggagtatgtgcacatacgaattcagcagaggaatggaaagaagagtctgacaacagtgcaagggctgaagaaggagttcagctacgagaa

SEQ ID NO: 185412 - DNA, 262 bp, Glycine max
cggtggtgaagaaaccaaagatatccttctcttggatgtggctcccctcacccttggaattgaaactgttggtggggtgatgacgaagttgattcccagaaacactgttatccctaccaagaaatctcaggtgttcaccacctaccaggatcagcagactaccgtctccattcaggtttttgaaggtgagaggagtctcacaaaggattgccgtctgcttgggaaatttgaactgtctggaattcctccagctccaaggggt

SEQ ID NO: 185413 - DNA, 259 bp, Glycine max
cttgtattcacatttcaacaactatagccatggctttctccacctcaaaggcactacttgtccttgcctgctccttctgcctatttgcatcttttacttttggacgcgatttctccattgtgggctattcatcggaggacttaaagtccatggataagctcattgaactctttgaatcatggatatcaagacatggcaagatttaccaaagcattgaggagaagctgcataggttcgagattttcaaggacaacctaaa

SEQ ID NO: 185414 - DNA, 249 bp, Glycine max
caaagaagtacggtgacactggttttgctggacagttgaatataacatttacaggaagtgctgggcagtcatttgcatgctttctgactcctggaatgaacattcgccttgttggagaggctaatgattatgttgggaagggcattgctggaggtgagttggttatcactccagtcgacaagaccgggtttgaacctgaggatgcagctattgtagggaacacttgcttgtatggtgcaatggtggaca

SEQ ID NO: 185415 - DNA, 255 bp, Glycine max
attttgccgcaaatgctatgctcgtctgcaccctagggctgtgaactgccgtaagaagaagtgcggtcatagtaaccagttgaggcctaagaagaagatcaagtaaattctgggtgggatattgttggtctctactttcgttttgtttgtcttagaacagtgacttgtttggtatttatcgtttctggttttgattaatgttaattgttttgagacaatagttttgaactagtcaattatatttttatgatgcca

SEQ ID NO: 185416 - DNA, 256 bp, Glycine max
ctataagctagtttatcgtgaggagaatatgaagttgtttgttttctttgttgctgcagtagttttggtagcatggccatgccatggcgcaggctaccaaaggttccctctccgaatgaaaactggctatggtgagcgttcttcggaggtaaaatgcgcaagttttaggcttgctgtggaagcacacaacatccgagcctttaaaaccattcctgaagagtgcgctgaaccaacaaaggactacattaatggcgaa

SEQ ID NO: 185417 - DNA, 256 bp, Glycine max
  unsure (1)..(256): unsure at all n locations
caagtagttgagaactaagaaggagaagcaaatggcttcctcaatgatctcttccccagctgttaccactgtncaaccgtgccggtgccggcatggttgctccattcactggcctcaagtccatggctggcttccccaccaggaagaccaacaatgacattacctccattgctagcaacggtggaagagtgcaatgcatgcaggtgtggccaccagttggcaagaagaantttgagactctttcctacctgccaga

SEQ ID NO: 185418 - DNA, 257 bp, Glycine max
cttgctcaggttgtaagtgatccaagcctaacaaaatctggtgtttactggagctggaacaaagcatcagcttcgtttgaaaaccagttgtctcaggaggccagtgatacagagaaggctcgtaagatctgggagattagtgagaaacttgttggttttgcctaagtgggaggagcctccaacatcccatgttgttctagagaccttgcacttggcatggaggaagaaaatgacgtctcaaaagagtggatagataa

SEQ ID NO: 185419 - DNA, 260 bp, Glycine max
agaaactgaggacttagctagtagttagagatgcctgagttttgcgtgacaggtggtactgggttcatcgcatcttacctggtcaaggccttactagagaagggtcacacagtgaggaccaccgtgagaaacccaggggatgtggagaaggttggttttctgactgaactaagtggagccaaagagagactgaagattttgaaagcagatctattagtggaaggaagctttgatgaggcagtgagaggagttgatggtgt

SEQ ID NO: 185420 - DNA, 260 bp, Glycine max
cgaaagtgttgtttttctttttttcatttgcattgcaaagcaaaaaccttgcaaattgcaatggcttccaacaaggttattgccaccatcttggttctttctctccttgcctactcaacatcattcaccaatgcatgtggcacatgccacccaaaacctactccttctccccctcctccatcagggaagtgccccaaggacacattgaagctaggggtgtgtgctgatgttctaggacttgttaatgttgttgttggttc

SEQ ID NO: 185421 - DNA, 256 bp, Glycine max
gagattgcatataggtttttagtgctgaagcatcaaaatggggagatattcaataccctttatgggtgttctgctactgttctgtctggtttcatcttcagaggcagaatatttgaagtataaagaccctaaggcgccactgaatgtcagaatcagtgacttgttgaagcgaatgtctctcgaagaaaagataggccagatgacacagattgaaaggagtgttgctactcctgatgtgatgaacaagtacttcatt

SEQ ID NO: 185422 - DNA, 257 bp, Glycine max
  unsure (1)..(257): unsure at all n locations
ctgggccttttgttctcgtgtcaatttctaaatccaccaccacaccctcnncttctattctctattattattatctcccacacccttcactctctctcactcttctctcgaatcttccaccgcaatggccaccnctgccgagaaactctccgctctcaaatccgccgtcgccggattgaacgaaatcagtgagaatgagaagaacggattcatcagcctcgtcggccgctatctcagtggcgaaggcagcatgtgga

SEQ ID NO: 185423 - DNA, 254 bp, Glycine max
gttcgagaccatggccataagccccttcaagcttgaacatcccttggaaagaaggcaggctgagtctgctcgcattagagacaagtatcctgatagaatacctgtgattgttgagaaagctgaaagaagtgacatcccagacatcgataagaagaagtaccttgtcccagcagatttgactgttggccaatttgtttatgttgtccgtaaaaggattaaggtcagtgcagagaaggctatttttgtttttgtca

SEQ ID NO: 185424 - DNA, 262 bp, Glycine max
atttgggattgggaaggcgagggattgcgctgcgtctcttcctcttctctttcgattcatccctcattcataatcttccaatccaacaacctcagcctcacactcacacatacacacatctgaacgcgtatcgtccctcccatggcttcaaagcgcatcctcaaggagctcaaggacttgcagaaagacccaccaacttcttgcagcgctggtccagtagctgaggacatgttccattggcaagcaacgattatgggtcctg

SEQ ID NO: 185425 - DNA, 272 bp, Glycine max
gtttgctacctaaaccctagtctccatacatcaacttgggaggttaaagagacggcaacgttgtgctgtccgccttgaccgagccagagcttcgtcttggccctcgattttgccctgtaaaactaatcccagtcacaacagaaataatcaatggcaccgaaacagaccaaggctgagaagaagatcgcttacgatgcgaagctgtgcgacctaatggaggagtacggccaaatcctcgttgtaaactccgacaacgtgggatcgaaccagct

SEQ ID NO: 185426 - DNA, 268 bp, Glycine max
cggctcgagtacgaaactactctacaaacacaacaaaactctccaattctgaagattttcttatctcttgtctttgaaactagaagctccgtgattgatcaatggcgacaaaagaaggcaaagccataggcatagacctcggcacgacctacagctgcgtgggcgtgtggcaaaacgaccgcgttgagatcatccccaacgaccaaggcaaccgaaccaccccctcctatgtgcgccttcaccgacaccgagaggctcatcggagacg

SEQ ID NO: 185427 - DNA, 260 bp, Glycine max
gagaactttggtaggttcataaaattaggttgcattgaagacactgcaaatcataagcgcattacaccactattgaggttttacacttccaaaagtgaggaggagcttaaaagcctagatgattatgttgaaaatatgggtgaaaaccaaaaggctatcttttatctagcaactgacagcttgaagagtgcaaagactgctccatttttggagacattggttcaaaaagatattgaggttctttatttggtcgaacctat

SEQ ID NO: 185428 - DNA, 261 bp, Glycine max
  unsure (1)..(261): unsure at all n locations
aacaagtagttgagaactaagaaggagaagcaaatggcttcctcaatgatctcttccccagctgttaccactgtccaaccgtgccggtgccggcatggttgctccattcactggcctcaagtccatggctggcttccccaccaggaagaccaacaatgacattacctccattgctagcaacggtggaagagtgcaatgcatgcaggtgtggccaccagttggcacgaagaagtttgagactctttcctacntgccngacct

SEQ ID NO: 185429 - DNA, 257 bp, Glycine max
ctagagtcttcagtttctcctcgttgttcttcgctttcctgttctcaatttcgattctttcgttaatttaataagatgtttgggagggcaccgaagaagagcgataatacgaggtactacgaaatcctcggcgtctccaagaacgcttcgcaggatgatctgaagaaggcttacaagaaagccgccattaagaatcaccccgacaagggcggtgatcccgagacgtttaaagagctggcgcaacttatgaggttctg

SEQ ID NO: 185430 - DNA, 261 bp, Glycine max
cctcgagccgaatcggctcgaggttggtgtagctagcgagggaactatatagggggaagactttattcattcattaagacggcatcggagcttcaattgcccccaggcttcagattccatccaacggaccaggcgctggtgttgcactatctctgccgtaaatgcgcatcgcagcctatcgccgttcccatcatcgccgaaatcgacctctacaaatacgacccctgggacctacccggattggcttcctacggagagaaa

SEQ ID NO: 185431 - DNA, 264 bp, Glycine max
ttcctctcccagacaaacacatggctttgcccaatcagcaaaccgtcgattaccccagcttcaagctcgtcatcgtcggtgacggtggcacaggaaagacaaccttcgtgaaaaggcatctcactggtgaattcgagaagaaatatgaaccgaccattggtgtggaggttcatcctttggattttttcactaactgcggaaagattcgattctattgttgggatactgctcgggcaagagaagtttggcggcctcagagatgga

SEQ ID NO: 185432 - DNA, 259 bp, Glycine max
ctggaattcccaacagtatctctatctaagggctctatggttgctgaagtactgtccctggctttaaataaatgtgaaatagaaggaatctgattccttcatcagttgtgtatgtttaagttatgtatttggagtggctgaatgtacttgtatttgtcattaataaaccatgtttgtgtaatggaaaccaaaataataaatgcaatcatgcaggtttgaactttttaaagttaaaaaaaagaaaaacatgtaacttaaa

SEQ ID NO: 185433 - DNA, 296 bp, Glycine max
  unsure (1)..(296): unsure at all n locations
atggggatgatgagcatatagtattcggctcgatgtgaaggcatcgttagcagttttgtagattcaacctcaatttgcagagttacgttctaatatatttacacaagactgataagagaaaatgtctctgattccaagtttcttcggtggccgaaggagcagtgttttcgaccctttctccctcgatgtgtgggaccccttcaaggattttccatttcccagttnctctttctgctgaaattcagcngttgtgagcacacgagtgggattggagggagacaccagaagcacacgtg

SEQ ID NO: 185434 - DNA, 265 bp, Glycine max
cttctccaacatgccaaacgacagcgttctgagtcttttcttcttcgttaccctcttcacatgccttctctctgctaattcccacgatgaccatattttcctaccgagtcaactccatgacgatgactcagtgagttgcactgctaccgacccaaaccttaactacaagccggtgatcggaatcctgacccaccccggcgacggtgcctctggccggctcagcaacgccaccggggtttcttacatcgccgcctcctacgttaaa

SEQ ID NO: 185435 - DNA, 261 bp, Glycine max
caaaaatggcggcgaaacttcaaatatttacgggattgccccccgcgccatttcaatcttcttcttcctccactctctgcgtactcaagaagcctctcactacctccttcttcggcaccgcgcgagtggaagttctgaaacttagagtgatgaggattgtgaagcctacgcgtggcggaggtgctctcggtgctcgcatgaacctctttgacaggttcgccagagttgtgaagtcgtacgcaaacgctgtcttaagttcgt

SEQ ID NO: 185436 - DNA, 260 bp, Glycine max
ataccagatggcggaagtggacgagtttgaggacaagcagaaggagttggaagggatctgcaaccccatcattgctaagatgtaccagggtgctgctggacctggtgcgagatgttcctatgggtgctgacatgcctgctgctggtgctggacctaaaattgaagaagttgactaagcttgtggaatatcactaacttcaactttgggttgcttctttcttattaggtgctctgccagagatgtaagctttaataatgta

SEQ ID NO: 185437 - DNA, 261 bp, Glycine max
gagaaatggaaaagtacgagaagctggagaaggtgggagaaggaacatacgggaaagtgtacaaggctcgggagaaggcgagtgggagcctggtggctctgaagaagacgcgtctggagatggacgaggagggtgtccctcccaccgcactacgcgaggtgtctctccttcagcttctctcccaatccgtctacatcgtccgcctcctctccgtcgaacacgtcgacaaggtccccaagtcccagaaatcctcctccaacc

SEQ ID NO: 185438 - DNA, 261 bp, Glycine max
ctttcgtcttaatttgttctcttcagccatggcgatggtgcaagatgaacgatgcgttcagaaaagctactggattgaacatacgacggacttgtccgtagagtcaatgatgctcgattccaacgcctctgatctcgacaaggaggagagacccgaagttttgtccctactaccaccatatgaaggaaaatcagttgtagaacttggagcaggtattggaagattcacagttgaattggccaagaaagctggccagttact

SEQ ID NO: 185439 - DNA, 258 bp, Glycine max
acatgggggaccttcaaaagcgtgacctgtttttgggtctattcattgaggtggcaaaagagagagccctaccagttggaccagaggaaggtggttttggaatgtcactatgatcttctgtatggacgagctggattcttatggggtgcattgttcgtgaacaagcacctaggagaagatgcagtgcccaaagacattttgatgcttattattgatgcggtgttggctggtggtagagcaggagcatctgatattaaa

SEQ ID NO: 185440 - DNA, 289 bp, Glycine max
  unsure (1)..(289): unsure at all n locations
cgtacgtatcctanttcggctcgagccacttttcagttacaaagcatttcattgttttacaatatacaacactacaatggctgcttcaacaatggctctctcttcatcatcattggctggccaagctatcaagcttgccccctccacccctcagcttggtgttggaagggttagcatgagacaaacagcctccaagactgtttcctcaggaagcccatggtacggcccagaccgtgtcaagtacttgggcccattctcaggtgagcccccatcctacctcactggtgaa

SEQ ID NO: 185441 - DNA, 253 bp, Glycine max
ggtgtccggaaatcgttcctatcatcacttctcaaatctcgaaccctctcgttcgtgccgatcactaggtcacacttcatcaatggcgggtagaggcaaaaccctaggatccagcgccgctaagaaggccacctcaaggagcagcaaagccggcctccaattccccgtcggtcgtatcgccaggttcctcaaggccggaaagtacgccgagcgcgtcggcgccggagcccccgtctacctcgccgcgttctcg

SEQ ID NO: 185442 - DNA, 259 bp, Glycine max
cgagataactagaaacagtgtgatgaaaatgaaggtccttgttttcttcgttgctacaattttggtagcatggcaatgccatgcgtacgatatgttccctctccgaatgaacactggctatggtgcccgtactccggaggtgaaatgcgcaagttggaggcttgctgtggaagcacacaacatctttggctttgagaccattcctgaagagtgcgttgaagcaacaaaggaatacatccaggcgaacaatatagatcag

SEQ ID NO: 185443 - DNA, 259 bp, Glycine max
ggagtttacacaagttctgattgaagagttatctctgaatttacaggctttacatgacattggagcaagaaagtatgccttggctgggttgggccttataggatgcaccccaggtatggtgagtgctcatgggacaaatggatcatgtgctgaagagcaaaatctcgctgcattcaatttcaataacaagcttaaagctcgagtggatcaattcaacaatgatttctattatgctaattccaaattcatctttataaaa

SEQ ID NO: 185444 - DNA, 254 bp, Glycine max
cacctctccaaaacttgtagctgaggatattattactcagcaaaaattcatggaagttccaatcaagtatccggttaaactcacccttagggtggttcttacttgtatcatggcggccaccggtgggttgatttttggctatgaccatggtgtttcaggtggagtgacctccatggattccttcctgaagaagttcttcccatctgtatatgaaaaggagtctaacgtgaagccttcttcaaaccagtactgca

SEQ ID NO: 185445 - DNA, 255 bp, Glycine max
gtttcccaacctccattgcctccgcttctacctcgctaccatgatcattcctgagaagaaccgcaaggagatctgcaaatacctcttccaagagggagtttgctttgcgaagaaggacttcaatttggcgaacaccctgagattgacgtgccgaatctgcaggtgattaagctgatgcagagtttcaagtctcgcgagtatgtgagggagacttttgcttggatgcactattactggttcccaccaacgatggaa

SEQ ID NO: 185446 - DNA, 253 bp, Glycine max
ggataagatacatatccttgtcaacctaaatggttatacaaagggtgccagaaatgagatatttgctatgcaacctgcaccaattcaagtttcatatatgggattccctggaacaactggggctacttacatagactacttagtcactgatgagtttgtttcaccactacggtatgcaaatatatattcagagaagattgtacatctaccgcattgctactttgtaaatgattataaacagaaaaatcaggat

SEQ ID NO: 185447 - DNA, 254 bp, Glycine max
ctcaggacgaaggtatttcacccaaatataaatagcaatggaagcatttgccttgacatattgaaggagcagtggagccctgcgctaactatttcaaaggtgttgctctcaatttgttccctgttgacggaccctaatcctgacgatcctttggtccctgaaattgcccacatgtacaagacagacaggaacaagtacgagtcaactgccagaagctggacccagaaatatgccatgggttaagtgacttgtgg

SEQ ID NO: 185448 - DNA, 255 bp, Glycine max
cctcataacacaaagcacaacgcaaagctcatccttgagttacaaaatggcagcagcttcttccatggctctctcatccccatccttggctggcaaggccgtgaagctgggcccatcagccccagaagtgggaagggtgagcatgaggaagaccgtcaccaagcaggtctcctcaggaagcccatggtacggcccagaccgagtcaagtacttgggcccattctctggcgagccccgtcctacctaaccggtgag

SEQ ID NO: 185449 - DNA, 261 bp, Glycine max
cctactcttagccgcagatctctcagggcttgcatcttctcaggtaagttgtgaagatgtacacatcaaggaagaaaatccacaaggataaggatgctgaaccaactgagtttgaagagtcagttggacaggcattgtttgatctggaaaataccaaccaggagcttaaaagtgatctgaaggatttatacataaactcagctgtgcaagttgatgtttctgggaaccgcaaggctgttgttattcatgtcccttacagat

SEQ ID NO: 185450 - DNA, 258 bp, Glycine max
ttcaacttgggtaccattgcgaggtccgggaccaaggagttcatggaggcgttgcaggccggtgctgatgtcagcatgatagggcagttcggtgtggggttctactctgcttaccttgttgcagagaaggtcattgttaccaccaagcacaatgatgatgaacagtacatttgggagtctcaggctggtggctctttcactgttactagggacactgatggcgagcaactcggaaggggaaccaagatcacctcttcc

SEQ ID NO: 185451 - DNA, 267 bp, Glycine max
tggaacgagcagcaaagagatacactgaagtcaagaaacaagctgatccaaaagcaagcacaaaacttattaccttccatggtgatctgccatacacatcatctgagatcatagagaagctagagtctcttgatgaagaggatatagtaggatcaggaggatttggtacagtttaccggatggtgatgaatgattgtggtacatttgctgttaaacagattgatcgaagttgtgaagggtctgatcaagtgtttgaaagggactaga

SEQ ID NO: 185452 - DNA, 258 bp, Glycine max
cgtttgctggtgttggagaacgaacccgagagggtaatgacttgtacagagaaatgattgagagtggtgtcattaagcttgatgataagcagagtgaaagcaagtgtgctcttgtgtatggtcaaatgaatgagccccctggtgcccgtgcccgtgttggtcttactgggcttactgtggctgaacacttccgtgatgctgaagggcaagatgtgcttcttttcgtagacaacattttccgttttacccaagctaact

SEQ ID NO: 185453 - DNA, 255 bp, Glycine max
cacttcccttctccaacttgccaaacgacagcgttctgagtcttttcttcttcgttaccctcttcacatgccttctctctgctacttcccacgatgaccatattttcctaccgagtcaactccatgacgatgactcagtgagttgcactgcaaccgacccaagccttaactacaagccggtgatcggaatcctgacccaccccggcgacggtgcctctggccggctcagcaacgccaccggggtttcttacatcg

SEQ ID NO: 185454 - DNA, 257 bp, Glycine max
ctggttgattcggatctagagtcttcagtttctcctcgttgttcttcgctttcctgttttcaatttcgattctttcgttaatttaataagatgtttgggagggcaccgaagaacagcgataatacgaggtactacgaaatcctcggcgtctccaagaacgcttcgcaggatgatctgaagaaggcttacaagaaagccgccattaagaatcaccccgacaagggcggtgatcccgagaagtttaaagagctggcgca

SEQ ID NO: 185455 - DNA, 256 bp, Glycine max
gcatttgtgagcacccgtgtggactggaaggagaccccagaggcgcacgtgttcaaggcagatattccaggactgaagaaggaggaagtgaaggtgcagattgaagacgataaggttcttcagataagcggagagaggaacgttgagaaggaagataagaacgacacgtggcatcgagtggagcgtagcagtggcaagttcatgagaaggttcagattgccggagaacgctaaagtggagcaagtgaaggcttcta

SEQ ID NO: 185456 - DNA, 257 bp, Glycine max
attcgttgttgttgttctaaaacgtccacacattctccgtcgccacaacaacaatggctccgaagaaaggtgtgaaaggttccgttgtagcagcgaagaagaaggttcaggagaaggtgacgaatcctttgttcgagaagcgtccgaagcagttcgggatcggaggcgcgctgccgccgaagcgggacctgacgcggttcgtgaagtggccgaagaacgtccaaatccaacgcaagaagcgcatcctcaagcagagg

SEQ ID NO: 185457 - DNA, 262 bp, Glycine max
ggctctgtcacagaagatattcttaccggatttaagatgcatgcccggggttggcggtctatatactgcatgcctaagcgcccagcgtttaaaggttctgctcccatcaatctttcggatcgtctaaaccaagtgcttcgatgggctttaggttccgtggaaattcttttcagccgacactgtcccatctggtatggttatggtggaaggttaaagtggcttgaaaggtttgcttatgtgaacaccaccatctatccagtca

SEQ ID NO: 185458 - DNA, 256 bp, Glycine max
gggattctgtgtttctgagggaaggctaccaagattctcagttggtggagaaggaccggttgttgcttataaaggaaaagcttcgtactctggttaatgttccacggtttcccaagggacctgctcgcaggatagttgaagatagcatgagaggaagtgatagcagagaagatgaaagtggtgaagaggaagaagaatggttagaagatgttgataatttaatgaatgatgatgggtttgtgacatgatgatggtg

SEQ ID NO: 185459 - DNA, 254 bp, Glycine max
gcgaagacggattacatgtacttcgacccgtcggattcaatcccgaagctgcacacggactcgagctgttcggagcaggtggtatcgccggaattcgcgagcgaggtgcaaagcgagcccaagtggaacgagtgggagaaaagcctcgaatttccatttaattacgtggatgccactctcaacaacagcttcatggcccaattccagggcaataatcagatgttgtcgccgctgcaggacatgttcatgtactg

SEQ ID NO: 185460 - DNA, 251 bp, Glycine max
gtgcggcggtccaaacactcttctctgcagcttttgactacaactcccttcaccatggctgaacaaaccgagaaagcttttctgaagcaaccaaaagtgtttctcagcacaaagaagactgggaagggaaagagacctggaaaaggtgggaaccgcttttggaagtccattgggcttggatttaagactcccagggaagccatcgaaggaacctatattgacaagaagtgccccttcactggcatgtttcc

SEQ ID NO: 185461 - DNA, 257 bp, Glycine max
cttcccttctccaacatgccatacgacagcgttctgagtcttttgctcttcgttaccctcttcacatgccttctctctgctacttcccacgatgaccatattttcctaccgagtcaactccatgacgatgactcagtgagttgcactgcaaccgacccaagtcttaactacaagccggtgatcggaatcctgacccaccccggcgacggtgcctctggccggctcagcaacgccaccggggtttcttacatcgccgc

SEQ ID NO: 185462 - DNA, 254 bp, Glycine max
atagattaaagaggaggtgtgctgagacaggtagggtttcgagttacagccgcaccttgattcagagcagagcgaccttgaagagctatggctgtcggaaagaataagaggatttccaagggaaagaagggtggcaagaagaaagccgctgatccctttgccaagaaggactggtacgatatcaaggccccttccgtctttcaggtcaagaatgttggcaaaaccctcgtctctcgtaccagggaacaagattg

SEQ ID NO: 185463 - DNA, 253 bp, Glycine max
ctcgagataactagaaacagtgtgatgaaaatgaaggtccttgttttcttcgttgctacaattttcgtagcatggcaatgccatgcgtacgatatgttccctctccgaatgaacactggctatggtgcccgtactccggaggtgaaatgcgcaagttggaggcttgctgtggaagcacacacacatctttggctttgagaccattcctgctgagtgcgttgaagcaacaaaggaatacatccatggcgaacaa

SEQ ID NO: 185464 - DNA, 256 bp, Glycine max
ctttgttgatcgagataactagaaacagtgtgatgaaaatgaaggtccttgttttcttcgttgctacaattttcgtagcatggcaatgccatgcgtacgatatgttccctctccgaatgaacactggctatggtgcccgtactccggaggtgaaatgcgcaagttggaggcttgctgtggaagcacacaacatctacggctttgagaccattcctgaagagtgcgttgaagcaacaaaggaatacatccatggcga

SEQ ID NO: 185465 - DNA, 258 bp, Glycine max
caatcagcaggattgatgatgccgtggcaagaatcttaagagtaaaatttgtcatgggcctatttgaaaatccatatgctgatccaagcctcgcaaaccaactgggtagcaaggaacatagagaaatagcaagggaagctgtacggaaatccctagtgttgctaaagaatggtaaatcttacaagaaaccactgcttcctcttcccaaaaagtccacaaaaatactggtagcaggaagtcatgctaacaattgggtta

SEQ ID NO: 185466 - DNA, 257 bp, Glycine max
ccattctactagcaagattgttccaaattctgaaattcagaatataactactgagatggtgaagacaccagaggtctcaagatggatggatcaagtcatccctacaatagccccttgtgatgcagcagaaccatggcaactagggtttcaagatgcagcaacacctataatgcaaggaataatagacttacatcacgatatctttttcttcgtcattcagattggagtttttgtatcatgggtcttgcttcgtgctt

SEQ ID NO: 185467 - DNA, 259 bp, Glycine max
ctcagttgtgtatcgttgcagctctactagctagggtttcgcaagtgcgatcgaagaagaacgatggcgatggctgctgctctgcgtcgcgaaggaaggcgtttgacccaaccaatcaacgccctccgttcctctctcatctctcaagaccaatcccctcatggcgcgcgcttcatttccactcaagtggtgagaaaccgaatgaagagtgtgaggaatatccagaagatcaccaaggccatgaagatggttgccgcat

SEQ ID NO: 185468 - DNA, 260 bp, Glycine max
acacattaacctttctcattccccatctcctcaccttattcagccactgctaatttctaggattccgaaatggacgctggcggaaagatcaagaagggcgccggaggaagaaagggcggcggccctaagaagaagccggtttcaaggtccgtcaaggccggtctccaattccccgtcggaagaattggccgttatttgaagaaaggaaggtacgcccagcgtgtcggtaccggtgctcccgtttacttggccgcagttct

SEQ ID NO: 185469 - DNA, 286 bp, Glycine max
actcgagccgaatcggctcgaggttcactgtcactttacacaaacctaacactttcttcactctgtattccttcttcctcgcatcaatggagttggacggcgttctcctcggcatgtgaaatcctctcctcgacatctctgccgtcgtcgacgacgctttcttgcaaaaatacggtatcaagttgaacgatgcgattctcgccgaggataaacacaaacctatgtatgaagaattgggtaacaatcctactgtggagtacattgctggaggtgctactcagaattc

SEQ ID NO: 185470 - DNA, 268 bp, Glycine max
gctcggcagtcggctcgagccggatgacgagcatcaaactctacttcttcgatttccattgcgaacgtatactatctccttcgactttctcatcaccttcttcgctcttcgatctacgtccggtgactgctccggataccaccaccaccactcgccgatggccacgctcggaggcttacacgactcgcactgctctcagaacagcgtcgataccgaagcccttgctcgatgcgccgtagacgaacactacaagatgcagtcttcgctt

SEQ ID NO: 185471 - DNA, 282 bp, Glycine max
ctcgagccgtcaaaacactcataacacaaagcacaaagcaaagctcatccttgagttaacaaatggcagcagcttcttccatggctctctcatccccatccttggctggcaaggccgtgaagctgggcccatcagccccagaagtgggaagggtgagcatgaggaagaccgtcaccaagcaggtctcctcaggaagcccatggtacggcccagaccgagtcaagtacttgggcccattctctggcgagcccccgtcctacctaaccggtgagttcccaggcg

SEQ ID NO: 185472 - DNA, 276 bp, Glycine max
cttcattctcatctttctctcttctctctccacccaaaccctaactcccgaccctgttcccctctcgtatccgtcatgaaaggaggaaagtccaagaccgaatctaagagagccgatcccaaacttgctgtgaataagaagggagccgccaccaaggctaggaaacccgccggcaaggggaaggcagcgaaagaccctaacaagccaaagaggcctccaagtgctttcttcgttttcatggaggagttcaggaaggtattcaacaaagaacatcct

SEQ ID NO: 185473 - DNA, 285 bp, Glycine max
tggagaatgaaaactgaaacagagccaaatgaaaccgagtcagattggagcgagttgactcgcgagtgcctcatcaacatcctctctcgactcagcgtcgaggatcgatggcgcggcaccatgctcgtttgcaagtcatggttcagcgtcttcaaggaaccctctcttcacttcgtcttcaacctcgaccctcaattcgactcgcccaccgaatcaactcgctggtggacccccgagttcgaggccaagatcgataacatgcttcgatctgtcgtcgaatgggcc

SEQ ID NO: 185474 - DNA, 284 bp, Glycine max
gtttctcctcgttgttcttcgctttcctgttttcaatttcgattctttcgttaatttaataagatgtttgggagggcaccgaagaagagcgataatacgaggtactacgaaatcctcggcgtctccaagaacgcttcgcaggatgatctgaagaaggcttacaagaaagccgccattaagaatcaccccgacaagggcggtgatcccgagaagtttaaagagctggcgcaacttatgaggttctgagtgaccctgagaagcgtgagatatatgatcagtatggt

SEQ ID NO: 185475 - DNA, 276 bp, Glycine max
ggctgacggggtggttctgttggatacatgggccagcatgtttgggatgagggttaggattgcattagctgaaaagggtgttgagtatgaatacaaggaagaaaatctcaggaacaagagtcctttgcttttgcaaatgaacccaattcacaagaaaattccagttctgatccataatggcaaaccaatttgtgaatctgcaattatagtgcagtacattgatgaggtctggaatgataaagctccaatcttgccctctgacccttatgagagagc

SEQ ID NO: 185476 - DNA, 282 bp, Glycine max
ctccttcaaaaagcttctcatccatggcgaaaacgctcatttcgtctcaatcgttcatcggcacaccgctcccctcactccctcgccaccacctcccccaccgcaccaggctcgtcgccaccaaagtcctcgtcagcctccacgaaattcccccaatccactccataagccgcaacattgacttcgccggaatcgtgactagagccgaaggccttctctacacgctcgccgatgctgcggttgcggcggaccctgcggttgctgcggactctgcggcttcca

SEQ ID NO: 185477 - DNA, 285 bp, Glycine max
tcgggaccgtagcagcggaagctctagcttgggtagcgaatcacaatggcgagaggattaaagaagcatctgaagaggcttaatgccccaaagcattggatgcttgacaaactgggtggtgcatttgctcctaagccctcatctggaccacacaaatcgagggaatgcctgccactcatactcattttgcgaaaccggctgaagtatgctctaacataccgtgaagtcattgctattctgatgcagcgacatgtccttgttgatggcaaagtcaggactgacaaa

SEQ ID NO: 185478 - DNA, 279 bp, Glycine max
gtctgctgttagatctgtacccgcctagccattgatttggaaaagtccaacttcaaggatgagtaagcttcagagtgatgctctaagagaagctatctcaggaatcatggctgattccaaggaaaagaacaggaaatttgtggagaccattgaactccaaattgggttgaaaaattatgatccccagaaggacaagcgtttcagtggctctgttaagttgcctcatattcctcgccccaagatgaagatttgtatgcttggagatgcccagcacgttga

SEQ ID NO: 185479 - DNA, 279 bp, Glycine max
atgggttcttcttctattacaacatcgctacaaaccatgaccatggctgcgatcgtgctcctgttcacggtctttgccgtttcctccgccctagacatgtcgataatctcgtacgacagcgcccacgcggacaaggccgccacgttgcgcaccgaggaggagctgatgtccatgtacgagcagtggctcgtgaagcacgggaaggtgtacaacgcgctcggcgagaaggagaagcgcttccagatcttcaaggacaacctgcgattcatcgacgaccac

SEQ ID NO: 185480 - DNA, 283 bp, Glycine max
gccccatttcggattgcagaacaatacagtcacagaaacattttccaaagaaaaagcaaaaaaaatggatgcaaaaacgaattcttcggcgccggaaacatcgccgccggtgatccacccggcagtggcaccactctcctaccttctgggaacatggagaggccaaggagaaggagggttccccactatcaactccttctcctatggcgaagagcttcacttctctcattcccccagcaagcctgtgatagggtacactcagaagacatggaaactcagctct

SEQ ID NO: 185481 - DNA, 284 bp, Glycine max
  unsure (1)..(284): unsure at all n locations
aaaggaaagagagagggagaagtatagagatagagagaaggagagagaaagctatagagacggggacaaggataaggggaaagataaaattagagaaaaggagagggagacggatcgagataaagaaaggacaagagatagagtgaacagaaagactcacgaggaagattatgaactggataatgttgatgataaagtagactaccatgacaagagagatgaggagattggcaagcaggcaaaggattcaaagcttgacaatgataatcaagatggccanacat

SEQ ID NO: 185482 - DNA, 282 bp, Glycine max
gttgatcgagataactagaaacagtgtgatgaaaatgaaggtccttgttttcttcgttgctacaattttggtagcatggcaatgccatgcgtacgatatgttccctctccgaatgaacactggctatggtgcccgtactccggaggtgaaatgcgcaagttggaggcttgctgtggaagcacacaccatctttggctttgagaccattcctgacgagtgcgttgaagcaacaaaggaatacatccatggcgaacaatatagatcagactccaaaacagttaa

SEQ ID NO: 185483 - DNA, 273 bp, Glycine max
aaactcagaaccaaactcgccaaaactagggttttgcattgatggcactgtgcaaccgcgtcagatcgggaatctctctcttcaccaaatccacgttcctcacttcccagcgatccagtctccaacgatccctcgttgcccctttcatttccctcgcctccagaaattacgccaacgtgccggggcaaaaggaaaccaaagttaaggtccctctggctttgtttggaggttcaggaaactatgcctctgctttgtatattgcatctgtgaaag

SEQ ID NO: 185484 - DNA, 275 bp, Glycine max
attctcgcttggttgcagcttcagcagcagcggcaagcaactccatccgcaatgggaatcgatttgaaggcaggaggtaagtccaagaagaccaaaggtacaagcccccaaatcgaatgatatttacgtcaagttcctcgtcaagctgtacggtttcctggttcgaaggactggtagtaacttcaatgcggtcatcctcaaaggccttttcaatgagcaagtcaacaagcccccgctatccctctctagattgattcgttacaccaagggaaagg

SEQ ID NO: 185485 - DNA, 282 bp, Glycine max
ccgaatgagagcatcaaactcttcttcttcgatttccattgcgaacgttactttctcttcttctttctcttcattttcttcgctcttcgatcttcgtccggggattgctccgaataccaccaccaccactcgccgatggccacgatcggaggcttacacgactcccaaggctctcaaaacagcgtcgaaaccgaagcccttgctcgattcgccgtagacgaacacaacaagaagcagaattcgcttctggagtttgctagggtggttagggcacaggaacag

SEQ ID NO: 185486 - DNA, 273 bp, Glycine max
ggaattgttgtaactttttgattcctaaattctctaaaattcgaaattctaatttcgttaggggaaagagattgtttgtgtgtgagtgagtatggctggaaaaggcgagggtcctgctatcggaatcgatttgggaacgacgtactcttgcgtcggcgtgtggcaacacgatcgtgttgaaatcatagccaacgatcagggtaacagaactaccccatcctacgtggctttcaccgacacagaacggttgatcggcgatgcggcgaagaacca

SEQ ID NO: 185487 - DNA, 280 bp, Glycine max
ttttctcacaccaggcgcacgttagcacaaactatcatggccacggcaacagcagctgccacctcgtcctttatggggacgcgtctcctggaggctcactccggagcggggcgagtgcacgcccgattcggcttcggcaagaaaaaggctcccgccccaaagaaagcctccaggggatcgggccgagacaccgacagacccctttggtatccgggcgccaaagcgcccgaatacctcgatgggagtcttgtcggagactacgggttcgatccgtttgggc

SEQ ID NO: 185488 - DNA, 247 bp, Glycine max
agggtaaccatggcgccactcgaacaaatgtggcaattcccaacgcttctcttctcagggggagttcgaatactgtgagctttcaatatgacgtcgttcttgaagcctgagaatgctctgaaaagggcggaagatttaatcaatgttgggcagaagcaggatgctttgtagactcttcatgacctcatcacctcaaaacgatacagagcatggcagaagacacttgaaaggattatgttcaagtatg

SEQ ID NO: 185489 - DNA, 83 bp, Glycine max
gtggatgcccgcagcggtactgacgtgcaaatcgttcgtctgacttgggtataggggcgaaagactcatcgaaccgtctagta

SEQ ID NO: 185490 - DNA, 270 bp, Glycine max
gccttgacgagcccaacacttttggaaacaggatccacagaatgttgaagcttggactgagcattgacgaggatgcaggtgaagctgatgctgaaatgcccccactggaggaggccgaggctgatgctgagggcagcaagatggaggaggttgattaaaattaaatatgatgcgtttcttgttagtagcgtctctaatgccttttttggctatgtttttttctcctttttttattttggattgatgacagtgttcaatggatatttagct

SEQ ID NO: 185491 - DNA, 276 bp, Glycine max
cttcaaagctgtggatgggagctatgtgtttaataaaggaaaggttcataaggtgcctgcaaacgacatggaggccttgaagtccccacttatggggctatttgaaaaacgccgggcacgcaagtctttcatttatgtgcaaaactacaacgagagcgatcccaagacccacgaggggatggacttgacaagagtgtctactaaagagttgatagcaaaatacggccttgatgataacactatagacttcattggtcatgctttggcgcttcatag

SEQ ID NO: 185492 - DNA, 278 bp, Glycine max
attcgctctgtgcagtttcctcgctctcttttctgcaattttcttttttgttccttctctgcggttatctttttgagcttcaatggcggacgctgaaaccttcgctttccaggctgagatcaaccagcttctcagcctcatcatcaacaccttctacagcaacaaggagactttcttgcgtgtcctcatcagcaacgcttctgatgctttggataagattcgatttgagagtttaaccgacaagagcaagctcgatgctcagccagagctcttcattc

SEQ ID NO: 185493 - DNA, 278 bp, Glycine max
tctcgagccgctcgagccgattcggctcgagctcattctcccatttcctctcagaaccctcacccactcaaccgcgctcctatatcctctacttcaccgccgctctctccaacgatcacaacaacatcgtcatcccatggcaaacgccgcatctggtatggcagtccatgatgactgcaagttaaggtttttggagctgaagacaaagaggacacaccgtttcatagtttttaagattgaggagcagcagaagcaggtcattgtggagaagctggtga

SEQ ID NO: 185494 - DNA, 267 bp, Glycine max
caagctgcagctaccttcatgcaacccaccaaggttggcatagcctctcgcaacctcaaatctacacaatgcatttctaaggcttttggcttggaacctgctgcagctacactcacttgctcccttcagcctgatctcaaagaatttgctcaaaaatgtgtcgacgctaccaaaattgcaggattcgcccttgccacctctgctctcgttgtttctggagcaagtgcagaaggtgttccaaaaaggctaaccttcgacgaaatccag

SEQ ID NO: 185495 - DNA, 279 bp, Glycine max
ctccgctatctgcgatcctagtcctacactctccgttcacgctcgaaccttggcgccgtcatcgacgcgaggacttctagaaggaagaaatttgaagaaagatgggagagaggaaggtgttgaacaagtattacccaccggactttgatccctccaagcttcccagagcaagaaggccaaagaaccagcagatcaaggtccgcatgatgcttccgatgagcattcgatgcaacacttgcggcaattacatctacaaaggaaccaagttcaattccagaa

SEQ ID NO: 185496 - DNA, 280 bp, Glycine max
ccgaatgagagcatcaaactcttcttcttcgatttccattgcgaacgttacttcttcttcttctttctcttcattttcttcgctcttcgatcttcgtccggggactgctccgaataccaccaccaccactcgccgatggccacgatcggaggcttacacgactcccaaggctctcaaaacagcgtcgaaaccgaagcccttgctcgattcgccgtagacgaacacaacaagaagcagaattcgcttctggagtttgctagggtggttagggcacaggaac

SEQ ID NO: 185497 - DNA, 273 bp, Glycine max
tagtatggctcggaagctgtttatgtccctcgtgtccctggtaccgattctgaagaagatgatggatacttgatttgttttgtacacgatgaaaataccggaaaatcatttgtgcatgtcatcaatgcaaaaacaatgtcagcagatcctgttgcagttgtcgaattgccgcatagagttccatatggtttccatgccttctttgtgacagaggaacaactgcaagagcagggtaaactgtgataattttggcagcctcactgtaccgtcctg

SEQ ID NO: 185498 - DNA, 274 bp, Glycine max
  unsure (1)..(274): unsure at all n locations
tcaagcctgttggcagcaatgtcatctccgtggatggaaaggaaatcaaagttgtttctgaccgcaaccctgccaaccttccttggaaggacttggggatagacttggtgattganggaaccggggtgtttgtggacagagaaggtgcaggnaaacacnttcaagcaggagctaagaaggtgctcatcactgctcctggtaaaggagatatccccacctacgtggttggtgtcaatgagtatgactanagccctgatgaacccatcatcagcat

SEQ ID NO: 185499 - DNA, 272 bp, Glycine max
  unsure (1)..(272): unsure at all n locations
ccaagaacaacatgaattttctttccttcgttactgttctactcttcatactacctgcaacctcatcttcccagtatttggggaacaaccttctcactcatcgcaagatattcctaaaaaaagacaacattattacctcgtacgctgtcatctttgacggtggtagcacaggaacccgtgtgcatgtcttccattttgaccagaatttggatctccttcccattggtgatagtcttgagcttaatannaagatcacaccgggtttaagtgct

SEQ ID NO: 185500 - DNA, 272 bp, Glycine max
gccttgcacgacgtcgacgtcaccatcatcaccaccgcacataacgccaccgttttccaaaagtccatcgatttagatgcgagtcgcggtcgccccatcagaacgcacgttgtcaacttccccgccgcacaagtgggtctccccgttgggatcgaagccttcaacgtcgatacgcctcgggtcatgacccccagaatctacatgggcctatcccttctccaacaagtcttcgaaaaactcttccatgacttgcaaccggatttcatcgtcac

SEQ ID NO: 185501 - DNA, 273 bp, Glycine max
ctcatgaccaagattgacaggcgatctggcaaagagcttgagaaggaacccaagtttttgaagaatggtgatgctggttttgttaagatgattccgaccaaacccatggtggttgaaactttctctgagtaccccccacttggtcgctttgctgtcagggatatgcgtcaaactgttgctgtgggagtcatcaagaacgtggagaagaaggatcctactggagccaaggtcaccaaggctgcccagaagaagaagtgaatcgtgcggtttggt

SEQ ID NO: 185502 - DNA, 275 bp, Glycine max
attcattctcatctttctctcttctctctccacccaaaccctaactcccgaccctgttcccctctcgtatccgtcatgaaaggaggaaagtccaagaccgaatctaagagagccgatcccaaacttgctgtgaataagaagggagccgccaccaaggctaggaaacccgccggcaaggggaaggcagcgaaagaccctaacaagccaaagaggcctccaagtgctttcttcgttttcatggaggagttcaggaaggtattcaacaaagaacatcc

SEQ ID NO: 185503 - DNA, 271 bp, Glycine max
ttgcaaactagttttgtcttgggaacatcatcacattacattagattggtggtaatggcagcgtcactacaagcagcagctactttcatgcaacccaccaagttgagcaggagcaacactttgcagcaaaagtctactcagtccatttccaaggcttttggtttggaacctgttggagctaaaaaggtcacatgctcccttcaggctgatcttaaggacttggctcacaagtgtgttgatgctaccaaaattgcaggattcgcccttgcca

SEQ ID NO: 185504 - DNA, 271 bp, Glycine max
cgcttgtgctgccttcgtttgcgtttttatcacagaggaattaacatatatatagcaagcatggcagtcacactctacgaccttagctcttcctctgggttgaagaaacttgatgagtaccttctcccacgcagttacatcaccgggtaccaagctacaaaggatgatcttactgtttatgcagctttgccaactgctccatcagatgaatatggaaatgtttccaggtggtacaagcacattgatgctttgttgataatctctggtgtta

SEQ ID NO: 185505 - DNA, 274 bp, Glycine max
  unsure (1)..(274): unsure at all n locations
cggaggagctgaagaagaattaccggattgtggactctggttacaattcctttccaacgtgcatcccgggaacacaataccataaggcactattgaaggagacttggcaagattataggtgacataatttgtgagaggaaggagaagaagttgcttgaaagggatctattgagctgcttattgaattggaaaggtgaagggggagaagtgttatctgattaccanattgcagataacattattggggtgctttttgctgctcaggacaccacag

SEQ ID NO: 185506 - DNA, 273 bp, Glycine max
  unsure (1)..(273): unsure at all n locations
tttcgataagaaaagttcacaacttcagctaagagaaaatgtctctgattccaaactttttcggtggccgtaggagcaatgtgtttgatcctttctcncttgaagtgtgggatcccttcaaggattttcattttccctcttctgtttctgctgaaaatttagcatttgtaagcactcgtgtggattggaaggagactccagaagcgcacgtgttgaaggcagatattccagggctgaagaaggaggaagtgaaggtgcagattgaagatgata

SEQ ID NO: 185507 - DNA, 271 bp, Glycine max
cgatcatcatctctttgagttgccattgaagaagaagctcagatcggaaaaattcacctctccaatcccaatcccatcgttgcaaatgatccgattcattctgttgcagaacaggcagggcaagacccgtcttgccaaatactacgttcctctcgaggactccgagaagcacaaggtcgaatacgaggttcatcggctcgtcgtaaacagagaccctaaatacacaaatttcgtcgagtttcgtacgcacaagataatatacaggcgatat

SEQ ID NO: 185508 - DNA, 239 bp, Glycine max
agtgaaggcatcgttagcagctttgtagattcaacctcaatttgcagagttacgttctaatatatttacacaagactgataagagaaaatgtctctgattccaagtttcttcggtggccgaaggagcagtgttttcgaccctttctccctcgatgtgtgggaccccttcaaggattttccatttcccagttctctttctgctgaaaattcagcgtttgtgagcacacgagtggattgga

SEQ ID NO: 185509 - DNA, 260 bp, Glycine max
gtgaaggcatcgttagcagttttgtagattcaacctcaatttgcagagttacgttctaatatatttacacaagactgataagagaaaatgtctctgattccaagtttcttcggtggccgaaggagcagtgttttcgaccctttctccctcgatgtgtgggaccccttcaaggattttccatttcccagtactctttctgctgaaaattcagcgtttgtgagcacacgagtggattggaaggagacaccagaagcacacgt

SEQ ID NO: 185510 - DNA, 156 bp, Glycine max
ccttcaaggattttccattcccacgattccgtctctagttccttctcctgagttttctcgggaaaattctgcgttagtgagcactcgtgtggattggataggatgaccccagaggcgcacgtgttcaaggccgatattcccgggctgaagaaggag

SEQ ID NO: 185511 - DNA, 273 bp, Glycine max
ttcggctcgaggtctcacaggaagttcgagcacccaaggcacgggtcactgggatttctccccaggaagcgtgctgctcgtcacaggggaaaagtgaaggcattccccaaggatgacccatccaaggcacccaagctcactgcattcttgggttacaaggctggtatgactcacattgttagagaggtcgagaagccaggatcaaagcttcacaagaaggaaacatgtgagcctgttacaattattgagacccctccaatggttattgttggt

SEQ ID NO: 185512 - DNA, 256 bp, Glycine max
gggagaaccaccaccccatcttgcctcaacaaccttatgatagagccttggctcgattctggtcaaggtacattgatgacaaatgcctgcctgcaatatcaaaggcagcatttactgtagacaaggaggaacgtgacaagggcactgaggaatcactcgagtctcttcaaattcttgagaatgagctcaaacacaagttctttggaggagagactatagacatagtggacatagccgctggtttcatagctttctg

SEQ ID NO: 185513 - DNA, 259 bp, Glycine max
ctttcttcttctcgtttttactttgacggtttctagagagagacagtttgttatagagagagaaagcgcgctgctgcttcttctgctgctgcttcgacagtgagaagagagagagaagcgctcttctccgtaccgtttctagagagagaaactgatggccggagttaatccgaacggcgtcgccgattttccggcgactccaacgcacggcggacagttcattcagtacaacatattcggaaacctcttcgaggttacg

SEQ ID NO: 185514 - DNA, 257 bp, Glycine max
cggctcgagattcaatgcttgagcatgtgaataagttgcttgagataccaggatcaaagttgctattcgggggtagtcctctagagaaccattcaattccacctatttatggtgctattaaaccaacagctgtctatgttcctctcgaagaaattatgaaggataagaattttgagcttgtaacaaaagaaatatttggaccatttcaggttatcacggactatcaaaacagtcagctagcagttgtattggatgct

SEQ ID NO: 185515 - DNA, 164 bp, Glycine max
agatggttctggcggagttaggtgggagcatttcgcgtgctctccagcagatgagcaacgcgacggtgatcgacgagaaggtgctcaacgattgcctcaacgtcatcactcgcgctcttcttcaatccgatgttcagttcaagctcgtccgcgacctgcagacc

SEQ ID NO: 185516 - DNA, 254 bp, Glycine max
atttcagtgagtgatcggtgttcacttgatctcatcataatcgtcagcgtcaattgaagaagatgccgatcagaaacatcgccgtcggaaggcctgaagaggcgactcaccccgacacgttgaaggcggctttggctgagttcatctcaaccttcatcttcgtgttcgccggctcaggctccggcatcgcctacaacaagctcaccgacaacggcgctgccacccctgccggcctcatctccgcctccatcgcc

SEQ ID NO: 185517 - DNA, 259 bp, Glycine max
ggcaacctcaacatcactgggcttctcaactctacattgggcctgcgccgcccctgcctcaagctcgattctttcaattctcaatctttctctctcttcgaccctaatcttcgcctatccctctctccacccaaaccctcacgcgccgtcatcgccatggccggcaccgggaagttctttgttggtggcaactggaagtgtaacggaacaaaagactcaatcagcaagcttgttgctgacttgaacaatgcaaaattgg

SEQ ID NO: 185518 - DNA, 260 bp, Glycine max
cttgccatggcagcagcagcgtcaatgtgtatgagcttcaacctggcaacagcattcaagggtctctctttttcttcttcttcctcatcgttcttcgctggaagtggtagttattctctccgcgcgggtcccacctcggtggtgtcgctgccccggcgctgcccgctgaccatagagaacgcccacaagaagggggcgggcagcaccaagaacggccgcgactcgcagggcaagcgtctcggagtcaagatatacggcga

SEQ ID NO: 185519 - DNA, 260 bp, Glycine max
tgggcttctcttgccccataccaccacagaccaagagcttcaacaattgagaaacagtctacctgatcaagttgttgttcagcgaatagatgaaagattatctgctctgggaaattgtatcgcatgtaatgaccatgtggccctcacacacactgatcttgacagggagactgaagagatgattgcagatgttcttggagtagaagttttcaggcagaccattgctggtaatattcttgttggtagttactgtgccttct

SEQ ID NO: 185520 - DNA, 260 bp, Glycine max
gtttcttccatgcaccaggacaccatgggtttactaatggagcgttgagagcatgctgtggtggaggtggacccttcaatttcaacatttccgcaaggtgtggtcacacaggttcaaaagcatgtgcagatccgtccacatatgcaaattgggatggaattcatttgacagaagcagcttataggtacatcgccaaaggtctaatttacggtccattctcatatcctcccctcaagacctctcccaacaagatagcctag

SEQ ID NO: 185521 - DNA, 253 bp, Glycine max
ccaacacattctggtcaccggtggtgccggtttcattggcacccacaccgtcgttcagcttctcaaagctggcttcagcgtttcaataatcgacaatttcgataactccgtcatggaagcagtggaccgcgtccgccaagtggttggccctctgctttctcagaacctccaattcacccagggcgatctccggaatagggatgacttggagaaactcttctccaaaacaacatttgatgccgtgatccacttt

SEQ ID NO: 185522 - DNA, 255 bp, Glycine max
ctcgagcgctctaataatgctgtcagcacttctttcctattagatgatgactcgagcattcctttttcggtggatgacatttccaaatcaatgcacccagtagaagtagcagacgtggatcctcctccgttgatacgtgagaactcagggtttgggttcttactagcacggtcagagtgatacaaatacccaatgaatattgtctctgatgctccatcttgtggctatccccggggtattgcaccaaggtgcagg

SEQ ID NO: 185523 - DNA, 253 bp, Glycine max
gtttcatttgtgaaactaacaacaacacaaggccatcatcatggcagctgcttccccaatggcaagccaactcaagtccaccttcactaggactcttgtagctccaaagggcctctctgcctcttcaccacttcacctcgtgccttctagaaggcaatttagcttcactgttaaggccatccaatcagagaagccaacctatcaagtgattcagccaatcaacggtgacccattcattggaagcctggaaacc

SEQ ID NO: 185524 - DNA, 252 bp, Glycine max
caaaaaggtaaactttttgcaacaaccatggttgcaatggcagcagcaacagcatccacccagttgattttctcaaaaccttgttccccttcacgtctatgccccttccaactatgtgtctttgacactaaacaagtgctatcaagtggcaggagaaggcatgtggggggttctggagttaggtgcatggctgtgggggaagcagcaaccactgggacaaagaagagaagtggatatgagcttcaaacactc

SEQ ID NO: 185525 - DNA, 252 bp, Glycine max
ggaaaataaagaaattagcgtgaaaaatgttgggtgtgttcagcagctccatagtgtcgccgccggaggagctcgttgccgccggcagccgtacaccgtcgccgaagatgacggcggcggcgctgcggaagtggttcgaggagaagaacccctccgcagtgtcggtggaggtcggagagcatgtccagctcgcttatacccaccagaacgagtcgccgtttcagcccagatcctttgctgtgaacgatgagg

SEQ ID NO: 185526 - DNA, 257 bp, Glycine max
ctgtcttccgaagcaggaactaaatatggctgacttgttggaatggtcaaagcaagataagaaacgaatgcttcatgtcgtctaccgtgttggtgaccttgatcgcaccatcaaattttacacagaatgtttaggaatgaagcttttgaggcaaagagatatcccagaggagaaatatgctaatgcttttcttggatttggccctgaagaatcccattttgttgttgaattaacatataattatggggttacctcgt

SEQ ID NO: 185527 - DNA, 258 bp, Glycine max
attcccttcacaccattctcactcgacagctttcacactctgagaaagcatggctgataacacattgatcagtactgctatctcagccttcgcatctctcataacttcctcaaaatccagatttgccatcgcagttcctctaactagatttggtgtcaccaatgtctcttctacacgcttttttattcgtgctgactggatgctaggccagatctagatctccttaccttgatggttcagcacctggtgcatttggat

SEQ ID NO: 185528 - DNA, 253 bp, Glycine max
cttagctactaaggaaggatcaaagagaatggctcaagcaatggcatcaatggctggcttgcgtggttcctctcaggctgtgttggaaggtagccttcaggtgagtggctccacacgcttgaatgtggggagtggaagcagggtggcctcagtcacacgtgcagggttcacagttagagcacaacaacaacaagtgagtggtgaggtacaaagcagccgtagggcagtgctttcacttgttgctgctggtttg

SEQ ID NO: 185529 - DNA, 251 bp, Glycine max
gtggtgtcttatagctgtggttatcatcttcttcttcctctttcttagatctcttctttctctacgccgcacgccgaaaccatggccggaaaaggagagggtcctgctatcggaatcgatctcggaaccacctactcttgcgtcggtgtgtggcaacatgaccgcgttgaaatcatcgccaacgaccaagggaacagaaccacgccgtcctacttcggattcactgacaccgagcgtctcatcggtgatgc

SEQ ID NO: 185530 - DNA, 255 bp, Glycine max
gcaaataactattaccaacaaactctactttcggcaaccttcaatttttttgaaagtcatggatttcagagtgatgggtttggagcctccgttgttccacacgctgcaacacatgatggacatgtcagaggacgctgcaggggaaaacaagacgtacagtgctccgacacggtcatacgttcgagacgccaaagcaatggctgcaacacctgcggatgtgaaggaatatcccaactcctacgtgttcgagatcga

SEQ ID NO: 185531 - DNA, 253 bp, Glycine max
aaaaaaaatctcaaaataaaacaaccaaaccacacacttcacaccctcttcaacatcctcagcaagtacaagaacaagaagaaacaatgtcttgctccaatctcacaatgttggtgtcctcaaaaccttccctttccgatccctccaatctctccttccgctctgtcctcaacccttttcagctcccttcacaaaacccaacttcatgcactccttcacgctcctcaaccacccaaattcagtgtggtctgag

SEQ ID NO: 185532 - DNA, 251 bp, Glycine max
cttctgctctagaaaattcagtgctgaaacatggcttcggctactctctctgtagccaaaccagcccttcaggcaaatgggaaaggcttctctgaattctctggcctccgaagctcatcaggcttccttcccttttctagaaaatcttcagaggatttccattctgtcattgccttccagacctatgcagttggaagcagtggaggatacaagaagggtgtgacagaagcaaaactgaaggttgccataag

SEQ ID NO: 185533 - DNA, 251 bp, Glycine max
ttctagcaatcaaccatctttggatcaaccctccaatttgtttacaatatggaacagaccctctcctttgaatttgagcatgaatttgttcaaaacacggcaagagtgaaatctgttgatatgcatccaactgagccatggattctactgggtttgtattcaggaactatttctatttggaactatcagacaaagactgaagagaagtctttaaaaatcagcgaatctccagtgagatcagcaaagttcat

SEQ ID NO: 185534 - DNA, 253 bp, Glycine max
attcgctctgtgcagtttcctcgctctcttttctgcaattttcttttttgttcgttctctgcggttatctttttgagcttcaatggcggacgctgaaaccttcgctttccaggctgagatcaaccagcttctcagcctcatcatcaacaccttctacagcaacaaggagactttcttgcgtgaactcatcagcaacgcttctgatgctttggataagattcgatttgagagtttaaccgacaagagcaagctc

SEQ ID NO: 185535 - DNA, 259 bp, Glycine max
cactgatcgagcgctcttgcgccgaagatgaacggggctaagcgatctgccgaagctgtgggatgtccaatagaatcggtaggggagcgttccgccttagagggaaggacccgcgcgagcagtgctggacgaagcggaagcgagaatgtcggcttgagtaacgcaaacgttggtgagaatccaatgcctcgaaaacccaagggttcctccgcaaggttcgtccacggagggtgagtcagggcctaagatcaggccgaag

SEQ ID NO: 185536 - DNA, 256 bp, Glycine max
ctttcaccaacaacaaagaaaacagagaaactttcacttcatatattttcatcatcgcagcaaaggaatcaatcaatcaaaatccatggcaggcttcagtggcgacgaaaccgctcctttcttcggcttcctcggtgccgctgcggccctcgtcttctcctgtatgggagcggcgtacggaacggcaaagagtggggtgggggtggcgtcgatgggcgtgatgaggccggagctggtgatgaagtcgatcgtgccg

SEQ ID NO: 185537 - DNA, 250 bp, Glycine max
gttgcattggctgtatttcaactcattatgactcttgggcatgttttccttggtatgggatggccagggtcaatgtatgttggcacgttactagttggacttggttatggagctcattgggcaattgttccagctacagcctcagagttgtttggtttgagaaactttggtgctttgtacaatttcattactatagcaaaccctgcaggaaccctggttttctctagtctcattgccagcaccatctatg

SEQ ID NO: 185538 - DNA, 251 bp, Glycine max
ctaatatttttctcactgtcttgtctctccagagaactgtatagagagagatggcagctgcaacatctggtgctgtgttaaatgggttgggatcttccttcttgagtggaggaaacaggagccaaacccttctggccactgctattggaggcaaagttggtgctgctgctgttactgttagtcctagaagactcattgtggtagctgctgctgcaccaaagaagtcatggctccctggtgtcagaggtggt

SEQ ID NO: 185539 - DNA, 254 bp, Glycine max
  unsure (1)..(254): unsure at all n locations
gtttccacttgcaaatgggacncatcaccatgctgcgacaaggtaggtttaaagaaaggaccatggactccagaggaagatcagaagctcttagcttatattgaagaacatggccatggaagctggcgtgctttgccagcaaaagctggacttcagaggtgtggcaagagttgcagactaagatggaccaattatcttaggcctgacattaagaggggaaaattcagcttgcaagaagaacaaaccatcattca

SEQ ID NO: 185540 - DNA, 246 bp, Glycine max
atgagttcggctactaagaacgcagcaaacgcggttgggggaaaaactgcaagagcatgtgacggctgcataacgaaacgtgcacgttggtactgtgctgccgatgatgcttttctctgccaggcttgtgactcttcggttcacttggcgaatcctttggctcgaagacacgaacgagtccgcttgaaaaccgcgtcgtacaagtccaccgatgaacgacgacaacctcccacgtggcacaccaag

SEQ ID NO: 185541 - DNA, 251 bp, Glycine max
ccctcgagccgaatcggctcgagcccggagtacctcttcgtcgaggcggcccgccgcaagcgacgatcctggggcgagaaccacaccttctacaccggctgcggctacctctccggcgctgtcggtggcgccgcctccggcctcgtcggcggcgttaaatccttcgagtccggcgacaccgccaagctccgcgtcaaccgcgtcctcaactcctccggccacgccggccgcgcctggggcaaccgcctcgg

SEQ ID NO: 185542 - DNA, 251 bp, Glycine max
ccgatttgaaggatacaattgtgaagggatttgggtttacggcggaagatgatgttaagattacggggttcgatccgagagacgccgaggtagggcattccgtggagtaccaattcgacctccaaatcgatcacaaggttattcccttcaagcttctcgaagatgtgaaacgctgggattacgtggatcttcccattttccgggccgaggccccaactggcttggttcagaaacgggcttcggctgacggg

SEQ ID NO: 185543 - DNA, 255 bp, Glycine max
cagagctgattttcgcggctgttaccggtcaccggagattctatccgaaatcgttttccgatgacgataaaaactgttaaagtcagtaacgtttccttgggagcaactgagcaagacattaaggagttcttttcattttctggtgatattgaatatgttgaactacggagccatgatgaacgatctcaaattgcttatattaccttcaaggattcacagggagctgagactgcactactgctttcaggggcaaca

SEQ ID NO: 185544 - DNA, 254 bp, Glycine max
ggttgattcggatctagagtcttcagtttctcctcgttgttcttcgctttcctgttttcaatttcgattctttcgttaatttaataagatgtttgggagggcaccgaagaagagcgataatacgaggtactacgaaatcctcggcgtctccaagaacgcttcgcaggatgatctgaagaaggcttacaagaaagccgccattaagaatcaccccgacaagggcggtgatcccgagttgtttaaagagctggcgc

SEQ ID NO: 185545 - DNA, 249 bp, Glycine max
gcgagcagcgtttgtttgttccttcctcagtcgttgtgacagtgtgtgtgagtgagtgagtgagagcgacgatgggcgcgagcagcgaccccacccaagacggttccgacgagcagcagaagcgttcggagatctacacctacgaggccccctggcacatctacgccatgaactggagcgtccgccgcgacaagaagtatcgcctcgccatcgcctccctcttagagcagtaccctaaccgcgtggaga

SEQ ID NO: 185546 - DNA, 251 bp, Glycine max
atggaatcaagcagagaacaagttcatctgcccttgccatggatctcagtacaatgaccaaggaagagttgtgagaggacctgctcccttgtctctggcattagcacattgtgatatagatgatgggaaggtggtgtttgttccttgggttgaaacagatttcagaacaggtgatgctccatggtgggcttagactccttaaagccgtccctctgttgtcatgtatatttaaacatgaaattcaaacattc

SEQ ID NO: 185547 - DNA, 249 bp, Glycine max
cggcaacagacgaattgtttctctctctaggcctagggtttccttctccactaccgttctttcatcggatcgctgccgtttccggcgtcattccgataattcggcggcatgaagctcacagtgaagactttgaaagggagccatttcgaaatcagggttcaaccctccgacactgttatggctgtcaagaagaatattgaagatgtacaaggaaaagataattacccatgtggacagcaattgctgatt

SEQ ID NO: 185548 - DNA, 246 bp, Glycine max
ctccgtgccgttgccggtgctggtgtgcttgctggttatgacaagctgcaggttcttgtgttcggcaagaagtacggctctggtggggcttaagttctaatgctgagtcagtactattatttgtttttagatggcgatgaaaaaaaaccattgagttccaagagtcttagactaatacctgccgcaaattttgtttaataaatttactagatgggatattgtcccaaaaaccgtttttaaatttca

SEQ ID NO: 185549 - DNA, 247 bp, Glycine max
ctggtttctccacctcctgtctttcctcttccagcaacttagggacatgttggttggtattaaaaactcacaatgcaagggccgtgccagggaaactacctggaactgtaaggagaagattgtcattaataaaagcagaagtgaagtatgtgaacgctgaaaaggctaaggaacttgtggaagctgatggatatactgttcttgatgtgcgggacaaaactcagtttgtgcgagctcacataaaatc

SEQ ID NO: 185550 - DNA, 244 bp, Glycine max
ctttgttcactcttcttctcttgcggctagggttttagcgcagtacttctagatttaaggaagatgggtaaggaaaaggttcacatcagtattgtggtcattggccatgtcgactctgggaaatccactaccactggtcacctgatttacaagcttggaggcattgtcaagcgtgttattgagaggtttgagaaggaagctgctgagatgaacaagaggtctttcaagtatgcctgggtgctgg

SEQ ID NO: 185551 - DNA, 248 bp, Glycine max
gactgctctctgtcaaccaatcacaaaatttagaattttcaatgtatcatttttaacttaaatactgtgagactctgtgtcagagtttgtgaagtgaatcccataatcatgaagaaaggaaacttgggacttggtctcaaactctcagttcctgtgcctgatcaatctaattttgccaggttcctgactgaaagtgggacttttaaggatggggatctgcttgtcaacagggatggagttcgaattgt

SEQ ID NO: 185552 - DNA, 253 bp, Glycine max
cagagagaagcgtcttaataaacgctcttctctgaaaaacctgatttcttctcttcttctcttctctttcgtttcgatcttcgatctctgaaaatgagagagtgcatttcaatccacatcggtcaggccggtattcaggtcggaaacgcctgctgggagctctactgcctcgaacacggcattcagcctgatgggcagatgccaagtgataagactgttggtggaggtgatgatgctttcaacaccttcttca

SEQ ID NO: 185553 - DNA, 121 bp, Glycine max
tcacgaagttggatatcatggatagaggcactgatgcgcggaatctgttactaggacaagttattcccctccgacttggttatgtcggtgtcgtgaatcgtagtcaagaggatattctaat

SEQ ID NO: 185554 - DNA, 266 bp, Glycine max
tggattttatggtcatgtccataactatgaaagagtatgccccatttatcagaatcaatgtgtgaatgaagaaaagcatcactactctggcactgtgaatggaacaattcatgtggttgttggtggagggggaagtcacctgtcagacttcacaccatcaccccctatttggagtctttatagggacgttgactatgggtttggcaaattgactgctttcaatcattcatatctcttgtttgagtacaagaaaagtagtgatggag

SEQ ID NO: 185555 - DNA, 255 bp, Glycine max
cttattctcttcctctctctctactctgagacacataggcaaattatcagacattatggctggttattcaaaagcttcagctctgtggatccttttgcttctctttggcttctctgtagctaaggaaattttggttggaggtaagactgatgcatggaaggtttcagcctctgaatcagattcactcaaccaatgggcagaaaagtctcgtttccaagttggagactatcttgtttggacatatgatggtggaaa

SEQ ID NO: 185556 - DNA, 259 bp, Glycine max
caacaataacaatggctgcctcactacaagctgcagctaccttcatgcaacccaccaaggttggcatagcctctcgcaacctcaaatctacacaatgcatttctccggcttttggcttggaacctgctgcagctaaactcacttgctcccttcagcctgatctcaaagaatttgctcaaaaatgtgtcgacgctaccaaaattgcaggattcgcccttgccacctctgctctcgttgtttctggagcaagtgcagaagg

SEQ ID NO: 185557 - DNA, 250 bp, Glycine max
caacaatgctagattttatccatatttcaaggattgtataggagtaattgatggtatgaacattccggctcatgttccagccaaagatcaatctcggttccgcaataagaaaggtatcctatctcaaaatgtgctggcagcatgcacatttgacctgcagtttatatttgtttatcctggttgggaaggttctgtcaccgactcacgagtgttaagggcagtccttgataacccagatcagaatttccct

SEQ ID NO: 185558 - DNA, 250 bp, Glycine max
tcataacacaaagcacaaagcaaagctcatccttgagttaaaaaatggcagcagcttcttccatggctctctcatccccatccttggctggcaaggccgtgaagctgggcccatcagccccagaagtgggaagggtgagcatgaggcagaccgtcaccaagcaggtctcctcaggaagcccatggtacggcccagaccgagtcaagtacttgggcccattctctggcgagcccccgtcctacctaaccgg

SEQ ID NO: 185559 - DNA, 250 bp, Glycine max
agattatcgtgaatgcgtataaaaggaaaataaagacattagcgccaaaatgttgggtgtgttcagcagctccacagtgtcgccaccggacgagctcgtggccgccggcagccgtactccgtcgccgaagatgacggcggcggcgctgcggaagcagttcgaggagaagaacccctccgccgtgtcggtggaggtcggagagcatgtccagctcgcttatacccaccacaacgagtcgccgtttcagccc

SEQ ID NO: 185560 - DNA, 258 bp, Glycine max
ctgaagttaaaagccttagccttccctacaactccaaacacaaagacatcatcatccatggctgcctccgtctccactgtcggagctgtcaacagagctcttttgaacctgaatggttctggagctggagcttcagctcccagttcagccttctttgggaccagcttgaagaaggttattgcctcaagggtccccaacagcaaggtctccggtggaagcttcaagattgttgctgtagaagagaagaaagagattgaa

SEQ ID NO: 185561 - DNA, 259 bp, Glycine max
gttcttgaggtgttagaggattttccttctgtacaaatgccatttgagtggttagtccaattggttccacctctgaaacctagagcattctccatatcttcttctcaatcagctcaccccaatcaagtacacttgactgtgaatgtggtgtcttggacaacaccttacaagaggaaaaaaaaaggactatgctcgtcgtggctagctgcattagatccctgtgatgtaggtatccatgttccaacctggttccataaag

SEQ ID NO: 185562 - DNA, 255 bp, Glycine max
tcttgacatccccttcaacttctattctcttttgaaacacttagaaaagaaaaaaaaaatgtctgcgttccttttgcttttcctagttttttcttctcagttgatcggtggactcaatacacctctaccatctccaatctatggaaacctcgtaaccattctcagcatagatggaggtggtataaggggtatcattccagctgtagttcttgaccacttcgaaaaggctcttcaggcatgggataaaagtgcatc

SEQ ID NO: 185563 - DNA, 248 bp, Glycine max
gaatatgtgtataacaggctccatttcagctatggttggtacttcacatttgttcaagggtttgtgtacctgtttctgatttacctccaaggcttcacaagcaagcaaatggtgaatccatggaaaacttatgtgaaactctctgctgtgcttatgggttctcatggcctaacaaaggggtcattggcttttctcaactaccctgcacaaatcatgttcaaatccacaaaggttcttccagtgatgat

SEQ ID NO: 185564 - DNA, 248 bp, Glycine max
aaatgaagcattcataaaccataactgaagaaaactaaggaaggaaggaagagtgagcgtgaaagatgccttgggcgaggctttcagggtctccaaggctcgacgttgctattgacatgggcaatccatttctcaatctcactgttgatggtttccttaagatcggagctgtcgcagccacgcgatcagctgctgaagatacttatcatattatccaaaaggggaatatctcaagtcatgatttcgag

SEQ ID NO: 185565 - DNA, 263 bp, Glycine max
gtctgcagagtgcagagccttctctcctctattatggcttccaacctgtttgctccattcattcgcaacaacaaaccaatctctatatttgtgcttagacaatgagggggagcttgtggcaacttgggcaatcgatcactcgccgtcttgcccatggagataagaaggctgttgctcgccgatgttttgcctcagaagctgagctgaaaaagacagtgtttcatgacttccatgttgctcatggtgggaagatggttccattt

SEQ ID NO: 185566 - DNA, 249 bp, Glycine max
gacagatgtctggcattttaataagaaagattgatactggggaagcatctgtgctttaggcataagggctgttttatggcatatggcattcaccaaatactgaactgttgaaaggacaagtcgaattagaccactctggctatgtacaagttcacgagggtactgcaaaaacttcagttgaaggtgtattagctgctggagatattcaggaccatgaatggaggcaagctataactgctgctggatctg

SEQ ID NO: 185567 - DNA, 254 bp, Glycine max
actcgagccgcattcggctcgagtaatcctatcctatcgtagcaaagaaagaaagacagaaaaacctagcttaccttatcaacattcaagatgcaaatctttgttaagacactcactggtaagacaatcacccttgaggtggagagttcagataccatagataatgtaaagtccaagattcaagacaaggaagggatcccaccagaccagcaacgtctcatttttgctggcaagcagcttgaggatggacgtac

SEQ ID NO: 185568 - DNA, 250 bp, Glycine max
agcgaagggaaagggttaggcatcattcatacactgaacgaacgctcagctcagtcaggtgccggcgttcctctttcacgttctcatggaaaacgacgacgtcgacatgcacgctgccgacaccagcgaagaattggatgacatgaagaagcgcttgaaggagatggacagatgaagctgctgctttgcgagagatgcaggccaaggtcgagaaggaaatgggatctgcgcaagatcctgcaaatgcttc

SEQ ID NO: 185569 - DNA, 246 bp, Glycine max
gcagaaagcaagctcatcctagagttttaaaaatggcagcagcctcctccatggctctctcttccccatccttggctggcaaggccgtgaagctgggcccatcagcccccgaagtcgggagggtcagcatgaggaagaccgtcaccaagcaggcctcctccggaagcccatggtacggcccagaccgcgtcaagtacttgggcccattctctggcgagcccccgtcctacctcactggcgagttcc

SEQ ID NO: 185570 - DNA, 241 bp, Glycine max
attttcagggtatcattcagaaggggtaacaatatcttggttatctgtgatgcctacactcctgctagagaacctattcccactaacaagatgcacgctgctgccaaggttttcagccatcctgatgttgttgctgaagtgccatggtacggtattgaacaagaatacaccttgttgcagaaagatatccaatggcctcttgggtggcctgttggtggtttccctggacctcagggtccat

SEQ ID NO: 185571 - DNA, 262 bp, Glycine max
cttgaatcttcgttatccttctttttttctccttgaactcgaatattcactatggcagatgaggtggttctgctagatttctggccaagtccatttgggatgagggtcaggattgcacttgctgaaaagggtatcaaatatgagtccaaagaagaggacttgcagaacaagagccctttgctcctcaaaatgaacccggttcacaagaaaatcccggttctcatccacaatggcaaacccatttgtgaatctctcgttgctg

SEQ ID NO: 185572 - DNA, 259 bp, Glycine max
cataaaagccggggcatacttcgagaatgtggaggtaatcaggaagaagaccaatctgatgttcgtcggagatgggattggaaagactgttgtgaaggccagcaggaatgttgtggatggctggaccactttccaatcagccactgttgctgtggttggagacggattcatagcaaagggtataacctttgaaaattctgctgggccaagcaaacaccaagccgtggccctaaggagtggttctgatttctcagccttc

SEQ ID NO: 185573 - DNA, 248 bp, Glycine max
cgcactatcagcacaacaactcactcactaagctaaacaatttcatcaagcctgccatggcttcctcgtgtgcttcctctgccattgcagctgttgccatctccacaccaagttcccagaagaatggatcactcttgggaagcacaaaagcttcttttcttagtgggaggaaactgaaggtgaacagttttacagcaccagttggagcacgatccagcactacagtgtgtgcagttgctgagcctgat

SEQ ID NO: 185574 - DNA, 246 bp, Glycine max
gaagagttgaacatgttgatcattctcgcaaatcggctgaacaggctgtgaaggccatcaaggcagctgaggaaggaaaaacagttgaggagtatgattaccttccatacttctattcccgttcattcgatctgtcttggcaattctatggcgacaatgtcggcgacacagtgctattcggagacaacaatcctgcgtcttcaaagccaaagtttgggacatactggattaaagacgggaaagttg

SEQ ID NO: 185575 - DNA, 236 bp, Glycine max
cttgagtcaatttattccaggttcagcaaaattgtattcactgtggcgtttgtatgggcaagtacttctgtgggacgtgtaagctctttgatgatgatgtatctaagcagcagtatcattgcagtggctgtggaatttgcagaactggaggatgtgaaaatttcttccactgccacaaatgtggttgttgctactcaactcagctgaaaaacagccacccttgcgtggaaggagca

SEQ ID NO: 185576 - DNA, 105 bp, Glycine max
tagtcatatgcttgtctcaaagattaagccatgcatgtgtaagtatgaactaattcagactgtgaaactgcgaatggctcattaaatcagttatagtttgtttga

SEQ ID NO: 185577 - DNA, 258 bp, Glycine max
attcgttttcatccatcaatgaatttaagtgttgccaagttccttggttttgaacagactttaaagaatgccttatcaccatacaaattaggaggagcagctggtggaagtgattttgatccaaaaggaaaaagtgataatgagattatgcgattttgccaaagtttcatgagcgaaatgtatcgctacctggggcctgacaaggaccttccgtctgaggaaatgggtgttggtactcgagaaatggggtatcttttt

SEQ ID NO: 185578 - DNA, 258 bp, Glycine max
ataacacaaagcacaaagcaaagctcatccttgagttaaaaaatggcagcagcttcttccatggctctctcatccccatccttggcttgcaaggccgtgaagctgggcccatcagccccagaagtggtaagggtgagcatgatgaaggaccgtcaccaagcaggtctcctcaggaagcccatggtacggcccagaccgagtcaagtacttgggcccattctctggcgagcccccgtcctacctaaccggtgagttccc

SEQ ID NO: 185579 - DNA, 256 bp, Glycine max
cggatctcttcttcagtggtggaagctactagaacactagtttgttgagcactgcgatgaggaagtggacggtctcttccgctctccttcttctctctctcctctttctctttgcagatcaaggtcgaaagtttcaggcgaatgccgagggagattccgacgagcttgtagatcctccgaatgtggaggacaagatcggtgctgtgcctcatggcctttccaccgattcagatgtcatcaagagggagtcggagtc

SEQ ID NO: 185580 - DNA, 254 bp, Glycine max
ggagggtgatcttgttgatgtctctggcaccaccattggcaagggtttccaaggtggaatcaagcgtcataacttcaaaaggggtccaatgacacatggttccaagagtcaccgacaactaggatcaattggtgctggaaccacgcctggtcgtgtttacaaggggaagaagatgcctggtaggatgggaggaaccaagaggaagatcagaaagcttaagattgtcaaaattgataaagatcttaatgtcctca

SEQ ID NO: 185581 - DNA, 240 bp, Glycine max
ctctctctctttctctttctctctcatccagatcttgcaaaaaaaaaaaaacacaatggcagcgagcgctcccactccaggcgaagagttcgtgtacatggcgaactggcggacaggccgagcgctacgaggagatggtggagtccatggagaaggtctccgcctccgccgaaagcaaggagctgaccgtggaggagcgcaacctcctctccgtcgcctacaagaacgtaatcggcgctc

SEQ ID NO: 185582 - DNA, 250 bp, Glycine max
actcgagccgattcggctcgagcttcaatttaaacacagaaacaaaaccaccaccttcaaagtactctctctcgagaatcatcgcataaaactagggtttccgatcgtcgtcgaggagaatgccgaagaacaagggaaagggaggaaagaaccggaagcgcgggaagaacgaggcggacgacgagaagcgggagcttgtgttcaaggaggacggccaggagtacgcgcaggtgctccggatgctggggaa

SEQ ID NO: 185583 - DNA, 242 bp, Glycine max
ccaagtattctgccacctgcagcatcccaaatccctcctacataaccatattgcacgaataggaccaatatagaatataacaaaacttagacatggaagaagcacaggtgcaggtatgggaagggtacgtagattggaggaacaagccagccataacaggacatcatggtggcatgcttgctgcttcctttgtttcggccgcggaggtattggagaacctagcatttcttgccaatgcaagc

SEQ ID NO: 185584 - DNA, 241 bp, Glycine max
gctgctgttcttgcgcgtgaacaagcctcaggtaagccaaaaccatggttaagcataacaatgttatcccaaacggacacttccgtaagcactggcagaactatgtgaagacttggttcaatcagccagcacggaagacaaggagacgattggctcgtcagaagaaagctgtgaagatattccccagacctacggctggacctctcaggcccattgtacatggtcaaactttgaaatacaa

SEQ ID NO: 185585 - DNA, 255 bp, Glycine max
  unsure (1)..(255): unsure at all n locations
tattttnttttctttgatggctgcaacctcaacatcactggcttctcaactctacattggcctgctccgccccttcctcaatctcgattcttttaattctcaatctttctctctcttcgatcctaatcttcgtctatccctctctccatttcaaatccttcacgcgccgtcatcgccatcgccggcaccgggaagttctttgttggtggcaactggaagtgtaacggaacaaaagactcattcagcaagcttgtt

SEQ ID NO: 185586 - DNA, 257 bp, Glycine max
atgggttgcaaactctttggattttaacaaggattatgaagcaagtgtttttgagacaaccataagagtagtaggtggtcttcttagtgcatatgatctttcaggggacaaagttttcctcaacaaagcaatagaaattgcagacagattattgcctgcatggaatacgcctacaggaattccttacaacatcattacattgtcacatggacgagcacacaaccctagttggactgggggtgagagtatcttggcag

SEQ ID NO: 185587 - DNA, 254 bp, Glycine max
ccttgctttgtctggtgtcaaaggagcagataatgggcactttcagaattggtgctgtcctcaagactacttcatggcttgtggctgctcttgtgatagtgattaacggctatcttttgacggaattctttgcctctgaagtgaatggaccaatgattggcgctgtagtgggtgcaataactgctgcatatgttgcattcataatataccttatttggcgagccatcacatatgtaccttggcaaagtgtaaca

SEQ ID NO: 185588 - DNA, 254 bp, Glycine max
  unsure (1)..(254): unsure at all n locations
atgccaccaaagccttntagactatgggtcaataaatgaaaacgtgaagaagagtcaatatgctgtnagaangtgaattatancttcgancntctgagnttcagaaagagggcacnaagnttatatttactaatgttgggaacccacatgcattgggacagaaaccactgagcttccctcgtnaggttgttgcnttgtgncaagctccantcctacttgatgatcctaatgttggactgcnattccntggctga

SEQ ID NO: 185589 - DNA, 242 bp, Glycine max
ggagaagggtgtcactgcccttgaccctagagccaatgattttgatctcatgtatgaacaagttaaagctcttaaggatggaattgctgttgaaaaaccaatctacaaccatgtcactggtctcctggatccccctgagctcattaaaccccccaaaatcttagtcattgaaggcttgcacccaatgtatgattctcgggtcagagatctcttggactttagcatctacctagacattagca

SEQ ID NO: 185590 - DNA, 242 bp, Glycine max
attcgagccgaatcggctcgagcggctcgagggaaaataaatgcaaataccacaaagacttacgctataagaaccatatttttcttgaaaagtgatggaaccttgacgccattggccattgagttaagtaagccgcatcctcagggtgaaggatatggtcctgttagcgaagtctacgtgccttcgagcgacggagttgaagcttacatttggttactggcaaaggcttatgttgttgtgaa

SEQ ID NO: 185591 - DNA, 240 bp, Glycine max
cgctgttgttgctgatgcatcaccgaacaacttcccctgtaaatcgcagttcgtatgtgcaaggttttaaaagatggctgatgctgaggacattcaacctcttgttgttgataatggaactggaatggtcaaggctggttttgcaggtgatgatgctcctagggccgtgttccccagcattattgggagaccacgccatactggtgtaatggttgggatgggtcagaaagatgcttacgt

SEQ ID NO: 185592 - DNA, 259 bp, Glycine max
gcgagattcaaggaaagctgtttatcttcagcatggagtttttgattcatcaatgggttgggtatctaatggtgttgttggctctccagcttttgcagcctatgaccaagggtatgatgtgtttctggggaattttcgtggtttggtttctcgggaacatgtcaacaagaacatatcatcacgtcaatactggcggtattccatcaatgagcacgggactgaggatattcctgctatgatagatagaattcatgaagta

SEQ ID NO: 185593 - DNA, 258 bp, Glycine max
ctcgagccggaagactgtagccgagaacccagtggtgctttattccaaaacatggtgctcccattcttctgaggtcaaaatcttgttcaaaaagctcggcgtcgacccattggtcttcgaattagacgaaatgggtcctcaaggcccacagttgcacaaggcggcaagcacattggcggctgtacagatacactgaagctgtatcggaaaggagaacttgaacctttgctatcagaagctaatgctaaaaaaacaggg

SEQ ID NO: 185594 - DNA, 245 bp, Glycine max
gaaaaaaaaaacccttagccaacacaaccatcatggccacctctgctattcagcaatcagcattcactggtcaaactgctctgaagcagctcaatgagttcgtccgcaagaccggtggcgccggcaaaggtcgcactaacatgcgccgcaccgtcaagagtgctcctcagagcatttggtatggccctgaccgtcccaagtacttgggtccattctcggagcagattccatcatacctgaccgga

SEQ ID NO: 185595 - DNA, 191 bp, Glycine max
atctccatttccatttcctctctctcagtttccaagaatcttaagctatgggaaagtcttcccaaccgtgagcgctgattaccagaaggccgtgagaggcgagagaactcaaggctcatcgtgagaagagatggctctctaatgtcgttgcaggatctctgactagcgtactcaacgtgcctcgacaaaga

SEQ ID NO: 185596 - DNA, 265 bp, Glycine max
cctcgagccgaatcggctcgaggcaaatattgcctattcggcaatatggcggaaaatggttacaattgagctgaacaagtttactgttgttttgtttgttgttgctaatacaagtggcagtttctgaaatcatttttgaagagcgatttgatgatggatggcgaagtaggtgggtgaaatcagactggaaaagcagtgagggcaaagcaggttcattcaagcacacagctggaaaatgggctggtgatccagatgacaaaggtat

SEQ ID NO: 185597 - DNA, 263 bp, Glycine max
cggctcaagtattattattagggtttggcgattcagagagaaagagaaatgggagaacgaaaaggaatcccaattgctctggggctcttggcgatgctcctcttcttcattgcttcttcctcttcctctcacctcgttcgtgcttccgatgacgccgacgacgcgatcttctacgagtcattcgacgaggattttgacggacggtggattgtgtccgacaaggaggattacaacggtgtctggaagcatgctaagagtgatgg

SEQ ID NO: 185598 - DNA, 243 bp, Glycine max
ctcactctgcactcaccactgccacacttcaatcgcactaatggctgtcaccttctcagatctacacaccgaagagggcatcaaatccctcgatcaattcctttctgggaaaacctatatttctggggatcagttgacaaaggatgatattaaagtgtatgcagctgttgttgaaaagccaggggacacttttcctaatgctgccaagtggtacgatgctgtctcttctcaacttgctccaag

SEQ ID NO: 185599 - DNA, 255 bp, Glycine max
gttcctcttcagatcaaacgcacacagttacgctcttcaaatcaatctcttctcagaaatgggtgtggctcaaagcattcccgatgcggaggagggaaccttggagattggaatggaatacagaactgtgtctggagttgctgggccattggtcattcttgataaagttaagggacctaagtttcaagagattgttaatattcgcttgggagatggacatactcggcgtggacaagtgctagaagttgatggtga

SEQ ID NO: 185600 - DNA, 260 bp, Glycine max
cagcaagaagggcaatatcaaggagaccctcttgactccaagattctacaccactgactttgatgagatggagacactcttcaacactgagatcaacaaaaacctcaaccaggatgagtttgaggcactgctccaggagttcaagactgactacaaccagacacactttgtcaggaacaaggagttcaaggaagccgctgacaaacttgagggtcccctcagacagatctttgtggagttccttgagaggtcctgcactg

SEQ ID NO: 185601 - DNA, 260 bp, Glycine max
aaatgttgctaacattgtcccaccatatgaccagtcaaaatacgctggaactggggcagcagttgagtatgctgttttgcatcttaaggtgtctgagattgtggtcattggacacagtgcttgtggtggtattaaggggcttctgtctttcccatatgatggaacctactctactgattttattgaggagtgggtcaaaattggcttgcctgcaaaggcaaaggtgaagacacagcatggggatgcaccttttgctgagt

SEQ ID NO: 185602 - DNA, 256 bp, Glycine max
  unsure (1)..(256): unsure at all n locations
acattctaaaacaaaggacccagttttacatttntttttgttcctgagttcnaatggctcttcaggctgcttccttggtttctgcttctttttctattgctaaagagggaaagtctggtgtatctctcagggacaccacaatgtttggtgtttcattgtcggatactctcaaatctgacttcagctctccctcatcgacttgcaaaagggaattccaacaaaaatttggccctttgagggttcagtcagtggcaac

SEQ ID NO: 185603 - DNA, 255 bp, Glycine max
gcaagggaagccagagttcactgaccatttgactcataaactaaagcaccaccctggacagattgaagctgctgctatcatggaacacattttggaaggaagctcttacatcaaagctgctaagaagttgcatgagattgatcctttgcaaaagcctaaacaagaccgctatgcacttaggacttcaccacaatggcttggtcctcaaattgaagtgattagattctctaccaagtcaattgagagggagataaa

SEQ ID NO: 185604 - DNA, 255 bp, Glycine max
accattgcgaggtccgggaccaaggagttcatggaggcattgcaggctggtgctgatgtaagcatgattgggcagttcggtgtggggttctactctgcttacctcgttgcagagaaggtcattgttaccaccaagcacaatgatgatgaacagtacatttgggagtctcaggccggtggctctttcactgttactagggacaccgatggcgagcaactcggaaggggaaccaagatgaccctcttcctcaaggaa

SEQ ID NO: 185605 - DNA, 259 bp, Glycine max
caaattgctacatagcacacactccctcttctcttctacggttatggcgtccacgttgggcacttcttcaattgcggttcttccttcgcgctgcatctcttctttttcttccaagccttccattcacacactctctctaacttcagggcagagctatgggcggaaattttatggaggaattggaattcatggcatcaagggaaggtctcagctctcagttgccaatgttgccactgaagttaactctgtagaacaggcc

SEQ ID NO: 185606 - DNA, 261 bp, Glycine max
tttagcaataaccaaaccctctctactcttttttcttctccttctcttcgctagggttttagcttcttcctcttcacttcgttctttttcgcctctacaatgagcaacgacaaggacacattcaacgtcgccgatctcacttctgctctcaacgaggacaatagagcagaccttgtcaatgctcttaagagcaagatacagagtttggctggacaacactcggatattctagagtctctgtcgcccaatgtccgaaagcgt

SEQ ID NO: 185607 - DNA, 258 bp, Glycine max
aaatgggatatcacttgaaggtctacataagaggttagaggctggtaacctggaccccagagaactagccactgctttagagggtcagaagaaggactttccaaatggtattgatgaatgtggtgccgatgctctccgttttgcactggtctcgtacacagctcagtctgacaaaattaacctagatattcaaagggtggttgggtatcgccaatggtgtaataaactgtggaatgcagtacgatttgctatgagcaa

SEQ ID NO: 185608 - DNA, 250 bp, Glycine max
caaaaggagagtgcaataactcgttgtacattcctagtgtgtgggacagacatggctaagatgtgtgtcttggtgttggttcttgctctggctgtggccacaagtgccagaaacgttcccaaccccaaggatgctggtcttaaggaccagaagaacttcatcagctatggtggagttggtggttattccgggattgggaacaatggactgccttttggaggagctggtgccggaataggtggtcgtcttc

SEQ ID NO: 185609 - DNA, 253 bp, Glycine max
aagcaatatagtttgtttaattgttgcttcatttctattgtgtgaatggcatttgggaagttcattatgaatataggggtagtggcaatggttctgggtttatggattcgcgttggatttgcacaacaagtaccttgctactttatttttggagactctttggtggataatgggaacaacaatcagcttaactcactggctaaggctaattatctcccttatgggattgacttcgctggtggcccaactggaa

SEQ ID NO: 185610 - DNA, 255 bp, Glycine max
ctttttcttcttcgttgggtttgttgccacttagtaagaaagaggactgtgaagagagtggggagaagatttggtgttgtggccatggcggagtctaagagtactgtgcttgttacgggagcgggtggtcgcacaggacaaatagtttacaaaaaattaagagagaggccaaaccaatatgtggctagaggtctggttagaacagatgaaagcaaacagaacattggtgctgcagatgacgttattgttggggat

SEQ ID NO: 185611 - DNA, 257 bp, Glycine max
agggagggtgaagaggagttgtcatctgaagatggaggtggatatggcaacaattccaacaacaagagcaactcaaagaaggcacccgaaggtggcgcaggtggagcagaagagaatggggaagaggatgaagacgaagatggtgatgatcaagatgatgatgaggatgacgacgatgacgatgatgacgaagaagatgagggaggtgaagaagaggatgaagatggtgctgaggacgaggagaatgaagaggatga

SEQ ID NO: 185612 - DNA, 254 bp, Glycine max
atgatgttgtccttgtcggtggttctaccagaattcccaaggttcaacaactgctgcaggacttctttaatggaaaagagctttgcaagagcattaatcccgatgaggctgttgcatatggtgctgctgttcaggctgcaatcttaagtggtgagggcaatgagaaagttcaggatcttctcctcctggatgtcacccctctgtctcttggtttggagactgccggtggtgtgatgactgtcctgatacctagg

SEQ ID NO: 185613 - DNA, 229 bp, Glycine max
  unsure (1)..(229): unsure at all n locations
ctcgagncgctcgagncgattcggctcgagtgttgtgacagnttgtatgattctttgagtgacgtggatgaccngagtgtgcaagctttggaacgtcatcgaagtcacgtacttcactggctactgatgacgtgactatagtgcaatcactgtctgcttacgctgagatgatagtgatagcacttgacgctctgaatgccgctgatggatcgagtacatcagcgatatc

SEQ ID NO: 185614 - DNA, 245 bp, Glycine max
tgagagtgtggtaaaagcaatatatactggttctgagtttgttgatactgttaataccggtgatgatattggtgtagttctggagtctacaagcttctatgctgagcaaggtggtcagatttttgatactggatcacttgagggcccacatgctttatttgaagtgcgtaatgttcaagtttatggaggctttgttcttcacattggtaatgggactggtgtctcagttggcgacaaagtagtgt

SEQ ID NO: 185615 - DNA, 253 bp, Glycine max
gaaacaatgaacgacttgttctccggttccttctcccgcttccgcagcgaccagtcctccccggaccgccaccacgacatcgagatgggcgccaccgcctccggcggcggtcgcggcggcgaggtgaaccttgacaagttcttcgaggacgtggaaggcgtgaaggaggaactaaaacacaaggaaggtttggctcacagtctaaggagcagccacgagcagagccagacgctgcacaacgcgaaggcggtga

SEQ ID NO: 185616 - DNA, 256 bp, Glycine max
cggctcgaggttgctgtcatcatccgcagctgctgtgattcgcaccgcaaacaaacagtgagccacggccgtcggaaagaacaagcgcatctccaaagggaaaaagggtggcaagaagaaggcagctgatccctttgccaagaaggattggtatgacattaaggccccttctctttttcaagtgaaaaatgttggcaaaaccctcgtctctcgtacccacggtaccaagattgcttctgaaggactcaaacataga

SEQ ID NO: 185617 - DNA, 250 bp, Glycine max
ggcaactcttggcttgcaagcagttcgtcctcctccattaacgtccacttccgatccaccacctctttttgatggcaccaccaggttgtacatcagttattcctgtccctatgcacaacgagtatggataactaggaactacaaggggcttcaagacaagatcaaattggtccctattgatcttcaagacaggccagcttggtataaggagaaagtctaccctgaaaataaggtgccatccttggagcac

SEQ ID NO: 185618 - DNA, 259 bp, Glycine max
agcaaaagcaatccactcagagagctagaagatttcaacaatgcctcgctatgatgataaatacggcaatacccgcctctatgtgggacacttgtcttcgaggactcgttcccgtgatctggagcgtgcctttagcagatatggaagagttcgaggtgtggatatgaagaatgatttcgcttttgttgattttagtgatcctcgagatgctgatgatgcaagatataacctggatggtcgggatgttgatggaagtcgg

SEQ ID NO: 185619 - DNA, 251 bp, Glycine max
ggccggtgcgcggcagcaacatccacgggagggctgatgaacaaaatgaccgggcgcatcggtgactcgccgctgataggcgccgggacctacgcgtgcgacgtgtgcggcgtatcgtgcacgggtgaacgcgaggccatcatacgtggcacgctggcgcgtgaggtcggcagcggtggatggaatacaaaggcttgaagcttcaagaagccgtggattttgtgatcaagcaccgtctcgatgaagggatg

SEQ ID NO: 185620 - DNA, 250 bp, Glycine max
ggaggcactgtggcagaagtcctaggagtgtaaaacagagacgcaaaatgaagacgatcttgtcgtctgagaccatgaatattcccgacggcgtgagcatcaaggttcacgctaaggttatcgaggttgagggccctcgtggaaaactcgtgcgagacttccaccatctgaacttggacttccaacttattaccgacgatggcggtaaaaggaagctcaagattgattcttggtttggttctcgtaaaac

SEQ ID NO: 185621 - DNA, 252 bp, Glycine max
cttcatcttcagtcgcaacattgccatccagttgatcagtgccaccaagactgatggacttggaaatgggaaagttggaaagcaaacctatttggagaaacatcttccttcgttacgaaccttgggagacaggcaagatgcattcagcgtttattttgaatgggataatgattttcgaattccaggagcattttacattaaaaatggtatgcaatctgaatttttcctcgtgagtgtcactcttgaagacat

SEQ ID NO: 185622 - DNA, 254 bp, Glycine max
ggagcactagctaagttcacaatttcaaaatggctaggggactaaagaagcatttgaaaaggctcaatggtcctaagcattggatgcttgacaaactgggtggtgcatttgcgcctaaaccctcatctggaccacacaaatcgagggagtgcctccccctcattcttattctgcgaaaccggctgaagtatgctctgacataccgtgaagtcattgctattctgatgcagcgccatgttcttgttgatggcaaa

SEQ ID NO: 185623 - DNA, 254 bp, Glycine max
ttcaagattcagcaagtgcgtttcggaagcagagaccgaaatacttcgagatggcccgtacaaagcaaactgctcgtaagtcaactggaggaaaagctcccaggaagcagcttgcaaccaaggctgcacgtaagtctgctccaacaactggtggtgtgaagaagcctcatcgttatcgccctggaactgttgctcttcgtgagattaggaaataccagaagagcactgagctcctaatcaggaagcttcctttc

SEQ ID NO: 185624 - DNA, 252 bp, Glycine max
caggtggactgaatgattctaaagcttcacttgaggtgcttgcttttgctgctatttctttgggcttgagctatgtggggtctggcaatgaagaaattgctcaagcaatgatatatacactaatggaccggagtgagtctcagttgggagagccccttacacgacttttacctctcggtcttggtcttctatatcttggaaagcaggacagtgttgaggcaactgccgaagtttcaaagactttcaatgaaa

SEQ ID NO: 185625 - DNA, 256 bp, Glycine max
atcgagataactagaaacagtgtgatgaaaatgaaggtccttgttttcttcgttgctacaattttggtagcatggcaatgccatgcgtacgatatgttccctctccgaatgaacactggctatggtgcccgtactccggaggtgaaatgcgcaagttggaggcttgctgtggaagcacacaacatctttggctttgagaccattcctgaagagtgcgttgaagcaacaaaggaatacatccatggcgaacaatata

SEQ ID NO: 185626 - DNA, 287 bp, Glycine max
gaagctgttgcttatggtgctgcagtgcaggctgcgattctcagtggcgagggtaatgagaaagtgcaggatcttcttttgttggatgttactcctctatccactggtttggagactgcaggaggagtcatgactgtgttgattcccagaaacacaacgcattcccaccaagaaggagcaggtgttctcaacttactctggcgacaagcccgtggtgttgattcagggctataacgggtgaccgaacgaggtctcgtgacaacaatttgcttggcaaatttgagtta

SEQ ID NO: 185627 - DNA, 276 bp, Glycine max
  unsure (1)..(276): unsure at all n locations
gtagtggaagaatcactcccttatccatttccacaccacatccgagtccgccncagggctgtctcttcagcctccattctacgctctctcaactcccagtctctgtcccgaagagcgaaccataatggaagagtaaattaccggaaaccgaataaccgtttctccgtgaaagcctccgccaaagagattgcctttgaccagcattcccgctctgctatgcaggccggcattgacaagctcgccgacgctgttgggctcactcttgggcccagaggg

SEQ ID NO: 185628 - DNA, 276 bp, Glycine max
gaagctgttgcttatggtgctgcagtgcaggctgcgattctcagtggcgagggtaatgagaaagtgcaggatcttcttttgttggatgttactcctctatccactggtttggagactgcaggaggagtcatgactgtgttgattcccagaaacacaaccattcccaccaagaaggagcaggtgttctcaacctactctgacaaccagcccggtgtgttgattcaggtctatgaaggtgaacgaacgaggactcgtgacaacaatttgcttggcaaa

SEQ ID NO: 185629 - DNA, 275 bp, Glycine max
tgggtattgatcttccaccagagaaggtttttttatttcaaaaatctgccctttacaagtgtaatatggctgggaaacctgctgttcttacacgtgttgtggatagcatgactgacaacttgagaccaactcgtgctgaagcaacagatgtcgccaatgctgttttagatggaagtgatgccattcttctgggtgctgagactttacgtgggttgtaccctattgagactatatctactgttggcagaatttgttcagaggctgagaaagttttc

SEQ ID NO: 185630 - DNA, 277 bp, Glycine max
gatcaagggcatgtactactccatcaccttcatggtggctcgcacgtgtgcacaagaggagaggctcaacatttccgtcactcctgattggggtgtgattcctattcagactttgtacacgagcagtggttgggatcccattgcgttcgggtttaaggcagagagtgaaacgctggagatgctgattcataaccctggaaaagaggaggatcccgcgtgtggcccgcttgttgattccgttgctctcaggactctctaccctcccaaagctactaac

SEQ ID NO: 185631 - DNA, 276 bp, Glycine max
cacctccttagtttcgaaagcatggcttccctggcggcttccaccgcggctatgtcagaaatccttggaaaccccgttaacctcagatgcgcaaccaggtctgctccatcaccaactacacctgccaccttcaagaccgtcgcacttttctccaagaagaagccagctccacctccaaagaaaaagcctgccgctgtatcccccgccaatgaggaactcgccaagtggtatggtcctgacagaaggatcttcttgcctgagggtctcttggaccga

SEQ ID NO: 185632 - DNA, 275 bp, Glycine max
ggcttggtggtgatcccagcttgggggcaggaatgtattcatctgaagctacattggcagatttgcctggtcttatagaaggtgctcacttaggaaagggtcttggtcgcaattttttgaggcacctcaggaggacccggctattggtccatgttgtggatgctgccactgagaatcctataaatgactacagaactgtcagagaagagttacgcatgtataatcctgagtaccttgaacgaccatacgttataattttgaataagattgaccta

SEQ ID NO: 185633 - DNA, 284 bp, Glycine max
ccaacaccggcacacccccgaacacttgttcgacacttgtttgacacttcttattaggtgtttggctcaaatattactttttgttggcttaaacacttaagccgtcacatttacacaactaatatactcgtaaaaacatagaaagttggttttaaaagatgaatataccatcaatttagattattttgttatatgttattcctatttcatttaactataatctctttgtttgtgtgtgtatgtggtgttcccatgtcgtatattttagacattataactgtgtt

SEQ ID NO: 185634 - DNA, 287 bp, Glycine max
tcgagctcgagcgcggtataccagttacaaggcttggccaaaatgataaagaaagattgattggacttggtgacagattgcacagcagagttgtaggacaagaccaagctgttaatgctgttgctgaggctgtgttgagatctagagctgggctaggaagacctcaacaaccaactggttcattcctattccttggtccaactggtgttggtaaaactgagcttgcaaaggctcttgctgagcaactatttgataatgaaaatcagttggtgagaattgatatgtcc

SEQ ID NO: 185635 - DNA, 280 bp, Glycine max
catggctaccttctggtgggcccattcgtgaaggccgggcctctgaggaacaccgagatcgccgggcaagcgggctctctcgccgctggtgggcttgtggtgatcctcagcctttgcctcacaatctatgggatttcatcttttaacgaaggagacccatccactgccccgtcactgaccttgacgggccgcaagaaggagcccgatcagctccaaactgctgatgggtgggccaagttcaccggaggcttcttcttcggaggcatttcgggtgttattt

SEQ ID NO: 185636 - DNA, 277 bp, Glycine max
ggcgcatgcagatgctaagcgtttgattggaaggcgtttttccgatgcatcagtacaaggtgacatgaaattgtggccgttcaaggtgattcctggccctgctgagaaacctatgattgtggtgaactacaagggggaggagaaacagttttccgcggaagagatatcctccatggttcttatgaagatgaaggagattgcggaggcgtatctaggttccaccataaagaatgcggttgtcactgtgcctgcttacttcaacgactcacaacgtcaa

SEQ ID NO: 185637 - DNA, 277 bp, Glycine max
cccacacacgcgcgcagacgcagagtgagtgggtaaagcaaaatcatcaagtgttgttcctccctgtcattgctctcttcttcttcttcttagtctatcattccttccttccttcctttcgatttccgcattcattcaatggtacttacaacactctctctgctcccaccctccactcctccctgcttctgcggcaccctccatctccgctcccacaacagcttcctttccatccattctccttcttcttcttctccctttccttccttctcctcaa

SEQ ID NO: 185638 - DNA, 270 bp, Glycine max
ggtgcccaaaaggttgggcaaaagcggggtaggttgaatgttgaagatgatgattcacagccaagaaagaaggtccgtttacggattcctgctacacaatggatttcaatttacaatgcaagacttccaatgaaacaaaggtaccattacaatgtgtctgatgcaagattagtacagcatgtcgtccgaggggttgcagatggccttcttattagttgtgtgtcttcttgttgcaatctttgggcccttattatggatgctggaactggt

SEQ ID NO: 185639 - DNA, 271 bp, Glycine max
ctcaaacctgaaaatgtgttggtccgagatgatggtcacataatgctatcagattttgatctttccctcagatgtgctgtgtcacctactcttattagaacttcctatgatggtgacccttcaaaacgggcaggtggtgcattctgtgttcaacctgcatgtattgagccatcatcaatgtgcatccaacctgcatgttttattccccggttatttcctcagaaaaacaagaagtcacggaagccaagagctgatcctgggttgccgtcca

SEQ ID NO: 185640 - DNA, 272 bp, Glycine max
ctccttctctctgagaacaacaccccacactcctctctctctctccgcttccttctcttctcacacctccatggcccacacttcccttccctccgccgatgccggcatggacgctgtccagcgccgtctcatgttcgaagacgaatgcattttggtggatgagaatgaccgtgtggttggtcatgattcaaaatacaattgtcacttgatggaaaagattgaagctgagaatttgctgcatagagctttcagtgtattcctgttcaactcaa

SEQ ID NO: 185641 - DNA, 278 bp, Glycine max
aagtttatttcctctgatcgtgtggtttctgagttctaagcactcacctctttcatacacgtttgttcgcttgttgagaagccatgggcgaggatttcgagttcccaagtgctggcaacatggaaatgcctgaggaggaagagtttgagagtccgatcctgaaggttggggaggagaaggagattgggaaaatggggctgaagaagaaattgctcaaggaaggtgaaggttgggacacccctgacagtggagaccaagttgaagtgcattatactgga

SEQ ID NO: 185642 - DNA, 280 bp, Glycine max
agtgaatattaattgataaattttaatatttattttgactagtttacaattatgtttttttttttattgtagatagtttataatgagataaaattataattgttaaaaaaattgaaaacctaaattattgtaggcagaaaaggcaaaactgttataacaaatatagtaatgtataccttattgacataatataacatacggcgcacgtgttcaaggccgatattcccgggctgaagaaggaggaagtgaaggtgcagattgaagatgataaggtgcttca

SEQ ID NO: 185643 - DNA, 282 bp, Glycine max
caactagataattggctcagaagaaaagaaaagctccaacaatggttctcacatccactgccacacacccagatgaactagaccagagcctaaactatacttttgcttccagatatgtgcgtgaacctattccaaagttcaagatgccagagaaatccataccaaaagatgccgcttatcagataataaacgatgagttgatgttggatggtgcaccaaggctcaacttggcctcgtttgtgaccacttggatggagcctgagtgtgacaagctcataatgg

SEQ ID NO: 185644 - DNA, 279 bp, Glycine max
cttcacttttaagttaaatagtttttcattgtttcatttaatctacaatggctgcttcaacaatggctctctcttcatcatcattggctggccaagctatcaagcttgccccctccacccctcagcttggtgttggaagggttagcatgaggaaaacagcctccaagactgtttcttctggaagcccatggtacggcccagaccgtgtcaagtacttgggcccattctctggtgagcccccatcctacctcactggtgaattcccaggtgactatggtt

SEQ ID NO: 185645 - DNA, 276 bp, Glycine max
aaacactcataacacaaagcacaaagcaaagctcatccttgagttaaaaaatggcagcagcttcttccatggctctctcatccccatccttggctggcaaggccgtgaagctgggcccatcagccccagaagtgggaagggtgagcatgaggaagaccgtcaccaagcaggtctcctcaggaagcccatggtacggcccagaccgagtcaagtacttgggcccattctctggcgagcccccgtcctacctaaccggtgagttcccaggcgactacg

SEQ ID NO: 185646 - DNA, 274 bp, Glycine max
gttgcaacaaatattgctgaaacttccttgactgttgatggtgtagtgtatgttattgactctgggtatgtgaagcaaaggcagtataatccatctagtggcatgtattctcttgatgttgttcaaattagcaaagtgcaagctaaccagcgagcaggccgagctggacggacacgtcctgggaaatgctaccgtctatatccttcccgtatttacaatgatgagtttttggacgttacagttcctgaaattcagagatcttcccttgctggca

SEQ ID NO: 185647 - DNA, 270 bp, Glycine max
ccaattcttattctttttctctctttctctctgcttgcggtgcttcacaagccaaatctaacttgtctctgttttctacgatctagtactactatcaatggccggaaaaggagatggtcctgctaacggaatcgatctcggcaccacctactcctgcgtcggagtgtggcagcacgaccgtgtcgaaatcatcgccaatgaccagggtaacagaaccacgccgtcttacgtcgctttcactgattccgagcgtatgatcggtgacgccgc

SEQ ID NO: 185648 - DNA, 276 bp, Glycine max
gatatgttccctctccgaatgaacactggctatggtgcccgtactccggaggtgaaatgcgcaagttggaggcttgctgtggaagcacacaacatctttggctttgagaccattcctgaagagtgcgttgaagcaacaaaggaatacatccatggcgaacaatatagatcagactccaaaacagttaaccaacaagcttacttttatgccagagacctcgaagtccatcccaaggacacatttgtgttcagtatagatggcaccgtactctctaat

SEQ ID NO: 185649 - DNA, 280 bp, Glycine max
ctccaacatgccaaacgacagcgttctgagtcttttcttcttcgttaccctcttcacatgccttctctctgctacttcccacgatgaccatattttcctaccgagtcaactccatgacgatgactcagtgagttgcactgcaaccgacccaagccttaactacaagccggtgatcggaatcctgacccaccccggcgacggtgcctctggccggctcagcaacgccaccggggtttcttacatcgccgcctcctacgttaaattcgtggagtccggtggt

SEQ ID NO: 185650 - DNA, 279 bp, Glycine max
caatccagagagcgcgtcttaataaacgctcttctctgaaaacccccatttcttttcttctgtcttcttctctttcgcttcttcgatcttcgatcttcgtcgctgaaaatgagagagtgcatttcaatccacatcggccaggccgggattcaggttggaaacgcctgctgggagctttactgcctcgaacacggcattcagcctgatgggcagatgccaagtgacaagaccgttggtggaggtgatgatgctttcaacaccttcttcagtgaaactggg

SEQ ID NO: 185651 - DNA, 277 bp, Glycine max
aaaggattctacccgccgctcgatgggaattgcgcttcaaggcgtctcgtagggctaatccgcctcacgagggtcaccaacggcacgtgcctttggggggccgaggccccctactgctggtcggcttacggacggcgggcgcacgcgtcgcttctagcccggattctgacttagaggcgttcagtcataatccaacgcacggtagcttcgcgccactggcttttcaaccaagcgcgatgaccaattgtgcgaatcaacggttcctctcgtactaggt

SEQ ID NO: 185652 - DNA, 275 bp, Glycine max
ctcccacgacaacgtatcacaagctcccaatatagcaagcagcaaacatgatttcttccgtgtcctttccagcgtctcttcccgccgttaacttctccggcaacgccatggcttcgccgtcgtgccgcgtcaaatcccggccaatagtcgccttcgccaccgccactgccaccgctgaagctcgctcttcctggacggagcaaccgagaccttcctatctgaactcctcttgctcttcgctttacgatatcctcggcatccccgctggcgcctct

SEQ ID NO: 185653 - DNA, 274 bp, Glycine max
atcacttgttagttcaacatggctggcagtggcacctttgcagagatcatagatggtgatgtgttcaagtactatgcacaaggccattggaacaagtcctcttctggaaaattcgttcccatcatcaatccaaccactaggaagacccacttcaaggtccaagcttgtacacagaaagaggttaatagggtcatggaatcagcaaaaacagctcaaaaatcatgggccaagactccactgtggaaaagagcagagttgcttcacaaggctgcag

SEQ ID NO: 185654 - DNA, 267 bp, Glycine max
gttgagaactaagaagaaggaaatggcttcctcaatgatctcctccccagctgttaccaccgtcaaccgtgccggtgccggcatggttgctccattcaccggcctcaaatccatggctggcttccccacgaggaagaccaacaatgacattacctccattgctagcaacggtggaagagtacaatgcatgcaggtgtggccaccaattggcaagaagaagttcgagactctttcctacttgccagacctcgatgatgcccaattggc

SEQ ID NO: 185655 - DNA, 277 bp, Glycine max
atctcgcattccgtggagatctagtgcttctgctgcaagacctcgctgaaaattagggtttcgattcggaggtagacgaagatgttcggaagggctccgaagaaaagcgacagcaccaggtactacgaaatcctcggcgtttccaagaacgcttcgccggatgacttaaagaaggcttacaagaacagccgccattaagaaccatcctgacaaaggcggggatcccgagaagtttaaagagcttgctcaagcctatgaggttctgagtgaccctgag

SEQ ID NO: 185656 - DNA, 300 bp, Glycine max
gtcggtcgggagtcggctcgaggtgcctataatcatgattggtcctggcactggattggctcctttcagaggtttcttgcaggaaagattagctctgaaagaaggaggagctgaactcggcccctcagttttattctttggatgcaggaaccgtcaaatggactacatctatgaagacgagttgagtcacttcgttaatactggcgcacttgatgagctcattcttgccttctctcgagagggacccaccaaggagtatgtacaacataaaatgatggagaaggcttcagaaatttggag

SEQ ID NO: 185657 - DNA, 277 bp, Glycine max
cagtatggctcggcagctgtttatgtccctcgtgtccctggtaccgattctgaagaagatgatggatacttgatctgtcttgtacacgatgaaaataccggacaatcatttgtgcatgtcatcaatgcaaaaacaatgtcagcagatcctgttgcagttgtcgaattgccgcatagagttccatatggtttccatgccttctttgtgacagaggaacaactgcaagagcagggtaaactgtgataattttggcagcctcactgtaccgtcctgcctc

SEQ ID NO: 185658 - DNA, 275 bp, Glycine max
cctgcatctcattcgttcgtccactttcactttaccaactcctaacaatttctctctgtctccttcttcaccgcatcactggagttggacggcgttctcctcggcatgtgcaaccctctcctcgacatctctgccgtcgtcgacgacgctttcttgcaaaaatacggtatcaagttgaacgatgcgattctcgctgaggataagcacaaacctatgtatgaagaattggctaacaatcctaatgtggagtacattgctggaggtgctactcagaa

SEQ ID NO: 185659 - DNA, 273 bp, Glycine max
cagcggcaggttgtcagacgcttctggacttcagcacgaagatcgtcgctgttggcagacactacgctgctcatgccaaagaactaggcaacgccgttcccaaggagccggtgttgtttctgacaccgacgtcgtcttacttgagtaacggtggaaccattcacatcccacacaacgagggatcatcgcatcacgaggttgagctcgctgtggtcatctccaagacagcccgtgcactctcccaactctctgccatggattacgtcgccggtt

SEQ ID NO: 185660 - DNA, 272 bp, Glycine max
ggttttcagttccaaggacagtacaattacagatgaggatattgacagacttattgctaaaggagaagaagcaacagctgagcttgatgctaagatgacaaaatttactgaagatgctatcacatttcagatggatgacactgctgagttgtatgactttgctgatgagaaggatgagaacaaatttgctttcaaaaaaattgtgagtgacaattgggtcgagccaccaagaagagaacggaagcgcaattactcggagtctgaatacttca

SEQ ID NO: 185661 - DNA, 275 bp, Glycine max
ggctcgcctcgtgcgattcggctcactaatatttccctcactgtctctccagagaacttgatagacagatggcagctgcaacatgtggtgctgtgttaaatgggttgggatcttccttcttgagtggaggaaacaggagccaaacccttctggccactgctattggaggcaaagttggtgctgctgttactgttaatcccagaagactcattgtggtagctgctgctgcaccaaagaagtcatggctccctggtgttagaggtggtggcaatctc

SEQ ID NO: 185662 - DNA, 278 bp, Glycine max
cggctcgaggcacattctaatcttcgcaaatcaacaacgtctctctctgttactctgaaaactgacttcaagttagcgtaactagctgccaagttgtgatggcattggtctctggaagaagttctgctctgaacccaaatgcacctatgttcatacctgctgcacttcgtcaggtggaggatttttccactcaatggtgggatcttgtgaaatcttcaacatggtttcgtgattattggttgagccaacataaggaggaagaatttgaagaagttgcc

SEQ ID NO: 185663 - DNA, 276 bp, Glycine max
ggctcgatgtttccgttaacgctctccaatacaaaataaccactcactgaatattcggtcgaagatgtccgccgccgaagaagctaaagttcccgccgtcgaaaagccggtggaggaggtgaaggcgccgaagcttgccaaggagaagaaacctaaggctccgaaggcaaagaagccgaaacaggccaaaactgcttctcatcctccatatctccagatgattaaggacgctttgattgctctgaacgagaaaggaggatcgagtccatatgcgat

SEQ ID NO: 185664 - DNA, 274 bp, Glycine max
tgaagatgagtatggaggattccgtagtcctaaagtagtggcggattttcgtggctacgcaaacttctgcttcaagacctttggagacagagtcaaatattgggtcactttgaatgaacccttatcatttagtctcaatggctacaatggtggcacctttgcaccaggtagatgttctaaatacgttgccaattgtagtgctggcgattcatccactgaaccctatatcgttggacactacttattacttgctcatgaatctgctgccacatta

SEQ ID NO: 185665 - DNA, 249 bp, Glycine max
attcggctcgagctgtctcgaggtgagtctgtcgatctacataactagaaacattgtgatgaaaatgaaggaccatgtcttcttcgctgctacaattttcgtagcatggcaatgccatgcctacgatctgttccctctccgaatgatcactggctatggtgcccgtactccggaggtgatatgcgcaagttggaggcttgctgtggaagcacacaacatctttcgctttgagaccattcctgaagagtg

SEQ ID NO: 185666 - DNA, 244 bp, Glycine max
tgaaaatgaaggtccttgttttcttcgttgctacaattttggtagcatggcaatgccatgcgtacgatatgttccctctccgaatgaacactggctatggtgcccgtactccggaggtgaaatgcgcaagttggaggcttgctgtggaagcacacaacatctttggctttgagaccattcctgaagagtgcgttgaagcaacaaaggaatacatccatggcgaacaatatagatcagactccaa

SEQ ID NO: 185667 - DNA, 257 bp, Glycine max
gtacgaatcacttgcagatcaattgacagatataattgttgatgcagttttatgtattcagaagcctgaggaagaaattgatctgtttatggtggagatcatgcatatgcgacacaaatttgatgttgacacacgcttggttgagggtattgtccttgatcatggttctaggcaccctgacatgaagcgacgtgcagaaaactgctatatcttgacatgtaatgtatctttggagtatgagacgagtgaagtcaact

SEQ ID NO: 185668 - DNA, 248 bp, Glycine max
aaattactactcccatcaattgctgcacttcctttgttaatggcatatgctggacacacaactatagttataccaaagccacttgtcccacacattgggattgaggttttggatcttggatggatgtatcaactatatatggggctattggctgttttttgcacaaattccatcaatatacatgctggaataaatggccttgaagttgggcagactgtggttatcgcatcagctatcctgatacccaa

SEQ ID NO: 185669 - DNA, 251 bp, Glycine max
ccccaatcgtagccgtcgcactttgcgttttctgcgtcatctccgattccccgacaatggccacccaaatgagcaagaagagaaagttcgtagctgatggagtgttcttcgctgaactgaacgaggttctgacaagggagttagccgaggacggatactccggcgtggaagttagggttacgccgatgcgcaccgaaatcatcatcagagccaccagaacccaagccgttctcggtgagaagggaaggaga

SEQ ID NO: 185670 - DNA, 201 bp, Glycine max
ggcttatggtggatacctaggcacccagagacgaggaagggcgtagtaagcgacgaaatgcttcggggagttgaaaataagcgtagatccggggattcccgatataggtcaacctttcgaactgctgctgaggccacgggcaggcaagagacaacctggtgaactgaaacatcttagtagccagaggaaaagaaagcaaaa

SEQ ID NO: 185671 - DNA, 251 bp, Glycine max
gtttctcgccaaacaaacacaaaatggctgccttcagcggcgacgaaaccgcacctttctttggcttcctcggagccgcctctgccctcgttttttcctgtatgggagcggcgtacggaaccgcgaagagcggcgtcggggttgcgtcgatgggcgtgatgaggccggagctggtgatgaaatcgatcgtgccggttgtgatggctggtgtgttgggtatctacggtttgatccttgcggttatcataagt

SEQ ID NO: 185672 - DNA, 252 bp, Glycine max
aagagttctctctttcttcaactgatctattccattctccttcgggttttgttcagttgtcgctttcttacactggtgcttcacctgatgttatgacaatttctgcaatgccgaacaaggtggccacagatgcggcagtgcaggactcagaaacgtccgagtcactggccagggatttagacaaaatcgagttcccggatccgaagattgtcaatgaagaccacttgatggtttcagaatacttcggtattc

SEQ ID NO: 185673 - DNA, 256 bp, Glycine max
cattcacaaccgaaacagtttccatctctctcacaaaatgacaacaatatcaaattgctcccttctcttcctcttcctcttcctctccaccctccacatagcttccaccctctcaacccccaccaacttcatcaagtcctcctgcagcaccacccagtacccagccctctgcatccagtccctctccgtctacgcctccaccatccagcaagacccccacgagctcgtccagacagccctctccctctccctcaac

SEQ ID NO: 185674 - DNA, 253 bp, Glycine max
cagagcctaaactatacttttgcttccagatatgtgcgtgaacctattccaaagttcaagatgccagagaaatccataccaaaagatgccgcttatcagataataaacgatgagttgatgttggatggtgcaccttggctcaacttggcctcgtttgtgcccacttggatggagcctgagtgtgacaagctcataatggcttcacttaacaagaactacgttgacatggatgagtatcctgtcaccactgagc

SEQ ID NO: 185675 - DNA, 253 bp, Glycine max
cctcaagccgaatcggctcgatggagttcagaagcttgaacctagagccatccccaaaatccgcttccatagtgaaggagtactggagtagattactataagattttgcaggttgacaagaatgccaccgatgaagagttgcagaaagcttacagaaagcttgcaatgaaatggcaccccgataagaatccaaccaataagaaagaggctgagactaagttcaagcagatatccgaagcttatgaggttctga

SEQ ID NO: 185676 - DNA, 249 bp, Glycine max
  unsure (1)..(249): unsure at all n locations
cgcgatcagttctgcaagggctttccgataaccatttcatccccagcccgaatccgtcacatcagcgaaggccttagtttgaacattgggttcactttcgcatccccgtgttcccccgcttctgagtggaccattgtgaaggatcaaccagaaggacctcgctgttaaactcactgggtttaataatacagtgcccggtgtgtttacattgatgatcgntcccgccgatgaattatcggctacaacatc

SEQ ID NO: 185677 - DNA, 256 bp, Glycine max
ctgactctgaaatacttctttgaaacaaaagttacaatcaattatccatttgagaaaggccctttgagccctcgtttccgtggtgaacatgcactccggcgatatccaacaggggaggaacgttgtattgcttgcaaactttgtgaggctatatgtcctgcacaagcaatcacaattgaggctgaggagcgagaagatggcagccgcaggacaactcggtatgatattgacatgaccaagtgcatctattgtggat

SEQ ID NO: 185678 - DNA, 252 bp, Glycine max
tctcgagccgattcggctcgaggtcatttctgggctcaacgtgatgcgaattatcaacgagcctaccgcggctgccattgctctatgggctcgacaaaaaggccactagctctggggagaagaatgttctcatttttgatctcggtggtgggacttttgatgtctctcttctcaccatcgaggagggtattttcgaggtgaaggccactgctggtgatactcacttgggaggtgaagattttgataacagaa

SEQ ID NO: 185679 - DNA, 250 bp, Glycine max
gccaagggaacgggcttggcggaatcagcggggaaagaagaccctgttgagcttgactctagtccgactttgtgaaatgacttgagaggtgtaggctaagtgggagctggaaacagcgaaagtgaaataccactacttttaacgttattttacttattccgtgaatcggaagctgggcactgcccctctttttggacccaaggtcggcttcggccggtcgatccgggcggaagacattgtcaggtgggga

SEQ ID NO: 185680 - DNA, 248 bp, Glycine max
tctcgagcgaatcggctcgagtcccactaaacaaaaaaaataaagcaaaatttaccaaaaagccttcttcttccaccaccatagtctcctaataagtgatccaccccgaccagaaatcaaacatgaaacccttgagactctctgtttctgaccttccaatgttgtcgtgtcactacatccaaaagggcgtgttactaaccgctccgccctcgtctttcgaggatatgatactctcttttaaacactct

SEQ ID NO: 185681 - DNA, 250 bp, Glycine max
ggaaaattggggtgattctccgctatctatgcttccaatatatcaagaacttattgaaggtggtatcagaatatgggtattcagtggagacactgattcagtagttcctgtaaccgcgtctcggtattcaatccgtgccttgaacctatctaccatcatcaattggtacgcttggtatgataatgacgaggttggtggctggagtcaagtttatgaggggcttacattggttacagtaagaggggcaggg

SEQ ID NO: 185682 - DNA, 254 bp, Glycine max
atttggtcatgcaatagaaactggggttggctatgggcagtggcttcatggagaggctgttgcagctggcacggtaatggctgttgacatgtcatatcgcctaggttggattgatgattctctagtgaagagagttggagacattttaaaacaggctaagttacctaaagcccctcctgagaccgtgactgtggacatgtttaaatctgtcatggcagtggataagaaggtagcagatgggttgctaaggctta

SEQ ID NO: 185683 - DNA, 262 bp, Glycine max
cctgccagtagtcatatgcttgtctcaaagattaagccatgcatgtgtaagtatgaactaattcagactgtgaaactgcgaatggctcattaaatcagttatagtttgtttgatggtatctactactcggataaccgtagtcattctagagctaatacgtgcaacaaaccccgacttctggaagggctgcatttattagataaaaggtcaacacaggctctgtctgttgctttgatgattcatgataactcgtcggatcgca

SEQ ID NO: 185684 - DNA, 257 bp, Glycine max
ggtacgctgaactactttgggaaacccatccccatcaatcttattgtggctgtcattgctgagattgttcttgtgggaggtgcagagtactacagaattattaatggcctgaacttcgaagacaaacttcatccaggtggtccatttgacccattggggcttgcaaatgatccagaccaagctgcactgctaaaggtgaaggaaattaagaatggcagacttgctatgtttgccatgcttggtttctacttccaagc

SEQ ID NO: 185685 - DNA, 203 bp, Glycine max
cctttgttcactcttctactcttgcggctagggttttagcgcagttcttctagatttaaggaagatgggtaaggaaaaggttcacatcagtattgtggtcattggccatgtcgactctgggaaatccactaccactggtcacctgatttacaagcttggaggcattgacaagcgtgttattgagaggtttgagaaggcagctg

SEQ ID NO: 185686 - DNA, 250 bp, Glycine max
tcgagcttctcttcattcttcactttggaaacaatcataatggcgttctgtaataaggttggaaatgtcttgaggcagggtgctgctcgcagcacacatgcccctgttgcgtccatgcttaattacatccgctgcatgtcttcaagcaagcttttcattggaggcctttcatatggagttgatgaccagtctcttaaggatgcattttctggctttggagatgtggttgatgcaaaagttataactgata

SEQ ID NO: 185687 - DNA, 230 bp, Glycine max
gacctatctggtgcagtgtacaccaatgactagtgccgtgtagttgagcctcatcaaaattgcatgaagactggacgtcctgattcagagtacctctactggccgttgaacccacgagactgtaaattgcccaaattcaatcccagaaagtttctcaaactcatgagaaacgaatcattgtcattcattggtgattaccatctcccgcaaccaagttcagtccctacttt

SEQ ID NO: 185688 - DNA, 245 bp, Glycine max
gtcagagtgagaaagagagagagagagagagaaactgagagatattcgcaaaccctaatttcggaaagatcggcgatggctgcctccaaggatcgcgagaacttcgtctacatcgccaagctcgccgaacaggccgagcgatacgaagagatggtggaatcaatgaagaacgttgcgaatctcgacgttgaactgactgtggaggagcggaatttactttctgttgggtacaagaatgtgattgg

SEQ ID NO: 185689 - DNA, 253 bp, Glycine max
atgacttttaagcgcaggaatggaggtcgcaacaaacacggccgtggccacgtcaagttcattcgatgctccaactgcggcaaatgctgtcctaaggacaaggctatcaagaggtttctggtgaggaacattgttgaacaggctgcagtcagagatgttcaggaggcttgtgtctatgaacaatacacgcttccgaagctttatgtgaagatgcagtattgtgtttcctgtgctatccactctcatgttgtga

SEQ ID NO: 185690 - DNA, 253 bp, Glycine max
gtttgctgaactcatgaccaagattgacaggcgatctggcaaagagcttgagaaggaacccaagtttttgaagaatggtgatgctggttttgttaagatgattccgaccaaacccatggtggttgaaactttctctgagtaccccccacttggtcgctttgctgtcagggatatgcgtcaaactgttgctgtgggagtcatcaagaacgtggagaagacggatcctactggagccaaggtcaccaaggctgcc

SEQ ID NO: 185691 - DNA, 262 bp, Glycine max
tagcgaggagacacaccttcagcagcagcagccatggttctcaaaaccgaactatgccgattcagcggtgccaagatctacccagggaatggcatcagatttgttcgtggtgattctcaggttttcctgtttgctaactcgaaatgtaagaggtatttccacaacaggttgaagccatcaaagctcacctggactgcaatgtacagaaagcaacacaagaaggacattgctcaagaagctgtgaagaaaagaagacgtgctg

SEQ ID NO: 185692 - DNA, 255 bp, Glycine max
cttgctttagccatcactaacactcagtctctgaattgcggctgagggtttcgagtaacgttttttttttctgagtttaagatatcatgggtaaagagaaggttcacattaacattgtggtcattggccatgttgactctgggaagtcaaccaccactggccacttgatttacaagcttggaggtattgacaagcgtgttattgagaggtttgagaaagaagctgctgagatgaacaagaggtcattcaaatacg

SEQ ID NO: 185693 - DNA, 254 bp, Glycine max
agaagaaggaaatggcttcctcaatgatctcctccccagctgttaccaccgtcaaccgtgccggtgccggcatggttgctccattcaccggcctcaaatccatggctggcttccccacgaggaagaccaacaatgacattacctccattgctagcaacggtggaagagtaccatgcatgcaggtgtggccaccaattggcaagaagaagttcgagactctttcctacttgccagacctcgatgatgcccaattg

SEQ ID NO: 185694 - DNA, 252 bp, Glycine max
gttctctgctctttttcttcttctacccccacaccggaggagagaaaaccaatatcactcttcaccgttagggtttgggtttcggtttccccctaatccaatcgcgcagcagcagcagcgagatgggcgccaattcgttgtcatcggcggaatcaaccctcgatctcgacgagcagatatcgcagctcatgcaatgcaagccactctccgaacaccaggttagagttttatgtgagaaggctaaggagattt

SEQ ID NO: 185695 - DNA, 247 bp, Glycine max
tgcagttttaaaagtataaagatggcagagacattcctatttacctcagagtcggtgaacgagggacaccctgacaagctctgcgaccaaatctccgatgctgtcctcgacgcttgcctcgagcaggacccagacagcaaagttgcctgcgaaacatgcaccaaaaccaacttggtcatggtcttcggagaaatcacgaccaaggccaacgttgactacgagaagatagtgcgtgacacctgcagga

SEQ ID NO: 185696 - DNA, 248 bp, Glycine max
gtgaccgctcttgttggagtcacggcaaatcagaatgcatacttcaaaggattattttatgcatcttctactgcagctaccgctatgagtaatctgataccggcattaacgtttgtaattgcagccattgcgggatttgagaaagttgacataagcttaagaagcacggccaagatattagggacagtttgttgcgtggctggagccttaaccatggcattggtcaaaggacagaagctgttacacac

SEQ ID NO: 185697 - DNA, 246 bp, Glycine max
aagaaaatgaaagtccttgttttctttgttgctatagttctagcagcatggcattgccatggctcagaccatgaccatgaccatggccacacctaccaaattttccctctgagaatgaaaactggccatggtggccactacattccggaggtatcatgccaaagttggaggcttggtgtggaagcacacaacgtcattgactggaaaaccgttcctcaagattgcgagggatatattgggaactac

SEQ ID NO: 185698 - DNA, 248 bp, Glycine max
ggcagcaacattgatggcagcaacaacaagttctggtactcttaaagcaactcctttccttggccaaggcaagggtgccaatgccaatgctcttagggatgttgtctccatgggaactgggaagtacaccatgggcaatgatttgtggtatggaccagacagagtgaaatacttgggacccttctcagctcagaccccttcatacttgaaaggagaattccctggggattatggatgggacactgctg

SEQ ID NO: 185699 - DNA, 256 bp, Glycine max
attattattaattactaaggaactctcccagaaaagaggcatcagttgcaatggctcgttacggtgagggcgacaagcggtggatcgtggaggaccgccccgacggcaccaatgtccacaactggcattggtccgagaccaactgcctcgactggtccaagaccttcttcaccagcctcctcactaacctcccaatcctcgacggcgagggtaacctcttcctcaaaacgacgtcgcttcgctccctcgacggcga

SEQ ID NO: 185700 - DNA, 250 bp, Glycine max
tggttgggttctctggagaagcaagcaggacttgcctgaggaactcatctttcacatcaactatcttggggctgatcaacccaccttcacccttaacttctccaaaggttctagccaagtcattgctcaatactaccaactgattcgccttggttttgagggatatagacacgtgatggacaactgcagggacaacatgctggtgctcacagagggactcgagaaaacagggcgattttcaattgtgtcc

SEQ ID NO: 185701 - DNA, 252 bp, Glycine max
ggaattgtcgtaactttttgattcctaaattctctaaaattcgtaattctaatttcgttaggggaaagagattgtttgtgtgtgagtgagtatggctggaaaaggcgagggtcctgctatcggaatcgatttgggaacgacgtagtcttgcgtcggcgtgtggctacacgatcgtgttgtgctcttatccaggggtcagggtttcagaatttcccaatcctacgtggctcacaccgacacagaacggtagat

SEQ ID NO: 185702 - DNA, 242 bp, Glycine max
ataatggcagaaacagaagacaaaacccttcaagcctcgcccatgaacgaaaccaagaagatgaagaagaataagaataagaataagagcgacaaacaaagacctcgggagattgctaccgaggagcgtccagaggaagaggagaatgagaataatacagatagcgatggagaatcctcgaagaagaagaagaagaagaaggtggaaggagaaagtgaagtgaaagagaaacaggtgaagac

SEQ ID NO: 185703 - DNA, 251 bp, Glycine max
gccaaagagctattaaaagacgatgaccttgaggttagtggacgatctaaattacttagccagcagaaattgtcctacaatgggttagagattatattttccgcatatggtgagttttggagtattattagaaaaatttgtgttgttcatgtccttagctccaggcgtgtctcaatgttttcctcaatgagagaatttgagatcaagcaaatgattagaacaatatccttgcacgcctcatcttcaaaagt

SEQ ID NO: 185704 - DNA, 247 bp, Glycine max
gccaaagagctattaaaagaccatgaccttgaggttagtggacgatctaaattacttagccagcagaaattgtcctacaatgggttagagattatattttccgcatatggtgagttttggagagaaattagaaaaatttgtgttgttcatgtccttagctccaggcgtgtctcaatgttttcctcaatgagagaatttgagatcaagcaaatgattagaacaatatccttgcacgcctcatcttcaa

SEQ ID NO: 185705 - DNA, 247 bp, Glycine max
tctggtcatcgttgggatctccatacgccggatctgctaaaatacgcttgatccatatgggcctcctcgaccacttgtgggacgacaccgtcgccggcccaaggccggaaaacggtctcggcaagctccgaaaacaccacaccttcactttccgacctagctccggcaagggtacgccctgcctcgttaatcatactcatataattcaccaacgattttcgttaactacaagtccacaactacaatc

SEQ ID NO: 185706 - DNA, 254 bp, Glycine max
gactgagacacggcccagactcctacgggaggcatcagtggggaattatccgcaatgggcgaaagctgcatggagcaatgccgcgtgaaggtaaaaggcctacgggtcatgaacttcttttcccggagaagaagcaatgacggtatccggggaataagcatcggctaactctgtgccagcagccgcggtaagacagaggaatgcagcgttaatcggaatgattgggcgtaaagcgtctgtaggtggcttttaaa

SEQ ID NO: 185707 - DNA, 280 bp, Glycine max
gtttgttgtgagctataagctagtttatcgtgaggagaatatgaagttgtttgttttctttgttgctgcagtagttttggtagcatggccatgccatggcgcaggctaccaaaggttccctctccgaatgaaaactggctatggtgagcgttcttcggaggtaaaatgcgcaagttttaggcttgctgtggaagcacacaacatccgagcctttaaaaccattcctgaagagtgcgttgaaccaacaaaggactacattaatggcgaacaatttagatca

SEQ ID NO: 185708 - DNA, 279 bp, Glycine max
tcgagataactagaaacagtgtgatgaaaatgaaggtccttgttttcttcgttgctacaattttggtagcatggcaatgccatgcgtacgatatgttccctctccgaatgaacactggctatggtgcccgtactccggaggtgaaatgcgcaagttggaggcttgctgtggaagcacacaacatctttggctttgagaccattcctgaagagtgcgttgaagcaacaaaggaatacatccatggcgaaccatatagatcagactccaaaacagttaacc

SEQ ID NO: 185709 - DNA, 280 bp, Glycine max
tgaatctcagaattctctaaaagagatctttttctgctctttgaagaaagaagggtctttgcttgattttggagatgtctctgctctcagatctcatcaaccttaacctctccgataccaccgagaaggtgatcgcagagtacatatggatcggtggatcaggaatggacctgaggagcaaagcaaggactctcccaggaccagttagcgacccttcagagcttcccaagtggaactatgatggttccagcacaggtcaagctcctggtgaagacagtga

SEQ ID NO: 185710 - DNA, 275 bp, Glycine max
atttttcaagtaacttaaggtttcaaacctaggaagttggaagtcatggcagcaacattgatggcagcaacaacaagttctggtactcttaaagcaactcctttccttggccaaggcaagggtgccaatgccaatgctcttagggatgttgtctccatgggaactgggaagtacaccatggtactcttcttcttcatgttttatgttttactatcacaaaagttttatggtgttgattacgtagtgtggttgatatgttatgtgggtctgtgttt

SEQ ID NO: 185711 - DNA, 137 bp, Glycine max
  unsure (1)..(137): unsure at all n locations
gttgaaatgactctgaagttgatggagcgttttggagtttctgtggaanacagtggtaattgggataagttcttggtccatggaggtcaaaagtacaagtctcctggcaatgcttttgttgaaggtgatgcttcaag

SEQ ID NO: 185712 - DNA, 278 bp, Glycine max
acattgtgtgaatcaaatgaactacttgaaatgtgtagtcaaagaaactttgagattacatccaacccttcctcttttgattgctcgagagacatcatcaagtgtaaaactaagagggtacgatattcccgcaaaaacaatggtatttatcaatgcatgggcgatccagagggatcctgaattatgggatgattctgaagaatttattcccgaaagatttgaaactagccaagttgatcttaatgggcaagattttcaattaatgccgttcggtattg

SEQ ID NO: 185713 - DNA, 274 bp, Glycine max
atcacatgcacccgcgattcctacgatcccttcccatggtctcttctctgcaccctcgccgtaccttctagaaccttccctcagatctcaattccccttccgctttctcctttcatggaaatggcttccactccccgcaccgtcgaagagatcttcaaggactacaccgcccgcagaaccgccatcgttcgcgctctctctcaagatgtggatgaattctacggactctgcgatccagataaggagaacttgtgcctctatggacatccgaatg

SEQ ID NO: 185714 - DNA, 271 bp, Glycine max
tcgagcacatatttgccgtgagcatgactgatgactttgacagattcatgaaggtgcctaatgagtgggctcctcctgaaactaagccatatgctccaggggaaaatcttcaacactggctcactgatgcaaaggccagggaccagtttgtgattcgtgctggttcggatactgaggttttgtggaacgatgccaggcatttaaagcctgatcctgtttataagcgtgcattttggacagagagttttgtgcaatggcctcctttggggac

SEQ ID NO: 185715 - DNA, 272 bp, Glycine max
gcaaaagcaagaagaactagtctaagcagaaatggcctcttcagtgatggcatctgtggccctcaaacctgcccctttcactgttgagaagtcctcagttagaggccttccctccctctcaaggaactcctcttcattcagagttgtggccagtggtggcaagaagatcaagactgacaagccttatggacttaatggtggcatggctttgagggaaggagttgatgcatctggcaggaaaggaaagggaaagggcgtttaccagtttgtag

SEQ ID NO: 185716 - DNA, 132 bp, Glycine max
ctgtcatgctggtgaccacttgcttaatgtctctagttatagtcttgtgctggcacaagaacatactgctagcagtttgcttcatattgttctttggttccattgaagcactctatgtctcagcatccctca

SEQ ID NO: 185717 - DNA, 267 bp, Glycine max
atcgcaattaccccaaattcctcaccctagcgtagctcgatctcttcttccttcgtgaattctggttcatggtggctgccatgtatggcacttagtattttccctttttgaagattaggggtgggtgggttgtgtctcgcttagggttccaaagtttgttgttttgaatggaacctcgcgttgggaataagtttcgcctgggtcggaagatcggaagtggatcctttggggagatctatttaggcactaatattcagacaaatggag

SEQ ID NO: 185718 - DNA, 272 bp, Glycine max
  unsure (1)..(272): unsure at all n locations
ctggccttttgttctcgtgtcaatttctaaatccaccaccacacnctctcttctattctctattattattatctccacacccttcactctcnctcactcttctctgcgaatcttccaccgcaatggccacnactggccgagaaactctccgctctcaaatccgccgtcgccggattgancgaaatcagtgagaatgagaagaacggattcatcagcctcgtcggcngcnatctcagtggcgaaggcagcatgtggatggagcaagatccaga

SEQ ID NO: 185719 - DNA, 269 bp, Glycine max
ttacaatctcccaagtttctaatctcagctaagaaaaaccaaaagatgtctctgattccaggtttcttcggtggccgaaggagcaacgtgttcgatccattctcactcgacatgtgggatcccttcaaggattttcatgttcccacttcttctgtttctgctgaaaattctgcattcgtgagcactcgtgtggattggaaggagaccccagaggcacacgtgttcaaggctgatattccagggctgaagaaagaggaagtcaaggttca

SEQ ID NO: 185720 - DNA, 274 bp, Glycine max
gagtttacatcatacttccactactgccgaacgttgcggtttgaagataagcctgattattcttatcttaagagactatttcgggacctattcatccgagaaggttatcagtttgattatgtatttgattggactatgctgaagtatcctcaaattggatccagttctagagcccgagtgagtacttaactagtgtggtttcattgcatttctagcgataattaaaggttcttgttaatcattttttggctgcattttcaacagccatgtggga

SEQ ID NO: 185721 - DNA, 274 bp, Glycine max
tcaaaatcaaaattttcactcgcaccacactgcacaatttcggagtgtggctggctccatggctgaactctacaggctcagctccgtcgagtggagcccttctccggtcatcgctttagccaccagtttcgacggctcccgagtagccgtcgctcgcaaagacggctccctcgaaatctggctcgtctctcccggctccatcggctggcactgtcagctgactatacacggaaaccctaacggatgagtgacgtcgcttcatttaggtgcccgg

SEQ ID NO: 185722 - DNA, 257 bp, Glycine max
ccactccttcactgctcatccaaaagttgacccatttactggggagatgtttacacatacagagtaatttcaaaggatggttatatgcatgatccggtacccataacagtatcagatcccatcatgatgcacgactttgccatcacagagaactacgcaatatttttggatcttctttgatttttaggccaaaggtatcccaggtgtttcggtcctatatcctcgtaaagctatattcaaggttggaacttcttttt

SEQ ID NO: 185723 - DNA, 269 bp, Glycine max
gtgtggttgaaacttaagaagtagcaaagatgtttccattcgggcacaagggtcaaaagataaaggggactatggtggttatggagaagaatgtgttggatatcaacagcatcaccagtgttgacgggatcgtcggcaccggcttagacttcttaggcagtgcactcgatacagttacttttttagcctcctccatctccatccaacttattagtgctaccaaggctgatggtgggaaaggataagttggaaaggctacaaatttgaga

SEQ ID NO: 185724 - DNA, 270 bp, Glycine max
tgggagggtccgaagttggagatagtgattctggttctgttctgttcttctttctactcacaacaacatcagaatcagaaacaacaatggccaacactaacttggaagatgttccctctctggatctcatgactgagctccttcgtcgtctcaagtgctcttccaaacctgacaagcgtcttattctcattggcccacctggatctggaaaaggcacccagtcaccaatcataaaagatgagtactgcttatgccacttagctaccggtg

SEQ ID NO: 185725 - DNA, 271 bp, Glycine max
gagaatgaggaacacatatgcgtattgaaggaccgcaacaaaccaataatcttcaccatggcaaggcttgaccgtgtgaagaacatcacggggcttgtcgagtggtacgggaagaacgcacgcctccgcgagttggtgaacctggtggtggtggctggagacaggaggaaggagtcgaaggacttggaagagaaggccgagatgaagaagatgtatggcctcatcgagacctacaagttgaacggccaattcagatggatatcctctcaga

SEQ ID NO: 185726 - DNA, 265 bp, Glycine max
ggcaaaagctggaaaactcgacccagtcataggaagagatgatgaaatacgaaggtgcatccaaattctctccaggaggacaaagaacaatcccgtgctaattggtgaacctggtgttggaaagactgctatttctgaaggactggctcagagaatagtgcacggagatgttcctcaagctttgatgaaccgtaggcttatatctctcgatatgggagcacttattgctggagcgaagtaccggggagaattcgaggataggctg

SEQ ID NO: 185727 - DNA, 263 bp, Glycine max
attttaatcacgcgcacatcagcacaacacaacaattcactaagctaaaatcacttcatcatggcttcctcgtgtgcttcctctgccattgcagctgttgccatctccacaccaagttcccagaagaatggatcactcttgggaagcacaaaagcttcttttcttagtgggaggaaactgaaggtgaacaactttacagcaccagttggagcacgatccagcactacagtttgcgcagttgctgagcctgataggcctctgtg

SEQ ID NO: 185728 - DNA, 261 bp, Glycine max
ggccgcgcgagctctgttgaccagaaaaaccctagccaccgtgctccgcaacgacgcgaacccataatcggagttggcataacagcagcggctactcattcacgcgggttgcacgtgtacacgctacccgatctggattacgactatggcgcactggagccagccatcagcggcgacatcatgcagctgcaccaccagaagcaccaccagacttacatcaccaactacaacaaggccctcgagcagctccaagacgcatcg

SEQ ID NO: 185729 - DNA, 259 bp, Glycine max
cgaacaaacacaaacatggatgcatccaaactcaatcacttgaagcatttcatcgaacagtgcaagtccaacccttccctcctctccgatccttcactctccttcttccgcgactatctcgaaagtctcggggcgaaactccctgaatctgcttattccgaatcgacgggcgtggagagcgatgaggacatagaagatgttacggaggagcaagagaaggtagaagaagaagaagaagatgatgacataattgaatccg

SEQ ID NO: 185730 - DNA, 258 bp, Glycine max
ctcactttcatttctacatccctggctctgttccgtcgatgacgatggcgtttagggtgcgaaaccctgacctccgctttctcattcttctctctctcttgtccatcacttccgccaaggtcttcttcgatgagcgtttcgatgacggatgaggaaatcgttgggttaaatcagattggagaaaagatgagaatctggctggggagtggaaccacacctctggcccatggtatggagacgctaacgacataggtattc

SEQ ID NO: 185731 - DNA, 266 bp, Glycine max
cgagataactagaaacagtgtgatgaaaatgaaggtccttgttttcttcgttgctacaattttcgtagcatggcaatgccatgcgtacgatatgttccctctccgaatgaacactggctatggtgcccgtactccggaggtgaaatgcgcaagttggaggcttgctgtggaagcacacaacatctttggctttgagaccattcctgaagagtgcgttgaagcaacaaaggaatacatccatggcgaacaatatagatcagactcca

SEQ ID NO: 185732 - DNA, 218 bp, Glycine max
  unsure (1)..(218): unsure at all n locations
cagaacaaacaaaacccacacttcactcccatccaattccaaacccacgttgttgntggtgcatggaatgaccgagtaccggatgaacctgtggaccgacgacaactcctccgtcatggaggccttcatgagctcctccgacctctcctccctctggcttgccacgccgcagtccgccacctccaccacaactccaggcncggcaaaagcccctcctc

SEQ ID NO: 185733 - DNA, 263 bp, Glycine max
tggactctctatgggaattcaaggtactgaagtggcgaaagagagctcagatattgttatattggatgacaattttgcatctgtggtcactgtcttaaggtggggaaggtgtgtttacaacaacatccagaagttcattcagtttcaattgacagtgaatgtggcagcacttgcaatcaactttgtggcagcagtgtcagctgggaaagtgccactaacagcagtgcaattattatgggtgaacttgatcatggacacattag

SEQ ID NO: 185734 - DNA, 259 bp, Glycine max
attcgctctgtgcagtttcctcgctctcttttctgcaattttcttttttgttccttctctgcggttatctttttgagcttcaatggcggacgctgaaaccttcgctttccaggctgagatcaaccagcttctcagcctcatcatcaacaccttctacagcaacaaggagattttcttgcgtgaactcatcagcaacgcttctgatgctttggataagattcgatttgagagtttaaccgacaagagcaagctcgatgct

SEQ ID NO: 185735 - DNA, 259 bp, Glycine max
ggacaagtggcgaaaccagtttgaacgctattattgtttgtgttcccagcgaaagggcaaaacaaagtataagaccttgcattgatatgcttcccttttcttgttgtcgtgtcaaccatggcgtcgtttgggtctctgaaatccaccattttcgaaaaagaagagagaaaacagcagtatcagtcgcatattcgaggcctcaatgcatacgaccgtcacaaaaaattcatggacgattacgttaaattttatggaaaag

SEQ ID NO: 185736 - DNA, 262 bp, Glycine max
tagaaacagtgtgatgaaaatgaaggtccttgttttcttcgttgctacaattttggtagcatggcaatgccatgcgtacgatatgttccctctccgaatgaacactggctatggtgcccgtactccggaggtgaaatgcgcaagttggaggcttgctgtggacgcacacaacatctttggctttgagaccattcctgaagagtgcgttgaagcaacaaaggaatacatccatggcgaacaatatagatcagactccaaaaca

SEQ ID NO: 185737 - DNA, 138 bp, Glycine max
cccagttccttgatctctcctctcaagatgcagatattcgtgaaaactttgaccggcaagaccatcacccttgaggtcgaatcctccgtcaccattgacaacgtaaaagctaagattcaagacaaggaagggatccca

SEQ ID NO: 185738 - DNA, 132 bp, Glycine max
gactagggaacagtataagcttttctgaatgtggagggattgaaattgaggagaattgggataaggtcaagactgtatttatgccaacaggagtgtctcttacatcagagagtattgccccacttgttgcaa

SEQ ID NO: 185739 - DNA, 287 bp, Glycine max
cggatctagagtcttcagtttctcctcgttgttcttcgctttcctgttttcaatttcgtctctctcgttaatttaataagatgtttgggagggcaccgaagaagagcgataatacgaggtactacgaaatcctcggcgtctccaagaacgcttcgcaggatgatctgaagaaggcttacaagaaagccgccattaagaatcaccccgacaagggcggtgatcccgagaagtttaaagagctggcgcaagcttatgaggttctgagtgaccctgagaagcgtgagata

SEQ ID NO: 185740 - DNA, 285 bp, Glycine max
cacttacaaagtagtactacttggtttcaatcaaaacaaaaactcacactttggtggccacagcaacaataacaatggcagcctcactacaagctgcagctaccttcatgcaacccaccaaggtgggcatggccactcgcaacctcaaatctacacaatgcatttctaaggcttttggcttggaacccgctgcagctagactcatttgctcccttaagcccgatctcaaagattttgctcaaaaatgtgtcgacgccaccaaaattgcaggattcgcccttgcca

SEQ ID NO: 185741 - DNA, 277 bp, Glycine max
gtttgcagtcactgctttgtttagatcagaaccagatcgtgttctcttcttccattggcaaacatggcaactcaaatgagcaagaagagaaagtttgtggcggatggagtgttcttcgccgaactgaacgaggttctgacacgtgagttggcggaggacggttactccggcgtggaggttagggttacgccgatgcgcaccgagattatcatcagagccaccagaacccaagccgttctcggtgagaagggaaggagaattagggaacttacctcag

SEQ ID NO: 185742 - DNA, 282 bp, Glycine max
ggaagaaccaccactaccttatccatttccactcctcaccaagccacaccatggcctcaaccaacgccctctcttcagcttccattctacgctctcccaaccgccagtctctgaccagaagagcgaaccacaacggaagagtaaattaccgtcaaccgaatagccgtttctccgtcaaagcctccgccaaagagattgcctttgaccagcattcccgctctgctatgcaggccggcattgacaagctcgccgacgccgtcgggctcactcttgggcccaggg

SEQ ID NO: 185743 - DNA, 277 bp, Glycine max
cgttgttgttgttctaaaacgtccacacattctccgtcgccacaacaacaatggctccgaagaaaggtgtgaaaagttccgttgtagcagcgacgaagcaggttcatgagaaggtgacgaatcctttgttcgagaagcgtccgaagcagttcgggatcggaggcgcgctgccgccgaagcgggacctgacgcggttcgtgaagtggccgaagaacgtccaaatccaacgcaagaagcgcatcctcaagcagaggctcaaggtccctcctgcactcaa

SEQ ID NO: 185744 - DNA, 274 bp, Glycine max
caaaaaatgaaaacccaaagtgcttctctcctctgtctttttctctctcttgctatccttttggctagtacgcactgctgcaagtgcaactccaagaagcgcagtgccaagccaccatgtttcaacattcaacagaagcctttttccttccacttttctctttggaattggttcttctgcttaccaggcagaaggagcagcaagtgtagatgggagaggcccagcatatgggacacctacactagacagcatactgaaaagatttgggatcata

SEQ ID NO: 185745 - DNA, 275 bp, Glycine max
cttggctgcaacttttggtctctccgcagaatctcgttccaattcgagttcatcctctaaaggggaaggtggtgtttggaatctgggaaaatgggtttgttttctgggatttttatgggggtgttgttcggcatcgcattgatggctggatgggcgcgcatgatgaagtaccgaagtgccaaacgaattgcaaaggcagctgacattaaactccttggatcccttaatagagatgatttgaagagaatttgtggtgataatttgcctgagtggat

SEQ ID NO: 185746 - DNA, 275 bp, Glycine max
cttctcccgccgcaactcactgtcttccttctctagggtttttagctcccccaatttcttcgctcaacatggttcttcaaaatgatattgatttgctaaatcctccggttgagcttgagaagaggaaacacaagctcaagcgtcttgttcagtcaccaaactctttcttcatggatgttaagtgccagggttgcttcaacataaccactgtctttagccactctcagactgttgttgtatgcggaaactgccagactgtcttgtgtcaaccaacc

SEQ ID NO: 185747 - DNA, 274 bp, Glycine max
gtgaaagagaatccgaggcgaagagaagagaaaaattaagatggaggggaaggagcaggatgtgtcgctgggagcgaacaagttcccggagagacagccgattgggacggcggcgcagagccaagacgacggcaaggactaccaggagccggcgccggcgccactggttgacccgacggagtttacgtcatggtccttttacagagcagggatagcagagtttgtggccacttttctgtttctatacatcactgtcttaaccgtcatgggagtc

SEQ ID NO: 185748 - DNA, 90 bp, Glycine max
tgcaagtctcagtgcataaatcacggtagatactgtgctccggatcctgagcaagacttcaccacaggttatgatggcaaagatgtcgtt

SEQ ID NO: 185749 - DNA, 284 bp, Glycine max
catcaaagttttgtcctttctctgctctttggcttctctgacacatttggtgccttgtagagcgtgttttggcaggaaggtggtatggcgaaggacgttgaggttgctgagcgtggctccttctctgggaaggactaccaggaccctccaccagcaccactcattgatgctgaggagctcacaaagtggtccttttacagggctctcattgctgaattcattgccactttgctcttcctctacattactgtgctcacagtcatagggtacaatcaccagactga

SEQ ID NO: 185750 - DNA, 278 bp, Glycine max
agtttatcggtttctcaatcgttagatctcatcttatactcaccggcgagtccatctcgcgccaggatcgtagccgctccggccaccgcctttggttccctcactttctcgtccttcttcttctcagaaatatgccttctcaaaaagttgaaacgggtcatcaagacacggtccatgatgttgcaatggattactatggtaagacgctggccacggcttcatcagatcacacaattaagataattggggtgagtaatacggcctctcagcatctcgca

SEQ ID NO: 185751 - DNA, 271 bp, Glycine max
caagaggctttagcaactcttgtggtgaacaaacttagaggatcactgaagattgcagcactgaaggcccctgggtttggagagcgcaagagccagtaccttgatgatattgccatcttgactggatgtactgtaatcagagaagaggttggccttactttggacaaagctgtctaagaggttctcggatatgcctccaaggtggtgctcaccaaggatacaaccacaattgttggtgatggaagtacccaggaagcagtgaacaagagag

SEQ ID NO: 185752 - DNA, 274 bp, Glycine max
agcagatgcagcatgcctgcaatgaatgtaagggtactggagaaactatcaatgacagagatcgctgcccacagtgcaagggagagaaggttgtgcaggagaagaaagtccttgaagttattgtagaaaaggggatgcagaatgggcagaagataacattccctggcgaactgatgaagcgccggacacaattactggggatatcgtctttgtccttcagcagaaggaacatcccaaattcaaaagaaaggctgaagatctttttgtagagcac

SEQ ID NO: 185753 - DNA, 133 bp, Glycine max
gtggttatcgagcaaagttttggagcacctaaagtgacgaaagatggagtaaccgttgctaagagcattgaattcaaggacaaagtcaagaatatcggtgccagtcttgtaaagcaggttgctaatgctacta

SEQ ID NO: 185754 - DNA, 273 bp, Glycine max
ctcgagccgcttacggctaaattctcaaagatttaaactttgtctcagagtttccaaattcacccaaccccagagagaaaatgtctctaatcccaaatttcttcggtggcagaaggagcaacgttttcgatcctttttccctcgacgtctgggaccccttcaaggattttcctttcccaaacactctttcttcagcttcctttcctgaattttctcgggaaaattctgcattcgtgagcactcgtgtggattggaaggagaccccagaagcac

SEQ ID NO: 185755 - DNA, 267 bp, Glycine max
agagtttgttgtgagctataagctagtttatcgtgaggagaatatgaagttgtttgttttctttgttgctgcagtagttttggtagcatggccatgccatggcgcaggctaccaaaggttccctctccgaatgaaaactggctatggtgagcgttcttcggaggtaaaatgcgcaagttttaggcttgctgtggaagcacacaacatccgagcctttaaaaccattcctgaagagtgcgttgaaccaacaaaggactacattaatgg

SEQ ID NO: 185756 - DNA, 269 bp, Glycine max
aagagttatttgtttacgatctcattagtcattacaatctgccaagtctctaatctaagctaacaaatatcaaaaagatgtctctgattccaagtttcttcagtggcccaaggagcaacgtgtttgatcctttctcacttgacgtgtgggatcccttcaaggattttcactttcccacttctgtttctgctgaaaattctgcatttgtgagcactcgggtggattggaaggagaccccagaagcacacgtgctcaaggcagatattcca

SEQ ID NO: 185757 - DNA, 268 bp, Glycine max
aaaatggccaaatcaatcaaattctttgagttgaacacaggggccaagattccttctcttgggttagggacttggcaagctgaacctggtgttgtagctgaagctctcaccacagccattcaggttggatacaggcatattgactgtgctagtgcgtataagaatcaagcagagattggttctgctcttaagaagctttttgatgatggtgtggtgaagcgtgaggacttatggatcacttccaaactctggtgttcagatcatgcac

SEQ ID NO: 185758 - DNA, 268 bp, Glycine max
ggcgaagacatgctgagaactctagttgtgaagcgcagccttggtcaccactggcactcgcattctcagcacctccgactccagcggcaattctcatcatccccggagcccaactcctccgtggatgcagaaacccgcaagtacgcgggctatgctgccctcctcctcttctgcggcggcgccacctactacacattccccctcccggacgacgccaagcacaagaaggcgcagatcttccggtacgctccgctgccagaggacctgc

SEQ ID NO: 185759 - DNA, 265 bp, Glycine max
gcacaaagcaaagctcatccttgagttaaaaaatggcagcagcttcttccatggctctctcatccccatccttggctggcaaggccgtgaagctgggcccatcagccccagaagtgggaagggtgagcatgaggaagaccgtcaccaagcaggtctcctcaggaagcccatggtacggcccagaccgagtcaagtacttgggcccattctctggcgagcccccgtcctacctaaccggtgagttcccaggcgactacggctggga

SEQ ID NO: 185760 - DNA, 267 bp, Glycine max
aacacttttaggtacctgaatattcttactcccttgatgaagagggtatttgcaaacatgcctttgagttgatttttgcatttgatgaagtcatctctcttgggcacaaggaaaatgtgactgttgcacaagttaagcaatactgtgagatggagagtcatgaagagaagctgcacaagttggttttgcagagcaagattaatgaaactaaggatgttatgaagcgaaaagctagtgagattgataaaagcaagattgacaagaaca

SEQ ID NO: 185761 - DNA, 266 bp, Glycine max
aaaaatttcgttcaagcgcacatttcaaagagtaatagacaccttgattttagtccttctcctcttgaatctcagtcatcgtgttttctcatccaataatttcactttcccatggttccttgctttcatatgcgaatcctggttcaccttcatttggattgtgattcttaacaccaagtggagtcctgcagtaaccataacccacccaaatcgtctccttcaacgggtacctgagcttccacctgtagacatgtttgtgacaacag

SEQ ID NO: 185762 - DNA, 263 bp, Glycine max
caaaaggaggtgaaatgggaggagaaggagggagagaaggggattgggagtgcagcagttgcaacaacaggaactacgccttcagatcattctgcaaccgatgcaagcaaccccgcctcctcgtcgacaccaaaaccccctctgattccaagtggctccctcgtattggcgattggatctgcaccggttgcactaacaacaattatgcatcaagagagaagtgcaagaagtgcggacaaccaaaggaggtagcagccatgcca

SEQ ID NO: 185763 - DNA, 269 bp, Glycine max
gcaaagagagagggagatggagggaatagagcacaggacagttgaagtaaatggcataaaaatgcacattgcagagaaaggagaaggccctgtggtgttgtttctccacggcttccccgaactctggcactgttggcacaaccagattgtggctcttggttccctcggataccatgcggtggcaccagatctccgaggctacggtgacaccgatgcaccaccttcaatagacagctacacatgctttcatatagtggctgatctcgttg

SEQ ID NO: 185764 - DNA, 270 bp, Glycine max
ctaaaacatctcaatgggttcttcttctattacaacatcgatctcaaccatgaccatggctgcgatcgtgctcctgttcacggtctttgccgtttcctccgccctagacatgtcgataatctcgtacgacagcgcccacgcggacaaggccgccacgtttcgcaccgcggaggagctgatgtccatgtacgaccagtggctcgtgaagcacgggaaggtgtacaacgcgctcggcgagaaggagaagcgcttccagatcttcaaggacaa

SEQ ID NO: 185765 - DNA, 267 bp, Glycine max
gtggaagataagttaatggtgcttgggtgcagggatctggagaagaggattgtggaagctgagatggaattgacattggctaagagccaagggtacctaaaggggcaaggccagagaagcggctcttctgatcgtaggcttcttgctgttatcggagtgtatactggatttgggagtaaattgaagagaaatgttttcagggggtcttggatgcccagaggtgatgccttgaaaaaacttgaagaaagaggagtggtcatacgtttt

SEQ ID NO: 185766 - DNA, 256 bp, Glycine max
tttttggatcagctgattacaaggtttatggttatgatcttcgtcacactagaatcccttggtgcacattagctggtcatggcaaagctgttagctatgtaaaatttatagattctgaagcagttgtctctgcttccactgacaactctttaaagctttgggacctgaacaaaaccagctcttctggtttgtcatctgatgcttgtgccatgacctttaaaggtcatagtaatgaaaagaatttcgtgggattatc

SEQ ID NO: 185767 - DNA, 263 bp, Glycine max
atttttcaagtaacttaaggtttcaaacctaggaagttggaagtcatggcagcaacattgatggcagcaacaacaagttctggtactcttaaagcaactcctttccttggccaaggcaagggtgccaatgccaatgctcttagggatgttgtctccatgggaactgggaagtacaccatgggcaatgatttgtggtatggaccagacagagtgaaatacttgggacccttctcagctcagaccccttcatacttgaaaggaga

SEQ ID NO: 185768 - DNA, 265 bp, Glycine max
gttacaacttacggctaaattctcaaagatttaaactttgtctcagagtttccaaattcacccaaccccagagagaaaatgtctctaatcccaaatttcttcggtggcagaaggagcaacgttttcgatcctttttccctcgacgtctgggaccccttcaaggattttcctttcccaaacaatctttcttcagcttcctttcctgaattttctcgggaaaattctgcattcgtgagcactcgtgtggattggaaggagaccccag

SEQ ID NO: 185769 - DNA, 266 bp, Glycine max
gcacaaggcaacatttccgtggctattgattggcttaataaatatctggaaacattcatggcagatcatgaggcatggagagaattggctgaaatatacgtctccctgcaaatgtataaacaagcagcgttttgctacgaggagttgatattaactcaacctactgttccactcttccatttagcatatgctgatgtactttatacgcttggtggattagaaaacctccaaactgccaagaaatactactcatctactatcgactt

SEQ ID NO: 185770 - DNA, 121 bp, Glycine max
catttctccatttccattttctctctcacttttcaagaatcgtaagctatgggaaagtcttacccaactgtgagtgctgattaccagaaggccgttgagaaggcgaagaagaagctcagag

SEQ ID NO: 185771 - DNA, 293 bp, Glycine max
ctctttcttttccctctctcaattccaaacagtagatttagttaaccttttggaaaaggaagtgttttttgagggaaaggagggaattttttgtgtgggagggtggaacccggaattcggtttggttggggtagagaggatgaagattcagtgtaacgtgtgtgaggctgcggaggccaaggttctttgttgtgctgatgaggctgggctgtgttgggagtgtgatgagaaggttcatgcggctaacaagcttgccagcaagcaccagagagtgcctctttctacctcttcct

SEQ ID NO: 185772 - DNA, 292 bp, Glycine max
ctcgagccgtacaggataaggttcattcaattcgtgaagcagctgctaacaacttgaaacgccttgctgaagaatttggtcctgagtgggctatgcagcacataattcctcaggttttggagatgaacaacaacccacactatttgtatcggatgactattcttcgtgctatctctctgcttgctcctgtgatgggccctgaaatcacttgttcaaacttgttaccagttgttgttgctgcatcaaaagacagagtgcccaacataaagttcaatgtggcaaaggtattaga

SEQ ID NO: 185773 - DNA, 285 bp, Glycine max
tttcactctttgtatttttcgctgactccggcgtcactttccgttgagtctccgtccaccggcgtgacgatggactcggaatcttcaaactcagattctcaaccgcaccctctctcgaacccaatcgacgacgcgtgccacgacatgagctccctggaagagctcgcgaaccgcggcgcgtggcgttccatcatcgacaaggtctcacgcgcccgcgccctctctctcctccacaagccccacgaccacctcacctaccttgccttcaacgccctctccttcacc

SEQ ID NO: 185774 - DNA, 289 bp, Glycine max
gccttccattatagtatccctacttacgaaaggggcttgtgcatcagatttgacttttgatggtcagagtgctgttagtatttgtaggaggttgacaaggccaaaggattatcatgcaaaaacagagcaggggaaagaaacaaacaaagatcggatatgcatcgatgttcttgaaagagaaatgtggaggaatccattggctggggatgcctgtatgtcttcccataccatggctgatgatctccacatgaaactactataccttgagaacagagtggcatttgcaaga

SEQ ID NO: 185775 - DNA, 287 bp, Glycine max
  unsure (1)..(287): unsure at all n locations
agattgcagtagtgctaagtgctaacacctgcagtgaacaatggcctctgcatcagcatctctgctcaagtacttcacttgttcttgacaagtctgagtgggtgaagggacaaacccttcgccaaccttctgcatcagttgtgagatgcaaccccaccaccccatcaggcctcaccatcagagctggttcctatgctgatgagctcgttaagaccgcgaaaacagtggcttcaccagggaggggtatttcnccatggatgantccaatgcnacctgtgggaagcgtt

SEQ ID NO: 185776 - DNA, 286 bp, Glycine max
gctctgtttctgtctctgtgtttgcggctgaggattccgaacgagcgcccttcttcgtttctcgcaaagtttaagtcatcatgggtaaggaaaagactcacatcaacattgtcgtcattggacatgtcgactctgggaagtcaactaccactggtcatttgatctacaagcttggaggtattgacaagcgtgtgattgagaggttcgagaaggaggctgctgagatgaacaagaggtcattcaagtatgcctgggtgcttgacaagctcaaggctgagcgcgaaag

SEQ ID NO: 185777 - DNA, 193 bp, Glycine max
ctctgttgatcgagataactagaaacagtgtgatgaaaatgaaggtccttgttttcttcgttgctacaatttcggtagcatggcaatgccatgcgtacgatatgttccctctccgaatgaacactggctatggtgcccgtactccggaggtgaaatgcgcaagttggcggcttgctgtggaagcacacaacat

SEQ ID NO: 185778 - DNA, 287 bp, Glycine max
catgaactgtcttcagaatctttctcgattctctgttttgcccttcgatacacttgttacgcgccaccgcaagaaccttcccctttccctgggtttcgtcaataattctcatcaaaatctaactatggcactcaaggctgcctcaggttctataccgagtgcagacacaagtagtgccgataaggaggaagaaaagtctgagacatatagtcatagcatgacagatgccatgggtgctgttttgacttataggcatgaattaggaatgaactataatttcatccgtc

SEQ ID NO: 185779 - DNA, 298 bp, Glycine max
ctcgattagccgaaaattgcaagaacggcttcaggctcttgcgatcaacaaacgcagcgttttgatctcagatttgagggggagagaatggcaacaacagtgagaagtctgaagataaagccaagtacgtgcaaacgtatagtgaaggagctgcattcttatgagaaggaagttgagagagaagctgccaaaacagctgatatgaaggacaaaggagccgatccctatgatctcaagcaacaggaaaatgtcttggctgagtctaggatgatgattcctgactgccgcaagcgccttg

SEQ ID NO: 185780 - DNA, 285 bp, Glycine max
gcgcaatcgtcttctgcttcaaggaaggagagcttgttattctctatcaacaaggaaaatgtcaggtgaagaggttgttgttgcagctgagccagctgctgccatcccaggcgagcctatggatatcatgactgccttgcaacttgtgctcagaaaatctctggcttatggtggtcttgcacgaggccttcacgaaggggcaaaagtgattgagaagcatgctgcacaactctgtgttctagcagaagactgtgaccagcctgactatgttaaactggttaaggc

SEQ ID NO: 185781 - DNA, 287 bp, Glycine max
caacgaaccactctgaagccgctcacgttatccacaacactctcaaccctccttaaaccctaaccaatccaaccatggcttcttcttccaccttcactgcaatgcccgcctgcaagctctcctcctccgccgccatctcctccttcccctcccgccgccgctccaacgccgtcgttctgtcgaggcgcacgcgccgccagggtctccgccatggccaaggagttgcacttcaacaaagacggcaccgcaattaagaagctccagagcggtgtgaacaagctcgcgga

SEQ ID NO: 185782 - DNA, 288 bp, Glycine max
aggaaattgtgaaggcgaacaggccttggaaagaaagaagaagttagcagagaaagctgcagccaaagcagccatcagagcacaaaaggaagctgagaagaagcttaaggaccgtgagaagaaagcaaagaagaaatcaggcactgcagccgtggccaaccctgaggacgaaccgaaggatgaagttgtcgaggttacagagccagaaaagattaacgatgatgtccaagccccggctccagtgaaggaaaaggtccaaaaggagagtggcatcaggtccaggggccg

SEQ ID NO: 185783 - DNA, 281 bp, Glycine max
ctaaactgtctggtggagttgcagtcatcaaggttggtgctgccacagagaccgagcttgaggatcgtaagctccgaattgaggatgccaagaatgcaacttttgctgccattgaggaaggtattgtacctggtggaggtactgcactggttcatctctccactcatgtcccagcactcaaggacaagcttgatgatgcagatgagaggctaggagccgacattgtgcaaaaggcactgatagctcctgcagcattgattgctcaaaatgctggaatagaa

SEQ ID NO: 185784 - DNA, 283 bp, Glycine max
gaaccagccggggatgcatttaaagctaatcatcctgaggcattggtcttcattaacaattgcaatgttattcttagggctgtaatggagaagtgtggggacacagatgattgtatctcaacatctgaggctgcagaattggctgcaaagcttgatgagaaggaaataagtagtttaccaatgcctggacaagttgatttcattaatggtggtcctccatgccagggtttctctgggatgaataggtttaaccagagcagttggagtaaagtccagtgtgaga

SEQ ID NO: 185785 - DNA, 290 bp, Glycine max
caaagttagaaacaaggagaaagacagaagatggcaggaaagaacatcccagatgtgttgctgaattcaggacacaaaatgccagttataggcatgggaacttcagtggagaatcgtccatcaaatgagacccttgcttctatctatgttgaagccattgaggtgggttaccgtcattttgacactgctgcagtgtatggaacagaggaagccataggcctagccgtggccaaagccatagacaaaggccttataaagagtagagatgaagttttcatcacttcaaagcc

SEQ ID NO: 185786 - DNA, 293 bp, Glycine max
gagtaaaggaggcataccgatgacgatggcgatgacggcgtcgcagttgcggtgcggttgggggtggaggccaacgccgaatcagcagcagcaacgacgtcgtatggttccggtggtgtgttccatcgctatagagaacgcgaagaacaaagagagagcgaaactgaagaagctcttcgatgaagcgtacgagaggtgccgcactgctcccaccgaagcgtttccttcactctccaacaattcaccgacgctctcgacaagtacgacttcaacgccgaaatgggcaccaaggt

SEQ ID NO: 185787 - DNA, 300 bp, Glycine max
cttcctctttttctcaaccaaaaggggttcaattctagctagttctcattacatcgtccgcgaccatgaacatggcgatcgtgcttctgttcatggttttcgcagtttcatcagctttagacatgtcaataatatcacatgacaacgctcatgcggatagggccacgaggcgcaccgacgacgaggtgatgtcaatgttcgaggagtggctggtgacacacgacaaggtgtacaacgcgctcggtgagaaggagaagaggtttcaaatcttcaagaacaatctgcgctttatcgatgaac

SEQ ID NO: 185788 - DNA, 285 bp, Glycine max
cctcgttgccccttccatttccttcgcctccagaaattacgccaacgtgccggggcaaaaggaaaacaaagttaaggtccctctggctttgtttggaggttcaggaaactatgcctctgctttgtatattgcatctgtgaaagctaatgcagtggcaaaggttgagtctgagcttctgcaatttgttgaggctgtaaagaatagtcccatattttcacagtttataagggacttgtctgtggctaaggatgttagagtaaaagtcatccaggatatttgtggtga

SEQ ID NO: 185789 - DNA, 282 bp, Glycine max; identical to SEQ ID NO: 107945

SEQ ID NO: 185790 - DNA, 284 bp, Glycine max
aacatggcaagagtggtggcactccaacagaaccaactatctttctctaccttagcttcctctctttctgacttcagtggaaccagacttcaaactcaacttcagttcaagagaaagcaatgccatccaaaagggtctttctacgtctccgcatcgagcaccaagaatctactaataatgggaggcaccaggtttattggtgtgtttttgtctaggctccttgtcaaagagggtcaccaggtgactttattcacaagaggtaaagcgcctgtcactcaacagtt

SEQ ID NO: 185791 - DNA, 284 bp, Glycine max
atagttccccgtggaatggctcttggcatggttactcaattgcctgacaaggacgagaccagcatttcccgtaaacagatgcttgctacgcttgatgtttgcatgggaggtcgtgtcgctgaagagctaattttcggagagaacgaagtcacttctggtgcatcctcagatctcaggaaagcaactagtctggcaagggagatggttaccgaatatggcatgggcaatgaagttggactagtcactcacgattatgaagatgatggtaggagcatgagctcaga

SEQ ID NO: 185792 - DNA, 281 bp, Glycine max
cttaaattccaggttctgttggaatatccaaaatggcaaaaggtagcaggggacgacacaggattgcttctcgtcaattcagagtgactccatacccactggcttcttgcaaaagggacatttgtgaggacatgtgccaaaagaaatgttctaaggctttggaaaagaaagagttggaagatgttacgtgttctgtgtgcatggaatatccacacaatgctgttcttcttctttgttcttctcatgacaagggttgccgtccctatatgtgtggaactagc

SEQ ID NO: 185793 - DNA, 281 bp, Glycine max
gaagaaatgttgttctcgagagcaagtatggctcgccgaaaatcgttaacgacggtgtcactgtcgctaaagaggttgagttggaggatcccgttgagaatattggtgccaagttggtgagacaagcggctgccaagacaaacgacttggctggtgatggaaccacgacctcggttgttcttgctcagggtcttatagcggaaggtgtcaaggttgttgcagctggggccaaccctgtgctcatcacacgtggcattgagaagattccaagctcttgtatc

SEQ ID NO: 185794 - DNA, 294 bp, Glycine max
cgtggtgccttatagctgtggttatcatcttcttcttcctctttcttagatctcttctttctctacgccgcacgccgaaaccatggccggaaaaggagagggtcctgctatcggaatcgatctcggaaccacctactcttgcgtcggtgtgtggcaacatgaccgcgttgaaatcatcgccaacgaccaagggaacagaaccacgccgtcttacgtcggattcactgacaccgagcgtctcatcggtgatgcggccaagaatcaagtcgccatgaaccccatcaacaccgtctt

SEQ ID NO: 185795 - DNA, 287 bp, Glycine max
ctgcaattcactctgtacaattcttcgttcgttctctgcagttatatcctttttgagcttcaatggcggacgctgaaaccttcgctttccaggctgagatcaaccagcttctaagtctcatcatcaacacattctacagcaacaaggagattttcttgcgtgaactcatcagcaatgcttctgatgctttggataagattcgattcgagagcttaaccgacaagagcaagctcgatgctcagccagagctcttcattcgtcttgtgcctgacaaggataacaagact

SEQ ID NO: 185796 - DNA, 284 bp, Glycine max
gaaatggcaacagaaacaaaagtgcaagaattaggtggcatcaccgatgtgcatggagctgccaacagcgtcgagatcaacaatctcgctcgctttgctgtagaggaacaaaacaaaagagagaattcagttctggagtttgtgagggtgattagtgcaaagcagcaagtggttgctggagtgaattactacataacattggaagcaaaagatggtttgattaaaaatgagtatgaagcgaaggtttgggtgagggaatggttgaactccaaagagttgctaga

SEQ ID NO: 185797 - DNA, 277 bp, Glycine max
caattttctagggttttattcattttccgatggcttctgcagatgttgagtaccgttgctttgtcggtgggctcgcttgggccactgacgaccatgccctcgagagagccttctctcagtacggcgaaatcgttgaaacgaaggtctgtttgttgcaggcatcacatctgatctcacacgattcggattcggaattttctcgatcccgttctgatctgtgatctctgatctgtttgcgttacttgatcttatgatcacttgtgttactatatgactc

SEQ ID NO: 185798 - DNA, 285 bp, Glycine max
cggctcgagcggctcgagctcgagccgattcggctcgagcacagaagaaagcagagcctctactacatcatcaatctcacatttcaataccttctctttctcccagtctctcacacacaacaattgaagaagaaaatggttgacaatgattcgctctcggaattcctcgcatctgcggtcgacgcggctcagaaagctggcgagattattcgaaaaggcttctaccagaccaaaaatgtggaacacaaaggacaggttgatttggtcacagaaactgataaagca

SEQ ID NO: 185799 - DNA, 294 bp, Glycine max
cttagcacttcttcttttcacactgccgctgcaacaatggcttcagagaagaaactttcgaacccaatgagggagataaaagtgcagaagctcgttctcaatatctctgttggcgagagtggagatcgtctcaccagagccgccaaggtgttggaacaacttagtggccaaaccccagtgttttccaaagcaaggtacactgttcgttcctttgggattagaagacatgagaagattgcatgctatgtcactgtcagaggtgacaaggcaatgcaacgtttggagagtggtttg

SEQ ID NO: 185800 - DNA, 289 bp, Glycine max
attagattacacctcaaggaagaggctggggagtacttgcaggagtctaaactgaaagaattggtgaagagatactctgaatttattaacttccctatctatatttgggcaagcaaagaggttgatgtggaggttcccgctgatgaagatgattccagtgatgaagaggattcatctgaaagcagctccaaggaggaaagcgaagatgaagatgctgataaaagtgaagacgaagaaaaaaagcccaagacaaagacggtgaaggaaacaacttatgaatgggaacttt

SEQ ID NO: 185801 - DNA, 285 bp, Glycine max
ttcggatctagagtcttcagtttctcctcgttgttcttcgctttcctgttttcaatttcgattctttcgttaatttaataagatgtttgggagggcaccgaagaagagcgataatacgaggtactacgaaatcctcggcgtctccaagaacgcttcgcaggatgatctgaagaaggcttacaagacagccgccattaagaatcaccccgacaagggcggtgatcccgagaagtttaaagagctggcgcaacttatgaggttctgagtgaccctgagaagcgtgag

SEQ ID NO: 185802 - DNA, 283 bp, Glycine max
ttcaaagacggcgtcttcataaacgcctttcttctccgtttccgtttcctcgttcaaattcgctttttgatctgcgaaaatgagagagtgcatctcgatccacattggtcaggctggtatccaggtcggaaatgcttgctgggagctctactgcctcgagcacggcatcgggcccgatgggcaaatgccaagtgacaagacagttggcggtggtgatgatgctttcaatactttcttcagcgagactggtgctggaaagcacgtgccacgtgcagtgtttgta

SEQ ID NO: 185803 - DNA, 284 bp, Glycine max
tcgacatccgcatcaaaagaccttctctttctcttgccatcatttcattccccatacgctccatccatcaccctttctttcattctgttgggaaatggatgtcacactttcagcgtgcaagtccattagctcgccttctgttcccgtcgcagctttatttgcggggaaagcaggaactaagagttcgcaatgcagttttttagctggagcaaacaaagtgaggtttcctaggcaagtcggtcaagttagccacgttcgcaaacagcgccaaacgcgtcactgtg

SEQ ID NO: 185804 - DNA, 281 bp, Glycine max
cttcaaaacactcataacacaaagcacaaagcaaagctcatccttgagttaaaaaatggcagcagcttcttccatggctctctcatccccatccttggctggcaaggccgtgaagctgggcccatcagccccagaagtgggaagggtgagcatgaggaagaccgtcaccaagcaggtctcctcaggaagcccatggtacggcccagaccgagtcaagtacttgggcccattctctggcgagcccccgtcctacctaaccggtgagttcccaggcgactacg

SEQ ID NO: 185805 - DNA, 283 bp, Glycine max
gctagcaccacattcacctgaggcttccaaagcaatggcttcccttgcagcatccactgctgctgcttcccttggcatgtcagaaatgcttggaaaccccatcaacttcagtggtgccacaaggccagctccatctgcttctagtcctgcctccttcaagactgtggctcttttctccaaaaagaaggctacaccaacacctccaaaaaaagctgctgctgctgctcctgccaatgatgagcttgccaagtggtatggtcctgacagaaggatcttcttgcct

SEQ ID NO: 185806 - DNA, 287 bp, Glycine max
ctcgagccgaaatgcatctaggttgtgggcacttgaaattggagagaggtgcaaaccttgagttcgttcacttcataggacggacaaaattggttctctgtctgaagcacgtgaggtgttgagaactgccaggcaacaagtaaagaagactgttccacatttgcctcagcacgtggcttgtgtagatgtgattgaacatggaatagtccatggaggctacagtggtgttctaaaggaggcagaagtattcaaacaattggttgtatctgacaccgcaaaaggtttaa

SEQ ID NO: 185807 - DNA, 281 bp, Glycine max
ccagaaaacacttgtctctgagcttgagggcaagacagttggtctgtatttctgcgtgaagtcattcggatcatgcagtgactttaccccaaagcttgtggaggtttatgagaagctgaaggcccagggggagaactttgaggttgtgctgatacccctagatgatgatgaagagtcattcaaggaactattagaaagtgtgccttggttatccttgcctttcaaggacaaaatctgtgggaagctagctcggtacttcgagctttcaaccctccccactt

SEQ ID NO: 185808 - DNA, 282 bp, Glycine max
attcctaattgtttaaacctaattctcatttcttcatcgttcgattcttctcctcctaaagatgcagatcttcgtgaaaactttgaccggtaagaccatcacccttgaggtggagtcctccgacaccatcgataacgtgaaagctaagattcaagacaaggaaggcctcccacctgaccagcagagacttatctttgcgggtaaacagcttgaggatggtcgaacccttgccgagtacaacatccaaaaggaatccactctccacctcgtgcttcgcctcag

SEQ ID NO: 185809 - DNA, 281 bp, Glycine max
ctcgagccgaatcggctcgaggatcactccaatctccatttggctactccagaaaagcctactctcttgttaaggcagcagctactccccctgtcaagcaaggatcagacagacctttgtggtttgcatcaaagcaaagtctttcctacttggatggcagccttccgggtgactatggatttgaccctctgggactttcggaccctgaaggaacaggagggttcattgagccgaaatggctagcatatggtgagataatcaatggtcgttatgcaatgttg

SEQ ID NO: 185810 - DNA, 283 bp, Glycine max
agcaaaagcaagaagaactagtctaagcagaaatggcctcttcagtgatggcatctgtggccctcaaacctgcccctttcactgttgagaagtcctcagttagaggccttccctccctctcaaggaactcctcttcattcagagttgtggccagtggtggcaagaagatcaagactgacaagccttatggaactaatggtggcatggctttgagggaaggagttgatgcatctggcaggaaaggaaagggaaagggcgtttaccagtttgtagacaaatacgg

SEQ ID NO: 185811 - DNA, 281 bp, Glycine max
tgctgggcctgtcattagtcttgtttatcctctatatgcttcaattagggcaattgagagcaagtctcctattgatgatcagcagtggctcacttactgggttctctactccttgatcaccctctttgaacttacttttgctaaagtccttgagtggattccaatatggccctatgcaaagctgattgcaacctgctggttggtccttccttactttagcggtgccgcttatgtttatgagcattatgtgagacctttctatgtcaatcctcagaccatta

SEQ ID NO: 185812 - DNA, 284 bp, Glycine max
aagaacaagaacaacaaagtaacgtgaaagagagagagatggaggcgattgttccagtggtggatttccagaggctttcagaggaagaggagcgcaagaagctgatgaaaacatgtgagaaaccagggtgtttcagaatcatcaaccactcaattccactaacactcatggctgacatgaagtcagtggttaaatacttgcatgaccttcccacggaaatcaaaatgcgcaacaaaccctccgtccctgagagtggctatagggcggcaatgccaacaagtcct

SEQ ID NO: 185813 - DNA, 284 bp, Glycine max
accaggcgcacgttagcacaaactatcatggccacggcaacagcagctgccacctcgtcctttatggggacgcgtcttctggaggctcactccggggcggggcgagtgcacgcccgattcggcttcggcaagaaaaaggctcccgccccaaagaaagcctccaggggatcgggccgagacaccgacagacccctttggtatccgggcgccaaagcgcccgaatacctcgatgggagtcttgtcggagattacgggttcgatccgtttgggctagggaagcccgc

SEQ ID NO: 185814 - DNA, 290 bp, Glycine max
ctcgagccgtgcaattcactctgtacaattcttcgttcgttctctgcagttatatcctttttcagcttcaatggcggacgctgaaaccttcgctttccaggctgagatcaaccagcttctaagtctcatcatcaacacattctacagcatcaaggagccattcttgcgtgaactcatcagcaatgcttctgatgctttggataagattcgattcgagagcttaaccgacaagagcaagctcgatgctcagccagagctcttcattcgtcttgtgcctgacaaggataaca

SEQ ID NO: 185815 - DNA, 235 bp, Glycine max
atcagatattgaaagaaacacgactgaataaaacattgacgaacgtggtaataccaactttcgacgagaggcaaaccaagccagttatattctcaaactataagctcaagacggaaacttacttaaatgccaaactctcagatatatgcatcgggacttcggctgcaccgacttatctaccgccgcaccaatttcagaatgacggtgttcaatttgatttggttgatggtgctat

SEQ ID NO: 185816 - DNA, 258 bp, Glycine max
tagagtttgttgtgagctataagctagtttatcgtgaggagaatatgaagttgtttgttttctttgttgctgcagtagttttggtagcatggccatgccatggcgcaggctaccaaaggttccctctccgaatgaaaactggctatggtgagcgttcttcggaggtaaaatgcgcaagttttaggcttgctgtggaagcacacaacatccgagcctttaaaaccattcctgaagagtgcgttgaaccaacaaggacta

SEQ ID NO: 185817 - DNA, 260 bp, Glycine max
atttctgtttacattcaagagagagaagaagaagaagagcaatggcagcaacaacagagagcgagaagaagaagcaagaagaagaagaggtacaagaacaagtggtgaacccatgggaagtttccgccaaaggcaaaatcgattacgacaaactcattgaccgtttcggttgccagaagctcgacgaagccctaatttcgcgtctcgagcgcatcacctctcgcactccccacgtctttctacgacgcggcgttttcttc

SEQ ID NO: 185818 - DNA, 249 bp, Glycine max
  unsure (1)..(249): unsure at all n locations
aaaattgactgtnacgtagctgaagctgattgagctacgttggtctcagagcgccactgaggaccttcaacttttcttctcctcaagctgccaaaattcctcgctcccaacgccttttcgtcgtcagagcctccgattcggagttcgaagccgccgttgtcgccggtaaggttccgccggcgcctcccgtnccgcccagaccggcggctccggttggaacaccggtggttccttcacttccacttcacg

SEQ ID NO: 185819 - DNA, 257 bp, Glycine max
aaagtttcttcctttctctgctctttgtcttctctgacacatttggggccttgttgagtgtgtttttgcaagagggtatggcgaaggacgttgaggttgctgagcgtggctccttctctgggaaggactaccaggaccctccaccagcaccactcattgatgctgaggagctcacaaagtggtccttttacagggctcttattgctgagttcattgccactttgctcttcctctacattactgtgctcacagttata

SEQ ID NO: 185820 - DNA, 256 bp, Glycine max
ctcgagccgcagaaagcaagctcatcctagagttttaaaaatggcagcagcctcctccatggctctctcttccccatccttggctggcaaggccgtgaagctgggcccatcagcccccgaagtcgggagggtcagcatgaggaagaccgtcaccaagcaggcctcctccggaagcccatggtacggcccagaccgcgtcaagtacttgggcccattctctggcgagcccccgtcctacctcactggcgagttccca

SEQ ID NO: 185821 - DNA, 247 bp, Glycine max
ctcaggtggattacttgcttggaaaacaagccttctttggccaaactgatgctgagggtggttttgattccaatgctgtggcaactgcaaacatcttggagagttcaacgcctgtcattgatgggaaacagtactacagtttgactgtgttgacaaggacagctgatggagatgaaggtggcaagcaccagctgattgcagcaactgtgaaagatggcaaactatacatttgcaggctcagctggag

SEQ ID NO: 185822 - DNA, 245 bp, Glycine max
gcagattccatcatacctgaccggagaattccctggtgactacggatgggacactgctggattatcagctgacccggaaaccttcgccaggaaccgggagctggaggtgattcacagcagatgggcaatgcttggtgcccttggctgcaccttcccagagatccttgagaagaatggtgtcaaattcggcgaggccgtgtggttcaaggccggtgcacagatcttctcagagggaggccttgact

SEQ ID NO: 185823 - DNA, 251 bp, Glycine max
ccatttcctcacctccttcaaccgctgctaaattctagggttccgaaatggacgctggcggaaagatcaagaagggcgccggaggtagaaagggcgtaggcccaaagaagaagccggtttcaaggtccgtcaaagccggtctccaattccccgtcggaagaattggccgttatttgaagaaaggaaggtacgctcagcgtgtcggtaccggtgctcccgtatacttggctgcagttctcgaatacctagct

SEQ ID NO: 185824 - DNA, 250 bp, Glycine max
cttttgaacattcacccaatttgcagagttccaagttatatacatacactgcataattaagagaaaatgtctctgattccaagcttcttcggtggccgaaggagcagtgttttcgaccctttctccctcgatgtgtgggacccctttaaggattttccatttcccagttctctttctgctgaaaattcagcctttgtgagcacacgagtggattggaaggagacaccagaagcacacgtgttcaaggctg

SEQ ID NO: 185825 - DNA, 251 bp, Glycine max
aaaacaaagaaaaaaaaaacccttagccaacacaaccatcatggccacctctgctattcagcaatcagcattcactggtcaaactgctctgaagcagctcaatgagttcgtccgcaagaccggtggcgccggcaaaggtcgcactaacatgcgccgcaccgtcaagagtgctcctcagagcatttggtatggccctgaccgtcccaagtacttgggtccattctcggagcagattccgtcatacctgaccg

SEQ ID NO: 185826 - DNA, 260 bp, Glycine max
cgagataactagaaacagtgtgatgaaaatgaaggtccttgttttcttcgttgctacaattttcgtagcatggcaatgccatgcgtacgatatgttccctctccgaatgaacactggctatggtgcccgtactccggaggtgaaatgcgcaagttggaggcttgctgtggaagcacacacacatctttggctttgagaccattcctgcagagtgcgttgaagcaacaaaggaatacatccatggcgaacaatatagatca

SEQ ID NO: 185827 - DNA, 255 bp, Glycine max
ctcaatcttcatctccaacaagtgtttctgtaaccatggcatccaccactctatcccctacaaccccttctcagctatgctcaggaaagagtgggattttcagtccctcacaggcacttcttgtgaagccagtgaagaggcagatgatggggaagagcaagggaatgagaattgcatgccaagccaccagcattcctgctgatagagtccctgacatgggcaaaagacagctcatgaatctgcttcttcttggtg

SEQ ID NO: 185828 - DNA, 257 bp, Glycine max
tgaatcacgcatcaatgccttgccaaggtacttgactgttcagtttgtccgtttcttttggaagagggaatccaaccaaaaggctaagattttgcggaaagtagattatcccctggagttggatgtttatgatttttgttcagatgatcttcgtaaaaaattggatgctcctagacagatcctaagaaatgaggaaggcaaaaagcttggtctgaaagtgaatgagaaaagctctgttcagaaggaaagtgatgtaa

SEQ ID NO: 185829 - DNA, 253 bp, Glycine max
acgcagttctcacactcattccgtgctctaaatctcaaattctagggttagggttcccaatttacccgccaatcagaagatgagttccaccggtggttctaccaagggcggaaggggcaagcccaaagcctccaaatccgtttcaagatcgcagaaagctggtctccaattccccgttggaagaatcgctcgattccttaaggctgggaaatacgctgagcgtgttggtgctggtgctcctgtgtacctctct

SEQ ID NO: 185830 - DNA, 252 bp, Glycine max
  unsure (1)..(252): unsure at all n locations
ctanaccctagtctccatacatcaacttgggaggttaaagagacggcaacgttgtgctgtccgccttgaccgagccagagcttcgtcttggccctcgattttgccctgtaaaactaatcccagtcacaacagaaataatcaatggcaccgaaacagaccaaggctgagaagaagatcgcttacgatgcgaactgtgcgacctaatggaggagtacggccaaatcctcgttgtaaactccgacaacgtgggat

SEQ ID NO: 185831 - DNA, 258 bp, Glycine max
cttcgttatccttccttttctctccttgaactcgaatattcacaatggcagatgaggtggttctgctagatttctggccaagtccatttgggatgagggtcaggattgcacttgctgaaaagggtatcaaatatgagtccaaagaagaggacttgcagaacaagagccctttgctcctcaaaatgaacccggttcacaagaaaatcccggttctcatccacaatggcaaacccatttgtgaatctctcgttgctgtta

SEQ ID NO: 185832 - DNA, 254 bp, Glycine max
ctgcactcttcatcaagctccgctccaacacaggggtaaatgagggagatccttcacgtgcagggagggcaatgcgggaaccagatcggttccaagttctgggaagtggtgtgcgacgagcacggcatagatccgacggggaagtacgtcggaaactcagatctgcaactcgagcgcgtgaacgtctactacaatgaagcctcgtgcgggcgcttcgtgccacgcgcggtgctgatggacctggagcccggaac

SEQ ID NO: 185833 - DNA, 251 bp, Glycine max
catttggataggttatttagaaaagcaaaatggtgaagatttgctgcattggtgctggatatgtggggggtcctactatggcagtcattgcacttaagtgcccatccattgaagttgctgttgttgatatctctaaatcccgcattgcagcctggaacagtgaccagcttcctatctatgaacctggccttgatggtgttgtgaagcaatgccgtggcaagaacctcttcttcagcactgatgttgaaaag

SEQ ID NO: 185834 - DNA, 251 bp, Glycine max
gccttacacatgcaagtcggacgggaagtggtgtttccagtggcggacgggtgagtaacgcgtaagaacctacccttgggaggggaacaacagctggaaacggctgctaataccccgtaggctgaggagcaaaaggaggaatccgcccgaggaggggctcgcgtctgattagctagttggtgaggcaatagcttaccaaggcgatgatcagtagctggtccgagaggatgatcagcccactgggatgagaa

SEQ ID NO: 185835 - DNA, 251 bp, Glycine max
ctcagttgcaggaaaaatggtttcgctgaaactgcagaagcggctcgcagccagcgtcctcaagtgtggcagaggaaaggtttggcttgaccccaatgaagtcaacgaaatctccatggctaattctcgccaaaacataaggaagctggttaaggatgggtttattatcaggaagcccaccaagattcactctcgctcacgtgcccgccgaatgaaggaagccaagaggaaaggacgtcactctggatatg

SEQ ID NO: 185836 - DNA, 249 bp, Glycine max
caaattcttattagaacgaaaaaagaaaagaaaagaaaaaagagcgatttttccctcaccaaagaagaaccaaaacaatggcggatcaactcaccgatgaacagatctccgagttcaaggaagccttcagcttgttcgataaggacggcgatggttgcatcacaaccaaggagcttggaactgttatgcgttcattggggcaaaacccaactgaggcagaactccaggacatgatcaatgaagtggatg

SEQ ID NO: 185837 - DNA, 249 bp, Glycine max
cttgcttagagatgaggacgatacaactgtgtctacaccatatactcgctgctgttttagagtaccgggttgttattcatgatccattggaagcttctgtcgacgaaaagaagtggcataatgtaaatggtcatgccattgtggatgctcaacatccagttagggcaaatgtggctgtgagaaaggagcttcatactcctgcatctgatcgatcttgcactcatttggaatttgacatttcaggacggg

SEQ ID NO: 185838 - DNA, 251 bp, Glycine max
cccaccattactcagcactgccactcttcaatcacactaatggctgtcaccttctcagatcctcacaccgaagagggcatcaaatccctcgatcaattcctttctgggaaaacctatatctctggggatcaattgacaaaggatgatatcaaagtgtatgcagctgttgtggaaaagccaggagactcttttcctaatgctgctaagtggtacgatgccgtctcttctcaacttgctccaagcttccctgg

SEQ ID NO: 185839 - DNA, 255 bp, Glycine max
ctatttttcaagtaacttaaggtttcaaacctaggaagttggaagtcatggcagcaacattgatggcagcaacaacaagttctggtactcttaaagcaactcctttccttggccaaggcaagggtgccaatgccaatgctcttagggatgttgtctccatgggaactgggaagtacaccatgggcaatgatttgtggtatggaccagacagagtgaaatacttgggacccttctcagctcagaccccttcatact

SEQ ID NO: 185840 - DNA, 260 bp, Glycine max
ccatcgagccgaatcggctcgagcttcaaacacaacacacacacacaacctgtgtttgtgaaaacctcacacagacaagtcacaccaacaagtttctgttgttccaatggcatcagcaacaccccttttgaaagatgagctggacatcgtgatcccaacgatcaggaacctggatttcttggagatgtggaggccattctttgagccttaccatctcattattgtgcaagatggagacccttcaaagatcatcaaggtcc

SEQ ID NO: 185841 - DNA, 255 bp, Glycine max
tcgtgccagcatctgccatccctgatggctggatgggattggatattggtccagattctgttaaatcattcagtgaagcattggatactacccaaaccatcatatggaatggaccaatgggagtgtttgagtttgacaagtttgctgttggtacagaggtatgtatgcaagaacacccacccacatatgaaattccattcaaattttatgttaaaccaaagttcaccgtcaatataaaaaatgtccactctaagc

SEQ ID NO: 185842 - DNA, 252 bp, Glycine max
gctgttcctacaatcattccaaatgtgcccttccggtcgcaccctcctcccttcctccgtctccgatttccgaccggcattcgacgtcctcgatgccgaccgcgacggcaaaatcagccgcgacgacctccgcgccttctacgccggagtcggcggcggaggagatgacgtgatcggggcaatgatgacagtggctgacaccaataaggacgggttcgtggagtacgaggagttcgagcgcgtggtctcggc

SEQ ID NO: 185843 - DNA, 249 bp, Glycine max
gtttcgtttaagagaattaagcactcggttacagaacaaacttctttcactctttcgcttctgaatcttcaacaatggtgctcgaggcgacgattctctgtatcgacaattctgaatggatgcgtaacggtgattactctccttctcgatttcaagctcaagcagacgctgtgaatctcatttgcggtgctaaaacgcagtctaatccagaaaatacagtgggagttctcacaatggcagggaaaggcg

SEQ ID NO: 185844 - DNA, 251 bp, Glycine max
cccttatcagccgccttcgctatcctcaaggctcagctgaagaaatgggcttcaactaccttcaagaggtcactggtgcaggtgctaggaaaaatgcagggaaatttgttgttctacacctccgatttgataaggatatggcagcccattcggcctgcgattttggtggaggaaaagctgaaaaactggcccttgcaaagtatagacaggtgatttggcaagggagggttcttaactctcaattcactgat

SEQ ID NO: 185845 - DNA, 251 bp, Glycine max
cattcataggcccaagagcaaagaaactaagaagattttgagcacaatggcatccacacaatgcttcttgcaccaccatgccctcaccactccaaccagagcttcatcacagcgcttagttgtgagcaccaaaccaaaccacattgtttgcaaggcacaaaagcaggttgtccaagagggtgaggacactactaacattgtctctcgcaggttggccctcactgttctcattggtgctgctgctgttggct

SEQ ID NO: 185846 - DNA, 249 bp, Glycine max
cacatttcactactcattctcgtttccctttcgactgtgattgtctgttaactgaacttttcgagcaaaatgtctggacgtggaaaggggggcaagggtttgggaaacggaggagcgaaacgacaccgtaaggtgttgcgcgataacattcagggaatcaccaagcctgcgattcggcgtttggctcgcaggggtggtgtcaagcgtatcagtggtctcatctacgaggagacacgtggcggctcaaga

SEQ ID NO: 185847 - DNA, 254 bp, Glycine max
catcgagccgattcggctcgaggtcagggttcgctgaacaagtttcacggtcaacatgccttacgggagagggcaagaaaatacgatcagggtatcctgattataaggtttgagatgccctttaatatatggtgtggaggatgcaattcaatgattgcaaagggtgtccggttcaatgcagagaaaaaacaagttgggaattattactcaacgaagatatggagtttcgctatgaaatctgcctgctgtaaaca

SEQ ID NO: 185848 - DNA, 249 bp, Glycine max
ctactcttgttctttattgtgacaatcaaagtgttgtatccattgatcataattctgtgttccacagtcgcatgaaacatatggaaatcgatatcttttttgttagggaaaaggttccggccatgcagctttcagtctgacacatcccagctctggatcagtggtcagatgtgctgaccaagcctcttccttcatcaagatttgaagttctcagtggcaaactcaatgtgaagagtttttccctgaaaa

SEQ ID NO: 185849 - DNA, 249 bp, Glycine max
gggacactgggtagatcagacaagagaggttctgcaacagataacaaagtgaatcagggaggacccattttgctctagcatttgaacttcctggtggctggcataagttgaaggatgctatgattttgactgttcttcagatgctattgggaggtggtggatcattctcagctggtggacctggtaaagggatgtattcacggctatatctcaatgttctgaatgaatatccacaagttcattcaattt

SEQ ID NO: 185850 - DNA, 246 bp, Glycine max
cgcgatgggtgcctacaagtatgtttcagagctatggcgcaagacgcagtctgatgtcatgcgcttcttgcagcgggtgacgtgctgggagtataggcagcaaccttccattgttcgcttgacaaggtcgacccgccctgacaaggctcgtcgcttgggcctcaaggataagcagggctatgtgatataccgtgttcgtgttaggaggggtggccgatagaggctagttcccataggtattgttta

SEQ ID NO: 185851 - DNA, 248 bp, Glycine max
ccagacaaaaaacaacccttagccaacacaaccatcatggccacctctgctattcagcaatcagaattcactggtcaaactgctctgaagcagctcaatgagttcgtccgcaagaccggtggcgccggaaaaggtcgcactaacatgcgccgcaccgtcaagagtgctcctcagagcatttggtatggccctgaccgtcccaagtacttgggtccattctcggagcagattccatcatacctgaccgg

SEQ ID NO: 185852 - DNA, 254 bp, Glycine max
ggcgaagaacggaagaagccaccatagtcgtcgtcgtgagcgaagatccataacaatacagttacaaattgcaacaacacactcctcgttcgatcgtagccagaagaatgggaagtttgggagcgattctgaagaatccagatgacttttaccctctgctgaagctgaaaatggcggcgagaaacgccgagaagcagatcccgccggagccacattgggcgttctgctacacaatgctccacaaggtttctcga

SEQ ID NO: 185853 - DNA, 249 bp, Glycine max
aaagttaccagtttgcgatctcattacaatctccccagtttctaatctcagctaagaaaaaccaaaagatgtctctgattccaggtttcttcggtggccgaaggagcaacgtgttcgatccattctcactcgacatgtgggatcccttcaaggattttcatgttcccacttcttctgtttctgctgaaaattctgcattcgtgagcactcgtgtggattggaaggagaccccagaggcacacgtgttca

SEQ ID NO: 185854 - DNA, 250 bp, Glycine max
atttttcttcctcagtagtgtcatttacgctcctcttctctgcagcaactatgcctaaccctaaggtcttcttcgacatgaccatcggcggtcaatctgctggccgcatcgtgatggagctctacgccgacgtcactccccgcaccgccgagaacttccgcgcgctttgcaccggcgagaagggcgtagggcggagcggcaagcccctccactacaagggctcgtccttccaccgcgtgatcccgagttt

SEQ ID NO: 185855 - DNA, 249 bp, Glycine max
actcgagccgctcgagccgctcgagccgcgcagagagaaattgagtttcctgagataaccacttacctctttgacccatcaatcgcaaccgcgaggaccgtgaaggatgtttcgcctcacgatttcgtgaaggcttacgcctcccatctcaagcgttccggcaagatggagcttcctgagtggactgatattgtaaaaacagcagaatttaaggaattggctccatatgatcctgactggaataatgta

SEQ ID NO: 185856 - DNA, 233 bp, Glycine max
agggtatatctcgcctcaatttgttacaaaccctgagaagttgattgttgaatttgagaatgcgagagtgttgattacagatcagaagatttcagcaataaaagacattataccactgttggagaaaaccactcagttgagagctcctttgcttatcattgccgaggatgtcactggtgaggctttggccacccttgtcgtgaataagctgcgtggtatccttaacgttgctg

SEQ ID NO: 185857 - DNA, 253 bp, Glycine max
gggactgtaactagccgcagcacgaggagaagctcaggaggagaaggatgtctcaaaggaagttcgagcacccaaggcacggttcactgggatttcttcccaggaagcgtgctgctcgtcacaggggaaaagtgaaggcattccccaaggatgacccatccaaggcacccaagctcactgcattcttgggttacaaggccggtatgactcacattgttagagaggtcgagaagccaggatcaaagcttcacaa

SEQ ID NO: 185858 - DNA, 277 bp, Glycine max
attgttgtgagctataagctagtttatcgtgaggagaatatgaagttgtttgttttctttgttgctgcagtagttttggtagcatggccatgccatggcgcaggctaccaaaggttccctctccgaatgaaaactggctatggtgagcgttcttcggaggtaaaatgcgcaagttttaggcttgctgtggaagcacacaacatccgagcctttaaaaccattcctgaagagtgcgttgaaccaacaaaggactacattaatggcgaacaatttagat

SEQ ID NO: 185859 - DNA, 275 bp, Glycine max
cttgggaagggcttctcccatcgcaaattgtctcccagttatcacattcacaaaaccattgacgaatcctatgcagttatcttcgatgctggtagcacgggaagccgtgtacatgtctatcgttttaaccaacaattagatctccttcgcattggccaagaccttgagttgtttgtcaagactatgccaggtttaagtgcttacgctgagaatccacaagatgctgcagaatctcttattccacttttggaggaagcagaagctgctgttcctca

SEQ ID NO: 185860 - DNA, 271 bp, Glycine max
aacactcataacacaaagcacaaagcaaagctcatccttgagttaaaaaatggcagcagcttcttccatggctctctcatccccatccttggctggcaaggccgtgaagctgggcccatcagccccagaagtgggaagggtgagcatgaggaagaccgtcaccaagcaggtctcctcaggaagcccatggtacggcccagaccgagtcaagtacttgggcccattctctggcgagccccgtcctacctaaccggtgagttcccaggcgact

SEQ ID NO: 185861 - DNA, 271 bp, Glycine max
cgacaacgcagcagcgcttctggctgctggccatgctcgcacctttgacagaatgccttatctgctgtctctgtcttcctttgtggctgacgatgacgccgctgctgttcctgctgctcaagatctgggggagcagtggtcttattaatggatgtgcttcaattcaaatagtctcgcactagtcatcattccctttgtttctgttgcttgcttggttgttcttcttcttcttgttgatcgtcgtggtcgttgaggtcttcaattttttttt

SEQ ID NO: 185862 - DNA, 272 bp, Glycine max
caaaataattgaaaccaaagattctctctctctctctcatgatccctactccatggcaccatttccctcataaaattctctcttcctttttgggttctcctccatccattccacgcttcaatcttccctctcttctgccctctgcacctcccctcacacccttcctcattctcaggaggtcaagatgtcgaccccggcaaggaagagactgatgagggattttaaaagattgcaacaagatcctcctgctggcatcagtggggctccccaaa

SEQ ID NO: 185863 - DNA, 271 bp, Glycine max
gtgagctataagctagtttatcgtgaggagaatatgaagttgtttgttttctttgttgctgcagtagttttggtagcatggccatgccatggcgcaggctaccaaaggttccctctccgaatgaaaactggctatggtgagcgttcttcggaggtaaaatgcgcaagttttaggcttgctgtggaagcacacaacatccgagcctttaaaaccattcctgaagagtgcgctgaaccaacaaaggactacattaatggcgaacaatttagat

SEQ ID NO: 185864 - DNA, 271 bp, Glycine max
ctgttggatgcatttctatttctaactaattattgtgcttattattattgttgagaaagaaaagaatggcaaagttaataaaattctttgagttgaacacaggggccaagattccttctgttgggttaggcacttggcaagctgagcctggtgttgtagccaaagctgtcaccacagccattctggttggatacaggcatattgattgtgctcaagcgtataacaatcaagcagagattggttctgctcttaagaagctttttgatgatgg

SEQ ID NO: 185865 - DNA, 274 bp, Glycine max
caagattctcacaaacaactcttgagaaagaaagaatggctgccaacacattgatgagttctgccatctcagccttcccatctctcctttcctcctcaaaatccagatttgccgcagcagttcctctttccagctttgttgtcaccaatgcctcttcttctcgcttttccatgagtgctgactggatgcctggccagcctagacccccctaccttgatggttcagcacctggtgactttggattcgaccctcttcgtcttggtgaagtaccaga

SEQ ID NO: 185866 - DNA, 273 bp, Glycine max
caagggaaagggaggtaagaacaggaagaggggaaagaacgaggcggacgacgagaagcgagagctggtgttcaaggaggacgggcaggagtacgcgcaggtgctccggatgctggggaacgggcggtgcgacgcgatgtgcatcgacgggacgatcaggctctgccacatccgcgggaagatgcacaagaaggtgtggatcgccgccggagacatcatcctggttggactcagggactaccaggacgacaaggctgacgtcatcctcaagta

SEQ ID NO: 185867 - DNA, 271 bp, Glycine max
tcgatcttaaggctgggggtaagagcaaaaagaccaaaagaacagcaccaaaatccaatgacatctacctcaaattacttgtcaagctttatcggttccttgttcgaaggactggcagcaatttcaatgctgttatactcaagcgcttgttcatgagcaaggttaacaagcctccaatttctttgtcaaggttaattaagtatacaaaggggaaggaggataaaattgctgtaatagtggggactgtaactgatgatatcagagtatatga

SEQ ID NO: 185868 - DNA, 270 bp, Glycine max
aagagttggaaagtggaaatgcaggagagccagcaaaactgatcaggcagagataccgtgaagctgcagacatgatcaagaagggaaagatgtgcgctctcttcatcaacgatcttgatgcaggagctggtcgtcttggtggaaccacacaatacactgtgaacaaccagatggtgaatgccactctcatgaacattgctgataaccccaccaatgtgcagcttccaggtatgtacaacaaggaagagaacccccgtgttcccatcattg

SEQ ID NO: 185869 - DNA, 272 bp, Glycine max
cttgtctctgccaccaaggagggtctcaaacttgacgagagtcaagatgagaagaagaagcaagaggagttgaaggagaagtttgacaacctatgcaaggtgatcaaggatgttttgggtgacaaggttgagaaggttgtagtctctgaccgtgttgttgattcaccatgctgtctggtgactggagaatacggttggactgcaaacatggaaaggatcatgaaagctcaagccctaagggacaacagcatggcaggatacatgtcaagcaa

SEQ ID NO: 185870 - DNA, 274 bp, Glycine max
ctttgaacatcgttttgcagccatggaaacaggcatagcatgctacactcgcgggcctttcttgcctagtgtttcttccaagcactctccaccttccatttctccatcttttggcttgaggagtctgaaatcaagctctttatttggagaatcgctaagagtggcctccaaatcaacaataaaggtttcaaagacaaagaatacttcactcgtgaccagatgtgaaattggtgacagtctcgaagaattcctcacaaaagcaacaccagataag

SEQ ID NO: 185871 - DNA, 274 bp, Glycine max
ctcacaccaggcgcacgttagcacaaactatcatggccacggcaacagcagctgccacctcgtcctttatggggacgcgtctactggaggctcactccggagcggggcgagtgcacgcccgattcggcttcggcaagaaaaaggctcccgccccaaagaaagcctccaggggatcgggccgagacaccgacagacccctttggtatccgggcgccaaagcgcccgaatacctagctgggagtcttgtcggagactacgggttcgatccgtttgg

SEQ ID NO: 185872 - DNA, 279 bp, Glycine max
tcgagctcgagcgcgcgaggcacgtggaaactagagagaacgtcgccatcaagattctcgacaaacagaaactactcaaacacaaaatgattgcgcagataaaacgagaaatatcaacaatgaaactgattagacacccaaatgtcatacgcatgtatgaggtaatggctagcaaaacaaagatatacattgtattggaatttgtgactggtggggagctgtttgataaaattgcacgcagtgggaggttgaaagaagatgaagcaagaaaatactttc

SEQ ID NO: 185873 - DNA, 276 bp, Glycine max
ctcgagccgttctaagcacaatttctctgagttgttttgtgagataatagcacatagcataacaagggaaggagtattaacaaccgcaaacctgaagagaaaaagagcagcagaagaagaaacaccaacgatgggtgtggattactacaagatcttgcaggttgataggagcgccaaagacgatgacttgaagaaggcttataggaaacttgctatgaaatggcaccctgataagaaccccaacaacaagaaagaagctgaagctaagtttaagca

SEQ ID NO: 185874 - DNA, 271 bp, Glycine max
atccgcagctgcttttattcgcaccgcaaacagtgagccatggccgtcggaaagaacaagcgcatctccaaggggaagaagggtggcaagaagaaggcagctgatccctttgccaagaaggattggtatgacattaaggctccttctgtttttcaagtgaaaaatgttggcaaaaccctcgtctctcgtactcagggtaccaagattgcttctgaaggactcaagcatagagtgtttgaggtctccttggctgatcttcaaggggatgagg

SEQ ID NO: 185875 - DNA, 269 bp, Glycine max
gatcgagataactagaaacagtgtgatgaaaatgaaggtccttgttttcttcgttgctacaatcttggtagcatggcaatgccatgcgtacgatatgttccctctccgaatgaacactggctatggtgcccgtactccggaggtgaaatgcgcaagttggaggcttgctgtggaagcacacaacaactttggctttgagaccattcctgaagagcgcgttgaagcaacaaaggaatacatccatggcgaacaatatagatcagactcca

SEQ ID NO: 185876 - DNA, 269 bp, Glycine max
atgacagttctgaagaagacagcgaggatgaaagtgaagagaaaccctccaaaactcctcagaaaagaggcagggacgtggagatggttgatgctgccttgtctgaaaagaaagctcctaagaccccagttacaccaagagaagaatctggcacttcaaagacactatttgttgggaacttgccatttagtgttgagcgggctgacgtggaagggttcttcaaggatgccagagaagttgttgatgttcgttttgctacagatgatact

SEQ ID NO: 185877 - DNA, 266 bp, Glycine max
attcactctgtacaattcttcgttcgttctctgcagttatatcctttttgagcttcaatggcggacgctgaaaccttcgctttccaggctgagatcaaccagcttctaagtctcatcatcaacacattctacagcaacaaggagactttcttgcgtgaactcatcagcaatgcttctgatgctttggataagattcgattcgagagcttaaccgacaagagcaagctcgatgctcagccagagctcttcattcgtcttgtgcctga

SEQ ID NO: 185878 - DNA, 262 bp, Glycine max
cgatgaggcgccactcgatgtttccatttgcctgcatgcctttggtattgtggggtgtggttcgtttagtggtgtcaagtcttgcgaacgtgagggtgcatgagtggtaatcgggatgtttttgttgcacggctccatgcttgcgcatgcaacgtgtgacatgcatccttttcattgtcaccttagccttcgtggcttaggtgctgacgattggttcctgtgttgcctacctaccaaacggtattcgtgtggctagtcagac

SEQ ID NO: 185879 - DNA, 263 bp, Glycine max
ggcattcgtcactctcgtgtcgggtgaaggcgaaaaccaaatcaagatgctgagagtgggcgcaaagaggcttttgggaacgacgtcgttgggcgttagggttccggcgaggctgtaccacgagagggttgtggatcactacgacaacccccggaacgttggatcgttagacaagaacgacccgagcgtggggacgggtttgctgggggcgccggcgtgcggcgacgtgatgaagctcagattaaggtcgacgacaaaaccgg

SEQ ID NO: 185880 - DNA, 269 bp, Glycine max
aaacaagtagttgagaactaagaagaaggaaatggcttcctcaatgatctcctccccagctgttaccaccgtcaaccgtgccggtgccggcatggttgctccattcaccggcctcaaatccatggctggcttccccacgaggaagaccaacaatgacattacctccattgctagcaacggtggaagagtacaatgcatgcaggtgtggccaccaattggcaagaagacgttcgagactctttcctacttgccagacctcgatgatgccc

SEQ ID NO: 185881 - DNA, 270 bp, Glycine max
ctctcttcttcagtggtggaagctactagaacactagtttgttgagcactgcgatgaggaagtggacggttgcttccgctctccttcttctctctctcctctttctctttgcagatcaaggtcgaaagtttcaggcgaatgccgagggagattccgacgagcttgtagatccacccaaggtggaggacaagatcggtgctgtgcctcatggcctttcaaccgattcagatgtcgtcaagagggaggcggagtcgatctcgaagagatctc

SEQ ID NO: 185882 - DNA, 269 bp, Glycine max
  unsure (1)..(269): unsure at all n locations
ggctcganaaggctttgcatttcatttgagagagagagcgtcttacctttccattatcaaaatggctgtttcgggctatcacaggagcgaggctaaccctagggatagggttggcgatacctctttcctctcccacgcgctctcgaaccgtcgcaatggccgtatccgtcgaccccaagaccgacaacaaactcactcttaccaagtccgaggaagtttcgctgctgccaaggagctgatgcctggaggtgtcaatccccagttcgtgc

SEQ ID NO: 185883 - DNA, 273 bp, Glycine max
cctcgagccgaatcggctcgaagtggttcaaagttaacaagtagcaacgatgtttccattcgggcacaagggtcaaaagataaagcgggactatggtggttatgcagaagaatgtgttggatatcaacagcatcaccagtgttgacgggatcgtcggcaccggcttagacttcttaggcagtgcactcgatacagttacttttttagcctcctccatctccatccaacttattagttgtcccaatgctgatggtgggaaacgaaaagttggaa

SEQ ID NO: 185884 - DNA, 266 bp, Glycine max
cttaaaagttattaagagcttttgcttttctttctgcgcgcttttaccaattaagtagttcttccttttctcaaagcaaaaaaaatgttcatcgagagtttcaaggttgagagtcctaacgtgaagtacacagagactgagattcagtccgtgtacaactatgaaaccactgaacttgttcacgagaacaataatggcacttatcagtgggttgtcaagcccaaaactgtcaaatatgaatttaaaaccaacacccatgtccctaa

SEQ ID NO: 185885 - DNA, 265 bp, Glycine max
attaaacctaattctcatttcttcatcgttcgattcttctcctcctaaagatgcagatcttcgtgaaaactttgaccggtaagaccatcacccttgaggtggagtcctccgacaccatcgataacgtgaaagctaagattcaagacaaggaagggatcccacctgaccagcagagacttatctttgcgggtaaacagcttgaggatggtcgaacccttgccgactacaacatccaaaaggaatccactctccacctcgtgcttcg

SEQ ID NO: 185886 - DNA, 269 bp, Glycine max
attaattactaaggaactctcccagaaaagaggcatcagttgcaatggctcgttacggtgagggcgacaagcggtggatcgtggaggaccgccccgacggcaccaatgtccacaactggcattggtccgagaccaactgcctcgactggtccaagaccttcttcaccagcctcctcactaacctcccaatcctcgacggcgagggtaacctcttcctcaaaacgacgtcgctacgctccctcgacggcgaggcctacatcaatgtccga

SEQ ID NO: 185887 - DNA, 270 bp, Glycine max
  unsure (1)..(270): unsure at all n locations
agaaaaacaagtagtcgagaactaagaagaaggaaatggcttcctcaatgatctcctccccagctgttaccaccgtcaaccgtgccggtgccggcatggttgctccattcaccggcctcaaatccatggctggcttccccacgaggaagaccaacaatgacattacctccattgctagcaacggtggaagagtacaatgcatgcaggtgtggccaccanttggcaagaagaagttcgagactctttcctacttgccagacctcgatgatg

SEQ ID NO: 185888 - DNA, 280 bp, Glycine max
ttcggatcgagagtgaatgttgatgccaacagggaactcatgtatgtcaaggccatgaccgatgaacagttggaaactctgaggaagcaaatagcagtttatggcaccatttgtgagcaacttattgagatgcacagaacactctcagctcaacaggatcttgcaggggttagattgggaaacatatactgtgacccattgatgacatctggtgggcacaaaataacatcaagacaaaggtggacacctacacctgtgcagcttcaaattcttgaacgta

SEQ ID NO: 185889 - DNA, 228 bp, Glycine max
  unsure (1)..(228): unsure at all n locations
ctacaacacacttttntaantcgattcgttcgcagaaacatggcttcttcgtttctatccgcagcttcgcacgctgtctcaccctcttgttctctgtccaccacgcacaaggganagcccatgcttggaggcaacactttgagatttcacaaaggacccaattccttctctagttcaaggtctagaggtcggatctctatggctgttgcagttaatgtatctcggttt

SEQ ID NO: 185890 - DNA, 268 bp, Glycine max
aacacattaacctttctcattccccatctcctcaccttattcagccactgctaatttctagggttccgaaatggacgctggcggaaagatcaagaagggcgccggtggaagaaagggcggcggccctaagaagaagccggtttcaaggtccgtcaaggccggtctccaattccccgtcggaagaattggccgttatttgaagaaaggaaggtacgcccagtgtgtcggtaccggtgctcccgtttacttggccgtagttctcgagtac

SEQ ID NO: 185891 - DNA, 257 bp, Glycine max
caacgaccaagctcgctgatttggagatagaggtgaagataattggttgggatgcgatgataagaatccaatgcagcaagaagaaccaccctgcagcaaggttgatggcagcattgaaggacctggacttggaagtgcatcacgcaagcgtgtccgtggtgaatgatttaatgatccaacaagccacggtgaacatgggaaacaagttttacacgcaggagcagcttctgtcggcactctcgtccaaagttggcgat

SEQ ID NO: 185892 - DNA, 263 bp, Glycine max
agaggtggagagatatttagagaggctcttaatgcacctggatgtgaagctgcccatattacagaaattgaagcaagcattgagtgtgacacttttatgcctcgagttaatacctctgtatttcagacatggtattcatcattccctttggtggaagacaacctccgctattctttcaccacttatgtgcgtgtaaggagttttccaccagagtccccggatcagaatgctgatccattttttgataataattcagacgcttt

SEQ ID NO: 185893 - DNA, 263 bp, Glycine max
  unsure (1)..(263): unsure at all n locations
gcaccagcgcgtgtggcttggaacgttcaacgaggaagacgaggcggcgcgtgcgtacgacatcgccgcgcagcgttnccgcggcatcgacgccgtcacgaacttcaagccgctcgccggcgccgacgacgacgacggagaatcggagtttctcaactcgcattccaaacccgagatcgtcgacatgctgcgaaagcacacgtacaatgacgagctggagcagagcaagcgcagccgcggcgtcgtccggcggcgaggctccg

SEQ ID NO: 185894 - DNA, 261 bp, Glycine max
atgcaaccaatatctgtgaaaacattatatggaaggcatttagtccaaccaccatcaacagtggacgtggagctgaatttgaaggtgctgttattgctctgttccatttgttgataactagaacagacaaggtccgtgctcttcgtgaggcattttaccggcagaatcttcccaatgtgacaaatttgcttgctactgtcttgatcttcctaattgtgatatacttccaaggtttccgcgtggtcttgcctgtaagatcaa

SEQ ID NO: 185895 - DNA, 218 bp, Glycine max
ggggaataatagaaataagaaaagattagtgaggttgaaatgtcgcaacgatcggtgccggcgccgttcttgacgaagacgtatcagttggtggaggatcaggggacggaccaggtgatatcgtggggtgaaagtgggaacacttttgtggtgtggaagcatgcggattttgcaaaggatttgctccaaaatatttcaagcacaacaacttctccagc

SEQ ID NO: 185896 - DNA, 260 bp, Glycine max
cagaccaacaaaggcttatctttgcaggaaagcagctagaagatggcagaaccttggctgattacaatatccagaaggaatctaccctccacttggtgctccgtcttcgtggtgggatgcaaatctttgtcaagaccttgactggaaagacaattacccttgaggtggagagttctgacaccattgacaatgtcaaggctaagattcaagacaaagagggtatcccaccagaccaacagaggctgatctttgctggaaag

SEQ ID NO: 185897 - DNA, 264 bp, Glycine max
cttctcagcagcttcggctagggttcagaaacgaaaaagggttcggagttctgttcgcgatgagagccaagtggaagaagaagcgtatgaggaggttgaagaggaagcgccgaaagatgagacagagatccaagtagtgcgttaaacctagtttgtttctgttgcttttacaattgcttatgttgtcgaatgggacacccagttgttagtggcactggtttctcctttttgatgtttgatacattttgttgcgattcaagtagt

SEQ ID NO: 185898 - DNA, 262 bp, Glycine max
  unsure (1)..(262): unsure at all n locations
atctctcattatccctctctgtttcttttcttcaactcttccaagggaactgagagacctagagagagtcatggacgctgttcttcaaaccagaggccttctttctcttcccacaaaccccatcactcgaatctcactcttgnanccttcacatggttcaaggcacagacttttctctccaaagccaaaaaaacctttctgggtcttctctttcctctaatgggttccccaaactctcaccaacagccaatgtctttgccca

SEQ ID NO: 185899 - DNA, 262 bp, Glycine max
cataactagaaacagtgtgatgaaaatgaaggtccttgttttcttcgttgctacaattttggtagcatggcaatgccatgcgtacgatatgttccctctccgaatgaacactggctatggtgcccgtactccggaggtgaaatgcgcaagttggaggcttgctgtggaagcacacaacatctttggctttgagaccattcctgaacagtgcgttgaagcaacaaaggaatacatccatggcgaacaatatagatcagactcc

SEQ ID NO: 185900 - DNA, 260 bp, Glycine max
ctcctgacatgggtggtgctggtgctggggcagccgaggatgattatgctgctccttctggtggaagtggtgctggccccaagattgaggaagtggactaaatgtgtagttgctttcatccatttatctgtttaaaacttatttgatgcttttttattggattttaacttttatgatttttgttggatgggatactaattgttttgcccgtgtgatatgaacgttgctttacgcattatgtcatttgctttatttcatta

SEQ ID NO: 185901 - DNA, 260 bp, Glycine max
ctcgagccgatttgagggtctcaggggaaaatgcagcaagatcacaggaaaaagagttcagcacagatggactttttctccgaatatggtgatgccaaccggtacaaaattcaagaagtcattgggaatggaagttatggtgttgtctgttcagccattgacactcacacaggtgaaaaagtggcaattaagaagattcatgacatcttcgagcatatatccgatgctgctcgtattctccgtgagataaagctgcttag

SEQ ID NO: 185902 - DNA, 267 bp, Glycine max
ctcgagccgaaaaaaacaaaaaaaaaactccctacaaaaccaactcattaaaatatccaattcacatatccgaaaacagaggaaacatgtctctgtttgcacccctgttgttgaaccagagcgaccccttcgaccatttccgagccttactcggtggaaattcagaatcattggatctcggagcgtacacccaaatggattggaaggaaacccttgacgcccatgtgttcgaaatcgatcttcccgggttcgccaaagaggatgtga

SEQ ID NO: 185903 - DNA, 289 bp, Glycine max
cagatttaaggagaggagacaagggccctggaactggtcagagtttccaacaaaggttgctgtacagttgaatgatacacacccaacacttgcaataccagagttgatgcgattactaatggatgatgaagggcttggatgggatgaagcatgggatgtgacatcaaagactattgcgtacactaatcatactgtcctccctgaagcactggagaaatggtctcaacctgtaatgtggaaactattccacgccatatggagatcatacaagaaatagacaagagattca

SEQ ID NO: 185904 - DNA, 283 bp, Glycine max
gccactctcttcaaaatggccgttaccttctcaaatctccacacagaatcaggtctcaagtccctcgacgacttcctctctgggaaggtctacgtttctggggatcagttcacaaaggacgacatcaaagtgtatggtgctgttttggagaagccaggtgactcttttcccaatgctgccaagtggtacgaggttgtctcatctcagcttgctgcaagcttccccggcaatgctcaaggggtgagattcagtggcaaagcttctgctccagcggaggctgctc

SEQ ID NO: 185905 - DNA, 280 bp, Glycine max
attcggctcgagctggttgattcggatctagagtcttcagtttctcctcgttgttcttcgctttcctgttttcaatttcgattctttcgttaatttaataagatgtttgggagggcacgaagaagagcgataatacgaggtactacgaaatcctcggcgtctccaagaacgcttcgcaggatgatctgaagaaggcttacaagaaagccgccattaagaatcaccccgacaagggcggtgatcccgagaagtttaaagagctggcgcaacttatgaggtt

SEQ ID NO: 185906 - DNA, 270 bp, Glycine max
gcaaagcaaagcagagccaacaacaagaagaacaaaaccaacatcaacaaccacaagaagaagaagcttgcaaattagaagaatcttcagttgaaagggaagaacacacaagaacaaagagaggaagaaacgcgaatgaagggagaattagagttgccaccagggttcagatttcaccccactgatgaagaattggtgaatcactacttgtgtaggaagtgcgcgggtcaaccaatcgcggttcccatcatcaaagaggtcgatttgtac

SEQ ID NO: 185907 - DNA, 269 bp, Glycine max
tttctttctttctttcgtctctctgctctaccatcaacgtctctctcttttcgggatacattcctgggatctgctggctttgtttttcaagggcaaaatgacagatacaaagccagatacacccttaacggcatctgcatcgcgaaagcttcctgatgtcaagaagtctgtgaagttggagtatgtcaagcttggttatcattacctcatcacccatggaatgtaacttgttctctccccgcttggcgtattgattgcagcccagcttt

SEQ ID NO: 185908 - DNA, 282 bp, Glycine max
cttcaaggccatatcaacccattgttcaaattagcaaagctgcttcatctgagaggctttctcataaccttcatctgagatgagtaactctacagagagaaagccacatgcactgttgacaccatatccacttcaaggccatatcaacccattgttcagattagcaaagctgcttcatctgagaggctttcacataacctttgtccacactgaatacaacactaaacgcttgctcaactcaaggggtcctaaagcccttgatggccttcaagactttcattt

SEQ ID NO: 185909 - DNA, 277 bp, Glycine max
atcttctagtatttttcaagtaacttaaggtttcaaacctaggaagttggaagtcatggcagcaacattgatggcagcaacaagttctggcactcttaaagcaactcctttcctaggccaaggcaagggtgccaatgccaatgctcttagggatgttgtttccatgggaactgggaagtacaccatgggcaatgatttgtggtatggaccagacagagtgaaatacttgggacccttttcagctcagaccccttcatacttgaaaggagaattccca

SEQ ID NO: 185910 - DNA, 275 bp, Glycine max
tggaagaatcactcccttatccatttccacaccacaccatagacgacaaccaacgctctctcttcagcctccattctacgctctcccaaccgccagtctctgacccgaagagcgaaccataatggaagagtaaattaccggaaaccgaataaccgtttctccgtgaaagcctccgccaaagagattgcctttgaccagcattcccgctctgctatgcaggccggcattgacaagctcgccgacgctgttgggctcactcttgggcccagagggag

SEQ ID NO: 185911 - DNA, 275 bp, Glycine max
ctagaaacagtgtgatgaaaatgaaggtccttgttttcttcgttgctacaattttggtagcatggcaatgccatgcgtacgatatgttccctctccgaatgaacactggctatggtgcccgtactccggaggtgaaatgcgcaagttggaggcttgctgtggaagcacacaacatctttggctttgagaccattcctgaagagtgcgttgaagcaacaaaggaatacatccatggcgaacaatatagatcagactccaaaacagttaaccaacaa

SEQ ID NO: 185912 - DNA, 275 bp, Glycine max
cggctcgaggatagccagccatgtcgatcttttctattccctcaccaacgtaccgttgttcaatttcaatttcaatttctcggcagccattgccatgttctttcacggctcaagtgagaagaagagggaaagggaaagtggtaatgagcatggaggcacgcattggagtgatgggcaccaagttgggtatgatgagctatttcgaatccgacggagaggttgttcctgtcactgtcgtgggtttcaaagaaggcaacatcgtcacccagatcaaa

SEQ ID NO: 185913 - DNA, 271 bp, Glycine max
aagaaggcgtcttcataaacgcctttcttctccgtttccgtttcctcgttcaaattcgctttttgatctgcgaaaatgagagagtgcatctcgatccacattggtcaggctggtatccaggtcggaaatgcttgctgggagctctactgcctcgagcacggcatcgggcccgatgggcaaatgccaagtgacaagacagttggcggtggtgatgatgctttcaatactttcttcagcgagactggtgctggaaagcacgtgccacgtgcag

SEQ ID NO: 185914 - DNA, 267 bp, Glycine max
gaaaaaatgaccaagatcttctttgtattgctgttatgtctgatcatagcagcttcttctgggtttgtgaattgctttgatgttgaaaagaaggaaaagattggaatttttgagctcaataaaggtgacctttctttgaaggtcaccaactggggtgcttcaattttgtccctggtgattcctgataagaatggaaagttgagtgatgttgttcttggatatgattctgttaaggattacactaatgatacaacatattttggagca

SEQ ID NO: 185915 - DNA, 283 bp, Glycine max
ttcggctcgagtgcagggtaacacatggctctgttattcaaggatccgtcgaagatttcggcgtatcgagatagaaggttccccgggacgcaagaggagtttgagcacgcgcttctgacctcaaccaccgtttacgtggggaacatgtcgttttacacgacggaggagcaagtttacgagctcttctcgcgtgctggggaaatcaaaaagatcatcatgggcttggacaagaacacaaaaacgccttgcggcttctgtttcgttttatattattctcgtgaag

SEQ ID NO: 185916 - DNA, 272 bp, Glycine max
gacgagtatcgcgtacgctaccatggcgtaagggcgaaacatagaacgccacagaagagactatggctaccgtctcgatcacttcgagcgtaacgcaagaaagaggcacgtcaagttcacaagcgctctgcaattagcccagaaggctctgggtattaagggcaaaatgattgccaagaaaaattatgctgaaaaggcgcagatgaagaagactttggctatgcatgaagaatcatcgtctaggcgcaagactgatgataatgttcaggatg

SEQ ID NO: 185917 - DNA, 284 bp, Glycine max
gcttacaaagaattggaaatgaagaggaaaggttacaagaaaagactagatgatttgcaaactgcccttcgcaagcatctcgaacaaattcaggcagatttagtggatcaagaaaagctacaggctacgttggatgatgaacatcttaatgctgcttgttgactgaaaaaagcctgtgaaatggttgctctgcttgaagcacaactaaaggagatgaatccaaatcttgattcaatttcagaatatcgaaagaaggtatcttcatacaatgagcgagttgaaga

SEQ ID NO: 185918 - DNA, 270 bp, Glycine max
acacatccctagctctgtcgttccgtcgttgacgatggcgtttcgggtgcgaaccctgacctccgctctctctttcttctctctctcttgtccatcgcttccgccaatgtcttcttcgaagagcgtttcgatgacgggtgggaaaatcgatgggttaaatcagattggaaaaaagatgagaacgtggctggggagtggaaccacacctctggtcaatggaatggagacgctaatgacaaaggtattcaaaccagtgaggattacagattc

SEQ ID NO: 185919 - DNA, 270 bp, Glycine max
cttccttcaaagtgaggtctctaagtttcactttctttgcatagggcaacctcctttctctgtgactctgagtatcgtatcgttttattattatttctaattctctcttatcaggtccattgaatatgtctccgtcgttggatcttcctcccaagggtggcttcagttttgatctatgccgaagaaacgcaatgcttcaaaacaaggccctcaaagccccaacctttctcaaaactggcaccactattgtcggtttagttttccaggatg

SEQ ID NO: 185920 - DNA, 268 bp, Glycine max
gcttaatctctctcattccccatttcctcacctccttcaaccgctgctaaattctagggttccgaaatggacgctggcggaaagatcaagaagggcgccggaggtagaaagggcggcggcccaaagaagaagccggtttcaaggtccgtcaaagccggtctccaattccccgtcggaagaattggccgttatttgaagaaaggaaggtacgctcagcgtgtcggtaccggtgctcccgtatacttggctgcagttctcgaatacctag

SEQ ID NO: 185921 - DNA, 261 bp, Glycine max
cagatgggtagctcaggtttctcatggaaattggcggatcatccaaagcttccaaagggtaagactgtggctgttgtggtattggatggttggggagaggccacacccaatgagtacaactgcatccacaaggccgaaacaccctgcatggattcacttaaaaagggtgctcctgaacggtggagattggtcagggctcatggtactgctgtaggacttccaacagaagatgacatgggcaatagtgaagttggtcacaat

SEQ ID NO: 185922 - DNA, 265 bp, Glycine max
cgcccaatacctactctccgctcccaagagcacgcaccaccactattgcacttcttcctcgttctccctctttttcttcttcttcgctaaacccttttttctatctcactaacacaacaatgggagacgagaagaagggcaagcctgctgcttccggcgtgtggtccaccatcaagcctttcgtcaatggtggagcctccggcatgctcgccacctgcgtcattcaacccatcgatatgatcaaggtgaggatctcaacttgggc

SEQ ID NO: 185923 - DNA, 279 bp, Glycine max
ggaaattcggctcgacctggaatttacctgctgaacccctctgttttggatcgaattgtaactgaggcccacttctatcgagaaagaggtgtttccatagattgcttcccggaacaaagctatatgcaatggtcctgccaggattttggatggacattggacaaccgagggattatattgctggcctgaggctttacatggactcattgaggaagaagtcatcttctaagttggccagtggctctcaaattgtagggaatgtcattgtggatgagacag

SEQ ID NO: 185924 - DNA, 279 bp, Glycine max
actcggctctcgggcagtaacattgatggcagcatcaataagttctagcactcttaaagccatcctttccttggccaatgcaacggtgccaatgccaatgctctcagggatctggtctccatgggaactgggaagtacaccatgggcaacgatttgtggtatggaccagacagagtgaaatacttgggacccttctcagctcagaccccttcatacttgaaaggagaattccctggggattatggatgggacactgctggcttatctgctgacccagaa

SEQ ID NO: 185925 - DNA, 276 bp, Glycine max
cagtgtgatgaaaatgaaggtccttgttttcttcgttgctacaattttggtagcatggcaatgccatgcgtacgatatgttccctctccgaatgaacactggctatggtgcccgtactccggaggtgaaatgcgcaagttggaggcttgctgtggaagcacacaacatctttggctttgagaccattcctgaagagtgcgttgaagcaacaaaggaatacatccatggcgaacaatatagatcagactccaaaacagttaaccaacaagcttactt

SEQ ID NO: 185926 - DNA, 273 bp, Glycine max
gtgagtttgttgatcgagataactagaaacagtgtgatgaaaatgaaggtccttgttttcttcgttgctacaattttggtagcatggcaatgccatgcgtacgatatgttccctctccgaatgaacactggctatggtgcccgtactccggaggtgaaatgcgcaagttggaggcttgctgtggaagcacacaacatctttggctttgagaccattcctgaagagtgcgttgaagcaacaaaggaatacatccatggcgaacaatatagatca

SEQ ID NO: 185927 - DNA, 274 bp, Glycine max; identical to SEQ ID NO: 157746

SEQ ID NO: 185928 - DNA, 272 bp, Glycine max
  unsure (1)..(272): unsure at all n locations
caagtagttgagaactaagaagaaggaaatggcttccctcaatgatctcctccccagctgttaccaccgtccaaccgtgccggtgccggcatggttgctccattcaccggcctcaaatccatggctggcttccccacgaggaagaccaacaatgacattacctccattgctagcaacggtggaagagtacaatgcatgcaggtgcggccaccaattggcaanaagaagttcgagactctttcctacttgccagacctcgatgatgcccaatt

SEQ ID NO: 185929 - DNA, 270 bp, Glycine max
attcgctctgtgcagtttcctcgctctcttttctgcaattttcttttttgttccttctctgcggttatctttttgagcttcaatggggacgctgaaaccttcgctttccaggctgagatcaaccagcttctcagcctcatcatcaacaccttctacagcaacaaggagactttcttgcgtgaactcatcagcaacgcttctgatgctttggataagattcgatttgagagtttaaccgacaagagcaagctcgatgctcagccagagctc

SEQ ID NO: 185930 - DNA, 259 bp, Glycine max
agataactagaaacagtgtgatgaaaatgaaggtccttgttttcttcgttgctacaattttggtagcatggcaatgccatgcgtacgatatgttccctctccgaatgaacactggctatggtgcccgtactccggaggtgaaatgcgcaagttggaggcttgctgtggaagcacacaacatctttggctttgagaccattcctgaagagtgcgttgaagcaacaaaggaatacatccatggcgaacaatatagatcaga

SEQ ID NO: 185931 - DNA, 262 bp, Glycine max
agcaaagctacgcgaaattagggttgatcgaggaagaagaagaagatgtcgtacctgttgcctcacttgcactctggatgggcggttgatcaagcaatcctggcagaagaggagcgtctggtcgtgatccgtttcgggcacgactgggacgaaacctgcatgcagatggacgaggtgttggcgtcggtggcggagacgataaagaactttgcggtgatatacctggtggacataacggaggtgccggatttcaacaccatgt

SEQ ID NO: 185932 - DNA, 274 bp, Glycine max
ggcggggataagattaaagattcaacaatggcctctgcttctgctactcttctcaagtcatctcctgttcttgacaagtgcgagtgggtcaaaggccagacccttcgccaacctctcgtgagatgtaacccttcctcagcatcagctctcaccatcaaagctgcttcctatgctgacgagctcgtcaaaaccgccaaaacagtggcctcaccggggcgtggtattttggcgatggatgagtcaaatgcaacctgcgggaaacgtttggcatcta

SEQ ID NO: 185933 - DNA, 269 bp, Glycine max
gaacgaccaatgtgtgatctcttgtggtctgaccctgatgatcgctgtggatggggaatatctccacgtggtgcaggatacacatttggacaggatatagctgctcagtttaatcataccaatggtctctccctgatatcgagagctcatcagcttgtcatggaaggattcaattggtgccaggacaaaaatgtggtgactgtatttagtgcaccaaattactgttaccgatgtgggaatatggctgctatactagacataggagagaa

SEQ ID NO: 185934 - DNA, 270 bp, Glycine max
gcaagaatggccagaatagcttcacttgagagcatgctgaacatatcatctaattcacttgtagcaatggcttctcaactttctgaggcagaagaacgagaacgggccttcactaatcgtggacgctggaaccagttgcgctcaatgggagaagccaagaatttgcttcaatatttgttcaattctgttggagatgctaggtgccaactgtgggaaaaggacactgagatcaaggaaataaaagatcagctcaaagaacttgtaggtcta

SEQ ID NO: 185935 - DNA, 272 bp, Glycine max
gagcgcgcatagtgtggtaccagcagcagagcttgtatacgtcgccgcttcagcgtagcaacatgatcattcccgagaagaaccgtaaagagatctgcaaatacctcttccaagagggagtttgctttgcgaagaaggacttcaatctggcgaacacccggagattgatgtgccgaatctgcaggtgataaagctgatgcagagcttcaaatccagagagtacgtgagggaaacatttgcgtggatgcactattactggttcctcaccaacg

SEQ ID NO: 185936 - DNA, 267 bp, Glycine max
catcgataacatatcacacttgagacagttatctctatctacgcaagagaagaatagaaaatggatatcaggttgatggatttggactctccattgttcaacactctgcaccgaatcatggatctgacagaggacgcagagaagaacttgaacgctccgacgcggacatacgtgcgcgacgcgaaggcaatggctgcgactcctgcggacgtgaaggagtaccctaactactacgtgttcgtgatcgacatgccaggcctgaaatcc

SEQ ID NO: 185937 - DNA, 265 bp, Glycine max
gtggtggcaaagatggggttattcttctgtgggatttggctgagggtaagcgtctttactccctcgatgctggttctatcatacatgcgctctgcttcagccccaacaggtactggctttgcgccgccactgaacagagcatcaagatctgggatttggagagcaagagtatcgttgaagatttgaaggttgacctaaagactgaggctgatgccaccaccggtggtggtaaccccaacaagaagaaggttatctactgcacaag

SEQ ID NO: 185938 - DNA, 259 bp, Glycine max
cgaactccgacggcaccaccaacggcgcaatcactgaggcgcagagacagcagcaacagcaaggggggaaggcgttagccgttaagaagccgccgtcaaaggaccgtcacagcaaggtggacggtcgcgggcgccgcataaggatgccaatcatatgcgccgcacgtgtgttccagctcacgcgcgagcttggccacaagtccgacggtcaaaccatcgagtggctcctccgtcaggccgagccctccgtcatcgccgc

SEQ ID NO: 185939 - DNA, 258 bp, Glycine max
gtgtgtcataacaaaagaggaagaacataggagagaaatctattcatatcatcatatcataggacaaaagcgagcaaattcagaggatgaatggggtcacacaccttgaaccagatgagtctgagtttgttgaagttgatccaactggaagatatggcagatacaatgaaatccttggcaaaggagcttcaaagacagtatatagagcattcgatgagtatcaagggattgaagttgcttggaaccaggtcaagttgt

SEQ ID NO: 185940 - DNA, 257 bp, Glycine max; identical to SEQ ID NO: 160436

SEQ ID NO: 185941 - DNA, 263 bp, Glycine max
ggcatcgttagcagttttgtagattcaacctcaatttgcagagttacgttctaatatatttacacaagactgataagagaaaatgtctctgattccaagtttcttcggtggccgaaggagcagtgttttcgaccctttctccctcgatgtgtgggaccccttcaaggattttccatttcccagttctctttctgctgaaaattcagcgtttgtgagcacacgagtggattggaaggagacaccagaagcacacgtgttcaagg

SEQ ID NO: 185942 - DNA, 270 bp, Glycine max
ccctcgagccgattcggctcgagcccagatgggaggtggcaataatgaccaggcaagagctatagaaaccctgctttttgtagacggtattaacacattgttgcaaacaatgtttggaactcgactgcctgcagtaattggagggtcttacacctttgttccaaccacaatctcaattcatcttgctggccgattcagtgatgaaccagatcctatagagatattcaagaggatcatgagatcaatccaaggtgctcttattgttgcttc

SEQ ID NO: 185943 - DNA, 266 bp, Glycine max
tgagtctatgctacgagtttatagataaattctattcttgattataaattattttatgtattcttagttatatgacttttcaatagtagaaatatcttttaaaaaagtgttttatattgtgatttattaattatttttcttatttgtcatcttaaattcatacatataaataatcatgttatgtttgatttatcttatccatttttttattatgttttaacttaatctttatggttcatcatatcctttgttttttttccttggat

SEQ ID NO: 185944 - DNA, 266 bp, Glycine max
  unsure (1)..(266): unsure at all n locations
tttttacattactcaatacactacactaacacaatccccttccctcttctctttctatccaaattctccaccagccatggcagtttcttcagcaacagcttcctccaaactcatactattcccccatgcatcatcatcctcttcccttaattccacacccttccgctcttccancancaacacccacaaactaacccctctctcctcctccttcctccaccccaccaccgtcctccgccgcaccccttcttccaccaccaccccgc

SEQ ID NO: 185945 - DNA, 261 bp, Glycine max
aaaaagaacaaaaacagatacaaaagatggttcatcagaggcaaaacaacatccatgttcttgttcttccataccctgcccaaggctacatcaacccccttgtccaattcgcaaaaagattagcttcaaagggtgtcaaagccacagttgccaccacccactacactgccaactccatcaatgcaccctacatcacggtcgatgccatctccgatggtttcgaccaagccggcttcgcccagaccagcaacaacgtgcaac

SEQ ID NO: 185946 - DNA, 256 bp, Glycine max
aaacagtgtgatgaaaatgaaggtccttgttttcttcgttgctacaattttcgtagcatggcaatgccatgcgtacgatatgttccctctccgaatgaacactggctatggtgcccgtactccggaggtgaaatgcgcaagttggaggcttgctgtggcagcacacaacatctttggctttgagaccattcctgaagagtgcgttgaagcaacaaaggaatacatccatggcgaacaatatagatcagactccaaa

SEQ ID NO: 185947 - DNA, 254 bp, Glycine max
ctcgttgtggttttccaatgctgcgagcgcagtcgaagatctagctagaggcagagaacgttctcttctccctgatcctctggaaagttcttagccgatggcgatcttctacgctttggtggccagaggcacggtggtgctggcggagttcagcgccgtcaccggcaacaccggcgccgtcgcccgccgcattcttgagaagcttccggcggagtccgactccaggctctgcttctctcaggatcgctacatct

SEQ ID NO: 185948 - DNA, 257 bp, Glycine max
agataactagaaacagtgtgatgaaaatgaaggtccttgttttcttcgttgctacaattttcgtagcatggcaatgccatgcgtacgatatgttccctctccgaatgaacactggctatggtgcccgtactccggaggtgaaatgcgcaagttggaggcttgctgtggaagcacacaacatctttggctttgagaccattcctgaagagtgcgttgaagcaacaaaggaatacatccatggcgaacaatatagatca

SEQ ID NO: 185949 - DNA, 262 bp, Glycine max
gttcactgcgagagtgtgggagccagaaaactgctgcttctcgacccacttttgaagttcaaaacttaaaccctagttctctctctctttctttctcctgcatcttcaaccatgtcagcgatgctgcaacctcagatcattctgctcaaggaaggcacggacacttcgcaagggaagccacagctggtgagcaacatcaatgcctgcaccgccgtcgccgacgtcgtccgcaccaccctcggccctcgcggcatggacaagc

SEQ ID NO: 185950 - DNA, 278 bp, Glycine max
atctaagtgagatacacagtagttaggtagcaagcataagtgtctaaccttagaaacatatctgctacatatcgtgtgcattttggaattgtgccactaaaattctattcatctatggctgcctcatcttatgctatgcaatcaatccttgcaaaccctatgatccgcatttccagcgggtctagggagaaccattttggtgttcctgcttatcacatgagaaggaatgttggcctgagagttaggtccatggctgaggaagagcaaccaagtcagcc

SEQ ID NO: 185951 - DNA, 222 bp, Glycine max
gtctcctaaaaccctaattcgcagtgaaaatgagagaaatcttgcacatccagggagggcaatgcggtaaccagatcggagcgaagttctgggaggtgatatgcgacgagcacggcatcgaccacaccggacagtacagcggcgactccgagctccaattggagcgcatcaatgtttattacaatgaagccagcggcggaaggtacgttccacacaacatac

SEQ ID NO: 185952 - DNA, 275 bp, Glycine max
cggctcgaggaacacagaagccacgctgttctttcaaatcgtaaccgaagaatgaagatggtgcgctgctgtcggtgcttcgcctgagtctcattccgtttgcgcccactatcagttgtgctgaggcttaactggttcttgaagcatatttcagagttttatcagagaacaaatgggttatattgggactcacggtgttgcagctctgcacagatataaatatagtggagtagatcattcctatgtggccaaatatgtactacaacccttttgga

SEQ ID NO: 185953 - DNA, 277 bp, Glycine max
gctgttttgaacattcacccaatttgcagagttccaagttatatacatacactgcataattaagagaaaatgtctctgattccaagcttcttcggtggccgaaggagcagtgttttcgaccctttctccctcgatgtgtgggacccctttaaggattttccatttcccagttctctttctgctgaaaattcagcctttgtgagcacacgagtggattggaaggagacaccagaagcacacgtgttcaaggctgatattccagggctgaagaaggagg

SEQ ID NO: 185954 - DNA, 275 bp, Glycine max
ttgactatggctgccctgagtctctcagatggcctaacgttggcaagtataaagtcgatgttgcttccttcgagtcactagcactgctcgagttacaggttagagaagacaccgatctcttcatcattgacgaagttggtaagatggagttattcagttcctcattcttccctgcagttctaagagtttttggagtcaaatatcccagttttggcttccattccagttccaaagtttggcagagacataccagaagtagcaaggttgcggaatca

SEQ ID NO: 185955 - DNA, 274 bp, Glycine max
ctcgtctttggttctggtctatagatctctgtgaagtcgctttataacactcaacctaagatgcagaacgaggaaggacagatcaccgagctttacattcctaggaagtgctctgccacaaaccgattgattaccgctaaggaccatgcttcggttcaggttaacattgggcatgtggatgagaatggcgtctacaatggccatttctccacttttgctctctgcggcttcatccgtgctcagggtgatgctgacagtgccctagatcgcttgt

SEQ ID NO: 185956 - DNA, 272 bp, Glycine max
ctcctctcttgtctgtgtaatcaaaacaacaacattcattcatactcacttccttgcctactacacattcttcatcacttcattcaacatttctccccttagcttgtttcaccaatggctgctgcggttagtgctgcagtctcttttccatccaccaagtctacctctcttccaagcaggacctccctcattgcccaagagagagttgtgttcaagaaggtttcattgcacaacagagatgtgtctagcagtggacgggtagtttccatcag

SEQ ID NO: 185957 - DNA, 271 bp, Glycine max
cttgcattgtatctacccacttctcaaccaacaatggcaatggcaacccaagcctctctcttcaccccacccctctccggtctcaaacccagcgaccgagccaccgcgccatggaaacaatcctccaccctctccttctccacctcgaagcccctcaagttctcgcgaacaatcagagcagcagccaccgaccagaccacagaggcaccggttgggttcaccccaccggaactggacccaaacaccccttccccgatcttcggaggcagca

SEQ ID NO: 185958 - DNA, 275 bp, Glycine max
gttgagaactaagaagaaggaaatggcttcctcaatgatctcctccccagctgttaccaccgtcaaccgtgccggtgccggcatggttgctccattcaccggcctcaaatccatggctggcttccccacgaggaagaccaacaatgacattacctccattgctagcaacggtggaagagtacaatggctgcaggtgtggccaacaattggcaagaagaagttcgagactctttcctacttgccagacctcgatgatgcccaattggcaaaggaag

SEQ ID NO: 185959 - DNA, 260 bp, Glycine max
caaaaacgtgaaatcggacctggttctcattctcgattacggttcccaatacacccacctcatcactcgccgcatccgcagcctctcggtgttctccctatgcatctccggcacctcctctctttcaaccatcaccgacctcaacccctccgtcgtcattctctccgggggcccccactccgtccacaccccggactccccctccttccccgacggcttcctccagtgggcccattccaatggcgtcaccgtcctcggca

SEQ ID NO: 185960 - DNA, 279 bp, Glycine max
gaaataataaggtgtggttggggttgggagttagggtagaatcaattgagaatggggatccgattcgtactgatggtgaacaagcaaggccaaactcgtcttgctcaatattacgaatacctcactctcgaagagcgacgtgccctcgaaggcgaaatcgttcgcaaatgcctcgcccgcaacgaacagcagtgttcctttgttgagcatcgcaactacaaaattgtttatcggcgctacgcctctttgttttttcctcgttggagtcgacgatgatga

SEQ ID NO: 185961 - DNA, 274 bp, Glycine max
cagccgcagacagagatggaagctgtgtgtggaagtgtttgggtcacatcctctcttccacgctcacccaagtccactctctctctattccgctctactcatcaacacctaacagcatttccttcacaatcccatcttttcttatatcaccctcctccctatgctaatgctaaaaccctccgcgccagaacctcctccaaacccgccattttccttccccacttaattgcttctctggaacaagttgaccagacttacataatggtcaagcccg

SEQ ID NO: 185962 - DNA, 271 bp, Glycine max
aacaacagcacaaagcgggttactgtctgttcaagctaccatctctctctctctttcttagtgcctccttgccagaagttaaaatggcccaagaaactttcctattcacatctgaatcagtgaacgaggggcaccctgacaagctctgtgaccagatctccgatgctgtgctcgatgcatgcttggagcaggaccctgacagcaaggttgcctgtgaaacctgcaccaagaccaacatggtgatggttttcggagagatcacaaccaaggc

SEQ ID NO: 185963 - DNA, 272 bp, Glycine max
gaaggagaagaatcatacataaagactcttgtacttaatggaaaaacttatgacctctatgttcacagttacttgcactttggtaaagaagcatctcgtgcggagatgttgaaggtcactggtgattcagctaacccttgcattttagccggttataatgggacctacacatattcgggagttaaatataaggccttggcctccacttctgggtccaatttcgataaatgtcgagaggtagctcttaaagctctgaaagtgaatgaaccatg

SEQ ID NO: 185964 - DNA, 272 bp, Glycine max
aagcactggcgcactaccctgaggcttctcttctcttctcttctctgtcgtgagtcaccatggtgagggttagtgtgctgaacgatgctctgaagagcatgtacaatgctgagaaaaggggaaagcgccaagtcatgattaggccatcctccaaagtcattatcaaattccttttggtgatgcaaaagcacggatacatcggagagtttgagtatgttgatgaccacagggctggtaaaatcgtggttgaattgaacggtagactgaacaag

SEQ ID NO: 185965 - DNA, 273 bp, Glycine max
ggaatttatgatcattgatgagaatcaagcggatgataccttgatcttgagtttgaggtctatccaatatgacattgcgtgggaacgctgtagacaacttaaggctgaagatgctgttgtcaagggtaaggttgttaatgcaaacaaaggaggtctggtggctcaagtggaaggccttaaggggtttgttccattttcacagatatcatcgaaatcagctggagaagaacttcttgagcatgtgattccttttaagtttgtagaggtggatga

SEQ ID NO: 185966 - DNA, 275 bp, Glycine max
caaagaaagaaagaaagaaaaccctagcttaccttttcaactttcaagatgcaaatcttcgttaagacactcactggtaagacaatcacccttgaggtggagagttcagataccatagataatgtaaagtccaagattcaagacaaggaagggatcccaccagaccagcaacgtctcatttttgctggcaagcagcttgaggatggacgtacacttgctgattacaacatccaaaaggagtccactcttcacttggtgctccggctccgtggtgg

SEQ ID NO: 185967 - DNA, 270 bp, Glycine max
cagacagtgtcgaagaagaagaagaagaagatggcattgggtgttcctgctcttcccctgacatacgtggctcacgttctggcacttgttgccagcatcttggtcgtgctctgggtcctcaattttaggggtggcttggcttgggattctgataacaaggccctcatcttcaatcttcatccagttcttattgtcattggcttactagtccttgggggtgaacctattataagctacaaagcattacccctgaagaaggaagtgaagaaa

SEQ ID NO: 185968 - DNA, 279 bp, Glycine max
atcgtgccaatactatgatagatcatcttcttgctcaacagcaatcacaacctgaatattacaccgatcaaatcatcaaaggacttgccctggtaatgctacttgcaggaacagatacatcagcagtaactttagaatgggcaatgtctaatttattaaaccatccagaaatattaaagaaggcaaaaaatgaattagacactcatataggacaagatcgtctagtagatgagcctgacattccaaaactcccttaccttcaaagcattgtctatgaga

SEQ ID NO: 185969 - DNA, 103 bp, Glycine max
cgaatgtcgtggtctctttgaaggtggaatcacgctgccaacaaatatactgagcgcaattagccccttaccagtcctcaaggaaatcttccgcactgatggt

SEQ ID NO: 185970 - DNA, 269 bp, Glycine max
cacctttgtcctaaaacatctccagtgggttcttcttcttctattacaacaacgttacacaagaccatgaccatggccatggccacgatcctgctcctgttcacggtcttcgcggtttcatcggccctagacatgtcgataatctcgtacgacaacgcccacgccgccacgtcgcgcacaccatggagctgatgtccatgtacgagcagtggctggtgaagcacggcaaggtgtacaacgcgctcggggagaaggagaagaggttccag

SEQ ID NO: 185971 - DNA, 267 bp, Glycine max
gatcgagataactagaaacagtgtgatgaaaatgcaggtccttgttctcttcgttgctacaattttggtagcatggcaatgccatgcgtacgatatgttccctctccgaatgaacactggctatggtgcccgtactccggaggtgaaatgcgcaagttggaggcttgctgtggaagcacacaacatctttggctttgagaccattcctgaagagtgcgttgaagcaacaaaggaatacatccatggcgaacaatatagatcagactc

SEQ ID NO: 185972 - DNA, 270 bp, Glycine max
cgttctccttttcacccgccatgtgcggcatcctcgcactgttgggctgcctcgacaactctcaggccacgcgcgctcgcatcatcgaattgtctcgcaggttgcggcatagaggtcctgattggagtggcatagattgctatgaggattgttacctagctcatcaacgccttgctattgttgaccctacttcaggggaccaacctttgtacaacgaagataagactattgttgtcactcctgacgacaaccatggttttaaatttcgtc

SEQ ID NO: 185973 - DNA, 267 bp, Glycine max
tctgcttatcaattactatcactattaatggcagttcttagttctggagaattccttggggcatttcttgttttcgttgtaatccactactggaggctcaacagacacaccccaattgctaagtggcccattcttggcatgttacctggtgtattcctcaacatgcccaccatctttgattatataacttctgtcttgaaacgtgaaggaggcactttcatgtttgaaggaccatgcctatcaaacatgaacataatgtttaccagc

SEQ ID NO: 185974 - DNA, 269 bp, Glycine max
agccgtcgcactttgcgttttctgcgtcatctccgattccccgacaatggccacccaaatgagcaagaagagaaagttcgtagctgatggagtgttcttcgctgaactgaacgaggttctgacaagggagttagccgaggacggatactccggcgtggaagttagggttacgccgatgcgcaccgaaatcatcatcagagccaccagaacccaagccgttctcggtgagaagggaaggagaatcagggaacttacctcggtggttcaga

SEQ ID NO: 185975 - DNA, 264 bp, Glycine max
cccatacctactttcagctcctaagagcacgcatcactgttgcacttcttactcgttctccctcttttttttcttcttcttcttcttcgctaaaccccccctttatttttcctatctcactaacatcgatgggagacgagaataagaccaagtcccctgcttccggcgtgtggtccaccatcaagcctttcgtcaatggcggacctccggcatgctcgccacctgcgtcattcaacccatcgatatgatcaaggtgaggatcca

SEQ ID NO: 185976 - DNA, 270 bp, Glycine max
ggcggtatcatcttccaggtgagacagaggaagaattttcaaccagattagccaataatttggagcagttgattctgaaagagggaccagagactattgctgcatttattgctgaacctgtaatgggggcaggaggtgtaatacctccaccatcaacttattttgagaaggtccaagccgttgtcaagaagtatgacattctttttattgcagatgaggtaatatgtgcctttggaaggcttgggacaatgtttggatgtgacaagtaca

SEQ ID NO: 185977 - DNA, 264 bp, Glycine max
ggagaatacaaaggggagcatcatggtgaacacagtactgaatataaaggagagcatcatgttggtgagcacaagccggagcaccatggaggagaagagcacaaagaggggttcctagacaagatcaaggacaagatccacggcgaggagggtggcaccgctgagggcgagaagaagaagaaggagaaggagaagaaggagcatgatgcatggcatgacagcagcatcagcagtgacagtgattagattatctcccactgctgc

SEQ ID NO: 185978 - DNA, 266 bp, Glycine max
gtttaaacctaattctcatttcttcatcgttcgattcttctcctcctaaagatgcagatcttcgtgaaaactttgaccggtaagaccatcacccttgaggtggagtcctccgacaccatcgataacgtgaaagctaagattcaagacaaggaagggatcccacctgaccagcagagacttatctttgcgggtaaacagcttgaggatggtcgaacccttgccgactacaacatccaaaaggaatccactctccacctcgtgcttcg

SEQ ID NO: 185979 - DNA, 272 bp, Glycine max
ataacctagtctgaaaccatagcacaaaatcaaccatgtctccattgattgttgccttggctacaatcgcagcagcaatcctcatatatcgtataataaagttcataacacgcccatccctccccctcccaccgggtcctataccatggcccatagtgggaaacttgccacacatgggcccggtgccgcaccactccctcgcggcgttggctcgcattcacggcccgttgatgcacctccgcctcggcttcgtcgatgtcgtggttgccgcg

SEQ ID NO: 185980 - DNA, 91 bp, Glycine max
gaaaaaggtacgttttgttcgttggggatttcctggaaaaaatcgtcgaaatattctcgaaatacctatgaacgagcttcaataaaacata

SEQ ID NO: 185981 - DNA, 264 bp, Glycine max
gacactactactggccttgtctctcgcaggttggccctcactgtgctcattggtgctgctgctgttggctctaaggtggcacctgctgatgcagcctatggagaagctgccaatgtgtttggaaaaccaaagacaaacacagacttcctttcatacaatgggaatggattcaaactctcaattccctcaaagtggaacccaagcaaagaggttgagtacccaggtcaggttcttagatatgaggacaattttgattcaaccagc

SEQ ID NO: 185982 - DNA, 267 bp, Glycine max
ggttgggatgatcactggatcttctgggtgggacctttcattggtgctgcacttgcagcactctaccaccaggtcgtaatcagggccattcccttcaagtccaagtgattcaatcaaaccgttcatgcttaatcaagttgggaacaacaaaaaaaatcaaaacaatgtttctgggtttcggtttcatttcatcaagatgatctgtttatctttttttttttaattttaatttaaagtctttgtattttgtatgtaaagatgtaaaat

SEQ ID NO: 185983 - DNA, 270 bp, Glycine max
ccctcgagccgaatcggctcgagcgaaatatggcttcaactcatctgcttcccctagcaacctaccttcttacttctctccgcaccttatctccagattgctggggcggaagcacaaccgttgactagtctcaaacttaactctcatattcttcaggagtctactgctaaagagattaatgaaaatcccgaggcaggatgggaggctgctataaatcctcgattctccaattatacagttgaacaatttaagcgccttcttggagtcaaa

SEQ ID NO: 185984 - DNA, 266 bp, Glycine max
gaaataataaggtgtggttggggttgggagttagggtagaatcaattgagaatggggatccgattcgtactgatggtgaacaagcaaggccaaactcgtcttgctcaatattacgaatacctcactctcgaagagcgacgtgccctcgaaggcgaaatcgttcgcaaatgcctcgcccgcaacgaacagcagtgttcctttgttgagcatcgcaactacaaaattgtttatcggcgctacgctctttgttttttcctcgttggagt

SEQ ID NO: 185985 - DNA, 266 bp, Glycine max
cgaatcttggtttattgattggtggaatactaggcaatccgaaattttcttgaatgatattaaagaaaagagtattctaaaaaaattcatagaatttgaagaactgtttttcttagatgacatgttaaaggaatgtccggaaacacatctacaaaacctgcgtactggaatctataaagaaacaatccaattaatcaaaacgcacaacgaagatcgtatgaatacgattttgcacttctcgacaaatataatttgtttctttattc

SEQ ID NO: 185986 - DNA, 267 bp, Glycine max
cttccattaacgggtggtgcctctcttccatctccccagccaaatcctctctcaagaaggccacattaggcccttctgtcttcgcaaccgttagcactccttcttctccttcttcttcttcttcttcttccttcccttctctcattcaagacaggcctgtctttgctgcccctgcccccatcatcaccccaactgtgagagaggatatggcaaaggaatacgagcaagctattgaagaactccagaaattgttgagggagaagagtg

SEQ ID NO: 185987 - DNA, 265 bp, Glycine max
cgcattcaacctttctcttcctcctcactcaaacttcccttctctacgccgttcctcccaaatggatgcaccaatggagttttggggtgttgaggttaaggttggtcagaccgtgacagttgacccaatggatcctgtggattcatacatacacatatctcaggttgcgctcggagaggccaaaaaggagaaacctaatgagtctgtggttttgtatttgaaagttggtgaacagaagattgtcttgggaaccctttctagggat

SEQ ID NO: 185988 - DNA, 265 bp, Glycine max
  unsure (1)..(265): unsure at all n locations
gttgagaactaagaaggagaagcaaatggcttcctcaatgatctcttccccagctgttaccactgtcaaccgtgccggtgccggcatggttgctccattcactggcctcaagtccatggctggcttccccaccagaaagaccaacaatgacattacctccattgctagcaacggtggaagagtgcaatgcatgcaggtgtggccaccagttggcnagaagaagtttgagactctttcctacctgccagaccttgatgatgcacaa

SEQ ID NO: 185989 - DNA, 263 bp, Glycine max
ctagagtcttcagtttctcctcgttgttcttcgctttcctgttttcaatttcgattctttcgttaatttaataagatgtttgggagggcaccgaagaagagcgataatacgaggtactacgaaatcctcggcgtctccaagaacgcttcgcaggatgatctgaagaaggcttacaagaaagccgccattaagaatcaccccgacaagggcggtgatcccgagaagtttaaagagctggcgcaacttatgaggttctgagtgac

SEQ ID NO: 185990 - DNA, 263 bp, Glycine max
aatgaaggtaaaatgttccctcaactgggtcaaatgatggctgggaattttaatgctcaaggaaacggggttccctgtctagatctcggtaatgaagactcatcgtccattcatgcagatgagcggaagcccagataaagaggtagagagccggcaaatgggagagatgaagcgctgaatcatgttgaagctgagagacactgacgtgagaagcttaaccagaggttttatgccttgagagctgttgtccctagcatatctaa

SEQ ID NO: 185991 - DNA, 264 bp, Glycine max
gccggaggtagggtccagcggctggaagagcaccgcacgtcgcgtggtgtccggtgcgcccccggcggcccttgaaaatccggaggaccgagtgcctcccacgcccggtcgtactcataaccgcatcaggtctccaaggtgaacagcctctggtcgatggaacaatgtaggcaagggaagtcggcaaaatggatccgtaacctcgggaaaaggattggctctgagggctgggcacgggggtcccagtcccgaacccgtcggctg

SEQ ID NO: 185992 - DNA, 268 bp, Glycine max
cctcgagccgaatcggctcgagtctagatccgtcgaaactatttcacgttgtctcaaggctggcatgtctgtggctcgttttacacttttcatggcatgaccctgagtaccaccaggagactttggagaatttgaaggctgctatcaagagtactaagaagctttgtgctgttatgctggacacggtgggcgcagagatgcaggttgttaacaaaagtgagaaagcaatctcacttgaggcaaatggtcaggttgttctaactcccga

SEQ ID NO: 185993 - DNA, 261 bp, Glycine max
  unsure (1)..(261): unsure at all n locations
cgcacacgaggagcagcctcaggaggagaaggatgtctcacaggaagttcgagcacccaaggcacggttcactgggatttcttcccaggaagcgtgctgctcgtcacaggggaaaagtgaaggcattccccaaggatgacccatccaaggcacccaagctcactgcattcttgggttacaaggccggtatgactcacattgttagagaggtcgagaagccaggatcagagcttcacaagaaggatacttgtgangctgtta

SEQ ID NO: 185994 - DNA, 259 bp, Glycine max
ggagctgctgcagtcattgttggttctgacccaattccacaagttgagaagcctttgtatgagcttgtttggactgcacaaacaattgctccagacagtgaaggtgctattgatggacaccttcgtgaagttggactcacatttcacctcctcaaggatgttcccgggattgtctcaaagaacattgataaggcactttttgaggctttcaacccattgaacatctctgattacaactccatcttttggattgcacacc

SEQ ID NO: 185995 - DNA, 266 bp, Glycine max
atactatgaaaaacatggatatggggtggaggaatttaatgaaaccttatatgatgaatgggttaacaagggcgacgcaccggcattgccagagactcttaaaaattacaacaagctgttgtctcttggcttcaagattgtattcttgtcaggaagatatcttgacaaaatggccgtaacagaagcaaacctaaagaaggctggcttccacacatgggagcagtcattctcaaggatccacatcttatcactccaaatgcactttc

SEQ ID NO: 185996 - DNA, 267 bp, Glycine max
gctgattttgcattgtggaaggctgctaaaccaggtgagcctagctgggacagcccttggggtcctggaagacctgggtggcacattgagtgcagtgcaatgagtgcttgttatttaactcataaatttgatatccatggtggtggaattgatttaatctttcctcatcatgaaaatgagattgcacagagctgggctgcagaccatgatagccatgtcagttattggatgcataatgggcatgtcactaataacaatgaaaagatg

SEQ ID NO: 185997 - DNA, 259 bp, Glycine max
aaaaaaaacccttagccaacacaaccatcatggccacctctgctattcagcaatcagcattcactggtcaaactgctctgaagcagctcaatgagttcgtccgcaagaccggtggcgccggcaaaggtcgcactaacatgcgccgcaccgtcaagagtgctcctcagagcatttggtatggccctgaccgtcccaagtacttgggtccattctcggagcagattccatcatacctgaccggagaattccctggtgacta

SEQ ID NO: 185998 - DNA, 263 bp, Glycine max
acttcccttctccaacatgccaaacgacagcgttctgagtcttttcttcttcgttaccctcttcacatgccttctctctgctacttcccacgatgaccatattttcctaccgagtcaactccatgacgatgactcagtgagttgcactgcaaccgacccaagccttaactacaagccggtgatcggaatcctgacccaccccggcgacggtgcctctggccggctcagcaacgccaccggggtttcttacatcgccgcctcct

SEQ ID NO: 185999 - DNA, 264 bp, Glycine max
gacaattcttattcttttctctctctcttgcgccgcttcacaagccaaacctaacttgtctctagattctctctgcattctctctgcattgtccgatcaatggccggaaaaggagatggtcctgctattggaatcgatctcggcaccacatactcctgcgtcggagtgtggcagcacgaccgtgtcgaaatcatcgccaatgaccagggtaacagaaccacgccctcttatgttggtttcaccgattcagagcgtttgatcggt

SEQ ID NO: 186000 - DNA, 259 bp, Glycine max
  unsure (1)..(259): unsure at all n locations
gaaaatgaaggtccttgttttcttcgttgctacaattttcgtagcatggcaatgccatgcgtacgatatgttccctctccgaatgaacactggctatggtgcccgtactccggaggtgaaatgcgcaagttggacgcttgctgtggaagcacacaacatctttggctttgagaccattcctgaagagtgcgttgaagcaacaaaggaatacatccatggcgaacaatatagatcagactccanaacagttaaccaacaa

SEQ ID NO: 186001 - DNA, 263 bp, Glycine max
ctcaggcgctgctgcccttcagtccttcagcaatggtttacgtgaagtcacagaaatcaaaagcctacttcaagaggtatcaagtcaagttcaagagaagaagagagggaaaaaccgattaccgtgccaggattcggttgattaatcaggacaagaacaaatataacaccccgaaatatcgctttgttgttcgtttcagcaacaaagacattgttgcacaaataatatctgctagcattgctggcgatattgttcttgctgca

SEQ ID NO: 186002 - DNA, 262 bp, Glycine max
cttcgttatccttctttttttctccttgaactcgaatattcactaacgcagatgaggtggttctgctagatttctggccaagtccatttgggatgagggtcaggattgcacttgctgaaaagggtatcaaatatgagtccaaagaagaggacttgcagaacaagagccctttgctcctcaaaatgaacccggttcacaagaaaatcccggttctcatccacaatggcaaacccatttgtgaatctctcgttgctgttcagta

SEQ ID NO: 186003 - DNA, 262 bp, Glycine max
ctcgaacctttgtgaccaaggttgagaaacgctcactggtgggctatgagtttgagatatggcagtgtggtcttggttgctttagtgcttctgccacacatggcttctgctgcttcaattgtgaagaacctaccgggttacaagggtgatcttccattcaaacttgaaactgggtacataggagtgggagaagaagacgaggtgcaaatatttcacttatttgtggagtctcagagaaatccattcattgatccactgttaa

SEQ ID NO: 186004 - DNA, 254 bp, Glycine max
agctgctatagcggctggcgctagagaagtagctgtttttgcatcagcttctgaatctttctcaaaatcaaacattaattgtagcatagaagaaagccttgtccgctatcgagctgttactcgggctgctaaacagctctctattcctgttcgagggaactgtagttccaatgcttttggctgtaatggctgttgtgccagcagagaagcttgctgtccacttccatgacacttatgggccatcccttccaaat

SEQ ID NO: 186005 - DNA, 259 bp, Glycine max
ccccgagcgaatcggctcgagcagagtccttccttgtctgttctacactgtgtaagcagacatcgattctgcgaactgagattcgcatcgccaattcaaaagcgttcgttcgtcggagatggagacgctaccgacgacgacgacaaagcgaggaggagcgagatcgaagcccgttcagacctcgaaatcgtctctcgttatggccttcttctcctgcgtcgcgtggctctacgtcgccggaaggttatggcaagacgca

SEQ ID NO: 186006 - DNA, 259 bp, Glycine max
caaaattacaaaaaaaaagtcctcgattgtggtggctactctctctttagtatttcactcaatttggagtgcttcttagtccaatagctcttaagccggttggccccttgcttcttgactcaaattcttcaagatatggcaccattcctcctttccaattccctatatggcaactcacaagcaaggaaacaaagagacaagcaataaccaaagaaaaaaaatgaaatgaaagctaaaccaatagagttttaacaagaca

SEQ ID NO: 186007 - DNA, 255 bp, Glycine max
ggttcatcgtcccactttcttctccttttagggtttcctttttgtttctcctttccagatctgcatcttcccttttttaggattaagcggtgagattcgtgaatctgagaaatgtcggattcttctcgggaggagaatgtttacatggcgaaattggcggacaggccgagcgttacgaggagatggttgagttcatggagaaggtagcaaagactgtggaggttgaggagttgacggtggaggagagaaatcttc

SEQ ID NO: 186008 - DNA, 259 bp, Glycine max
agttaatctatctgcaacagcaacattgtgacagtgacagtgtcgtaggatggagaaggtggtatgtgtgaccggcggcagcggctgcattggttcatggctcgtccatctcctcttggatcgcggctacaccgttcacgccaccgtccaaaacctcaacgatgaagccgagacgaagcatcttcaatccctcgacggagcgtccacgcgcctccgcctcttccagatggatctcctccgccacgacaccgtcctcgcc

SEQ ID NO: 186009 - DNA, 246 bp, Glycine max
  unsure (1)..(246): unsure at all n locations
cttggcagcagaaagaactcaaagacagagatcatcatggncgaggggaaagactcagatacaagcgtatagagaacgccacaagcaggcaagtaactttctcaaagcggcgaaatgggttgctgaagaaggcctttgagctatcagttctgtgtgatgctgaggttgctcttatcatcttctcttcaagtgggaagctctatgaatttgctagctccagcatacagtgttcaattgaacgatacc

SEQ ID NO: 186010 - DNA, 269 bp, Glycine max
aattcggctcgatccgctcgacagaggcacagagagagcatggtttcggggtcagggatctgtgccaagagggtaattgtggacgcacgacaccacatgctggggaggctggcatcgatcgtggcgaaagaacttctgaatgggcagaaggtggtggtggtacgctgcgaggagatttgcatctccggtgggctcgtcaggcagaagatgaagtacttgcgtttcctccgcaagcgcatgaacaccaagccctctcacggccccatcca

SEQ ID NO: 186011 - DNA, 255 bp, Glycine max
ctttctctctctctgactcgaaattttgcagatctggaaatggcgacggcaacgtaccctccaccgccaccttattacagactttacaaagattacttgcaaaaccctaagtctgctcccgaccctccaccgcctattgaaggcacttatctttgttttggagccaattacaccactagtgatgttctaccaaccttggaagaacaaggggtgcgccactctattctaagggccctaatgttgatttcaagaagg

SEQ ID NO: 186012 - DNA, 250 bp, Glycine max
ctcgagcgcatcactagaagtgttggatgcatttctatttctaactaattattgtgcttattattattgttgagaaagaaaagaatggcaaagttaataaaattctttgagttgaacacaggggccaagattccttctgttgggttaggcacttggcaagctgagcctggtgttgtagccaaagctgtcaccatcgccattctggttggatacaggcatattgattgtgctcaagcgtataacaatcaag

SEQ ID NO: 186013 - DNA, 255 bp, Glycine max
tctcaagtccaacctacccctttttcttctcccaccaacttcaccgtcttcttcctcgatcatgtctcacttcaagggcaagtaccatgatgagcttattgccaatgctgcttacattggcactcctggaaagggtattcttgctgctgatgagtcaacagggacaattggcaagcgtttggccagcatcagtgtagagaatgttgaatccaacaggcgtgctcttagggagctgcttttcaccgctcccggtgc

SEQ ID NO: 186014 - DNA, 256 bp, Glycine max
ctcgatcaaacacaaaatggaaaagaatgtggggattctcgccattgacatctacttccctcccgcttgcgttcagcaggaagcattggagactcatgatggtgccagtaaagggaagtataccattggacttggccaagactgcatgtcattctgtaccgaagtagaagatgtcatctcaatgagtttgacagtggttacttctcttcttgagaagtatgggattgatcctaaacaaatcggtcgtctggaagtt

SEQ ID NO: 186015 - DNA, 255 bp, Glycine max
taagccgtggaccaggcctacctgagccactgcttcgcccccgccggcgacgtggtctccatcaaaatcatccgccacgagctcacgggccagcccgagggctacggcttcgtcgagttcgtctcccacgccacagcggaaacggttctccagacctacaacgccatcgaccagaccttcacgctcaattgggcctccttcggcatcggcgagcgcaggcccgatgccgccctggaacactccatcttcgtcggc

SEQ ID NO: 186016 - DNA, 253 bp, Glycine max
attgaattctccagagagaagaagaaacttaatcgatcatcacttcacttcactaatacatcatggcagacgagacccagaacaagtatgagagctctgaggttgaggtccaggatcgtggtgtttttgactttctcggtaagaaaaaggatgaagaagacaagcctcatcctcaggaggaggtcatcgccaccgagtttcaaaaagtcactgtctcagaccaaggagagaacaagcacagcctcttagaaaa

SEQ ID NO: 186017 - DNA, 248 bp, Glycine max
ctctcttgcggctaggtttagcgagctcttctagatttacggaagatgggtaaggaaaaggttcacatcagtattgtggtcattggccatgtcgactctgggaaatccactaccactggtcacctgatttacaagcttggaggcattgacaagcgtgttattgagaggtttgagaaggaagctgctgagatgaacaagaggtctttcaagtatgcctgggtgctggacaaacttaaggctgagcgtga

SEQ ID NO: 186018 - DNA, 257 bp, Glycine max
ccagtagtcatatgcttgtctcaaagattaagccatgcatgtgtaagtatgaactaattcagactgtgaaactgcgaatggctcattaaatcagttatagtttgtttgatggtatctactactcggataaccgtagtaattctagagctaatacgtgcaacaaaccccgacttctggacgggatgcatttattagataaaaggtcaacacaggctctgcctgttgctttgatgattcatgataactcgtcggatcgc

SEQ ID NO: 186019 - DNA, 254 bp, Glycine max
gtgtgatgaaaatgaaggtccttgttttcttcgttgctacaattttggtagcatggcaatgccatgcgtacgatatgttccctctccgaatgaacactggctatggtgcccgtactccggaggtgaaatgcgcaagttggaggcttgctgtggaagcacacaacatctttggctttgagaccattcctgaagagtgcgttgaagcaacaaaggaatacatccatggcgaacaatatagatcagactccaaaaca

SEQ ID NO: 186020 - DNA, 254 bp, Glycine max
ctcgagcgaatcggctcaggtaatctaacaaagtaagcacaacgagggagatattgcccgtgcaaggtgggcaatgcgggaaccaaatcggttccaagttctgggaagtgatatgcgacgagcatggcatcgaccccaccggaaagtacaccggcgacgaggcctccgatctccaactggagaggatcaacgtctactacaatgaagcctccggcggaaggtacgttccccgggccgtcctcatggatctcgag

SEQ ID NO: 186021 - DNA, 252 bp, Glycine max
agcgaaacgcatagaatcgaaagaggggaaaagaaaaagaaaagttagggttagggattttgagagatggcatcgactaagaagatcaccctgaagagttcggacggtgaggccttcgaggtggaggaggcggtggcgctggagtcgcagacgatcaagcacatgatcgaggacgactgcgccgacagtggaatccctctccccaatgtcaccagcaagattctggcgaaggttatcgagtactgcaagaag

SEQ ID NO: 186022 - DNA, 253 bp, Glycine max
acccagcggaatcaagcaatggcacttccatctccaccggccctcgaagcacagttaaccactctctcttcctcatattccttatcatccgttggtagctcatacctgcaaacagggcaagaatttcgagaactcaaccaaggaacaatgcaatctccatgatacccatgcccgcacggcaacctcttcgccaagtctccaacaccgagcaaatccttacatatagcgcacgccacggcttcgctttcggacg

SEQ ID NO: 186023 - DNA, 253 bp, Glycine max
cggctcgagtgaatctcagaattctctagaagagatctttttctgctctttgaagaaagaagggtctttgcttgattttggagatgtctctgctctcagatctcatcaacctttacctctccgataccaccgagaagctgatcgcagagtacatatggatcggtggatcaggaattgacctgaggagcaaagcaaggactctcccaggaccagttagcgacccttcagagcttcccaagtggaactatgatgg

SEQ ID NO: 186024 - DNA, 252 bp, Glycine max
attaaaccaaccatactacaccagacactcctcctaaccttcaataattctcttctcacccttataaaaagaaactcattttaactcagactttgcatttcaccttatctatctatcttttctaacatggctgctgggactggactctttgcagagattttggatggagatgtgtacaagtactatgctgatggagaatggaagaaatctgcttctgggaaaagtgttgccatcatcaaccccactaccaga

SEQ ID NO: 186025 - DNA, 254 bp, Glycine max
cttctccgcctccttcaaaatcgtcatcaatttcgcgtctttctttctcaattctcttagattctcaattgggtcttcaaaaatgcggatgagttgcaatggatgtcgagttctgagaaaaggttgcagtgaaaattgcagcatcagaccctgtttacaatggatcaaaagcccagaatcccaagccaatgctactgtgtttctcgctaagttttatggtcgtgctggtctcatgaacctcgttaacgcaggcc

SEQ ID NO: 186026 - DNA, 251 bp, Glycine max
gggaatcctctctgtgtgtgatgagccacttgtgtccgttgacttcaggtgcactgatgtgtcctcaaccgttgactcctcgttgaccatggtcatgggagatgacatggtgaaggtcattgcttggtatgacaatgaatggggctactcccaaagggttgtggatttggctgacattgttgccaacaaatggaagtgagagccaaacaaattctcattggtaattaaattatgtatgtaccatgccattg

SEQ ID NO: 186027 - DNA, 258 bp, Glycine max
ctcgagccgcaaagctgaagtgtctgcttcttccgattccggcacgcccccatcaccatggtgcacgttccgaacacaaagaagacatactgcaagagtaaggagtgcaggaagcacaccctgcacaaggttacccaatacaagaagggtaaagatagcattgctgcccaaggaaaacgccgttacgatcgcaaacaatctggttatggcggacaaactaagcccgtcttccacaagaaggtaacctctcgttaacct

SEQ ID NO: 186028 - DNA, 253 bp, Glycine max
cagccatgtcgatcttttctattccctcaccaacgtaccgttgttcaatttcaatttcaatttctcggcagccattgccatgttctttcacggctcaagtgagaagaagagggaaagggaaagtggtaatgagcatggaggcaggcattggagtgatgggcaccaagttgggtatgatgagctatttcgaatccgacggagaggttgttcctgtcactgtcgtgggtttcaaagaaggcaacatcgtcaccca

SEQ ID NO: 186029 - DNA, 246 bp, Glycine max
gttgatttctcagctccgtgcagagcatcagaaggagggctgtactgctggaattgatgttatttctggctctgttggagacatggctgaacgggggatatgcgaacattcaaagtcaagcaagctgtattgctatcttcaacagaggcagctgagatgatccttagagttgatgaaatcatcacgtgtgctccgaggaggagagaagaccgaatgtacaatatcctgagggtccaactttggatg

SEQ ID NO: 186030 - DNA, 250 bp, Glycine max
aatgaatctgatcagggcaaagagcattgagaaaggttgggacttgaagttgggggaacttgcaaggatttggaaagggggttgcatcataagagcaatatttttggacagaatcaagaaagcatacgacagaaatcctaaccttgcaaaccttcttgtggatccagaatttgcaaaggaaatagtggatagacaatctgcatggagaagagttgtgtgtcttgctatcaactatggcactagcacacca

SEQ ID NO: 186031 - DNA, 251 bp, Glycine max
aaaagcttatgccacaaggacaatcctgttcttgaaagacgatggatctttaaagccacttgctatcgaattaagcaagcctgcaacagtgagtaaagtggtgttgcctgcaacagaaggtgttgagagtacaatttggttgttggccaaggctcatgtcattgtgaatgactctggttatcatcagctcataagccattggttaaatactcatgcagtgatggagccatttgccatagcaacaaacaggc

SEQ ID NO: 186032 - DNA, 249 bp, Glycine max
cgacttttgatcgaggactatccttatgcttctgatgggctagagatatcggatgctatcaagtcttgggtggaagaatatgtctcattctactacaagtcagatgaggaacttcaaaaagaccccgagctccaagcttggtggaaagaacttgtagaggtgggtcatggggatttgaaggctaagcgctggtggcaaaagatgcaaactcgtgaagagttggttgaagcttccgctaccctcatatgg

SEQ ID NO: 186033 - DNA, 250 bp, Glycine max
agaaggtgctgcttattggagggggagatggtggaattcttagggaaatatcacgccattcttctgttgagcatattgatatatgcgaactagaccaaatggtcattgatgtttattcggagtttttcccggatatagctgttggttacgaggatccccgagtgcatgttcatatcagcgatggagttgcgtttatcaattctgttcctgagggcacttacgatgtcattatatcggatgcttttccagc

SEQ ID NO: 186034 - DNA, 277 bp, Glycine max
cgcaggcttcggattgggctcgaggattgtattcttgtcagggagatatcttgacaaaatggccgtaacagaagcaaacctaaagaaggctggcttccacacatgggagcagttaattctcaaggatccacatcttatcactccaaatgcactttcatacaaatcagcaatgagagagaatctgttgaggcagggatacagaattgttggaatcattggagaccaatggagcgatctgcttggagaccacagaggcgaaagcaggacctttaagctt

SEQ ID NO: 186035 - DNA, 236 bp, Glycine max
cggatctcttcttcagtggtggacgctactagaacactagtttgttgagcactgcgatgaggaagtggacggttgctctccgctctccttcttctctctctcctctttctctttgcagatcaaggtcgaaagtttcaggcgaatgccgagggagattccgacgagcttgtagatcctccgaaggtggaggacaagatcggtgctgtgcctcatggcctttccagcgattcagatgt

SEQ ID NO: 186036 - DNA, 246 bp, Glycine max
gctgggacttagcatcgatgaggatgacaatggcggagatgatgttgatatgcccccgttggaagaggacggtgctgaggagagcaagatggaggaagtggactaaatgccaaaggtgttgtgttaatgaattgtggatcgtacgatttagtctgttaaatggtacaggatgcataagtctttttagtctttatcttccttgttttgttttttgaaatatattgggttttcttttttacttttgtg

SEQ ID NO: 186037 - DNA, 248 bp, Glycine max
gaaatccttttctctcctctctctccttcccaaggttcttgctgtctacaaggaagttattgctgaccttaaggcagctggtgcttcatggattcaatttgatgagcctacccttgtcttggaccttgaatctcacaagttgcaagctttcactgacgcatatgcagaacttgcacctgctttgtctgatctgaatgttcttgttgagacctactttgctgacatccctgctgaggcgtacaagaccc

SEQ ID NO: 186038 - DNA, 248 bp, Glycine max
accagctatacttgttccttttgaaggttagaagtgctacaatacaaacaatggcagctactcaggaagatgtgaagcttttgggtattgtgggaagcccatttgtgtgcagggtccagattgcccttaagttgaagggagttgaatacaaatttttggaagaaaatttgggcaacaagagtgatttgcttctcaaatacaaccctgttcacaagaaggttccagtgtttgttcacaatgagcagccc

SEQ ID NO: 186039 - DNA, 248 bp, Glycine max
ttgggcagttgttggcaatctatgaacacagaattgctgtagagggtttcatttggggaatcaattcttttgatcagtggggagtagagctggggaagtcgctggctactcaagtcagaaagcaacttaatgcatctcgtactaaaggagaaccagttcagggctttaatttcagtactacaacaatgttgacaagatatcttcaggcaagttcagatgtcccagcggatctgccaactgttttaccg

SEQ ID NO: 186040 - DNA, 247 bp, Glycine max
  unsure (1)..(247): unsure at all n locations
aaggntctactctactncttcaccttctgctctagaaaattcngtggtgatacatggcttcggctactctctctgtagccaaaccagcccttnaggcaaatgggaaaggcttctctgaattctctggcctccgcagctcatcaggcttccttgccctttctagaaaatcttcagaggatttccattctgtcattgcctccagacctatgcagttggaagcagtggaggatacaagaagggtgtgacc

SEQ ID NO: 186041 - DNA, 253 bp, Glycine max
  unsure (1)..(253): unsure at all n locations
gtgccggacagccacgaaaagccgaggctcttctgacttctatgagcaaatatggcgtacaaccaaacgtggtgatcttcactaccatcatcagtggatggtgtgccgcagcanaatggatcgtgcatttagactttgtgagaaaatgcatgacatgggaacttccccaaatttgaaaacttatgaaactttaatatggggatatggagaagcaaaacaaccatggaaagcagaagagttacttactactatg

SEQ ID NO: 186042 - DNA, 246 bp, Glycine max
tgttgctgctcatcctccgtaacctccgagctctgcaccgaagaacgaagccatggggaagacacatggaatgggatctgctcgcaagctcaagtcccaccgcaggaggcaaaggtgggctgacaagtcatacaagaaatcacatcttggaaatgaatggaagaaaccttttgctggttcatcccatgccaagggaattgtccttgaaaagataggtattgaggctaagcagcccaactctgccat

SEQ ID NO: 186043 - DNA, 253 bp, Glycine max
gccttatcgctgtggttatcatctgtcttctgtcctcctttcctaagatctctctcttttcactacggccgcacgccgaaaccatggccggaaaaggagatggtcctgctatcggaatcgatcttggaaccacctactcttgcgtcggtgtgtggcaacatgaccgcgttgaaatcatcgccaacgaccaagggaacagaaccacgccgtcttacgtcggattcactgacaccgagcgtctcatcggtgatgc

SEQ ID NO: 186044 - DNA, 243 bp, Glycine max
attcattgaggtggcaaaagagagagccctaccagttggaccagaggaaggtggttttggaatgtcatatgatcttctgtatggacgagctggattcttatgggcgtgcattgttcgtgaacaagcacctaggagaagatgcagtgcccaaagacattttgatgcttattattgatgcggtgttggctggtggtagagcaggagcatctgatattaaagactgcccattgatgtatagatggc

SEQ ID NO: 186045 - DNA, 247 bp, Glycine max
ccctcgagccgattcggctcgacaggaattggattcgcaatattgaccaacatgcttcagaacaatgttaacaaaatactgacggggaacaaagctgatatggatgaaagcaaaagggtaagcaaactttgtttgcgtttcatgaaaactcacttttatatttttcctcacatctttcaaacacaaatttgacttgaacaacagagttgcagagataagatcaaaggggcttaaaaaaccaaccatt

SEQ ID NO: 186046 - DNA, 248 bp, Glycine max
ctttctctcttctctctccccgcccaaaccctaactccctacccacttccgctttctctcatccatcatgaaaggaggaaagtccaagaccgaatctaagagagccgatgccaaacttgctgtgaataagaagggcgccgccaccaagactaggaaacccgccggaaaggggaaggcagcgaaagatcctaacaagccaaagaggcctccaagtgctttcttcgttttcatggaggaattcaggaagg

SEQ ID NO: 186047 - DNA, 245 bp, Glycine max
ctgagatgtgggaagaggcggcgaaggagtatagggtccttttgatggacatgtgtgagcataagctggcacccaatttgccatacatgaagtcgctctttctcggctggttcgagcctctgagggatgccattgtcaaggaacaggagatgtatagtgaagggaagaataggatggcctatgcgccatactttgtttcagttgccggctgacaagatggctgttatcgcaatgcataagttgat

SEQ ID NO: 186048 - DNA, 206 bp, Glycine max
acaaccaacaacaagttcacattgtaggaacctttgtcttgttgtgttcggtagtggctcatattgatattggtatggtctttgcttgaaccccatttgcaaaaaggaagaagaagaacatgaagattcagtgtgatgtgtgtgagaaagcccctgcaaccgtgatttgttgcgcagatgaggcagctttgtgtgccaaatgtgac

SEQ ID NO: 186049 - DNA, 150 bp, Glycine max
cagccatggtctccttgctccgctctctccgccgtcgcgatgtgccctccgcctccctctctgcttatcgctcgttaacgggcagcaccaagccagcatatgtagctcacaactggtctagtttgtctcgaccattcagttcaaggcctg

SEQ ID NO: 186050 - DNA, 251 bp, Glycine max
cctcgagccgaatcggctcgaggggtagaggaaggtgcttcttggacattagcatagggcaagagctcgaagggagaatagtggtggagctttatgatgatgttgttcccaaaactgctgagaatttcagagctctatgcactggtgagaaaggcattggtccaaatactggggtgccccttcatttcaagggatcttgctttcatcgtgttattaaaggcttcatgattcaaggaggtgatatatctgct

SEQ ID NO: 186051 - DNA, 264 bp, Glycine max
aaacaaagactaaaaaaaacccttagccaacacaaccatcatggccacctctgctattcagcaatcagcattcactggtcaaactgctctgaagcagctcaatgagttcgtccgcaagaccggtggcgccggcaaaggtcgcactaacatgcgccgcaccgtcaagagtgctcctcagagcatttggtatggccctgaccgtcccaagtacttgggtccattctcggagcagattccatcatacctgaccggagaattccctgg

SEQ ID NO: 186052 - DNA, 261 bp, Glycine max
gaagtttttagctttagctttgcagagatgtcaggtggtggatgcagcagcatagtgtggttcagaagagatctgaggatagaagacaatccagcactgacagcaggagtgagagctggtgctgttgttgcagttttcatatgggcacctgaagaagaaggacaatactaccctggcagggtctctagatggtggctcaagaacagtttggctcaccttgattcctctctcaggaatcttggcactcctctcatcactaag

SEQ ID NO: 186053 - DNA, 258 bp, Glycine max
gaaatgtttgagggatgctaaaatggacaaaagaagtgttgatgatgttgttcttgttggtggttctaccagaattcccaaggttcaacaactgctgcaggacttctttaatggaaaggagctgtgcaagagcatcaatcctgatgaagctgttgcatatggtgctgctgttcaggctgcaattttaagtggtgagggcaatgagaaggttcaggatcttctcctccttgatgtcacccctctatctcttggtttgga

SEQ ID NO: 186054 - DNA, 259 bp, Glycine max
ctcgagccgctgttagtgagatgtatgggagagaactggtggacctgcgaaaggagagtagatgggagtttctcaatacactgttttctgtgtctgaagctgtggcctacatgcagatggttgacagattggatgatgaaactataccagcagatcttgctcttgattataaagggctatataaggctgttggaaaagctctcttctgggcacatgttgaaggtcgtcttaagagtgagatcatgtctaagcctgaact

SEQ ID NO: 186055 - DNA, 258 bp, Glycine max
accatggctacgctgattgctccttccaaccactctcctgtggaagatgccgaatctctccggaaggctgtcaaaggttggggagctgatggaaaagccatcatagcaatactaggccatagaaatgccacccaaaggaccctaatcagagaagcataccagaatctcttccaagaggatctcatcaaacgccttgagtctgagctctctggtgactttgagagggcaatgtaccgttggatattggaacctgaagac

SEQ ID NO: 186056 - DNA, 260 bp, Glycine max
aaacctaacgcagcatcgctattctcttcattccatggctttgcccaaccagcaaaccgtggattaccctagtttcaaactcgttatcgtcggcgatggtggcacaggaaagacaacctttgtgaaaaggcatctcaccggagaattcgagaagaaatatgagccaaccatcggtgtggaggttcacccattggattttttcacaaactgtggaaagattcgattttactgctgggatactgctggacaggagaaatttg

SEQ ID NO: 186057 - DNA, 264 bp, Glycine max
gagataactagaaacagtgtgatgaaaatgaaggtccttgttttcttcgttgctacaattttcgtagcatggcaatgccatgcgtacgatatgttccctctccgaatgaacactggctatggtgcccgtactccggaggtgaaatgcgcaagttggaggcttgctgtggaagcacacaacatctttggctttgagaccattcctgaagagtgcgttgaagcaacaaaggaatacatccatggcgaacaatatagatcagactcc

SEQ ID NO: 186058 - DNA, 260 bp, Glycine max
aaacaactctttctcttcttccttcgctcgttgttctccctcgcgtagatcgacaatggcggagacagagacgtttgctttccaggctgagatcaaccagctcctcagtctcatcatcaacaccttctactccaacaaggagattttccttcgtgaactcatcagcaacgcctccgatgctttggacaagattcgattcgagagtttgacagataagagcaagctcgatgctcagccagagttgttcattcatattattc

SEQ ID NO: 186059 - DNA, 258 bp, Glycine max
cattcacccaatttgcagagttccaagttatatacatacactgcataattaagagaaaatgtctctgattccaagtttcttcggtggccgaaggagcagtgttttcgaccctttctccctcgatgtgtgggagccctttaaggattttccatttcccagttctctttctgctgaaaattcagcctttgtgagcacacgagtggattggaaggagacaccagaagcacacgtgttcaaggctgatattccagggctgaa

SEQ ID NO: 186060 - DNA, 258 bp, Glycine max
aatcaacattttttttctatcaattcacacgacaaaatttagcagagttcaaaacaccaaccaagtaaagtaaagaagggaagatgtcactgataccaagtttcttcggtggtcgaaggagcaatgttttcgaccctttctcgctcgacgtatgggaccccttcaaggatttgtctttcccttctgctgaagattcagctttcttgaaaacacgagtggattggaaggagaccccagaagcgcacgtgttcaaggctg

SEQ ID NO: 186061 - DNA, 256 bp, Glycine max
attagattggtggtaatggcagcgtcactacaagcagcagctactttcatgcaacccaccaagttgagcaggagcaacactttgcagcaaaagtctactcagtccatttccaaggcttttggtttggaacctgttggagctaaaaaggtcacatgctcccttcaggctgatcttaaggacttggctcacaagtgtgttgatgctaccaaaattgcaggattcgcccttgccacctctgccctcgttgtctctgggg

SEQ ID NO: 186062 - DNA, 256 bp, Glycine max
aaggaagtctccaaactcaagcgtgctggggaggatgcttctaagttcattactgaatcagaggagaccaaaaaatcgatagcggagaaagaggttgaagtgcgggaaactctgaatctcttgaattccaagttggaaactattggaaacctcgtccacgattccgttccaattagcaacgatgaggccaacaatgttgttgttagatcgtggggagagaaaagagtggagcctaagctgaagaatcatgtggatc

SEQ ID NO: 186063 - DNA, 256 bp, Glycine max
caaaagccattgcattgtggtgaatgtttgagtgcagaaggtaaaaaagaaaatggtggtgaagattcgattggcaaggctcgggtgccggaaccacccattctatcgtgtggttgttacggatagcaaaacaacaagagatggcaagcaacttgaagttttaggtttctacaatcccgtcgcaggcaaggatgatgacaaaagaatgagcctcaaactggagagaatcaagtattggctttccgttggagctaag

SEQ ID NO: 186064 - DNA, 255 bp, Glycine max
ttgcaaccatgcttcttagaacagcgtcctctttctctctcttcaacgccaacgggaccatatactactcccttcctctgttcgctactctcagggcaaacacttggttccatgcgctaccaagaactccaataaccggcccttaaccggcgtcgtatttgaaccctttgaagaggtcaagaaggagctcgaccttgttcccactgtcccacaagcttcccttgctcgccagaagtacaccgatgagtctgaggc

SEQ ID NO: 186065 - DNA, 258 bp, Glycine max
ttcttcctttctctgctctttgtcttctctgacacatttggggccttgttgagtgtgtttttgcaagagggtatggcgaaggacgttgaggttgctgagcgtggctccttctctgggaaggactaccaggaccctccaccagcaccactcattgatgctgaggagctcacaaagtggtccttttacagggctcttattgctgagttcattgccactttgctcttcctctacattactgtgctcacagttatagggtac

SEQ ID NO: 186066 - DNA, 262 bp, Glycine max
ctcaaatttctcagtctccggaactcgtttctaccttcacttcgcacatctcgaaccctctctttccggcaactaggttaaagttcatcaatggcaggtcgtggcaaaaccctaggatccagcgccgccaagaaggccacctcaaggagcagcaaagccggcctccaattccccgtcggccgtatcgcccgtttcctcaaggccggaaaatacgccgagcgcgtcggcgccggtgctcccgtttacctcgccgctgtcctcg

SEQ ID NO: 186067 - DNA, 258 bp, Glycine max
cacagttaacagggatggctatggaccagttgcacagatgtttgctcggaactcgtgcaaaattatattacctggcatggacctttcggacgcgaaccaaccaaaggaaaaccattctagccctgagttgctacttgcacaaattatggaagcttgcaaaaagcatgaggttcaggtttcaggtcaaaattcgtctgaatctggtgttccaggggggtttgaacaaattaagaagaatttatctggagataatgtatt

SEQ ID NO: 186068 - DNA, 258 bp, Glycine max
accaagttcccatccaagggcttcacactctttcccaacccaatgcgcctcaaagagacttgaggtgacagaattctctgggctaagatccacttcatgtgtgacatatgctaacgatgctagagaatcttccttttttgatcttgtagcttcccaactcactcccaagaccaatggatcatcaactcctgtgaggggagagacagtggccaagttgaaggtggcaatcaatggtttcggacgcattggtagaaactt

SEQ ID NO: 186069 - DNA, 256 bp, Glycine max
tctcaatacccttttgatttgtgaaaggaaagcaaacatggttgatcaggtccaacaccctacaatcatggacaaggttgctggtcagctccatctccgttctggtctttcatctggtattagaagttatgatggagcctaccgccacccagctatgtaccaaagaccctcttttgggaattactcgaatgctgcattgcagtttcctgtgatgcccacatgcaaagctaccatggatttgtctgctactgcaaca

SEQ ID NO: 186070 - DNA, 256 bp, Glycine max
cagagatcaagggaatattcagaaatcctggtgcagtaaccaagatcaaagagtccaagctttctctactttcttatggaaaattaaacaatgttccagaggcagtttacatgcaacatctaatgggaatcgatggggtaattgtggatttggttcaagaaataactgaggcagttgcggatatgataaagccaacaaagggtggtgaaggagagggtttggttgagggttgtgggaaggtgcagggaaactcaaa

SEQ ID NO: 186071 - DNA, 252 bp, Glycine max
caacaacgtcgtccaagaccatgaccatggccatggccacgatcctgctcctgttcacggtcttcgcggtttcatcggccctagacatgtcgataatctcgtacgacaacgcccacgccgccacgtcgcgcagcaagtgcagctgatgtccatgtacgagcagtggctggtgaagcacggcaaggtgtacaacgcgctcggggagaaggagaagaggttccagatcttcaaggacaacctgcgattcatcga

SEQ ID NO: 186072 - DNA, 251 bp, Glycine max
tttaggtggatattactatggaaaaatcaagtttcctcctgaatatccatataaacctcctggaatcagcatgactacacctaatggacggttcatgacacagaaaaagatctgtttgtctatgagtgactttcatccagaaagttggaatcccatgtggtctgtatcaagcatattaacagggcttctttcattcatgatggacaacagtccaaccactggcagtgtaaacaccaccactgctgagaagc

SEQ ID NO: 186073 - DNA, 253 bp, Glycine max
gccgtttcgaatctgcacaagaacaccaagaaatccttctccgagacgatcaagatcatgtactatcattttagtgagagatctgggctgaaggctcctctgatcgccgatgatgtttatgaaataattatgaagaatgctgctcgtctagacagtgagataatctatgacagagactttgactatgattattttggattcaaaacccttgagaggtcttacctcttgaaggttcaagggaaggttgtggaaa

SEQ ID NO: 186074 - DNA, 252 bp, Glycine max
ctttccctttgttgtttcttgtggtcttggagtctgcagcaatgtggggttggatggtcggggaagcgcgtagggcagcgtgcaactggaactgggtttcgctccgaagcatgggtggcggtcccagaacctttcccggcggtgtgaacaagtggaagtggaagcgcatgcacgagaagctcgccagagacaaacagaacagactcatccaacaagagaagcagctctacccagctcgcattcgctcccaca

SEQ ID NO: 186075 - DNA, 254 bp, Glycine max
gcttgctcatcaagtccaagaaccaacctaccttttgcaatctcaattcaatggcgtcctctctcattgcgaacgcttcctctcctcttccctcctctccaggtccctccttcgccccgccgcttccgcttcccaccgctctttcaacaccaacgccatgcgccagtatgacaaccgcgccgacgaccacagcaccgacatcgatcgtcactccgaacgctctttccctagcactgcgcgccgcgacgatatct

SEQ ID NO: 186076 - DNA, 254 bp, Glycine max
ggaactagaaaatccatacaatcttcaccaccaaaaagaaaataatggcaatggccagtgcaacaactctagccacaatcactgttgtggcggctagccccagtgttggcagcagaaggagtgggaagaggaatgtgaacttcatcagagggttgaattcttttggagggttgaaggctcagaacaatgtgacattactaggccttcctgtgtgcactgagcagtgctttgcaaaggtggtgagctcattgaaa

SEQ ID NO: 186077 - DNA, 255 bp, Glycine max
ctcagactcatgtctcagcctttgaccaccaactctgctgatggtgattcctccgtcgccgcacctcccatcctcttcgattatcatcttatcgaccaaaaacttctccaaaacatagtctacgatgctcttgtctggagcaccctcaactgcctccttgttggtgacaaatcagttcagagatcaggaacagttcctggtgttggcctggtgcatctcccgctttctttattacctgggccatttcctgaaaat

SEQ ID NO: 186078 - DNA, 254 bp, Glycine max
caaggcagaaagcaagctcatcctagagttttaaaaatggcagcagcctcctccatggctctctcttccccatccttggctggcaaggccgtgaagctgggcccatcagcccccgaagtcgggagggtcagcatgaggaagaccgtcaccaagcaggcctcctccggaagcccatggtacggcccagaccgcgtcaagtacttgggcccattctctggcgagcccccgtcctacctcactggcgagttcccagg

SEQ ID NO: 186079 - DNA, 250 bp, Glycine max
gagctataagctagtttatcgtgaggagaatatgaagttgtttgtactctttgttgctgcagtagttttggtagcatggccatgccatggcgcaggctaccaaaggttccctctccgaatgaaaactggctatggtgagcgttcttcggaggtaaaatgcgcaagttttaggcttgctgtggaagcacacaacatccgagcctttaaaaccattcctgaagagtgcattgaaccaacaaaggactacatt

SEQ ID NO: 186080 - DNA, 249 bp, Glycine max
cttcgctcgcacgtgccagtccctccgctcaagcctcacgacgtcctcgttcgcgcgcgccccgtctccgtcaaccccttggacacccgattgcgtgctggctacgggcgttccatcttcgagccgctgctgcctctcattttggggcgcgacgtcagcggcgaggtttcggcggtcggagataaggtgaggtcggtgagtgtgggagaacaggttttcggggcactgaatcccattgccgtaagaggc

SEQ ID NO: 186081 - DNA, 171 bp, Glycine max
atcgagagacaaaaagtgacttgaatgtagtgtctattggtcatcttgatgctggtaagtctacaactggaagtcagatacttatcattagtggtcaagttgatgaacggactatcctaaaatacgagaaagaggctaaggacaaaagtctagaaagctggtatatggctt

SEQ ID NO: 186082 - DNA, 254 bp, Glycine max
  unsure (1)..(254): unsure at all n locations
gttgcattgttgcatcaccgcaagtccacaacatggctgccaatgncgctgcaggcatagcttccttattttcttcttctattaacagtgtcaaatgtctacgttcctccaagaactgctccactatagacccccttataaccacagtgccctcaaaccgtggcatgtttgtgtcacacttggtggaacctttgtccattgggggtgccattaattcgcacaagttgtgggggcctagaatttctgctgctgtt

SEQ ID NO: 186083 - DNA, 249 bp, Glycine max
tctctctcactccctctcccttccttccatcccaaccacaaggttgctgagaagacataaaaaatggtaaagatttgctgcattggagctggctatgttggtggcccaaccatggctgtgattgccttgaagtgtcctgagatcgaggtggtcgtggtggacattgctgctccacgaatcaacgcgtggaacagtgaccacctcccgatatacgagcccggccttgatgatgtggtgaagcagtgtagg

SEQ ID NO: 186084 - DNA, 244 bp, Glycine max
gttggtttcagagatgggaagcatgcacatagaaaccccagaaacttttgctgatggtagcaaaaacttcgatgatgatggacgagctaaaagaactgggacttggattactgcaagtgctcatatcataacggctgtgattggttctggagtgctatctcttgcatgggcaattgcacagatgggttgggtagctggtcctgcagtgctctttgtcttctctttgataacatacttcacctcc

SEQ ID NO: 186085 - DNA, 197 bp, Glycine max
accctcttggtaattctgatgctactgagcctagagtgttctcttgcaactactgccacagaaagttctacagttcacaagcactaggtggccaccaaaatgcacacaagagagagaggtcaattgcaaagagaggacacaggtttggatctcagattatggcctttggccttccccttttgcatcataacaacaac

SEQ ID NO: 186086 - DNA, 252 bp, Glycine max
ataatatcagcccaggtattaattacacgaccttgactatcaactacggattggttgaaattgaaaccatttaagttgaaagccatagtgctgatacctaaagcggtaaaccaaatacctactacaggccaagcagctaagaagaaatgtaaagaacgagaattgttgaaacttgcatattggaagatcaatcggccaaaataaccatgagcagctacaatattataggtttcttcctcttgaccaaatctg

SEQ ID NO: 186087 - DNA, 253 bp, Glycine max
aggaaacccaccgtaagcgataagcaatagaattcagagagagagagaaagagagtctcttgctctgtatctttgatttgatcattccaatcttcaatttttctatatatccatcaatccgctgagtgcaaagttctaatctttcgcctattgggttctactcctttctctcttcgtttccgatcgatccaattttcttcccatggctacgatcggacacaacaatctcaatgccaaattggttcttctcggg

SEQ ID NO: 186088 - DNA, 249 bp, Glycine max
gtatttttgatgcaaaggctggaattgcattgaataagaactttgtgaagcttgtttcttggtacgacaacgagtggggatacagctcacgtgtcattgatcttcttgtattcgttgccaagaagtctctttaaggtgttacttcaaagtagcttgtcttcacattattaccgtatgtttatgtttagctgcgatttagtgtcttgctcgagcaaaaaatgagaggtctgaataaatcggtttctgaaa

SEQ ID NO: 186089 - DNA, 248 bp, Glycine max
agggcagatatttttaccaatcttccagctcttcgcaaacttgacaacatgcttctcggaattttagacagtttcactgctacagagttttggtatgtagaccaaggaattgtagccccagatgcagatggttcggcctcttttcggaaaacaattcagcggcaagaagagaagtggtggcttcccgtacctcgtgttccccctgcaggactcggtgaagactcaagaaaacagttgaatcactctcg

SEQ ID NO: 186090 - DNA, 248 bp, Glycine max
gagagagatctatctatctatcaagatggcgttgttggttgagaaaacaagcagtggaagggagtacaaggtgaaggacatgacgcaagccgatttcggaagattggaaatcgagctggcggaggttgaaatgcccggcctcatgtcctcccgcaccgagttcggcccctctcaacccttcaagggcgctaggatcaccggctccctccacatgaccatccagaatgtcgtcctcatcgagaccctca

SEQ ID NO: 186091 - DNA, 246 bp, Glycine max
ggacaacttggataagttagtcgccaaagctataacagatagttttggcaaaggaatatggaacaaggccattgtaacactcacacatgcccagttctctccaccagatggattgccctatgatgaattcttttcacaaagatctgagtctctcttgaaggttcttaggtcaggtgccaggataaagaaagaagcctttcaggctgcttcaattcctgttgttttggtcgagaacagtgggagatg

SEQ ID NO: 186092 - DNA, 244 bp, Glycine max
cggctcgagcgttcatgcttaatcaagttgggaacaacaaaaaaaatcaaaacaatgtttctgggtttcggtttcatttcatcaagatgatctgtttatctttttttttttaattttaatttaaagtctttgtattttgtatgtaaagatgtaaaattatgattattaggtggtgcatgtgttgcgtcatgggccaatgttatcctctgcttttaagttggaagaggcccagctcacgtgtgat

SEQ ID NO: 186093 - DNA, 247 bp, Glycine max
gtgagaaatgatgatgaagcgtcggttccttttggttctcttggttctctatgtcacagtggagcagagtaagctactccaccacgtagaagtcgatggtgggtttgtaaaaacaagaggagtgcagcttatgctgaatgggagtccctactatgctaatggctttgctgcctattggcttatgtaccttgcctctgatccttcccagagaaacaaaatctcatcggtatttcaacaggcttcaaat

SEQ ID NO: 186094 - DNA, 202 bp, Glycine max
tgtcattttccctcagtttctcgctcgccacacgcccctctctctcctccaatgggcgaccagctcagcgacgaccagatcgccgagttcaaggagggcttcaggctcttcgacaaggacggcgatggttgtagtactactaaggaacttgggactgtgatgcggtcactagggcaaaacccaactgaggcagaactgcagg

SEQ ID NO: 186095 - DNA, 249 bp, Glycine max
actcgagccgaatcggctcgagcttcaactttgcatctcaaggcgttaaaaaatggagaaggcacatatgcaagtcccaagagctaaactgggtaaccaaggcttagaggtttctaggttgggctttggatgtggaggactatctggaatttataatgcccccctctcgcatgaagaaggatgttcaatcattaaggaagtgttcaataagggtgttaccttctttcatacatcacatctttaccgaca

SEQ ID NO: 186096 - DNA, 282 bp, Glycine max
ctttgaggcagttcaagaacaagccagcttccaagaagttcatgcttggccttcagttcttcttccccattttcgaatgggctcccaaataaacctttcagttcttgaaagctgacctcatagctggcatcaccatcgctagcttggccattcctcagggcatcagttatgccaagctcgccagcctcactccaattcttggactatattcgagctttataccaccattgatttatgcgatgatgggtagctcgacggatttggcagtggggactgtggcgg

SEQ ID NO: 186097 - DNA, 276 bp, Glycine max
cttggttgacagtgatgaaaggaagctagtttctggattgatagcagatgcgggtaccatcggtgcacatggagagcagactgtcaaaattcctgtcactttgatttatgatgacatcaagcaaacatatgctgatattaaacctggaagcatcattccttatagggtgaaggttagtctcatttttgatgttcccatcttgggaaggctaactctacctttggagaaaactggagaaatccccataccatcaagcctgatattgatcttgagaag

SEQ ID NO: 186098 - DNA, 271 bp, Glycine max
gttggatatagctctcagggttctggatccacacttattatgccatttcttgataaccatctgaagtctcctagcccactcctgttacctgcccaggatgctgttactccattgtctgaagcagaagcagttgatctggtcaaaactgtttttgcatctgcaactgagagagatatatacaccggagataaggttgaaatcgtcatcctaaatgccagtggtattcatcgtgaatacatggacctaagaaagactaatgctttacaggaaa

SEQ ID NO: 186099 - DNA, 274 bp, Glycine max
gttctctcacacactcattcggtgctccgaatctcagattctagggttagggttcccaatttctccaccgatcagaaaatgagttcaactggtggttctaccaagggcggaaggggcaagcccaaagcctccaaatccgtttcaagatcgcagaaagctggtctccaattccccgttggaagaatcgctcgattccttaaggctgggaaatacgccgagcgtgttggtgctggtgctcctgtgtacctctctgcagtgctcgaatatctcgctg

SEQ ID NO: 186100 - DNA, 267 bp, Glycine max
agagtgcaataactcgttgtacattcctagtgtgtgggagagacatggctaagatgtgtgttttggtgttggttcttgctctggctgtggccacaagtgccagaaacgttcccaaccccaaggatgctggtcttaaggaccagaagaacttcatcagctatggtggagttggtggttattccgggattgggaacaatggactgccttttggaggagctggtgccggaatcggcggtggttttggcgaggtggtggacttggtggtgg

SEQ ID NO: 186101 - DNA, 271 bp, Glycine max
  unsure (1)..(271): unsure at all n locations
acagtcctcaaggaaatcttccgcactgatggtgaacctanncttcaatttccaccacctcatgtactccgagttagtaaatctggatggatgactgatgatgagtttgcaagagagatgattgctggtgtaaatccaaatgtaattcgtcgtcttcaagagttcccaccaaaaagcactcttgataccgacacctatggtgatcaaactagtaccataacaaaacaacagttggagattaacttgggtggggtcacagtagaagaggcaa

SEQ ID NO: 186102 - DNA, 267 bp, Glycine max
tgttgatcgagataactagaaacagtgtgatgaaaatgaaggtccttgttttcttcgctgctacacttttcgtagcatggcaatgccatgcgtacgatatgttccctctccgaatgaacactggctatggtgcccgtactccggaggtgaaatgcgcaagttggaggcttgctgtggaagcacacaacatctttggctttgagaccattcctgaagagtgcgttgaagcaacaaaggaatacatccatggcgaacaatatagatcag

SEQ ID NO: 186103 - DNA, 271 bp, Glycine max
  unsure (1)..(271): unsure at all n locations
ctccaggctgcttctcttgttcctgcttctttctcggttcttaaagagggaaagagtggtgtgtctctcaaggactccancttgttcggtctttcattttcagaacctatcaaagctaacttcagctcttctgcattgaggtgcaagagggaattcgaacaaaagctctgtgctgtgagggccgaaacagtggctacagcctnctccagcagttaccaagtctacaccagaaggcaagaaaacatgngaagggcagtgttgtgataatggg

SEQ ID NO: 186104 - DNA, 269 bp, Glycine max
ggcgaagaacggaagaagccaccatagtcgtcgtcgtgagcgaagatccataacaatacagttacaaattgcaacaacacactcctcgttcgatcgtagccagaagaatgggaagtttgggagcgattctgaagaatccagatgacttttaccctctgctgaagctgaaaatggcggcgagaaacgccgagaagcagatcccgccggagccacattgggcgttctgctacacaatgctccacaagtttctcgaagtttcgccctcgtca

SEQ ID NO: 186105 - DNA, 280 bp, Glycine max
cattcggctcgagctgtgacacgatcaccataacaatggctgcatcactacaagctgcagctaccttcatgcaacccaccaaggttcgcatagcctctcgcaacctcaaatctacacaatgcatttctaaggcttctcgcttggaacctgctgcagctaaactcacttgctcccttcagcctgatctcaaagaatttgctcacaaatgtgtcgacgctaccaaaattgcaggattcggccttgccacctctgctctcgtgtttctggagcaagtgcagaa

SEQ ID NO: 186106 - DNA, 266 bp, Glycine max
atccacacaaactcagggtatggcagagagagagagagagagagagagagagagagagaatgagagggtgggctatcgcggtgcatagtggcgctggtgtcgaccctaatctcccactcgagcgccaagaagaagcgaaacaacttctcacgcgctgtctcaatcttggaatctctgctctaaattctaatcttcccgccatagatgtcgtcgaacttgtggtgagggaattcgaaacggatcgctgttcaattcgggccgtagat

SEQ ID NO: 186107 - DNA, 267 bp, Glycine max
ctataagctagtttatcgtgaggagaatatgaagttgtttgttttctttgttgctgcagtagttttggtagcatggccatgccatggcgcaggctaccaaaggttccctctccgaatgaaaactggctatggtgagcgttcttcggaggtaaaatgcgcaagttttaggcttgctgtggaagcacacaacatccgagcctttaaaaccattcctgaagagtgcgttgaaccaacaaaggactaattaatggcgaacaatttagatca

SEQ ID NO: 186108 - DNA, 269 bp, Glycine max
ctctgccactttctgagtacaatacaacactgccatggctgcctcagtctccactattggagctgtcaacagagctccactgagcttgaacagctctgaagctggagattcggttcccagttcagccttctttggcacaagcttgaagaaggttactgcctcaagggtccctaacgtcaagatttcttctggaagtttcaaaatcgttgcggcggagaaagagattgatgagcaacaacagaccacaaggacagatggaaaggtcttgc

SEQ ID NO: 186109 - DNA, 270 bp, Glycine max
attcctaattgtttaaacctaattctcatttcttcatcgttcgattcttctcctcctaaagatgcagatcttcgtgaaaactttgaccggtaagaccatcacccttgaggtggagtcctccgacaccatcgataacgtgaaagctaagattcaagacaaggaagggatcccacctgaccagcagagacttatctttgcgggtaaacagcttgaggatggtcgaacccttgccgactacaacatccaaaaggaatccactctccacctcgt

SEQ ID NO: 186110 - DNA, 265 bp, Glycine max
gaaggtcggcggcgtggtgttatacggcggagtccacgtggcagcgtcgtgcctcttcttctcagccgccgcagagtttctctttgcgcctcttcttcttcttactcctccatttctgaccacgtttctttcgtgaaggatgtagctgcgactcagcctcctcagcatctttcacaactcctcagtattctgaagaccagaggtgaatctattatctccccgggtgccaggcaaggattattcctcttgctataccactgtcaaa

SEQ ID NO: 186111 - DNA, 266 bp, Glycine max
tcaaaggatgaacctgcaaaggaggctgctaaattcacagcccaagtcatcctcatgaaccaccctggtcagattggaaatggctatgcccctgtcctcgactgccacacttctcacattgctgtcaagtttgctgaactcatgaccaagattgacaggcgatccggcaaagagcttgagaaggagcccaagtttttgaagaacggtgatgctggttttgttaagatgattccaaccaaaccatggttgttgaaactttctccgag

SEQ ID NO: 186112 - DNA, 262 bp, Glycine max
cgagacgattcgcaaatctcaatcgaatctcagaacaatgagagaactcatcagcattcacataggtcaggccgggatccaggtcggaaactcctgctgggaactctactgcctcgaacatggcatccagcccgacggcatgatgccttctgactccaccttcggtgtagcacacgacgccttcaacaccttcttcagcgaaaccggatctggcaagcacgtcccccgtgctgtcttcgtcgcctcgacaccaccgtcatcg

SEQ ID NO: 186113 - DNA, 260 bp, Glycine max
atctctctctctccaatggccaaagacctcgaaacggagattcaaagtgggttgcctcacaaggactaccacgacccaccccccgccccattctacgaccccgccgagctccgaaagtggtccttcttccgagccctcatcgccgagttcgtcgccaccctcctcttcctctacgtcaccatcatcaccgtcatcggctacaaccaccagacagccaccgccgacgagccctgcagcggcgtccgcatcctcggcatcgc

SEQ ID NO: 186114 - DNA, 267 bp, Glycine max
cagccacctaccgttgttcctggaggcgaacttgccaaggtgcagagggcagtttgcatgatttcaaactccaccagtgtggctgaagtgtttggccgcattgatcacaagtttgatctcatgtatgccaagcgtgcttttgtccactggtacgtgggtgagggtatggaagaaggtgaattttctgaagcccgtgaggaccttgcagcccttgagaaggattatgaagaagtgggtgctgatctggtgagggccaggaagaggatg

SEQ ID NO: 186115 - DNA, 266 bp, Glycine max
agcaccgattggctcttcaagacttgcttccttaccatttcattcctaaaaccctattcttcttcgctcattcatcagcactgccatcagccccaacctccccacaaggtcacagggactaaagaggtgtaccaccatgtcggacgatgaaagggaggagaaggagttggatctctcttctgcagaagttgtaaccaaatacaaaaccgcggctgagatcgttaacaaggccttgaagctagttatttcagaatgtaaaccaaagg

SEQ ID NO: 186116 - DNA, 261 bp, Glycine max
gtttctttctctctcatgttgtagtatctcactagtgtttttcattcgtttctgaaccacacaaacatcaccaccgaacaatgccgacggggttaccggcggcgaattccttagtggcgccggacgaagaggggtgggtgtgggggcagatcaaggcggaggcgcgccgcgacgccgagtcggagcctgctttggcgagctacctctactcgacgatcctctcgcactcgtcgctcgacgttctctgtcttttcacctcgg

SEQ ID NO: 186117 - DNA, 81 bp, Glycine max
gtcagtagtcatatgcttgtctcaaagattaagccatgcatcgtgtaagtatgaactaattcagaatgtgaaactgcgaat

SEQ ID NO: 186118 - DNA, 263 bp, Glycine max
gaaaactatcataagtgaccaaaaaagacaacctttggggaatcataaaattcttcagaatggctcgcacaattacaattgcagcaatgtgtcttcttctctcaatagtgtccctctgtgtcaccaccaacgcattaatgccatacacacgtagcaccatctgggacatgatgctccaatccgaggacccatttggaatcttggaacagaacccattcaacaacatacccaacatcagagaggagccgagactctcgccctgg

SEQ ID NO: 186119 - DNA, 263 bp, Glycine max
taacttgctccctcagaagcgaagaagaagccacagagaactagtctcctactctcacccgcgagaaaaaaatggcatctcacatcgttggatacccccgtatgggtcccaagagagagctcaagttcgctctcgagtctttctgggatggcaggaggagcgccgaggatttgcagaaggtgtcttctgatctcagggcatccatcttgaagcagatggctgatgctgggatcaagtaatctccaggaacactttctctcact

SEQ ID NO: 186120 - DNA, 261 bp, Glycine max
ctttgcaacacaacaaaaaaagacaacactgagagtagcgtcttaataaacgctcttctctgaaaaacctgatttcttctcttcttctcttctctttcgtttcgatcttcgatctctgaaaatgagagagtgcatttcaatccacatcggtcaggccgctattcaggtcggaaacgcctgctgggagctctactgcctcgaacacggcattcagcctgatgggcagatgccaagtgtaagactgttggtggaggtgatgat

SEQ ID NO: 186121 - DNA, 264 bp, Glycine max
aaagatactgcgccaagaggttggtggtcatgcagctgtcttgggttttgtgggagcaccttgggacaatagcaacatatatagtggaagggggtacaacacgcacatatacaaccattaagagcatgtgccacactgccccacatgtattgaggactttgctttctcatttgacgcaggcaatagctgattacgttattttccaagtggagtctggggctcattgcatacaaatatttaatcatggggtggacaactaccacc

SEQ ID NO: 186122 - DNA, 261 bp, Glycine max
gaaacaatgtcttgctccaatctcacaatgttggtgtcctcaaaaccttccctttccgatccctccaatctctccttccgctctgtcctcaacccttttcagctcccttcacaaaacccaacttcatgcactccttcacgctcctcaaccacccaaattcagtgtggtctgagagaactcagaacccgcattgattccgtgaagaacactcagaaaatcaccgaggctatgaagcttgtggctgcagccaaagtgagaaga

SEQ ID NO: 186123 - DNA, 262 bp, Glycine max
cttacggctaaattctcaaagatttaaactttgtctcagagtttcacaattcacccaaccccagagagaaaatgtctctaatcccaaatttcttcggtggcagaaggagcaacgttttcgatcctttttccctcgacgtctgggaccccttcaaggattttcctttcccaaacactctttcttcagcttcctttcctgaattttctcgggaaaattctgcattcgtgagcactagtccggattggaaggagaccccagaagc

SEQ ID NO: 186124 - DNA, 257 bp, Glycine max
ctcgtctctttttgaaaacactttattttcgcaaagttgattctttctctctttatctttctttccccaatttgtgagtgttactgttgaatcgattggattggcattaggctgatctgaaatacgcaattgacatggcgagcgcgatggtagaggacgcgaacttcgaagatgaccaactagccaatatgaccaccgacgacatcgtcagagcttctcgtcttctcgacaacgagattcgcatcctcaaggaagag

SEQ ID NO: 186125 - DNA, 300 bp, Glycine max
cctctttctctctctttctaaaaaccagaaacaacaaacacaaaccgaaaaggcgaaaggggttttccgagtgagatctagggattccatcgattcggagagaggatattgatagaacgacctcaacgagcaaggtcaggaggtggagtactagaacatggattcggtgccttcgaattcgcatggaaacctcgatgagcagatttctcagctcatgcagtgcaaacccttgtccgagcaagaagtaagggtcctgtgtgataaggcagaagaaattttgatggacgagagcaatgtcca

SEQ ID NO: 186126 - DNA, 297 bp, Glycine max
gataactagaaacagtgtgatgaaaatgaaggtccttgttttcttcgttgctacaattttggtagcatggcaatgccatgcgtacgatatgttccctctccgaatgaacactggctatggtgcccgtactccggaggtgaaatgcgcaagttggaggcttgctgtggaagcacacaacatctttggctttgagaccattcctgaagagtgcgttgaagcaacaaaggaatacatccatggcgaacaatatagatcagactccaaaacagttaaccaacaagcttacttttatgccag

SEQ ID NO: 186127 - DNA, 293 bp, Glycine max
cggctcgagcggctcgagcggctcgaggaatgttagagtattatgaaattggtcctgataacaaatgagaacctccgcctgctctatgacactaaaggccgattccgtcttcattccatcagggatgatgaggcaaagttcaagctctgcaaggttaggtcagtacagtttggccagaaaggtatcccatacctgaacacctatgatggtcgcaccatccgttacccagaccctctcatcagggccaatgacactgttaagctggatctggaggaaaacaagattgtcgattt

SEQ ID NO: 186128 - DNA, 293 bp, Glycine max
cacaagttccaataacatacactattcatctgataaatggacaatttgtggatgctgcttcagggaaaactctttccaacatatgacccacgcacaggagaagtgattgctcaagttgctgaaggtgatgcagaagatatcattcgtgcagtatcggcagctcgcaaggcctttgatgaaggaccttggccaaaattgactgcttatgaaagatgcaagataatactgcgctttgctgatttggttgagaaacacggtgatgagcttgcagctctggagacatggaacaatgg

SEQ ID NO: 186129 - DNA, 289 bp, Glycine max
caatatctggcggaggagctgtcggaggattaccgcaatctgtcggagctggcttttagaggggaatatgaaacgtgtctggtgtacacggaggagatgaaggagcgatgcgtggaacagttcaagcaggggacggtgtgtatggaacagctggcagcggtggaaggattgtgcgagttggcgaggaaggcggttggggcgggggaatcggttcggagatatcacgtgaacctgtctgttttcacgtccgttccagacgcgtggggaattgaacaggtgtttcccatta

SEQ ID NO: 186130 - DNA, 289 bp, Glycine max
gtgagcgacgctgatctgcgcatacaggtatactttgagaaactctcaagcaaggtcactgcaaagccacgaagcccctcaaggtgttcatctcaggaggatgatcttggtcagagactggaagcaaaactgcaggctgctgaacaacagaggttgagcatcttgactaaggcccaaatgcgtttagcaagactggatgaattgcgtcaagcagctaaaagtggagtagaaatgcgctatgagaatgaacgtgtgaggcttggaacaaaagttgaatcacgggttcagc

SEQ ID NO: 186131 - DNA, 287 bp, Glycine max
aacttctgcattccaaaaatgaactcggacacgacgtcgtattggtgctacagttgcacgcgcttcgttcacatccacgaccagaacgacgtcgtgtgcccccgctgccatggcggcttcgtcgaaaaggtcaccgccgggcaatcggcaaggcaggggttccgccgccgccgccgcaacgccgggagccactcgccgttcaacccggtgatcgtgctccgtggaccgggggaggacgaggagagcagctttgagttatactacgacggattcgacggcgaggggct

SEQ ID NO: 186132 - DNA, 296 bp, Glycine max
ccaaaacaaatactaccatgttgttaatctactctttttatcactcttcctctttcgggcacaagttcaattcttcactctttttttttttcctcttagttcggtgaatcatggcgaacccaatcgacggtggcgagttcgagtgcctttccgggttcggcaaccacttctcctccgaggccctcgccggagctctgccggcggcgcagaacagccccctcgtctgcccgtacggactatacgccgagcaaatctccggcacctccttcacttctcctcgcaaccgcaacctcttc

SEQ ID NO: 186133 - DNA, 287 bp, Glycine max
gcaccacatacacctgaggcctcctaagcaatggcttcccttgcagcatccactgctgctgcatcccttggcatggcagacaagcgtggacagcccatcaacttcagtggtgccacaaggcgagctccatctgcttctagtcctggctccttcaagactgtggctccggtctccaaaaagaaggctacaccagcacctccaaagaaagctgctgctgctgcgcctgccaatgatgagcttgccaagtggtatggtcctgacagaaggatcgtcttagcagacggtct

SEQ ID NO: 186134 - DNA, 293 bp, Glycine max
gtgtggttgaaagttaagaagtagcaaagatgtttccattcgggcacaagggtcaaaagataaaggggactattgtggttatgcagaagaatgtgttggatatcaacagcatcaccagtgttgacgggatcgtcggcaccggcttagacttcttaggcagtgcactcgatacagttacttttttagcctcctccatctccatccaacttattagttctaccaaggctgatggtgggaaaggaaaagttggaaaggctacaaatttgagaggaaagataacattaccaaccata

SEQ ID NO: 186135 - DNA, 288 bp, Glycine max
gatgaattggagactgtttccaaggagtggggaattgaggctatgccaaccttcctgttcttgaaagaaggcaagctggtggacaaggttgtgggtgccaagaaagaggagctgcaattgacaatagccaaacatgccgcaattgctgctgcttgaagtgccatatgaatatgttaagaataatagactattgtcttcgagtcagtttgcttttattactattaatctgttattgggtctgtttgcatgatttcagaacggatttagagttagtaaaacatggatggg

SEQ ID NO: 186136 - DNA, 292 bp, Glycine max
actacatcgcgggcggccgctcgcgatctagaactgttacactcaaagtagtgaacaacaacagcaacaacaacaacaacgttgcagtgtactgtattgtttcttagtgcacttttttttggcatcaaagaggttaaatccatggattctgattatggtattcccagggaactctcagatcttcaaaagattcggtcgttgtaccagccagagcttcctccttgtctccagggaaccactgtgagggttgaatttggtgatgcaaccaccactgctgaccccactgatgcac

SEQ ID NO: 186137 - DNA, 289 bp, Glycine max
gcaattatttgtggctatatatatcagtgtccaccatttcggttaagctaccaggggctaggagagcccttgtgctttgcagcatttggtccttttgccacttgtgctttttatttattacatgccagtgcaagggtgaagaaccatttcccattaagtggaacagttctttcagcatcaattcttgttggcttcacaacatcacttatcttgttttgcagtcatttccatcaggtggaaggagacaaggaggttgggaaaatgtcacctttggttagacttggcaata

SEQ ID NO: 186138 - DNA, 291 bp, Glycine max
cctcgaccgattcggctcagagtgcctggcgtcgcggacacagaccagagcttgcagaagcgatttctcatttctcattcttaacaacacacttcaacaatggccaaaaccttcaaatacatcatcctcggaggaggagtttccgctggttatgcggcgagggagtgtgccaaacagggcgttaagccaggggagttggctatcatttccaaagaagcggtagcaccttatgaacgtcctgctctgagcaaggcttacctttttccagagtcccctgctagacttcctggg

SEQ ID NO: 186139 - DNA, 291 bp, Glycine max
cacagctggtgacacccatcttggaggtgaggattttgataacagaatggtgaaccactttgttcaagagtttaagagaaagaacaagaaggacataagtgggaaccccagagcacttagaaggttgaggactgcttgtgagagggccaagagaacattgtcatccactgcccagaccaccattgaaattgattctctctatgagggaattgatttctactccactgttactcgtgccagattcgaggaactgaacatggatctctttaggaagtgtatggagccggtgga

SEQ ID NO: 186140 - DNA, 288 bp, Glycine max
gaagaaatagccagagacatccagagggcggagacagaatggaggatcattctgcttcgatacttcaatccggttggtgcccacgagagtggacagattggggaagatccaaggggaatccccaataacctcatgccttacattcaccaagtcgccgttggcagattgcctcagctcaatgtttatggtcatgactatcccactaaagatggcaccccgatccgggactatatccatgtaatggacttggcagatggccacattgctgccctccgaaagctttttgca

SEQ ID NO: 186141 - DNA, 289 bp, Glycine max
cggctcgaggtacggcaccggcagattggagaaccggtcgtcgttggaggcggacatagcggctgtgaagcccagccacgtgttcaacgccgcgggtgtcacgggtagacccaatgtggactggtgcgaatctcacaaagttgaaaccatccgaaccaacgtcgtcggcactctcaccctcgccgacgtctgccatcataaaggcctcatcctcatcaactacgccaccggctgcatcttcgagtacgattcttcccacactctcggatccggcatcgccttcaaggaa

SEQ ID NO: 186142 - DNA, 285 bp, Glycine max
  unsure (1)..(285): unsure at all n locations
canatccgaagcatgatgcattgtgcgagcattgtctcggctccgtcctacgcgttcccttttctctctggctccgcttccactantccaactgcgntctcgctcactaagcgcagttggaagccacctccgagcatggcaaaaggcccagtcagagccaccgtttctatagagaaagagaccccggaggccaatcgtcccgaaacgtttctcagaggagtggacgaggcccagtcttccacttcggttcgggcccgcttcganaagatgataagggaggcccag

SEQ ID NO: 186143 - DNA, 287 bp, Glycine max
  unsure (1)..(287): unsure at all n locations
gcagacagaagcgaangcanacggggttgcctcaacaattcgctgttgttgttctcttctcttctctttgacatgaatactctttcttccacgctccatggcggnnnggctccccgctcagcttcgaaaaccaaaaccgcatctctctccaaatgccatcgcatttgggtcaccaaagcttctgttgccgttgagcaacaaactaaggtcgctctcatcagaattggtaccagaggaagtccactagctctagcacaagcatatgagaccagagacaaactcatggc

SEQ ID NO: 186144 - DNA, 291 bp, Glycine max
tgttatttcacgcgttctctctccaatttggacctccctttccttcgttcctcactcactgcaacggcgccggagatccgtcgctctcctcctccaccaccaccgcgatgggcgccaattccatgctcgccgagttctctcacgatctcgacgaccagatctcccagctcatgcagtgcaagccactctccgagcaacaggtccgaggtttatgtgagaaggctaaggagattttaacggatgaaagtaatgttcagcctgttaaaagccctgtgacaatttgtggcgata

SEQ ID NO: 186145 - DNA, 290 bp, Glycine max
gttaattttcagttttggttttttgggcggctccaatggcaacctctcaaatcactgcatcattgaggaacttgcctgcatttgaaaggtttcaaccttcagcgcttcgattttcttctgctgggcacgtcagaattggaacactcacgcaaccctcgtttccctctttcgttgtcaaagccgccactgttgttgcccccaatcacaccactgttaagcctctgggtgatagagtactggtgaaaattaaggatgcagaggagaagactgcaggtgggattttactgcca

SEQ ID NO: 186146 - DNA, 287 bp, Glycine max
gaaacaggttccatgtcggccaggacttgggggagcaattgttcctcgatcttgtgatcatgttcctcagcctggtgaagaaccttgtccaattgatccctggctcgtggttcctgacaagagcagatatgttgatcaacaaactttgaagatgcaagaaaatccagaggatgttccaactggagaacttcctagaaacctgcttctctctcttgatcgacatctggttcagacagtggtgcctggctcaagattgacaatcatgggaatttttagtatctaccagg

SEQ ID NO: 186147 - DNA, 282 bp, Glycine max
gataggatgagcaaggagattacagcattggcaccgggtagcatgaaaattaaggttgtagcaccaccagagaggaagtacagtgtctggattggaggctctatcttggcctccctcagcaccttccaacagatgtggattgcgaaggcagagtatgatgaatctggaccatcaatcgtacacaggaaatgcttctaagttataacaatggagtatgaaagatggaccagggaaattactatttatacgaacactacaaaaataccatcaagtggttgagga

SEQ ID NO: 186148 - DNA, 282 bp, Glycine max
  unsure (1)..(282): unsure at all n locations
ggcagttccattaacgctggcttctacactagagcagacttttatntataaggaaggtggggtgggatacaaagctagtgaatgtttcatatccttgggttgagaagtagattgttcaccggccaaagttttcagattggcagagagcagttaggcacaggcttctagcagctggtgtgtctcctttcaatggcttcacctatgatcacaagtacggaaccaaagttggtggaaccatttttgacagatttggccgtcgccacacagctgctgaattgcttg

SEQ ID NO: 186149 - DNA, 283 bp, Glycine max
tcaagagcatcactgaactaacaaagcaaccctatgtcgaaggtggtttgtgtcaccggagccagcggcgccatcggatcatgggtggtcctactcctcctccagcgtggttacaccgtccatgccaccgtccaagatatcaaggatgaaaatgagacgaaacatttggaggaaatggaaggagcaaagagtcatctccatttttttgaaatggatcttcttgacatcgactccattgccgctgccataaagggttgttccggcgtaatccaccttgcatgtc

SEQ ID NO: 186150 - DNA, 239 bp, Glycine max
cggagctatggcgcaagaagcagtctgatgttatcagattcttgcagcgagcgaggtgctgggagtatcgccagcaacctgctattgtccgtttgacaaggtctactcgcccagatacggctcgtcgcttgggtttcaaggctaagcagggttatgtgatttaccgtgttcgcgtacgaaggggtggccgtaagagaccagttccaaagggtattgtttatggtaagcccaccaaccaa

SEQ ID NO: 186151 - DNA, 289 bp, Glycine max
acgccgcagagtcagagagagagattcactgaaacagagcgcagaagaaaatacataaactaatccagaaaatgagcagcggcgctggaaaggtggtgtgtgtcaccggcgcttccggttacattgcttcctggatagtcaaattcctcctcaatcgcggctacaccgttaaggccaccgttcgcgacacaagtgatccgaaaaaaataaaccacttggttggcctcgacggtgctaaggagaggctgcacctctacaaggcgaatcttcttgaagaaggttcctttaa

SEQ ID NO: 186152 - DNA, 288 bp, Glycine max
tagagattctggagcctaacacgtgcattaggggttgctgcaccagcccctctattccccttcatctccctccctcttcttatacccttctctctcctattgcccgagggtctgagagtgttgtttatgaagggactttggatggcacgagggttgctgtgaagaaacccatcttgtcaacttcagaagacattaataagtttcataaagaattgcaattgttgtgcaagttagatcatccaggaatagcaacaccgattgcggcccatgcaaaaccgcccaattaca

SEQ ID NO: 186153 - DNA, 282 bp, Glycine max
  unsure (1)..(282): unsure at all n locations
ctaagctcactctttctaagtttcttctatcatctctccaccatggttctctcctaaaccgcctccgaatccgacgtctctgtccacacaacatacgactcttttntngncggatgtgctgttcactggttccagatggcgtagtagtcgataccgatgtcggcagcataccagatcatatacgacgagtgatgttggatgggaacccaaggttgtctttggcatcatttgtgacgacttggattcagccagagtgtgatagactcatcatggctgccatta

SEQ ID NO: 186154 - DNA, 284 bp, Glycine max
gcacaacacaacaattcactaagctaaaatcacttcatcatggcttcctcgtgtgcttcctctgccattgcagctgttgccatctccacaccaagttcccagcagaatggatcactcttgggaagcacaaaagcttcttttcttagtgggaggaaactgaaggtgaacaactttacagcaccagttggagcacgatccagcactacagtttgcgcagttgctgagcctgataggcctctgtggttcacaggcagcacccctcctccatggctagatggcagttt

SEQ ID NO: 186155 - DNA, 281 bp, Glycine max
actcgagccgcaaaaccctcttttttctctctcttgcataacctaattttcatttcttccctcaaatttcaaaatgcgtgagatccttcacatccagggtggccaatgcggcaaccagatcggcgccaagttctgggaggtggtttgcgcggacacgggatcgaccctaccggaaggtacggtggggactcggagttgcagctcgagaggatcaatgtctactacaacgaggccagttgcggtcggttcgtgccgcgcgcggttctcatggacctcgaacc

SEQ ID NO: 186156 - DNA, 275 bp, Glycine max
atgtggaggcactacttccagaacactcagggtcttatttttgttgtagacagcaatgatagggacagagttgttgaggccagagatgagttacataggatgttgaatgaggatgaactgagagatgccgtattgcttgtgtttgcaaacaaacaagatcttcctaatgcaatgaatgctgctgagattactgacaagttgggtctccactctctgagacagcgtcactggtacattcagagcacctgtgcaacctctggggagggcctttacga

SEQ ID NO: 186157 - DNA, 279 bp, Glycine max
actcataacacaaagcacaaagcaaagctcatccttgagttaaaaaatggcagcagcttcttccatggctctctcatccccatccttggctggcaaggccgtgaagctgggcccatcagccccagaagtgggaagggtgagcatgaggaagaccgtcaccaagcaggtctcctcaggaagcccatggtacggcccagaccgagtcaagtacttgggcccattctctggcgagcccccgtcctacctaaccggtgagttcccaggcgactacggctggga

SEQ ID NO: 186158 - DNA, 283 bp, Glycine max
aacacattaacctttctcattccccatctcctcaccttattcagccactgctaatttctagggttccgaaatggacgctggcggaaagatcaagaagggcgccggaggaagaaagggcggcggccctaagaagaagccggtttcaaggtccgtcaaggccggtctccaattccccgtcggaagaattggccgttatttgaagaaaggaaggtacgcccagcgtgtcggtaccggtgctcccgtttacttggccgcagttctcgagtacctagctgctgaggtg

SEQ ID NO: 186159 - DNA, 282 bp, Glycine max
gttcttagggcacaaactatacagcggatatatcctgtagagactacttccactgatggaaaaatttgtgcttatgcagatacagcctataatcaagatttgtagttcaagaaggctgtcaaattttctggatagccgatgactcatttggaatcaatagcttgctctgcagtacgggcagccatcaacgttaaggcatctgttatcattcgcttcacatcatctggcagtgctgcaaggtcgactgctaagtaccgtgcaatcatgcctgtcgaatccgtt

SEQ ID NO: 186160 - DNA, 280 bp, Glycine max
aattaaactacatagaaaaataaaaccaaacctttcttcctactactcccattcccacatttcgacaacatggacgaggacttcgacatgccgacggcggaggcaatgggcgaggacttcgacttcgccggcgccaccggcggcgacctcgacggcagcagcagcaaccccatcttgaaggtcggcgaggagaaggagattggaaaagagggtttgaagaagaaactacttaaagaaggtgaaggatgggacactcctgaagttggtgacgagttcaagt

SEQ ID NO: 186161 - DNA, 279 bp, Glycine max
agactgtacactgagactggttttaaagcaacgccacttgttccagccatgcctcctcaacagacccaacaacctctgttatcggaggagcaagaagagacagcctacgattcctcggagaaggttgtggtggtcggaatcgacgagcacgacggcgacttggaggcgccgccgttctcatggcggaagctgtggctcttcaccgggcccgggtttctgatgagcatcgcttttctggatcccgggaacctcgagggggatcttcagtccggtgccatt

SEQ ID NO: 186162 - DNA, 278 bp, Glycine max
gtttagatggcataattatgaaagttgaagatgttgaacctgttctcgagctaaaggaatatttcgacagaagaatggaagaaagcaatctactgagcttgaccaaagccactgtaacacatattcaagcagctggaatgggtgatcgcgtttgtgtagatctctgcagtctcatgagacctggtgaaggacttcttgttggatcttttgccagaggattatttcttgttcactcggaatgcttggagtcaaattacattgcaagcaggccgtttcgg

SEQ ID NO: 186163 - DNA, 259 bp, Glycine max
  unsure (1)..(259): unsure at all n locations
catagctgcagcattagggtttttcatctgcttcaatggggaagggaacagggagttttggtaagagaaggaacaagactcacactctctgtgtgaggtgtggccgccgagcttccatctcaagaagagtcgttgcgccgcttgtggtttccccgccgcacgcaactaggaaatataactggagcgtcaaggcaatcgcagatagacaccggaatggcagntgaggtattgcgtaacggctcgcgatcaagatggctca

SEQ ID NO: 186164 - DNA, 283 bp, Glycine max
cgaggtggtgccttatcgctgtggttatcatcttcttcttcctctttcttagatctcttcttgctctacgccgcacgccgaattcattgtctgaataggagagggtcctgctatcggaatcgatctcggaatcacctactcttgcgtcggtgtgtggcaacatgaccgcgttgaaatcatcgccaacgaccaagggaacataaccacgccgtcttacgtcggattcactgacaccgagcgtctcatcggtgatgcggccaataatcaagtcgccatgaacccc

SEQ ID NO: 186165 - DNA, 300 bp, Glycine max
cacgcgtacgtcacctccggctcgagctcgagcgaatcggctcgagcgagcgcggcacccacacacacagttcgtcggaatgggaacggtgattcgcgctcaggtaagggtgctgggtcggtgttcaagtctcacactcaccaccgcaagggtccggcgaggttccgcagcctcgacttcggcgagcgcaacggctacctcaagggcgtcgtcaccgacatcatccacgaccccggtcgcggcgcccctctcgccaaggtggcattccgccaccccttccgctacaagaagcaaacggag

SEQ ID NO: 186166 - DNA, 281 bp, Glycine max
acctaggcacccagagacgaggaagggcgtagtaagcgacgaaatgcttcggggagttgaaaataagcgtagatccggggattcccgatataggtcaacctttcgaactgctgctgaatccacgggcaggcaagagacaacctggtgaactgaaacatcttagtagccagaggaaaagaaagcaaaagcgattcccgtagtagcggcgagcgacatgggagcagcctaaaccgtgaaaacggggttgtgggagagctatacaagtgtcgtgctgctaggcg

SEQ ID NO: 186167 - DNA, 288 bp, Glycine max
ccctcgagccgaatcggctcgagcacaccaggcgcacgttagcacaacctatcatggccacggcaacagcagctgccacctcgtcctttatggggacgcgtctcctggaggctcactccggagcggggcgagtgcacgcccgattcggcttcggcaagaaaaaggctcccgccccaaagaaagcctccaggggatcgggccgagacaccgacagacccctttggtatccgggcgccaaagcgcccgaatacctcgatgggagtcttgtcggagactacgggttcgatc

SEQ ID NO: 186168 - DNA, 287 bp, Glycine max
caaattctcaaatccaaatccaattccaattccaattcccaatcttctcaaaccctaattcctcatcttgaaaatgagagaaatcttgcacatccagggagggcaatgcgggaaccagatcggagcgaagttctgggaggtgatatgcgacgagcacggcatcgaccacaccggaaagtacagtggcgactctgaactcctcttggaacgcatcaatgtttattacaacgaagcgagtggcggaaggtacgttccacgcgccgtcctcatggatctagagcccggca

SEQ ID NO: 186169 - DNA, 288 bp, Glycine max
  unsure (1)..(288): unsure at all n locations
gaaagtcctccctgctttgaatggaaaattgactggtatggcattccgtgttcccaccgtngatgtctctgttgttgacctcacagtgaggctggagaaagaagcttcctacgatgaaattaaaaatgctatcaaggaggaatcagagggcaagttgaagggaattcttggttacactgaagatgatgtggtctccactgactttatcggcgatagcagatcaagtatttttgatgcaaaggctggaattgcattgaataagaactttgtgaagcttgtttcttggta

SEQ ID NO: 186170 - DNA, 286 bp, Glycine max
gtcaattccaacaacaccacaatgggaagaagaccggcgaggtgttaccggcagataaagaacaaaccgtacccgaaatcccgtttctgccgcggcgtgccggagccgaagatccgaatctacgacgtgggaatgaagaagaaaggcgtggacgagttcccgttctgcgtgcacctggtctcgtgggagaaggagaacgtctccagcgaggctttggaggcggcgcgcatcgcatgcaacaagtacatggccaagttcgccggaaaagatgccttccacctgcgcg

SEQ ID NO: 186171 - DNA, 281 bp, Glycine max
ccaaagtgcttctctcctctgtctttttctctctcttgctatccttttggctagttgcagtgctgcaagtgcaactccaagaagcgcagtgccaagccaccatgtttcaacattcaacagaagcctttttccttccacttttctctttggaattggttcttctgcttaccaggcagaaggagcagcaagtgtagatgggagaggaccaagcatatgggacacctacactagacagcatactgaaaagatttgggatcatagcaccggtgacatgggagctg

SEQ ID NO: 186172 - DNA, 281 bp, Glycine max
gctctgtgtcgccgtaacacaaaaagggaagagagagaaagaaccaccccacccaacaatagcttttgttcttcacaagacatagcttcgtgtgtgtgtttcttttcttccttccagcttggaaagactgaagtctctgtctttttcaggttttgggggtgttgttgaagatgttggtagcaaatagctttgatctatggcgaaaggacggttttttctctgcggcggaagaggtgcaggaatcagctgatataatggaatctgcatacagggcatggttg

SEQ ID NO: 186173 - DNA, 277 bp, Glycine max
tgctttttgtaaaattgtaaacaggaagcgatgatgaaagacacattggaacgagctacagatcccaactttaacttaaaagcttaccttcagaatgcttatgttcatccagttttcaaagctagcctttttgatgaggacgaggacgaagaggtaatgagtctaaagttggaaactgagagtttgactgtacccacaaaacggcaatcaagaaggaacacaccattgcctagcagaattagtggtgcatcatctccttctctgcctgatcatggca

SEQ ID NO: 186174 - DNA, 279 bp, Glycine max
ctcttatacaaaaaatctagggtgggaatttcctggtattggagaatttcagtgctacgacaaatatcttaaagctgatttcaaaggagctgcattaagggcagaccatcctgaatgggagctacctgataatgctggggaatcaaatgatgtacctgaatctacagaatttttcaaatcaggaggaacttatcaaacagagaaagggaaattttttctaacctggtattccaacaagttgctgacccatggtgatgaaatcctagatgaagccaacaa

SEQ ID NO: 186175 - DNA, 281 bp, Glycine max
cctttgttcactcttcttctcttgcggctagggttttagcgcagttacttctagatttaaggcagatgggtaaggaaaaggttcacatcagtattgtggtcattggccatgtcgactctgggaaatccactaccactggtcacctgatttacaagcttggaggcattgacaagcgtgttattgagaggtttgagaaggaagctgctgagatgaacaagaggtctttcaagtatgcctgggtgctggacaaacttaaggctgagcgtgaaagaggaatcacc

SEQ ID NO: 186176 - DNA, 283 bp, Glycine max
agcaggtattcgtgctgagtcagattctagagataattattctcctggatggaagtattccaactgggaaatgaaaggggttcctctaagaattgaaattgggccaaaggatttagcaaataagcaggtcatcaactttgccagtgttttatcaattctcatatttgtcattttgcttccacactgttagtttttcagtgaacaccaaataaatctctttgaattttgcataggttcgcactgttcgacgtgataatggtgcaaagatagacattgctagtgc

SEQ ID NO: 186177 - DNA, 282 bp, Glycine max
caacgattgctggtgttaatccaaatgtcattaagattcttgaggagttcccaccacgtagcaagctagattctcaagcctacggtgatcatacctctataataacaaaacaacacttggagcctaacttgggtgggctcaccgttgagcaggctatccagagcaagaagttgttcatcttagatcaccatgactatctcattccatatttgaggaaaataaatgcaactaccacaaagacttacgctacaagaaccatatttttcttgaaaagtgatggaa

SEQ ID NO: 186178 - DNA, 281 bp, Glycine max
cgctgcatctcaacgaaacagagcgagctagagagagagagagagaaagagaagagagagaagcagcgattcatcacaatgggtaaggttcacggatctctcgcacgtgcgggtaaagtgagaggacaaactcccaaagtggcgaacaagacaagaagaaaaagccacgcggacgcgctcacaagagaatgcaatacaaccgccgattcgtcaccgccgtggtgggattcggaaagaagcgtggaccaaactcctcggagaagtgagggaggcgtgttgaa

SEQ ID NO: 186179 - DNA, 281 bp, Glycine max
gtaaaagctcgtttgattctgatttccagtacgaatacgaaccgtgaaagcgtggcctatcgatcctttagtccttcggaatttgaagctagaggtgtcagaaaagttaccacagggataactggcttgtggcagccaagcgttcatagcgacgttgctttttgatccttcgatgtcggctcttcctatcattgtgaagcagaattcaccaagtgttggattgttcacccaccaatagggaacgtgagctgggattagaccgtcgtgagacaggttagttt

SEQ ID NO: 186180 - DNA, 278 bp, Glycine max
ctcgagccgtccgggttcacgtttcacaatcactttttgcgcttctctcactcactcacacttcttcttcctcttcgtgtggttttctttctcgaactcgaacgaagatgcgtgagattcttcacatccagggagggcaatgcgggaaccagatcggagccaagttctgggaggtggtgtgcgcggagcacgggatcgattcaacggggaggtaccaaggggacaacgagttgcaactcgagcgagtcaacgtctactacaatgaagcgagttgcgga

SEQ ID NO: 186181 - DNA, 290 bp, Glycine max
ttcggctcgagatttgatggattagcaagagcatgtgctaaggctggtgggttcccagagccagagatcattcactacaaccctaaagattttgattttgggaaaaagaaatcatttccattccgtgaccagcatttctttgcatcagttgagaaagcaaagagcgtgcttggattggaacctgaatttggacttgtagagggtctagcagactcgtacaacctggactttggtagaggaacatatcggaaagaggctgatttctcaacagatgacataattcttggcaa

SEQ ID NO: 186182 - DNA, 275 bp, Glycine max
caaagaaaaaaaaaacccttagccaacacaaccatcatggccacctctgctattcagcaatcagcattcactggtcaaactgctctgaagcagctcaatgagttcgtccgcaagaccggtggcgccggcaaaggtcgcactaacatgcgccgcaccgtcaagagtgctcctcagagcatttggtatggccctgaccgtcccaagtacttgggtccattctcggagcagattccatcatacctgaccggagaattccctggtgactacggatggga

SEQ ID NO: 186183 - DNA, 278 bp, Glycine max
cctcgagccgaatcggctcgagattcacctgagctttttgtgaggcttccaaagcatggcttcccttgcagcatccactgctgctgcttcccttggcatgtcagaaatgcttggaaaccccatcaacctcagtggtgccacaaggccagctccatctgcctctagccctgcctccttcaagactgtggctcttttctccaaaaagaaggctgcacctccaaaaaaagctgcagctgctgctcctgccaatgatgagcttgccaagtggtatggtcctg

SEQ ID NO: 186184 - DNA, 276 bp, Glycine max
cgcaacaaaaagaaagaatcccaggcgaggagaaagatggaggggaaggagcaggatgtgtcgttgggagcgaacaagttccccgagagacagccgattgggacggcggcgcagagccaagacgacggcaaggactaccaggagccggcgccggcgccgctggttgacccgacggagtttacgtcatggtcgttttacagagcagggatagcagagtttgtggccacttttctgtttctctacatcaccgtcttaaccgttatgggagtcgccggg

SEQ ID NO: 186185 - DNA, 275 bp, Glycine max
ctactacaagggaagaaaaacttagctactaaggaaggatcaaagcgaatggctcaagcaatggcatcaatggctggcttgcgtggttcctctcaggctgtgttggaaggtagccttcaggtgagtggctccacacgcttgaatgtggggagtggaagcagggtggcctcagtcacacgtgcagggttcacagttagagcacaacaacaacaagtgagtggtgaggtacaaagcagccgtagggcagtgctttcacttgttgctgctggtttggc

SEQ ID NO: 186186 - DNA, 279 bp, Glycine max
agagtttgctacaagcaaggggtgttaattggacatctataaggccagtctacatctatggacccttgaactacaaccctgttgaagagtggttcttccatagattgaaagcgggacgcccaattcctatccccggctcaggaatacagataacccaacttggtcatgttaaggatttggcaaaagcttttatccaggttcttggtaatgagaaggccagcaaggaagtattcaacatctcgggagataagtatgtcacatttgatggattagcaagag

SEQ ID NO: 186187 - DNA, 281 bp, Glycine max
attctctgcacttttcagttacaaagcatttcattgttttacaatatacaatactacaatggctgcttcaacaatggctctctcttcatcatcattggctggccaagctatcaagcttgccccctccacccctcagcttggtgttggaagggttagcatgagaaaaacagcctccaagactgtttcctcaggaagcccatggtacggcccagaccgtgtcaagtacttgggcccattctcaggtgagcccccatcctacctcactggtgaattcccaggtg

SEQ ID NO: 186188 - DNA, 278 bp, Glycine max
  unsure (1)..(278): unsure at all n locations
gangatgattatccatcttcaagcacttttagggaacagatgggctgcaatagctgcttacctaccacaaagaacagataatgacataaaaaactattggaacacatatttgaaaaagaagctgaacaaaaaattggaagcaggttctgatcaaggaagcttgttgggaggaggacataataatattgggttttcatcagtttctcaaccaatgtctagaggccagtgggaaagaaggcttcaaacagatattcacatggccaaaaaagcacttagtg

SEQ ID NO: 186189 - DNA, 278 bp, Glycine max
attactccctatattaacccaacaatgcaaaacaacacactgaactctcttcactgaaacgacacacacaaaaaaaagctttagtttaggatgacccaagtgaggaacaagcaagtggttctaagagactatgtcaccggattccctaaagaatccgacatgaacattgttgaaggcaccataatattgaaggttccagaaggttccaatgatgtccttctaaaaaatctctacttgtcatgtgatccatacatgcgactcctcatggccaaggaccg

SEQ ID NO: 186190 - DNA, 277 bp, Glycine max
ggcaaacgtttaattctctttccacccttgagcattatatacaaagtggagcgcagactgtcttatttgttggagatctttcttatgctgataggtaccagtacaatgatgttggtttacggtgggatacatggggacgatttgttgaaaggagtacagcatatcatccatggttatggtctgctggaaatcacgaaatagactatatgccttacatgggagaagttgttcctttcaaaaactatctttaccgatatactactccctacttggcctc

SEQ ID NO: 186191 - DNA, 279 bp, Glycine max
ataaaccctaggtagagagctcttcctccctttctcacagcaatggccgccgcagcacgccctctcgtcaccgtgcaggccctcgacggtgacatggcaaccgatgcctcctccaccgttcccatccctgacgtcatgaaggcctctatccgccccgacatcgtcaatttcgtacactcgaacatctccaagaacagccgccagccatacactgtcagtcgtcgcgctggtcaccagacctccgccgaatcctggggtaccggccgagccgtctcccgt

SEQ ID NO: 186192 - DNA, 275 bp, Glycine max
caatacccttttgatttgtgaaaggaaagcaaacatggttgatcaggtccaacaccctacaatcatggacaaggttgctggtcagctccatctccgttctggtctttcatctggtattagaagttatgatggagcctaccgccacccagctatgtaccaaagaccctcttttgggaattactcgaatgctgcattgcagtttcctgtgatgcccacatgcaaagctaccatggatttgtctgctactgcaacatctgcctcacccgtctttgttg

SEQ ID NO: 186193 - DNA, 269 bp, Glycine max
gcgggctcaagtgctccccactctcatcttcttctctcttctccaaaccttctctttggacccaacaatcccaaaagcgcgtttcaattaccattgcgaactcaatagcaatagccaatgcgcagaacaaagagagagcgaggcttaagaaactcttcgaagaagcctacgagagatgccgcaatgctccaatggaaggtgtttccttctgcatcgaagacttcactgctgctcttgacaagtacgacttcgattctgaagttggcggc

SEQ ID NO: 186194 - DNA, 275 bp, Glycine max
catcatcaacacattctacagcaacaaggagctattcttgcgtgaactcatcagcaatgcttctgatgctttggataagattcgattcgagagcttaaccgacaagagcaagctcgatgctcagccagagctcttcattcgtcttgtgcctgacaaggataacaagactctttccattattgacagcggcattggaatgaccaaagcagatttggtgaacaacttgggtaccattgcgaggtccgggaccaaggagttcatggaggcgttgcagg

SEQ ID NO: 186195 - DNA, 270 bp, Glycine max
cccaattcctaattgtttaaacctaattctcatttcttcatcgttcgattcttctcctcctaaaggtacgtctctggtttcctctctctcttgttcattcttttcgtaatagcaaccttattagccttcgtttattgatttttctcctaattacacttcaattttttcgatttgtgtttgttacgtcaatctgtatatcttttttgttgtcgtcgaatccgaaacttttcattcgcctttctgattccgtaaatcgtttgttaagtgcaa

SEQ ID NO: 186196 - DNA, 278 bp, Glycine max
tgaacattcacccaatttgcagagttccaagttatatacatacactgcataattaagagaaaatgtctctgattccaagtttcttcggtggccgaaggagcagtgttttcgaccctttctccctcgatgtgtgggagccctttaaggattttccatttcccagttctctttctgctgaaaattcagcctttgtgagcacacgagtggattggaaggagacaccagaagcacacgtgttcaaggctgatattccagggctgaagaaggaggaagtgaag

SEQ ID NO: 186197 - DNA, 278 bp, Glycine max
gaaaaagtaaagtttccagttttgttaagcaggtctacttattcagccttatggtataagccagatacattgttttctacacccaaggcttatgtaaagattgatttcaattgcccatattctggaaactctcctgaggctgaagttttgacgcatattttcacagagttattgatggattacttgaatgaatatgcttattatgctcaggttgctggtttatattacagcataaatcaaacagatggtggtttccagatgactctccgtggttacaa

SEQ ID NO: 186198 - DNA, 277 bp, Glycine max
aaagtgttgtcccaaagaaagagcatctttctcctttctttcatcaccgttggaagagactgagatgggttcaaaaaccaagacttttacctttgaggaggtggctaagcacaatcacaggaaggattgctggattatagtcaaagggaaggtgtatgatgtcaccccatttttggatgatcatccaggaggtgatgaagttttagtgactgcaacagagaaggatgccaccactgattttgaagatattgggcacagtgattcagcaacagagatg

SEQ ID NO: 186199 - DNA, 277 bp, Glycine max
ataaaaagaaaacataatgcagagagaggtagaagaatccagaacccgttgtttgtctcccattcccgttcctatataaagctccttctttcacaaccttcacctacttcaactctctacaattcgctctgtgcagtttcctacgctctcttttctgcaattttcttttttgttccttctctgcggttatctttttgagcttcaatggcggacgctgaaaccttcgctttccaggctgagatcaaccagcttctcagcctcatcatcaacaccttct

SEQ ID NO: 186200 - DNA, 277 bp, Glycine max
aaacaaacaaataaagcaaaaggcctttttattccaaagcaaggaaggaagaaataaaccgaatgagagcattaacctcttcttcttccactttcattccaaagcgttattccttcttcttcttcctctccattctcttcgctcttcgatcctcgtccgggggctgctccgaataccaccaccaccacgcgccgatggccacgataggaggcttacgcgactcccaaggctctcagaacagcgtccaaaccgaggccctcgctcgattcgccgtcga

SEQ ID NO: 186201 - DNA, 272 bp, Glycine max
taacaagagattcaagaccggcatggctaatgaagaggaacagaaaaaccacctcttcggcatcaaagatctcggtcacaagactctccttcagagtgatgcactctatcagtatatacttgaaaccagtgtctgtccaagagagcacgagtgcttgaaagagatacgcaagatgactgcaaaacacccactgaacatcatggcaacaccagcagacgaaggacaacttctgagcatgcttgttaagctcacgaattcaaagaacgccttgg

SEQ ID NO: 186202 - DNA, 274 bp, Glycine max
tgtgaatcaagaaccgctctgctatggctgctctgcaatacttggaatcgctgcgcaattcgcaccctgagctctccgattggtacaattcgctggcggatctgtaccagaagaagctctggcaccagctcactctcaagctcgagcagtttgtggctctcgccgtcttccaggctggtgatgctttaatacaattatatcacaatttcatcacagactttgagacgaaaatcaaccttctcaagcttgcacattttgctgttatagtttctcg

SEQ ID NO: 186203 - DNA, 274 bp, Glycine max
gttcaaggccgggtcccagatcttcagcgagggtgggctcgactacttgggcaacccaagcctgatccacgcccagagcatcctcgccatctgggccacacaagttatcctaatgggtgccgttgaaggttaccgtattgctggtggccccctcggtgaggtcactgacccaatctacccaggtggcagcttcgacccattgggccttgctgatgacccagaggcttttgctgagcttaaggtgaaggaactcaagaacggacgattggccatg

SEQ ID NO: 186204 - DNA, 276 bp, Glycine max
atcaagggttgtgaaagcagagaagtgagatacactaagttatcctcataaatacactctaattaggtggcaagataagtgtctaaccttagtaacattgccacatattgtgttcattttggaattgtgccactaaaattctattcaattcatctatggctgcctcttcttatgctatgcaatcaatcctggcaaaccctttgatccgcatttccagcgggtctagggtgaaccaatttggcgttcctgctttgcacatgagaaggaatgttggcc

SEQ ID NO: 186205 - DNA, 234 bp, Glycine max
attttagaagaataccccctcttttgctgcatcagaggagttgtaaattaagagcatggctgcacaagctcttgtatcatcatcttctcttaccttctcagcggaggctgcaagacaaagtcttggaccaagatcactccaatctccatttggcttctccagaaaagcctcctttcttgttaaggcagctgctaccccccctgtcaagcaaggatcagacaggcctttggggtt

SEQ ID NO: 186206 - DNA, 268 bp, Glycine max
ttagaccgtcgtgagacaggttagttttacccaagtgttggattgttcacccaccaatagggaacgtgagctgggtttagaccgtcgtgagacaggttagttttaccctactgatgacagtgtcgcaatagtaattcaacctagtacgagaggaaccgttgattcgcacaattggtcatcgcgcttggttgaaaagccagtggcgcgaagtaccgtgcgttggattatgactgaacgcctctaagtcagaatccgggctagaagcgac

SEQ ID NO: 186207 - DNA, 266 bp, Glycine max
ggtggtaatggcagcgtcactacaagcagcagctactttcatgcaacccaccaagttgagcaggagcaacactttgcagcaaaagtctactcagtccatttccaaggcttttggtttggaacctgttggagctaaaaaggtcacatgctcccttcaggctgatcttaaggacttggctcacaagtgtgttgatgctaccaaaattgcaggattcgcccttgccacctctgccctcgttgtctctggggcaagtgctgaaggtgttc

SEQ ID NO: 186208 - DNA, 268 bp, Glycine max
gcattccctcgtttaccatgctttcctaagagtaagagaaaagtaaaacccctcactactgatagattttcattcctccgaggaaaaaagaaaacatgtcggatgctttgatcaatggattggccggagctggaggagggatcattgctcagctcatcacatacccacttcaaactgtaaacactcgccaacaaaccgagcgtgatccgaagaaagacacgaggagtcaaggggccctcgaacgaatgtgccaggttgtaaaagaaga

SEQ ID NO: 186209 - DNA, 265 bp, Glycine max
ggggataggggttagggtctgttcttgtgatcgaagctaagcgtgcacaatgggtggatcagtgagggacgtgaagtcgaatggcgaggtcgacgaggtggtggcgagttgctctccggttatcctccacttctgggcgtcgtggtgcgaagttccaagcacatggaccaactcttctctcacctttccactgatttccccaacgggcgcttcttaagggtcgaggccgaagagcaacccgagatttctgaggcttactccgtct

SEQ ID NO: 186210 - DNA, 273 bp, Glycine max
gaaagctgtcatggcaattggcaagtgataataatagcaaactaattatacgtttcttttcttccccgtctcaactcaattccattctcttctctgagtctcaacctaattccccattcatccatctttacgtgtttgttggattccatggccaaaagctccttcaagcttgaacatcccttggaaagaagacaggctgagtctgctcgcattagagacaagtatcctgatagaatacctgtgattgttgagaaagcggaaagaagtgacatc

SEQ ID NO: 186211 - DNA, 271 bp, Glycine max
ccttatcttatctctcgttatatccatctttacaactttcatttcatttccctatttcagacacagtaagatcttggtgtctccgtttgcagcgtcactacttgctacaacacgagccattaaacccaccttcccaatccactccaattcaaatttctcactataaaccacttcttcaaacttccctccgcaattcttaattcattcgtaccatggcagcgtcctcgctctgttcctctttcacctccaaatcatggaacccgctccggcc

SEQ ID NO: 186212 - DNA, 270 bp, Glycine max
gagaaaagtgaattggattgcatctctcgctttgtgttggaagaggggaatcgtagatctgatttctttctttcttttaataataattttgtgatcagaattattgagctgaagaaaagacaatgggattgtgggaagcttttctcaattggctacgcagccttttcttcaagcaggaaatggagttatctctaataggacttcagaatgctgggaagacttcccttgtaaatgtagttgctactggtggatatagtgaggacatgattc

SEQ ID NO: 186213 - DNA, 271 bp, Glycine max
gatgcaggctcagacataactttttatgctcttttagaggcttctacctttgccaagcattgggtgccattctgcaagagatttaaggtggaaccgaggtcacctgctgcttattttaatacccttgtatcaacaaactcacacgaccataaccatgccaaagacttagatgccatcaagaaactatacgtagatatgaaaagacgaatagaagatgtagtcaagttgggtggagtacccagcgaacacagatcaaagcataatgggtttt

SEQ ID NO: 186214 - DNA, 271 bp, Glycine max
cgcgtcgctccgcaccagtttcaccgcacgaatatcttgttgtttggagcgatccgagaaaaactctgtaaacatgttggtttaccaggacctccttacaggtgatgagcttctctctgactccttccgttacaaggaaattgagaatggaatgctgtgggaagttgaggggaagtgggttgttaaaggagcagttgatgtagacattggtgcaaacccttctgctgagggtggaggagaagatgagggagttgatgatgcagctgttaag

SEQ ID NO: 186215 - DNA, 276 bp, Glycine max
attcggctcgagattgattccagcaccacaatcttagatgttcacggagtgggccttaagaactttacaaagtctgcccgggaacttattacccgattgcagaagattgatggtgataattaccctgagactctttgccaaatgttgattataaatgctgggcctggatttaggctgttgtggaacactgtcaagtcttttctcgatcccaaaacaacttctaagattcatgttcttggaaacaagtatcaaagtcgtttgcttgaagttatagat

SEQ ID NO: 186216 - DNA, 271 bp, Glycine max
  unsure (1)..(271): unsure at all n locations
actgatgtgtcctcaaccgacacangtncgntcatncacacacagnngaggattcccttgtacctcccaaccctccaaaggcaaactncaatggcatngcactccgtgtgccaacaccgaacgtctcagtggtggacctcgtcgttcaggtctcaaagaagacctttgcagaagaagtgaatgcagcattcagagagagtgcagacaatgagctcaagggaatcctctctgtgtgtgatgagccacttgtgtcgttgacttcaggtncatt

SEQ ID NO: 186217 - DNA, 241 bp, Glycine max
gtttgttgtgagctataagctagtttatcgtgaggagaatatgaagttgtttgttttctttgttgctgcagtagttttggtagcatggccatgccatggcgcaggctaccaaaggttccctctccgaatgaaaactggctatggtgagcgttcttcggaggtaaaatgcgcaagttttaggcttgctgtggaagcacacaacatccgagcctttagaaccattcctgaagagtgcgttgaa

SEQ ID NO: 186218 - DNA, 259 bp, Glycine max
ctcgagccgggcgaagagaagagaaaaattaagatggaggggaaggcgcaggatgtgtcgctgggagcgaacaagttcccggagagacagccgattgggacggcggcgcagagccaagacgacggcaaggactaccaggagccggcgccggcgccactggttgacccgacggagtttacgtcatggtccttttacagagcagggatagcagagtttgtggccacttttctgtttctatacatcactgtcttaaccgtca

SEQ ID NO: 186219 - DNA, 254 bp, Glycine max
ctcatcttcctctttttctcaaccaaaaggggttcaattctagctagttctattacatcgtccgcgaccatgaacatggcgatcgtgcttctgttcatggttttcgcagtttcatcagctttagacatgtcaataatatcacatgacaacgctcatgcggatagggccacgaggcgcaccgacgacgaggtgatgtcaatgttcgaggagtggctggtgaaacacgacaaggtgtacaacgcgctcggtgagaa

SEQ ID NO: 186220 - DNA, 261 bp, Glycine max
cagagttgggagttgaatcctctctgattcgatgacgacccgaatcgcgcccggtgtgggagccaatttgttgggtcaacatgccgccgagaggaatcaagatgccactgcttatgtcggaaatctcgaccctcagatatgtgaggagttactatgggagttgtttgttcaggctggtcctgtcgttaatgtctatgttcccaaggatagagtcaccaaacaacaccagggttatggttgcggtgaattccgcagtgaaga

SEQ ID NO: 186221 - DNA, 263 bp, Glycine max
tgcctctgcaattcagcgggctcaagtgctccccactctcatcttcttctctcttctccaaaccttctctttggacccaacaatcccaaaagcgcgtttcaattaccattgcgaactcaatagcaatagccaatgcgcagaacagagagagagcgaggcttaagaaactcttcgaagaagcctacgagagatgccgcaatgctccaatggaaggtgtttccttcatcatcgaagacttcactgctgctcttgacaagtacgac

SEQ ID NO: 186222 - DNA, 262 bp, Glycine max
ggaatatccgctattctagttgctgcttctgtctgtaacacaatacaatcatcattcatcaaatcactgaaaccaaagccacaagctgcgacatcagaagaatggaagacggtgttgaccacttggctttcgagaggaacaaggcgcagttcgatgttgaggacatgaaaatcatttgggccggttctcgtcaagactttgagctttcggatcgaatttctcgccttgttgccagcgatccggcgttcagaaaggatgatag

SEQ ID NO: 186223 - DNA, 265 bp, Glycine max
gtgcatcactagcaagttattttgatgtcatagcagggactagcacaggaggactcatgactgctatgctcactactcctcacccagacgaccccactcaccctctgtttactcccagcggaatcatagaattttataaaaaatacggtccttctatattcaatgaaactagtggttgggataatgcattcccgggtcccaagtacgacggcaagttcttacataataaagcacgtgagttgctgcaggatacgcgattgagcca

SEQ ID NO: 186224 - DNA, 258 bp, Glycine max
tttgatccttccttagtagctaagagaatggctcaagcaatggcatcaatggctggcttgcgtggttcctctcaggctgtgttggaaggtagccttcaggtgagtggctccacacgcttgaatgtggggagtggaagcagggtggcctcagtcacacgtgcagggttcacagttagagcacaacaacaacaagtgagtggtgaggtacaaagcagccgtagggcagtgctttcacttgttgctgctggtttggccact

SEQ ID NO: 186225 - DNA, 251 bp, Glycine max
agaagatccagcacagtgaggtggaagtgaagggactgaagcttcacgtggcagagattggaagtggctccaaaacagtggtattcttgcatggattcccagagatctggtacacatggaggcaccaaatgatttctgtggcaaacgctggttatagggctattgcctttgatttcagaggctatggactttctcagcaaccagcagagcctgaaaaggaaaccatgtttgatctggttcatgaaattgta

SEQ ID NO: 186226 - DNA, 253 bp, Glycine max
gcgaaatcgcaatcgcaatccagcgaatatgaaggtcgtagctgcatacttgctcgcagtgttgggagggaatccttccccttctgccgatgacatcaaacacatcctcggcgcagttggagctgaggctgagaatgagttgattgagttgctcttgactgaagtcaagggaaaagacttcaatgagctaattgctagtggcagtgaaaagatgtctgcagtgtctggtggcggtgcagcggttgcgttgctg

SEQ ID NO: 186227 - DNA, 255 bp, Glycine max
ctaacgcgtgcagagcagagagagacgcagccatggggcgaagacccgcgaggtgttataggcaaattaagaacaaaccataccccaagtcacggttttgccgtggtgttcctgatcccaagatcaggatttacgatgttggtatgaagaagaagggtgttgatgaatttcctttctgtgtccatctggttagttgggagaaggaaaacgtttctagtgaggccctggaagctgctcgtattgcttgcaacaagt

SEQ ID NO: 186228 - DNA, 238 bp, Glycine max
  unsure (1)..(238): unsure at all n locations
ataatagtagaaggtcggagatagtaaagagagaaatccgaatagaaaaagaagctagctagggtttcggcgcgaagaagaatggggaagaagaaggtggagataaagcgaatcgagaacaaaagcactcggcagataacattctccaagaggcgcaatggattgatgaagaaagctcgcgagctatccattctctgcgatgcgaaggtggcgctgctcatttcctcaaccncggaat

SEQ ID NO: 186229 - DNA, 260 bp, Glycine max
cacgtaaattctaagcggtggccaaaggaaaaaacggctctactatcatcagtcccaaagcaattgccgcatgagctaagttcaacgcattacctaacagtttgtcttctgcatcttccttatagttcttcagctaataagaagtaacaaatacaatctgccaccatccccaacatagatacccataatcggcgctcttcaccagctaggcacactgccacaccgtgccttcatgcactctcacacaaatatggccctct

SEQ ID NO: 186230 - DNA, 257 bp, Glycine max
gtgagtcctgcaactggtataataagaccagatcaaattgttgaagtatcagtgcatcattaggaatttcagactctagaagagtttgtagatggtgtcgtacaaaattcttagtgtgaagactccagagacaaggaagctattttggttgtcaaggtgcatggcaattacactatctagccaagaaatcaccgagtccgtgttcaccactgttattcatctcagaaggaatctctgattgactctcaaccagacgg

SEQ ID NO: 186231 - DNA, 259 bp, Glycine max
aacctcgaatcctcttctgcttcaacaacttcccgaggcttctggccttctgtcttacgttggatcccctcttccaccgatcacatcatcaatgctgaaaaacgccttctctctcttgtcaagactccgtatgctcaagaacaggtcaatataggttccggtccacctgattccaaagttagatggttccgttcatctagcaatgaaccacggtttattaacacggttacatttgacagtaaggatgattctcctacgc

SEQ ID NO: 186232 - DNA, 259 bp, Glycine max
tcctaatcatctgtcgcacgctacgagggtccctcctttcatatttgatgggcctctctgtgccgctaaggagtatttcttgatgctttgtattttccttagttgttttatattattgatttttcttgtgtctgcatcatcaatgacaattttacgacatcgtcttgtcttttgtgatttagattgtcaagttgtatgagagatgtgtcattgcatgtgccaattatcctgagtattggatacgctatgttttgtgtat

SEQ ID NO: 186233 - DNA, 211 bp, Glycine max
tgaacctgaatggttctggagctggagcttcagctcccagttcagccttctttgggaccagcttgaagaaggttattgcctcaagggtccccaacaccaaggtttccggtggaagcttcaagattgttgctgtagaagagaagaaagagattgaagagacccagcagaccgacaaggacagatggaagggtcttgcctatgaatatctcag

SEQ ID NO: 186234 - DNA, 195 bp, Glycine max
cggcgacggcgagtgtacggattcgctcgtgtgtcgatggtcttcagctccttagattctggctatctccatttgcataagaaaaagctgcgttctcctcactcttggcttcttcaggtacttcctggggctgggtattggaggagactacccttagtcttctaccataatatcggattttgcgaccaagaagac

SEQ ID NO: 186235 - DNA, 223 bp, Glycine max
ctcgagccggttttgttttgggaacatcatcacattacattagattggtggtaatggcagcgtcactacaagcagcagctactttcatgcaacccaccaagttgagcaggagcaacactttgcagcaaaagtctactcagtccatttccaaggcttttggtttggaacctgttggagctaaaaaggtcacatgctcccttcaggctgatcttaaggacttggc

SEQ ID NO: 186236 - DNA, 257 bp, Glycine max
aaaatggcatcattcaccatgacagcttccatccttggcggcccagccgtcaccaaccggttggcagtagcaacgcagaggagatcactcgtagtgaatgctgccaaagctgttgaagcggaaaaggtcagttctgacaatgacatggatggtagcaatggaaggaggaacttgatgttcgccccggcggcggcggactgctgtttgctctggtgcctggatggcagtggcagatgagccagaacctaggaccccag

SEQ ID NO: 186237 - DNA, 255 bp, Glycine max
ctttttgagcttcaatggcggacgctgaaaccttcgctttccatgccgagatcaaccagcttctcagcctcatcatcaacaccttctacagcaacaaggagagattcttgcgtgaactcatcagcaacgcttctgatgctttggataagattcgatttgagagcttaaccgacaagagcaagctcgatgctcagccagagctcttcattcgtcttgtgcacgacaaggccaacaagactctttccgttattgaca

SEQ ID NO: 186238 - DNA, 234 bp, Glycine max
ctcggctcttgcatcgatgaagaacgtagcgaaatgcgatacttggtgtgaattgcagaatcccgtgaaccatcgagtctttgaacgcaagattgtacccgcagctccatgaggctagtatcattccatagtcttttccagttgtggtgggaggcgttgtatcaagagcctgcttgtttaatttactcggcgcataatatgactttaatacagctggttttttatgagtatgat

SEQ ID NO: 186239 - DNA, 198 bp, Glycine max
aactgaaccacatcatcacacacacatactaagaagcaacaattcttctacaatggatctcctccttctggagaagacactcataggtctcttcctcgatgcggtggtcgccatcgccgtctccacactccgaggccggtaattcaagctcccaccgggcccactccccgtcccaatcttcggcaactggctccaagt

SEQ ID NO: 186240 - DNA, 263 bp, Glycine max
ttccgctcgagcttcactagtacaccaaattaatagacattaaagatatatcattccacaacacaaattaaacttagtgagacgtacccttattatggccaaagaaggtcttggacttgaaatcactgagctaaggttgggtctacctgatgcggacatcaagtaagtgtagtcaataagaaaaatgagaagaagagggcattctcggaaattgctgatggtgttggagatgaaaatagctcctccggtgtgctcttaccgga

SEQ ID NO: 186241 - DNA, 262 bp, Glycine max
actcgagccgaatcggctcgagctctgttggaactgatgccaagggacacattaatatagaagagctgaggaaggctgctgaaaaccacaaggataacttatctgcacttatggtaacatatccttcaacccacggtgtttatgaggaaggtattgacgaaatttgcaatattattcatgataatggaggccaagtatatatggatggtgccaacatgaatgctcaggtttgtttttccatacatatctttacattcatgta

SEQ ID NO: 186242 - DNA, 262 bp, Glycine max
ctcagaaaaatgagagaaatcatcagcattcacataggtcaggccgggatccaggtcggaaactcctgctgggaactctactgcctcgaacatggcatccagcccgacggcatgatgccttctgactccaccttcggtgtagcccacgacgccttcaacaccttcttcagcgaaaccggatctggcaagcacgtcccccgtgctgtcttcgtcgacctcgaacccaccgtcatcgacgaggtccgctgcggcacctaccgta

SEQ ID NO: 186243 - DNA, 258 bp, Glycine max
gggacacataaacccggcggtgacatttgggctgtttttggcgaggaagttgtcgttgcccagggcgattttctacattgtaatgcaatgcttgggtgctatttgtggcgctggcgtggtgaagggtttcgaggggaaaacaaaatacggtacgttgaatggtggtgccaactttgttgcccctggttacaccaagggtgatggtcttggtgctgagattgttggcactttcgtccttgtttacaccgttttctccgc

SEQ ID NO: 186244 - DNA, 258 bp, Glycine max
actcgagccgattcggctcgagcgttagtgctttatttaggtgacaacactactcacagagaaagccactcggagaccttgcaagacttcatcaatggctgtcacagtttatattgtgtactactccatgtatgggcatgttgagaaactagcagaagaaatatagaaaggggcttcctctgtggaaggtgttgaggccacattatggcaggtacctgagacgctgcaggatgaggtgctcggtaagatgactgcacc

SEQ ID NO: 186245 - DNA, 243 bp, Glycine max
caggcattcattgcccatcttgatgagcctttgcgcacaacgtttcagtggtttatgcactacaaggatataatagcactgcctataacatcatggaatgttcagcaaggatttgtcactgcaactttactgcgagttctaaaagcaagggactgggatccttacgaggcgcagaaaatgtccgttgacagtgcaaattcaacggtgcacaatgagattgccaatatattatctaacaccatt

SEQ ID NO: 186246 - DNA, 246 bp, Glycine max
cctcgagccgattcggctcgaggaaagaggaagtgaaggttcagattctagatgatagggttctgcagattagcggagagaggaacattgagaaggaagacaagaacgacacgtggcatcgcgtggagcgtagcagtggtaagttcatgagaaggttcagattgccagagaatgcaaaagtggagcaagtaaaggcttgtatggaaaatggggttctcactgttactattccaaaggaagaggtta

SEQ ID NO: 186247 - DNA, 253 bp, Glycine max
ctacaatggctgcttcaacaatgactctctcttcatcatcattggctggccaagctatcaagcttgccccctccacccctgagcttggtgttggaagggttagcatgaggaaaacagcctccaagactgtttcctcaggaagcccatggtacggcccagaccgtgtcaagtacttgggcccattctctggtgagcccccatcctatctcactggtgaattcccaggtgactatggttgggacactgctgggct

SEQ ID NO: 186248 - DNA, 253 bp, Glycine max
gacgattggttcctgtgttgcctacctaccaaacggtattcgtgtggctagtcagacccattccatccaggcctctttgttggggacgctggaggatttcaaagtcccacacgtgaaccacgttagtcgtccatcataacggcttcctgtggcacacgtgtggtgattgttctctcggatgcggtgcatgcagtgaacgtgggtggtctagtgcccccacattgttccttaaaatcggttgtctcggatgacg

SEQ ID NO: 186249 - DNA, 252 bp, Glycine max
cagatctgtcttccgaagcaggaactaaatatggctgacttgttggaatggtcaaagcaagataagaaacgaatgcttcatgtcgtctaccgtgttggtgaccttgatcgcaccatcaaattttacacagaatgtttaggaatgaagcttttgaggcaaagagatatcccagaggagaaatatgctaatgcttttcttggatttggccctgaagaatcccattttgttgttgaattaacatataattatggg

SEQ ID NO: 186250 - DNA, 244 bp, Glycine max
ctcgagccgccttcttttgggaaaagattaacaataaaagtgtggagtactgttgatagcaaagatgtttgggatcttcgacaaggggcaaaagataaaggggacagtcgtgttgatgccaaagaatgtgttggacttcaacgccataacctccatcggtaaaggtggtgttatcgacacagccaccgggatcttaggtcaaggcgtcagcatagtcggtcaactcatcgagactgccacttcc

SEQ ID NO: 186251 - DNA, 249 bp, Glycine max
agcttgctcatcaagtccaagaaccaacctaccttttgcaatctcaattcaatggcgtcctctctcattgcgaagcgcttcctctcctcttccctcctctccaggtccctccttcgccccgccgcttccgcttcccaccgctctttcaacaccaacgccatgcgccagtatgacaaccgcgccgacgaccacagcaccgacatcgatcgtcactccgaacgctctttccctagcactgcgcgccgcgac

SEQ ID NO: 186252 - DNA, 242 bp, Glycine max
cggctcgagcagaaaactgctgcttctcgacccacttttgaagttcaaaacttaaaccctagttctctctctctttctttctcctggatcttcaaccatgtcagcgatgctgtaacctcagatcattctgctcaaggaagccacggacacttcgcaagggaagccacagctggtgagcaacatcaatgcctgcaccgccgtcgccgacgtcgtccgcaccaccctcggacctcgcggcatgg

SEQ ID NO: 186253 - DNA, 246 bp, Glycine max
gtttcacttgtactcactcactccaagaccaatacggcgccatgcctaccgtcagtgtggggcgtgatcgcctgtatgctgctctaggaaagacttacacgcaagaggaattccaagacttgtgcttcagtttcgggatcgagctcgacgacgatacgacggagaaggcaattgtgagaaaagagaagcatttggatgaagaagaagctgacgaggacgaagaagttatctacaaaatcgaagttc

SEQ ID NO: 186254 - DNA, 245 bp, Glycine max
agtgaccccaatatacttagccatatctttacttcccaaaacttgctctacaatgagtttccttcgttcttttgcaagaaacaaggatatatcaaaagtaggacgcagaggtatccattgcatgcagaaactatgtgcagaaaaaatatctcctgattcactagagaaggcccaaaatcgtgtgatagatgctgcactcacacttgttcgagaaaatacaaggcttaagaaagaactcgtgcata

SEQ ID NO: 186255 - DNA, 246 bp, Glycine max
gggcagtgacagacgcacctcaacctcttggaacgtggcaccttcttcattggaagttcggccagaccttcacgggcaagaatttccgcgtctgaaaaaaataacaaaatttaaacatggatgtttgtttttgtagttgcgttttggttttttagttttcccgcgttcaactttccctctattttcccgggaaagtttgaagccgtgttttggtttaagtgtgtagtaggggacagaaagtaagag

SEQ ID NO: 186256 - DNA, 246 bp, Glycine max
atttgactctgcgagatcgctgcatctggcttcactacctgcatctatggctaaaccccaccatctctttctccttcttcttcttctctgcgccactcttgagttttcttcatcttcaccctccgatcacctctacaatgttggagaacttgtcccattgtttgtcaacaaagtgggacccttcaacaaccccagtgagacatatgagtactatgatttgcctttctgcaccccagacccaattgt

SEQ ID NO: 186257 - DNA, 252 bp, Glycine max
cttctctcgttgattcggatctagagttttttttcactcttcagttctcgttgttgttcttcgctttcctgaaactagggttttcaatttcgattcattcgttaataattaaagatgtttgggagggcaccgaagaagagcgataatacgaggtactacgaaatcctcggcgtctcgaagaacgcttcgcaggatgatctgaagaaggcttacaagaaagccgccatcaagaatcaccctgacaagggcggt

SEQ ID NO: 186258 - DNA, 250 bp, Glycine max
gataactagaaacagtgtgatgaaaatgaaggtccttgttttcttcgttgctacaattttggtagcatggcaatgccatgcgtacgatatgttccctctccgaatgaacactggctatggtgcccgtactccggaggtgaaatgcgcaagttggaggcttgctgtggaagcacacaacatctttggctttgagaccattcctgaagagtgcgttgaagcaacaaaggaatacatccatggcgaacaatat

SEQ ID NO: 186259 - DNA, 249 bp, Glycine max
ctcaaatctcttcgttccttcgattcgttccattccttccaaaatggccaaagacccagttcgcgttctcgtcactggagctgcagggcaaattgggtatgctcttgtccctatgattgctaggggagtgatgtagggtcctgaccagcccgtgatcctccacatgcttgacattcctccggcagcagagtcattgaatggggttaaaatggaattggtggatgctgcattccctcttcttaaaggtgt

SEQ ID NO: 186260 - DNA, 245 bp, Glycine max
gccagtagtcatatgcttgtctcaaagattaagccatgcatgtgtaagtatgaactaattcagactgtgaaactgcgaatggctcattaaatcagttatagtttgtttgatggtatctactactcggataaccgtagtaattctagagctaatacgtgcaacaaaccccgacttctggaagggatgcatttattagataaaaggtcaacacaggctctgcctgttgctttgatgattcatgataa

SEQ ID NO: 186261 - DNA, 246 bp, Glycine max
cacatattctttgttgcaatatcacaaacacctcgtccgtcacaatgcagctacctgtggcggccaacgctgtcgtttcaccgtcgccgttccgacctcatccccttctccggtcatccttctccggcgtctccgttaagctcactccccaatccataacgttttcacgcttgaagcccctcaccgtcttcgccgccaccaagaaggccgtcgctgtcctcaaggggacctccgccgtcgaaggcg

SEQ ID NO: 186262 - DNA, 247 bp, Glycine max
actcgagccgaatcggctcgaggaagaaccaccactaccttatccacttccactcctcaccaagccacaccatggcctcaaccaacgccctctcttcagcttccattctacgctctcccaaccgccagtctctgaccagaagagcgaaccacaacggaagagtaaattaccgtcaaccgaatagccgtttctccgtcaaagcctccgccaaagagattgcctttgaccagcattcccgctctgctat

SEQ ID NO: 186263 - DNA, 244 bp, Glycine max
cacacatagaaacccaacaacaagaatgaagaagatgattctaaccctcttcttcatcatcttatctctcctctccctctcccacgcctccgtggtggatttctgcgtagagactacacaggccccaatggccccgcaggtcactcatgcaagagcccagcaaaggtcacggtggacgacttcgtctactccggccttggcaccgccggcaacacctcaaacatcatcaaagccgcggtgacgc

SEQ ID NO: 186264 - DNA, 251 bp, Glycine max
ccgtaagggttgtgaagcaggcagagaagagccatggtgcacgtttccttctaccgaaactatgggaaaaccttcaagaagcctcgtcgtccgtacgagaaggagcgtttggacgccgagttgaagctggtcggtgagtacggacttcgctgcaagacggagttgtggagggttcagtacgctctcagccgcatccgtaacaacgccagaaatcttttgaccctcgacgagaagaacccgcgccgtatctt

SEQ ID NO: 186265 - DNA, 253 bp, Glycine max
gtaccataacaatacaacagttggagattaacctccgtgcggtcatcgtacaagaggcaattagtgctcatagattcattcatattagattaccatgatgcattcttcccgtatttgacgaagataaacagcctacctattgcaaaagcttatgccacaaggacaatcctgttcttgaaagacgatggatctttaaagccacttgctatcgaattaagcaagcctgcaacagtgagtaaagtggtgttgcctg

SEQ ID NO: 186266 - DNA, 241 bp, Glycine max
gctacaaacaaggtgcacttcattttcaagcttaagaatccaaagactggggagtatgttgaacaccatctcaagtatcctccttctgtcccatctgacaaactaactcatgtatacactgcaattctgaagcccgataatgaattgcaaattttgattgatggtgaggagaagaaaaaggcaaatttcttgtcttctgaggactttgagcctcctcttatcccttccaagacaatccctg

SEQ ID NO: 186267 - DNA, 247 bp, Glycine max
agactccaaaacagttaaccaacaagcttacttttatgccagagacctcgaagtccatcccaaggacacatttgtgttcagtatagatggcaccgtactctctaatattccatactacaaaaaacatggatatggggtggagaaatttaactcgaccttgtatgatgaatgggttaacaagggcaatgcaccggcactgcccgagactcttaagaattacaacaagctggtgtctcttggcttcaag

SEQ ID NO: 186268 - DNA, 241 bp, Glycine max
gtctggggaaatttgcgttgtttttcgcggtacagctcacacacactgaacggtaagtatggcggacaaggctgttacaatccgaacccgaaagttcatgaccaacatggctctttccaggaagcagtttgtcgttgatgttcttcatccatcgagggcaaatgtttccaaggctgaacttaaggagaagctagctaggatgtatgatgtgaaagaccctaatactgtatttgtcttcaaa

SEQ ID NO: 186269 - DNA, 244 bp, Glycine max
cacatattctttgttgcaatatcacaaacacctcgtccgtcacaatgcagctatctgtggcggccaacgctgtcgtttcaccgtcgccgttccgacctcatccccttctccggtcatccttctccggcgtctccgttaagctcactccccaatccataacgttttcacgcttgaagcccctcaccgtcttcgccgccaccaagaaggccgtcgctgtcctcaaggggacctccgccgtcgaagg

SEQ ID NO: 186270 - DNA, 194 bp, Glycine max
ttcaacaatcagcttatcccggcactggacctttggagaacttggctgctcacttggctgacccatggcacaacaacattggaaacgtcattattccacaatcgattttgccttgaaaaaaaatatatatttgtttcaatagctacctgtataactccgtgtaacaatttgtaatgaatcggatcgatcttgct

SEQ ID NO: 186271 - DNA, 246 bp, Glycine max
ctttaaagttacatagtttttcattgttttacttaatctacaatggctgcttcaacaatgactctctcttcatcatcattggctggccaagctatcaagcttgccccctccacccctgagcttggtgttggaagggttagcatgaggaaaacagcctccaagactgtttcctcaggaagcccatggtacggcccagaccgtgtcaagtacttgggcccattctctggtgagccccatcctatctca

SEQ ID NO: 186272 - DNA, 245 bp, Glycine max
caagtgttgtctcaaagacagacactctttctccttactgtcatcaaactcggaagatactgatatgagttcaaaaaccgagacttttacctttgatgaggtggctaatcacaatcacaggtaggattgctggattatagtcaaagggaatgtgtatgatgtcaccccattttctggatgatcatccaggaggtgatgaagtcttagtgactgcaacagagaaggatgccaccactgattttgaa

SEQ ID NO: 186273 - DNA, 243 bp, Glycine max
gtggaatatttgcgtatctgaattacgacgtgaacagagacagacgatacatcttgcaggttctcttcaatggcctcagcagattggagtaccgtggatacgattccgcaggcatcgcgatctacgattccaatttctctccccttgttttccgtcaagaaggaaacattgaatcgctcgtcaaatcggtttatcaagaagtgggagacactgaactgaacttgggggaatgcttcggcactc

SEQ ID NO: 186274 - DNA, 242 bp, Glycine max
ctcgagccgtataatttgcacaattttgtatatcccccttgttcttatagattggcattaacgtgcttctcctccattcctccggcatgcgttttcacctcataatttcgttaaagagttcggtgagccactcaagacctctatctccaagagttttccacacttcaataggcacaatgtctggccccaccgccttaccattactcattcttttcaacgcttcctttacttcctgtttctga

SEQ ID NO: 186275 - DNA, 240 bp, Glycine max
gcagtgctttcacttgttgctgctggtttgaccactggctactctgttcaagctgtgcttgctgatgccaaacctatcacagttggaccacctcccccaccttctggcggattacctggaacattgaactcagatgaaccaagagaccttaagctgccattgaaagataggttcttccttcaaccattgtctccaactgatgctgcacaaagggcaaaggaatcagccaaggaaattgtt

SEQ ID NO: 186276 - DNA, 250 bp, Glycine max
gtttccactacttttcttcccttctttccagaacaacaccacaacacaaacagagcaaaaaaagctccaccaatggcgggttacagagccgacgacgactacgactacctcttcaaggtggtcctgatcggcgattccggcgtgggcaagtccaacctcctctctcgcttcaccaagaacgagttcaacttggagtccaagtccaccattggcgtcgagttcgccacccgcaccttgaacgtcgattcca

SEQ ID NO: 186277 - DNA, 249 bp, Glycine max
ttctactccaacaaggagattttccttcgtgaactcatcagcaacgcctccgatgctttggacaagattcgatttgagagtttgacagataagagcaagctcgatgctcagccagagttgttcattcatattattccagacaagactaacaatacactgaccattgttgacagtggtattggcatgaccaaagctgatttggctgaacaatttgggacaattgctagatctggtaccaaggaattcatg

SEQ ID NO: 186278 - DNA, 240 bp, Glycine max
cctaattcacacccaaagagaaaagaaaaaaaaaacaacagtggtacgtgatgccaccgaagttcgatccctcgcaggtggtggacgtgttcgtccgagtcaccggcggcgaggtcggcgcggcgagttctctcgccccgaagatcgagtcccttgggactctccccaaagaagatcggagaggatattgctaaggaaaccgcaaaggactggaaaggcctccgcgtgacggtgaagcta

SEQ ID NO: 186279 - DNA, 244 bp, Glycine max
gaagcattagcaaaagcaagaagaactatcctaagcagaaatggcctcttcagtgatggcatctgtggccctcaaacctgcccctttcactgttgagaagtcctcagttagaggccttccctccctctcaaggaactcctcttcattcagagttgtggccagtggtggcaagaagatcaagactgacaagccttatggagttaatggtggcatggctttgagggaaggagttgatgcatctggc

SEQ ID NO: 186280 - DNA, 243 bp, Glycine max
ggcagaaggagcaacgtgttcgatcctttctccctcgacgtgtgggatcccttcaaggattttcattttcccacttctctttctgctgaaaattctgcatttgtgaacactcgtgtggattggaaagaaaccccagaagcacacgtgttcgaggctgatattccagggctgaagaaggaggaagtgaaggtgcagactgaagatgatagggttcttcagataagcggagagaggaaccttgag

SEQ ID NO: 186281 - DNA, 242 bp, Glycine max
aaaaactactttggcgaaagaagttggtaagaaagctgaggagttaaaactttttgagaaggttgtcatggcaacagtctctcaaactccaaatattagaagcatccaattgcaaattgttgataacttgggtttgaaatttgggggacgatcagaggaatgcagagcacaaagactatcagagagattagggacaggtcacaactctactaatcttggatgatgtatgggagaacctagac

SEQ ID NO: 186282 - DNA, 241 bp, Glycine max
gcatatctatgatgagttcttggagaaagcaaaggctcgtgctttgaaacgtgttgttggggatcccttcaaaaagggtgtcgaacaaggacctcagattgatgtggaacaattccagaaggtccttaggtacataaagtccggtatttaaagcaaggccacccttgaatgtgggggtgaccaaattggctcaaagggcttctttgtccagcccactgtcttctcaaatgttcaggatgac

SEQ ID NO: 186283 - DNA, 242 bp, Glycine max
  unsure (1)..(242): unsure at all n locations
tgttgatcgagataactagaaacagtgtgatgaaaatgaagttnccttgttttcttcgttgctacaatcttcgtagcatggcaatgccatgcgtacgatatgttccctctccgaatgaacactggctatggtgcccgtactccggaggtgaaatgcgcaagttggaggcttgctgtggaagcacacaacatctttcgctttgataccattcctgaagagtgcgttgaagcaacaaaggaata

SEQ ID NO: 186284 - DNA, 244 bp, Glycine max
caatttttctctcaaccggcccaatttagcataagcccagcatggccaccgcaacagcagcagccacctcgtccttcatggggacgcgcctcctggaggcccattccggggcggggcgggtgcatgcccggttcgggtttggcaacaagaaagccgccgccccgaagaaagtttccagggggtcgggctctagctccgataggcccctgtggtatccgggcgccaaggcgcccgagtacctgga

SEQ ID NO: 186285 - DNA, 243 bp, Glycine max
ctcgagccgaatcggctcgagtgaagcgcgaccttgtgactactgcggcaactccacagcacactctctattgcagagccgaaccagcaaaactctgtttctcgtgcgatcgcgaagttcactctaccaaccagctcttctccaagcacacgcgtacgatgctctgcgacgcatgcgacgattcgcctgcgacgatactctgttcaaccgacacctctgttctgtgccagaactgcgactggg

SEQ ID NO: 186286 - DNA, 247 bp, Glycine max
agaggaaccgccgcgaacttcccagagcgtgggcctggtgatcggcgtgacgggcatcgtgggcaacagcctcgccgagatcctccctctcgccgacacccccgccggtccatggaaggtctacggagtcgcacgccgtccccgtccggcgtggaacgccgaccaccctgtcgagtacatccagtgcgacgtctccgatcccgccgacgccgaagccaaactctccgccctaaccgacgtcactcac

SEQ ID NO: 186287 - DNA, 243 bp, Glycine max
ctcgagccgcactcataacacaaagcactcagcaaagctcatccttgagttaaaaaatggcagcagcttcttccatggctctctcatccccatccttggctggcaaggccgtgaagctgggcccatcagccccagaagtgggaagggtgagcatgaggaagaccgtcaccaagcaggtctcctcaggaagcccatggtacggcccagaccgagtcaagtacttgggcccattctctggcgagc

SEQ ID NO: 186288 - DNA, 241 bp, Glycine max
gatcgagataactagaaacagtgtgatgaaaatgaaggtccttgttttcttcgttgctacaatttttgtagcatggcaatgccatgcgtacgatatgttccctctccgaatgaacactggctatggtgcctgtactccggatgtgaaatgcgcaagttggaggcttgctgtggaagcacacaacatctttggctttgagaccattcctgaagagtgcgttgaagcaacaaaggaatacatc

SEQ ID NO: 186289 - DNA, 225 bp, Glycine max
gaatgatgcaggccagcttcgtggaagaactgaaatagctcctgatcaaagggaaaagtttttgcagaagtatcagcaagtgcaacaagggcatagtacccttcttaatatgccttctcttgatgggggaaaccataagcagttttctgcccagcagcaaaatccccttttgcagcagtgtaactctcatggctcatctgtctcttctcaatctggtattggact

SEQ ID NO: 186290 - DNA, 260 bp, Glycine max
ctaaagccgagcagcgagagagagaaaccctagcaaaaatgccggctggtcacggtttgagatcccgcaccagagattccttctctcgtcccttcaggaagaagggtaccatcgccctcaccacatacctcagaacctaccacgtcggcgattatgtcgacgtcaaggttaacggcgccgtccacaagggaatgcctcaaagttctaccatggccgcaccggtcgcgtctggaatgtcaccaaacgtgctgttggggtca

SEQ ID NO: 186291 - DNA, 227 bp, Glycine max
ctgacttcctgtttgtttctgatctatggcttccaaggagttctctggtctttgttccttggtttcttcactctccgagagcattttgtgcactactgggttgaaaatgtatttggtggagagcaaaggagttgtcataacatgcatgttcttggctcttttcttcttggggacatggcctgctcttttgactatgtagaaaggcgtggtcgtcttccacacaacat

SEQ ID NO: 186292 - DNA, 259 bp, Glycine max
tagctgttggagtcatcaagagtgttgagaagaaagaccccaccggagccaaggtcacaaaggctgccgccaagaagaagtgattgcattttggcaattttgctagcacatgtgatcatcaacgtggtttcaaaaaaacttgttcctttacagtagtttatctttgcagagtcttaggtgtttgttttaccagttatatttgaagtgtccgccgatttcatgtagccgtagccttcaaaactgggttcttgatcggcgg

SEQ ID NO: 186293 - DNA, 260 bp, Glycine max
  unsure (1)..(260): unsure at all n locations
tttcaaagtatttgcttttattttttggtgaaaaagtgttttgcttttgctgttgtacaagatgagtgatgagaatggcgaagaacctcgagaaaaccgtccggttccacgcttgaatgaaaggattctttcatctctgtctaggagatcagttgctgctcacccttggcatgatcttgaaattggacctggagcgccatgattttcaatngngttgtggagatcactaagggaagcaaggtcaaatacgaacttgacaa

SEQ ID NO: 186294 - DNA, 231 bp, Glycine max
cagggatcaagaaagcagtggaagaactcaatccagtgaggagaacagtttttggcatgctctacaactacaaacttggttggatgaaaaaaggatacaaacatagacaagcatcacgtttagccgatttattagccttcagaaaggtcaaagctaggcttgggggtcgtgttcgactaataatatctggtggggcagcttgagcccagaggtggaagaattcttgcgtgt

SEQ ID NO: 186295 - DNA, 261 bp, Glycine max
  unsure (1)..(261): unsure at all n locations
ctccgaatttcattttcagaagcctctttgggaatcaaattggagtgtctgaaatccaatccgaagcatgatgcattgtgcgagcattgtctcggctccgtcctacgcgttcccttttcgctctggctccgcttccactactccaactgcgatctcgctctctaagcgcagttggaagccacctccgagcatggcaaaagcccagtcagagccaccgtttctatagagaaagagaccccggaggccaatngtcccgaaacg

SEQ ID NO: 186296 - DNA, 260 bp, Glycine max
ttcattccccttatctttctctcttctctctccccgcccaaaccctaactccctaccctattccgctttctctcatccatcatgaaaggaggaaagtccaagaccgaatctaagagagccgatgccaaacttgctgtgaataagaagggcgccgccaccaagactaggaaacccgccggaaaggggaaggcagcgaaagtcctaacaagccaaagaggcctccaagtgctttcttcgttttcatggaggaattcaggaag

SEQ ID NO: 186297 - DNA, 261 bp, Glycine max
ttttagctagtgtaataaagataccaattatcgttacaaaaactccatatgtttgatttatttcaaaaaagtcagaaacgaatatgtatggaatagagatatttgaaccaccaaagtaaagaactgttacaaataaggaagaaatgaataggtttaaataggaagcaacataaaataaaccaaatttgatacccgagtatcggtttgataacccgctactagttcttcttccgcttccggtaaatcaaaaggtaatctttc

SEQ ID NO: 186298 - DNA, 237 bp, Glycine max
agaaaaacaagtagttgagaactaagaagaaggaaatggcttcctcaatgatctcctccccagctgttaccaccgtcaaccgtgccggtgccggcatggttgctccattcaccggcctcaaatccatggctggcttccccacgaggaagaccaacaatgacattacctccattgctagcaacggtggaagagtacaatgctgcaggtgtccccctcaattggcaagaagacgttcga

SEQ ID NO: 186299 - DNA, 223 bp, Glycine max
ttcggctcgagaaggattctacccgtcgctcgatgggaattgcgcttcaaggcgtctcgtagggctaatccgcctcacgagggtcaccaacggcacgtgcctttggggggccgaggcccctactgctggtcggcaaacggacggcgggcgcacgcgtcgcttctagcccggattctgacttagaggcgttcagtcataatccaacgcacgtagcttcgcgcca

SEQ ID NO: 186300 - DNA, 257 bp, Glycine max
ggcaaagacggaggagaggtcgcaaacgcaaaaatggtgaagtttctgaaaccaaacaaggccgtcattgtccttcagggacgctacgccggcaagaaagccgtgatcgttcgaaccttcgacgaaggaactcgcgagcgcccctacggccactgtttggtggcggggataaagaagtaccctgcgaaggtgatcaagaagactcggcgaagaagacggcgaagaagtcgcgcgtgaaggcgttcgtgaagctcgtc

SEQ ID NO: 186301 - DNA, 253 bp, Glycine max
tcgagcacaattcctacgcatttctactctttagtttctccaattttacttctcaattctcaacaatggccactacaacacaacttcacttaccccctggattcagattccatccaacagatgactcactcgtcatccactacctttgtcgcaaatgcgcttcgcaacatatcgcggttcccataatcgccgaattgatctgtacaagtacgacccttgggaccttccaggaatggctttgtacggagagaaa

SEQ ID NO: 186302 - DNA, 257 bp, Glycine max
ctcgagccgtctggagcttgatcctcaacttgatgcactggttgggaggcacagtcgcaaaccttggtctaaatttatcaatgcagataatcaacatcttgtgtctcctgaggcaattgattttcttgataaactccttcgatacgatcaccaggacaggttaacagcaagagaagcaatggcacatccatatttcctcaagtaagggcagctgaaagtagcagaatgaggacacagtaacttaaaacatttttgga

SEQ ID NO: 186303 - DNA, 251 bp, Glycine max
gccacaaccctgataacgacacctctaggatcaagcttccttctggtgcgaagaagattgtgccaagtgggtgcagggcgatgattgggcaggttgcaggtggagggaggactgagaagcctcttctgaaggctggtaatgcttaccataagttcagagtgaagaggaattcatggcctaaggtgcgaggtgtggcgagaacccatttgagcatcctcacggaggaggtaatcatcagcatattgggcatg

SEQ ID NO: 186304 - DNA, 194 bp, Glycine max
cttcagtttaaagttacatagtttttcattgttttacttaatctacaatggctgcttcaacaatggctctctcttcatcatcattggctggccaagctatcaagcttgccccctccacccctgagcttggtgttggaagggttagcatgaggaaaacagcctccaaaactgtttcctcaggaagcccatggtac

SEQ ID NO: 186305 - DNA, 177 bp, Glycine max
tgatgctccaagggcagtgtttcctagcattgttggtcggccacgtcacaccggtgtgatggttgggctggggcaaaaggatgcatatgttggggatgaggctcagtccaagcgtggtatactaactcttaaatatcccattgagcatggtattgtgagtaactgggatgacatgga

SEQ ID NO: 186306 - DNA, 153 bp, Glycine max
ctataagctagtttatcgtgaggagaatatgaagttgtttgttctccttgttgctgcagtagttttggtagcatggccatgccatggcgcaggctaccaaaggttccctctccgaatgaaaactggctatggtgagcgttcttcggaggtaaa

SEQ ID NO: 186307 - DNA, 229 bp, Glycine max
agaaaccgcagtgggccggctaaaatgccttacactttgctctatccttctagtgaggagggattgactttcagaggaattcccaacagtatctccatctaggggctctatggttgttgcagtactttcccgggtttcaataaaaggtgaatagagggaataggttccctacatccacctaggtagggtaaagttatgtttgggggtgattaaatgttctcgtgtttgc

SEQ ID NO: 186308 - DNA, 225 bp, Glycine max
gtttgtagtgtagcaggaacaagcagcaatggcgccgaaggtaacacgcaaggttagcagaaaccccgaattgataaggggaattggaaagtactcgaggtcgcagatgtaccacaagaggggcatttgggctatcaaggccaaaaatggtggcgttttacctcgccacgaccctaaacccaaacctgaaacacccgctaaaaaccacccaattttccccctgct

SEQ ID NO: 186309 - DNA, 196 bp, Glycine max
aaacactatagcaatagaaacatttgcttttgaaaaacccctcactcttcatcactacactagctacccacatacaatgtcgaccaaatttaaggtgtttcgtgaattcacaagcgatgactcattcctaaaccaagttatccctgaaaacatcaccgaattccaagtgactctgtccctcgctagagactacgat

SEQ ID NO: 186310 - DNA, 255 bp, Glycine max
cttctgttctgatccaggtatggcttctaaacgcatcttgaaggcgctcaaggatttgcagaaggatcctcctacctcatgcagtgcaggccctgtggctgaggacatgtttcactggcaagccacaatcatggttcctgctgatagcccatatgcaggtggtgttttcctagtttcaattcattttcctcctgatatcccttcaagccaccaaaggttgcttttcggactaaggtgttccacccaaacatcaac

SEQ ID NO: 186311 - DNA, 257 bp, Glycine max
atttaccagctatacttgttccttttgaaggttagaagtgctacaatacaaacaatggcagctactcaggaagatgtgaagcttttgggtattgtgggaagcccatttgtgtgcagggtccagattgcccttaagttgaagggagttgaatacaaatttttggaagaaaatttgggcaacaagagtgatttgcttccaaatacaaccctgttcacaagaaggttccagtgtttgttcacaatgagcagcccatagca

SEQ ID NO: 186312 - DNA, 253 bp, Glycine max
ccggcgtcttcataaacgcctttcttctccgtttccgtttcctcgttcaaattcgctttttgatctgcgaaaatgagagagtgcatctcgatccacattggtcaggctggtatccaggtcggaaatgcttgctgggagctctactgcctcgagcacggcatcgggcccgatgggcaaatgccaagtgacaagacagtggcggtggtgatgatgctttcaatactttcttcagcgagactggtgctggaaagca

SEQ ID NO: 186313 - DNA, 254 bp, Glycine max
tttttctcttattgccgggataattctttttggtggtctccttgcacctagtttggagcttaagcttggactagggggcacatcttatgcagattttattgaaagtttacatcttcctatgcaactgagtcaggttgatcccatagtggcatcattctctggaggagcagttggagtaatctcggcattaatggtgttgagataaacaatgtaaaacagccggagcagaaaagatgcaaatactgtcttggtac

SEQ ID NO: 186314 - DNA, 258 bp, Glycine max
  unsure (1)..(258): unsure at all n locations
gaaaattcagtgctgaaacatggcttcggctactctctctgtagccaaaccagcccttcaggcaaatgggaaaggcttctctgaattctctggcctccgaagctcatcaggcttccttcccttttctagaaaancttcagaggatttccattctgtcattgccttccagacctatgcagttggaagcagtggaggatncaagaagggtgtgacagaagcaaaactgaaggttgccataannggtttggaagnttngaa

SEQ ID NO: 186315 - DNA, 230 bp, Glycine max
ataatcgagacacaaagatcatagtgatcattttttaatttctcagatttatccgacgtccttgcagatccaccaaccgttatggctgccttcagcggtgatgaaacggcaccgtttttgcggttccttggcgccgcagttgccctcgtcttctccggtatgggacctgcctatggcacagcgaaaattggcgtgggttggctcccatgggtgtaataagcctgacctgg

SEQ ID NO: 186316 - DNA, 253 bp, Glycine max
gagtctgacatgtgtgcgagtcaacgggcgagtaaacccgtaaggcgcaaggaagctgattggtgggatccccctgtgggttgcaccgccgaccgaccctgatcttctgtgaagggttcgagtgagagcatacctgtcgggacccgaaagatggtgaactatgcctgagcggggcgaacagaaggaactctggtgaggccgcagccatactgacgtgcaaatcgttcgtctgacttgggtataggggcgaaag

SEQ ID NO: 186317 - DNA, 246 bp, Glycine max
agcaagctcatcctagagttttaaaaatggcagcagcctcctccatggctctctcttccccatccttggctggcaaggccgtgaagctgggcccatcagcccccgaagtcgggagggtcagcatgaggaagaccgtcaccaagcaggcctcctccggaagcccatggtacggcccagaccgcgtcaagtacttggcccattctctggcgagcccccgtcctacctcactggcgagttcccaggtga

SEQ ID NO: 186318 - DNA, 246 bp, Glycine max
cttgacatccccttcaacttctattctcttttgaaacacttagaaaagataaaaaaaatgtctgcgtcccttttacttttcctagttttttcttctcagttgatcggtggactcaatacacctctaccatctccaatctatggaaacctcgtaaccattctcagcatagatggaggtggtataaggggcatcattccagctgtagttcttgaccacttcgaaaaggctcttcaggcatgggataaa

SEQ ID NO: 186319 - DNA, 247 bp, Glycine max
ctcacgcgaagagaaacacgaactaagaatccatggcgacaccaacgacgacgaagagaaaaccggtgttcgtgaaggtggatcagctaaaacctggcaccaacggccacacgctgacggtgaaggtggtcagctccaagccggtgaagacggtgaccactcgcggcggtcgatcgtcggtgctcgcggcgcgccgtcgcgcatcgccgagtgcctcgtcggagacgaaaccggaaccataatcttc

SEQ ID NO: 186320 - DNA, 254 bp, Glycine max
gcacaacccatggccaccacctccgcattcctcctccttcccctcctcctgctgctccacctcgccatcgccgctcacggcatcggcatcaactacggcacgctcggcgacaaccttccaccgcccgcggggtggcgaacttcctgaagacgaagacgaccatcgaccgcgtgaagatctacgacgtgaacccgacatcctgcgggccttcgccggcagcggcatctccgtgacggtgaccgcccccaacggcg

SEQ ID NO: 186321 - DNA, 258 bp, Glycine max
  unsure (1)..(258): unsure at all n locations
tggaaacaggcatagcatgctacactcgcgggcctttcttgcctagtgtttcttccaagcactctccaccctaccatctctccatcttttggcttgaggagtctgaaatcgagctctttatttggagaatctctaagagtggcatccaaatcaacactaaaggtttcaaagacaaagaatacttcactcgtgaccaatgtgaaattggtgacagtctggaagatttcctcacaaaagcnacaccggntaggggntnnt

SEQ ID NO: 186322 - DNA, 221 bp, Glycine max
tgttagtgggttgaaaacgttagagaggaactttgcaacaagcatggagacagcctcagactatggagcattcacagagaaattcactttaccaccaaattctgcaccagctcttcctctcaaatcactcacctttgcagtgaaagagattttcgacacggaaggatacgtgaccggcttcgggaatcctgactgggtaggactcatcgggtggctacctc

SEQ ID NO: 186323 - DNA, 206 bp, Glycine max
cctgaattttctcgggaaaattctgcattcgtgagcactcgtgtggattggaaggagaccccagaagcacacgtattcaaggctgacattccagggctgaagaaggaggaagtgaaggttcagattgaagatgataaggttcttcagataagcggagagaggaacgttgagaaggaagataggaataacacgtgcatcgcgtggag

SEQ ID NO: 186324 - DNA, 240 bp, Glycine max
  unsure (1)..(240): unsure at all n locations
cggctcgagtcactcccttatccatttccacaccacaccatagcctcagncaacgctctctcttcagcctccattccacgctctcccacccgncagtctctgacccgaagagcgaaccataatggaagagtaaattaccggaaaccgaataaccgtttctccgtgaaagcctccgccaaagagattgcctttgacagcattcccgctctgctatgcaggccggcattgacaagctcgccg

SEQ ID NO: 186325 - DNA, 255 bp, Glycine max
aagtgcgtttcggaagcagagaccgaaatacttcgagatggcccgtacaaagcaaactgctcgtaagtcaactggaggaaaagctcccaggaagcagcttgcaaccaaggctgcacgtaagtctgctccaacaactggtggtgtgaagaagcctcatcgttatcgccctggaactgttgctcttcgtgagattagaaataccagaagagcactgagctcctaatgaggaagcttcctttccagaggttggttcgt

SEQ ID NO: 186326 - DNA, 160 bp, Glycine max
gtcttcataaacgcctttcttctccgtttccgtttcctcgttcaaattcgctttttgatctgcgaaaatgagagagtgcatctcgatccacattggtcaggctggtatccaggtcggaaatgcttgctgggagctctactgcctcgagcacggcatcggg

SEQ ID NO: 186327 - DNA, 153 bp, Glycine max
actcgagccgaatcggctcgagcacttctttcatcgcttcggatcaccaatctcatctccgatctcaaaatgcccgccgtttatggagctcgcttgaccaccttcgaagactccgagaaggagagtggatacggttacgttcgcaaggtttca

SEQ ID NO: 186328 - DNA, 258 bp, Glycine max
cgtcgctactaagagttgctgcttcttcagccactccgcacctcgcagcctctgtgccctcaacaaccatggctgaaatcgaaactaccgttccagatcccacccaaatcgacgtcaaactcttcaatcgctggagcttcgaggatgttgaggttaatgatatgtctctggctgattacattggagtgtccccatcaagcatgctacatatgttcctcacactgctggtaggtactcagtgaagaggttcaggaaagc

SEQ ID NO: 186329 - DNA, 245 bp, Glycine max
gctggagacacccttgagattttactcaccaataagctctccacagagggaacagttattcactggcatggaattagacagtatggaacaccttgggctgatggaactgctgccatttcacagtgtgctattgctcccggagaaacttttaattacacatttacagttgacaggccgggtacatacttctatcatgacactttggtatgcaaagagcagcaggactgtatggttctctgatagtg

SEQ ID NO: 186330 - DNA, 257 bp, Glycine max
gttgaacaagggtttctctgtctgcttcttcactttctctcgtttcaatcgaaaccaaaacaaaatcatgggcagaaaattcttcgttggtggcaactggaaatgcaatgggaccactgaggaggtaaagaagattgttactactttgaatgaggctaaagtccctggagaagatgtcgtagaagttgttgtgagcctccttttgtgttccttcctgttgtaaaaagtttgctgcgccctgatttccatgtttcggc

SEQ ID NO: 186331 - DNA, 265 bp, Glycine max
caaaaatatctgttgctctctaccctgcttagggttccaacttccaacccaacacttatcgttctcatgcaacaagggaaaatgaggcctattttctgtggaaattttgaatatgatgcccggcagtcagagctggagcggctttttagacgatatgggaaggttgatagggtggatatgaagtctggttttgcttttatctatatggaagacgagagagatgctgaggctgctattcgtgctcttgatcgagtagaatttggtc

SEQ ID NO: 186332 - DNA, 270 bp, Glycine max
acttctcatcaccattaacgcattcggttgtttcatagagacagtttaccttgtcatctatatcacttattgccccaagaaagctaggttctctagcttcaagatgattttcttgttcaacgttggagtgattttcttggtagttcttcttacccatgttctagcaaaagaacgaacagcccgtatcgagctccttgggtggatttgtgttgtcctctctaccagtgtgtttgcagcacctttaagcatcattaaagtggttattcgtac

SEQ ID NO: 186333 - DNA, 271 bp, Glycine max
ctataatttcagagctagctagttcacagcttcagttcgttcttgttgatcctgtgaacttatggctgacggggtggttctggtggatacatgggccagcatgtttgggatgagggttaggattgcattagctgaaaagggtgttgagtatgaatacaaggaagaaaatctcaggaacaagagtcctttgcttttgcaaatgaacccaattcacaagacaattccagttctgatccataatggcaaaccaatttgtgaatctgcaattata

SEQ ID NO: 186334 - DNA, 269 bp, Glycine max
ctcgagcgaatcggctcgaggcaaattccaattcccaattaccaattcgaaacccatattcctttcaaagaaccacattgagtgatcgtgatggcaccaaaggcagagaagaagccagcggagaagaagcccgcggaggagaagaagtccacggtgggagacaaggctccggcggagaagaagccaaaggtcggaaagaagcttccgaaggagggaggcgccggcggagaagggaagaagaagaagagaaacaagaagagcgtggagac

SEQ ID NO: 186335 - DNA, 266 bp, Glycine max
cacaaaacccaacttcatgcactccttcacgctcctcaaccacccaaattcagtgtggtctgagagaactcagaacccgcattgattccgtgaagaacactcagaaaatcaccgaggctatgaagcttgtggctgcagccaaagtgagaagagctcaagaagctgttgtcaacggaagacccttctcagagaccctcgttgaagtcctctacaacatcaacgagcagctcctaactgaggacgtagacatccctctcacaaaggtt

SEQ ID NO: 186336 - DNA, 280 bp, Glycine max
  unsure (1)..(280): unsure at all n locations
ggaattccgctcgacgtggacggttgcttccgctctccttcttctctctctcctctttctctttgcagatccaggtcgacagtttcaggcgcatgcgagggagattccgacgagcttgtagatcctccgaaggtggaggacaagctcggtgctgtgcctcatggcctttccaccgattcagatgtactnaagagcgagtcggagtcgatctcgaagagatctctccggagcaatgcggagaagtttgagttccaagcggcagtgtcacggcttatggata

SEQ ID NO: 186337 - DNA, 268 bp, Glycine max
ataggacaaatattacaatactacgtatttttgttaaaacttcttcctttgcttcggcagcaggtgcagcagcacctccagctggtgcagcagcaacggcaaccgctgcaccgccaccagacactgcagacatcttttcacttccactagcaattagctcattgaagtcttttcccttgacttcagtcaagagcaactcaatcaactcattctcagcctcagctccaactgcgccgaggatgtgtttgatgtcatcggcagaagggga

SEQ ID NO: 186338 - DNA, 270 bp, Glycine max
gtttgttgatcgagataactagaaacagtgtgatgaaaatgaaggtccttgttttcttcgttgctacaattttcgtagcatggcaatgccatgcgtacgatatgttccctctccgaatgaacactggctatggtgcccgtacactgcagatgagatacgcacattttagacgcttgctgtagacgcacaccatcatctggcgctttgagaacattcctggagagtgcgttgacgcaacaaaggtatacatccatggcgaacaatatagat

SEQ ID NO: 186339 - DNA, 267 bp, Glycine max
cggcgtagtaagcgacgaaatgcttcggggagttgaaaataagcgtagatccggggattcccgatataggtcaacctttcgaactgctgctgaatccacgggcaggcaagagacaacctggtgaactgaaacatcttactagccagaggaaaagaaagcaaaagcgattcccgtagtagcggcgagcgaaatgggagcagcctaaaccgtgaaaacggggttgtgggagagctatacaagtgtcgtgctgctaggcgaacagcagag

SEQ ID NO: 186340 - DNA, 256 bp, Glycine max
tggtggatacctaggcacccagagacgaagaagggcgtagtaagcgacgcaatgctccggaggattgaaaataagcgtagatccggggattcccgatataggtcaacccttcgaactggtgctgaatccacgggcacgcaagagacaacctggtgaactgaaacatcttagtaggcagaggaaaagataggaatagcgattcccgtagtagcggcgagcgaaatgggagcagtctaaaccggtgaaacggggttgt

SEQ ID NO: 186341 - DNA, 268 bp, Glycine max
cagatctacaaaacctgcgtactggaatctataaagaaacaatccaattaatcaaaacgcacaacgaagatcgtatgaatacgattttgcacttctcgacaaatataatttgttactttattctaagcggttattctattcttggtaatcaagaacttgatcttattaactctttggttcgagaatttatatataagttaagtgacacaataaaagctttgtctatgctgctattaactgatttatgtataggattccattcaaaccc

SEQ ID NO: 186342 - DNA, 261 bp, Glycine max
tttttgtcacaatgacttacaatatggtaacataatgatggatgaagagacaagatttatcactataattgactatgaatatgccaggtataattccattgcatatgacctcgcaaatacattttgtgaaatggtggcagattaccacagtgacacacctcatgttcttgactacacgaagtatccaggactagaggaacgttaaagatttatccgcaactatctgagttctgaaggcaataaaccaagcaatgctatagt

SEQ ID NO: 186343 - DNA, 244 bp, Glycine max
ctcgagcgaatcggctcagtgatccggagcgatgagtgaaattgagaagcagagggtaacggggaaggtgaagtacgttcatgaccagaagggttttggcttcataaccaccgacgacagcggcgaggaattcttcgtccaacagtcctccatccgattcgacggcttccgcagcctcgccctcggcgagtccgtcgatttcctaattgattccgatcccgaaggccgcaccaaggccgtcgac

SEQ ID NO: 186344 - DNA, 262 bp, Glycine max
ctcgagcgaatcggctcgaggaaaaacaagtagttgagaaacaagaagaaggaaatgcgcttcctcaatgatctcctccccagctgttaccaccgtcaaccgtgccggtgccggcatggttgctccattcaccggcctcaaatccatggctggcttccccacgaggaagaccaacaatgacattacctccattgctagcaacggtggaagagtacaatgcatgcaggtgtggccaccaattcgcaagaagaagttcgagact

SEQ ID NO: 186345 - DNA, 259 bp, Glycine max
ctggtggttgtgcagggaacaatctgcaccggcttcgttgcttcggacaacactgtctacctcaaaaccctaaaaaagggcgatgtcatggtgtaccctcagggcttgttgcacttccagatcaacgatggagagtctcaggccttggcttttgtgagcttcagcagtgctaaccctggcctccagattctggacttttctttgttcaagcgtgatttccccactgagcttatcacgcaaaccactttcattgatgctg

SEQ ID NO: 186346 - DNA, 275 bp, Glycine max
tcggaatcggctcgactcgagcgaatcggctcgaggacatagtagcacaaaactcacgcctaagttacgagattgatggaaactcaaaggcaccgcttggttctaataccaccaccatttcaaggacacttaactccaatgcttcaactagccaccatccttcatttaaaagggttctccataaccatatcacatgctcatttcacctcccccgatccttctaattaccctaactttagttttctacccttgttctatgatttatccgataccaa

SEQ ID NO: 186347 - DNA, 264 bp, Glycine max
gataactagaaacagtgtgatgaagatgaaggtccttgttttcttcgttgctacaattttcgtagcatggcaatgccatgcgtacgatatgttccctctccgaatgaacactggctatggtgcccgtactccggaggtgaaatgcgcaagttggaggcttgctgtggcagcacacaacatctttggctttgagaccattcctgaagagtgcgttgaagcaacaaaggaatacatccatggcgaacaatatagatcagactccaa

SEQ ID NO: 186348 - DNA, 259 bp, Glycine max
atcttccttagctacctagattattcacttcaattcctcacaagcaacaccgtttcttgctccaatggcagctttgtatctcccaataagcatgttggcactcattgttgttgtttctcttggtttgtggagtggtgttcaaggtgcaccacaagtgccatgctacttcttttttggtgattctttggttgataatgggaacaacaaccagctccagtctttggctagggctgattacttgccttatgggattgacttc

SEQ ID NO: 186349 - DNA, 267 bp, Glycine max
caaaaaatgggagttccagagagagaccctcttgcacaattgagcttgcctcctggatttagattttatcccactgatgaggagcttttggttcagtacctttgccgcaaggttgctggccatcatttctctcttccaatcattgctgaagttgatttgtacaagtttgatccatgggttcttccaggtaaggcagcgtttggagatcaggagtggtacttcttcagtccaagagacaggaagtacccgaatggttcacgaccaaac

SEQ ID NO: 186350 - DNA, 268 bp, Glycine max
  unsure (1)..(268): unsure at all n locations
ggcttcttcaatccctaatgcgccttctgcgttcaattctcagagctacgttggtctcagancgccactgaggaccttcaacttttcttctcctcaagctgccaaaattcctcgctcccaacgccttttcgtcgtcagagcctccgattcggagttcgaagccgccgttntcgccggtaangttccgccggcgcctcccgtnccgcncagaccggcggctccggttggaanaccggtggttccttcacttccanttcaccggcgtcct

SEQ ID NO: 186351 - DNA, 266 bp, Glycine max
gcggaagtcatcaccgtcgatggaaccctaacctcttccgagaatgacaagagcggaatctccgtcgatgccgccgcgcacggcggtgaaaagacggtgtccaacgctgaaacttccggtagcgatcctcagaagactctggagttggcgaacgagctgatggaaaaaggaaacaaggcaattaaggcgaacgattttggagaagcagctgataacttcagccgtgctctcgaaatcagagtggcgcattatggtgaacttgctcc

SEQ ID NO: 186352 - DNA, 259 bp, Glycine max
gcatttcagcagcacaccacaatggccaccaatgcattcactggcacatctctctccatgcgatctgtcattcctcaaacacaggcatttgcctcaatttctggcccgacatctgcttcaatttccagctttgggagaaagaatgtttcttttagcttgcagccacgcttaattcgccttaaaatttcctgtgctgccgctaaaccagagacagtagagaaggtgtgcaaaatagtaaagaagcagctggctatgcctg

SEQ ID NO: 186353 - DNA, 257 bp, Glycine max
gataactagaaacagtgtgatgaaaatgaaggtccttgttttcttcgttgctacaattttcgtagcatggcaatgccatgcgtacgatatgttccctctccgaatgaacactggctatggtgcccgtactccggaggtgaaatgcgcaagttggaggcttgctgtggaagcacacaacatctttggctttgagaccattcctgaagagtgcgttgaagcaacaaaggaatacatccatggcgaacaatatagatcag

SEQ ID NO: 186354 - DNA, 260 bp, Glycine max
ctttatgtgcttaagcctatcaagtatgtaggcattgaagtttggcaggttaaaggcggttcagtttttgacaacgttttgatttgtgccgaccctgattatgcaaaacaagttgttgaggaggtgtttgccaacagggagattgaaaaggaaggttttgaggaagcagagaaagtgagaaaagccaaagaggaggaggaggctcaaagagcaagagaagaaggtgaaaggcgtagacgagagagaggtcatgatcgacg

SEQ ID NO: 186355 - DNA, 264 bp, Glycine max
aattttgccaaatgtattttgtagggagctgcgcacaaggagcgttctggattcgagggtccctggacctctaatcctcttattttcgacaactcatacttcaaggagttgttgagtggtgagaaagaaggcctccttcagctaccttctgacaaggcacttttgtctgaccctgtgttccgccctcttgttgagaaatatgcatcggtatgtatgtcgtaatattttgcataacatgaatttctggaatgtagaacatttctt

SEQ ID NO: 186356 - DNA, 207 bp, Glycine max
  unsure (1)..(207): unsure at all n locations
caaaacatggatatggggtggagaaatttaactcgaccttgtatgatgaatgggttaacaagggcaatgcaccggcactgcccgagactcttaagaattacaacaagctggtgtctcttggcttcaagattatattcttgtcaggaagaacactcggacaacaggctacctacagagcacacttanagcatgctggctagcacacat

SEQ ID NO: 186357 - DNA, 279 bp, Glycine max
gctcggcattcggctcacctcgagcgaatcggctcgagaaccttgcaaattgcaatggcactcaataaggttattgccaccatcttggttctttcgctccttgcctactcaacatcattcaccaatgcatgtggcacatgccacccaaaacctactccttctccccctcctccatcagggaagtgccccaaggatacattgaagctaggggtgtgtgctgatgttctaggacttgttaatgttgttgttggttcccctgtctctagcaagtgttgtgca

SEQ ID NO: 186358 - DNA, 265 bp, Glycine max
gaaacagtgtgatgaaaatgaaggtccttgttttcttcgttgctacaattttcgtagcatggcaatgccatgcgtacgatatgttccctctccgaatgaacactggctatggtgcccgtactccggaggtgaaatgcgcaagttggaggcttgctgtggaagcacacaacatctttggctttgagaccattcctgaagagtgcgtcgaagcaacaaaggaatacatccatggcgaacaatatagatcagactccaaaacagttaa

SEQ ID NO: 186359 - DNA, 263 bp, Glycine max
ggtggatacctaggcacccagagacgaggaagggcgtagtaagcgacgaaatgcttcggggagttgaaaataagcgtagatccggggattcccgatataggtcaacctttcgaactgctgctgaatccacgggcaggcaagagacaacctggtgaactgaaacatcttagtagccagaggaaaagaaagcaaaagcgattcccgtagtagcggcgagcgaaatgggagcagcctaaaccgtgaaaacggggttgtgggagagc

SEQ ID NO: 186360 - DNA, 260 bp, Glycine max
gagaagagaagggctacacaaacacaatctctaatggcactcaggatgtgggcttcttccactgccaatgcactcaaactctcttctgtctccagacctcatctcttgcctcctttttctttctccagatgcttatcttccgtcttggatggacttaagtacgctgattcacatgaatgggtcaagcacgaaggctcagtcgccaccattggtatcactgaccatgcccaggaccatcttggagaggttgtgtatgtgga

SEQ ID NO: 186361 - DNA, 259 bp, Glycine max
  unsure (1)..(259): unsure at all n locations
gaaacagtgtgatgaaaatgaaggtccttgttttcttcgttgctacaattttcgtagcatggcaatgccaagngtacgatatgttccctctccgaatgaacactggctatggtgcccgtactccggaggtgaaatgcgcaagttggaggctcgctgtggaagcacacaacatctttggctttgagaccattcctgaagagtgcgttgaagcaacaaaggaatacatccatggcgaacaatatagatcagactccaaaac

SEQ ID NO: 186362 - DNA, 259 bp, Glycine max
aaacactcataacacaaagcacaaagcaaagctcatccttgagttaaaaaatggcagcagctgtctccatggctctctcatccccatccttggctggcaaggccgtgaagctgggcccatcagccccagaagtgggaagggtgagcatgaggaagaccgtcaccaagcaggtctcctcaggaagcccatggtacggcccagaccgagtcaagtacttgggcccattctctggcgagcccccgtcctacctaaccggtga

SEQ ID NO: 186363 - DNA, 236 bp, Glycine max
  unsure (1)..(236): unsure at all n locations
caaccggatatttccaccaaaccantttgngatgttgtanncgaataaatggcgactacnaggagcgtgggaacgttgaaggagggtgatttgaaggggaagagggtgttcgtgagggtcgatctgaacgtgcctttggatgacaaccttaacatcaccgatgacactagagtccgtgctgctgttcccaccatcaagtacttgactggttatggtgctaaagtgatcctttctag

SEQ ID NO: 186364 - DNA, 263 bp, Glycine max
gacaccgagccgattcggtcgagagagaatccgaggcgaagaccagagaaaaattaagatggaggggaaggagcaggatgtgtcgctgggagcgaacaagttcccggagagacagccgattgggacggcggcgcagagccaagacgacggcaaggactaccaggagccggcgccggacccactggttgacccgacggagtttacgtcatggtccttttacagagcagggatagcagagtttgtggccacttttctgtttctat

SEQ ID NO: 186365 - DNA, 264 bp, Glycine max
gaaggcatcgttagcagttttgtagattcaacctcaatttgcagagttacgttctaatatatttacacaagactgataagagaaaatgtctctgattccaagtttcttcggtggccgaaggagcagtgttttcgaccctttctccctcgatgtgtgggacccttcaaggattttccatttcccagttctctttctgctgaaaattcagcgtttgtgagcacacgagtggattggaaggagacaccagaagcacacgtgttcaag

SEQ ID NO: 186366 - DNA, 262 bp, Glycine max
taggcataaacacagtgatgtactacagcccaacaattgtccaaatggctggctttcaatctaatgagttggctcttctcctttctctcatagttgccggcatgaatgctgccggatcggttcttggcatttaccttattgaccatgcaggacggagaaaattggccctatatagcttagggggggtaatagcatctctgatcatcttggccttgtcattttttaaccaatcatctgaaagtggtttgtatggatggcttgc

SEQ ID NO: 186367 - DNA, 257 bp, Glycine max
gtgtgaagctatgttgggtaacttctttgtttcagattatattcctttcatgggttggattgataaactcaggggactggatgcacgtcttgaacgcaatttcaaggagatggattcgttctaccaagaagccattgatgaacacatgaattctaagaaaaaaactcccgaggaagaggatttagttgatgtcttacttcaactgaaagagaacaacacgtttcccatagatctcaccaatgataacatcaaagcag

SEQ ID NO: 186368 - DNA, 256 bp, Glycine max
cggatggactatgtcactgattttcaaattagatgcccaatgaaggagaaaaagtataacaagaaatgtgctgatgctgtcattgaatcacttggccttgatattaaaaagattgaaaggtgcatgggagatccaaatgctgattctgaaaatcctgttttgaaagaagagcaagatgcccaagttggtaaggggtcacgaggtgatgttaccatattgcctactctagttgtcaataatagacagtatcgaggaa

SEQ ID NO: 186369 - DNA, 271 bp, Glycine max
gaccaccacaacccacaagtctttacgaggtccaagaggtggtatgatattcttcaagaaagatactgtgcatggggttgatttggagcctgccattaacaatgctgtttttcctggtctacaggggggtcctcataaccacacaattggaggactagcagtttgcttgaagtatgctcagtctccagaatttaaaaattatcaaaatcaggtggttgctaactgtagagctcttgctaagcgattaattgagcatggatataaactggtt

SEQ ID NO: 186370 - DNA, 269 bp, Glycine max
  unsure (1)..(269): unsure at all n locations
ctagtttcttacaaggctctactctactgcttcaccttctgctctagaaaattcagtggtgatacatggcttcggctactctctctgtagccaaaccagcccttcaggcaaatgggaaaggcttctctgaattctctggcctccgcagctcatcaggcttccttcccttttctagaaaatcttcagaggatttccattctgtcattgccttccagacctatgcagttggaagcagtggaggatacaanaagggtgtgacagaagcaaaa

SEQ ID NO: 186371 - DNA, 263 bp, Glycine max
ctttctttgtcgaactcgtgcgaagatgcgtgagattcttcacatacagggagggcaatgcggaaaccagatcggagcgaagttctgggaggtggtgtgcgcggagcacgggatcgattccacggggaggtaccagggggacaacgagttgcaactcgagcgagtcaacgtctattacaatgaagcgagttgcggaaggttcgtgccgagggcggtgctcatggatctagagccagggaccatggacagcgtcagatctggtc

SEQ ID NO: 186372 - DNA, 265 bp, Glycine max
cagggtcatcctgaaactgatcctgtagaagatgttcttgaacaatcaacctcacagagttggggctcatccaagagtcccaagtttgaagagtccaactctagtgagcttcctttaaaaaaaaccagggtttccgtgcgtgcaagatcagaagctcctctgattagcgatggatgtcaatggaggaaatatggacataaaatagccaagggtaatccttgtccccgtgcctattatcgttgcactatggccgtaggatgcccgg

SEQ ID NO: 186373 - DNA, 262 bp, Glycine max
cagagaagcaatcagttgccaaactatttttctctctcctttttttgacttttctttctttctgcaactccaaaatgtcttccataggggcaaaaaatctagcactctcctccgcctttttgctccttttggtcggttttgcaacctcagacatcaaccaagacaaagcagaatgtaccgacaaacttcttggtctagctggttgtcttccctatgttggtggtgaagccaaagtccccgccatggattgttgctctggtat

SEQ ID NO: 186374 - DNA, 262 bp, Glycine max
acgaaactactctacaaacacaacaaaactctccaattctgaagattttcttatctcttgtctttgaaactagaagctccgtgattgatcaatggcgacaaaagaaggcaaagccataggcatagaactcggcacgacctacagctccgtgggcgtgtggcaaaacgaccgcgttgagatcatccccaacgaccaaggcaaccgaaccaccccctcctatgtcgccttcaccgacaccgagaggctcatcggagacgccgcg

SEQ ID NO: 186375 - DNA, 261 bp, Glycine max
atcgagataactagaaacagtgtgatgaaaatgaaggtccttgttttcttcgttgctacaattttggtagcatggcaatgccatgcgtacgatatgttccctctccgaatgaacactggctatggtgcccgtactccggaggtgaaatgcgcaagttggaggcttgctgtggaagcacacaacatctttggctttgagaccattcctgaagagtgcgttgaagcaacaaaggaatacatccatggcgaacaatatagatca

SEQ ID NO: 186376 - DNA, 270 bp, Glycine max
gtccttaccgaaaactagaggccagggtctcggagtgtttgggtttgtttatcttaaacaccacaaacacagaacagaggtgtagagaagaaagctcaaaaatatggcggcagagtcatcactgagggtggcgactcccactctttgcaacctcaatgggtctcagagacgaccaaccaccaccactctctctccgcttcgcttcatgggttttcgtcctcgaccctcctctcactctctcacctcctcttccctttcacacttcttcgg

SEQ ID NO: 186377 - DNA, 266 bp, Glycine max
ctttctctctaactccctcactcacactcacagttaagcaatggccgggaaaggaggaaaggggcttcttgcagcgaaaaccaccgcggctaacaaggacaaagacaaggacaagaagagacctatttctcgttcatctcgtgccggaatccagtttcctgtgggacgtatccataggcagctgaaacaaagggtccaagctaatggacgtgttggtgccactgctgccgtatacttagcctcaattcttgagtatcttactgctg

SEQ ID NO: 186378 - DNA, 266 bp, Glycine max
cccgattcaagaagaaccgcaagaagcgcggccacgtgagcgccggtcatggccgtatcggaaagcaccgtaagcaccccggcggccggggaaacgccggtggcatgcatcaccacaggatcctgttcgacaagtaccatccgggcttcttcggtaaggtgggaatgaggtacttccataagcttcgcaataaattctactcccccatcgtcaacgtcgaaaagctatggtctctcataccccaagacgcgaaggaaaaagcccta

SEQ ID NO: 186379 - DNA, 263 bp, Glycine max
ttgggattggagggattgacgctgcgtctcttcctcttctctttcgatccatccctcattcctaatcctccaatccaaccacctcagcctcacactcacatatacacatatctgaacgcgtatcgtccctcctatggcttcaaagcgcatcctcaaggagctcaaggacttgcagaaagacccaccaacttcttgcagcgctggtccagtagctgaggacatgttccattggcaagcaacaataatgggtcctgctgatagtc

SEQ ID NO: 186380 - DNA, 264 bp, Glycine max
ccacgtcctcctcgactacttcggcgccaagaagctccaccagatcaccaacggcaccgccctcgccgccaccatgtaccaggccaccggcagcgctcccggatccgccggctttgtcaacatcaccgacctccacggcggaaaggtcggcttcggcgccgaaaacaacgacggcacactctcctcaactttcgtcaaatccgtagaagaaatcccttacaacatctcagtaatccagatcagcaaagctcttccctctgccgc

SEQ ID NO: 186381 - DNA, 263 bp, Glycine max
ataacacaaagcacaaagcaaagctcatccttgagttaaaaaatggcagcagcttcttccatggctctctcatccccatccttggctggcaaggccgtgaagctgggcccatcagccccagaagtgggaagggtgagcatgaggaagaccgtcaccaagcaggtctcctcaggaagcccatggtacggcccagaccgagtcaagtacttgggcccattctctggcgagcccccgtcctacctaaccggtgagttcccaggcga

SEQ ID NO: 186382 - DNA, 262 bp, Glycine max
cgagataactagaaacagtgtgatgaaaatgaaggtccttgttttcttcgttgctacaattttggtagcatggcaatgccatgcgtacgatatgttccctctccgaatgaacactggctatggtgcccgtactccggaggtgaaatgcgcaagttggaggcttgctgtggaagcacacaacattcttggctttgagaccattcctgaagagtgcgttgaagcaacaaaggaatacatccatggcgaacaatatagatcagac

SEQ ID NO: 186383 - DNA, 262 bp, Glycine max
gtcgaatcttttgaaacccctctcgtcgtacttatccctacgacgccgttcggtgtcgacctcgtcggagcccctcaccgtggagacctcggtgcccttcacctcccacaactgcgacgcgcctccacgcgccgtggagacgtcctcggcggagctcttctcgttcttccgtcacatggcgctgatgcggcggatggagatcgcggcggactcgctctacaaggccaagctcatacgcggcttctgccacctctacgatggc

SEQ ID NO: 186384 - DNA, 259 bp, Glycine max
gcaagctcatcctagagttttaaaaatggcagcagcctcctccatggctctctcttccccatccttggctggcaaggccgtgaagctgggcccatcagcccccgaagtcgggagggtcagcatgaggaagaccgtcaccaagcaggcctcctccggaagcccatggtacggcccagaccgcgtcaagtacttgggcccattctctggcgagcccccgtcctacctcactggcgagttcccaggtgactacggctgggac

SEQ ID NO: 186385 - DNA, 263 bp, Glycine max
ggtgccttatctctgtggttatcatcttcttcttcctctttcttagatcttctctttctctacgccgcacgccgaaaccatggccggaaaaggagagggtcctgctatcggaatcgatctcggaaccacctactctttcgtcggtgtgtggcaacatgaccgcgttgaaatcatcgccaacgaccaagggaacagaaccacgccgtcttacgtcggattcactgacaccgagcgtctcatcggtgatgcggccaagaatcaag

SEQ ID NO: 186386 - DNA, 264 bp, Glycine max
ctcgagccgctttctcgcattttccctcttctttctctctcacgttttccgcttcagttttaccgggaaaatcatggtgaaaggtccaggcctctactctgacattggcaagagagctcgcgatcttctgttcaaggattatcagaatgaccacaagttcaccatcaccacttacacttccaccggagtggaaatcacttcaactggagtcaggaaaggtgagatatatttggccgatgtcagcactaaggtgaagaacaagaa

SEQ ID NO: 186387 - DNA, 264 bp, Glycine max
gactttcattgctcctctctcgctctctatcttccacttcttttcaagctccttctctacttcactcactagggagaaactctggcaagtggggaaactttaacagattcagcactgcagcagcagttgaggatttaatcactccacaagttccaataacatacactacccatctgataaatggacaatttgtggatgctgcttcagggaaaacttttccaacatatgacccacgcacaggagaagtgattgctcaagttgctg

SEQ ID NO: 186388 - DNA, 264 bp, Glycine max
atcacacacaactacaagaaagaacttccttataaccaaaaccaacaacaactatggcaagttatcagaagcattacgatgatcagggtcgcaaggtcgacgagtatggcaatgttgagaggcaaactgacgaatatggcaacccggttcatgccactagtgtcacttatgtagccaccaaaagtgttggtggctacaatgatgacgctaataagcaacatgatattactggtgtctatcccgagaaagacaccggtagacatc

SEQ ID NO: 186389 - DNA, 264 bp, Glycine max
caacttacggctaaattctcaaagatttaaactttgtctcagagtttccaaattcacccaaccccagagagaaaatgtctctaatcccaaatttcttcggtggcagaaggagcaacgttttcgatcctttttccctcgacgtctgggaccccttcaaggattttcctttcccaaacactctttcttcagcttcctttcctgaattttctcgggaaaattctgcattcgtgagcactcgtgtggattggaaggagaccccagaag

SEQ ID NO: 186390 - DNA, 260 bp, Glycine max
ttcaaagaaggcgtcttcataaacgcctttcttctccgtttccgtttcctcgttcgaattcgctttttgatctgcgaaaatgagagagtgcatctcgatccacattggtcaggctggtatccaggtcggaaatgcttgctgggagctctactgcctcgagcacggcatcgggcccgatgggcaaatgccaagtgacaagacagttggcggtggtgatgatgctttcaatactttcttcagcgagactggtgctggaaagc

SEQ ID NO: 186391 - DNA, 261 bp, Glycine max
gccagaggaaaagaaagcaaaagcgattcacgtagtagcggcgagcgaaatgggagcagcctaaaccgtgaaaacggggttgtgggagagctatacaagtgtcgtgctgctaggcgaagcagcagagaatgctgcaccctagatggcgagagtccagtagccgaaagcatcactagcttacgctctgacccgagtagcatggggcacgtggaatcccgtgtgaatcagcaaggaccaccttgcaaggctaaatactcctgg

SEQ ID NO: 186392 - DNA, 261 bp, Glycine max
aacccttctttctttcaggttcattacttgatcagtgtcaaaagggtagttgcaaattgcaatggctaagcatgatgttgagggtggttccttctcagcaaaggactaccatgatcctcctccagcacctttgattgatgctgaggaactcacacagtggtccttctacagggctttgattgctgaattcattgccacattacttttcctttacatcacagtgctcactgtgattggttacaagagccagagtgatgtcaa

SEQ ID NO: 186393 - DNA, 260 bp, Glycine max
ggcaatgcttggtgcccttggctgcaccttcccagagatccttgagaagaatggtgtcaaattcggcgaggccgtgtggttcaaggccggtgcacagatcttctcagagggaggccttgactacttgggcaacccaaacctgatccatgctcagagcatccttgctatctgggctgttcaggttgtgctcatggggtttgttgaaggttacagagttggtggaggaccacttggtgaaggacttgacccaatctaccctg

SEQ ID NO: 186394 - DNA, 261 bp, Glycine max
attgaaagtgactgaggaagtggagaggcaagtggctgtgactaggcctgtgagaatgcattggactggctgccccaacacttgtggccaggtgcaagttgctgacattggtttcatggggtgcatggctagggatgagaatggtaaggccactgaaggtgtggatattttcctgggagggagaattggaagtgattcacatctagctgaggtgtataagaagggtgtgccttgcaagaacttggtgcctattgtggtaga

SEQ ID NO: 186395 - DNA, 266 bp, Glycine max
caaacttccgattgggctcaacaagaagaagaacagagcctcgctgaaaccgaagcgggcctggaaagttgggagcccaacggcgaagacgccggcgatgagagcttcgtcgaaccgccggaagaggccaagctcttcgttgggaacttgccttacgacgttgatagccagaaattggccatgcttttcgaacaggccggaaccgttgaaatcgctgaggttatttataacagggaaactgaccagagtcgcgggtttgggtttgt

SEQ ID NO: 186396 - DNA, 266 bp, Glycine max
cttctgttctgatccaggtatggcttctaaacgcatcttgaaggagctcaaggatttgcagaaggatcctcctacctcatgcagtgcaggccctgtggctgaggacatgtttcactggcaagccacaatcatgggacctgctgatagcccatatgcaggtggtgttttcctagtttcaattcattttcctcctgactatcccttcaagccaccaaaggttgcttttcggactaaggtgttccacccaaacatcaacagcaatggca

SEQ ID NO: 186397 - DNA, 262 bp, Glycine max
ctcacttccttgcctactacacattcttcatcacttcattcaacatttctccccttagcttgtttcaccaatggctgctgcggttagtgctgcagtctcttttccatccaccaagtctacctctcttccaagcaggacctccctcattgccccagagagagttgtgttcaagaaggcttcattgcaaaacagagatgtttctagcagtggacgggtagtttccatcagagctcaagtcaccactgaggcaccagccaaggtt

SEQ ID NO: 186398 - DNA, 261 bp, Glycine max
gtttacaccgagcagccacacctcccgcagcagccatggttctcaaaactgaactatgccgattcagtggtgccaagatctacccaggaaagggcatcagatttgttcgttgtgattcttaggtttttcctgtttgcaaactcaaaatgtaagatgtatttccacaatcgcctgaagccttcaaagctcacctggactgcaatgtacagaaagcaacacaaaaaggacattgctcaagaagctgtgaggaagaggagacgt

SEQ ID NO: 186399 - DNA, 253 bp, Glycine max
aatcattgagggatggcatatattccaaggaagtggttagtgtgtcaaagattttaaggggaattcctgggaatgataaatgtgctgagtgcagtgctcctgatccagactgggcatctctaaaccttggcatattgctgtgtattgaatgctctggagtgcatcgaaatcttggtgttcatgtctcaaaggtgagatctataacattagatgttagggtttgggaaaataccgttctagagttatttgataa

SEQ ID NO: 186400 - DNA, 262 bp, Glycine max
cttcttcttttcacactgccgctgcaacaatggcttcagagaagaaactttcgaacccaatgagggagataaaagtgcagaagctcgttctcaatatctctgttggcgagagtggagatcgtctcaccagagccgccaaggttcacttcactcattgctcccgctttttttttttttgataaatttttaattccggttttcctccttgcaggttttggaacaatttgggggccaaaccccagtgttttccaaagcagggtac

SEQ ID NO: 186401 - DNA, 261 bp, Glycine max
gggaagaagaacttagctacaagctaaggaaggatcaaagagaatggctcaagcaatggcatcaatgactagcttacgtggttcctctcaggctgtgttggaaggtagccttggctccacacgcttgaatgtggggagtggaagcagggtggcctcagtcacacgtgcagggttcacagttagagcacagcaacaacaagttaatggtggtgaggtacaaagtagccgtagggcagtgctttcacttgttgctgctggttt

SEQ ID NO: 186402 - DNA, 257 bp, Glycine max
agagaatgcaaatctggagtttgtgggggtgattagggcaaagcagcaggtggtggaagggttcatatactacatcactttggaagcaaaagatggtgaaaccaaaaatgtgtatgaaacgaaggtgtgggtgagatcatggttgaactccaaggaggtcctcgaattcaagcccatcagtattaatcctctttcggtgtcggtctagtctttataaggttacagaaataaatggtcgcaaggcgaaagttgtacta

SEQ ID NO: 186403 - DNA, 259 bp, Glycine max
agaaaaacagatagtgtgggagagagaagagcggaagagaaaatgacgaccaggttcaagaagaacaggaagaagagaggtcacgtcagcgccggacacggccgtatcggaaagcaccgcaagcatcccggaggtcgcggtaacgccggtggcatgcatcaccaccgtatcctcttcgacaagtaccatcctggtttcttcgggaaggtaggcatgcgctacttccacaaacttcgcaacaaattctacaatccgatca

SEQ ID NO: 186404 - DNA, 258 bp, Glycine max
tgaacaatgatgagctacatgtggttatgttcccattgccttgcatttggccacattagtccatttgttcagctctccaacaagttgttctctcatggtgttcatgtcactttcttgtcagctgcatccaacattcccagaatcagatcaactcttaatctcaatccagccatcaatgttatctcactaaagttcccaaatggtataaccaacactgctgaattgccacctcacttagctggaaatctcatacacgcc

SEQ ID NO: 186405 - DNA, 258 bp, Glycine max
cgaatatcttgttgtttggagcgatccgagaaaaactctgtaaacatgttggtttaccaggacctccttacaggtgatgagcttctctctgactccttccgttacaaggaaattgagaatggaatgctgtgggaagttgaggggaagtgggttgttaaaggagcagttgatgtagacattggtgcaaacccttctgctgagggtggaggagaagatgagggagttgatgatgcagctgttaaggttgttgacattgtt

SEQ ID NO: 186406 - DNA, 265 bp, Glycine max
ctactactcactcactgcagatctcaattgcatcgctgtccatggctaccatcgttagcatcaaggcccgccagatcttcgacagtcgtggcaatccaactgtcgaggtggatttgacttgctccgatggtacttttgccagagctgctgttccaagtggtgcatccactgggatttatgaggcccttgaattgagagatggaggatctgactaccttggaaagggtgtatcaaaggctgttgacaatgtgaacaccgtcattgg

SEQ ID NO: 186407 - DNA, 202 bp, Glycine max
tcaaaactcattttccagaaaagcgtgctgctgaaatcttacatggtcttggctttgacaagcaaatgcatgcaaagaatacacgtgatttttccggtggctggagaatgaggattgcattagcgctaactctatttatggaaccaaccatttcttctacttgatgaaccaaccagtcaccttgactttggaggctgtgtgt

SEQ ID NO: 186408 - DNA, 260 bp, Glycine max
ctgctatcgaatactcggataaggaggaacatcttttcaatggcgtcccaaattacccgtgagtcgtcttgaatcaatacattcgtacctgctacccagactaagttgcgtgaactcttgggaaaacttaaacaagagaatgtgaactccttaactatacttgtgatgggaaaaggtggtgttggaaaatcttcaactgtgaactccatcattggggatagagtggtttcgattaatcctttccagtcggaagggccaag

SEQ ID NO: 186409 - DNA, 261 bp, Glycine max
cttgactagagaaagagagagagagagcttcgaatcgaaactcagaacgtagaaaaaaacacaaatcacaatcgctatggctaggtacgaccgagcaatcaccgtgttctcccctgacggccatctcttccaggtcgagtacgccctcgaagccgtccgcaagggcaacgccgccgtcggcgtccgcggcaccgacaatgttgtcctcggcgtcgagaagaaatccaccgccaaactccaagactccaggtcggtgaggaa

SEQ ID NO: 186410 - DNA, 261 bp, Glycine max
tgttcagtgtctaatagagaatctgtaaaataggaagcaactagtgtgcccgaatcgcccttgcctgtccaaaacaagcctcctgagcagataactatgccgagacaagaagccaaacaagagggaatcatcagaaatagaaccggaaaaggaacaggataagaagaaacagaagaaacgtggttcagtgaagagagtttctagcgcagggcttcgtgttgattctgtgttgcaaagagagaccgataatttcaaggagtt

SEQ ID NO: 186411 - DNA, 260 bp, Glycine max
ggcggaggagaagagggagcaactctggagttcactccgacgtgggttgtggccgccttttgcacagtcatcgtcgccatttccctcgccgctgagcgcctccttcattatggcggaaagtttctcaaagccaaggaccagaagccgctctacgaagctctccagaagatcaaagaagagctgatgcttttggggttcatttccctgcttttgacggttacacaaaacggcattaccaaaatctgcgttcgaccctcttt

SEQ ID NO: 186412 - DNA, 263 bp, Glycine max
tgtgtctcacagggtctgtgacacacagactcacttccaagttccaagctttggccatttattcccactgtttattgagaacaactgcacgaacatggcacagattttggctccctctacgcaatggcagatgagaatctcaaaatcctctcccaatgcaagtcccattacatcaaacatgtggaattctttattgtggaaacaaaataagaaagtttcacccacaagttctgctaaatttagagtgatggcaattaagtctg

SEQ ID NO: 186413 - DNA, 277 bp, Glycine max
agcacttgcaaactagtcttgttttcggaacatcatcacttacattacactggtggtaatggcagctgcactacaagcagcagctactttcatgcaacccaccaagttgagcaggagcaacactttgcagcaaaagtctactcagtccatttccaaggcttttggttgggaactgttggagctaaaaaggtcacatgctcccttcaggctgatcttaaggacttggctcacaactgtgttgatgcaaccaagattgcaggattcgcccttggcacct

SEQ ID NO: 186414 - DNA, 282 bp, Glycine max
cctcgagccgaatcggctcgagcaaaggttgctgtaggagataagaacccagtagtgctaagacgctaacacctgcagtgaacacatggcctctggcatcagcatctctgctcaagtcttcacttgttcttgacaagtctgagtgggtgaagggacaaacccttcgccaaccttctgcatcagttgtgagatcgcaccccaccaccccatcagggctcaccatcagagctggttcctatggctgatgagctcgtttaagacgcgaaaacattggcttcacca

SEQ ID NO: 186415 - DNA, 272 bp, Glycine max
accatcactgcagcattagggtttatcatctgcttcaatggggaagggaacagggagcttcggtaagaggaggaacaagacccacactctctgtgtgaggtgtggccgccgcagcttccacctccagaagagtcgctgcgccgcttgtgctttccccggtgcacgcacgcggaaatataactggagcgtcaaggcaattcgcagagagaccaccggaactggcaggatgagatattgcggtaagtgcctcgcgtttcaagaatggctcagag

SEQ ID NO: 186416 - DNA, 275 bp, Glycine max
acccttcccaattgagaaggcccccactaagagaattgcaagtgtaaatggtggggtgaagatatctgaactgttgaagtatacggttagaggctttgtctttgagggcggcgaaatgctggaagatctatcaaacgttgtttcagatgcatgtatatgtcttcagaacaacaacatacctttcaatgttcttatctctgactgtggaaagcaagtgtatctgttaccacagtgttatgcagagaaacaagctcttggagaagtgaatgctgagc

SEQ ID NO: 186417 - DNA, 274 bp, Glycine max
cctcggtgttgctcagagatggcatgaccagagcacccgttgttcggttaccctccgctcagcgcgccgcgcagttgaagttcttcttggaggatcctctcaacttcgattcgcttgctgtcgttttcaataagtcaagcagatttgccaggttgcagaacattcagtgtgctattgcgggcaagaatctgtacatgagattccgatgcagcactggtgatgccatggggatgaacatggtgtcaaaaggtgttcaaaatgttcttgattttct

SEQ ID NO: 186418 - DNA, 272 bp, Glycine max
tccagccacacgcttcagaagacatggcctcattgggtgggttacaaaatgtgagcggcatcaattttcttatcaaagagggtccaaaagtcaatgcaaagttcgagctgaagccgccaccatatccactgaatggtttggagccggtgatgagccagcagacacttgagtttcactgggggaagcaccacaagacttatgtggaaaatctgataaaacaagttgttgggacagagcttgatgggaagtcactagagagttattgtcacatc

SEQ ID NO: 186419 - DNA, 272 bp, Glycine max
cgtcttcgagtttcacagcgaagtcgtaggagggtttcaaaagatggagaacatgcagagcttctggcaattgggcgatgaactccgtggagactcaaaagcatcggaggatcacaaatggttaatggttgctccgaaattggcggaacagacaagattgaagggggagcgtgtgaaaaaccttgatctttcaaagggccccattgaaacaaagtcaagggataaatttgggttccaggaagagaacaaatttgattctcttaacttaagca

SEQ ID NO: 186420 - DNA, 273 bp, Glycine max
gccgctggggtggaaaagggttcaaaagaccccaaggcggaaatggtaggaaaggtcacgattgatcaattgcgtacaattgctgctgaaaagctaccggacttgaattgctcgagtatcgaatcagctatgagaattatagcgggcactgcggcaaacatggggattgtggttgatcctcctgttcttgaacccaaacagaaggaatttgtgtagagaaatttcagtttggccgagtgtaaaatcgcgcaggacatatttactgacttgttt

SEQ ID NO: 186421 - DNA, 273 bp, Glycine max
gttaatttgcaccttttgtttctctctagaaattagaagttcatgcttaaactttaccttgatacttctttctcgcatgaattttcgaacattgaacaggaaattaaccatggctcaacctgcaagcctcacaagaataggccttgctggcctggctgtgatgggccaaaaccttgctctcaacattgctgagaaaggctttcccatttctgtctacaaccggaccgcgtccaaggttgatgagacagttgaaagagcaaaacaagaaggaaa

SEQ ID NO: 186422 - DNA, 272 bp, Glycine max
caggctgctaagagcattgtggcaagtggacttgccagaaggtgcattgtgcaagtgtcttatgccattggtgtgcctgagcctttgtctgtgtttgttgacacctatggcactgacaagatccatgataaggagattctcaacattgtgaaggaaaactttgatttcaggcctggtatgatctccatcaaccttgatctcaagaggggtggaaataacaggtttttgaagactgctgtctatggacactttggaagagaagaccctgactt

SEQ ID NO: 186423 - DNA, 247 bp, Glycine max
  unsure (1)..(247): unsure at all n locations
ggctcgagcaagtgtttctgtaaccatggcatccaacactctacctgnatcacaaccccttctcacgtatgctcaggaccaagtgggattttcagttcctcacaggcacttcttgtgaagccagtgaagaggcagatgatggggaagagcaagggattgagaattgcatgccaagccaccagcatttccgctgatagagtccctgacatgggcaaaaggcagctcacgaatcttcttcttcctggtg

SEQ ID NO: 186424 - DNA, 271 bp, Glycine max
gcatgaggaagaccgtcaccaagcaggtctcctcaggaagcccatggtacggcccagaccgagtcaagtacttgggcccattctctggcgaggccccgtcctacctaaccggtgagttcccaggcgactacggctgggacactgctgggctttccgcagactcagaaaccttcgccaagaaccgtgaactcgaagtgatccactccaggtgggccatgctcggagacttgggctgcgtcttcccggagttgctgtcccgcaacggggtgaa

SEQ ID NO: 186425 - DNA, 258 bp, Glycine max
gatcgagataactagacacagtgtgatgaaaatgaaggtccttgttttcttcgttgctacaattttcgtagcatggcaatgccatgcgtacgatatgttccctctccgaatgaacactggctatggtgcccgtactccggaggtgaaatgcgcaagttggaggcttgctgtggaagcacacaacatctctggacttgagaccattcctgaagagtgcgttgaagcaacaaaggaatacatccatggcgaacaatatag

SEQ ID NO: 186426 - DNA, 269 bp, Glycine max
gtgaaatgggttggaaagctgctgagaaactcattaggcactggaaagttgtcagaggggataatgttatgataataaggggcaaagataagggcgagactgggactattaagcgtgtcattcgctctcagaatcgtgtcattgttgagggtaaaaatctggtgaaaaagcacatcaagcaagggcaaggtcatgaagggggcatctttacagttgaagctccaatccatgcctccaatgtgcaagttcttgacccagtgacagggaag

SEQ ID NO: 186427 - DNA, 271 bp, Glycine max
acaaaatttagcagagttcaaaacaccaaccaagtaaagtaaagaagggaagatgtcactgataccaagtttcttcggtggtcgaaggagcaatgttttcgaccctttctcgctcgacgtatgggaccccttcaaggatttgtctttcccttctgctgaagattcagctttcttgaaaacacgagtggattggaaggagaccccagaagcgcacgtgttcaaggctgatattccggggctgaagaaggagcaagtgaaagtggagattgaa

SEQ ID NO: 186428 - DNA, 278 bp, Glycine max
cgcctcgagatcatggttaggctatagtgctcttctgcctgaataatgaggagagaaaaccgcacgctgtggttactccatatccagctcaaggacatgtgaaccctttgttaaaactagcgaactgcttcatctcagaggctttcacataacctttgttcacactgagtaccactacaagcgtttgctcaagtcaaggggtcctaatgcccttgatggcctaccagattttagatttgagagcatcccagatggtcttcctccattggatgatgata

SEQ ID NO: 186429 - DNA, 268 bp, Glycine max
gttggatttgtaggaggaagtaagaaaacacaacacgaatttcattgcagagtgttattttgagtatcagcatcaatggctccaattgcagtgggaaacgtgattccagacggcattttggcttacttggatgaagaaaacaaaccccaaactgtctccattcactctctcgccaccggcaagaaagtcatcatctttggggttcccggtgccttcactcctacttgcagcttgaagcacgttcctggcttcattgagagagcagaag

SEQ ID NO: 186430 - DNA, 268 bp, Glycine max
attttggctcatttaaggcagttcctcccataccaggggccttcctttgcattgttggagatgttggacatgtttggagcaatggaaaattttggaatgtcagacatcgtgtaatatgcaaggaaacgggtactcgttattcatttggtgcatttatgttatcaccaagggatggtaatgttgaggccccaaaaaaattggtggaagttgaccatgtacaacgctatcgaacatttaagtacgaagatttgagggatttcagaatcac

SEQ ID NO: 186431 - DNA, 266 bp, Glycine max
cttatcctgtttctttcaatggaagtcatttctgcttctagcttgaatcccaacgctccgatgttcgtgccactcgcctatcggacggtggaggatttctccgaccagtggtgggacctcgttcactcctccccctggttccgcgactactggctccgcgagtgcttccaagatccccagttccaaaacgacgacgctttcgacttcgactttgacctagatctccaagatgaagatgaaaaggaacgaaaggaagggaaggaggt

SEQ ID NO: 186432 - DNA, 265 bp, Glycine max
gccttcctatgaccggaatcagctccatgccgcggtggtggagttgtattgcggcgagggggcggagattaagtactccacggtgcagaattggtacgctggggatgcagaagggaagggtggggtatacaatttcgtgacgaagagagggctgtgtgctggtgccgggtcgaagatatcgtggacgcaggtggagacgggttcggcgatcacgtggaagtacccgagcgttgtgttggagggagatggcagtgtgggggagttt

SEQ ID NO: 186433 - DNA, 268 bp, Glycine max
gctatatagcataaacatttgagtcttcattgcacaatgtcgacctcttccattaacgggtggtgcctctcttccatctccccagccaaaacctctctcaagaaggccacattaggcccttctgtcttcgcaaccgttagcactccttcttctccttcttcttcttcttcttcttccttcccttctctcattcaagacaggcctgtctttgctgcccctgcccccatcatcaccccaactgtgagagaggatatggcaaaggaatacg

SEQ ID NO: 186434 - DNA, 266 bp, Glycine max
atcagcacaacaactcactcactaagctaaacaatttcatcaagcctgccatggcttcctcgtgtgcttcctctgccattgcagctgttgccatctccacaccaagttcccagaagaatggatcactcttgggaagcacaaaagcttcttttcttagtgggaggaaactgaaggtgaacagttttacagcaccagttggagcacgatccagcactacagtgtgtgcagttgctgagcctgataggcctctgtggttcccaggcagc

SEQ ID NO: 186435 - DNA, 265 bp, Glycine max
ctcgaaccgtgaggatggtatcttcaaggaggtcttacgtaagaagcctgattttcatcactaaccatggccaactattagtaatgccgcaaatgattttttgaaaacattactagtaaaggatcctcgggcgagattaactgcggctcaaggtttatcacatccatgggttagagaaggaggtgaagcattggagattcctattgatatatctgtcctcagcaacatgcggcagtttgtgaaatatagtcgaatgaaacaattt

SEQ ID NO: 186436 - DNA, 267 bp, Glycine max
ctgcaaaagagcgtcgtagtcgcaaccctaatcagaacaagcgcagcttcaagcgagtgacagccaccagccatgggtcgtatgcacagccgcggtaagggtatatcctcttctgctttgccctacaaaaggacacctcctagctggctcaagatctcttcgcaagatgtcgaagaaaatatctgcaagtttgcgaagaaaggtttgaccccgtctcagattggtgtcattctcagagattctcacggtattgctcaggtcaatagc

SEQ ID NO: 186437 - DNA, 267 bp, Glycine max
cttctttttactctctctctgtctctctctacgctttctcgttcgagcatccctcaagggatccactaactgaaggagaaatggggttgacattcaccaagcttttcagccggcttttcgccaagaaggaaatgcgaattctgatggtgggtctcgatgcagctggtaagaccaccatcctgtacaagctcaaacttggagagatcgttaccacaattcccaccattgggttcaatgtggagactgtggaatacaagaacattagtt

SEQ ID NO: 186438 - DNA, 259 bp, Glycine max
acggcgtcttcataaacgcctttcttctccgtttccgtttcctcgttcaaattcgctttttgatctgcgaaaatgagagagtgcatctcgatccacattggtcaggctggtatccaggtcggaaatgcttgctgggagctctactgcctcgagcacggcatcgggcccgatgggcaaatgccaagtgccaagacagtttgcggtggtgatgatgctttcaatactctcttcagcgcagactggtgctggaaacacgtgc

SEQ ID NO: 186439 - DNA, 266 bp, Glycine max
  unsure (1)..(266): unsure at all n locations
ggcttcttcaatccctaatgcgccttctgcgttcaattctcagagctacgttggtctcagagcgccactgaggaccttcaacttttcttctcctcaagctgccaaaattcctcgctcccaacgccttttcgtcgtcagagcctccgattcggagttcgaagccgccgttgtcgccggtaaggttccgccggcggcctcccgtgnccgcccagaccggcggctccggttggaacaccggtggttccttcattccattcancggcgtc

SEQ ID NO: 186440 - DNA, 267 bp, Glycine max
actcgagccgattcggctcgagaacgcgatctctctctattctttgaaaccaaagttcaaactcacgtcttccctgggttctataccgaaatcaacgacgatgagttccacagaggcagcagccacagagaagaaaggtggaagagggaaaccgaagacttcaaagtccgtttcccgttcctccaaagctggccttcagtttcccgtcggccgtgtcgctcgctacctcaaggccggtcgctacgcccagcgcgttggctccggttc

SEQ ID NO: 186441 - DNA, 265 bp, Glycine max
tgcaaaacgagaagtatccaacaatgactaccacccgtgttgctatctgtctttgctttgcattcctttactacgcggctgaaggagccaaggttagtttcaataacaagtgctcatacacggtatggccaggaaccctaaccggtgaccaaaagccccaattatcaacaactggtttcgagttgggtccaggagcatccaactctgtggaccttccatctccatggtccggtcggttctgggcacgaacaggatgctccaacaa

SEQ ID NO: 186442 - DNA, 268 bp, Glycine max
ggaagaaccaccactaccttatccatttccactcctcaccaagccccaccatggcctcaaccaacgccctctcttcagcttccattctacgctctcccaaccgccagtctctgaccagaagagcgaaccacaacggaagagtaaattaccgtcaaccgaatagccgtttctccgtcaaagcctccgccaaagagattgcctttgaccagcattcccgctctgctatgcaggccggcattgacaagctcgccgacgccgtcgggctcac

SEQ ID NO: 186443 - DNA, 273 bp, Glycine max
cttaactgtagaaaagaaaaaccgaagatgagcttgttgaatgaggagagaaaaccgcacgctgtggttactccatatagccgcaacagatgaatctgatcgcctcctgaagatggaagagactttacataagcgagtcattggtcaggatgaagcagttaaagccattagtcgggctatccgtcgagctcgggttggactaaaaaatcctaatcgtcccattgccagcttcatcttttctggtccaactggtgtggggaagtctgaattggc

SEQ ID NO: 186444 - DNA, 281 bp, Glycine max
caagaagtgtaagttttcattcaatggccagcgctcagctctcagcaatatcttcgtcgatctctacggcgtcgtttgaagggcttcgaccttcggctgttcagtttgcttccgcgggcagaattagaattggcaatctctcccaaaggtctttccggggcttggttgtcaaagccgccaccgttgttgcccccaaatacaccgcgattaagcctctgggagacagagtgctgataaaaattaaggaagcagaggagaaaactgagggtgggattttgctt

SEQ ID NO: 186445 - DNA, 277 bp, Glycine max
ttggagagaaacaaacaccaaataaaaatagcaatcatggcaaataagtaccatgttcgttctattagtttgccttctagatctcatcctagcaccattagagttgaggaggagcttagcaagatcaaaacttgggaaggaacattcacatccacatcagggtccattcacacaggcatatccttgattgaagatttgtacatttgcttggatgatcttctcaacatggcatctacccaaaaggtgatttctcaccatagaggtgaaaaatgtgtgc

SEQ ID NO: 186446 - DNA, 271 bp, Glycine max
ctcgagcagtttgcattgctacaagatatagtgctgttagaagacagtttggatcacataatggaggtctagaaacacaggtgattgattacaaaacacagcaggctaggctcttcccattgctggcttctgcttatgctttcagatttgtgggcgagtggctgaaatggctttatatggatgtgacgaaaagattgcaagctaatgatttttcaacattacctgaggctcatgcatgcactgctgggttgaaatccttgactactacggc

SEQ ID NO: 186447 - DNA, 268 bp, Glycine max
ctcgagccgcaattaaaagcaatatagtttgtttaattgttgcttcatttctattgtgtgactggcatttgggaagttcattatgaatataggggtagtggcaatggttctgggtttatggattcgggttggatttgcacaacaagtaccttgctactttatttttggagactctttggtggataatgggaacaacaaccagcttaactcactggctaaggctaattatctcccttatgggattgacttcgctggtggcccaactgga

SEQ ID NO: 186448 - DNA, 263 bp, Glycine max
ctctcttcctttggcttgactccgtgtgaaagattacaactccaccggcaacggttttcaagggtgaggtaattgctggtctaaattaaccatactgtctaatttgactcctgagattgctagtgagtaatgggcatagacatttatatagctcatctcaatgtttgacggtgaactgatcagaactggaatcatatgcatatggatcaacaatatgtgaaccttggtaggagtagcacttcagacaatggttcttttattta

SEQ ID NO: 186449 - DNA, 272 bp, Glycine max
aaagaacctttgagatttggggatttgttgccacgttcatctttaaggcttggctgaacaaccagaagttctcttacaaaggaggaatgaccgaggaaaaaaaaaccttaaggcgaaaggcccttgccaagtggctgaaggaaaacattctgagattaggtcctacattcatcaaaattggccagcagttctccactagagtggacattcttcctcaagaatatgttgaccagttgtccgaacttcaggatcaagttcctccatttccctca

SEQ ID NO: 186450 - DNA, 282 bp, Glycine max
ttcttctcttgcggctagggttttagcgcacttcttctagatttaaggaagatgggtaaggaaaaggttcacatcagtattgtggtcattggccatgtcgactctgggaaatccactaccactggtcacctgatttacaagcttggaggcattgacaagcgtgttattgagaggtttgagaaggaagctgctgagatgaacaagaggtctttcaagtatgcctgggtgctggacaaacttaaggctgagcgtgaaagaggaatcaccattgatattgctttg

SEQ ID NO: 186451 - DNA, 278 bp, Glycine max
cgttgcagctctactagctagggtttcgcaagtgcgatcgaagaagaacgatggcgatggctgctgctctgcgtcgcgaaggaaggcgtttgacccaaccaatcaacgccctccgttcctctctcatctctcaagaccaatcccctcatggcgcgcgcttcatttccactcaagtggtgagaaaccgaatgaagagtgtgaggaatatccagaagatcaccaaggccatgaagatggttgccgcatccaagctgagagccgttcagaccagagctgaa

SEQ ID NO: 186452 - DNA, 279 bp, Glycine max
gctttactaggatgggttgccaacatttcctgatgaggaggcgtttgcatgcattgagagggaactaggactatctattgactctattttctctactatatctccaacggctgtagcagcagccagtttgggtcaagtttataaaggccggttgaagtactctgggaaacttgttgctgttaaggttcaacgccctgatattgaagaagctataggaatggacttctacctaattagaggtttagggtctctcataaatacatatgtggactttatcac

SEQ ID NO: 186453 - DNA, 277 bp, Glycine max
cctcgagccgaatcggctcgaggctgaaagagggactcgagaaaacacgggcgattttcaattgtgtccaaagacaatggtgtgcctttggtggctttcacactgaaagaccacacccactttgacgaattccaaatctcagactttttaaggcgctttgggtggatagtgccagcatacaccatgcccccagatgctcaacatgtcacagaccttcgtgttgtcatcagggaggacttctcaaggaccctcgcggagcgtctcgtgtccgatgtgg

SEQ ID NO: 186454 - DNA, 275 bp, Glycine max
gctctccaatacaaaataaccactcactgaatattcggtcgaagatgtccgccgccgaagaagctaaagttcccgccgtcgaaaagccggtggaggaggtgaaggcgccgaagcttgccaaggagaagaaacctaaggctccgaaggaaaagaagccgaaacaggccaaaactgcttctcatcctccatatctccagatgattaaggacgctttgattgctctgaacgagaaaggaggatcgagtccatatgcgatagcgaagtacatggaggag

SEQ ID NO: 186455 - DNA, 269 bp, Glycine max
ctctcccagaaaagaggcatcagttgcaatggctcgttacggtgagggcgacaagcggtggatcgtggaggaccgccccgacggcaccaatgtccacaactggcattggtccgagaccaactgcctcgactggtccaagaccttcttcaccagcctcctcactaacctcccaatcctcgacggcgagggtaacctcttcctcaaaacgacgtcgcttcgctccctcgacggcgaggcctacatcaatgtccgaaaggggaagatcatcc

SEQ ID NO: 186456 - DNA, 266 bp, Glycine max
cgctgattccagcaacaagcggctggtgctcgcactgtatgacgccctaaactccggcgactccgacgccgtcgtcaagatcgtcgccgccgacctcgagtggtggttccatggtccgccctcacaccagtttttgatgcgcatgctcaccggcgactccgctgccgacaactccttccgcttccttccgcagtccatcgccgccttcggctccaccgtcatcgtcgagggctgcgacaccgcccgcaacattgcctgggtccacg

SEQ ID NO: 186457 - DNA, 266 bp, Glycine max
gcagttaacaaaatttcgataagaaaagttcccaacttcagctaagagaaaatgtctctgattccaaactttttcggtggccgtaggagcaatgtgtttgatcctttctcccttgaagtgtgggatcccttcaaggattttcattttccctcttctgtttctgctgaaaatttagcatttgtaagcactcgtgtggattggaaggagactccagaagcgcacgtgttgaaggcagatattccagggctgaagaaggaggaagtgaa

SEQ ID NO: 186458 - DNA, 268 bp, Glycine max
gagccctctcttcaggtcaccatctagactgcaatcatggctgatcgaccacagcatccatcagttgttcagaagctagctggacagtcttacctggtgtccaggcttagccccaactttaactctaggaattattctgcaactggttcttacgtcaatggcggaatgcactcgcctgggttggctgttgtgtcacctgtatctccagttactgtgcatgctccagcagagaaaggagtgagtggatttctagtggattttctgatgg

SEQ ID NO: 186459 - DNA, 279 bp, Glycine max
gccttcaaatccttcgtcggcctccgccagtcatcgccggagccccgcatttcgccgcccagccaagacccgccactccccaccgcaaattccgcgtcttggcaggaaaattcagcaccaagatcaatggccggaacctccgcgtggcggtggtgggaggcggtccggctggcggggccgccgcggagacgctggcgaagggcggcgtggagacgttcctgatcgagcgaaagatggacaactgcaagccgtgcggtggcgccatcccgctgtgcatgg

SEQ ID NO: 186460 - DNA, 276 bp, Glycine max
tgccagtagtcatatgcttgtctcaaagattaagccatgcatgtgtaagtatgaactaattcagactgtgaaactgcgaatggctcattaaatcagttatagtttgtttgatggtatctactactcggataaccgtagtaattctagagctaatacgtgcaacaaaccccgacttctggaagggatgcatttattagataaaaggtcaacacaggctctgcctgttgctttgatgattcatgataactcgtcggatcgcacggcctttgtgccggc

SEQ ID NO: 186461 - DNA, 268 bp, Glycine max
cactcttcagttctcgttgttgttcttcgctttcctgaaactagggttttcaatttcgattcattcgttaataattaaagatgtttgggagggcaccgaagaagagcgataatacgaggtactacgaaatcctcggcgtctcgaagaacgcttcgcaggatgatctgaagaaggcttacaagaaagccgccatcaagaatcaccctgacaagggcggtgatcccgagaagtttaaagagctggcacaagcatatgaggttctgagtga

SEQ ID NO: 186462 - DNA, 274 bp, Glycine max
gccatggcggtttctgcaattggttttgaaggtttcgagaagaggctggaaatatcctttttccagccgggactttttgctgaccctgagggaatgggtttaagagctcttgcaaagtcccagttggatgagatacttacaccggctgcttgcaccattgtttcatctcacagaaatgatcatgtcgactcctatgttctgtctgagtccagtctctttgtttatgcctacaagatcatcatcaaaacctgtggtactacaaagctactgcttg

SEQ ID NO: 186463 - DNA, 264 bp, Glycine max
aaatcacttcatcatggcttcctcgtgtgcttcctctgccattgcagctgttgccatctccacaccaagttcccagaagaatggatcactcttgggaagcacaaaagcttcttttcttagtgggaggaaactgaaggtgaacaactttacagcaccagttggagcacgatccagcactacagtttgcgcagttgctgagcctgataggcctctgtggttcccaggcagcacccctcctccatggctagatggcagtttgccagg

SEQ ID NO: 186464 - DNA, 266 bp, Glycine max
gcgattttctcttcaatttccagatcacgaaactaaagaagatggagaaagcgatcagcagacagaagattttgcttcatcatctcaacccttcatcgtctacccacgtcaacgaatcatcctccctctatgcttcagcatgtgtggcgggggacagcgctgcttatcaaaggacatcgacattcagggatgatgttgtgatcgtggctgcttatcggactgctcattgcaaaggtaaacgtggtggtttcaaagatactcttcct

SEQ ID NO: 186465 - DNA, 266 bp, Glycine max
aacattgtagcttttgctgtctggattgcttacaaggaatcaaacttgatcagctcaattctgtggattgttttgattgccttgttagggagtatctttacatctgcctatattgttgtgcaatttctgaagttgtcatctcaagaatcttcacaggatcctatgtattatgttctgttgcggcatccaaacaagaatggcacagcaccacaaagacagcgttcatctgttgtgactctaagaataattttcagcattttgggtgt

SEQ ID NO: 186466 - DNA, 273 bp, Glycine max
atttgtttgtggaaatattggatcacttcttcagcaatgtctgtgagctcgatttggtttttaacttccacaaggtctatcttatacttgatgaattcattctagcgggtgaactgcaagaaacaagcaagaaggctatcattgagagaatgggggaacttgaaaaactagaatgaaaaattacttttcagcagtcatatcaatttggagatttcgatgacttactcatgcccttggcttaattcttgtatttcaattgtgatacagaatttg
